United States Patent Application Publication US 2007/0067865 A1 - sequence listing, part 55

SEQ ID NO: 346745 - DNA, 412 bp, Zea mays
gcgacgggtgggaatgggaaacacgaccccgacaaccaatctgcgtggatccactgccgccggcgttgttcgagccgtccggacggaacgacgacacctaccgagtcgtcaacaccgcttacacgccgggcgtactggtggacgccatcaacgaagcaatgaagcagatgcacctggcgttggttcaggcgagcaacctccggcgatgcgatggtgccggcatcgatgcgatgatgccacgggcagctggcgcattcgcatgatccagacaccagccgacgatccatcagtcattcacctactgctgctgtcctaccgcttatgttctcgatttccttgtttttgtttctaagaaaataaaggagagcatcagtttgcattggcgtaaatttttattttctttaatcagacg

SEQ ID NO: 346746 - DNA, 141 bp, Zea mays
tatatatatcgagagcgcttttttataatttttattgatacaaaaatcacggtgaaatattggaaacattttgggggaaaaaaaaaaaataacgatttttttaaaaacattacaccaatggtgtactttttgaactcatta

SEQ ID NO: 346747 - DNA, 168 bp, Zea mays
aaaaaaaaaaaaaaaaaataaaaaaaaaaaaaattaaaaaaaattaaaaaaaaataaaaaaacgtgaaatttaaaaaaaataaataacaaaaacataaaaaaaatataaatgcatactaattaaaaaaaatttttcttttttctttctactccccccacttttaaatt

SEQ ID NO: 346748 - DNA, 134 bp, Zea mays
gggagatgatcgagagacgtgcccaggagcgggtggttttcgaacaacaatggcggctgacaatgcagaggctggagcaggagcggttgttgctggaacactcgtggatggaacgggaggagcgaagaaggatg

SEQ ID NO: 346749 - DNA, 402 bp, Zea mays
acccgtcaacctaggtaaataatccaaaggtaaaaataccacaaagcattttctcggacttgttccatgttaacatgaatcctaaaacgcaactttaaactgacaaggttgcatgcatcccaggcatgcaacacgggttggcagcgtgtcacaaatattttacctggcaccaggttcattctacccgttggaattctcatggacggccggacgggggctttttattaaaaaaaggcaaaaacatgcgtagattttaccagttcaaggaattcttggactggttaaacttttcgctatatgcactttccaaattcttcttgcatgcttttaacaatgggtgcaggaaggaaatcctgaaaaaactgatggattttcccaaggaccttctttaccaattatttt

SEQ ID NO: 346750 - DNA, 65 bp, Zea mays
gtcaaacgtaagcgccaaggtcttagacggttatcttgtctcagtccaggatcagggacgcgtgg

SEQ ID NO: 346751 - DNA, 336 bp, Zea mays
ctgtcctttgctcattgttgaggttgaatgttggtgattgtttatgttttttattggtgtggctggtgtatacattgtactgtttggttcagatgagggatcgagggcggcgcatgcggctagctcgtgggcggaacagactggtgagattgaggatggatcaggagcttgagccctagaaagctttgcaggcgcatctagttgaagtttctgtagaaagggtgaaggcatctgaaaccatatagtctctataggaaagtagtgactcatgagtagctgaacaagactgatcgtaatatgctggcgaaaaaatgggggtatgaatggagaaagatc

SEQ ID NO: 346752 - DNA, 255 bp, Zea mays
tcccggtcgacccacgcgtacgtgacgctagttttaccttaggattcttgttctttacaagatgaaaaacctactcattgtggactttatccgagtacctacagacagcactcgcaaaaagatcagaattatgtgaaagaaacatgtattcatctattctgtttgccattttttagatcttgtcaaatacacatctttaatctattactatatgtataaattccttaatttcttttttttaaattactaatttaa

SEQ ID NO: 346753 - DNA, 301 bp, Zea mays
  unsure (1)..(301): unsure at all n locations
ataaaaaaaaaaatagaaataaaagcacttgttaattaaaaaatgaaaaaaaaaacacattggggacattaaaaaagaaacaaacagacagaactaaaaaaaaagggcggtatttttagaaggggcgatgtntcctactcttctaagtgccatttgctggtcttttgtcgggtgaccattattaatttagtcctctatggttaataaacgtgctgtctgtgaaaaccatgacgatttttaatttttttgtatttcaataattatttattttgagaaaaacctttattatgaaaagtggata

SEQ ID NO: 346754 - DNA, 243 bp, Zea mays
aattaacggatcgacccacgcgatactcataaaccatctcaagtttcctgtttataccaccaaggaccatctaaccaaaagagcgtcatggaccctttataatgagggggtcaccatcataattgaagtacaccttcaacatatcaaccgtctcatcattgataccctgaagtagattatgatctacaatatcatacgtcacaagcttttactcctaattcatgtcagagcacaaaaaacaac

SEQ ID NO: 346755 - DNA, 213 bp, Zea mays
gacattcacgacaaaaaaaaaaaataaaactttaaaaaaaaaaaaaaacaaaaaatcacatgagacaaaataaaaaaaaaagttgaccacaaaaaaacacaaaacaacaacacaatctaacaaaaaaacgggccggccgttttaaaagatccaagcttacctccccgtccatgcaacgcaatagcttttttttagggtcaccaaattcaattc

SEQ ID NO: 346756 - DNA, 215 bp, Zea mays
gttaaacataatttgccatcacgtaggagtttcagattatcatgcaccgaaatataagcacggacaggtcaaaaacataagacgagggcagtatatacactacggaggagacataataccagctaccacctctaactgtggctgccctgtttaagattcccaattcctcagtccctacattgcaagttttttatctttttctggggtcggaaaat

SEQ ID NO: 346757 - DNA, 213 bp, Zea mays
cgccaacatatggtttcacctttaagtgtgatgagagatctgaaaaacgactagagaactgggccaagcttaaagagaagatgcatcgcaacacagatagaaataagctatttgcaagccaagtcaaaggaaactgaagaagcaaaactcagaatgctagttaaagagattgacttccatggcaacatcaatgccgagcttatataagaacca

SEQ ID NO: 346758 - DNA, 261 bp, Zea mays
cgcgtgcgcaacggtactggcctcgttctggttgaattttgccaggggcacaacccacactggaagggtgtgccatggggaacagggagccgtgtgaccagtgccccaccaaagacgagctcctgccgtaataggggggtgagtggtactgaagcttctggaaataacaaggtctgatgagaggcctgcctgcgtgagtattgctgcttgcattcctgattacatgataataaaacgcatcgattagtaatatatgtcatg

SEQ ID NO: 346759 - DNA, 222 bp, Zea mays
aatgctcttgggttacgaccgcttcaaactgtattctaaattattacctctgtttacgaatgtttggcgccggcttgttctctgagaacgaaaaatacaccgcgagcaggaacaatgccggggacaacgactaccaaggcggccgagacgaccgagaagactccctcagtatctacacaggggggggcggactcgaggacccaacttgcttaccggatcatg

SEQ ID NO: 346760 - DNA, 58 bp, Zea mays
cattcacttacactaacaacctaacacattttttctattttaatcacctcatatcaac

SEQ ID NO: 346761 - DNA, 65 bp, Zea mays
tgcaggtaccgtccgaatcccggtcgccacgcgtccgctaaacgtgagcgactgattgccatgcc

SEQ ID NO: 346762 - DNA, 97 bp, Zea mays
gttaaacgtgagtaaaaagtattttgatggtaatgtatagtaagatgatgttgaggatagtttcgaagttaaaaatggcgttgattactttatatat

SEQ ID NO: 346763 - DNA, 236 bp, Zea mays
gcgccgcgctcaccgacgaggacacctgccttgacggcctctcgtcccgcgccgtcgacgccgggacgcgcgccggcattcggggcaaggtcgtcgaggtcgcgcaagtcaccaagaacgcgcttgcgcttgtaataagtcggcctggtactaacacggagggaccaagatcagccagccagcagcaaaccaccgtttaagctaggctactagggggttgcgaagtgtgtgtgggg

SEQ ID NO: 346764 - DNA, 133 bp, Zea mays
ctcgaccgtgagcaaccactacatcgccgcctatgtctagtatgccgcgtttaataacgatgtccaggtgaatagacggaacgagcacgggatatacactccgggcaggtataatgcctggtacaacgtctga

SEQ ID NO: 346765 - DNA, 299 bp, Zea mays
  unsure (1)..(299): unsure at all n locations
accggtccggaatcgaccgacgcacccacgcgtccgaacacagtcacgtaaaaggatgttttatgcttatctcatagcgctaanggggagggatggacgcttttgctggtggggcgcatcaatatcctcgtctgcaggggttgacggaggcgtttcctcagatccctctgccttgcttggcttgatcttaagagatatcaaattaaaatatatgtgatgtgcttcggtgttgggggaaacatgttgcccaaccgtgcctgggaataggcaaacaggatggatccttctttgnncnnatg

SEQ ID NO: 346766 - DNA, 58 bp, Zea mays
cggacacgtgggtcactagtacttcaccgccactgtacagtacgcttcgctttataac

SEQ ID NO: 346767 - DNA, 155 bp, Zea mays
gctgaacgttgtcgggctcgccaacgacttttgtgtgtacgccgtcgtgtgcgtcctagcgctcgcgttcaagaacgacaaggtgcccgatactaatggcatgcctctagaggtcatcaccgatttcttcttcgttggggcaaagcaagccaacg

SEQ ID NO: 346768 - DNA, 147 bp, Zea mays
tcgcctgcaggtaccgtccgaattcccggtcacccacgcgtcgaagccgtcatgggactactttcccgacgatgtataccaagggatgattgaccacagcgtcgctggagacagcagacgtcatgaaggcgctatacaatgaggaca

SEQ ID NO: 346769 - DNA, 338 bp, Zea mays
  unsure (1)..(338): unsure at all n locations
ctgtcctttgctcattggtgaggttgaatggtggcgattgtttatgttttttattggtgtggctggagtgtacattgaactgggtggctcagatgacggatcgagggcggcgcacaccgagagctcgtgggcggaacagactgctgagattgaggatggatcaggagcttgatctccacaaagctttgcgggggcattgagtagtagagttgtgnagaaagggtggaggcatctggaaccatatagtctctatcggaaagtcgtgacctatgagttggtgaacaagactgacctgaatatgctcgcgaatatatggcggcatgaacggagaaagatca

SEQ ID NO: 346770 - DNA, 156 bp, Zea mays
ccgtccggattcccggtcgaccacgcgtccgtaacacgtgagctacaagtacttccccgtctatgtctaggactctcatgtttatcacagtgttgaagataacagcgacgtcgaggacgcgctatatcatgcgggtattgatatgatgtggatgct

SEQ ID NO: 346771 - DNA, 184 bp, Zea mays
cgcacacgtgacctccaccttatgactgtctcttccttgtacattgtctacgcgctcaagcgggagaggagcacaatgtacgggtgcaggggctacaccacactctcttctgatgatgaattacatgctgacgatggcggtcgtgtcgtgttcttggactattgtggtctgtgatgcctttatc

SEQ ID NO: 346772 - DNA, 314 bp, Zea mays
acgcgtccgatcagaagtcacaacatcaaattggatataattgaagagaattcacacaaaatcaggggggtgaacatattcagaggggggcattatatcctgaattgattggtggtcttagtacagaacctgatgttatacgacatacgtgatgagtggccaacatttgtcacgaaagtgagccaatggacggtgttatttaagtccaagtgttcttgtttaaacatgtggcaattttttttggattacattccatccaaacacctttgtacaatcctcgtatgtaaaatttttcatcgggttttgtattttta

SEQ ID NO: 346773 - DNA, 169 bp, Zea mays
aaaagttttgctcgtcgctgcaaacaaagacagggttattacagatatgtggctctggtctttgcacaaaacatagtgcacacactacctgccaactcaccattaaactaccatcaatccgggctcttcctatcctgagcaaacagaccagctcagttccgcttcaaac

SEQ ID NO: 346774 - DNA, 467 bp, Zea mays
ccggtcttgaattccccggtccgcccaacgccttccgtaaaaaaaaataaaatataaaataaaaatttaaaaaaaaaaaaaaaaaaaaaataaaatgggctatttttaaaaaaaaatacgatatataataatattttttggggccccctattttaatatcccaactctttcttccccgggctccctctttataactttctctattttttcccctattttcaattctttgccctttttttaatacccccataattgaaaaacctttgctgttcccaaactaattctctttgcaaaaatactccctttccccattttaattttacctcaaaaaaccccccctctttccccttttcaaaaattttccaaactccatattcttaatttctccctccccccttttcccgcccctttattatctctccaatttgtttgtttcttttctccctagttttaatctttcccacttt

SEQ ID NO: 346775 - DNA, 292 bp, Zea mays
  unsure (1)..(292): unsure at all n locations
ccggttcggaaaaaccgggcggacgcacgcgaccgangacccnacacacgcagacgcagactgcgccgagaaccggggatcgacagagaagggggggagctacgagagcgcgggggaaagaccgactcaagatgaagctgagaaggccacgccacaaggacaagacgcccaagaaggcaggaggacagcagcccgatggggtcgatcagcacaccgaacgagcacggggccgagacccccgccaccgagaagcaaaaggcaccaaggacgacagggcgtaaagacaagcgga

SEQ ID NO: 346776 - DNA, 320 bp, Zea mays
cttccgaaaaaaacaaaaaatcattaaaaaaaaatttttttaaaaaaaaaaaaaaatttttaagccgaggtttatataaaaaaaaagggaacctcaatataatataaaaacaatttaaaaagtttatgggccccccctttttaaaggtatcaggttttaatatccttcattccaactttttactttttttatagggccaccaaaatcaatattattcccccatttttaaaaacatgtaacctgaaaaaaccttgcattacccaatttaaatcttcttacataaattttcttttttccctctttctttaattccaaaaagc

SEQ ID NO: 346777 - DNA, 51 bp, Zea mays
attccccccgcgacccacgcttccgctacacatcttcctttacaacatttt

SEQ ID NO: 346778 - DNA, 332 bp, Zea mays
ggaaaatgaaccagggttattgaggcaaagacaacccaaagaacaatcgcacacgacggtgatgaacacacaacgacagaggcatcagaaaaagcattcgccaccgcagagtagcatacacacatacatacgtacatgaactgcgcggcgaacaatcgccagcgggaaactatcaaccgccaagaacgtagtctgcatgcactgtctctcccctgagacgacccggccgtgctccgtcagaagggaccagtaaacaagagtcctgcaagcgggggcagaacttccacagttccaaatcacttcctgtttaatcgagttgttgtacgagaaat

SEQ ID NO: 346779 - DNA, 202 bp, Zea mays
cattgtgcaccttggcaacattcccaataacgggacccgcattaagcggggcatgaaccctgggagccgcggtcatttacaacaaggccaaggcctgggacgaccaagggatctttctgggtgggtccactgaattggcgcccgccatcgcccgccgtctactcaccaagtaccgtgcctgaagggccagccgcccacccaa

SEQ ID NO: 346780 - DNA, 296 bp, Zea mays
cccccggcgacccacacaacactcttcatcaatccatattcctacattttctctcccataaatgctcatattatctccccgcggtttttaaaaaatggtcacgctttaactaccattttcaaattgtaaatctctacctttaccacttattactcatttctttcattgcgtctcaataactttatatacataatcataattttcctaccttattacttctctcttcattttattttacaccttaattcctttatatccttatcctcaattctttactcaatttaattattccttta

SEQ ID NO: 346781 - DNA, 54 bp, Zea mays
aatgcctggggtggaaccggaaagttttggttcgggaataatcagggggtgcac

SEQ ID NO: 346782 - DNA, 398 bp, Zea mays
  unsure (1)..(398): unsure at all n locations
caaaaaaaaaatctgcggtcccggtttcaaggtggtggaaggctctactgtcctgacggccctgcactgatcgatcatcagctgctggcggaggcgatgcgatgatgatgcaaaactttgtacatgcgttggtggatgatggtgtagagtggctttgtataaaggtgctatangttgngtggccacaacccttttggatatcacacatgacangatatttacctttacattntgtatgcatctgatatggttttgatatttatgccagagatgatttacgtgatggtaaaattagttagtgacgactggaaatttgggagtgttctgtgaaagtaaatttgaccctgaatcctgcgaggaatggctgatcatgaagtttattgtataatttggatagt

SEQ ID NO: 346783 - DNA, 247 bp, Zea mays
  unsure (1)..(247): unsure at all n locations
ccggnctcgaattcccggggcgacccacgcatccgcggacgcttgggttttttttgagcgcttttctactctctcctctcttttttcctnttagcccgcgtttttttaatttggggggtctcttattttattacatttttttctatctcatctcctatctcacttattttctttctcttaacttctttctatttttttcttttttttttttttttttttttctttttttttttttccttttttttta

SEQ ID NO: 346784 - DNA, 227 bp, Zea mays
  unsure (1)..(227): unsure at all n locations
ccggnccggaattcccgggtcgacccacgccttccgaaaaaaaaaaaaaaaaaaaaaaaaagggtctcccataataaaaaaaaaaaaaataactggcgcgtctttctaaaaaaataaactcttctatactctcacctacattctattccctgtctcacgttttacaacatcttcactgccaaaaccctgtcgtaacccatcttaatcgcctaaaccacatcctcctt

SEQ ID NO: 346785 - DNA, 228 bp, Zea mays
tacacataattattccattttctaaaaacaaggctaaaatcttcccacggccggaatataaaacgggccccacccctttatcacctaaataaccattcaactcacaagtattaatggacttttcaagaccattgtgccctgttgaactcatgtattaccttgttaagtcccttgtgtccttttttctacctgaccctttcaatatctgattgctcgtttctttaatta

SEQ ID NO: 346786 - DNA, 428 bp, Zea mays
ccggttcggaatacccgggtggacgccacgcatccggggaggatgctccgggagcgcactctggctgccatgcggcaggcctaggacgcgctgggcgaggtttgtaaatcggaggccacactgtccgtgctggtggacaactggaaacgtacttgacttggttgctgtggattatgttggaagggggtgggggttactctacactattcgccatttgtggactttacatcgaaactagactttctatattatcaattttttttcttattaaatattatatattattttttttctttttttttttttaataattcttttttttaattttttttattatttattttattctttttttttacattatacactttattaattatattctttttatatctttatattaatttttttttatttttattttattt

SEQ ID NO: 346787 - DNA, 274 bp, Zea mays
  unsure (1)..(274): unsure at all n locations
gaaaacccggggggaccgacgcgtccgcactaacnaacgaactcttgctccgatttctagctanctgacgtcnactattgcgccgccgctntataacacgagggcgccgcatgtagtggccgtgctggtggtggtggcgctgctggcttcgtccgcgtcggcggcgatcacctgcgggcaggtggggtcgttgctggcgccttgcattccgtacgcgacggggagggccagcgcgctccccgcgtcgtgctgcagcggcgtcaagagcctcaac

SEQ ID NO: 346788 - DNA, 170 bp, Zea mays
cggaattcccgggtcgacccacgcgtgcgtctgttctacaaggttggggtaacctggcttgcatgtcctgctttaatagcattagttgaggggatctttctgcagcatcagctcgtctgcttctatggctactgactcactctatggacagaaagcattgtctatggcca

SEQ ID NO: 346789 - DNA, 275 bp, Zea mays
ccgggccgacccacacgtacgattttctttgaaaacattttctctcttacttattgcaactgccttgctttcctagtggcggtcattctaaactccactgcaagtctcctctatctatcaacaattttattatttttacctactaattaacccgaacatcaacccaccaccttttatgcattcctatataaaataattcgactacatcccattctctcaccatctactacacttccaaaccaccatagctaagattgtcactgtcacctcactcc

SEQ ID NO: 346790 - DNA, 359 bp, Zea mays
cccacgcattcgtaatgtttttaacgttagtaaaccctctcctccttatgctgaataggcaaagaaagggggggaggtacaaaaacagtctttgattgtcctcctttcaaggcttgctgaggcatcagatggtgaaagtgactggcacatatcctggtctaatgaactttgatgctattaatcatcttttagctaacctattatggagccatgccccttggtgacagaactgtttccattatatatacttcattaacgcatgcacaacatataataactgtctgttttacaatttatcgctaatatttattctggatttaagtctctaggctcttttgctttgggatgcttttttttta

SEQ ID NO: 346791 - DNA, 366 bp, Zea mays
gaaaaaccgtcccgaccgacgcgtccgggcaaagcttcgctagaggccatcatcacgccataatatgccagagagcatactatgcaggtggacttccgtggcctgcgccttcttctttttctacgcggcggatcctctttgctagggcgggcggcggctgcagctgtaagctctggacgcctgcgcgctctgcttcaagccgttggcccgcaacagctacatcttcatgtacaggggcgacaccccgttctgcagcgaggactgccgcttctagcagatgcaccacgacgctgcggtcacagcctacgctcggcatcaggccatcagtcggcggaggcaacatctgagcatgggctgttttgtgtc

SEQ ID NO: 346792 - DNA, 271 bp, Zea mays
cccactcgtacggcgcttcatcctctcgctccatccgcttcacagcgcctacactctcctttccaagtgcggcgtgatttcctagcaagaaggttttttatatcgtacgcgtgttccttatgaactactgctaacactacttccttctcgttgttattgtcgataaggacgacctattcatctacttgtggacaccccccatttgtttatgtgccatataactcaaaactgcttttttttacccacattaatattcgaatttaacctctcc

SEQ ID NO: 346793 - DNA, 347 bp, Zea mays
  unsure (1)..(347): unsure at all n locations
cggnctggaattcccgggccgaccgcacgcgtccgctgaatctgtattagtgcttgtgttggacctgtaagtttttgttcgtgaataatcagggggtgcacagactattaaaagcgtagtttctgctctaccaagtggactatgtttgcttgaacgatatgtactgtacgcaccagaactgaatgagagtgtacggtgttagcaaaaaaaaaaaaataaaaaaataataaattaaaaaattaaatttaaaaaaaaaaaaaaaaaaaaaaagattaaaattataaatatataaatttatgaaaaaaaattattataatagaggggcggcctttttaaaggatctaatt

SEQ ID NO: 346794 - DNA, 202 bp, Zea mays
caatctaatctaatcctttttctctccaccccttccctctcatattaccctttcttctaaattgtattttaaaagataacacagtactattattcattccaacatcaactttatatcactattttacatcaccttcctatcccctaattttatccttataatcctatctcctattttacatatattcacatactattactta

SEQ ID NO: 346795 - DNA, 398 bp, Zea mays
tgacgatgaaagtggtagcatacttttgttgctttcctggtgcctaactatcttttaaagtttcatttagatccaaaaaaaaaaaaaaaaaaaaaaaaaaaaaaaaaaaaaaaaaaaaaaaaaaaaaaaaaaaaaaaaaaaaaaaaaaaaaaaaaaaaaaaaaaaaaaaaaaaaaaaaaaaaaaaaaaaaaaaaaaaaaaaaaaaaaaagggggggccgtttaaaagaaaaaaattttattacccggtgtttgcaaggaaaaatttttttaatggggccacaaaaataaaataaatgggccgggttttaaaaacgtggaaatgggaaaaaccttgggtttaccaaattaaatcccttggaaaaaaatccccttttcccaagtgggttaaaaacaaaaa

SEQ ID NO: 346796 - DNA, 64 bp, Zea mays
aaaaaaaaaaaaaaaaaaaaaaaaaaaaaaaaaaaaaaaaaaaaaaaaaaaaaaaaaaaaggag

SEQ ID NO: 346797 - DNA, 409 bp, Zea mays
  unsure (1)..(409): unsure at all n locations
gaaaanccgggcggacccacgcgtccgcaaagcgtaagaaggggcacgcttacaaatagaacatcgatggaaacccaaacagtatgatggcaaatgaagctgcccatactactgccaatcaaagtggcgatcctcataaaggaagttagaaggggcaacccatgttgtcagaggacgctaccaccactgtttccccaagcaagagtaagaagcacgaaactcgtaatgatgaattggacaaagatagttgtaatttgtccaatggaaagaatgggaaaacagacaaacggaatatcgacagatacacatattatcttacaccaaacgaaaccataaattataatcataatggtgacattcttctcaagatttaagtatgagaaattcattattatgaaacatcaaattc

SEQ ID NO: 346798 - DNA, 88 bp, Zea mays
gttttatttggttattttaaatacatcacttttattattaactatatgtatcccgatatatatatatctacctcattgcaattttgcc

SEQ ID NO: 346799 - DNA, 390 bp, Zea mays
atgactgcagaggattgtgatatagagtaaagaattttgctgacaaggacagaatattggttgtagagtagaaatttagagttatatgagtgcggacagcctcaaaacggaactgctactgccagggcagtgagctgtttcggtccgttccctctgctcgggtgctggctctgcaactgttcgtcgccaaggatgggcctgtggccaaccgtggatggagtggaccgtcctctcctgtctatccatctggaacggaactctggactctgacccttgttgggtatctggagcagcagattcggcggttccctgttcggtctccagccggcggatgtggatccattcattacggtaaaagctgcttcagtcccttgccgccggtctggtggc

SEQ ID NO: 346800 - DNA, 268 bp, Zea mays
  unsure (1)..(268): unsure at all n locations
cacgaattactttgacagttagcttgtcaagatgtcaattttaaactggcttattgtgatattttgtccaaaatgctnaaaaaaaaaaaaaaaaaaaaaaaaaaaaaaaaaaaaaaaaaaaaaaaaaaaaaaaaaaaaaaaaaaaaaaaaaaaaaaaaaaaaaaaaaaaaaaaaaaaaaaaagggggcggccgttttaaaggatcaaagtttacttacgcgtgcttgcaacgtaatagcttttttatagtgccaccaaaattaaatta

SEQ ID NO: 346801 - DNA, 367 bp, Zea mays
cacaaatcaactttactgctacctctgctagatgtcatacttccactaccttaacgagggctatctactccttcgccccttaaattacaacatcctgtttaaattaagacatgtaaaggtctcataaataatgcttacacctgcaattcttcattttcaaaggattttaaacacttctatattatctgaagtgcaaaaacatcaatcctttatttttttctcaaccactttatattacttttttttagggaaaaaaaccaaacagttattttatgtattaactctattaaatttttttacgcttggcctattataaatctttttacattttcattattcttttctttttaaaataaatcgtctttat

SEQ ID NO: 346802 - DNA, 433 bp, Zea mays
ggctggccgtcgctggctcgctgctacttcggccccttcgccagcgacgataacccacgctggtatccgagggaaaattttctatgtgctggttggaatggcgagtacagcatgctttgtaattgtcagtaagaatgatatcccaatctacgaggcagaagttggatctgcacccaaaaggatttgtcttatcaccatcagtttatcctgcatgctgcgttagatgttgttcaggacgtagcatggaccacaaatgcaatgtccctgaagtcagttgatagattcaatgaccttgtggtgtctgattatgtaactgctggtcatatcctttttaaaaagcgaagattgtctgactgttgttttaaaccacatttgcctatgtctcattatgtttggttttcaaagtttaatcataggatttactatacttttc

SEQ ID NO: 346803 - DNA, 208 bp, Zea mays
  unsure (1)..(208): unsure at all n locations
gaanagggggccgcacccacgcgtacaattaattttttacttcatcacactctctatatatatactgatattaaaatttatacagaagaccttatattttatatatcaccttcttcatattcttttatttttattccatttcttctgaaaatatttctttctttttaataatcgacttcctatttattaccttttacttacaaaattt

SEQ ID NO: 346804 - DNA, 317 bp, Zea mays
aattacgggtcgaccgacgcgtccgggcagagaggggccgtgggccccgccagacttaccgtggaggtgggcgacttggtgggtgcagcgatagacacgctggaaatgagttaagacctactcaccgggcatatgagcgacacagcggtacaggccgtggctactggatgaactgtgaacggtgtgcgcgtagaaatcgaggtacctgacctgataaatgccttgcaaataacactgggagagctgttaattctgaggagactactagacgttcggcaagacacaagaaatcctggtgatccactcactctggggca

SEQ ID NO: 346805 - DNA, 435 bp, Zea mays
acggccttcgccggcaaggccgtgaacgtgccgtcgtcgtccgccttcggcgaggcccgcgtgacgatgcgcaagacggcggcgaaggccaagccagcggcggcgtccgggagcccgtggtacggccccgaccgcgtgctgtacctgggcccactgtccggcgagccaccgagctacctgacgggcgagttcccgggcgactacggctgggacaccgcggggctgtcggcggacccggagacgttcgccaagaaccgggagctggaggtgatccactcccgctgggccatgctgggcgcgctcggctgcgtcttccccgagctgctcgcccgcaacggcgtcaagttcggcgaggccgtgtggttcaaggccggctcccagatcttcagcgagggcgggctggactacctcgggaacccgagcctcatccacgcg

SEQ ID NO: 346806 - DNA, 122 bp, Zea mays
tataaacaatgaggttatacttttggtggcgccatccggtctgattgcgtactagtgtggggcgtatttaaaaaaaagaagaaaaaaaaaataaaataaaaaaaaaatattaaaaataaaaa

SEQ ID NO: 346807 - DNA, 225 bp, Zea mays
ggcgccgtgacaccgtgagttcaagcatggttcgttgctgtcagcgcttggaaagtggagttactgagttgttgggttctgcttaaaaaaaaaaaaaaaaaaaaaaaaaaaaaaaaaaaaaaaaaaaaaaaaaaaaaaaaaaaaaaaaaaaaaaaaaaaaaaaaaaaaaaaaaaaaaaaaaaaaaaaaaaaaaaaaaaaaaaaaaggggggggccgttttaaaaa

SEQ ID NO: 346808 - DNA, 338 bp, Zea mays
gtttaaaaagcttgtatctaccttatttccgttggctctcgcggtacagataggagggcgaggtccaagcatctcgccccaacaagccaatgcaggcatgatacgaaggctgtaccacagctcccacttttgccacatgttacgccactttgcgtgactaaacatgcaaaaaagccactaggatggcactggctttaccactctaccgtaacttggatctgcaagcaagaactacgacaacataggtgccggagctgtcttttcagtacactcactcagtgcataggtccatactaacgccctccttgtactatgataaacacaaggtgaccattgta

SEQ ID NO: 346809 - DNA, 375 bp, Zea mays
aaaaaaaaaaaaaaaaaaaaaaaaaaaaaataaaaaaaaaaaacaaaaaataaaaaaaaaggaaaaattaaaaaaacatacatacaaacatatttcgatttttattaaataatctaaacccaattaaaaattaatataaatttacaacattccctaatttaaaaaaccaaaaaatttaccatattaaaacaaaattaataaaaaattccttttgcgcccttttttaggattcccatttattccccccccttttctccttttccttttttttttttgtctcaccttaaattttatctctccctgctttttccccatccttttctttgaaaatctcttttccccccaatttaactttttttcttgccatttcccttt

SEQ ID NO: 346810 - DNA, 159 bp, Zea mays
aagcaatcaccctagcaaagcagcgcggagcgacgatccatcggtatttcatattagacgtacggttctccatcatctgatgcgacacgcagtgcattggctacagtactgatcacgacagagcacagcactccggcctgccatatgctgcaggatctt

SEQ ID NO: 346811 - DNA, 306 bp, Zea mays
cggacgcgtgggtcttaggctgtaagtgtcatttcaaatatagatttcagactcatacaaatcggacgagcattgaataagaaaagaataattttatatttgcatccacagtagacagtacttgattgccatttgactgatatttatgttgaccttgaaagaactgagcataggagaagaaagtttcacaccctcagatgtcgagagagcactgtggagctcggcaattgcgtccaagtcaccaccaagcggtaacccaaagagggaatcaaagatgcatggcaagaggaaaagatgatttacacc

SEQ ID NO: 346812 - DNA, 170 bp, Zea mays
ttcccgggtcgacccacgcgtacgcagactcatgtgtcctaagctgcaactgtcattttaaatattaatttcacactcatacaaatcgggcgagcattgaataaaaaaagaataattttatatttgcctccacagcacacaatacttgattgccatttgactgatattta

SEQ ID NO: 346813 - DNA, 81 bp, Zea mays
  unsure (1)..(81): unsure at all n locations
gcggaaggagtcggagggaaccgaaaactcagggtctcgaatttcctaagagcggangcgatggcttggaaaggaagaaaa

SEQ ID NO: 346814 - DNA, 347 bp, Zea mays
atcgtcttaaatagtttaatgcgccgggcctagttctacatctataactccctccgtggaggtacggcaagcaagtctagttcgctctgcgctcacaatatctgctcaactgcatgtacaagcagtgggaagatcgacggtagccccaacatgaatcggaccgtactcagggacatcatccaatgtgatcacgaggccgcagatccagtggctacactaggacagggcgggtaggtcgattactcaccgctcatgcacgattatagtcgcactaaactcgagatcttacaagtgaaccgtattcaccactcggtcttatattctcatgaaacacatctagaaatcga

SEQ ID NO: 346815 - DNA, 294 bp, Zea mays
gaaaaaggataggcaaggaccaacgagcgagtgttacttatatgacgaatatggacgcgcacctggcgcattgaatccatcttattgaacgcttgcacctgctctatcttttgattctcaatgacaccctcatattgaccgaacacgatcttcttttctaccttgatgcgttagtcttccgatgcacgaaagaggacaaccaacacgtggctaactgacatgaggtcgatatgatcagtaactatgctgttgatcaatactgtaactaacagggccacgatcactatatcgttc

SEQ ID NO: 346816 - DNA, 325 bp, Zea mays
cagaaacaagccaatagcccaataggcaatagctagaggtctcttcgttgcgctgctagtacacataaaagcaagagcgagagcgagagagagagagaagaagaagaagatgaggccggggagagatggtggaggtgtttcggcgaagctaacgggcggcgcaggcggggccccgccgagcctatggaagacgccgaccccatacgtcttcctaggcctggccttcatgatgtgcgtcatcgggacggctctgctcgtgctcatctgcacgcgcaagaaggcgtcgtcctcgcggcggcgggatgatggggcggccgacgagagg

SEQ ID NO: 346817 - DNA, 374 bp, Zea mays
cagaaacaagccaacagcccaataggcaatagctagaggtctgttcgatgcgctgctggtgcagataaaagcccgagcgagagcgagagagagagagaagatcaagaagatgatgccggggagagatggtggaggtgcttatgcgaagctaactggctgcgcatgcggagccccgccagagcctatggaagacgctcgccccatatcgtttttctaggcctggactctatgacgtgcgtcatccagacagctctggttgtgctcatctgcacgcgcgagatggcgtgatccttgtggcggtgggacgatggcgcgggctacgagagggcagatctcgcgccgctggactgtcatcccaaggtagctatatggat

SEQ ID NO: 346818 - DNA, 400 bp, Zea mays
gaacgatacgacgttcaccgtgatctggatggcatgctgtcgagggaagctggtagcattcttctactcttcagagtcacagcaatggtgtgcactttcaccgcctgaacactatgctttgagcaccagaagagtcatgggcgttcgactaggacagcgcaaccatgctcatgggtgcttctactggatgttagccctcacacataggtggcttgtgttggacacacacaaaatggactttctccatcgtggacatctcacctatcctgacaggccgtgcgatgatgttcagtaatcagattaccactctggagtcaagcaatggctggactaccatcgtggtctctgatgttttccgtcagatagaagatgcattctgtatttttatgcattcttgaat

SEQ ID NO: 346819 - DNA, 214 bp, Zea mays
ggcagatgtggtttgggatgcagtggtaaaatgaatcagttccccagcttcatgaataactatgctgttagtgtctgaggtttacattgtgtcagtttggtcacttttggtgtgatgagttttagtagcggtgtggccggtggatatgcagtgaaattgtatcgcttgaacagtgataagatacctctatggaagggtgaaaacccacaaatgc

SEQ ID NO: 346820 - DNA, 101 bp, Zea mays
ggtaattgatagccaccagcttgtatgcaagcttgccataaattggaagaaagggaaacaagggccatcacaacaatcttgaccttgcaaccaacaacaac

SEQ ID NO: 346821 - DNA, 232 bp, Zea mays
agaaagcaagccaatagctagaggttccttcgctgtgctgctagtgctagacgacgacatatagaagaaatatatatagagaaagagagaaaagatgaggccggagagagttggatcaggtggtgtttgggtgaagctcatgggcggcgccggcgggcccccgccgagcccatggaggacgccgacaccctacattttcctggcgctcttcttcatgatgggcgtcgtcgcg

SEQ ID NO: 346822 - DNA, 227 bp, Zea mays
accaatggcagccaaaatatttggcctccttatgctccttggtctttctgcaatgctgttacggcaaccattttcccgcattgctaacaagctcctatagcttccctttttcccccgtacctttaaccagcggggtcttcggtttgggaaaacccaattcttcaaccctttaggatccaacaggcaatcgcaggtgggctttttacctttataacccttgttcctcc

SEQ ID NO: 346823 - DNA, 187 bp, Zea mays
gtcagctccgcgaggtgctcaaagtctgcgcgggcacgcagagcgacaaccttcttcagggcaagggctacggtgccgtgccgagtgtgccggcccttccgcttgtgccttgtggttggggggttaaacgggattgtaaactggaaccaacctgccaaccaaccaaaggcaaaaactgcccccccgg

SEQ ID NO: 346824 - DNA, 207 bp, Zea mays
ggcttggtgttttccaggtaagggcagagtttctctccgccgatggcaaagtgatctcaacttcaagtcaaccatgcatgctcaagttcaaaagcgtacacatgcacttcatcgagacttttctgcagagcgtctctcttctgtccggctactcatcggaatctcaagttattaaactggaagatgaagggtatcaaccaaaggtct

SEQ ID NO: 346825 - DNA, 267 bp, Zea mays
ctaggaggagggaagaaagaatggctcaagcgtcgagctctttctctattgttctgttggtcctcgcactagtacttgtggttgaggtttctgctggaaccgcaaatggagagctttacagacctgctggtgcagaatgctctgtccccatagaacaatgtccaaagaaatgtgactaccggtgctctgctacatcgtaacaagaagccatgccttttcttctgcaactactgcttgaacaagtgcttgtgcgtccccttcggcaca

SEQ ID NO: 346826 - DNA, 150 bp, Zea mays
caactagcaacatagaaagcacaatagtgtaccaacaatggcagctaaaatattttgcctccttatgctccttggtctttctgcaagtgctgctacggcgaccattttcccacaatgctcacaagctcctatagcttcccttatttcccc

SEQ ID NO: 346827 - DNA, 382 bp, Zea mays
  unsure (1)..(382): unsure at all n locations
caactagcaacatagaaagcacaatagtgtaccaacaatggcagctaaaatattttgcctccttatgctccttggtctttctgcaagtgctgctacggcgaccattttcccacaatgctcacaagctcctatagcttcccttcttcccccgtacctctcaccaacggtgtcttcggtatgtgaaaacccaattcttcaaccctacaggatccaacaggcaatcgcagctggcatcttacctttatcaccctttgtcctncaacaatcatcagccctaatacagcaagtacctttggtgcatttattggcacaaaacatcanggcacaacaactacaacaactngtgctagncaaccttgctgcctactctcagcaacagcag

SEQ ID NO: 346828 - DNA, 95 bp, Zea mays
cacggctctgccgcattggcgcgcgccggcggccggcactcgccgtcctgacgcgagaaagaagatgctctagaagttgggggcctggctaggga

SEQ ID NO: 346829 - DNA, 54 bp, Zea mays
  unsure (1)..(54): unsure at all n locations
atagtgccacctaaattcaatttcactcggccggnctctaaacaacgcctaaat

SEQ ID NO: 346830 - DNA, 67 bp, Zea mays
gagcctgccgttctaaaaggatctcaggctaaagtacgcgtgcatgcaagcgggttaacttttctat

SEQ ID NO: 346831 - DNA, 82 bp, Zea mays
gcgaaggagaaagcagaccaacctagccacccagggagaaagaggccaaaagggaggggagagtggtcccatggcttccatt

SEQ ID NO: 346832 - DNA, 53 bp, Zea mays
cggacctttcaaagcctacctttcgtcccttccgcccgggccgggttggcggc

SEQ ID NO: 346833 - DNA, 282 bp, Zea mays
ggcgggggcgctgctgctgcggctccacaaggggaggtacctcccaggcccctacctctggtgggtgccgaacgctgtcttaaccgacgccgtcaagaccgccggcctgtggctccggcatgaccaccatcccgtatccaaatggctgtcatgcaatgatttaaagaagcttgccttgtttgggtgtcctaatattgagcgagtaacggttgttgcgtcaaaaagattaagagccttattcaacatgcatgaaagaactatatgcggatcctgtaaactgag

SEQ ID NO: 346834 - DNA, 102 bp, Zea mays
gccacgttgtatacgcggatcacggatcaccgtgctgctcgcccgctcattgcttgccttcagtctgcagagaacgcgatttggtctggtgttcgggaccca

SEQ ID NO: 346835 - DNA, 109 bp, Zea mays
tgggtatacgagagccgacgatcgcctccacgtgccacgatgaagggaccctgacgcatagccgggttgtcccagacgtatgagcacgcgtctgtttctcttcctgcgt

SEQ ID NO: 346836 - DNA, 91 bp, Zea mays
cggaattcccgggtcgaccctcgcggacgcaagcatacgttcgcgtgcctgcaacgtgataactattctatagtgcaacctaaaggcaatt

SEQ ID NO: 346837 - DNA, 104 bp, Zea mays
gccgcatccacaacctgcctctctcgtcccctggcggcgtccgcggcaggatggcggtatctacagcgaggacggtgaaggatgtcaacccgcacgagttcgtc

SEQ ID NO: 346838 - DNA, 162 bp, Zea mays
gctggcttctcctccccctcttaccaagtcctcttcgggttagggttacttagggttttgtggaggggcgatcgcggcaggtgatgtggagtaccgttgcttcctcggcgggcttgcctgggccaccagcaacgagtcggtggagaatgccttctgcttcta

SEQ ID NO: 346839 - DNA, 265 bp, Zea mays
cgatctcgtttcaaatccatccatcctcgtttcctccgtcccgcagcatctcaaccccatggccaagatcaagatcgggatcaatgggttcggcaggatcggaaggctggtggccagggtggccctgcagagtgacgatgtcgagctcgtcgccgtgaacgaccccttcatcagcaccgactacatgacctacatgttcaaagtccgacactgtgcacggacagtggaagcaccatgaagtcaaggtgaaggactccaaaaccct

SEQ ID NO: 346840 - DNA, 358 bp, Zea mays
ctctcgcgcacccgccgccgatagctatatgtgttgcacacccggcgacgctatactctatgggcttgcgcagacagcggagcttctgtcctcgcgcagtcagcagaccctgccttcgcgcgccgtcagcagatacagagacctgcgctgctgaccggaccctgcccctggcgcgctcgtagtagatacctacgccgctgaccgcccgatgacaggcctgcatgatttcatatctagcttgcatcggcatacacaggtgacgctgacaggtgacaagttgccttgttattgatgctgagattgctgccctgtacttacttagtgcacagggaggcaatgggaggagctctgcgacaat

SEQ ID NO: 346841 - DNA, 291 bp, Zea mays
ggagctgcgatgtggatccatattgaccacatacacagcgcacccaatggactaattgttctgtgatcacactgaagatatgctgtaactgtacaaccaataacgcagatcaacgcaaaccataatttacagccacccgttcactctattcctcgggacgtacttgaatcataatctagactatccttcatgaagtgcgcttcccagtttagcaatcatggcatgaccctatgtcttttgccttctggcttggaggagcttctgatcttgtgctgggtgaccataaggctg

SEQ ID NO: 346842 - DNA, 81 bp, Zea mays
tattccgaggaaacttacgtccacgctgctcttctgccgccgccggtaatcaaatgcctatgacttggtccgtgctgttgt

SEQ ID NO: 346843 - DNA, 385 bp, Zea mays
ccggccggaattcccggtcgacccacgcgttcgtataccgaggaaacttacgccctcgctgctctcctgccgacgccagtaatcaactgcctaggacttggtgcgtgctgttgtccatgatattcaacctctacccctaccggtgatcaacgcaacttgtggcacctcatggatcctaggcagtcatcaacatgaggacagaggtcttcgttgcatgctgctataggtgccattggaggagtacgacctgcacttcgacaagaatgtacgagaagcctaatggattttactactgctgcaaccccatcaacgtgcacacaacatgtatgtcaacatgagtcgacagtcggcggtgagaatccctctttgatgtctgattatagag

SEQ ID NO: 346844 - DNA, 319 bp, Zea mays
aaaccaaccaaacctctcttgacaaaaaacaatcatgtacccttctaccgatcctatggagtggaatttcaataagccaccgtgcccgtatgaaaaagaactcctatctactctaattacaatttacttgcgagctgtgatccaattcatgcccgagctatccctcgtacatactgcctttatccttattaagaatgcacctacttgagctgctcaccctgaatgagaaataacccactccgtatctttcatgaccagccactctctccccggatgaacatatatcactttctctgccagtgacaatacaagcttgatt

SEQ ID NO: 346845 - DNA, 367 bp, Zea mays
gcaaaacaagagtagaacagcgtaaacatctggatcctccgaaagctgagacacagctgtttttttcttttcttttcttttcggatagtatgctctctgctgttagttgccccctgttgaatagagaaagaaaaagaggacgccggttcttttctgtatacacgaaaagctgttcaagtatagtggcctgtatgtttttggtcttctggatgattacacattgctttggtcaccatttcatttgatggaaagaaagaaagaaagaaagaaaaaaaaaaaaaaaaaaaaataaaaaaaattataaaaaataaaaaataaaataatttatttatatataatatttaatatatttttatttattttataa

SEQ ID NO: 346846 - DNA, 389 bp, Zea mays
gatgaattcaatattttttcgacacgaatatcaactagcataccatatagaacaagggggggtgcatctgtttcattgggcagttcaaccggaaacctggataaactaggagttaacaaatgcctaaatggtaaccgtgatcaaccaagccctacctcagttcttgatgcaccctctgaagatagcagttgttatgagcctgaaacacttggaacaactacttccaagaatgctatattaagatcttcagcaattgaaactgtggcccgtttcttgtcattaccgaggatctcttatggggagtaatggatgatctgagtgaagaagcgtttctggatttttacagtctgttttagtgttgagatatcttttgtgtcttgtataacttt

SEQ ID NO: 346847 - DNA, 350 bp, Zea mays
  unsure (1)..(350): unsure at all n locations
cggaanncccggggggacgcacgcgtccgtgtttctataggattgattgggaggccgtctactgaaaggaggaaatgatgctgcaatgtttgtctagtaggagcgccagatgagtttcagatccgagcggcaagcggagcctgctgtttgtttgcacattttgagagactttgtagtttgtaatgtttctagctcctgtatgacgattttctcggcggctgcacctgacctgcccaccgtcaccagctcaccgttgtagtagtctccgatgagcaaatcggttgttaatacgtaagagaggagagctatttttgttcttaggcaaacaatgcttaactgtttcattattc

SEQ ID NO: 346848 - DNA, 434 bp, Zea mays
  unsure (1)..(434): unsure at all n locations
gaannnccgggnggacgcgcacgcgtccgctccggatggttaacgtcagcttcagctgtagcgccgaggcgctgcgctcctacgtcgcntggctttaaccggcggtgccgctttctgtgcctgatgcgcgtctcctactagctgcaacaggccttccaccgctaccttgacgtcatggcttcaccgctgttactgacatctccttcggatcctctacctgtagggagaacgatctgtctaccgttcattgacagagatttcatcctgtcttttctgcgtcgtaagtgtggttggagcttacccatctttttttgtccaaacctgtacatatttctatctgccttcttgtttagttctggaataaatagttcttggtaattgaatggatcattgttgtttagtaaatcacaatgagttagcttcttttctttttt

SEQ ID NO: 346849 - DNA, 144 bp, Zea mays
cggacacaaagccggactcttactcagcaccgcccacagacgatacatacacaaaggggggagtctctgaccccgaggcctgctctctcaacgagcccacagctcctgagcccacatactgctacattctaggagccccaaaag

SEQ ID NO: 346850 - DNA, 456 bp, Zea mays
  unsure (1)..(456): unsure at all n locations
cgggnggacccacgcgtccgctcacttcaacgcacagagggtgatgcctttagtgtttcttggagtggtgatgggagggttctttgcatggtcgcgcaacctgcttgcgtctatggtgctgcacagcttgtggaatggatttgtgttcttggatttgatgaagtgagcatttgatcttgatttattgtttttgttccaaccttggacatatcttcttgagcctttattgataatgtttattacatgattgtatctattcttatttcacgattaaaattatggtatttaatgcatcgtctgaacattaagaatcattttatttttaatctaaaaaataacaatttagtgcacgtaattataccacactacttaaataatatgtttattcttatgaaaatctttatttattaattattaatctcttctaattttaataatcttgtcccaatttttttt

SEQ ID NO: 346851 - DNA, 327 bp, Zea mays
agctggagttcacaccacaatccgtttcttacggatcattgttggtgtaagagatggtgtttcctttctagagtactcacccatcatcaaggaaatcacggttttcatgcacatgaaagtgaggagagcaaagttgtactacctgaaagacaagctttcccgctttttaacatataagttgatatcatatatgctgacttaacaactttttctaccatcatctagatttctattatacctttttattaacttccctatcgacatcattcatatttcactgaaatttctaggtattagatatgtaatatatacaactttataatatac

SEQ ID NO: 346852 - DNA, 423 bp, Zea mays
cttgcacaacctgtggtactctggtggttagctgtacatgctgcgctgtcatgatggggggtttgctgttacatagagccaatgcgtccttgattcctaagtacacgtacgtttgtcgtcgtcgttcctccccccatcccattccaggaatgaaatgtttgtaggtgtcactgaaaaccgtgtaaatccacataaatgctatgagacatagattataccatgtgattcctaaattttagtttgttttttttttgctggtcaagaactcatgacgatgttgttgttattataatgaactttataaaaaatacaatttttatgctttttggatgtttttttctgtcaaaaataaaaaaaaaatatgtcattcgtttcttaaatgatcctaaacttacttttcgcttgtctttctaactttcataa

SEQ ID NO: 346853 - DNA, 385 bp, Zea mays
gctcaggatcatgaaaggatcagatgcaattgtacttgctccaagggcatctgatgggggcatgaatcgcaactagaatggttgcttcttacagtccacagcaagagggagatatccagtgactgtttggatctttgttggaagccggaaaacgtctaacattttcaagaagaattcttcctttatgtctgtacctcatgtttttgctgttactcaagtaaagaactccacgtttgtttatgttatttttacatcatctactactgtcataataataaatctcctcctatttttttgttgttaatcctttgttctatcttgtaaatggtttgtttcaattgatgtgtctgcgattacttttttattcactcctcttacttatttt

SEQ ID NO: 346854 - DNA, 105 bp, Zea mays
gacccacgcgtacgccagtcaaggctaccattgatgctaatttcctcaccaaggaggtacacttcaagggcaggctccttactcagtacttatggtacactgctg

SEQ ID NO: 346855 - DNA, 111 bp, Zea mays
gtaatatttacctacttcatacagtggtctaactaccactatggctctaaacaaagggggttctttccaaaaaaccttgtatgaagtattatctattatctaatactctac

SEQ ID NO: 346856 - DNA, 84 bp, Zea mays
aatacattattacatccagttcggagtgtgataaaagtttagtccaagccaacaggggggaaaaaaaaaaaaaaaattacaatt

SEQ ID NO: 346857 - DNA, 124 bp, Zea mays
  unsure (1)..(124): unsure at all n locations
ttaataaaccactttccccccctttatattaccanaccgcaatcatttatccgtttttttataaaaacaacccgccatccacaaaaaaaaaaaaaaaattaaaaaaaacaaaaaataattatat

SEQ ID NO: 346858 - DNA, 292 bp, Zea mays
gctcccaagagactgacggcatctaccggatcaggaagaacacacacgtgacactatagaacgtttaggttttcacatcactctacctgtgtctgactacacaatggggaaggtcgacgtcgatggcgccaatctgtgatgcgcttcgaagatgtgaagctatattactcactctgaccactagcaccaaggtggcaatgcagcacagcgacaatcgcgtttgtaggcttagataacacatacctcactcaataaaaagaggatttaaaacacacctgtggcgatgtgtggt

SEQ ID NO: 346859 - DNA, 168 bp, Zea mays
  unsure (1)..(168): unsure at all n locations
tccttantacacaaattttcaaatcttatctttccaccaaaactcttactattcatctttaccaaacttttctttattanatctttctcattaatacattctcctttatcataaacctcacttatattttcacacaaatttccttattctaacaacattctatatcta

SEQ ID NO: 346860 - DNA, 409 bp, Zea mays
  unsure (1)..(409): unsure at all n locations
caacggctgtaactacacctctttccatcttttatgtcgcgcccatggtctgctgcccncggcacggggtctatttcaacagcatgaggtacttatactacntttntaaagtggacacggatctcgtgtattaacagctttagagaggccagttcaaggccgccatctacagtctctttttcactaagtaaggttaggagatcaatgataggattaatgaattcaagatcgcttctgccaaaggcatcttcatcttcatctacttttactaaactgcttcttcccttacttatttaaccgatttgtttgatctcataaaatccttcttagctcattacgatctatctatttggtgattcctactcttttcatcttgctctacttttctttctacttactataaattttt

SEQ ID NO: 346861 - DNA, 268 bp, Zea mays
acccacgcgtccgaaaaaaaaataaaaaaaaaaaattttttaaaaaatttttttaaaaaaaaaaaaaaaaaaaaaggggagattttaaaaaaaaaaatggcccccccctctaaattttccattcttacatacccttccatcccactttataactcttttatactttcaccaaaattcaattcactgcctctcgttttacaacctcctaactgtaaaaaccctttcgttacccaatttaattgccttaaaacacatcccctttttccca

SEQ ID NO: 346862 - DNA, 392 bp, Zea mays
  unsure (1)..(392): unsure at all n locations
ccattactattttttcaccccaaccanaaacttttntccatggtgggtttctttaaaaaagcgtgcttgccaaaacaaaaacttttttatcntatnntaaacaacatacaacaattatcaattttttcactatatccacattacagatttcaattcttttttttaaacacattttccataaaacaactacataaatcatcttcttactattttattcttacttttaaatacaattcttccataactaactcattattttttttatacatctaatatctttactaataaactatacactcttatttatacttctgctctagatcatctaattcaatattctcatccaccttcaatactacctatgattacttcttccctcatattacttctca

SEQ ID NO: 346863 - DNA, 292 bp, Zea mays
ccacgcgtccgcttatgtccttttctttctttctttctttctttttttttcctttcattattttactgctattgtatggttttttttcgcatgtctcaacaaaagtgaatcatggtgttgactttagatgtgttgttgccaaaaaaacaacaacaacaaaaaaataaaaacacaataataaattattaatttatataaaaaaaaaaataaaaaaacaataaaactaacctaattatcaaaaatataaaaaaacggggccgccccctttaaagaacccaatttttctccccct

SEQ ID NO: 346864 - DNA, 401 bp, Zea mays
  unsure (1)..(401): unsure at all n locations
cacgcgtacgctgacgctttgtctcgccccctttctcttcatttttctaaccgcgcaccnatcanaaggtgccttccttctactcgtcggcggacacatcaactnttcccctttcttacgaaataacatcatgaataatactgctcacccacttcaacaagccccaccttgaccgcttctacttccttaagccaatctcgcacaagccaaattgtattgactcccatcctcattgatcaacttcaaggtatccaccttcattcccaacattggttatgtttctgacaagtcgaaacatcactaccttcccaacaattacaaaacacttcttggtccacaacgtatcttacctctaattgctcatacatcacaacaccacctacttccctcaaatttctcac

SEQ ID NO: 346865 - DNA, 308 bp, Zea mays
cccacgcgtacaccgacgcgctctcaaatcccaatttcaccgtatattttgaacagggcgaccgaaggcggtggtgggtttcatcatggacttcgcgcacaatctgatcctccgtatgatggaagacccgtacaagcccaacaagtttcgctggaacatttcttccataataaagaacttttccaacccactaaagccgtgttgaaccttcctcttctcccctaccgattttttaactttaaccgcttcaactcgcagctctccttggatccccatatcaaccataccccctgcctttcttaccccta

SEQ ID NO: 346866 - DNA, 287 bp, Zea mays
aaattacaaaacaattattcatctttctcttatattcacattacataattcaattcatttttttaaaaacattttctctaaaacaactacataaatcatgctcctcctattttcttcttcttttttaaaacaatcttttctaactatttcaatcttacattctatacatcttaactttttctaaataaataatacactttcatttatatcttctttctcatatctctctatttcaataatctaattctatttatacctcaccttttatctctactccccttatcttt

SEQ ID NO: 346867 - DNA, 275 bp, Zea mays
aaaaaaaaaaaggaaaaaaaataaaaaaaaaaaaattaataaaagaggaaaaaaaaaaaaaataaaaaaaaaaaaaaaaataaaaaaaaaagaaaaaaaaaaaaaaaaaaaaaaaaaaaaaaaaaaaaaaaaaaaaaaaaaaaaaaaaaaaaaagaaaggaggaaaaaaaaaaaaaaaaaaaaataaaaaaaaaaaaaaaaaaaaataaaaaaaaaaaaaaaaagaaaaaaaataaaaaaaaaaaaaaaaaaaaataataaaaaaaaaaaaaaaa

SEQ ID NO: 346868 - DNA, 247 bp, Zea mays
taagctttctttcccctttttatatgcatgaggatttacgcattaattcatataggggggatctcataatttttccaatctttccaatcccataggtataggaataactgaacaaggcctaattttgcagtttttgtcacattcacacagtgtgttatagtaccagtttggtgctctgacactggggaagtttaatgtatccttacctatgaatagccgattatgatgaatggagattaaattgata

SEQ ID NO: 346869 - DNA, 342 bp, Zea mays
  unsure (1)..(342): unsure at all n locations
aaaaagaatatattatgaacattataattacaaaataatattcaagttggtgcttctcaacggcggattttttaaaaattagcacgcgcacaaactcaaacancaatttatcctatatagttaataaaaactcatctacacacttattcatgttaagttgcttatattcctaaaattgtacagctctcaacgaatattttgtctcatgataatcccctaactttttataaaagtcttaatccatcttttcttaatatcaaaccttattctttaatttatcttcctgtatatgaaacttttaaacatttgtctaaaacatatatacttaattactaataacct

SEQ ID NO: 346870 - DNA, 444 bp, Zea mays
acgcgtacgcgtgctgtccattttaacatgggattttagttttatttatggttttaacatcctcctatgaggaaacaaagcctctagagaggggaggttgccttcccgaagttagtgccaccaaacttgctgcatggaacatgaagaagcaatgtttataacaaaaaaaaaaaaaaaataaaaaaaaaaaaaaaaaaaaaaaaaaaaaaaaaaaaaaaaaaaaaaaaaaaaaaaaaaaaaaaaaaataaaaaaaaaaaaaaaaaaaaaaaaaataaaggggggcccgttttaaagaatcaaagtttacttccccgtccttgcaacgtaatagtttttttatatggtccccaaaattaaattccctgcccgcggtttaacaactcttaaattggaaaaaccctggctgtccccaattaaattcctttgagaaaaatccccttttc

SEQ ID NO: 346871 - DNA, 366 bp, Zea mays
  unsure (1)..(366): unsure at all n locations
acccacgcgaacacggacgcgtggnccaggacaagtcttataatgtattcccttcataatattaattattacagatagttacaataccgatgctgaggcccccaaaacnaatgctnaataagatcactcttcaaatcttttcatactgtgttaagctacaaaaacgttgtctcaaaggcacactgattgctcctaccttgcggaagaagactacaacttagatcttgaggatcaaagtgtccaaaaagtgatgtttggatctttatattataaaaaggcttttacgatgtctctaattcttcaccaaaaatctaaaacccatattaataatgtaatttataattaaccactagattttttaataat

SEQ ID NO: 346872 - DNA, 329 bp, Zea mays
aacacgcgtaaaatatgtttatcacagcatttattttacacacagaaaccaaaaataaacaagccggcgttttttaaaaacgcggtgaggcactccaacataaccaataatattactaccaattaccataccaccaaacacgctcctaataacctaatcacccagcttcacaactcaatatttcttccaagtcagacctaacataaagcaacaaacatcaaatctactatccttcgtcctacacactctatcaattgtaaaacctttcttttacacattttaaaccctactaactatattccatatactcatatctctttcaaagcaaa

SEQ ID NO: 346873 - DNA, 249 bp, Zea mays
aaaccctaatgatgttattataaaaagctagctccccacaaaatcataaaaaaaaaaaaaaaaccaaaaacaaaaaaaatatacaactatatacaccacatatcatcaaaaaattttattaattaatttataaaacaatattatttattaatccttcactataaaatacttctctccctttaaaaataaacaaatttataaatcccttcattttaaataaaacattttataaatcttcacacaaaataa

SEQ ID NO: 346874 - DNA, 395 bp, Zea mays
  unsure (1)..(395): unsure at all n locations
aaactgcatgtataaccattctttctcctataatcatttccatgagatgagttgttaaacttgcgtcggcttnattaaaataagctgtaagacctcataaatatataaattgcttgtacttgtttgcatccaataaaaaaaaaaaaaaaaaaaaaaataaaaaaaaaaaaaaaaaaattttttttataaattaataaaaaaaaaaaaaaaaaattaaataaaaaataaaaaaaataaaaataaaaaggtcctccctttttaaataaaccaattttacttaccctttctttaaaaataatattttttttatattccccccaaaataaaattaactttcccctctttttaaaatctccaaactttaaaaaccttatactccccaaattaattcttct

SEQ ID NO: 346875 - DNA, 318 bp, Zea mays
gatttgtgtgagagtcacaagacactacctatcttctttcaattgtggtttgtggagatttgtggatcgttgctgttattaggtgtacatgtgtctacatgatgtgtaatttgtacatgagaccatgctccgtccagaagcgtatgccgtcgtctttttgttcattcatgtaggaggggcatgctcatctgtgctttcagagtttcccatatatgatgattaatataacaatcgatgtcattctctggaactttgggtgaaataaaaaaatggtacatgttaagggtttaaaaaaaaaaaataatttaaaattttatt

SEQ ID NO: 346876 - DNA, 305 bp, Zea mays
cccgcgcgtccgatgagcgcaaaagaagcaaaggagtatggccttattgatggagtaatcatgaatcccctcaagggcctgcaaccacttccagcttccaggtagtcatgaagtgggctagaactgtcaaacatttttgtttgttgtatcaatgtgtctgttggagctgagtttgcgccgcggtgtttctagtagcctggccacataatattctacatccagaggcgtcaaagattgtaaaaaaacaagaactacggttaggatatatccttgttgatggacattcgaattgaattaacagtatt

SEQ ID NO: 346877 - DNA, 305 bp, Zea mays
agggacgacccacgcgtgcgaaaaataaatatttaccattccacttttttttattctaaacaacaaaaaaaaaaaacgcgcacggttttatttaaaaaaattgccggcgccttcttattaactttttttttttttttttccttctttttcttggggccccccgttattaaaattccaattttctttccccttctttccaaagatttttttttttttttgaaaccacctaccatttcttgattgtgagattccttcaacctttttttcttaaaaaacccttggttttccatttttaatcttttttc

SEQ ID NO: 346878 - DNA, 253 bp, Zea mays
aatcaatgttctaataagggcagtgtggaaaataaatgggctcgggctttcaatgcatgaaagtaacaacaaagaagatcatgatcagatcatcatattgttccaagacatgcttgaagtggttacaatggacataatggttgactagctcaacgagtacggaacctagaaaccattctacacatttgatgagtagcctttaatcatcattttttttctcgaacgcgcaggataactgcacaccattgtatta

SEQ ID NO: 346879 - DNA, 390 bp, Zea mays
gacgaatcacgagggcgtccattccaaaaggtcaagattgagataatcttgggaaagagtgacagattctatgagttgatggctgctgctgccgaaaagaggggtgaagttgaagaaggcgaagagcaggcttgaaaggaaaaaaaaaacagtaccgacgacaagcggctgttgtggtggtctgttagttttgcttaatttaatgccatgcgcatgagagctggcatgcgttctagcttatctacattgccatggcagtgtctgcaaactcatggattgatggatgaatgctggtttcttccaattttgacagcttcatttgtttttttggctacgcatgttttgccagtctgacgttctccttacgaaatatggcgtgctttgttgact

SEQ ID NO: 346880 - DNA, 276 bp, Zea mays
  unsure (1)..(276): unsure at all n locations
cggacgcgtgggcgctccctcgcttttatccaccggcggcggctgaagtgctgagcggcgaggcatcnagcgccactgcgacctgcntnctgctgtgctcctgcgcggctgcgcgccggcggacgaccgggccgtcggcgtggttccggctctccgcgcctgcgcggctgcgtcgcgacgagcagtgcatcggcacagtggcggtgcgccccccgcggcgaggcggctccacggaccgcgcttaccgagcgccgtcgcgccgaacgggcgcgggcg

SEQ ID NO: 346881 - DNA, 418 bp, Zea mays
gcatattactgctgttggtacgtgacatgtgtaggaaacaaaaaaaaaaaaaaaaaaaggaaggataaaaaaaaaaaaaaaaaaaaaaaaaaaaaaaaaaaaaaaaaaaaaaaaaaaaaaaaaaaaaaaaaaaaaaaaaaaaaaaaaaaaaaaaaaaaaaaaaagggggcggcctttttaaaaaatcaaattttacttccccgtccttgcaaagtaaaactttttttatagggcaaccaaaataaaattaactgcccgccttttaaaaacgtggaaattgaaaaaaccttggctttaccaaattaaattcctttgaaaaaaatccccttttcccaacttgggaaaaaaccaaaaagccccgaaccaatcccctttccaaaaaattcccaaacttaaatggaaaatggaaccccccttt

SEQ ID NO: 346882 - DNA, 432 bp, Zea mays
aaaccgggccgacccaagcgaacggggccctgataacctggacaaccttatgatgttggctgagattttccagaggcaggcgcctggtgctgaaggagctgcgcgaggaggataacgacgttcctgagcttgtccaaggagagacatttgaggaggctgcagagaaggagcctcaactggagcaggatgagaagaaagaatcgtaattttgttgtgaagggtcgtcggtttaattgttggcatcagccttgcgagagacctacctgctcatctggcgtgcctttacatgtgcttcgggttcgaaaagcattactgcattatgttttcttgaagacagtgtaggcatatattttcctcgagccatagtgagtttccgcatatgttttgcaaaaaaaaaaaaaaaaagggcgggccgttttaaaggatccaagc

SEQ ID NO: 346883 - DNA, 80 bp, Zea mays
  unsure (1)..(80): unsure at all n locations
gcgtncgaaattgaaaaatatcactatatttagggttgaaacagaaccgaaaagtcctgtcctggtccgaatactgtttt

SEQ ID NO: 346884 - DNA, 200 bp, Zea mays
ccgggccgacccacgcgtacggttttagtgttgcaacaccgcatgttttgcttttgggccatgtatcgtgttggagcagatgagggatgcaaccaaagggcatgcacgcccctaatctctattttatcagcaaccaccaccatattagtgtttgggttttgcttagatcatatttgtcatctaagaatttgtcgttcatc

SEQ ID NO: 346885 - DNA, 236 bp, Zea mays
gtccaaacaaaaaaagcaccttctttcctaccttttgtccctgaccaagatcgcttgcaatcgggtgcggtaggaactcgccgagtggcaactcaacccccctgctggattcaagcacaggggctccgataacataacacaagtggttaattgcggtcactggagcggcaatcactctttacgccggcgagacctaccaattgcagggcgacttttctgaacattatcctatggaa

SEQ ID NO: 346886 - DNA, 319 bp, Zea mays
  unsure (1)..(319): unsure at all n locations
ggaaaaaccgggccgacccacgcgtacggtttttttgggcgtgtgaccgtgtcctatgtttaactgagtacataaagagagatgggcgacgttcgttgtacatacgggttgtctatgtatatgtcgatacatatgaaacgtgaggcaagccttgtgtagttgtgtacctgcctgcatacatagggtattagggatggtagctgtgggtatggatactagcgagtttcgtatctggtggatatgaataatggtnnaaaaaaaaaaaaataaaaaaaaaattaaaacatacctttttaccaaaataaaaaaaaaatgggcg

SEQ ID NO: 346887 - DNA, 287 bp, Zea mays
gaagaatgcgccattgccgcctgcggtacaaactctgataggcatgggcctggctataagaaacacaaactcagctgggaccgatcgccttgacacatacgacgacaccctacgcgcctcggacgacgacaccccattcgcccgccagcagcggagccggacaaccgagccttgggtctcccttctataggatccaacgctccttacccttccatccgagcccttatctcttctatagagggacataacttcaattgagcgcccctgtggttacaacgtctgacccg

SEQ ID NO: 346888 - DNA, 467 bp, Zea mays
ccgggccggacccacgcgtccgcggacgcgtgggtctgcgagcggaccttctttttttttcttttactcgactggttccagcacgggaaattcgcaaatatgcgatttgggcaacatcaaggaatccacatttcaacacacaatggcactagatctactacaccactggtcaatagacacacgacccaccactacagatcgtaaacgatctactcgaacacagggcattcaacattcacaggcggttaagagcgcccactgtatgcctgtctagggggacgttggacgctcgtcttgggcgactgtggcctggcttggcacgtcgccttctccgcagtctttttgggcaggagcacctggttagatgttggggaggacgcctccgtgtacgcggtcagaactgtttggaggagatatgacatcacgacttagatgtctgttcattccaaaaatgcaagctcctatta

SEQ ID NO: 346889 - DNA, 134 bp, Zea mays
tagatactggtgacgaggtgatacataaggattacgatggttgtggtattacatgtactacagtgtgcgatcgaacctgaatttggtcccttttggatgcacagtcatggaaggatggaattgcatggtgaacc

SEQ ID NO: 346890 - DNA, 456 bp, Zea mays
  unsure (1)..(456): unsure at all n locations
ggatgaaactaagtccgtgaatttgggacgcttgtatcaaaggtggagcaagtgcgcggtacgattagctttgggataccaactaagcagtgagcatgcaggaacacattggtgatctttcgtctttaaccccccatgtacatggcttttttgaggtgggataggaatggcggttgtgtttcccatggccattctttgcacgttatgaagctcagctgcaggatgctcttatatagagagaaatgttagtcacatcacatcgcgtgtccatactgtatagcgaaacttaacatgttgtaatatcggtcggacaatgtgtgcggtgtggatggtatctttcttagatagatgcgcaagcttaaccgntggcatttatggattaaggattggaagaatattcacggtggataataaataaatgattttttttggggtaaaaaaaaaaaaaaagggcgg

SEQ ID NO: 346891 - DNA, 327 bp, Zea mays
ggacctgatccgttatggtgtgcttgaatcgtggctgtggagatgtgtggaactcattggtgaaagtgtgctttattaataatggtgatgctgaaaaaaaaaaaaaaaaaaaaaaaaaaaaaaaaaaaaaaaaaaaaaaaaaaaaaaaaaaaaaaaaaaaaaaaaaaaaaaaaaaagaaaaaaaaaaaaaaggggcgatcgtttaaaaagatccaaatttacgtacgagctaatgaaaagtgatactttttttaaaaggaaaccaaaattaatttacctggccggaattgaaaaaaccttggactgggaaaactttgtcgtatccaa

SEQ ID NO: 346892 - DNA, 286 bp, Zea mays
  unsure (1)..(286): unsure at all n locations
atgagattggttggaactatgatgcangaatgaccggngttgtatttgtgcccatcatattgtcatggttgccttcacttggcagccgtggtttggagtcgcaccctcatattgggtgcagccttggaagcaaggcaaacatgccccccgtccgcctttgcaatatatgttttggcatgcttcattggatttaccgtgttccttagttttcttttatatatatagctgcggctcatatgttgaacaagtttacagcttttatctgagcactttatttgtgcactaa

SEQ ID NO: 346893 - DNA, 389 bp, Zea mays
gaagaagatcatgagcagcgccaccgcgtcgagcgccaggccgcccagcagcagcgcgtacgtgatgccgacgtcgacgggcaggatctggtgggcgggcttgtcgaggaagaagaagatgaggagcgcggcgacgaggcagcaggagcagatgcagcggaggacccagccgcaggtggtgtaggcgacgggcgccttggtgtacaccatgtcgtagatgaagttgagctccacctcgatgacctcgaacgcctcccggatggaggttgtcgttgtcgtctcctctgtgtctgtgtctctgacgaagaaggcctggctgagccgcctctccttgaagctgaggatgacgttgacgaagaggcggcgggaagatgagggaagaagtcgta

SEQ ID NO: 346894 - DNA, 222 bp, Zea mays
ttttgaatagcagggtgttttttcccccatagatctactccatttatctgatcatcaaatcagcccttaaaaccattttttgtcgattctttcacccatcgcccgctcacccatattgtatatttttaagcgttgaccctgtattatatcaagcgagttgacactcccaagaaggaaaagaactgtgcaccaccctacatggaacattggctcaataaatat

SEQ ID NO: 346895 - DNA, 205 bp, Zea mays
gtcacacacacacacacacacacacacacactcacacacacacacacacacacacacagacgagtggttttcaaagccaagtgtgtgtactagcaaccagctagctcgggcggcagcaggcagccatcatgtcggaggagaagcaccaccacttcttcaaccaccacaagaaggacgaggagcagcccgccggcgagtaccggta

SEQ ID NO: 346896 - DNA, 449 bp, Zea mays
ccgggccgacctacgcgttcggtggcatttaaggtatgtttgattggttattttttatggcaagacttgcttgaccggggtaagttttagtccctccattggatgttattttagtccttaaatttttaaatatgaaaactaaaactttattttaattttcgtatttgataatttaaagactaaaatggaataaaattgatggactaaaaattagtccctacaaaccaaataccccttattttacagtgtaattggtagatgagataagctacagtagtgggtgttagacaccatacctgggcaggtatacaactgctccctagcttgtatacgtatgtatgcaatgtgcaatgcatagaacagcttaacagctctcaattcctggtgtgttcaaagctttattgcattattgccaacactgtttacacttgatctcaatgtaaacaaac

SEQ ID NO: 346897 - DNA, 293 bp, Zea mays
tcccgggtcgacccaaacgtccgtttataaaaaaaaaaatcaaaaaaattttttcttataaaaaaaaaaaaaaaaaatattgctgaaataaaaaaggaattgatagagagattaactactgttaaaaaaaaaaaatcaatataaatagctaaatataagatatgccttgattttaatgttgtagtatttgttgcaaatgttaaaaatgcctatttggaaccttaattgaaaattttgttgaaaaaaattcttttaagtcatgcaatttcccgaactgaataataaaccggtga

SEQ ID NO: 346898 - DNA, 189 bp, Zea mays
  unsure (1)..(189): unsure at all n locations
cggtccggaaaattcccgggtgcgacgccacgccgnntccggttaaatagtatcatcacgttcagctccgttctctcatacataataaaactagaatgagattgttgtgggtagattcaataatctgtgtatccatatgcaatgttttgacatgcgcgtaatgaatgggatgtgcgctgctaactaaaa

SEQ ID NO: 346899 - DNA, 395 bp, Zea mays
acatgccatcctttaatatgtatcttgagtacgtgcaatccatctctgacaggctggaggaactatagcagcaagttctccaaatgcgtgaaattttgtttgatccacaatcaacagaattcatcgttgagacaattccaacgatgatggcagttactgagtcatcaacgtttcactagtcattaaagaaggatggtgcacacacaacaaggctccttataaatcacgtgttgccaccctctgcgtagcactgcatattctgtgctgcaaaacggacgcaagaaacacgtgccttccgtgcgatactttaagaccgataactttgttgcctgaagcttatccacgctccgctcctttatatggaacttaaacgcgttcctgcacttcgatttctc

SEQ ID NO: 346900 - DNA, 351 bp, Zea mays
  unsure (1)..(351): unsure at all n locations
tttttcaacaactgcgaacagctgcatcctagctaatgggggctttttttgtgctgtgagcagcctactgttcaagatgatgttttcccttcttctgagaacaccactagatgggtggttcattaaaaataataaaatcacacgactatttttactatagagtactcctacgccgcaaaaaaaaaaaaaaaaaaaaaaaaaataataattaaaaaaaattatataataaaaaatatataattttttttattgtttataatataattttattattttaaatatanggggggggcggctttttaagatcaaaaatttttttcccctcgttgagaggaaaaaattttttttttt

SEQ ID NO: 346901 - DNA, 267 bp, Zea mays
aaccgggccgacccacacgtacctcattcccttcttaataaactccaccgctttttttttaccttcttatccacaccatcaacgtgctttatttaaccagtcacccacatctcttatttattcacttatgaccccataattaaatacatattcttccaatcctttgctccacacataaaacacatacccacatctattattcatgatcattttcttttcttataaaacttttcatcatacttaaatttacttctttttcttttaaac

SEQ ID NO: 346902 - DNA, 161 bp, Zea mays
ctcacactttcttcaacacgttcgatatatttagccatatatatgctatacttttttgtgtgcaagaattgcagggaggctgctttgctattgaatgtgccggatacatctttgctagaagtgggtataatctatcatgtgtaactgtaactacatttatc

SEQ ID NO: 346903 - DNA, 295 bp, Zea mays
aattcccggggcgacccacgcgtacgtttttttttttttttttttttttgggatcaaatgtacaatacattcattctataaggcgacatatatatgatacaagaatatctgctttaataacaaaaatgtaagaaaaaccaacttgggattgagctccgtacgtgcaataagcttggattctaatttccacctccttatgaaactaaaccttttactccccaaaaaggaaacctacctattctttaatctggttcaattaccccaaagcttaatacctttgcttaatggttatttt

SEQ ID NO: 346904 - DNA, 393 bp, Zea mays
  unsure (1)..(393): unsure at all n locations
gttggtgtatgcaatttaatatggggtatcaaagctagaggtcatgaggttgaatcctggttagcgtaattaaaataaaataattgttgctcgctcatattccacatctgagacccaagagatgctcgacgtgagggagagttttgggaataatataagtgaattgcccatctctttcaatcagcttaaacttttaggttgaattagttggtgtatgcaacttaatagttatcattttcacttcccattagactttttctcttctttcaatacacatttttcctttttccaacatttgtctctatttctctagatctctcttggtttctgtgcaccacaccttttttacttctaaattatcgtgtcaaacttaanacatcaattattttggga

SEQ ID NO: 346905 - DNA, 282 bp, Zea mays
atcctaatatacccttcaatttccatttttaacgctccacctcatctccctcaatgggggttataaccaatgccttaccacacttctgcctcacaaatataacacatctaaagccacctaccctctataccataagaacactctcaccactaatataagtaaacggtccatatcattaaataccttacacttttaatatgtatcccatggtttatcctactcagtagctatcatttatacttaatcttcgactctttgtactattttaacacaaatatttcc

SEQ ID NO: 346906 - DNA, 398 bp, Zea mays
ggatttcagatgggattcagacaagcaggcatttgaaacgacatatctatggaatttggaggcagatgagtgactctatacatatcagcatgcatgccgcggaacgtaactaataagcaacaataataataataatatgcacttatatgccatgtgctgaataattaataataacctactctatgtgtagagtattacatactgtactgaaccttgtttgtgtagttatgtattgtctacaagaactttgctatatgtagagggagataccacaaatagccattcctatggaatttgggatatatctcaaataactgtgtactgtcgaatagtatatagtatgtaattatgcatttaatagctccctacattaaataattgatatatgtatgattatt

SEQ ID NO: 346907 - DNA, 420 bp, Zea mays
aaaaataaccttggttttaaaacaaaacctatatcttgatacgacaaaaagaaagtaacctggggggtactaaaaaaaatactatacctgtcctcttgcttgcctatctccaatgtcataattcctgcacgcattatgttaccttccacttatgtccctgaagctatatttttctaaccaccctactctatagtcaaattttgtcaaaatctcctgatcctacattgtgtccctttgcataaatctacaatatacttcattctgtattagtaaaaccaccggaagtattatatctattgttaggcatccagagctacctttgatagcatcttgcggactggatagctacttacgtatctgggacacaaacacaagacagttgctatctgctgtctttctgaagcagcaccttacaacggt

SEQ ID NO: 346908 - DNA, 156 bp, Zea mays
ccgactcgtaggtcttgatttaacgattgttgaacaaaagcactagtgtatgcgtcggaagttaaatcataggtcagaattgttagctgataccgtagtgccacatattgtctgtgtatacaatgtacgtggatcctttgttctttgctgatcctg

SEQ ID NO: 346909 - DNA, 248 bp, Zea mays
gagaggtgacaggttcatgacacacacaaacacacgtacactagtctgaccactggcatgtgggcttgctgtgattaatattttcagcccatcatttgctcggagcatactttattcttgttattattgcatagccatagattgtccaccccaccctctgtgcacatatatacagtgacctgatctgaccatctcacatgatcgatagaacactgaaaaaagcccatgacaatgccaaaaaatctaaa

SEQ ID NO: 346910 - DNA, 221 bp, Zea mays
  unsure (1)..(221): unsure at all n locations
cagagaatgttggttcgggaaatcagagtcgtcagtcatctacatagcttttctgggttgatagactgnattttaagtccatgtttatctgggatggctggggtcagcatgtttgtacaattatttggagttgcttttggaatggtcgcggtttgatgagttgcctacagcatgagatgtcttttcgctccacaaaaaaaaaaaaaaaaaaaaaaataaaa

SEQ ID NO: 346911 - DNA, 163 bp, Zea mays
  unsure (1)..(163): unsure at all n locations
cggnccggaaaaaccgggtgcgacgcacgcgtccggttgtatatacctaattggtctcagtcttttgcaggcattgtacatgacgtatgccgcggtagctttgatcgatatcgaccttgcctttaatctgcggaaccttttttaacggtgcacgtaccactct

SEQ ID NO: 346912 - DNA, 381 bp, Zea mays
gcggcgacccggcggcgtgcacgggtacggacataaagcgtaccaaggaggagctgaggggcttcttgagagacatacacacatccattgccgagtgctcgcctgaagcttccaagaggacgaggtaacagccggctcatccgtgctaagacgtccgcaggagggacgagcagtcacacagcggaggagatagcggctccaacgactggtgaaacggaccgaggaatgtgaacagtctagaggacatgaacgcgactggattgagagagacgtcaacggccacattgatgaggggctactcctagccaactacgggcgggctcattgatcggacgacagttgctactactaaataaactatcatgatgctgctcaatttcg

SEQ ID NO: 346913 - DNA, 347 bp, Zea mays
ccgggggacccacgcgtccgccactcttcctgaatcagagcgtgctattttttttcttcctttaggcgacccccgctgaattaccaaccggtcggggcgccaaaagctagggttccgctgggcgccggtgccggctctactttcgtagcctctccgacggctcgcgggaaccggatgctgctaaactctgggtttctctcctcctgggtgcgcctattcttcacctgcactggtggttgttttggttgtgcccagactactccgataatatcttttgatgagcccacacaatgtttaagaattcaagggcgctcacctaaaatacacaatttatttgactacttttt

SEQ ID NO: 346914 - DNA, 299 bp, Zea mays
aatctattaaaactcttttatgactattttttttttcggaaatgaataaaatatagctggggggtttattaccactagaaaaacctataattaaaatacaacataaacaataaaactccatactttgtcaaactcttctcgtctgctagtagctcatcacactttgttgggattagcaaaattactctatcataaccagctgtatacccgaattaatcaacaacattttataatgactgtctcttcttataaagagaacatcacactggtagatgctatttggatctaattttacactt

SEQ ID NO: 346915 - DNA, 245 bp, Zea mays
ggcggagtcgcagaccaagattgacctcttcgttggcatcaactcgggtcatgtcttcaggaagctcgagctgacttcagggccgttcctccttaggggggaatcaactacgagggtgtatatagtgaggcgcctgaacagagaggctgctcggtgtgttgcttatgagaagcgtattagttagcttgtgaaggttggctagggacaagcgtgctctgaatgtcgctaagataaagcttggaact

SEQ ID NO: 346916 - DNA, 364 bp, Zea mays
cgctgctgttgccggtaatgatggcgattacgctgctgatcctggtgatgatgatggacgatcgaggaagccgcagggccgggcaatgatggcgatagggccaccgttaggtgtgcatccgggggcacaaattaaagggattgctgtgtggagatctgcacgagtttttgctccatgcatgcttgccgttcgtgtcaaaaaaaaaaaaaaaaaaaaaaaaaaaaaaaaaaaaaaaaagaaatactagataagagaaaaagacaaaaaaaatgttgatggaccttaaaaaagaaaaaaaaaaaggggggggccgttttaaaggatccaagtttacgtccgcgtgcttgcaacgtaataatttttt

SEQ ID NO: 346917 - DNA, 385 bp, Zea mays
ggcctccgccgcgtccaagtaatcatgctacagtggtggatcggtggagaatctgggaggactattggaagcataggacatctcaccgatggcttttagaagtataacagtgtattattctgatccatgtacttaccaaacaatgcacatcagaagaactgatgtgaggagtatttgctgaatctgcagagtttattttggcgtccgatgccaaagatttttccctatgaacttcattgcgatgatttttgtgacttcatcatatttgtgattctagaagggcagactggtacagtaatgactaatgagaggtgtatcactgaatcaccacgtcttgggtttgaagcagtctctccgcatttgcgtgaaagatttgtctcggttt

SEQ ID NO: 346918 - DNA, 199 bp, Zea mays
gcgtctcgtacgttttatttgcccaccattttttcagaatttccccagaactttactgcgggtgcaaatgtactctttatgggaatccacaatcctttttacctagttagtcataattacatgtacacttgagtaaatcgtgaacactacaaggtttctcgttgtttaaaaagactttttatcttattcggtctaatta

SEQ ID NO: 346919 - DNA, 324 bp, Zea mays
cctcaagagtcctgtataatcgcatcacgcgtattactcgacataccagcgttaaggatacgggggggtgcattataccgcaacagcgcctaagaatgtacttagagttcaatgctagcggaatgagtgtttttcgcacctgaggcacactttacatggttgctgatgttaatatatgcactgactacatgggcctgccgcaatgttacatagagaacataactgaacacttgtattttcatgagcccttattgatttgatacaacgcgccatcatgaatcttgtaaccaaattatcaaagctgcattctcgatatttaatcaa

SEQ ID NO: 346920 - DNA, 422 bp, Zea mays
ttctagtttcttcacctgtgatctctccctcatcccctgcgcataggaagtcagcttcttcacgtcgcctcctccctaggcgccgatcctacagagcctcgctggtcatccctgctctctcgacgtctctccccttcctgccatggccgcccctccctgctgcagctcgacgctcctccctggagctcgcccctgccctctgtccagcgccctccctgctgcccatggtatggacgccagccccctctcttgttgccatggatagcccctcttccatctccttccccaagcacaagtcccatggtcgtccaacctagctcgcccagccacctctgctgctcccatggtgatctctaaattccttagttgttctactagttcttgttaataccctgctgatgtgatgttttatgtgtgttgat

SEQ ID NO: 346921 - DNA, 398 bp, Zea mays
  unsure (1)..(398): unsure at all n locations
cttcgttttcgtgacctcctcttgccctgccctgcccatcggcatggcacggaggaggaggcaaggctcctgcagcttatgaaaaaggaacaattggatctataccattaaaagatccaaactttagatatataccatggacctcacatgtcattgactcatgtggacccacatgtaagtgagataataatggtatggatccaaagtggtaatcttttaatggtatggatccaaatttccctatgaaaaatgtttgttgactgaaatcttaaacactccgggagttcggcttggagatgccangtaataaaaacaaaaaaaaacgcgcatgtcgtataaataaaaagaaagaaaaataagaagccgaggtagaagactgaagaattgccaacacaagc

SEQ ID NO: 346922 - DNA, 260 bp, Zea mays
atttattttcatgaccttctcttgctcttccctgcccatctgcaaggcacggaggatggggcaacgatcctgcaggctccgaaacagcaacaactggatctatatcattgaacgatccaaactttacatatataccacgtagctgacatgtcattgactcatgtgaacctacatcctagagacactaacatggcatggatccaaagcggtcatctttgacaggtataggtccaacagccccctatgtaaaatgcatggag

SEQ ID NO: 346923 - DNA, 279 bp, Zea mays
ctaagacagttcgttccgtgtcacttctgtttaaaattaagttttgccgagacaagctgtatgtaccggatgaaagtgtggttccttattgtatgctctggaattttatttttggtatgtttattttttgccttagttcaacatgcctcctgcttggacaaagtcaaattaaaaaacatgcttggacaatataataaaaaaagaaaatataaacgataaagatattaatgtagacactaaaaaaaaaaacttgaaaactgttaattaaaaaagggcggc

SEQ ID NO: 346924 - DNA, 96 bp, Zea mays
ccacgccgtcggaaaaaaaaaaaaaaaaaaaaaaaaaaaaataataaaaaaaaaaaaaaaaagggaaaaagggggggaatattaaaaaataaaaga

SEQ ID NO: 346925 - DNA, 171 bp, Zea mays
ccggtgaaaaaccgggtcgaaccacagccttccgcaaaatttaactgaagtttaaaaccttacataagtgaacttttttttggcgatgtaacatggatattatgcattttttcatgtttaattgtactaatgttgtctcatgatatgttcatatgaggtcagttgtgtgtt

SEQ ID NO: 346926 - DNA, 413 bp, Zea mays
  unsure (1)..(413): unsure at all n locations
ccccgggccgacccacccgtccgcggacgcgtgggtgcgcccaccagatccgggtccgggaacgcgtggggcccgagaaaggaggcctctccggcgtcttcccctgtgggtcctgctcccgcctccgccggcggccagatctggtccgcgacacgcatcgcccaggccagcgcagtggagaaggtcatctctgggagatggcacacgtcgaagccctcgtctccgccggcgccagtgacagtgccagctccggtgttgattaccgtggccccgccggaggttgagaggcctaggtctgttggggtgagagagctggacagtggggtggagaggggcgcggcacccgtgagacccgcgtcgcatgaaggaagagttggtggggaaaggagagacggngataccccagagagacc

SEQ ID NO: 346927 - DNA, 192 bp, Zea mays
attgtgaccatttttttcactcaacttttgttagaagcggggataaatgggcggagggcggaactatgggaaagctactacgtgccaagggcggaacccatgcactttctgagaacaataggcggctggaaacggatggcaatatcgcgaacatgataacatgatatgtgatcactcatgtgtgctacaaat

SEQ ID NO: 346928 - DNA, 355 bp, Zea mays
  unsure (1)..(355): unsure at all n locations
ccggnccggaaatcccgggtccacccaacccttccgttaccgattccgtaagtccatggttctattgtgtgttggaaaatatgatttcgctcttcatgtattcttctttttttggatgccaatgaggcaatgatctatatgcaaaaggctggattactccacaggatgaataaaccattatttcacactcgtagcattcatcagttgatacttgataattctgtggtaggagtatgtctgtaatggaacgcttgatcatcgatggtgaattggcacaccatgtgatgcattgaaatccttcttttgtaccaaatnaaaaaaaaaataaaaaaaaaataaaaataaatttaatata

SEQ ID NO: 346929 - DNA, 391 bp, Zea mays
ccggactggaattaccgggtcgaaccacgccttccggggtttaaaggactcgtttgaaaagcttttattttgatttaccaaaaacctttcagggtgatgggcctcagcgacacatttttcagaggcttggactggtgatggtgtcttgtttactagattttacgtctttccaaactatgtttgaacactgttaggtcgaccatacttgaattgtgcttatatatttgactgtcatgtattctgaagatgcatctgcattctggtgccttggtttatgttgagattctgaccatcattgtaacggttgattactatgagtttgagaattggatcgattggatggttgcaatttccatgtgaccaggacagataaaatcttactgattcagtt

SEQ ID NO: 346930 - DNA, 363 bp, Zea mays
cgggccggaaatcccggggcgaaccaacccgtccgttcatgtaagtccgacaaattaaaaccaggattatttatttagttactacgactactatatgaaaactgcttcgttattactactagctatgaaattcatgaggaccacgtactgttttattagctgcgtagattgcagacaacagtgtacacttttgtaccatgtcgatcatgatcatatgaaagagatacacaggaggatacatatttgcagctatacgccctcgctcgcatgtatatacaccaagctatttatttctgttcacaaacactcagtttgtatgtatctatctactcgtatatattaatatatataaaaataaatgtt

SEQ ID NO: 346931 - DNA, 438 bp, Zea mays
  unsure (1)..(438): unsure at all n locations
tccggacaggtccgacactccgcaagcccacaaaagttgctagccttcgttgctacctaggaatgctgagaagatgtgctgactcttgctcggaaatgcgctaacttgcgctagttggccgcaacttgcctaccgcaatgcacctgtcgaggaccggggtaggttcattcggtcttcgtcgccccgggttttcaaggtannaagtcaggtcagggccaactttctgtcgaagaagcgaacaaatcgaagaaagtgaagtggagggtgggcgnnngcaatggagtgaatgcngaatntngcggcggaccgggaaagaagcgttgctgcannngggcggtaccgaagcttggggcgggtgcttggggcaaacggcaacttcggggcggggtgcaacgccggcgcgggaacctgcgcaacgggctcgcaagcgtcgcggtc

SEQ ID NO: 346932 - DNA, 235 bp, Zea mays
cgagttgggacgaatctggatgtggtttttcctcttaaatagaattcaacagctaggggcattaaagcaactgactccttcgacaggcatatactgtagaaattaagccatgaagctttggcttatatagtgcagaggaatcccaggttgactacattggagaagcagctcttcagaaggggaggaggctttcaagttctgcgcaacctcatgcaaaatatctggtattattact

SEQ ID NO: 346933 - DNA, 254 bp, Zea mays
  unsure (1)..(254): unsure at all n locations
cgggatgaccaacaaagcttcttatatacaanttctaactgcagcacaatcgatggagaggctgccatttattaccgatcatctgcctcctttccttcatcatcccccaattctgaagagacatcactaaagactgaggtagctgatgatggcaaaatcattggcactgaagatgaaatggaaacatcgtatcttggaaatgattgtgttgacgaagtaaaaaaattatcataatgaactgaccacccaaattg

SEQ ID NO: 346934 - DNA, 354 bp, Zea mays
  unsure (1)..(354): unsure at all n locations
ccggnccggaattcccgggtcgacccaagccttccggaaggacaaaattgaggcggcatcaggacagacataggtggctgggatgggagttcttgcctatttctgtggccaggcaacaatgttaaataaaaggaatgtgttatattgtgctttcaagttgataaattgtggcaaccaggttttgattatgtaggcaatattttgacaagctactcttatccagcatgaatgacttcacgtttgtgaatgctgcaaatgttgtacttctttcatgcgattgagtagatgttttacttctgttgccatcaccagttcaacgctgtacttttaattgattcgatcacgtgctttctt

SEQ ID NO: 346935 - DNA, 216 bp, Zea mays
cggaccggaaaacccgggtcgacccaacccgtccggaaggttttttttctgctactgtggctgctacctttgctggtgttattgctagggtcgaatacttaagttaactatgcgctgacagtctggactagcagtgttatgtgcgctgctggaccttgcgcgcaatgctgtggccgatttgttcgttaatgtcaagaattgtgttacagtgcgtgt

SEQ ID NO: 346936 - DNA, 341 bp, Zea mays
atccaattcatgtgtattggaaataaccgaacaaggccttaataaaacatctagcttgcaaaaaaaaaaaaaaaaaaaaaaaaaaaaaaaaaaaaaaaaaaaaaaaaaaaaaaaaaaaaaaaaaaaaaaaaaaaaaaaaaaaaaaaaaaaaaaaaaaaaaaaaaaaaaaaaaaaaaggggggggccgttttaaaggaccaaagttaacgtccgcgtgcttgcaaagaaaaagtttttttttggggccaccaaaattaaattcacgggccgcggtttaaaaacgggggaacgggaaaaaccctggggttaccaaactaaatcgcctggaaaaaaatcccctt

SEQ ID NO: 346937 - DNA, 132 bp, Zea mays
atccaattcatgtgtattgaaaatatccttacaaggccttaataaaacatatatcttgcagattataaaaaaaatttcaataccacaaaataaaaaaaaaaaaaaaaaataataaaaataaataattaaaaa

SEQ ID NO: 346938 - DNA, 326 bp, Zea mays
ccggtccggaattcccgggtcgacccacgccttccaagttctttgagtttgatgtcccgcacatatatcgtcattacaatgtcagatcaactgcatgatgaaaaatgtgtactttttgtttgttgaaatgtgctttccaattttcagtttcctcttcgtcatcacgatttgtggaatgaataggggtcgagtcttgttcaatgttacgtgcattggacaccaagttgaattgtagccaatgcttgaaatctgttgtcatgatgtgggtgggggacattggaaactctgtaaaatatttggtgtcatatatcaaattgttttgctct

SEQ ID NO: 346939 - DNA, 171 bp, Zea mays
cccgacccacgcgtgcggattaacacacatttcacggcgcacatttgtcttcaccgacacaccaatgatcatgggaggttattttagaagcaatctcattcacaaaggtcgccgcacgatcggctttcaccgctgactatcatgaaaaagacaccagttatatcattatca

SEQ ID NO: 346940 - DNA, 227 bp, Zea mays
tgcttttcgactataatttggagattgttccaatgtccgtgcaatcatctgaacatgtgactacttattgtgaaaaaaaaaaaaaaaaaaaaaaaaaaaaaaaaaaaaaaaaaaaaaaaaaaaaaaaaaaaaaaaaaaaaaaaaaaaaaaaaaaaaaaaaattgtgggcgggaaagaaaaaaaaaaaaaaaataaaataaaccggggcggccctttaaaagatttaa

SEQ ID NO: 346941 - DNA, 398 bp, Zea mays
cttgctgtgaattttgacacacctggtggagctggtgagttgcaggatggtcggagtgtggatgacagtggtgcgctagacaatgccggcagtgatgttttgcccgaggatttggatgatcggataggaccagacctttcgagtggaagcagtggcaggccatcaagatggaaagcactgatgggtgctttgatgttgaggagcttttctgtttccatatttcaaagacaaccgcgtggagcctgctctacaagtcacgagtcatgaaaattggatgacatggttattccttgagccctttaaattcttttatatttggattgttcaattaaattggtgctgttttatttacgtcttctggtgatcaaataaaggggaaatacatgttggatgtgtgc

SEQ ID NO: 346942 - DNA, 244 bp, Zea mays
  unsure (1)..(244): unsure at all n locations
cggaatcgggcgggaacgccaccacgcgtgcgaacgtcgtgggcgcaactacctgtggcattattcagtgaccccttccgacgaagatacccaatggcgtgtcgttagtagaaaaacgccctgcttgggatttctaccagtnntggagtnncatcaaaccagctananccatttgcacctttgaattgtttggggtgaaatgcccttgggagaaaagaggggtcaccaaagaattggggagtca

SEQ ID NO: 346943 - DNA, 152 bp, Zea mays
catggtttttttcatcgcctttctcaacgacatcacgggggggaccatatatcaagacagagtgcatccctttcccttgcccgtctgctggaacctgacagaaatcatttcaaaccgtatcgttcttgtaagctacctcgctctgatgactg

SEQ ID NO: 346944 - DNA, 327 bp, Zea mays
ggggttctctttagatctcaagaaggagttttttttcaagtcaccggacaaccacaaaggtgaggttgatattactaggagtggcaaatgcctaacctacttacacaggattgtgtagcatctgcaccttaaacgtgagtccagtgatgctacggatgatgactaagaattaactgaagaaccgaccttctgtttgtatctcgccaaacaaacatttccatacctgctctttagcgcctacaaacacttatggagactcttgacttaaaccagacaatcacaatgtttgttccatacttaacttttgaatgtttgcttgccgttttt

SEQ ID NO: 346945 - DNA, 132 bp, Zea mays
aaaaaagaccgaccacgcgtacctcaaaaccactaaacagcccgactttttttttttttctgccataaacacaataccggtgcttctatataaaatacccaaaccctctcacactcgtaccgacaccatact

SEQ ID NO: 346946 - DNA, 140 bp, Zea mays
cccgggtgcgacccacgcgtaacgataaatatgaatgggaccaaaccttcgatgcttttgtgcacatggtctgcattatattaaggagtggcatttgtactcgaactagaatcatatgcatgtctgcacttgttgcaccc

SEQ ID NO: 346947 - DNA, 240 bp, Zea mays
cggaccggaatacccgggtgcgacccacgcgtaacgatcgactagtggtagttaggctccgtcgttccttggttgtgctattaccatcaacagtgggttctgtttcttgctttgtgtatctagccatgtctaaagttgctggtagctgtaatgatgctataatgcgtgcttaactgctgacgaacctttttcctctaaaaaaaaaacataataaaagaaaataataggggtgcctacatt

SEQ ID NO: 346948 - DNA, 262 bp, Zea mays
ccggaccgagattcccggagtcgacccacgcgtacgtaaaaatcttttatatccggcgcttttttttatttaaaacaataaaacaaaaaatgggaaggtttaaaacaaataaaaaataaaaaaattaattaaaaacaaaaatatttctttactatttggcatgcacccttgggagcccgcagatgcgctccccaactttcttcccccgactcttaccatcttcaagttctttaacctcaacccctgcccgaacctttagaaa

SEQ ID NO: 346949 - DNA, 411 bp, Zea mays
gaataaccggggcgacccacgcgtacgttctgaccgttttcacccctacctaagtgactttctttacaatagacctcatataggacgggtggtgccaagtgtcattgcagcactttcacaaagttaatccattaattgttgtcagcttttgactctactcctttgagatacagtacggaagtgccctaccaagttgatactgcattttcaatgtgctgatctaggtggctacattgctagaagttctgccaaatcgcttgacaactgatgtgttggaacaacttcgtctaaataaacaagcattggttgagctgggatcaccaacatgtgacctcaagcagatgcttatctatctcctagatgatcctcatgaaatcagacgaatatgcataatggggagaaattgcacac

SEQ ID NO: 346950 - DNA, 224 bp, Zea mays
ccgggggggagtctgtcagactcaggtctctatctaccgatgtacatataccttacgaggaggaaagacattctctatctatcgatgtacatacatacatacataacttaatttcaaaaaaaaaatgttaaaaccaaaaaaaggaaaaaaaaggtgtttcttctatcaagggggtttttccccccgggaaaaaaaaactagtttatggttaatatttggggggg

SEQ ID NO: 346951 - DNA, 332 bp, Zea mays
cggttcggaattcccgggtgcgacccacgcgtacgctgacacgttgtcgagcgcgcgggcgaaacctgtcattcatcctgttaatatccggtcagaggtgttgcccaggaatacagcttggaagccaacaaaaatttgtgactgtggtgcttctactgacattggttgttatgcttgccttggccatccttatatgggttggtgcgatgagacaatcctatcgattcttctctactgaaaaggcgttatttggatgtattttcagcagtaattattgtactcggtggtgctctggcatgttacggtgcattgttattctcgaagatgagcat

SEQ ID NO: 346952 - DNA, 220 bp, Zea mays
  unsure (1)..(220): unsure at all n locations
cccggnntggganacccgggcgcgacccacagcgtacgcttgctccctctacatcgaccccgcttgtttcgtcttttagcgcatcaatctccggcagggggggctagccataatagagcccgtcatcaaatacagctgggtcgctctggagcgatggctgccctagcatcttttccgtacgcatcccatcgtcctccagaggtgcgtacgagacatctac

SEQ ID NO: 346953 - DNA, 368 bp, Zea mays
cccggacgcgacgccacgcgtaacgctcgcgatcctcaaaaagcgcgacgccgcttttttttgaggttctgaacgataacaactttgcgggggtgacatgggtactaccacgaggcaactcactgtgaacatggactcattacacatgtaaccaaaaacctttacatcatttatacgaaaggaatcaaagcgcgccttaacacgctaacttctgcctgtactaaaaacattgttatcgatactgaacacaaacggaaagctctgacgcttaagatgaacgtgaactcatctcacattacaaagcaattcaagccactgtgaataatagatcacatatacatacactcctaagacaatgctgcagtgat

SEQ ID NO: 346954 - DNA, 279 bp, Zea mays
ccggacccgacgccacacgtacgaccgtatacaagaaaacaaccgatctttttttattcattgcagtctatataaaaccgggggctttttcttgaattaccatattcaaattattaaaaaaacctaactcctggagtgagaataacgccattcattttatcaaattaaaaaaaaataaccttttacctattaaaaacaaaaaaaaacttaccacccattgaataaaaattaaaaaacactgacctctttcttaataaaaaaaccttacgttcgctattt

SEQ ID NO: 346955 - DNA, 359 bp, Zea mays
aatacccgggtgcgacccacgcgtacgcggacgcgtggtcaaagagcacctacttttttttttttctaaattatcagttctcactcggatggtcgccgaggtctgcaacccacaggatacttccgggcctgtgccgatcaaggacgtcgacgacggcagggttccagaacaaactcctaatgaggagatcggcgacctccttggcgggctgtcaagcaagaagcagtccatcctggagctgctcctgtaccacagcttgttgctgcacggagcactggatgccggtgaccataatgtttcagcgccgattgacgccgagcctcgacgacgtgatcctcgcgagctaccccaagtgcggc

SEQ ID NO: 346956 - DNA, 205 bp, Zea mays
gacccacgcgtaacgctcagatccaacgaaaaacgaacgccattttttttatatgtcatcacaggtgacaacctctcagggtgtcctattataaaaagcatgatgcacacactctaagttctattatgtagaaaagcgggaacaatatcctacatcatgttatccctccataatactttcctataggtcaacaaccaacatcttt

SEQ ID NO: 346957 - DNA, 331 bp, Zea mays
acgacccacgcgtacgcaccaaacctctaaacaaaccaaccaattttttttattgcattgtacaattacactacgggagggtgtttattatgcacacagacattctcatcaccatatacatttttatacatgctcatcaccataccaatcacgctaatctactacatacaactcggcctttgacctacccgcgcgtgcacgcactactgtaactgtaaaaaccactgctgacactaaccgttcacttgacgcaagtgaagacactgtctaataccacatttgctttccgcctgataaaaaaatggtttgtatttataacaatctctctcta

SEQ ID NO: 346958 - DNA, 81 bp, Zea mays
ctcttcggcggggtgggttgccacaagaacgagtctcttgataatgccttctccttctacggcgagagcctcgaatccaag

SEQ ID NO: 346959 - DNA, 316 bp, Zea mays
gaccggaaaaaacggagcgacccacgcgtacgccggtatgcaggaaagcgaaataccacttttttttttcagcatgaattctcatagttcgtgacggaacttatgtttgatctatatcacgaattccaacaattaacgaaagaaatctgctaccaaaaatgatgctatttacaaacaacatccattttcgtaacagatacccttctttgattgttgaaaaaccagacattgtaaaaaaccaactacgatctatccttttataatgcaaaaaaaaacaacaaaaaaggacttccgttttatacgaaccaaacttacc

SEQ ID NO: 346960 - DNA, 253 bp, Zea mays
ccggggcgacccacgcgtacggtaggaacaaatggaacttacgcgttttatgaggtgcaaggaagtttgtgaagaccatgctactgacgagatggcatataacggtggcaggtatgcttccccaccgggccaatgtacatttgttggagacataagcataagcggaaggcttgatgaagatggcaagaatcaatgtgtgtgttcaaaataggaggcacatgctggactggactaggaaataaccaatgaaacg

SEQ ID NO: 346961 - DNA, 317 bp, Zea mays
cccgggcgcgacgcgagcgtacgctcggatcgcctagaccggacggcctctttttgcgcggcggcggcagcggctaccatcggcaggcgttacgctctaccatgaccttccacctgaacacacagagctacccgaccatgccggagtcgtcgtcctaggactcgacgaccgaacaagacctcgtgccgagcccttcttccgtggacttggttgtcatggctctgatcccgacactcgtgctgaatgacatcagggacctctgcgactgaccccaaatcttgctaggtacgtcccggaccgggagctccatcaggggg

SEQ ID NO: 346962 - DNA, 325 bp, Zea mays
ggcgcgacccaagcgtacgcttggatcctctcgccctcgcaagccacttcatcaagaagccggactgggcgccaacgagagacgctccctctttccggtggaccggaacccgccacggcttatcgcccttaacaccatggcacggcggttccacatccccgaccccgttccacgggggcgggtgttgccaccctcctactgcatgctattgaggtacgctgcctttacgctgccacgggtggtgccgatgaagttgctcttcgacgatgacctgctccggaaccggctcgcaccgcgggtctacatccacatccggtgccagctc

SEQ ID NO: 346963 - DNA, 262 bp, Zea mays
gacgcatacgtaacggtcggatacacaaaaaccacccgctttttttctttaccattactcccacctctgggtcggtcccatttgaaccaaaacccagaccaaaacaccacaattaccaccaccttcaccactcatacagcgggagaaagagagccgagaggcgagccgtattgtcaaaccgggcgagacgcattgctgcaaccgcccaccgcgcacacgcattggatgcacacgatcgtcaccatacgagcgagcccagcag

SEQ ID NO: 346964 - DNA, 198 bp, Zea mays
  unsure (1)..(198): unsure at all n locations
ggaaaaaggaaggacccanagcgaagaacggatctacaccaatttccacaaggggtgtttttttatcaaaaatcaatacgccgtgggggggtgtgatgttctgagcaaaacaccaagggttcccgcaaaagacacgaagcactagtacaagtgattcgaggcatgtttctaaattcggaatactaacacttggtttga

SEQ ID NO: 346965 - DNA, 233 bp, Zea mays
cgtccgaatcccgggcgcccatcgcgtccgcggcgcgttgttaccgtacaacatgtgtttcgtcccgtggagcgagcgagtgactctcaagtgtgttttcttgcatggtgattcgtcatactgttcctgcaaaactggatgacccttgtccatgcagacaaactctctcgtgagacacctagccgacaaaggaaaaataacatgggcggccgttatacacgatccaagcttac

SEQ ID NO: 346966 - DNA, 226 bp, Zea mays
gcgacccacgcgtaacgcgggacgcgtgggattagcatgcaccaaactttctgtttcgcgcccgatgtgggggagggtgcatgatgcgctgcaagccaggacagagacggactgttcccccgcactcatccactctgcttcccacacggacatgcggcatcatactcacctgggacggcggcaggctggtggcttgcgtgggcgggacggaacgtgcggtcgaatg

SEQ ID NO: 346967 - DNA, 369 bp, Zea mays
gaatacccgggtgcgacccacgcgtaacgccacgacgtccggtaaacagcctcgcggcaattttacctgcttgtattggcatgatgatacgtcggttacaagagtgcagtattcgatccgttagttcaagttctgcgtttggggtgttagatccaccagaattagatttgttcggcaagctacgctcgaatacgtttgctagcttctaatgaagttgacacctcacggcttgtttgtgttcggttgtgtctgcattgaaatggattgaatcccttactaatcaaaattgattagaaggggttttagccctctttctcttgcaactgaacaaggcttaaaggtgttgtggaatatgaaattttttgatct

SEQ ID NO: 346968 - DNA, 192 bp, Zea mays
ggacagcgttgtaaagacaaacgcccttttttttttttaaaaaaaaaaaaaaaaaaaaaaaggggggtttttaaaaaaaaaaaataaaaaaaaaacgggggcgtcgttctttataacccaagcttacgtccccctgcatacaacctaatagctcttttataataacacctaaatttaataaattgcccgttt

SEQ ID NO: 346969 - DNA, 225 bp, Zea mays
gcgacccacgcgtacgctatattttgctcttttattagtttatagttatttttgtatgcatattttcctttttactgtgtggtggtaaccatcaacagaaactgatggttgagctacgacttatgtaagaagtaagatgttttgtgtaaccctttatgtttagtaatttcgtctcaacaaaaaaaaaaaaaaaaaaaaaaaaaaataaaaacaaattaaaaataa

SEQ ID NO: 346970 - DNA, 326 bp, Zea mays
ccggccggaaaacccggggcgacccacgcgtacgaccaagtggtctacatctgccaacacaaatttatttttatcccacgtactagctttgtggggctgtggattgtgttaaacgccagtggccacaaccttcttataggttaaagaaactcttctatgcttattattgaggattgtcattgaactaacatatatttcaaacttataaactatttataacatttcaaagattatttctttgaatcaattttgtaacacactatcgataaatataatgtaaatttgctgtaacctataactatgtgtaataaagaaattcctctgct

SEQ ID NO: 346971 - DNA, 125 bp, Zea mays
ggccgacccacagcgtacggttgtttcctctatatcaatccaccttttttttttttttcctacatcaacagttatctggaagaaccatttctacataggcgcatccacccatattctccttaact

SEQ ID NO: 346972 - DNA, 279 bp, Zea mays
cggaataacgggggcgacccacgcgtacgtgacagatcaagcttttatcaatgtccatgggacatgtgaccaaaatggtttgcaacacaatgatatttatataaaaaagggaagtacaattgtacaaacaggcatatgctaacaacatatcatgtacatttgtaattagattcggtcatatcatgtacatagagggtaagattagttgtatatactgaataaagtaggcacaaaccattgatacgatgtaaaataatggaaataaacggttgcataaaa

SEQ ID NO: 346973 - DNA, 354 bp, Zea mays
gaaggcccggatcgacccacgcgtacgctgacgcgtggtgagacgacagacattatttacggaacgtcgtcggggggaggggcgttcgctgcatacagatgatccaaggcaaccgtcgactgcgaaaccatacgcaccgccgaacttgtctccccaagacctacccatcgactatgcacgcttactcgccgacgaattcggcgtccttagcgtaatgctccgctacaaagtgtgctcgatgatcgcaatcatcttatgcgctcagtcgctggcaaacatgaataactttgagaacgatctgaaacagctttgtatggccttcatgtttgctgctatggatctggtgacaaacta

SEQ ID NO: 346974 - DNA, 283 bp, Zea mays
  unsure (1)..(283): unsure at all n locations
cggaanncccgggccgacccacgcgtacggtcgcaccttatagatcactacaccgtgtttttcttggtcatacacgggcttgtggcgctggaggtcttgaagaagggacctacgggtccctgtgacaggccgatcgccgggatctggcttaaccaggtaagcttccaagcctaacatctcggcggctgaactcctgttcctaccgatgtgcctgcactcggtagtgtacttatccaccggaatctgagcgccatgatccttactctcaaccgcctaatcacgc

SEQ ID NO: 346975 - DNA, 487 bp, Zea mays
  unsure (1)..(487): unsure at all n locations
cggaannnnccgggncggacccacgcgtnccgcntggtggtaccgcctatcanntgcagcaacctgctccaaggggnaaaaggcnagacaaagcgccacgcaatnnagagagtcggcttgagggggatgagcgtggtatatcatagcgctcgacacgtgatgcggtccccggtgaaaaaatcccgacgatccctgtttatgaaattcgtttggtgaaatccaactatnngcatggcgccttccctttccagaatattccnntgctccccctgttctaatgcnnctgtgcctggtcngccggtccgcttggaaccgtttattctccnngcaccgccggaagttgccatgcattatgttgaagggatcnnagggcgcgccacctttcttttgaagcccagtggaaggtccacaatcctangaaaagcaaggaaggggcaagcggcgggcgggcggtccctccaaatgcgtggtcccgtcccccagtctt

SEQ ID NO: 346976 - DNA, 384 bp, Zea mays
cactcctcgccatcacataaaaccagtgcaagcagaagcagcgcaatggcgagcagcaccatggccctctcctccacagccttcgccggcaaggcagtgaacgtgccgtcgtctctcttcggcgaggcccgcgtgacgatgcgcaagacggcggcgaaggcaaagccggcggcgagctccggcagcccgtggtacggccccgaccgcgtgctctacctgggcccgctgtccggcgcgcccccgagctacctgacgggcgagttcccgggcgactacggctgggacaccgcggggctgtcggcggacccggagacgttcgccaagaaccgggagctggaggtcatccactcccgctgggccatgctgggcgcgttgggctgcgtg

SEQ ID NO: 346977 - DNA, 393 bp, Zea mays
aaaaaaaaaaaaaaaaaaaaaattataaatttaaaaaaaaaaaaaaaaaaaaaaaaaaaaaaaaaaaaaaaaaaaaaaaaaaaaaaaaaaaaaaaaaaaaaaaaaaaaaaaaaaaaaaaaaaaaaaaaaaaaaaaaaaaggggggggccgtttttgagaatcaatttttttttccccttttttgcaagtttttttttttttttttgggtacctaaatttaatttaatgggccggttttttaaaacttggtaattggaaaaaccttggtttaacaaaattaattgtttttaaaaaaatttcctttttctcaagttgggtaatatttaaaaaggcccatattttatttttttccaaaaatttgtccaccttaaatggcaattggaaccccctttt

SEQ ID NO: 346978 - DNA, 467 bp, Zea mays
aaaaaaaaatataaaaaaaaaaattaaaatttaaaaaaaaaaaaaaataataagggataggggtgaatattaataaataaataataataaaaaatataataatatagggtacatagtttttaattgtctgtttgttttactttctttttttttttttaaacatctgtttgttattctcctatatttatttgcttgcttaggttctgtttttccagctattcttgtttttttaattaactctttttttgtttgttttttcttgtagttatttcatcctttttgtttttctgttattcttatttgtttttcttctttttttattgttgttttcattattatgttttttttttccgtctctttttgcttgtttatttagttgaactcttaattgttcttatttttttttgtttttttctatttttattttggttttttttgttttttttttttaatatgattgttttttt

SEQ ID NO: 346979 - DNA, 350 bp, Zea mays
  unsure (1)..(350): unsure at all n locations
ggaccggaanacccgggtcgacccacgcgtacgctcgcttcgtggctatatgcaagtgttgttcggagtactaaactcatacgtggtaaaagatgaataaagacttaaacatttctttaacaaaaaaaaaaaaaaaaaaaaaaaaaaaaaaaaaaaaaaaaaaaaaaaaaaaaaaaaaaaaaaaaaaaaaaaaaaaaaaaaaaaaaaaaaataaaaaaaaaaaaaaaaaaaaaaaaaaaaaaaaaaaagggggggcctttttaaaatatcaaatttaaataacgcgggcatggaaggtaaaagtttttttttggggcccccaaaattaaatccactggccgtgttttaaa

SEQ ID NO: 346980 - DNA, 428 bp, Zea mays
  unsure (1)..(428): unsure at all n locations
gtcgagcctaacctttatgtttacttgattctgtagtgcgtgcgtgtgtctctaataaatcctaaacttcgcgtgaaattcgactccgcctgatggaatattgggtactcagcagctatcgtatcgcgttctctatctcatttatatttgaaactttataaatctactactttatatatgacctgctacgaacagttttacaatcatccgcggaccaaattcaaccgtggtagtcacatctctcatgagtcatatcctccaactattcctccttactccttatgtatattttctaatatattttactctatctactaaaagattcttctctacatacgcactacactataactcagttaattaatatttattattatttttcttgaaattttcaaaaatataccaatgttggngtatcataatacaca

SEQ ID NO: 346981 - DNA, 408 bp, Zea mays
  unsure (1)..(408): unsure at all n locations
cggaannnnccgggncgacccacgcgtnccgctnncatttgctgcacttctcaacgtttctagcttacgactatccatcgacanccgnnagttaactgtgtgcatgaagtttctcgataggctttcgttttanttcccccgtctcggggccganngttttgttacgtctcggtaacacaaactcgggaannactctcctannacttaattgcannatcccttgtgcctttcctcaacttgactcggagcctgtgacantttgctnngacagccaaaaaaaaactccggcaaaaaagggtgccctggtgatacctgtacgtattnttccacgcgcgacttggcatttaaatcaatgcctagtgaaaatgtaataatcccgccccgttcccgttaagtcttacccttatg

SEQ ID NO: 346982 - DNA, 172 bp, Zea mays
gatttggtactttcgacttgagtggttattaacaaaaggggagcctggtatttgggtggcaggatggcttttttggggttattaatgaaccaaaacgggggccccctgcttccaaacccaaggttccagaccccggggacttaagggaaggaaaaaggcaaaaaacctggtc

SEQ ID NO: 346983 - DNA, 72 bp, Zea mays
gtggtatgggagggtatgcgcgagaaagagattgcaagttcgaatcttaatatttataaaacatataattta

SEQ ID NO: 346984 - DNA, 453 bp, Zea mays
aaataaaaaaaaaaatttataaaaaggctgataatttttttgaaaaaaaaaaaaaaaaacacgggcatgggatagaaattaaaaaattctttagggtcccctaaatgggaggccccttgtctgcttccccctacatccaacctgttaaactctctttttgggcccccttaattcaacttactgcccattcttttacacgccagttgacgtaaaaacccctgggaaacccccgtttatccctcctaaaattaattccctttaaatcggctctcggaattcccctgtggcccccccattaccccctcctatacatttgtccacctttattggttctttggtcgcgccttgtacccccccattaatcccccataaatcgtgtgtttccttttagttaccccttttccttcccttccttttactctcctttttattcttttttttttttctttttcc

SEQ ID NO: 346985 - DNA, 364 bp, Zea mays
  unsure (1)..(364): unsure at all n locations
cgatacattgcatatctcctgtgttttttttggcgatgtaaagttaattgactctgctggtctttggcagctatttcttttgagagccgctggatttttgctgccatgctatattatggcttgggctattagtatcatgcagcgtcaaagacaaagacaggttggtggctcggtgccaatggaaatgtttctctttcatgtgtatactgtattgacttttgacggaaaagaattccacgaaactatttatacctagcatggattgaatatatatatcaacggagttaagcaaaaaaaaaaaaaacanaanaaaaaaaaaaaaaaaaaaaaaaaaaaaaaaaaaaaaaaaaaaaaaaggggcggc

SEQ ID NO: 346986 - DNA, 218 bp, Zea mays
cttcgccactgtagcagtccagggaatggccattttactcgtcataccctgattaccaagggaaatacgcaaacaatgtagaccagcccataggccactgggagtgcgagaatgttcaccaacatcatgcgagctcagaatttgcaatacatatgtacccattgtaaaatgcatttagcacgagcaaattaccagctacactgattcttaagatccct

SEQ ID NO: 346987 - DNA, 259 bp, Zea mays
  unsure (1)..(259): unsure at all n locations
gttggacttttctgatgtgtgtgtactatgtccagagtgtattgaataaactttggtgaagagtggttaaaggactattgatcggtgctaaggatgagaagacaacaatgttctgntgtatcttgtgcattaaccgtatatgtggcgtgaagatgtaatacgttctatatcttnagtgtttatatttcatacaaaaaatgtgcattgggattatttgagctgaatatggacccatttaaactcagattcctactcttgc

SEQ ID NO: 346988 - DNA, 323 bp, Zea mays
  unsure (1)..(323): unsure at all n locations
gtttggcgttccggcacatgccaccaaatgtgtgcacataccataccgtggattcctggagtcatctgctgatcctacaccgtgaggtcaattatgtaagtgtgacttagaaaaaaaatgtagatagatcctcattctggaaaaagccgggtatttgattgtaattcaatactgtgcttgatatatcacaatcagctcgcattttgtaattcaatactggacgaatataaattcaatcctttgttttactgctcccnttgaaatatgataaaaaaaaaaaatattaaaatgtaataatggtaatttgatttaaggggggggtt

SEQ ID NO: 346989 - DNA, 379 bp, Zea mays
ccagattaggatttgtagtctgctgcatctccatgaattgttcaaagcggccggctggataatgttgtagctggtccaggaatgcagctgtagagagagagagaggagtggaggcagaagagtgactgattatgcattcttttgctgtggtgttagtagctgtgtacccgtgacacatgtcgtctttcttggaacggagaaagatgcaggtgaagtgtgcattgtgcccttttgttctactgctagtggtaaggcaggagccttgcagttgtcggggggagaattgtctgtaagattgtaactgatgagaacagtgccttcttttctgaaggaaaatcccgtgtggaatcgcttggaattagtcttggctcgtgataac

SEQ ID NO: 346990 - DNA, 281 bp, Zea mays
acccgggtcgacccacgcgtaacgctgacacgttgtaaaaaaaaaaaaattttttttaaaaaaaaaaaaaaaaaaaagggttggggatatttataaaaaaaaaaattaaataataaaaaataaaaaataataaaatattctataatgtaaaataaattgaatttactttaaagtgtttttacaataatatgtcttgtaaaaccctttaaattaactaaattaatcgacttaaataaaattccattttctccatttaaaaaaatagcgaaaaaaaaaacatt

SEQ ID NO: 346991 - DNA, 318 bp, Zea mays
gtttggcgttccggcacatgccaccaaatgtgtgcacataccataccgtggattcctggagtcatctgctgatcctacaccgtgaggtcaattatgtaagtgtgacttagaaaaaaaatgtagatagatcctcattctggaaaaagccgggtatttgattgtaattcaatactgtgcttgatatatcacaatcagctcgcattttgtaattcaatactggacgaatataaattcaatcctttgttttacaaaaaaaaaaaaaaaaaaaaaaaaaaaaaaaataaaaaataaaaaaaaaaaataatattttaaaggggg

SEQ ID NO: 346992 - DNA, 372 bp, Zea mays
  unsure (1)..(372): unsure at all n locations
ccgcccgaancccggtcgccacgcgtcggccggcacgcaccacaaataaacggagcccggctggcatccattattcgtgcagtagtcgcagctgcggacgactgaaccaccgacagacaacatggccgcctccgctcaccgtctccggcctcgccggcgcctccctggccagccgcccggcgttcttaccagcttacgcgggcagccgggtgtcggcgaggaaccccctgatgagcaggaacctggagaggaatggcaggatcacctgcatgacgtttccccgggactggctgcggagggacctgagcgtcatcggcttcgggctcatcggctggatggggccgtccagcgtcccggccatcaacggcaaca

SEQ ID NO: 346993 - DNA, 455 bp, Zea mays
  unsure (1)..(455): unsure at all n locations
ggaataacccgggctcgacccacgccgtccgcggaccgcgtgggctcctagctggactattcttatctccgatcaagtanctgaatttgtgggaacatcgtgatccatcgttttaaaagttgtgacagtataatcttgagtgctattccgaacacatttttagccggtgaatgtattgtttgtttaaaaaaaaaaaaaaaaaaaaaaaaaaaaaaaaaaaaaaaaaaaaaaaaaaaaaaaaaaaaaaaaaaaaaaaaaaaaaccccaaaaaaaaaaaaataaaataaaaaaaaaaataaaaaaaaaaaaaaatatggggggggcctttttaaaggatcaaaattttttttcccgttgttggaagattaaatttttttttaggggccaccaaaattaaaataactggcccgttttttaaaaactgggtaattgggaaaacctctgggttttcccaa

SEQ ID NO: 346994 - DNA, 357 bp, Zea mays
cgaggtacagggagaacgggtgaatgtctgacgttacgtattataaagtgatgtgcaatgatgactacaaactaaaaatatcagtggatgaccatagcaggaagcatcaaaggtgtgacagattgctacccatttgttcccttggttcgtggcacaatgcaaatgcggcatcagtacaacagcgtacgcaatccttcgcacgcgcgcggtgcagcatggttttacgttttacacgctgcctttagtgaaaactgtatggagctgtcagtacttgtacaggtagtgaagaaccaaggcatgaagtcaaaacctgcatgcacagctaccagaaacagaagcttttcggcactttgagca

SEQ ID NO: 346995 - DNA, 344 bp, Zea mays
  unsure (1)..(344): unsure at all n locations
ggctggcttctcctccccctcttaccaagtcctcctcgggttagggttccttagggttttgtggaggggcgatggcggcggctgatgtggagtaccgttgcttcgtcggcgggcttgcctgggccaccagcaacgagtcgctggagaatgccttcgcctcctacggcgagatcctcgactccaaggtcatcaccgaccgggagacggggaggtctcgcggcttcggcttcgttaccttctcctccgagaactccatgctcgacgctatcgagaacatgaacggcaaggagctcgacggccgtaacatcaccgttaaccaggcccantcccgtggcggtggcggt

SEQ ID NO: 346996 - DNA, 233 bp, Zea mays
gtattatatacatacatgtatactccagcgagcgattcattattgcattgcattgcatggtcgtcagtgcggcgcacccaccgacggctgttgctgacaagagttcatttcattgccggcctttttgtgattcgattgttaattatactgctacgatgtacttactacttgaattattagtgtatttgctgtcactgttgatcatccaataaatttatcattattattcttcc

SEQ ID NO: 346997 - DNA, 155 bp, Zea mays
gacgaggaggagaacgcaaccatcccagttctcttggtacggactggggtcaagaacggggtgcaatcggccagggcatccaggaacaacttcatggtggttccaacgggccacccatcgctcaaagagcatgcagaatctctgaaacttgacaa

SEQ ID NO: 346998 - DNA, 369 bp, Zea mays
aactgcatggtgagcgactacagtgtcgcggtcctggcagcggcgatgcagctcaagcggcgtgtcctctcgctgtctggctgtatgaaggtgacacagaagagcgttcctttcttgggcagcatgtcttcatccttggaggcgctgaatctccagttcaacttcatcggtaaccacaacatcgcttccttggagaagcagctctggcggagcgacatccttgcttagagggaacaagggcgattggttgctggagactctgggtcagcaaccttttttctccagatgcagatacacgaccgtaggggtagcatatacttaagtctaagcctcagtagttgagtctggtttctggctcgagtttgtgtc

SEQ ID NO: 346999 - DNA, 388 bp, Zea mays
cggacgcgtgggtggccgcgctgttcttggcgtaccgccgcgcggagttttcgccgatggacaacacctacgcccaagctttcggggtggatcctgagctggctcttgctgccgagcagaaagccgcggcagagagagctcaacgaggtatcaacaacactcgcatgctcaattctagctgtactgttgttcttgttactgtgtacttgaaattgatgggtaaacaatgttcctactgctttatagatcaagcaacaattattttgatgtgaataacggagtggatctgattcaaataatttctatttcacttctgtctaactgttggttgcattttttttatcaacgaaagtgattattggatttgggatgatattcatgcagaaac

SEQ ID NO: 347000 - DNA, 79 bp, Zea mays
aaaaaaaaaaaaaaaaaaaaaaaaaaaaattaaaaaaaaaaaaaaaaaggaaaaaaaaaaagaaaaattaaaaaaaaaa

SEQ ID NO: 347001 - DNA, 265 bp, Zea mays
  unsure (1)..(265): unsure at all n locations
ggaaaattatctctagcatttattgtagagtaatacaaagagtaatcttggcagaagatgggtacgttgttgcccagtttccctttgtatttgtcagtaatccatgatttcatgacaacgatgaattgctggctgaaatcggctccacctttaagccaaaatcctgaaactgctaacgcatgcttgcaagttcctttgtatcctttcttctgagcataccnnanaataaaaaatataaaaaattaaaaaaataataatacccttt

SEQ ID NO: 347002 - DNA, 270 bp, Zea mays
gcgcggcggaatccggcgcccactcgtacctaaggggttcgtctttggtggcctctgtaatcgcgggttatctcaaaggtctgaacggatgatggtgcctgacagacccggtgggccctctgtaaaatcgaatgtgacatggggtcactatgcttggattccttctgtcttattgtttctctaatacattttgaaagctacgttggtcttttgggcaggggcatggttgctttatacatattggctgactgtggatggctggcaacgcct

SEQ ID NO: 347003 - DNA, 289 bp, Zea mays
gacccacgcgtccggaaaaatcgttctggagagctttagtgctgacagctgacgtggtggtttctctgactgcgtataggtttctgggcatcaaagaaaggcatggaatttgagtacctgaggcctatcctgtcttcctcgcttactatcctcatcctaacttagcttcataagagatttcttcccactgggacccgtgtcaagtgggcttgttcgatagtctaagggctctggtcttcttatgctttattctgtacagacaccaagaacctgattcaagcgcctcacc

SEQ ID NO: 347004 - DNA, 187 bp, Zea mays
gcacttgcctattcaatagaattcacctttaatcacacatgctgcatggtccttttacgggaaaattatctattcaagctttatccataccactgttggcatatttaatgcatccactttgactactctaatatatcatactcccatcttactatttacttccaaatataactcctattgttaatcc

SEQ ID NO: 347005 - DNA, 327 bp, Zea mays
gccttttagtagtaccagttgaatttgatagttacgccgatcgagatcagtaaaaaaatagggctgggaaaaaaaaaaaaaaaaaaaaaaaaaaaaaaaaaaaaaaaaaaaaaaaaaaaaaaaaaaaaaaaaaaaaaaaaaaaaaaaaaaaaaaaaaaaaaaaaaaaaaaaaaaagaaaaaaaataagaaaaaaaaaaaaaaaaaaaatattaataaagggggggggggccctttaaaaggaccaaagtttaataccggggggatgggggaaaaaaagttttttttttggggcccccaaaattaatatctggggggggggggtttta

SEQ ID NO: 347006 - DNA, 208 bp, Zea mays
ataaaaaaaaaaaattttttttgattagttttggtttttaatatttattattgagtataaaaaaataaattaattttttttggtgtatgggtttggattttttttttttaatattaaaatttaataatttgaaattaaaaagggggggggggttaattaaataaaaatatttaattaaggggttatatgattattttttttttttttt

SEQ ID NO: 347007 - DNA, 221 bp, Zea mays
  unsure (1)..(221): unsure at all n locations
cggaannncagggtcagacccacgcgtccggcgggtgatcctgtcaagcgatccaaccttaattctcaaaagtgcgttcagtttgcccgggtagggacgggtttcatgaaaaaaaaaataaaaagcactgggtgccttatttcctgaattttcgtgtaaaaatgtactccctgcgtcccaaaacagttgacgttataatatttatagttaaacttgtagct

SEQ ID NO: 347008 - DNA, 354 bp, Zea mays
ataccagtgtatgttttgtaccatacacagcatgtcaatgtaaggatagtagaaaagccactttaggtccctccctggctccctccccttgcaaaccaaacacctacattccttgtgtgcctagttagatatgttgtttgccatatagcctttcccttagtaaattattgttgtctactgtgattaagcctcctaattgtacccgccatgtggcccgtgctgccagaatcaagaagttttgactgtaccttctgtatgtgtaaatgcaatggggaaaaaatgatgaaaaaaaaaaaaaaaatatttaaaaacaatttataaaaaagattaaaaatttatataaattttaataaa

SEQ ID NO: 347009 - DNA, 353 bp, Zea mays
gcctttagtagtaccagtagaatttgatagttacgccgatcgagatcagtaaaaaaataatgactgagaaaaaaaaaaaaaaaaaaaaaaaaaaaaaaaaaaaaaaaaaaaaaaaaaaaaaaaaaaaaaaaaaaaaaaaaaaaaaaaaaaaaaaaaaaaaaaaaaaaaaaaaaaaaaaaaaaaaaaaaaaaaaaaaaaaaaaaaaaaaaaaaaaaaaaaagggggggggggcctttaagggtccaaaaaaaatgacgggggggagagaagttttaattttttttagggggcccccaaataaaaataccgggggggggggtaaaaaacgggggaggggggaaaaaaccgggggg

SEQ ID NO: 347010 - DNA, 51 bp, Zea mays
gcctcccgtcctaccactccaccttgattttctactcgacctccatgcagc

SEQ ID NO: 347011 - DNA, 343 bp, Zea mays
atctgactgcaagctcatggcttcctgctcggcggataccacggttgcgctgagggacgtctatcccccaaaaccccaaagcaaagcggacatcacagaaacagacgaggcctcctgctagctcatgtagtttgggccttcctgataccttctggcagaattttggagcttccgtgcaatgaaaatctgaacttgtcgcaacagtgcaagcgatttattctttttcgtcaaagaaaagagtaagttatgatgtgccttctacagagaagcgcaaacgtatgcatgtaactgttgttaggaacggttctcttgatttctttatttttcattgaaattctacccg

SEQ ID NO: 347012 - DNA, 337 bp, Zea mays
  unsure (1)..(337): unsure at all n locations
gaagncccgggccgacccacgcgtccaacctatctgaaagcatgtggctctccagtgaggttattcccatgattcactaagggtcgattatgggaacaaacccctctgctcccctagacctcattgtaccagagaatgccttctgctatcttacataaattgggccttgctgataccatctggcataatttcgcaccttacgtgcaatgaaattatcaacttgtagtatcagacccttctacagacactctttctccccatcctagacttattaatgacgttccttttacccagaagggcaaaccttttcatgatactgatctgaaccactggtctt

SEQ ID NO: 347013 - DNA, 92 bp, Zea mays
tttttactaaagagtaaagatagggtttaattgttcttaaaagttctagggaaagaacatatgataacatggttacctcaccaatctatacc

SEQ ID NO: 347014 - DNA, 286 bp, Zea mays
gcggtggccggccgcggaggcgtcgacgaagcatggggaatgcggggcgctggctgcggagcttcctgtcgggcaagaaggacaggcatgcggcgcctcccaaagacaagcggtggatcttcaagcgccccccgccggcggcgcaagaagggacggcggcggaccagcaccaccatgggcctccgctcggtctgccggcgccgggcgtctacgagctcgacttcgaccaaaagaagcacgccgtgcctcgtctatggcgccgccgccgtcaggaaccatgccaccc

SEQ ID NO: 347015 - DNA, 259 bp, Zea mays
gtccaagccatcgtcatcgtgaagggccttttctataaccttgctgaccacattgtcgagcacgttatcaacaacgcttgtgtcctactccaccaacttcttccactgcaagttaagtaggctccttctttgacctttacgtgtccctatgcatgataacgctcactaattattatttagtactcatcatctaaactattgctcatatctggttggatataaattttttctacaatctttcttttttttttttcacaaa

SEQ ID NO: 347016 - DNA, 345 bp, Zea mays
gcggacccggcccggatttccagggtggacccagccttccgaatttttctcacctctcgtttttctacaccccgatctgatttgggtctggctctcacgtgatccgcgtttgattttggggatctctgtcccgacaagacttatgttgtgggggggcattttttcgattcgttcttggtgggaagcgttttgttttaccggccaggcaatccgtcgatttcgcgagtttgttccaatttgctgcgcgagggttgtcatccggagttgctttccatgtacctggattttacgttcctgtgtcattgggatgttctccctttaactagagtagacatattggggggg

SEQ ID NO: 347017 - DNA, 218 bp, Zea mays
gaattcccaggtcgacccacgcgttcgtagttccggaaagcagctaccaaaaaagcacctcacagctatggaagttttttgattgggtgcatttacaaaactcggagctactttagtcacctatccattgctagtcgtgaagtcatagttgcaggcaaaacaaaaaattggcagctatgtgatgtccacatacacaggttcaataaattccataataa

SEQ ID NO: 347018 - DNA, 105 bp, Zea mays
ttcaagtccaagcagctttagcgccaattctctaatctgctcgacgacggccactcactggtatttatatacaaaacccttaactacaacttactcgcacttctt

SEQ ID NO: 347019 - DNA, 224 bp, Zea mays
ggagaacaacgaaaccaaacccatgttttatcaacaacaataataataatgctgttaaaccagcaaacactggattagaccctaacagctgtcgttgttaaaccagccttcactggagaagggtcacctagctcccggaactggcggcgccacttccacgcccggagccatgccgcccaagcttgacccgtcgcaggtgggggaggtgttcgtccgtgtgaccg

SEQ ID NO: 347020 - DNA, 235 bp, Zea mays
gagctctgatacaatgcatgggagagttccaaagctcgagaggagtagtagcagcgtcgcataggtcattaggtgaaacggttgctgtttcctccacatagcagtttatgctacagagatgtaacagaaacaagtcaggttttgcccgatggtctatcagtctatgcaaccccgactgcctacgtactcccagaacagtttcctttacatctcatgaaaactcgaatttgtctat

SEQ ID NO: 347021 - DNA, 412 bp, Zea mays
ctaaaggctcagagacctggtgaaactgcatgcactggactacttcacaatgctggggcgcatcactttgacgactgtgcccgcttcatggcctaccaccttacagagtacaggcggtactgtaacatcaataacatattactgacgctgaacttgcagcacgccatgaacaccctactaatgccaccaaacactcaatctagcttacatgatttaatagaccattacatgtacaacgacacagctcctcctctaaacgtcttctacacatatttctagtatcattatatcaaccaaattgatcaacaacaatatctgaagatgttagagccgacaaattttatccatgaattcttgacctgaatttcaatttccccaatgtaaaacatagtgttaaatttactgtcaattt

SEQ ID NO: 347022 - DNA, 442 bp, Zea mays
gtcaagaatgccggtggtgccatggctgcaaattcagcctagcaagttcatctatgcgcgggaacgatgacactactagcttggtatggattcagtcgattggattgtaggactccaaagcactgcattggtgatggtccctgcaaggtactgccggagttatagggaggctctgctcattttgcctgtgggccggaagcaagccctcccttttgtgctggtccagcactgccaactttttctgtcgtggtggtcgcctggtctggtcggtcggtcgtaggaatcattagcccttccaaagctgcacaaagctgaatcacggtgacagcttctgcagcatgcacggggcaaaagaaaaaagatagccccagtggagatgtggatgtttttttttcttgtctgattgaatcttttgattaactttggatttgtttgtgcgctg

SEQ ID NO: 347023 - DNA, 391 bp, Zea mays
tgtatttgtattaatgtgttggaacacgtatatgtagttgcaacttcttttcaaaaaaaaggggggaaaaaaaaaaaaaaaaaaaaaaaaaaaaaaaaaaaaaaaaaaaaaaaaaaaaaaaaaaaaaaaaaaagggagaaaaaaaaaaaaaaaaaaaaaaaaaaaaaaaaaaaaaaacaaaaaaaaaaaaaaataaagggggggggcctttttaaaggaccaaggtttacttccccgtccttccagccttaaaatttttttttggggccccaaaaattaaattagggggccgtgttttaaaacggcgggggcgggaaaaccctgggggttcccaaatttattgctttggaacaaattccctttttggacggggggtgtaaaaccaaaaggg

SEQ ID NO: 347024 - DNA, 207 bp, Zea mays
cgacccacgcgtactctcttcttcgccacccaccgtggccttctgttcaagtacctgtaagggccacaccagtgcgtcattattttaaatatacgaccgacctaccgtttacatctctaataactcctgccaaatctcccgttcatgtgtattgtgcgctagccgtctatctgcactgctgttttttaggtctcattgttcgaattt

SEQ ID NO: 347025 - DNA, 367 bp, Zea mays
  unsure (1)..(367): unsure at all n locations
cgctctaccccgagtgctgagacgctgcgctgcgctatacgcctatacctacagtgacgagctgagggtgtcggagctatatggaaccgcgaggcgcgagcaactcgcaacacaaacgtatatttgaatattacaacttggaagaagaaaaacgaatcaatctgatatagaattatcattgtcaggttgtgttctgaaaacaaatttgaaattataattccatcgagagaatgtcgaggtacacggagaacgagtgaatgcctgacgttacgtnttntnnaaaaaaaaaaataaaaaaaaaaaaaaaaaaaattataattaaaataataaattattataattattaatttaaaagggcggccgtttt

SEQ ID NO: 347026 - DNA, 115 bp, Zea mays
tgatcggttactgtacattatatctagatagtagcttggcaacgactactccacatcagtgggtgtggctctactgacaatattccaccagtctagcctgaaattttgtggagta

SEQ ID NO: 347027 - DNA, 129 bp, Zea mays
aaacccggaccgacccacgcgtccaatcaacctttcgctacttatgaccattacctttctcggtttcaacatcaacaactgggcggttatataaaataacatccttttctttctttatcattactttct

SEQ ID NO: 347028 - DNA, 100 bp, Zea mays
ggccctcacgggccgcaccgctggccgaccctgatcttctgtgaagggttcgagttggagcacgcctgtcgggacccgaaagatggtgaacggtttcatg

SEQ ID NO: 347029 - DNA, 475 bp, Zea mays
gaataaacgggccgaccgacgcgtgcggaacagctcgctagctatcaagcttacttgtgctgctgcctcttcgttcatcagcaccggccgcgatatttttaagccccgcgggagctccatctgcttgaggttcccgtttttctgctcggtctattttgcacttttcctaaaggtgctgtagctgctcccttttctttccttcggtgaggaagctcccgtcggggccctgctttttcttacgtcctactacatcatttggctgcttgctacggtggatctttttaaggctactccgtccgtctactgattctgcgttggctccttctttctctactccgccgacgcttatgcgtgcgcttcatgagttgtttatcaaccactagtaatatattatgccgtaaatttgtgcctgcatataaacactcacttgaggattcatgcatgcggcttttaattaatttcaaaaataacatgc

SEQ ID NO: 347030 - DNA, 104 bp, Zea mays
ccatacttttgctgtataaaaacaaaagattcacaacctcacaaaaaaaaaactacaaaaacaaaaaaaacaacaacatcccttccacaaaaaatccaaactac

SEQ ID NO: 347031 - DNA, 356 bp, Zea mays
  unsure (1)..(356): unsure at all n locations
caaccacanttcattctaatccaatctcttcaaatggaaccttccaagttcccccccgccagtttacatatataccaggaacacttntttttccaataataccattttataactcaactgctgttgatccatacatccaactcatgttggtgatgaatccatttctttctccaatcacctcaaacctctcagcatacacctatcaccttaagtcatacaacttatatccagaacttctacactatctctaaatacacctcatgaattaccaaccacttcaattattcatttacttcaagcttctatcacacatattcccttaccttatgtttttctactacataccaaaatctttt

SEQ ID NO: 347032 - DNA, 260 bp, Zea mays
ggaaaaaccgggccgacccacgcgttcgttaggtgaaggatgagtacttccgtcttttctccaacaagttctcggaacaccagcccgaccgttcttattaaacatggcacctaccacaaggactacaatgagccccctcctgcaccactctttaagccctatgagctaaagttcttatcctactaccattccatcattttttatttctttgcctctttactctaactctacatttccattctcaccttaattatcatttt

SEQ ID NO: 347033 - DNA, 372 bp, Zea mays
cgaaattcccgggccgacccacccgtccggatcaattgaatatacttgataacctggtggtctgaaacacctgaggaacactaacaagtagggagctcggcatatgtaaaaagcggccaactggggctccctcttcgttcacttctgccactctgcgagctaacccaacggtgctcatactccagggacgcacctcttaaaataacactatagggtctgacaacctttacaggatcctttacaagaccttgaacgacatttaatggaaatgcgacgatctttatactcaacatgcttcttattagaacactagagaggaggaatggcaaactattttgtgcaccatcctttcaagcaaactattctgcatgt

SEQ ID NO: 347034 - DNA, 222 bp, Zea mays
ggcattggtggatttgggagttgtcagatactcatatgatgttttttcaaatccaatacgggggtgtccatcgctggagccggctgggggggccttgtaaagattttgtacctgggaaccccaaaaaaattgccaagactttattaccaatcgtggtgccccatttggtccttaaaaaaaaaaaaaaacaaaataaataatataaaattataaaaatactta

SEQ ID NO: 347035 - DNA, 344 bp, Zea mays
gcgcgaagctgcgttccatcgcggcggtccaggtcgccgcagagccggagccgtcggcggcagcgagctcctcggcgagcaggtcgtgcatccggaaaccgtcgctggtgcggaccagcggccggcgcgggcgcgtggcatggcgagcgcctctggcccgatgtttgggcgtggccctggcagccccagcgcgggccccggtggccacagcgagcgtgcacggcgtctcttcgagttcttggcgacatgatgcatcagaggcaattttctagccttaataatgatgatggatgactgatgtacctcgtgtcgcatcaacaatggcgaaccgcactggttattgt

SEQ ID NO: 347036 - DNA, 228 bp, Zea mays
caccaaatatctattccttatacggaaggtatcttatacaccagtaccacccatttagacagcagacatcttttactatacaaacctacatactctcacacttattcactcggacacatcattcatactaaaacacctagtctatacactcgcctcactctccttttaaaaacaaaactatacacaccacaacttacgcttattatgtcacatccaaactcaacggtg

SEQ ID NO: 347037 - DNA, 164 bp, Zea mays
cacgagctggctctccctgcttcggtggggggctgagacacgtgtggagcccaattaaaagggagccggctctgggttaaatggccaactttgtctcacagttattcacttggtccactattggactaacagaacggggcttacactcctgtgacgcacctttt

SEQ ID NO: 347038 - DNA, 69 bp, Zea mays
aaaaacccgaccgacccatacgaacttctattcctcaaatccaactaaccactctattcatcccacata

SEQ ID NO: 347039 - DNA, 311 bp, Zea mays
tctatcgctgctgttcatgtcgccgcacagcccgagccgtcggcggggggcagcttctaggctactgtttcctattagcttttcgtgtacgagccggaggctcttgctcctgttggtcctcatgatccgttctccttggcgcatgctgttttttctgatgagctctagatggctaacgattgatgccgtgctcacttcatttatttctatctttattttattaatttgcgctcgtgatggtttagtctctctctcccttacattttcatttcacactgtatttttctgtttatttctcttcttatatttac

SEQ ID NO: 347040 - DNA, 467 bp, Zea mays
ggaaacccgggccgaccgcacgcgtccggttcccagaaaagtatgttgctctgatattatgtgttccagcaattattcacccagggcgtcttatactggctgtgagcaagcacaatcctccaatttttgctctatactgggacaagaagcagcaattttctcttcagggaagaacagctctgtgggatgccattctacttttatgtcaccaaataaacgttgggtatggcggtgtggttagaggaatccatatcggttcgtctgccttgaatctcctgtcagttatagattcagattcagaaagctgaaagttagtttggtagtcttgaggggatgaattatgtcaagctagtttactggtgttaatgttgtaatttacactatcatgtttggaattgacatagctttatctagctgtaatatgccctgtggtaccttggatttgtgactatattaatatttgtctt

SEQ ID NO: 347041 - DNA, 118 bp, Zea mays
atcttgatatgactgtccaatcttctatggttgaagagcacatcttctcccccgaccattttttctaaaaaaacttacctccctttcaatactgtatcttaaaacctaaatctaaaaa

SEQ ID NO: 347042 - DNA, 203 bp, Zea mays
aaaaaaaaaaaaaaaaaaaaaaaaaaaaaaaaaaaaaaaaaaaaaaaaaaaaaaaaaaaaaaaaaaaaaaaaaaaaaaaaaaaaaaaaaaaaaaaaaaaaaaaaaaaaaaaaaaaaaagggggcggccgttttaaaggatccaagtttacttccccgtgcttgcaacgtaataccttttttttggggccacctaaattaaatt

SEQ ID NO: 347043 - DNA, 156 bp, Zea mays
agaccatggaacacgcgtccgccttcctttcgcgcgcgctcaccactccgttcccggcacgcgaggtcctaccgcggcgccgcccggctcgcgtgttcttcgacgtctctgcgcctgagcacaagccgtcgggcgcggaggcgttcaccaccaact

SEQ ID NO: 347044 - DNA, 179 bp, Zea mays
cccactgctgctgcatttgggggtgtatggcattggcccattgaccgtcctggctgatttaatggttgcaatgggttaaggacctggttttttgttggttgtgccattaatttccaattccttcaaaacctttaaaaaggaaaggccactggacctgggttctttgggttttgaataat

SEQ ID NO: 347045 - DNA, 230 bp, Zea mays
ctagaaacggttgtattatggctatcaccttgctcctggataaaaaatgtgcgaggagggggatttccttgaggccttgctgtaacgtgttgagcactggcacaaatcccgcctatggtggaaaagatgataagtgtatggtcttgtcttgatgcctactgtatcgccactggatacgaggcatattcttttgtataacatgagctaaaacaacatactgtgaagcatgg

SEQ ID NO: 347046 - DNA, 149 bp, Zea mays
atatctcttttttttttttggggctggccactttaaggagcatggccccacgaaactctctgcatgcaaacactacatggctgcataagataatggccttgtggtacacaatcagtaagacattattggatgattaggaataagcatta

SEQ ID NO: 347047 - DNA, 429 bp, Zea mays
  unsure (1)..(429): unsure at all n locations
cgggtcgacccacgcgttcgggacgacatgtcatgagaggttttgtaggggtttctggcttcgctacacttgtattaagtgctaaacgccccttggctataaagggaccctngaactatatattttcaggggtttctccctttaaatttgtttgaactctaaatgctccggttaacacactatgccacaaagtgttttttttggctctatatatngacctaaaaaagaaataaacactaggaactttacatttttatgcatcaagtttactgtcgtggtgctttggttgtcacgggtgagctctaagtatcctttgttttgctgtctgtattcgtggttaaatccatggatccagtgttggcgttgccagtatatcgccaaagatgctgtctgtattcgtggttaaatgcatgcatccagtgttaacac

SEQ ID NO: 347048 - DNA, 414 bp, Zea mays
ggctggggtaggctgaggacgacagtgatattgcagggttttgttgaggctttgagaatcttggagaggaaagaaacgccactaaggacagtctttcagattgaggagattcacagcatagtctcacaagcccttgcggaattaactcagtggaacattatgagctagttgccctgagatcgatagtgcaatcagaactcttttcagttcggctagctttgctccaatgtggtagacgatcatgcagtgctgggagacaggtcagcactaatgcaacagtttttttttttttgcgtaggttggaatactgcagacacggtgattataacataatacacatcattagaaaatttgtccgatacaaaatatcacaatttttttgcgaccgtttacaagattttttgtcactcggat

SEQ ID NO: 347049 - DNA, 406 bp, Zea mays
ggaaaagaaggccgagctgcttcactcactgttacagtttcaatagatcccgttgtggggcggcgctccgctccgcagctctctctggctggccgccaggggcgctgtgccgcacatcgagtttagtgcactgcacagaggcacgcgtgggtggagtggatctaaacacctatgatggtgacagatcaaacctgatctgctggtcggaagcttaaaccgacaccatactttctctgactggaacgggatcttatggactgtgtgctaaagctagtggcgtgggggtgtcagatttgtgccgtagcaccatcagtctgtaataactgttcgaatcatgacagcatatgttatgtactagccctttacaatatgatcgccgactctctggtaaaaccgacccccttta

SEQ ID NO: 347050 - DNA, 271 bp, Zea mays
gctgtataaaaaaatgccaactctttctctttcttacattagttacacgccacggggggggtaaattatatgcatgtgctacaaaattgattcaacaacctcaaagaacctaaaggcaaagaatatttaaaatttatatgccttctgtaccttatttgaagaaaagagcgtacaatactgaccatattaaagatgctcccctcttgcatattattgctgacaacatgaaggccggatctacataacttatttttgttcaaaaaatcaacat

SEQ ID NO: 347051 - DNA, 277 bp, Zea mays
atcaaactacatgctaaccgacccatcttttcctcacaaaatcctacccgccacggggggagttctttatgtagatatagaaccaacctcactacactcacagaccacatgaacaccctatcctactataaaatacacgcttcatacagtgtatagggcacaccactcaccattggctgacctcaccattggacagaaaaaatagccaatcctttttttcatccaaaatgaaactgatctgatctcgatgccaaaaaataacatttacttagctctt

SEQ ID NO: 347052 - DNA, 277 bp, Zea mays
tttacatataaatggagaaatattatttatatatgtgcgtaatgcgtagcaacataggtgagagagagagagagacagagagaggaaaaaaaaagaaagaaaaaaaaaaaaaaaaaaaaaaaaaaaaaaagaaaaaaaaccaagagaaacaagaccggggaatgctgttccaaaaaaaaaccacccagccgaataaacccaggcttttgtttgtctccaaacgtaaatggttaaaatcaatagtggcggggaaaagaatgttgtccccggggggggg

SEQ ID NO: 347053 - DNA, 78 bp, Zea mays
atgatttcttaaaaaaaaaaaacattttcattaaagtctcatgtaaatcaaaaaaaaggaggttttatatatattatt

SEQ ID NO: 347054 - DNA, 215 bp, Zea mays
ataaaacaaaataaatttacaaaggatcttattaataaaaaaaaataaaaaaaaaaaaagggacttcttattaaagctgatagtaaaaccaactttaactactcggaacacatatacactccctatttctttaaaatagcttattcatccccaaacaacatgggcgtgccgctttcggaactttttgaccattcaagccttacacgcccttttat

SEQ ID NO: 347055 - DNA, 92 bp, Zea mays
aacgcacataagtcgccttgtctgaaaaaataaaaaaaaaaaaaaaaaaaaaaaagggaaggatatttaaaaaaaaaaaaaaaaaaaacatt

SEQ ID NO: 347056 - DNA, 160 bp, Zea mays
  unsure (1)..(160): unsure at all n locations
gaanncccgggccgacccacgcgtacggttatcttttgtttaataaaccacttatattttatggggatcccctgcagaactggggaggctccgtttcacaggaacggatcccataacctttctctccgacgaaggcaaatgttttatgtaatttgcctga

SEQ ID NO: 347057 - DNA, 300 bp, Zea mays
ctatagcatccttgctccaaaccctggtcactcttatgcaacccgcccatatcgggggaggggcgccctatgacttactttcccaacgcccgtattttcaactattctttaaggagttccccatccaccccggtgcccccagtatcacattctccctccacaacttttacaacatgtgcgtccacaccgctaatcttgattgcttcgcactagccaacaaaaaacttcttttttcgtgcgcgagcacttatggcacacacaaaatgctttactactacgagatccagaacaaaacgtaca

SEQ ID NO: 347058 - DNA, 174 bp, Zea mays
cccagtctttggtattatcatgctcacatgtcgaaccatcaccctcgaacctagggctgggattgtatgatccacagctattgcctcctcacaggaccctccgtgcaacatttattagctattccaaaagacacacacaccatagcttccttagcatgtcatacatcatttttg

SEQ ID NO: 347059 - DNA, 353 bp, Zea mays
ggccagaccgacgcgtcacgcctccctttcgttctaataaaacatttttttaggtataaatttcctcttggtgaggggggggctctattaataaactggcctacacacattatctgaaataaaaaaaaaaatattgtctgtcctcctaatgaagaaccaaactttgttatgctccatacaagccactgatttgaaagactgggataattaatagtaataacccgcgcaaaaattgatggtttttttctattaacctaatcctgtgattagcgggaaaacaggccccttaatcaaacttcagtttctactggtcaagctattactttggggcaaaccagagatttaacattact

SEQ ID NO: 347060 - DNA, 59 bp, Zea mays
gtcgcgatccgtcgccacctcggtgactggtgtgtgtagcaaggtcccaagtcatactc

SEQ ID NO: 347061 - DNA, 140 bp, Zea mays
gtttgttacggcgaggatatctagtctcactctatcgttctgagctcatcacatagagtgagatctattccgcgggacgcctaaaagacttatctactcgtcctatgtctaatacagcatcaacaacaatggcatctaca

SEQ ID NO: 347062 - DNA, 85 bp, Zea mays
gatagactatgcaaaacttaaattattttcaccttgacaaactaatactagggtggtctttatacaaagacaacataaaacacat

SEQ ID NO: 347063 - DNA, 316 bp, Zea mays
cccactctttcgattcaattcataattacttacacgaaaaccacaacttgttcagagggagcgcgcaaactgagatgctaaacggccgttagcctttcttctgatatcaaacttcctatgttggctgtgtacatgcttatgaaccaaactatgttaaaaagcaagcttgtttttgatacgatactgtagtttatttatcataattagagcgcctgagagtgtcttggtcttcttttaaagaacatgccttcacaacatgagttggagaaaatattttctctcgctagacagttttttgatatatatatgtgggacg

SEQ ID NO: 347064 - DNA, 420 bp, Zea mays
gttggcttctcctccccctccggttcgggttcgggttcgtgaggttctccggggttcggtttcgtgggtgagcggatcgagatggcggcgtctgatgttgagtaccgctgcttcgtcggcggcctcgcctgggccacggacgaccactccctccacaacgccttcagcacctacggcgaggtcctcgagtccaagattatcctcgatcgggagacgcagaggtcccgcggcttcggcttcgtcaccttctccacggaggaggcgatgcggaacgccatcgagggcatgaacggcaaggagctggacggccgcaacatcaccgtcaacgaggcccagtcccgcggcggccgtggaggcggcggcggcggctacggtggtggccgtggaggcggcggctaccgcggtggcgggcgccgtgat

SEQ ID NO: 347065 - DNA, 443 bp, Zea mays
cggacgcgtgggtttgcatagtaagttttgcctaccatgtccctgcgtcctggagatgtcaagtcgtcaacggagatttgatctgacaaatgcttcctgcacttggcgccaacatttgtttttttttgtggctgcaactgtgaacccatttaacttacatcagattggcggtggcgatcttcctgatgacactgtattgacctgctcacgtggcttcgacaacgcactggagtttctatcaacatgcaagattgcaaatctgactattaaagcagaactcggatgctgcttgctgcatcgaggcggtagattgaccatccaggagtgtctgctgcagtgcgagcaaaaccctttggaccacctgtccttcccaataatcagcacagccatagagtacgatccattcccatccctcaaggagcaagggcacggagtaacggtcg

SEQ ID NO: 347066 - DNA, 379 bp, Zea mays
ggctgccctggggagataccccggcatggcagctggccctgggatggcggagccggtggtcaccgggcccgaggacgccctggggctggacctgcagctcagccttgcgcccgccggcttgtgacttggctggtcccgtcgtcgatggagatcgcgcgcgcgagctgtgccctgccacgcaccgtcgccttggtaaaagagaattgatcacctactagcttgctactactaaaaagtttgtactaagatcgatcgttgctggctagataattagcactagtaattaagtttagttgctgggaatgggatttggatagctgcatgcatgtaagccacctgtaagattccggttctagctaattgatgtgcatgatgatcg

SEQ ID NO: 347067 - DNA, 385 bp, Zea mays
caccggaccagcagcggctgatcttcgccggcaagcagctggaggatggtcgcaccttggctgactacaacatccagaaggagagcaccctccacctggtgctccgcctcaggggtggtatgcagatttttgtgaagacattgactggcaagaccatcaccttggaggtggagtcgtatgacacaatcgataatgtcaaagccaagatccaggacaaggagggcattccaccggaccagcagcgcctgatctttgctggcaagcagctggaggatggccgtaccctcgtcgactacaacattcagaaagagagcaccctccacctggtgctccgcttgcgaggtggtctgcagatctttgtgaagaccttgactggcaagaccat

SEQ ID NO: 347068 - DNA, 166 bp, Zea mays
cgggtcgacccacgcgttcgagcactacactgccaccctttcaatgctattggataggattttctttagacaggcatgaagccccttcagctggcggccggagagcgctattgagctcacgaggccaagcacgcccgttcgtagagaaactgcggcgctcctacgg

SEQ ID NO: 347069 - DNA, 235 bp, Zea mays
gccacgcgtccgcccatgcgttctcccactctttcggatcgaaacctttgattagaatggtattcacttcgccgccaatgtactaaataagcttcatggtaaatacatgtatgtctacctttacatttcggatgccaacactggctctcgagagaacattgatatagatcttgtctactaaaacagaacacgcatttatttgtgtacagaatctatctactttcatttctataag

SEQ ID NO: 347070 - DNA, 63 bp, Zea mays
  unsure (1)..(63): unsure at all n locations
cggaannnccgggtcgacccacgccgtccgggccttctctgtgagagtaaacggagacccgag

SEQ ID NO: 347071 - DNA, 154 bp, Zea mays
gttctgtactgctatctgaagaccgcgcttctaagatagcggacattaacgtttggcgcggagtgatttctcaagggcaaacgaccaccaattgttaccaacaagcgttgttcgcttgccttcttgccggggatgtgtaccacttctgtgcttt

SEQ ID NO: 347072 - DNA, 218 bp, Zea mays
gtcatacataaccatggcgcttgcccacctctccttaccccttctctgggtagtcgggggtggccgttttaaccgtcgccgacgacggcctcactgacatcgatgtttacccgctcgagaccttcaccgtggcgatcaccacggccggcggcttgatgcattccccgctatgcgccaactctttggtcgggagccagcacatagttctcgactatatc

SEQ ID NO: 347073 - DNA, 333 bp, Zea mays
ccggaatggaattcccgggccgacccacgcgtacgaagcaacataccataacccccgtccttttcgtgagcaaaccgggccacgtcgcgggggagcttatgccacaccctttatttgatccgaagttattgtagcggatcgaaactttcttctatcacattgggaggcactacttgatacactggttcatgcaacggtcaatgaatttcatattttgcaaaaagctttccctctataaacactgactcttgcttgccagcaccaacaaatatggatgcatgaccgccccaaaaatggagagcatgcttgcagaaacaagcatcttcttcctta

SEQ ID NO: 347074 - DNA, 277 bp, Zea mays
cggacgcgtgggttcttctcccccatgtctggtctatttttgggcatgctaagatggacctgaccagcatgcagctagcacgatatggttgagctgagcttgagccactataaataaaaaaaaaaaaataattgaacatataagcaataaaagaatgggaaaatactgatgcttataggaaaacacatttaaaaagaacttgcctaaaatttaaggttatgaaaaattgggttgtacatctaaaaaataaaacctcagttacttctattctgattat

SEQ ID NO: 347075 - DNA, 131 bp, Zea mays
tttattcttataataacatccccctttatttattatcctcgtttttttaggtgggtggttgttttttaaatttcacaacacataacacattcataaatccacaatatacatgaccttctgaaaaaaataca

SEQ ID NO: 347076 - DNA, 249 bp, Zea mays
ggccgacccacgcgttcggtttagtttatactacctaacacagggccttcgtacacaaaaaaatgccctaggttcctagggcgcgcggattgtaacaaattcgctcccgaagtttcttagctccgatcaggcgcctaagggaattctgtgggccttcccataacaaaactggtataagtacgctcaggttgctcctttcttgccccttggatctttaacatgttctgttttcataactccgtcagattc

SEQ ID NO: 347077 - DNA, 382 bp, Zea mays
ggcgaaaaaggctgaggtgaccaagtcccataaggcacagacgaagggagcggtccagatgggttccaagggccccaagttgggtggtggctgtggcaagcgctgaatgaacctaagtgttgttccttgaccttgcaattgctcctccatagcccaccttgttgcaccaacgccacttttgtagtacctcggttaattttgcattttctttcagagttgtttgtgggttttgagttccatctcaagagagttgagtctatttatctttatattgggtgaaatgttcatatgctttcctcagcttgtatgatggtttgctttgaaatataactctctcttgctaccacaaaggtatcatagccaaactctgcaattactcctt

SEQ ID NO: 347078 - DNA, 319 bp, Zea mays
cgaatccggccgcccacgctacggacaaagtccagtcttacatcaagagcaccatgcggaaaccattcaggattggtagaatgatattgtgaagtctgctctttatgacataggatccgaccgatgtgatcgaactaaaacttactatatcatgcaaggttggttggacatcgagtctgggaagtgatgactcattcgccctgtctttcagatctctctatataaatatttaagaggctcacaaaaggcaaaggatataacgtgatgtcactctgtgtggtgtcacgcaggtgccccgaaagacccacataggtctgcc

SEQ ID NO: 347079 - DNA, 341 bp, Zea mays
accggactggaaaacccggcccgacccacgcgtacgcgaggtacacggagaactgttgaatttctttcgtaacgcataataaattgatgagcaaggtggactactaactaaagatgtcagctcctaaccatatcattataaagtaaaggaatgccatatagctaactatttcgtccacaatttccatgaaaaacacaaatccctcatctgtacaacaatatactctattcctcacatgcctgcagatcagaagtgcattacctattacaagcttacctcaactaaatctaaacccatctgtgcttgacaagataaccatgctacctctaaaactggtgcaa

SEQ ID NO: 347080 - DNA, 269 bp, Zea mays
attcgagccacgaccacgcgtgcgatacgcgttgcctgacatcactatcaccttcctaagcctggccaacgacacgggggtgtccatttctctgacggcgaaacatctcatgaacctgcaatctcgtcatataagcaatgtgcgtctgatacatccatttcgtctcatgcagcaagggcccgttcgaaaatatgcttatccacttgattagacaattcaacaacaacatacgttctttccttgacaactgcatacacgtcctcatatat

SEQ ID NO: 347081 - DNA, 289 bp, Zea mays
gggtgctacactcgagacagtcactcctattccttatgatgtggtcaacgatctgaagggcggttactagagagaatttttgtaccttcagcagttcaaacgagctggcaaacttatctgaatctttttgataattggctagttcttctgttctggtgttctataaaaaataaattacattaaatacaaaattcaaataaaatattatatgttttggatgaaataaataaaattaaaagatgactaaaaaacacaaatacttaaaaagggtcggcccttttaaaggacc

SEQ ID NO: 347082 - DNA, 296 bp, Zea mays
cgattcggaattccgggcacgacgccacgcgtccggtacaagattacgcgctggaaggacccgttctgctctcggcggacggagacggtgatgattaccgcacatgaactactacacggcgtgcatgtaccacttcaacctacgccggacggcggtccgcaggcttgccaacaccattctcaacgacaagcttttccactgcggcatcatcgacattcaggtcaccagctgaccgtgcgatgtacacggaccagacgatcggtttccacatgtgtagagtaccagaaccccggcta

SEQ ID NO: 347083 - DNA, 226 bp, Zea mays
gaaaacccggcccgacccacgcgttcggtcccattaaggaggtcgagaccctatatttaaacttaacctaccttagcggtgggagcgagaactatagctgcgcgttaactctcaaacttaaccatgccataaagcaagacacagaggctgaattccttatggaccgtcgcgccaagatgtcgtatatctaggtgcacttgcgctacaactagctaaccagcgatgg

SEQ ID NO: 347084 - DNA, 356 bp, Zea mays
  unsure (1)..(356): unsure at all n locations
ccggncgacccggcggccggggcacaaaacngnggcnnacancncnantttaccgaggangggacnncggggggagggggangcnggagggagaaacgggccnggananacangnggacangaagggggaagggaaaaggangcgnnncncngnnggacggncaccaangcnnagggngcnggaaanggcancggaggaaangcggggaagagngcagagnggccagaagagcannnacagcccanccgaganggagccagggggngngccagcgnnacccacggggaccaaagggggaagaagcancnngggagaagnggagaacncacaaaaaaaccaccagngagccaacaca

SEQ ID NO: 347085 - DNA, 243 bp, Zea mays
ggacgcgttgattgtggtgacccagtgcttttctttatactcataactatcataccatgtgattggttctgacgtcatagttgtatgtgaattcttaaacctactacttgattgaaggaatattgtaagtttgattgtattattcacctccacgcaaacatgttatatatcaaagacaacaaacaaatcaacatctacaaaaatgacagacacctttcttctcttttcctactaaagccctaa

SEQ ID NO: 347086 - DNA, 379 bp, Zea mays
cggacgcgtgggcggacgcgtgggttcgccggcaaggccgtgaacgtgccgtcgtcgtccgccttcggcgaggcccgcgtgacgatgcgcaagacggcggcgaaggccaagcctgcggcggcgtccgggagcccgtggtacggccccgaccgcgtgctgtacctgggcccactgtccggcgagccaccgagctacctgacgggcgagttcccgggcgactacggctgggacaccgcggggctgtcggcggacccggagacgttcgccaagaaccgggagctggaggtgatccactcccgctgggccatgctgggcgcgctcggctgcgtcttccccgagctgctcgcccgcaacggcgtcaagttcggcgaggccgtgt

SEQ ID NO: 347087 - DNA, 316 bp, Zea mays
ggcatttcggcaaggagattggcggccatttggtgcatgattttgttggctgacatggcaggtgctgctgcattgttgcttctggtcagctgatctgatctcagcttgctgatggtgcacaagcatgtatttgtaccactactagtatgttagaatggtatataagtgtatcacttggtggctttggcttgatcagtttgaatcaattcctgaggatggagaaaaaacattgctgaaaaaaaaataatcttaaacaaaaaacaactagaggatggccacaccctaacatactacaacattcaaaaagagagcaccc

SEQ ID NO: 347088 - DNA, 355 bp, Zea mays
gcccagagcaataagataagaggactttggttaaatcacatgtcccctgagcatgcgagggggggcaagaaacgtcccaagtgtacatgttcaagtcggcagaatggtcttcccactagatgatggcaggcttggtgaactacattttcctgggatggggggtactgattttggtccgagtgcccaaagtaccataagaagaaatctatcaaacaagtacgagtggaccatcctagactcatcataaacagaaggacggaatgcaaaatattgcaccgaatagcactgtcactcaaattgtatcatcggagcaaagaatatatctgcagacacagaatcaaatgacttgagcaat

SEQ ID NO: 347089 - DNA, 188 bp, Zea mays
ccgtaccacatgctcagacatagattttcgatttctttttcataacagatacgccccaactgagagagggacaactatcatgttacctcacctttcaatcttcaagctttcataaacatgtacatattcttatatggtaacgatacctttattcggtgctggaacacccacctaatgattcggagatt

SEQ ID NO: 347090 - DNA, 242 bp, Zea mays
cgggccagacgcacgcgtacgcgtacgaatacgagacaagatggtgatagttgcatcaaggccgcagctccatgatgcgggggccgttggcaggaagctcattcgcaccatttctatctgattatggcgggggctcagcttagacatactgcttatttgctgtgggtgcagctgagcatgatatatacaggagatgaacagtattcaatcccatcatctgcatgatgcttgagactaaatcc

SEQ ID NO: 347091 - DNA, 162 bp, Zea mays
ctctctcactgtcaatcccgacgtcttctttcctgtttggcacgaggaacaccacatgtagaggctcttacaagggcggattctgaactatatcttctgcatacatcatcaagatccatggcggtcaccaacatattacaatgcactccacactcaacagct

SEQ ID NO: 347092 - DNA, 82 bp, Zea mays
gaaagagaaagaaacaaaacagttggtttcttgttacttgtaagtggttaaactgaaatacaaatggatgtaagattgaatg

SEQ ID NO: 347093 - DNA, 286 bp, Zea mays
ggctaatcaaatgtattcacattgggcataatcacgccactggagtctggcccgaatcaaggtgcaggttgctgcgctgtacgagccagactgagctacatacacttctgacagagcgtaaatgcgtgctttccctgctacatattatctaggtcatgtatggtgctaccatcgtggttaaataacgaaaataatgctgagcatattcgtttgaatgctaaccaaaatatagggcgggcagtcttcaggactcaatcttgcgtacacgtacatgcaacttcttacg

SEQ ID NO: 347094 - DNA, 387 bp, Zea mays
gtcagatttagaataccatataaagtttcttctggatggccgtccaagagatccagggggtgtgcttctacaccttgatggatcgcacgatgttggtcttgacattaacctctagagcttcaactacatgctcatcttcgacgatttattttgaagattttataagctagatcataatagtatgtacatagggactatgcgaataattaccgcgggagattgtgaaacacctgcttggcaccttgtgcgtggaacttgctcgtgtcttgctcaaacatacataaatttcatactcaaactacttggttatctacacgttccatataatacctatctctttatgataaccatttatgagactgaaccattcttgtatacctttttttc

SEQ ID NO: 347095 - DNA, 472 bp, Zea mays
cggaattccgggacgaccacgcgtacgcgtgctcatgacttaaaaccgcgtcagactcataccggagatcgacggcacgggattgctggtgatggtctgcatcggtgacctagctcgcacggaagttgtctagtacagagaagagcttttctggctcaaagacttcttagatgggcgctacgacgactgtttgtgcactaactatggcatgaaatcctttctgttaataggattggtctatgaaagaacgatgactcaccactctctaaatgtggcagatctattgcgctattgttggactatagaatataatgtcggcttggtttaccatagccttgaaattgctctgcatgatgaatggatcagctgtgctaagcatgtctacgctatacattagattgtgcgctaggagctttcatatttctaagcacatccatatcagatgtgcaacagactgactggataactatta

SEQ ID NO: 347096 - DNA, 372 bp, Zea mays
ggccacgacgccacgcgttccaacgttcaccgcaacttgagctttttctttcgtatatacacccagttctttgagccagagggtattgcaaatgcacaaagatcgctgcggttgggacaggaagaaaaagctcttggagtgcgttaatgagaataaaaagcatttgggatttttgtggaatctgaaagtgaatttatgatatgatttctttatatggttatctttttaatccatgaccaaactgtagagacatggaaaaggaactctcaaatcttgtttgaaattggtagagttattctcagttatatttatttactcgcgctcgagctatcctataacacccaaccctgtataccgaatgataagcaccct

SEQ ID NO: 347097 - DNA, 249 bp, Zea mays
gcttcctcttttccctccccttcctagacttctcctgctcaataagaccccaactgcatcggggagaattcctcccaaaccaaggaggtctgcaccctaaccccttattgtttgcccaagataagaaccaagtcctttgcactctccctctcaaaaaaagagaggttgcccccctttattagaaaaagaccccctctcccacccaaatattttttccctagaccattttttatacttgccaaatacccc

SEQ ID NO: 347098 - DNA, 259 bp, Zea mays
gttttgaattcccgggtcgacccacgcgttcgcaaaaaaaaaaaaaaaaaaaaaaaataaaattaaaaaaaaaaaaaaaaaaaaaaaaaggaagagaaaaaaaaaaaaaaaaaaaaaaaaaaaaattttaaacacaaaaaaggatggacgaaaaaaataaatctattattaagggcttccccttccaaaaaaaaaagagaggaccgacttaatggaaaaagacaaaaaccttctaaccaacatatactttttaattcca

SEQ ID NO: 347099 - DNA, 192 bp, Zea mays
tacatattttacttctctccagccatcttgctccccattttccaggtattcttcaaaaccaacaaatcacacaaccacactcacaacactaaagcccaaaaaaaaaaaaaacacctaatgctcttttctttccaaagaataaacatccgccagcccctttaaaaaacacaacattccaaccccccaaaacaa

SEQ ID NO: 347100 - DNA, 393 bp, Zea mays
gacccacgcgtacggttgcctacacgaccattatggatctctatttctcgttctgttagcttacacccacgatgggagtgttagcaggttacccccgatttcaactccgctctctattatatagtgttgcacttgaaaacctatcatatgatttcgttgccaccagagcaacatcctccagtgattgagctacataatatactttcagctcctaaatataagcaactgacagctaacacagcaaaaatgctggttgagaatctgtcacatcacataattgctagttgatcactaatactaaactggaaatgatccttacattcgtttatgaaatcaccactcctcctgtaacctcgaatcattgtccgcattctgattccatcatgatccata

SEQ ID NO: 347101 - DNA, 66 bp, Zea mays
cttttcttatcgttcagtaaactacattgttaacactctcctgccattttgctcctgattttcctg

SEQ ID NO: 347102 - DNA, 179 bp, Zea mays
ccgggccgacccacgcgtgcggaaacctcagggttggctttgatgcaaagatttctgcatgtcgtcaccaagctcgggatggggtaactgggcagctactgccccccatacctcatttaacaagctatcgccccgattctcactgttcaaacatcccatcaattttgaaatagtagcaa

SEQ ID NO: 347103 - DNA, 326 bp, Zea mays
ggaaaacccggcccgacccacgcgtacgcccacgcgtccgggattcaaattacacccttttggctgagctctacaacaaatgcaagggggtgaccttagagatcttaacctccacttgcagtcactttttgaagcaagaaccactggtccagccaaccaagcagaatattctgcttgcaggagatgcagcgatgcatatcttattataaacagggacgtatgcaacgacccaaagaccgaacctgtgttgaagatcctaagaacaaagaattgtggcttcttgtgatctacgataaaaccaaacttaactaacttcttagttccta

SEQ ID NO: 347104 - DNA, 69 bp, Zea mays
  unsure (1)..(69): unsure at all n locations
gtgccattcaaaaaaaaaaaaaaaaaaaaatttaattataaaaaaaaaaaaaaaaataatttgtgnagg

SEQ ID NO: 347105 - DNA, 359 bp, Zea mays
acgcgaaccaatattgaaaatgcacataatctttctttttttttaacggaacaccccaaagggggatatttaattttcagagaacaccttcactccatcaacgatctatccccaaaaaccaaggagatatttagttatccaccttccccttaatgattttcaacatttcagcaccacaatcctcatctactatgggatcctcatattatccaacttcaactccgcaaagatccttatcatgaccttctacaagacactaatccgtcttcctccaaacaaaactgacaagcccataaaatattgcttgcagcttgacctacatatgataaaatgacattgaaaccctttttactggttgt

SEQ ID NO: 347106 - DNA, 165 bp, Zea mays
gaaatccaggccacgacgccacgcgtccgtgataatgctaatctgtggtggacacattttagcgttaagggggcacacgtagttgtggtgttcttcttgctgttttatttctacgagcttctcactgtatttttagtccacacaaaaaaaaagacacatattcat

SEQ ID NO: 347107 - DNA, 393 bp, Zea mays
gtgccggcgctgtcggagttccactccggcggctacgatttcgactcggcgtccatccggcggatggagctgctggtgctgtccacgctcggatggcgcatgggcgccgtcacgcccttggacttcctcccctgcttctcctcccgggtccacccgcacggcggcgccggcgccggcggccacgtcgcccacaaggccatcggtttcatctttgccacggctgaagctggtagcgtgcttgatcacaggccgtccactgtggctgcagctgcaatcttggctgcaacctatggacctctactgaccaaagaagcactcgattccaagatgagctacctttctccatcttgtcttattgagaaggaacatgtacatgcctgctacagtatgatg

SEQ ID NO: 347108 - DNA, 377 bp, Zea mays
catgaatttaattctgccaagagggcatcctgtcattttgtcgtcggtactgtcgacgggggtgcgatcggcccgagttccagccacggtcggtcggtaccgactagctagctagctagcggtcgatgacgctgatgaccacccatgaaccgtagatcatctctgctgccacgtgtgtcgtcttttcattagtccacattatttcgatgtccaaaatattttaagaacctaaggaaatatttatgaatcatgtaacatttatatttacatattatattttttatgtttgagtcaactttatttatgatgcacaatttatgtgatttgcatttctttgaaaaaaaactacagaaaacctatctacttggtggttgaaa

SEQ ID NO: 347109 - DNA, 166 bp, Zea mays
cgacccacgcgtaaaccttcatttttttcgcctctccttttcgattccaaatcatacatatccccattgacacgggtcaattcaataacacctgctcatacagtccatcccaatctatacctccaccctcttctcaattactaccccatcaaaatctttgatcacc

SEQ ID NO: 347110 - DNA, 356 bp, Zea mays
ttgtacaccactgttgatcacatacattgtatttgcattttgtttgatggttattttatcaatgaaattgtttctatttgtaaattaaaattaggagaatttggaaaataccaccacaagggccaccttagttgtaaactaccgtaagtgtttctatgacatttggtgacaacgcctacatgtcatcctcacatgatcacatcatatgggcatatggtgttttctacatatgagcatctttgtgatggaatcctcttaatttgaaatttctttttcttgtaagcatttatttgttacattcttactcccactcttttctttgttttcttaaacagtaagcgcatgaaaactcattt

SEQ ID NO: 347111 - DNA, 236 bp, Zea mays
ggaattgcccacgcgacccacgcgtacgcttagttgttaggatggcataatcttcccttgggcatcgcccgtgctatcttgaaggacgggtgggatcctggttatagacaaatcaaccaaatcactggatgtcgactacaaggggatccttcagtatgcactggacacagtgatggtgaaccatacagtaatggtcgccccccaccgtctgtcaacgatacaaaatgctggtcata

SEQ ID NO: 347112 - DNA, 112 bp, Zea mays
gtctgattaaatttatccacccatctgtcatctacaaaatgctcattcctgctgatatcgaggttgtttttttccttctgatcactcaccttactccttacattaataaaca

SEQ ID NO: 347113 - DNA, 350 bp, Zea mays
cccaacgaagtgcgagcgacccacgtccacacgacacgaaccaccaccaccaaccagcaggcgcaccacgcacccagcgcaaagcgatggcgtcgctcaccatgatggcgtccttcgccgccgtggcggtggccgcgccctcgcgccgcggcaccttcgccgtggtcaggtccgccaaggtcgaccgctgccaggagcccgccacgctagcacaaccgaaggccaggcccggcgcgaacgaagccgggcccgcatggtgcgggttgtggcgcgggccgggcaaccattggggggggcggcgccggcatggcgggccccaagaaccggaacccccaaggcaaaaaaaaata

SEQ ID NO: 347114 - DNA, 131 bp, Zea mays
  unsure (1)..(131): unsure at all n locations
ggaannncccgggtccgacccacgccgtccgttaaaaaaaaaaataaaaaaaaaatatctttattaaaaaaaaaaaaaaaaaaaaaaacaaaccgtctaattattaaaaaataaaaaaaaaaaaccccccc

SEQ ID NO: 347115 - DNA, 355 bp, Zea mays
cggacgcgtgggcgaagctcaagaagaagctcttcggcaagcagtcccgcagggatcagcggcagcatcagttcatgcgccaggcggcggcaagcaatgggatgatgaagcaagaagcggcaaccagggaggcagccggaagcagtatcatggcagtggccaactacaactggcaccaccaccatcaagccatggcggccgtgcctgtgcaaccaatactaggctcgataatggaaggccatcgcgcaggggatgaggtagatgagtcgattcggaagcttctgtataagctaggaggagcaggcccttccacagcactctcggatcctcagtgtgttcctccaatgtactgtgg

SEQ ID NO: 347116 - DNA, 316 bp, Zea mays
ggccaagcggattcgcacaatcaagcgcaacacgctcacccactcccgctccttctcctgctccggcatgtcggagggcgagtgggtcgacgaggatttcaagaggatgtacgcaatctgacgacccacgctacctgcatgtgtttgagatcatctcgtgcaatggccatcgcgttattgtcaacttgccgtgcttcggaccgggctaacattcttcttccgtcactccttagtggcgattgaagtattgtccaaccgaataaacctacctgtgcgccgcctgcgagagagaagtaataagttttgtcttcataga

SEQ ID NO: 347117 - DNA, 290 bp, Zea mays
gctcctcgaggattattacagggccacaatctatcgtatgctccgagaaactgtcacctgccacatggagagcttgaatcttgtggcgtgttcatgcttccatgctgacacagaaaatggacattagtctggatttcctgatcataatcaattggctctggaatacgcttatcctcatgtaacaggcctttatctataacttaatgccgtaggaatttgtcttgcgactgcaacactcttctggccgtaaatgtataaatgcacatccgcttctcttatcaatgaacaaa

SEQ ID NO: 347118 - DNA, 347 bp, Zea mays
  unsure (1)..(347): unsure at all n locations
gtgaggatggggttcgacgacatgtacctctgcagcccgggaggcatgtacgacaagttcggcaaggactactttctgtgcacggggatggcgtccatgttggtgcccgtcgtcgtcaaccccggcgaggagtggaaggcggcgcangtcatcgagcatgacaacttgtaacttcttcttcttctccttttggtcaacggaattacagaatcgaatacatgtcgatggccccgatctccagtgagatatatacatcattacagatagttctttccatgggaagtgttaaacagtgaatgtaaaatgagaaagtgaatgggaaaactatcatttttntttnnnnnana

SEQ ID NO: 347119 - DNA, 286 bp, Zea mays
gaaggcccgggccgacccacgcgtacgaccacacttgctgccacgcactttatttattgctttatctcactcaaaaacgttagccgggcattttttttttaacaagttcatccacgagccaaaaaatcatatcctatacattcactctagcttgtctcaggaagaaacgctaactctcttcaagggtttctaggatgggcataaaataattcttgttgcaaccgatttggctggaaggtgaatttgacatttaaccaagttaacatttgtccttcaactacttaca

SEQ ID NO: 347120 - DNA, 180 bp, Zea mays
gcgacccacgcgccgcgccttagcgcatggttgcttactgcactgtactaatcactatagcgggtgggactgccctaaactcggggaggaagcccggctatactggcagaactgcaaagcctgactgccagaaactgggccaactcgcgacgggagctatttccgtctcagtgccggcga

SEQ ID NO: 347121 - DNA, 164 bp, Zea mays
ggagaacagaggatctcatttgaatatttgatcctcttttaatgtttcttattgcctgagcatcacagaaaaaaaaaaaaaaaaaaaaaaaaaaaaaaaaaaaaaaaaaatctaaaaaaaaaaaaaaaaaaaactaaaaaattcaaggccgaccaaatataaag

SEQ ID NO: 347122 - DNA, 71 bp, Zea mays
gttttgacactcgttgtatttctgtatatcgcgtcagactgtgaaataaaagcagtacagtgtgtttcttg

SEQ ID NO: 347123 - DNA, 208 bp, Zea mays
  unsure (1)..(208): unsure at all n locations
cggaantcccgggtcgacccacgcgtacggacctgtcctcgccaacgagggtagtgggaggacgccgggtccaacaccacagacacgagggctcggatgttgtgaagttcggcggcttgagcgtggaaagcaccgacgtggtctacgtcaaggccagaggcggggatggccttaggaatcgccggggggtccttacgagcgaccggtg

SEQ ID NO: 347124 - DNA, 199 bp, Zea mays
ggacgcgtgggctccgagtcgcccctccccttccgccgtcgatggcgctgccgtcgagcgccttccattcgtcacggccatcctcggggtcccctggtactacaagaaagcggcagcctcgggccgagacatcaggtggtggtgcacctgtgatgagccccacgtggcgtgcttggaggacctgggcgttcctaccacc

SEQ ID NO: 347125 - DNA, 258 bp, Zea mays
aaaaaaaaaaaaaaaaaaaaaaaaaaaaaaaaaaaaaaaaaaaaaaaaagcaggcagatcggcgcgtagcgtcccatacatacgccttcagtgcgcgccctctcgaggatctaagcttcccctcacttgcacaccatggccaccgttttacaacgggttgccctcggaaaaaccagccggacctcacctaacaacgttttgcaccggaaaaaccttggctcacccggccttaaaccccttaagaccccaccagctttc

SEQ ID NO: 347126 - DNA, 298 bp, Zea mays
cgcgtcactcaagctaatgagagtgtcatcaccaacatctagtgctagtccccctttctttcatccagccatggtatgcatcaacaccttccataactgccccattgccataagagcaaagatcaacacgaggtccaagggcttcagcagtaacgtgacgaaagggttaccaacaccatccttccatttcctgtgcagggcgtctactttcgcggctgacaccatccctcctctcgtgctggacgaaaaccccaaagcgatcattttgggggcgtggtcctggaacttcttccttctt

SEQ ID NO: 347127 - DNA, 296 bp, Zea mays
agcgccggagcatcctcaccggcctcaagggtcgcgacgcccgcagcctcgacgccgggggcgaagcctgcggtgatgcagaagacggcgacactcgctaccaaccatgaccctatcgtggtctcgcaagcgatagaacccagccctccactccctttctccatcctccgatggaagatgcagacgcaaccgtcgcacgcccgatgacagcactcgcattcgtccctttttcttttccttccgggccagggcaaacctggcgtcactgggacgggaaaacggcaacccttggcttc

SEQ ID NO: 347128 - DNA, 273 bp, Zea mays
gacgccggtttcaagagcgagcctgagaagactaaaccatggggcaatcaaacgcaacagcagtccggctctagatggttgctcgcagctggcatggtcaagggaaacaagcattctctgatgaaatccaaagctgtcgtgaagccaaccaaagaggcagctggccaggcatgaaacaccctcttgagcatctcttcacgtgttcatggagccggcaccaggtggtccgagctagcaagaaataagagccattcacggaaccccaatatcatg

SEQ ID NO: 347129 - DNA, 367 bp, Zea mays
ctctacttggccaatggtgaatagaacagctatattctcaaaaactagaatagaactgttgaattctaattgactcttcaactaacgtacacttattcgccgctgccgggtgcctgggtttgttgtcagaattcggaactcacaaggcggtttctccgttcttcagagatctgggccagtcgacgacacacacattttttttttgtttttgcttggtcattgtatccatggcccgggagtatgcatgtgctgtgtctcctgcttggcaaacacgtgtcacccaatctagtaataagaaaagaaatataagtagaacagatggaaagacggatcggttaactgatgaatgaacaaatgaacgaatgct

SEQ ID NO: 347130 - DNA, 93 bp, Zea mays
aagatgtgtcttttatttacacaaagtttggacttttgatacataacagtttggtgggctggaatagacaactgaagacatgtcttctgcaaa

SEQ ID NO: 347131 - DNA, 126 bp, Zea mays
gtaatcttttgtggtgccacagatgagaactcttcggatttaaaccgtcaatctttcaggcgggtaagtgaaataaatataactataaaaataaaactctagacctaaacaataaataaaaaataa

SEQ ID NO: 347132 - DNA, 307 bp, Zea mays
  unsure (1)..(307): unsure at all n locations
aaannannnnnnnaggggncnntggggggggaaaaaaaaaaaaattttcgggtattccccctttgagacggggggggggggcggaaaccaaaaaatttttttttttttttaagaccccccggtttaaacacaaaaatgcatggggcttaaaaaaagggagttattttttttttttttaaaaaaaaaggggccttccttttgggggggggggacaacccccccggggaaaaaaatacccccccccctccaaaaaacccgttggaaaaaatgaggcccttcaaaaaaaaacccccccttttttttttcc

SEQ ID NO: 347133 - DNA, 369 bp, Zea mays
  unsure (1)..(369): unsure at all n locations
tttttttttttttttttttttttttttttttttttttttttttttttttttggttttttttttttttttttttttttttttttttttttttttttttttnggaaaaaaaaaaaaaaaaaatttttcccaatttttttgaaaaaatttttttttttttaaaaaaaaaattcctttttttttaaagggaaaaaaaaaaacctttttctccaggggtattaataaaaaaaatcaaaaattttttttttttaaaaaaaccggttaaaaaccaaaaaaaaaaaaaaacccttcatttgtttttagttttaaaaaatttttttttaaaaaaaaaaaaacccccaaggggggggttttttttttttgagggtgggg

SEQ ID NO: 347134 - DNA, 256 bp, Zea mays
ggggaaagaaccgggggctttttttccagttttaaaattaaccaaaaatttcaacggccgcatttttggacaacgggttttacttaaaagcccttaaaaacaagggttcaaaggaaagcaaagcttttcttttaaaaatgcccccggattttggactttttaaccccaaaaaaattctgtactttacccccaaaaaaaaggtttttaagggggccacccctttctctccacctttggcaatcgggggggggggttt

SEQ ID NO: 347135 - DNA, 239 bp, Zea mays
gggccaaaacagagaatggcttttaacttagttcagtttttacacatacatgcttttcacttattccattcctatgaacaaaaatttagggcgggccctactgggcatcaattacatatgctttatccaactttttttttatcgacaaaggagccgaaaaatttaacggggagaacatgtcgtcatttttggatttgggagcaggcttgaacttttaggggccagccttggtcccccaa

SEQ ID NO: 347136 - DNA, 163 bp, Zea mays
  unsure (1)..(163): unsure at all n locations
ggttnnttgggggaaaaaaaaaaaatttttttgattttttcccttttaagcatgggttgggggcctaaaaacaaaaagtttagtcttttggtttaatcccgccggttaacaatctaagactcaatgggacttaaatagggggatttattttttgttccttaaa

SEQ ID NO: 347137 - DNA, 316 bp, Zea mays
ttgcaggaatatggccacatgctcatctgatcatgctaaaggtgtgtaacagacatgatttttttttacatttatttgtttcaacacgcaaggcagccaccgctgctcgtgtgaagctggtgcgcggctgcacgcgggcacagcggccgtcgcaccgccatgcaggcgagtgcgctggccacgccgccgcaagcaggcgcgggcttcgccgtaactgcttcaggcaagaagtaagagcactctggcacgcaagcacaactctgctgacgccgctccggcaccccggcatacagccgtcttagccccgctaccccgc

SEQ ID NO: 347138 - DNA, 185 bp, Zea mays
aaaaaaaaccacctgggggaatttttcctttccagttttttcaaggccccctcgcccgaagtcattacccttggatttggggttgggccacaaacaaaaaccaaaccaggggaccctttcttcctttttacaaacttttatacgggaacctaaccccgttttttcattcccctggaacaaaccaa

SEQ ID NO: 347139 - DNA, 386 bp, Zea mays
  unsure (1)..(386): unsure at all n locations
ttttttttttttttttttttttttttttttttttttttngggnnnnttcccaaaagggctctttgggttttttataaacccccctattaaaaaaaaacacatttttcggggtccaaaaaatatggaaatttgtgtgggaaaaaaaaaaaaacaaaaaagcgttccctatccaaaaaaaccacccccccaaaaagaaaccaaattcccttttatatacacaaaaaaaaaaatctttttcccaaccaaaatttttttaaaantccnaactccccggcccaaatcccaaataaaccaaggtccaaaaaaaagaccttaattttcccattaaaggaaccctgggcccccttgcaccngtttagcccttttttttccgccccttaataact

SEQ ID NO: 347140 - DNA, 209 bp, Zea mays
  unsure (1)..(209): unsure at all n locations
ggggggaggggatttcccctccaggttttcccccccttgggggtcccttggcccctttttccctgttcccccccccggttctccctccccgtttttccttttaaaacccccctcccccccccaggggggggccccccgaagcctgcctttcccttaaggggggttgccccccagnccaacccctctttttggccctcccctttttcccc

SEQ ID NO: 347141 - DNA, 105 bp, Zea mays
  unsure (1)..(105): unsure at all n locations
aaagtaaanatagtataaaagtaagtttttgaaaataagataaaaaagaataaggatgtaatttgtanaaattttaaaaaaaaaaatttttttttttattttaaa

SEQ ID NO: 347142 - DNA, 273 bp, Zea mays
  unsure (1)..(273): unsure at all n locations
ttnnnaaaagagaacaccgggccttttaaaatttttttttggcccccaaaaaacccggggcataaaccccaccctttttaatttaaaaaaaaaaaaaaaaatccttttttaaccttttaacttggaggttaaaacccgattttcaaaatgcctaaaccaaaaaaatttccccctttaaaaccggaaatcaaaaaaaaatttgccccgctataaacccctttttttaaccaaaaaaaaaaccagcccccccaaaaaagtccctttttttacccc

SEQ ID NO: 347143 - DNA, 357 bp, Zea mays
  unsure (1)..(357): unsure at all n locations
aattagagtgaaaggttnnatttttttttttttttttttttttaaannnaaaagaaaaggaattttttaaaaggtttatttttggttgagggaaaaattaaagggggtaaattaaagggaatttttttttaaggagggggattttaaaaaagggaaacaaaaaaaaaatttttttttgggtcccaaaaaattttttaaaaaaaaatggaaagggaaaaggggttttatttatttttttaagtttaaaaaaaaaaaaaaacacttttttttttaacccaaaaaatatgtccacaaaaaaaaaaagccccgccggggagaaaaacacgggccataacaacccaattatttgttttccct

SEQ ID NO: 347144 - DNA, 266 bp, Zea mays
  unsure (1)..(266): unsure at all n locations
aaantnnaaaaatnnnaagggggantggtgggtatttataaaaacaaaatgggggggctttttttttaacacaaaaaatttggatttattttttttgggggaccccggaccccccccctttgttaaagacccctccccaaaaaaaagttaaaaaaaaattttttttttgtaacaaattttttaaagggtttttaaaaaaaaaaaaaggggtttcccccccccccccccatataatgggggccacccccctcccccccccccctttt

SEQ ID NO: 347145 - DNA, 213 bp, Zea mays
gagcggggacaaatacttggtccaaatgttaacgtcaagccataaacaaatgccatgcaaataagggtgaaccttgaaaacaaatgttaaaacaaaccagactgggccacaacttgaacagggaccgggcaattttttttcgaggcaattttttgacaaaacttcactttagggccgaggaattacaaaaaaatcacttcagggcccaagggg

SEQ ID NO: 347146 - DNA, 130 bp, Zea mays
aaaaaaaaaaaagggtccctttttttttgggagggttctttaaccctgtttaacccggggggggcggggtttcccttaaggggggttttttgttcttttccccccccccttaacccccctttttttcccc

SEQ ID NO: 347147 - DNA, 275 bp, Zea mays
agggcaagatgattctgggattggtttgtgaaacaatagccggattacataaaaacaagatgggacgctggttcttaatccaaaaaatgggggccttccttcatggggggagacgggtaatacaaccctgggaaagggttatttttcgactggcaagggacaactggaaccggtgggtggatcaatcattttaaccattcattttcaaagaggggtgaaggctttcaaccattccaaaaccctggtggggggtttaaatacccattccccttttt

SEQ ID NO: 347148 - DNA, 173 bp, Zea mays
tttttaaccgaaatttccaattccactggagataggtgaacaattcccaatctggcctttcaaaaaggccagtaggtcaaaaataccccaaatgggggatggtttggatgggggaggattcatcaaggaaggggccttttaaaaaaacaaaaacattggtgacatctgcagac

SEQ ID NO: 347149 - DNA, 92 bp, Zea mays
aatagtagtaatattttaaataattaaaaaaaatttttaaaaaatatttttgaaaaaaacttttaaaaaaaatttttattaaattaaatgtt

SEQ ID NO: 347150 - DNA, 93 bp, Zea mays
ttaaattagggacaacgtttccactccttaaaatgatgaaaatacatcgataaccaagtaaagggctccctttaacataataagggcaaaatt

SEQ ID NO: 347151 - DNA, 370 bp, Zea mays
ttttgatgaacatttatcactgatttgaacaacacacttctggggtgacagaataaattggggagatatgtaacagcaaaacgaaacaaaattacaggacccattctcaaatcacaaatactcctggccgccgccgtctcgcgaccatgtcgccgaccacctcatcgagcagtgagctcagtacgtggctctccacctgctcaccggcctcgaactcctccacccggaaatcgacccatgtgcccagcccgccgctcatgtccttgtcgacgagctcgtcctccgtccagtctcccatgctcttccagctggttacctcactgcagacttgggcctccatgcccagcgtcgctgctcctttgctccatgc

SEQ ID NO: 347152 - DNA, 153 bp, Zea mays
gaaggaacgaaacccttttttttttttttccaaagggttttttttttcaaaaaaagcttttttaatttggagaaacaaatttttttgggggggtttttaatttaaattgggccccccaaatttttttgccccccgggttaattttttgcaaaa

SEQ ID NO: 347153 - DNA, 205 bp, Zea mays
tgcagcaccaagaagcaccatttttttccttaggatttaacttaaaataaagcctgacgggggtaacagcacccatcgatcccgaatccatgctggttgatgcatgggtctgctggagcccaggatgaacacaacacttacaactggcacaaaacgacctttaatcaaaaacacagatgggcaacaacaaacacgagacgaacga

SEQ ID NO: 347154 - DNA, 159 bp, Zea mays
ggggggaaagtcctttttttaaaacccccttgttatgcggggttcgggtttcaattttttttttaaaaaaaccgggcttggggttgccacaaggaggccttttttttggcccctcaaacaaattgccgcggatgagatccattttgggcgcccctttta

SEQ ID NO: 347155 - DNA, 104 bp, Zea mays
  unsure (1)..(104): unsure at all n locations
ggttacatgagcatattccatttgtcaaatattatatcttatacatnnttcgaggacaaatgtactgttcataatcatataaattaaattttcaagcctgggga

SEQ ID NO: 347156 - DNA, 314 bp, Zea mays
tttaaaaaaatttttttctattttttattttttatattttttaggtttttagaggtttttttattataaaatttttatatattttaaaatttttggggccccccaacccctttttttttttggttttacaaaaaaaaacaatttttaaaaggcacccccaaaaaaaaaaaaaagtttttccccccctccgggggggccccactaagggaaaaaaaaaaagggggaaatttttagacaaaaaaaaactttggggggggaaaaaaaaaaaaaaatttccaaaaccccaaaaaagaggaaagggccttttccccctt

SEQ ID NO: 347157 - DNA, 305 bp, Zea mays
  unsure (1)..(305): unsure at all n locations
tttttttttttttttttttttttttttttttttttttttttttttttttttggttttttttttttttttttttttttttttttttttttttttttttttttttttttttttttttggggggggggggaaaaaaaaaaaaatttaaaatttgttttgaaaaaatttaaaaaaagggggggggggaaaaaaaaattaaaaattggttgggaaaaaaaaaaaaaagggtttatatttttttnngggaaaaaaaaagggggaaaaaaagaggaaaaaatttttggttttggggggggaagttttttggg

SEQ ID NO: 347158 - DNA, 104 bp, Zea mays
tgggaccccttggtgggggtttaagggtccaaacttaccttccctttcatgccaccccatttttttttttttggaggacccaaaatcaattcaccgggcggaaa

SEQ ID NO: 347159 - DNA, 101 bp, Zea mays
  unsure (1)..(101): unsure at all n locations
tttttttttttttttttttntttttttnttaaccgttcctggcattatttttcaaattttcccctggccgggtcattttttaattacttgggccccccaac

SEQ ID NO: 347160 - DNA, 233 bp, Zea mays
ggggggaacaaaacattttattcaaatccccggggggttttttttgttccaaatttccgaattccagtctctttccccacagcagggaggaagtaaaagctttttccacgactcattttacaaaacacgggggcgagcctttccccaaaaatccatgtgcgggggggtaaaccttatcctttcagggctaccccaagggccgaaacaagattacccccaaaggtggcagaacc

SEQ ID NO: 347161 - DNA, 165 bp, Zea mays
tttttttttttttttttttaattttttttttaaattttttttttgttttttggggtttttttaatttttaataaaaaaaaaaagctcataatttttataaaaaaaattttaaaaaaggggataaaaaaagaaaaaaatggataaaggaaaaaggggatttaaggg

SEQ ID NO: 347162 - DNA, 172 bp, Zea mays
aaacggggacacagggacctataaaaactgagatacaaatcctcagccaaaaactaagtttcatacaacagagaggacgaattgccgcaggaaaacaaaagatttctaaaaccctcttctccacaaaggtatacaacaagcccctggtgtcacctgaccaagagttccccac

SEQ ID NO: 347163 - DNA, 166 bp, Zea mays
taccaaacaacatctcggccagacaaccaaaccagcatccaattaccatacttgtggtccttttgcccgcacatgttcaaaagaaaaaaaaggctcccttttttttgcaaaaaggtcttgaacccggatgaaccaaggcgagacgggctggccctaaacggggcat

SEQ ID NO: 347164 - DNA, 263 bp, Zea mays
cgacctaacttattccatttatttaccggaccccgagaggcattttcgcgggccaaattggtccatcaaaaaaaggtggcccctaccccaggaaccagaaaagtttttaattccttaacctgggccaattaattggccagaagtggcccattccttttttccaggaaggaaggaaggaaaaggaccgggggccttacattccctgccaagcaagggctaatgggattattcgatggggggctatatatacgggggggttgggg

SEQ ID NO: 347165 - DNA, 60 bp, Zea mays
agtaatatgtatgtgttattatttggagtttttgggattttaaggataattggaaaattt

SEQ ID NO: 347166 - DNA, 137 bp, Zea mays
  unsure (1)..(137): unsure at all n locations
ttttttttttttttttttttttttttttnnnnnnnnnatnnaggggggttacgcaantttgcaaaattacccggggggtttacaaaaccagcacaagttccccccttacatttaacaacaactactggaaccccccc

SEQ ID NO: 347167 - DNA, 256 bp, Zea mays
tttttttttttttttttttttttttttttttttttttttttgggttttttggtaattttttttttttttttatttttataaaaatatatttttttttttttttttattttttttttttttttaaaaaaaaaaaaaaaaaaatttttatgtgattttaaaacaaaaaaaaattgtgaaaaaaaaactgtttttgtttggaaaattttttaaaaaaaaaaaaaagaatataaaatggttttaaaaaagggtttttttt

SEQ ID NO: 347168 - DNA, 101 bp, Zea mays
gggggggaccgcaagaaaatatctggtcccaaaaccacaatttccgaagggttgttttttttgccaaaagaacattttagttgggttggtttttttatttt

SEQ ID NO: 347169 - DNA, 52 bp, Zea mays
aataaaaaaaactttttttgtttgctttttttgcgctttgatgcaaaaataa

SEQ ID NO: 347170 - DNA, 182 bp, Zea mays
ggacccaaaaaaaaaaaaaaaaccctccaaaaatgaaaaaaacccccccccccccaaaaaacccaaattcccacaccccccccctaaatttttaaaaaaaaaaaaccgtttccaaacttttgggcggtgtttttaaaaataaaaaaaaaaaaaagccccaaaacaaggggctttttttaaac

SEQ ID NO: 347171 - DNA, 308 bp, Zea mays
cccaaaaaataatactggcgggttccaaaaaatatttctgacagatcaagagacccctgggacaggtcacacaacaaacccccttggttttgcaatactttgcatcacatagcatgttttcatccaagcgggttcattttaattttttttataaatattccgggatccaaacatccgggcattcttttaagaggggaatcataaaacatgctctggaacaagaggggcaatctaagcttggggggaatcagttcccctttggggcacccttttttgcagcctggggaggggttttttttgttttattt

SEQ ID NO: 347172 - DNA, 168 bp, Zea mays
gagccctcaatgggaatttttaacatcaacacttgcatagttaccacaggaaggacaagttattttattacccaaggcaaatgggggggtaatggtggactaaaactcggatcctaaaaatggatcggagaatgcccaaggaacaaaaaaacattcgtccccgataac

SEQ ID NO: 347173 - DNA, 302 bp, Zea mays
gttagctttgtaattatcaagcatttggttcaattttgacagaggattgatgtgtgtgtataaaaaaaaaaaaaaaaaaaaaaaaaaaaaaaaaaaaaaaaaaaaaaaaaaaaaaaaaaaaaaaaaaaaaaaaaaaaaaaaaaaaaagataaaaaaaaaaaaaaacaaaaaaaacaacaaaaaagcagaaaaacactctcaacaagaatggatgaaaactccatcccttcattccaggagatgaacatatacaatgacgaggtcactctccagttcttgaaccctaaggtgcacgctatcat

SEQ ID NO: 347174 - DNA, 96 bp, Zea mays
cctggattaccgagtaagccctgaaagaaccatggtgctatgccccatcgtcgaggatttcaggaacaagattttactcactgaccttcatgtgat

SEQ ID NO: 347175 - DNA, 215 bp, Zea mays
aaaaaaaaaaaaaataaaaaaaaaaaaaaaaaaaaaaaaaggaaaaaaaaaaaaaaaaaaaaaaaaaaaaaaaaaaaaaaaaaaaaaaaaaaaaaaaaaaaaaaaaaaaaaaaaaaaaaaaaaaaaaaaatgaaagagaaaaaaaaaaaaaagttgactgggaaataaattggaaataaaaatgtgggggggggggttttaaaatttaaaatttt

SEQ ID NO: 347176 - DNA, 112 bp, Zea mays
cccacgcgtccgaaaaaacataaactttttaaaaattcaaaaaaaaaaaaaaaaaggggaaaacacgaaaatagataaaatacctaactggtgggcgagccttcatgttccc

SEQ ID NO: 347177 - DNA, 382 bp, Zea mays
ctaatatctcacaagccatttgtgatgaagatgatgagctcagagtattggatccaccagcccctgcatcagtgagcaaaagggcaaaaaatgttggtactggtaattcaagaacaagaattaacaagcgtacacaagatgggaatgtggttgagatgatgggaaggtttctagaaatgaaagaaaaacaagctgaggcggatgaaagggccacaactaatgcaaatgaggatgatttccctattcaaacatgcattgctattgtggatggaatggaagagttttctgatgatgagatggttgattctcatgatgtttttaaggatgcccaaatccgggccattttgatgactgccaaagatgctacgcgcataaaatggtt

SEQ ID NO: 347178 - DNA, 345 bp, Zea mays
  unsure (1)..(345): unsure at all n locations
cgcctgcaggtacccgagtccggatattcccgggtcagacccacgcgtccaggtcgagccgcggcgcaatggnctcctctgctgttcagggacatgaaggggctctcgtgctcgtcccaggcgtccacggcgacatgcccgagcctggagcggcacccgacgccccgcccacacaaggccagcgccggcgccagccccctgcctcccgttcctgctgccgagcccaggaccaggacgcaccggcttgacggcaagaaagggcagccgccgcagcacaaggctgccgtggtccccgcgaacgccggtggtggcctcgtcagccccgccggctcgtccaggtacctg

SEQ ID NO: 347179 - DNA, 137 bp, Zea mays
  unsure (1)..(137): unsure at all n locations
tttggatgctagaattagaatggttaagattaaagagaactgatgtgataggcacatctttttgttgtccctgaaataaagtcagttgtgggcgttgcttgtccgccccntnnataaaataaaaattaaataataaa

SEQ ID NO: 347180 - DNA, 295 bp, Zea mays
atccttttccccacaatcatggttgaagctggaaggcgttcctcggttttgaatttctttggtaggagtaatgaatcctatctggccagaggttcgaacctgggtgggtgactgggtgttccattacggtgctaccaactgagctatgcttgttctcatgtaataagaacaattcctgttcaaggaggaaaacaaatctgcaatactgctttaagataaaattttcccttttttcacaacaagcaaagataagtgctactgcgtgctaggatacctaatccattatcgatgagga

SEQ ID NO: 347181 - DNA, 67 bp, Zea mays
ctgctatcctgtgatctgccctgagtggctcctatcgagttatgtttctgtcgggtcttatggatct

SEQ ID NO: 347182 - DNA, 67 bp, Zea mays
gacccacagcgtccgggccagcccttagttttttttttatttttcttactttcttctttctttcctt

SEQ ID NO: 347183 - DNA, 64 bp, Zea mays
cacgcacgcatacacagcacagagtgaggtaagcatccgaaaaaagctgtgatctgatcgacat

SEQ ID NO: 347184 - DNA, 291 bp, Zea mays
ggttgggcgccgcatatcagcaagagatagccctcgaggtttttggagatgcccaacctgcacctatgataattcagtttccacagatatctgtgagatgtgcagcactgcacgagataaccatgcttttttgcggagacagcatcatcaagccgtaggtaacacggtggaactccctgttgatgagatgcgccgtaagaggctgcaaaggtttgacagatgatgtaaatcattgttgtcagtacacacattgtgcgctgctgaacacagttgaagtatggcaggtccatt

SEQ ID NO: 347185 - DNA, 51 bp, Zea mays
ccacaacaagccagtgcaagaggtacttgctgagatgaccaacggaggggt

SEQ ID NO: 347186 - DNA, 285 bp, Zea mays
  unsure (1)..(285): unsure at all n locations
gatagaactttcttagatcttataatatttggcaggaagacttcaaccacaatgaaacattcgctactggtacaaaactcagaagtacaagatcacagacaaaacagccggacgcgtgggtgaacgtgctacggttatgatggtnacaaaaaaaaaaaaaaaaaaaaaaaaaaaaaaaaaaaaaaaaaaaaaaaaaaaaaaaaaaaaaaaaaaataaaaaaaaaaaaaaaaaaaaaaaaaaaaaaaaaaaaaaaaaaaaaggggggggccgttttaaaggaccca

SEQ ID NO: 347187 - DNA, 107 bp, Zea mays
atttaaaccgattcaatactacccaatccacatggattaatgctgaaacgaacaagccctaagacattgttcggttattctaattccatgtgtattggaatggattg

SEQ ID NO: 347188 - DNA, 251 bp, Zea mays
atttgagaatttttttgtatttttttttgccgtggtggagtggaagtgaacaggagagaggttcagggcagcagggaatggctgtgtatagctttgactgattggatgagattgaaatgaaatgaaatggagaagatactgttccttgacaaaaaaaaaaaaaaaataaaaaaaaaaaaataaaaaattaaaaaaaaaaaaaaaaataataaaaataacataaaaaaaaaatgaaccgacaatatatctta

SEQ ID NO: 347189 - DNA, 360 bp, Zea mays
  unsure (1)..(360): unsure at all n locations
tcataaagaggctatccgtgaagtctgaatgacacattttggtggattctcaactaaggtgatttactgttcaaaatcatctatacagatataggcaatcaaatcagtttgcctcgcgaagagtataggcgagtattatgatcgggtgggatgcagaattatggtttagttgcataggataacatgcttctgtatgacacttgcgatgtatatatttttgctaaagagccctcctttcaggatgtttgtagccagcttcttttggatgtaacagatggaggccaagacgcctgttctgtctaatgaggcacattatatgtagctgtactattcgtggtccagcaaaattttggcnnngaa

SEQ ID NO: 347190 - DNA, 399 bp, Zea mays
  unsure (1)..(399): unsure at all n locations
tagatcgctgccggttgcagctgaagagaaagaggagttggcgttctacgaaggggtgcggttttgttagggtagccaccggagttgaggtcccttgccaaggaacgaacgaacttggtgcctgtggcggacagctgctattgtagctaggcgcatacatgtttttggaaaaggaaatcgagtgtaacactgacatatttattgcatgtctatctgtatagacaagtcaataacaccgacgctgttcggctgatgcattccanaaaaaaaatgtacttttcaattttatttattaatattttgtgtaataatcgtgatacatttgtccatccttgaacaaaaaattgtgggtttgtgccaaattctagaatatttgtttttaaatgtgaatatttaatt

SEQ ID NO: 347191 - DNA, 69 bp, Zea mays
atgtaatgctcgctctctaaaagattcgagaaatataaatgaagttaaagcttcgtttgaatttgaatg

SEQ ID NO: 347192 - DNA, 322 bp, Zea mays
gtgttgggctatatgtatatcgatcgatgggcggaggatatgtacgtatcttgttttgatacccgcggccggggccctcctagaggcgtactgtatgattgattatgcgggccttctacaactactactggtgttgagatatatatatatctctacaccggtcgcagttgtaaatggaaatcgatcgatgggcggaggatatgtacgtatcttgttttgatacccgcggccggggccctcctagaggcgtactgtatgattgattatgcgggccttctacaactactactggtgttgggctatatgtatatctctacaaaaa

SEQ ID NO: 347193 - DNA, 415 bp, Zea mays
gtgggttggcttctcctccccctccggttcgggttcgggttcgtgaggttctccggggttcggtttcgtgggtgagcggatcgagatggcggcgtcggatgttgagtaccgctgcttcgtcggcggcctcgcctgggccacggacgaccactccctccacaacgccttcagcacctacggcgaggtcctcgagtccaagatcatcctcgatcgggagacgcagaggtcccgcggcttcggcttcgtcaccttctccacggaggaggcgatgcggaacgccatcgagggcatgaacggcaaggagctggacggccgcaacatcaccgtcaacgaagcccagtcccgcggcggccgtggaggcggcggcggtgggtacggtggtggccgtggaagcggcggctaccgcggtggcggg

SEQ ID NO: 347194 - DNA, 421 bp, Zea mays
aattcccgggtcgacccacgcgtgagaactttcttaacggaaaacttgaaacccttaccaactgaccttacagaagatggtgctggggacggccatcaagcctggtgaggcaaagcatgtggctgactatgacttcacggaaaaacgcatgtggtgaccctccacagaatcttatgctttatacacacaaagatgcagctgatcatcgctatcattcgtacttaatttatgtgccctgactagtttttgtatatttacaggctggtagtgttcgaattaatttcccagcaagtgaaactgtcgaaggaaaactacaaggctgacagtcgaacgcgtgggagatagcttaattgtgccttatgataagcaggcatgctttcctggtttatttcatacagctactagtagtttcagctgcaac

SEQ ID NO: 347195 - DNA, 443 bp, Zea mays
  unsure (1)..(443): unsure at all n locations
ccgggccggaattaccgggtcgacccacgccgtcggtttggttccggccgaaaaaccagctgtccccgccaccgtttcccctaccgccgaagaagcaggagcaccatcacccgccaccgcctctgcccacacttccgccgaagaagcggctggcgtcaccgcctctgctgcctggaagcgagaagcagtgggtcatctcctccccgtcggagccgcggttcgtgccgctgccggtgtgggctctgatgtccggctccgggaagcgcaagaagcggtcaggctgcggcgggcgcgtncccgcccttcacaccccagccgccgncgaggagaccgggcgcgcctgagaggccgagacgatagacgacaccctccctgttactggtatccatcccctgctccttgatcatgccaatctgatgaccgctcagtcgatcgatgctaat

SEQ ID NO: 347196 - DNA, 158 bp, Zea mays
aagaccagcacgcatgcatgggcatactctatatatatatatgtatagcccgtgcccgtgccccgcctttgtaccaatacaagccaaaccaagtggatgtgtattattattgcgctatcacatacatgtacccctgctacctgaaaaaaaaaaaaaca

SEQ ID NO: 347197 - DNA, 87 bp, Zea mays
tccggttggttgatgaaaaggctgggccagaagagatggcagtggacagaccaaggccccccaagcctactccagacgccgatgggt

SEQ ID NO: 347198 - DNA, 144 bp, Zea mays
cggaattcccgggtcgaaccaagccttccggtgggaacccgtaattaatggggtcggttaaatgttagaatttgcttgtagtttgtaagcgtgatacatgtactctgagccgcttgatgcaatgatgctgtttcattttctgtg

SEQ ID NO: 347199 - DNA, 342 bp, Zea mays
tccgcggacgcgtgggtgacgacggaagatggttcattttactcctatttattgctacgttgtgtgtatgtgttatgcagctatgctgtatggcttatggttatgagcgccacaaatttgtttgtcaagattctggatgatatacttatgcattctgacataataggaggcaaaacctcaagattttccttatttttattttatcaaaaaaaaaacaaataataaaataaaataaaaaaaaaataaaaataaaaaaataaaattttcggtttgggtattgaataaaggtatgttttaaaaataccaaaatgacttggggggggccgttttaagggatccaag

SEQ ID NO: 347200 - DNA, 321 bp, Zea mays
acgtcatgtacacacaacggcaaattgtgcttcactggactccgacgtaacatctgagagccagcctgatgatgatcataggcctacccacatgaatgcatctgatataatatctctatcaactggctggcacctctgtggcttatttgaagaatctaactggaagagagaatccaaagacacatgtaccaacacaagctcgactatcatatgaaacatcgaagatactgcacagaataagctgctgaatgtgacataaaaggatgtacgcatgtttatgatggaagcttcaaagcctggaaagacacgggaaatgggtat

SEQ ID NO: 347201 - DNA, 320 bp, Zea mays
  unsure (1)..(320): unsure at all n locations
ctctctctttgttgttggccacctttatctcgtgatgtttgtgtgcatgtggtgggctctactgctaccgctacgacgatcggtgtccatcaccggatcaagcaagacgaaaggcatcgaaacatggtagataaataaggacttggccctgcgttgtgtggtggtaagaaattcttctgcctgtgttcttgtagagcctactcgtacgttctcgcccaccctgtccgtacgtacgtgtacgtagttttgccgnccggccgctggttcgtgtttcgtcgtggtttccgggtctgtattaatacttcggcccttccccaatt

SEQ ID NO: 347202 - DNA, 65 bp, Zea mays
caaaaaaaaaaaaaaaaaaaaaaaaaaaaaataaaaaaaaaaaaaaaaaaaaaaagggaaagaaa

SEQ ID NO: 347203 - DNA, 239 bp, Zea mays
  unsure (1)..(239): unsure at all n locations
cggaanaaccgggtcgacccacgcgttcgtaataatgaaatggctaccctttcacatcattatttgctatagtcagttatgcgtgccacatttaccttggcttcttttatggtttaaatttatttttactactatgctgtgacctgacaaatccttatattgatagagcgtttgcgcaggcgctgtcagtggatccacatatatgtgtatgatacgatgcatccttatgcccggttgaa

SEQ ID NO: 347204 - DNA, 268 bp, Zea mays
  unsure (1)..(268): unsure at all n locations
ccggnncggaattgccgggtcgacccacgcgttcgcttcatccgcgcgcgcgtcagagactcagtttccatgcatatacgtgcgccttcgtcagcgcgcatcgacgtcacccgagcgcgctacactccccatcgttcacagttcactgctcgcgcgtcgtgcagacaccacaccatggcacctgccgcccctgctgccacgggcgctgtgagccccgccgtcaccaatggcggcgtcatggttgcagcacgctccgtcaggctgggcc

SEQ ID NO: 347205 - DNA, 278 bp, Zea mays
  unsure (1)..(278): unsure at all n locations
ctttgactggctntaaaaaataatataatttttaaaaaaaataaaaaaaaaaaatggttttgtataaattatataaaaaaaaaataaaataattaaaattgggcttcccctttaaaagattccaaactttcctcccctttctttcaacttcataactcttttattattttctcctaaatttaattccctgtccctctttttacaacctttttattgtaaaaaccctttcttttcccaactttaatctcctttaaacacattccccttttcccctcttg

SEQ ID NO: 347206 - DNA, 473 bp, Zea mays
cggaattcccgggtcgacccactctttcttaaaaaaaaaaaaaaaataatatataaaaatttattaaaaaaaaaaaaaaaaaaaagataaaaattaaaaaaataaaaaaaatattaataataaaataaacaattataatttaaataaaaaatgtcccgcccccttttaaaaatccaaccttacttccccttttttcctacataattatctttttattattctccacaaaataaaatttatttaccttctatttacaatctctatatttaaaaaaccttctcttttcccaacttattcccctttaataatattccccctttcaccatttattttaaaatttataaaatctttaacacttatcccttttaaaaattattcaccccataattataattttatcctcctcctttatctatccttttaatcacctatctatttttttttttattcctcatatttatacttttattttt

SEQ ID NO: 347207 - DNA, 176 bp, Zea mays
attaaaaaaattaaaaaaaaaaaaaaaaaatttcaataaaaaaaaaaaaaaaatagaagatggttaaatcatacttaacttcatatcctttccccccctccacctttttatttctttcctttcactcccttccattccccttcctttctttttccactccctttccttaattttca

SEQ ID NO: 347208 - DNA, 231 bp, Zea mays
ctggcatgttgcataaattgctccccaaataaaaaaaaaaaaaaaaaaaaaaaaaaaaaggaaaaaaaaaaaaaaaaaaaaaaaaaaaaaaaaaaaaaaaaaaaaaaaaaaaaaaaaaaaaaaaaaaaaaaaaaaaaaaaaaaaagggggcggccgttttagaggatccaaattaacgtacccgtgcatgcaacgcaatagcttttttttagggacacctaaattcaatta

SEQ ID NO: 347209 - DNA, 330 bp, Zea mays
  unsure (1)..(330): unsure at all n locations
ggaanncccgggtcgacccacgcgttcgnaaaaaaaaaaaaaaaaaaaaaaaaaaaattaaaaaaataaaaaaaaaaaaaaaaaaaaaaggaaaaagaaaaaaaaaaaaaaaaaaaaaaaaaaaaaaaaaaaaaaaaaaaaaaaaaaaaaaaaaaaaaaaaaaggggggggccgttttaaaggatcaaattttacttacccttgcttgcaacgtaatattttttttttaggggaacctaaataaaattaattggcccccttttaaaaacgcgttgattggaaaaaccttgggtttcccaaattaaatttctttgaaaaaaatcccctttt

SEQ ID NO: 347210 - DNA, 311 bp, Zea mays
caaaaaaaaaaaaaaaaaaaaaaaaaaaatttaaaaaatttaaaaaggaaaaaaaaaaaaaagaaaaaagtataaataaaaaaaaaaaaaaaaaaaaaaaaaaaaaaaataaaaaaaataaaaaaaaaaaaaaaaaaaaaatataaaaataaaaaaaaaaaataaaattaaaaaaaaagggggggcgtcttttaaaagtttcaaattttccccccctgtttttgaaaaaaattattttttttttgtttcaaataaataaaaattaattgccccttttttaaaaaataggattttgaaaaaccctttttttt

SEQ ID NO: 347211 - DNA, 254 bp, Zea mays
cttttcactggattcgactttgaagcccgttgaggcaattagcagagtcgggatgttaattttggtcgcccaaaaaaaaaaaaaaaaaaaaaaaaaaaaaaaaaaaaaaaaaaaaaaaaaaaaaaaaaaaaaaaaaaaaaaaaaaaaaaaaaaaaaaaaaaaaagggagtaaaaaaaaaaaaaataaaaaaattaaaaaataaaataaaataatattgtaaaatgtttttaaaaaaattatgtaaatttaaaaa

SEQ ID NO: 347212 - DNA, 73 bp, Zea mays
aaaaaaaaaaaaaaaaaaaaaaaaaaaaaaaaaaaaaaaaaaaaaaaaaaaaagaaaaaaaaaaaaaaaaaaa

SEQ ID NO: 347213 - DNA, 179 bp, Zea mays
ccggatctaggttagctaggaatgggaatttgttgattcgttggaggccttccgagcacgcgcgcacggcacggtactcgtacagacaggccgctgccgctgccgcctgtgtggaaaggccctataccgtatatatagtgtgacaaagtcaataaagctgaaaagatcgcgttatttcc

SEQ ID NO: 347214 - DNA, 73 bp, Zea mays
aaaaaaaaaaaaaaaaaaaaaaaaaaaaaaaaaaaaaaaaaaaaaaaaaaaaaaaaaaaaaggaaaaaaaaaa

SEQ ID NO: 347215 - DNA, 480 bp, Zea mays
gaattcccgggtcgacccacgcgttcgaaataaaaaaaaaaaaaaaaattttaaaatttaaaaataaataaaaataaaaagagaaagtgaaaaataaaaaaaaaatattataataaataaaaaaataataaatattaaattataattattatttaacatttatttctttaattattaatatatttattattttttgttgttttttttaattatccatcttttttttcctttctttattatattatatttttttttattttttcttaatattctttttttttccctcttttttatatatcttattttatttaaaaatacttgtttttttccaatatattttaccctattttatgaaattactttttttcttacttttgtgttttaattttataaataggtccttttaatttttttttttttaaaaatattttcctctatatttttttttttttttgtttctccttttttttttttattttt

SEQ ID NO: 347216 - DNA, 55 bp, Zea mays
aaaaagaaaaaagaaaagggaatgagaaattgactaaagctggtcatttttgctc

SEQ ID NO: 347217 - DNA, 305 bp, Zea mays
  unsure (1)..(305): unsure at all n locations
cggnncggaattaccgggtcgacccacgcgttcgtaaaaaaaaaaaaaaaaaaaaattaaaaatttttaaaaaaaaaaaaatatatggggaaaaaggaaaaataaaaaaatatattttaaaaatattattaaaaaaaaattttaattaattaaataataattaattatatttttggttgttcttttttattatttattttttctttctctattttttcaaccctttattttttatttttttgtttataattttttttttcttttttgtattttattatattttcaatattttaaaattttttttt

SEQ ID NO: 347218 - DNA, 262 bp, Zea mays
aaaataaatcaaaaacaacaaaccataattttttatttttttaataaaaaataaaaaacccagatatcttaaaaaagaattgtattacgagcattaacttacaatccaacacacgtcgttcagtacataacatatatattccaaatttaaaacatctttgccagaaacgtttcttgaggcaatggctgccttgtttggtacataaaatatcttctgcttttatacttcgacaaattggcctccttcagtatgctgttatact

SEQ ID NO: 347219 - DNA, 139 bp, Zea mays
  unsure (1)..(139): unsure at all n locations
gaatngcnggaccgacccacgcgtacggctgatggcccctcagtaaagcttcctgcagcttcgttgttactttgttcgggcgaagcggcggcttcttttgtttgctcatcaataacatctttcattaaattttttttaa

SEQ ID NO: 347220 - DNA, 321 bp, Zea mays
cgacccacgcgttctgttgagtttatctcttgattatttcacttatttttgctagaactgtttctagggctagagaagaaattaatgcgtgctttcttttgagcttttattgttttaaaaaaaaattatacttttttttattaattaatttaattataaacccctatttttatttactaattattaaaaaagggcggccgttttaaattatccaaattttctaacccaatatatgctatttataaaattattttatttggtaaggtaaattcaataaactttccgtctctttttaacgttttaaatggtaaaacctttttt

SEQ ID NO: 347221 - DNA, 130 bp, Zea mays
aaaaaaaaaaaaaaaaaaaattaaaaaaataaaaaaaaaaataaattcttttggtaaaaattacaacttacatacactttctttcaaaaataatatatatttcttaaaaaaactctaaattctttttaat

SEQ ID NO: 347222 - DNA, 63 bp, Zea mays
  unsure (1)..(63): unsure at all n locations
naaaaaaaaaaaaaaaaaaaaaaaaaaaaaaaaaaaaaaaaaaaaaaaaaaaaaaaaaagagg

SEQ ID NO: 347223 - DNA, 111 bp, Zea mays
gtctaaggacacttacgacctgctgcacgcatacttttatggactaaacaatatggcgcgttacaacgcggactggaaaacctgcgtacccaacttaatgctgagacatcc

SEQ ID NO: 347224 - DNA, 120 bp, Zea mays
cggacgcgtgggcggacgcgtgggcggtcacatcttgtatcaagctgacaatgacatggcggtgagaacactcatggatgagtctgggagatatgtccatcgtccgtcccggtggctgac

SEQ ID NO: 347225 - DNA, 89 bp, Zea mays
  unsure (1)..(89): unsure at all n locations
gaatgnccggggcgacccacgcgtncgaaaaaaaaaaaaaaaaaaaaatataaaaaaaaaaaaaaaaaaaaaaaaaaaagggggggcgg

SEQ ID NO: 347226 - DNA, 73 bp, Zea mays
tctagagtattcaagcttacgttcgcttggagacggcgtcttatctcttatatagtgttttctaataacaatt

SEQ ID NO: 347227 - DNA, 168 bp, Zea mays
  unsure (1)..(168): unsure at all n locations
acccacgcgtncggtcgctctgtgtcagttgttagtgctgtgttcatcctcggctccagcagacccatgcatgaaacaggatggactgcggatcgatggatgctgttacccccgtcaggctttattctaagttaatcttaaggaaaaaatggtgcttcttggtgctgc

SEQ ID NO: 347228 - DNA, 254 bp, Zea mays
  unsure (1)..(254): unsure at all n locations
ccgggncgacccacgcgttcgcggacgcgtgggcggacacttgggtgtaattttaggccgctgctttataggagtaggttgaacaaaactattaaacctttatataaatataaaaaatatatattaataaaaaataataaattttaaaaaaaaataatataatatattatctttattatttaaaattttaatattaaaaaaatatattaatttgtatacaaataaatgggtttctttcttttttaaatcaaaaa

SEQ ID NO: 347229 - DNA, 254 bp, Zea mays
gtgaataatatattaacagaaattcaacttttggttatggaagccacttttggggcgagggctgatgttccatagaacatccatctggttgattgaacatgtggaattcaatgcaaaatgaaaagtatgagccacttttagcatgatcaatggcatctttcatacataagcctttttgaataagataagcctaataccaagtcgcgaattgcaatgaatatatgagctttgtgcaatgcttgtaagaataattt

SEQ ID NO: 347230 - DNA, 244 bp, Zea mays
atacccgggccgacccacgcgttcgacgtcaccaacttcgtgcccggcaagtgtaggggtcggaggggccaccgcggggcgtcaggggtctccgatgtcgatatctatgtgttcggatgcacgttagcgcgcactggttccagattgaaccatgatgtaaattacttaccgttccagggttcaatcggcaaggaataattgttgtgttcacttgtctctggcttttcaacattttgtaatatta

SEQ ID NO: 347231 - DNA, 302 bp, Zea mays
ctcgccttcgcccaaaaaaaaaaaaaaaaaaaaaaaaataaaaacaaaaaaaaatacaaaggggagagtgagaaaaaaaaaaagacaaaaaaagaaacaaagtatgtaattttttttattgagagtttggaaaaaattattttcgctcgccgtgttgtttgattatagtgtgttgtataaaatttttctgattgacaggggtgttactttattgtacacccctttgacatttttatttctctgagaaaaaaatgtcttttttgtgttctcattatttttttttattatgtgtcccgggtttt

SEQ ID NO: 347232 - DNA, 201 bp, Zea mays
tcttacactttggagccgccctttttaaattattgtctctctcttcttctcttggtttttttatcatccacattttcccacaatataaaaataccttttctttccgacataccaacatccatcttaatttatcctatttttctccttataatttacttttttattttttttcaccttcaaatcaatactcctttcttttat

SEQ ID NO: 347233 - DNA, 345 bp, Zea mays
ccggccggaattcccggtcgaccccgcgtccgaaaaaaaaaaaaaataaaaaaaaataaattaaaaaaataaaaaaaaaaaaaaaaaaaaaaggaaaaaaaaaaaaaaataataaaaaaataattttataaaaaataacaataaaaattaaaataaaataatttacttaataattgggttcccttttttttaaaattctaatttctataggcgtgccttttttataaaaatctttttttttttccccctttttaaaattaaatttttttttttttttccccccttttatcttttaaacccctctctttttaccaaatttttttttttttaaaattttttttcttt

SEQ ID NO: 347234 - DNA, 233 bp, Zea mays
atattttttttttttttatggttttttttttttatattatttattttttttttatttaaatttttttttttattattttttttattaattttttttttggcaaaaaaaaaaaaaaacttacccttttaaaaatttttataaaaaaaaaaacatttttttttttaaaaaaacacaaataaaattttctttcaaattttttaaaaaaaaaggtgcaataaaaatattttcccacc

SEQ ID NO: 347235 - DNA, 164 bp, Zea mays
atttagggggtccattcttacgtacccttgcttgctacgccttatctcttctatagagcctcctatttgcaattcactggccgacgttttacaccgtcgtttctgttaaaaccctctcgttacccactctattttccctgcttaatatccttgtttctccagct

SEQ ID NO: 347236 - DNA, 109 bp, Zea mays
cggacgcgtgggcggacgcgtgggttgcattgcataggcaagtcgagatgatgagttggcgttgtacactaagatgaaccatgtttgtgcaatagtggtggtttttgtt

SEQ ID NO: 347237 - DNA, 275 bp, Zea mays
gagcagttgaagatgcttccgacatgatctaaactagttgtatcgtcaagttaattctgctgaatcggtggacaaacttctacgttgtggcactggccgatcccagtgacttgccctaaaatttacgttctgtctttacatgggcatcctagtgttgtgctcatcacattattgatattgtttctgtgatgcttcctttggtcgtcttattataaaatttatttatataatttattatttaaattttaaatttatatttagtttaattttttaat

SEQ ID NO: 347238 - DNA, 58 bp, Zea mays
atgatctttgtgtgaaccattcaatcctgtgacattattcacctatgggtttttctta

SEQ ID NO: 347239 - DNA, 143 bp, Zea mays
ggcaaacttatctgaatctttttgataattggctagatcttctgttctggtgttatgaactcatgtggctattgctgttggcgtcaaaagattttttttattaaaaaaaaaaaaaaaaaaaaaaataaaaaaaaaaaaaaata

SEQ ID NO: 347240 - DNA, 88 bp, Zea mays
gattattttcacgaactcatgtattcacaatgttaggggaacgtcaattaagttggaatctgaacatttcatatgttagtcatttgat

SEQ ID NO: 347241 - DNA, 216 bp, Zea mays
taaaaaaaaaataaaaaaaattttttttttaaaaaaaaaaaaaaaaaaaataaaattaaaaaaattaaaataaaataaaaaataaatggggggtcgttttaatgatcaaattttacaacgctcttgcaaggtataactttttttttttgtcccctaaataaataacgggccgtcgtttaacaactcctttactggaaaaaccctttgtttcccaat

SEQ ID NO: 347242 - DNA, 58 bp, Zea mays
tattaaaaaaaaaaataaaaaaaattttttattataaataacaaaaaaattagggcgg

SEQ ID NO: 347243 - DNA, 104 bp, Zea mays
ggggcaaaaagggaagcgaaatgcatccggactaagtatatgaagctgtgttgtttcattcattatacagcttaataagatatatgcagagggtggatttgtat

SEQ ID NO: 347244 - DNA, 124 bp, Zea mays
atcaaagatgattagtgcacttattttgttgcataaaaaataaataaaaaataatggaggaaaaaaattaaataaaaagataaaaaaaaaaaaaaaaaaaaataataaaatattaataaaaatt

SEQ ID NO: 347245 - DNA, 327 bp, Zea mays
gaaattgttatgtgtgacttgcctttgtgtttaaaaaaaaaaaaaaaaaaaaaaaaaaaaaaaggaaaaaaaaaaaaaaaaaaaaaaaaaaaaaaaaaaaaaaaaaaaaaaaaaaaaaaaaaaaaaaaaaaaaaaaaaaaaaaataaaaaaataaaaaaaaaatattaaaaataaaaattgggggcgccccttttaaagtacccatctttccttccccgtccttccaactaaaaatttttttttttgggccccctaatttaattcctcggccccggttttaaaacctttttaattgaaaaacccttggtttacccaaatttatttcc

SEQ ID NO: 347246 - DNA, 143 bp, Zea mays
ttcccgggtcgacccacgcattcgctttgacacgtggtccgacgaatttgtcatatattgtacctacccatgatgttcagggaggcgtacgcgcgaaatgtgcaccagctaggaatcagagtcgatacaggggcatatgagtg

SEQ ID NO: 347247 - DNA, 170 bp, Zea mays
taaaaaaaataaaaaataaaaaaatttttttttaaaaaaaaaaaaaaaaaaataaaaaaaagggtggtctttctattggttccaatcttacttactcttgcatgcggggtcactgcttttctattgtgacacctaatttcaattcacgggccgtttttttacatctatag

SEQ ID NO: 347248 - DNA, 83 bp, Zea mays
cggattcaacagcgcattcggtttctttatgttgtggactaacctaagatatgatctcattgcatacttgtcttactattact

SEQ ID NO: 347249 - DNA, 178 bp, Zea mays
ctgaacaaggaggaaggatcttttgccctttttataaaaattaataaaataccatataaatggatggatattaatcacctctccatcaacaatttcatattcaaaacatctaatttccatctttatatcttgtaaaatcaatggggcggcccctctaaatgacccaactttccttacc

SEQ ID NO: 347250 - DNA, 414 bp, Zea mays
gagctctgttatcaaaaaaaaaaaaaaaatttttataaataaaataaaaaaaaaaaataaaaaaaaaaataaaataattaataaaataaaaatattataattaataaaaaattaaataataaaatttattggggcgtccctctttataaatcaaatctttcttccccttgcttcctacataaatactttttttatgggtcaccaaaaattatttaattggccgctgttttaaataattttaactggaaaaaccttgtcttttcccaatttatattgtctttgtaatcaaaatcccctcttttacccagcttggttttaataacaaaaaaaaggcccccttctcctttatctcttttttactaaaaatttttccccacttctttatattgtatattggtaaccccccccttttta

SEQ ID NO: 347251 - DNA, 184 bp, Zea mays
ccggtttgactccacgcgttacgccttgattggtaaataatgtctatttttttttggccttattgcaaacaaagtgtgagaagcttttccgggtgattcgtgatgaatgaacgccgcctgctttgtttaccacccgggagtgtatcctgttgcacattgtaacagacgtgcatctattgaacta

SEQ ID NO: 347252 - DNA, 71 bp, Zea mays
  unsure (1)..(71): unsure at all n locations
ccacgcgnccggaaaaaaagaaaaaaaaaaaagaaaaaaaaaaaaaaaaaaaaaaaagaaaaaaagggggg

SEQ ID NO: 347253 - DNA, 77 bp, Zea mays
cccgggtcgtacccacgcgtccgaaaaaataaaaaaaataataaaattttaatataaaaaaaaaaaaaaaaataaaa

SEQ ID NO: 347254 - DNA, 122 bp, Zea mays
cgacatttatatttattgaaatcttgcagtatcgcttgacgatgtaaaaaaaaaaaataaaaaatatttaaatatatattaataaaaaaaaaaatattatatatattaaaaatttaaatata

SEQ ID NO: 347255 - DNA, 200 bp, Zea mays
tctggttcgacccacgcgttcgcacaaatattcaaatagttagctatacaattcttaaaaaaatgggtcctgttgttttgtgcctcccatttcctagtccagaatttatttgacgattttttactaaaactggttggatcatagacctggaaaaaaaaggaaaatgacatctacagctgtgtgttttttttctaagaagg

SEQ ID NO: 347256 - DNA, 305 bp, Zea mays
gatctcttcgtcaacgactcttgtgctgttcaaaggcaaagacaaggccgagatcgccatggctaacaaccgtagtaggcggataatcatggaggttgtcgagggatcggttccgagccccggcatcggccaccacaattagctcaccgtgtaccttcttactgtctctcatatatatacgcataaacaaaaatgacatgcaagctagctttggtatagacgatgctagctagatctacacatgtttatgatgtatacatacagcagatcgagtgatatatttcctctgttgctagtacttgatt

SEQ ID NO: 347257 - DNA, 243 bp, Zea mays
ttatgctttaaattctatagttggatctgcgtgtgatggacattagagtttaaaaaaaagaaaataaaaaataaaaaaaaaaaataaaaataataaaaaaaaaaaataaataataataaataaattaataataaaatataataaaaaaataaattaaggggggggccgttcttgaggttccaagcttccttccccgggcttgctacgttttagcttctttttttggggcccctaattacaatt

SEQ ID NO: 347258 - DNA, 66 bp, Zea mays
aaaaaaaaaaaataaaaaaaaaaaaaaaaattatattataaaaaaaaaaaaaaaaaaataataatg

SEQ ID NO: 347259 - DNA, 310 bp, Zea mays
actccacgcgtccgctgctctgcagttggacagctgcaccacggtgaggagaatctgaaaataatggctagattctgcgctttccagatcaggaagaccctgtcagacaacatattttcctgggacagcgtaacgatgttgaggctctactactcggtagatctcgccgtggcggcagatgcagtgtccggagcatttacctaggccttggccgatctagtccaagacaaccctttcatgagaactgactttcctttttacatcgttgtgccacgtaccggagcttgtcgttcttcgtgtgccatcgaca

SEQ ID NO: 347260 - DNA, 213 bp, Zea mays
aaaaaaaaaaaaaaaaataaaataaaaaattttatataagaaataaaaaataaaaaaaaaaaaaatattaatactcttgcatgtcaattcttaaacccttaaatatgtcgtacccatatatggttccactgtgcgtggttttacattattctgtactggttatacccgggctgttattgggggggggcccccttggataacatcctttttttt

SEQ ID NO: 347261 - DNA, 375 bp, Zea mays
  unsure (1)..(375): unsure at all n locations
gaattnngggtcgacccacgcgttcggcctcatgaactccttcatcaacgacttttttaaaagctctcccggtgcccgcagctggcccgtctacaaggatgcccccttacctcccggggatccagacctccgccgcttgtctccccgggagctgccaagcacgccgtttggagggtcctggccgtcaccaatttacctttttttccccctttagaagcttcgttgttgtggtttctaagcaagcctgtgattggccccttttaagggtataatgagtgggttggctgtgtttgttaaattgggccaagggcctttttgccctgggttttgaaatttagtccatggtgggaattgcattgcttttgggtttttttg

SEQ ID NO: 347262 - DNA, 250 bp, Zea mays
aaagaaagctacttatacataaactgaaatattaaggagttcgtagcttctaggaagaaaaaaagaaaaatttaaaaaaaaaaggggcgtacgaataaatgggcggcacgatataaaagatccatgtttacctactcgtgcgtgcgatggtttagctatcctatattgtcacctcaattcaattcacattgtcgtgttttacaaattccggactgtgaaaacctctggcgtggctgaaaaaaatcccctt

SEQ ID NO: 347263 - DNA, 295 bp, Zea mays
  unsure (1)..(295): unsure at all n locations
naaaaaaaaaaaaaaaaaaaaaaaaaaaaattaataaaaaaaaaaaaaaaaaaaaaaaaaaaaacaaaaaaaaaaaaaaataaataaaaaataaaaaaatattttataaaaaaaaaaaaaaaaaaagggggggccctttttagggatccaagtttatttccgcttactttcaacgtattaatttttttttgggttgccttaattttacttctgggccggtggttttaaaccgttgaggttggaaaaaccttggctttcccaaatttattctctttgaatgaattccccttttccc

SEQ ID NO: 347264 - DNA, 93 bp, Zea mays
gtctcaagttcagagcgttatgccatgttttcagacctgattagtacactgttttcaaaaagcgattgagctctagtccaatgtattgataat

SEQ ID NO: 347265 - DNA, 270 bp, Zea mays
gagacggctcgtaattacagtgctttcagttgtgcccaaaaaaaaaaaaaaagggggggtttgtattgaaaaaaaaaaagatacaaaatattaaaataaatgataaaaacaataaaacaatatttaaaaaaataaaaaataaataaaaaaatatatcaataaaaaaagggggggggggttttaaaaaaacaaaatttatatcaccgggctttcaaaagaaaaattttttttttggggcccctaaatttattttagggggggccggtttaa

SEQ ID NO: 347266 - DNA, 86 bp, Zea mays
cattagtgcaaaaagttgtattttagtttagatttagagtacacttatgtatgccttgtttgacaatacttatttatgatatattg

SEQ ID NO: 347267 - DNA, 320 bp, Zea mays
  unsure (1)..(320): unsure at all n locations
ggacctgctcgtggcgctcgcctcctcctctggtcccagtcccgccgtctgctcctccagcttcaagttgaagcagagccgccgtcatcttcagctgtctgtcaggacgggcgaacaccactgaacgcagacagagcaggcgaatgcatgtgtgcgactgatttcattttgtgtggaaacttcaaaagagggggagggtggactcgtgggcattcctggcaatgggtggactcactgcctggctggtcggttggccgtccttatcacgggaagaaattcgaagttactaagggccggnnnaaaaaaaagaaggaataaaa

SEQ ID NO: 347268 - DNA, 175 bp, Zea mays
caattttccactgttcttttctttttttttctaaaagaagttgtgatatatgtatattttttttcttttctagagggtttaggtgaatacatacataatacccccttgaagtgcctctcaacaaggatgtaatggaaagaaaggcaagctaaagaccagcttaacaatgatggtg

SEQ ID NO: 347269 - DNA, 412 bp, Zea mays
cggctcttcagagtttatccctgcacgacaacccaatcacaatggaccagttccaacaaatggatggatttggagagtttgaggcgcgcagaaggaagaaattcgacaagcagattgattcaggggtcatgatggcctcaacggttctggatgaaggggttatttccaattattttaaaacttgaatggcttccattctttcttagtggtcaagaattaagaccgattgtggatttgtagatattaatcttacaacctacaaagcaaggttcaccaaaccggttgtgaagtgaaaaccggcgcccacagaaaactggggaaaaccggccgcaatctaaatcaccccactttttaattttgaacgcgtttgaacccgttaaaaaaaaaaaaaaaattttattaaaatataaat

SEQ ID NO: 347270 - DNA, 319 bp, Zea mays
tttttaaaaaaaaaaaaaaaaaaaaaaatttatttttataaaaaaaaaaaaaaaaaaaaaaaaggaaaaaaaaaaaaaaaaaaaaaacataataaaaaaaaaaaaaataaaaaaaaaactaaaaaaaaaaattataaaaaaaaataaaaaaatggggggccccttttagggatcccaatttttttcccccttgattgcagcggaaaaatttttttttggggcctcctaattccattatacggcccgtgttttaccaccctttatagtggaaaaaccgggggttcccccacttaatttgtcttattaaaaatcccttttt

SEQ ID NO: 347271 - DNA, 69 bp, Zea mays
gctttattcaatttatggagttgttcatgttcgcttttttttcctttttaaaggtcccacgagtgaact

SEQ ID NO: 347272 - DNA, 222 bp, Zea mays
gcgccggcgacccgggtcgacccacgctcgttccgcgttttatacctttatgtgtttggtttgaaatgcagaatgaacttggcgcttggttgcattttggggccgtttgcaggtgccaactgagattaaaaaaaaaaaagggggcgttaagtcacttactcctgctgcagcatcttttatggtactaaattaattactggcgcgtttacaacgcggatggaa

SEQ ID NO: 347273 - DNA, 66 bp, Zea mays
cccgcgggtgtcgccatgtacttttaccgcactacattttggttctatagagagaggatttgtgtc

SEQ ID NO: 347274 - DNA, 242 bp, Zea mays
  unsure (1)..(242): unsure at all n locations
gtcgacccacgcgtaccgctgattacggacctganatcatgagatggggattgatggattcactcctttttgcacatttatannttttcgtgattttgtactggttctgtactcggtaattgnnatttgtgcgaaccagataccctcagaacaaaagcatgtacanagagattcttaactgtatctgaacttatgaacgacgttctaaaatattgaagctggcattatcttcaattggcgaa

SEQ ID NO: 347275 - DNA, 99 bp, Zea mays
aaaaaaaaaaaaaaaaaaaaaaaaaaaagggctgaaaatataaaaagaaaacaaaataaaaaacgcgtacatgcaaaaataataaatcttatatagtgt

SEQ ID NO: 347276 - DNA, 98 bp, Zea mays
  unsure (1)..(98): unsure at all n locations
naaaaaaaaaaaaaaaaaaaaaaaaaaaaaaaaaaaaaaaaaaaaaaaaaaaaaaaaaaaaaaaaaaaaaaaaaaaaaaaaaaaaaaaaaaaaaaaaa

SEQ ID NO: 347277 - DNA, 285 bp, Zea mays
  unsure (1)..(285): unsure at all n locations
cgggncgacccacgcgnncgcacncacncacanggcacacagccacacnggaaccgcngcccgcagcggagggagcnggcacgggccaacgcacacanaacacaagcncgncgncgaaggcgcggggggcngcggngcnggcgcnggccgcggccacggccaacgccgnggcgnccgnggcgggcggcgacangagcgcggacaagacggagggcgcggaccaacnggngggccnggcgccgagccngcagnacgngcaggggcaggcccgcgcgccgacgaccg

SEQ ID NO: 347278 - DNA, 222 bp, Zea mays
ctgaaatacctctggaggattcctttgtttaaaaaaaaaaaaaaaaaaaaaaaaaaaaaaaaaaaaaaaaaaaaaaaaaaaaaaaaaaaaaaaaaaaaaaaaaaaaaaaaaaaaaaaaaaaaaaaaaaaaaaaaaaaagggggggccgttttaaaggatccaagtttacttccccgtgcttgcaacgtaataattttttttttgggtcacctaaattaaatt

SEQ ID NO: 347279 - DNA, 276 bp, Zea mays
aaaaaaaaaaaaaaaaaaaaaaaaaaaaaaataaaaaaattaaaaaaaaaaaaaaaaaaaaggaataaataaaatgataaaattagggggggatatagatagagataaatatatgtagggttcttgtcatggaattacattttatttggttgggaaaagaaaagaatttttttattgtgggtgctttttgcatataattcgggtttccctttttggcattttaggtatgatggattttttggatttcccttcttaatagttgttgtatcaatatgt

SEQ ID NO: 347280 - DNA, 315 bp, Zea mays
  unsure (1)..(315): unsure at all n locations
ggcgacgccgcagaggctgctcgctgccggagcaccagggacagggcagccggacgtctagctagtcaggatgattcaggacgaggtcttcccggcgtaacggggcggcatgggctgcgcggggtgtctgcttccgtttcttgtaaagtgcagtggcgtgcgtgcgtggctggccagcacacgagagcctgatggcgtagcgtaggtacagagtatgtaacgggcaataacacgcaggttcgtgtctggacctgtggtctctcgttcgtgccccnntnnaaaaataaataaaaaaaaaaaaaaaaaaaaaaaata

SEQ ID NO: 347281 - DNA, 337 bp, Zea mays
atcctttaccattttttctgattttctgcaattataatcagacgaacattgtgttcatttaaattactgttttcaacagtgttgagtatctaaatttaaatatttagattgcttattatatatgtaattgtacatacttgtctgtttttagtataaaaaatgcagacttgttagtgaaaaaaaaaaaaaaaaaaaaaaaaaaaaaaaaaaaaaaaaaaaaaaaaaaaaaaaaaaaaaaaaaaaaaaaaaaaaaaaaaaaaaaaaaaaaaaaaaagggggggccgttttaaaggatccaagtttacttccccgggcttgcaacgaaatagtttttttt

SEQ ID NO: 347282 - DNA, 192 bp, Zea mays
cggacgcgtgggatcgaaattctggtcttttctgagcagtttgcaattcggaacccccataaacccttgactattgtacctagagataaagtgaacgggtatcaagatataaatgcattaatgtttttgtgaaaaaaaaaaaaaaaaaaaataaaaattaaataaataaaaaaaataaaattaaatctaata

SEQ ID NO: 347283 - DNA, 71 bp, Zea mays
tagaggatcgaagcttacttacgcgtgcatgccacgaaataactcttctatcgcgccacctaaatccaatt

SEQ ID NO: 347284 - DNA, 373 bp, Zea mays
atggacataaacttctactgaccggtcatcgtctcgacggggaggacggggccagccgccagccaagagttgcagacagacattcctcgctacctgatgagtggcagggcaggccttctgacgaccgactgactgggggttcgtttctcccaaggttccgttccatcggtcggaaatcggaatgtttggtagctagcaggtgactcctttcgccatgcgtttctgtgcacctggcgcctggactcttgctgctgctgtcctgcatgccattgacgcccccaactcctacgccgtgccgtcttcagcgtgcaaaataaatactcgaggagatcaatgctttccgagcgtgagattgttgctaggaacatttgca

SEQ ID NO: 347285 - DNA, 128 bp, Zea mays
  unsure (1)..(128): unsure at all n locations
naaaaaaaaaaaaaaaaaaaaaaaaaaaattaaaaaaaaaaaagggaggacaatataaaaagaaacaaacttacaaacacatgcatgcaaacgaaataactcttctatagtgtggcctaatttcaatt

SEQ ID NO: 347286 - DNA, 185 bp, Zea mays
cggacgcgtgggcggacgcgtgggcggattcttttgcggacgcgtgggaaaaaaaaaagggaggaatgtattaaaaaaataaaaaaaaaataataacattataaataaaaaaaaaaaaattaaaaaaaataaacaggggcggccggtttaaaggacccaagttttcttacgcgtgcttgcaaatt

SEQ ID NO: 347287 - DNA, 93 bp, Zea mays
cggacgcgtgggaaaatttaattgttttatattttggaaaaaaaaaaaaaaaaaaaaaagaaaataaaaaaaaaaaagggaaaacaagggcgg

SEQ ID NO: 347288 - DNA, 130 bp, Zea mays
  unsure (1)..(130): unsure at all n locations
naaaaaaaaaaaaaaaaaaaaaatatatattttaaagaaaagacaaaaataaaataaaacaggcgtacttacacatgaatgcaaaaggaataactctattttagtggagccagaaatttaatgcactggc

SEQ ID NO: 347289 - DNA, 193 bp, Zea mays
atcagatgctgatatactttgctttgttttgttctggcccaccgaactgtggcaagaagctgtgtcttacaggctggggttagaactcttgaactgatagtcggcttaggagggtcttattgtgcacacagttggttggatgtttttgtgtggtataaaaacgatttcgcgcgtagaaaaaaaagatacaaac

SEQ ID NO: 347290 - DNA, 360 bp, Zea mays
ggagaagcgccagagccaccatgaccggcttttgcagattttccccaactcggttgacaacgctgacgtggtgctgcaccgggacggcgacctctggaagcacattgccgcgttgcggcggcaccggaggacgtttagctacgtcaaggagagagggacgtagaagcgtagcatatagccttcgggtgaattggcaattggcatggcacgtactagtgtttaggagagaattagcaaaagcaaaagattaatgtgtacatatatttaagctagatcatagatgggtgtggcacaacacgacatttcatttaaaccaaatacttttacgggcggccgttctagaggaaccaagcttacgta

SEQ ID NO: 347291 - DNA, 313 bp, Zea mays
aattatgtttactgctggttcgacatagtgtttgccgatgttttctaccgctgagcataagaggagtttggtaattaaacaccgtgcttcatgcaagcatgagaaagttgtgtggttggtaacagttaccgttcttaagattgatcaactatggtggtactagttctgttgaaagctgcctttagaaaactaagcctcatggtgatgcctataaatgctcggactctggttgtggccattgttggactgtctaatccaaggtacaggttgcttattacatcatgcgatgagacaggctattactaatcttata

SEQ ID NO: 347292 - DNA, 72 bp, Zea mays
gtgaaaataaaatagtttttccattgtgattgtaaaagttggaaagcaagaaaatttcgcgtgcaatttgtc

SEQ ID NO: 347293 - DNA, 98 bp, Zea mays
aaaaaaaaaaaaaaaaaaaaaaaaaatataataaaaaagaaaacccaaaaaaaaaaaagggggcggtctttactaaaatataccgaaacaaaaaacta

SEQ ID NO: 347294 - DNA, 371 bp, Zea mays
cgctctgcaagttgcagcgaaatgcagaacacgaggcacccactgatgatgatggagatggagggcactgttccagagaaggaagcttctggtgcgggggtgtgtgtgtgtgtgtctatctactgctgagcttgccgtcagtgctgctgcagcaagatctgatgaaaagcctggaattcttcaggctagttgccattgccagtcccagtcccagtcccagtcaccttctcatctctgatgtctttcagtccacatgattcagttcagttcagtgaacaaccgccgagacgatgttttcatcatcattattgtcgtttcgtcgccggaatagaagtaacttctgttctaaaaaataatttccttactttaaa

SEQ ID NO: 347295 - DNA, 268 bp, Zea mays
gttcgtgcttgtatctagtagtttcaggtttacaagtttagtgccttttgtagcccacgtcatagagaggctcctagatagtgggaatagtatactcggatgcgtgattactagtcttaagtaattatagatatatggtcgtacgtagttcttcaatgttgtgattgaagaacacacgcgatgtcttctctaatcttctgtgtacctatatcttgtaagttatttattgtcaaagagatgtcaattctcttatgcgtacgcatgctgc

SEQ ID NO: 347296 - DNA, 240 bp, Zea mays
  unsure (1)..(240): unsure at all n locations
atcatccttccgttcacatatactaaatatatacacatttacagggtgtttggttnaaaaaaaaaataatggaaaaattaaaaataaaaaaaaaaaaataaataaaaaaaaaaaaaaaaaaaaaaaaaaaaaaaaaataaataaataaaaaaaaaagggggggccgttttaaaggatccaagtttacgtacgcgtgcttgcgacgtaatagtttttttatagggtaacttaaattcaatt

SEQ ID NO: 347297 - DNA, 428 bp, Zea mays
cggacgcgtgggcggaacgcgtgggtggcttctcacgattctgccttaaaaaaaataaatataaaaaattttaaaatttataaatatttttattttttttaaaattatatattttaaaattaatattaataaaaaaaagtcccccccttttaaagattccaattttccttccccttccttccaccttattactttttttttagtgccccctaatttcatttccttgcccgtctttttccaccttctttccttgtaaacccttgccttcccccactttattccctttccaccccttccccttttccccacttgccttaataccaaaaagcccccccccttctccctttcccaccatttccccccctttattttccatttcacccccccttttcccctcccttttaacccctcttttttttttttttccc

SEQ ID NO: 347298 - DNA, 260 bp, Zea mays
cgactaatctcaactaccttggaggtcgagtatcaaagtaggtatggtatcatagagaaggaaataaatggtgttctactgctaaaaaaaaaaaaaaaaaaaaaaaaaaaaaaaaaaaaaaaaaaaaaaaaaaaaaaaaaaaaaaaaaaaaaaaaaaaaaaaaaaaaaaaaaaaaaaaaaaaaaaaaaaaggggggccaatttaaaaaaacacaaaattacaaacgcgggaatcaaaaaaaaaaactttggtgtggcgcc

SEQ ID NO: 347299 - DNA, 69 bp, Zea mays
ccgatttgttcgttaatgtcaagaattgtgttacagtgcgtgtatatatgtgtgtcgccgcatttttat

SEQ ID NO: 347300 - DNA, 172 bp, Zea mays
aaaaaaaaaaaaaaaaaaaaaaaaaaaaaaaaatttaaaaaaaaaaaaaaaaaaataaaaaaaaaaaaaaaaaaaaaaaaaatataaaaggggcggccgtttttggggttccatgctttcgttcccgtgcttgcgcgcgctttgttcttctttagtgcccccttattttgtc

SEQ ID NO: 347301 - DNA, 151 bp, Zea mays
aaaaaaaataataaattaaaaaaatactttccgccaaaaaaaaagcaaccaactacacatgtaacaaaatgaccatacctccctcgactgaccatctttcggacaccggggggggccctctcctgacgtgttcaggattctcagctgcatt

SEQ ID NO: 347302 - DNA, 213 bp, Zea mays
gaccaagtttggttcccaaaaggatagtgtatacatagtactatgaaaacaatgctggagtgattagagaaaccaaagggagagatgaaaaggcatatgacatgggggggccgttctaaaggatccagtgttactctcgcgtccatgataggcaatacgtcttatatagtgtgacctaaattaaattcagtgcccgattttctacaacttaca

SEQ ID NO: 347303 - DNA, 395 bp, Zea mays
gggagctatgcattagtaataatcaattttcagaaaataaagagtattttccctatttttataaaaaaaaaaaaaaaaaaaaaaaaaaaaaaaaaaaaaaaaaaaaaaaaaaaaaaaaaaaaaaaaaaaaaaaaaaaaaaaaaaaaaaaaaaaaaaaaaataaaacataaaagataaaaaaaaggggggggggtttaggaggtttaaaatattattaacgtgtaaattagaggggggggcttctttaatagggtcccgaaatttaacaccgtgggccgggttttaaaacgggggtataggggaaaaagtggggttcaccaaaataatttttttaaaaaaaatgccatttgaaacaagcggggtctataaaaaaaaagccagaattttgagccttt

SEQ ID NO: 347304 - DNA, 388 bp, Zea mays
  unsure (1)..(388): unsure at all n locations
cccgacgcgtccgaacaatgggttggctgctcctccccctccggttcgggttcgggttcgtgaggttctccggggttcggtttcgtgggtgagcggatcgagatggcggcgtcggatgttgagtaccgctgcttcgtcgggggcctcgcctgggccacggacgaccacttccttcacaacgccttcagcacctacggcgagggcctcgagttcaagattattctcgatcgggagacgcagaggtcccgcggcttcggcttcgtcaccttctccacggaggaggcgatgcggaacgccatcgagggcatgaacggcaaggagctggacggccgcaacatcaccgtcaacgaagcccantcccgccgcggccttagaagcggcggcggcg

SEQ ID NO: 347305 - DNA, 399 bp, Zea mays
cgctatctctatctcacgcaggttcacaggcttaggaggcgagtggtagtcaccagccgctccggcacggacgcatctgacgcgccatgcgcggcggggatccagcgcaggtaccgctcgcacctccatctatgtggatccagcgcaggtaccgctcgcacctccatttatggtgcctggcccgggctccgtcgtggaggccacgccgccgaggagcaaggctggggccgcgcccgcgcccgcgcccacgccatgtcagggtcgtacccacgccggtggggagcagctggccatggcgtcagcggacgtcttcgagacaagtgggagatccaatgtcgcatgaccgacgaggcaccagcaaggcagcgatgcagcctggatattcgacctgtatcctgg

SEQ ID NO: 347306 - DNA, 351 bp, Zea mays
ctctatttataattgacgcatgttcacaggtgtacgaggccagtggctactacggagccgctggggcactgacacatctgacgcgccatgcgcgggcgggatccagcgcaggaaccgatcacacctccatgtatgtggatccagcgcatgtgcccctcgcacctacatttatggtgcctggcccggcctcccacttaacgccacaccgacgaggagcaaggatggggccgcgcacgagcgcgtgcacataccatgtcaggatcaaactcactccgggtgagagcaggtggccatggctgtaacggtcgttttttaaacacatgtgaaaaccaatgttggatgaccgactag

SEQ ID NO: 347307 - DNA, 413 bp, Zea mays
aaaaaaaaaaaaaaaaaaaaaaataaaaaattttaaaaagaaaaaaaaaaaaaaaaaaaaaatgggaaaaaaaaaacataagacgctaccatgcgcagcggggatcacaacacaagtaccgatcagacactacatttatatagatccaactcaaagtcatgggggggcccctctttatggtcccatgtttcttgctccgtcttggaggcttctccttttttttttggtggccgtaaattcacttttgggcgcgcggttttcacgccgggggggggggaaaacccgtggggagcccctttttattgcctttgcagacttctccttttcacctgggtggtttaatgtaaaatggcccaccagggatctcttttccaaaaatgcggcctgcattttggacatgtgtaccccccttt

SEQ ID NO: 347308 - DNA, 326 bp, Zea mays
gagctggagtgtattctagagatgctccgtatttctgaagggattcaagttcaaacctgaaattattgtatttcttctaccaaaaaaaaaaaaataaaaaacaaaaaaaaaaaataaaaaaaaaaaaaaaaagaaaatacaaaaaataaaaaaaaaattaacattaactagaacaaaagacaaaaaaaaaattagagctgaaaagtatgaactacttgggggggcgcttttaaaaaactaatctttagcctacaggaaataaaaaacaatcttttttattttaactgcctaaaactaaaaaaattgggcaccgtttaaaacaacga

SEQ ID NO: 347309 - DNA, 131 bp, Zea mays
aaaaataaataataaaaaagaaaagaaaattttttttaaaaaaaaaaaaaaataaaagatgggaaaaatagtaaaatttaaaaacgaagaaaaaagtattcatttttgttggtaaatctttttttctattg

SEQ ID NO: 347310 - DNA, 166 bp, Zea mays
ctgtgtgtttttggtatggatccgatgggtcttgtgtattaaaaggatgtttacgtactatatatagatggaaaatcgtttattctaaaaatcggggcaaaattaatataacttggatttgaacggccggtcgctctaaaaaatccaagcttacggtcgcgtgcat

SEQ ID NO: 347311 - DNA, 75 bp, Zea mays
atataaaaggaagcaagcttacatacacgtgcatgcgcacgcatatctcttctctagggacacctaaattcaatt

SEQ ID NO: 347312 - DNA, 313 bp, Zea mays
agacacatgaacaatatgttttcctcttcttacacagaaaacgagataacttgataaaaaagtgaaagtttaataaagacgacataaaaaaaaaaaaacttttatactaaagtaaaaaaaaattagggggggtcgcttaaattaaacaaactttaccgccggttaaaaccaaggggattcctattttattggcgtcccaaatataattcttttgccagctttttcaattttcgagagggggaaaaccatggggtttcccaactaatttcccttttaaaaaaaccattttaccctgcttggcgaatgagaaaaa

SEQ ID NO: 347313 - DNA, 226 bp, Zea mays
gaaaataggccatattgaggatgttacttttttccccacagacagcacacgcaagaaagggtggttgaaaaagaaagtggctgttatttccagtcctggcgtggtgccctgtcacatgtttccgttcaagtctgtctgcatctaatatactgagttattagagctttagtatcaaattgaagtgtccgagtgtactcatgattgcttaccaaaactcattcttgtc

SEQ ID NO: 347314 - DNA, 53 bp, Zea mays
aaaaaaaaaaaaaaaaaaaaaaaaaaaaaaaaaataaaaaaaaaaaaaaaaaa

SEQ ID NO: 347315 - DNA, 398 bp, Zea mays
gtgctacaaaggagcaaggaaacatagcagttgggaattattcagagaacagactcttggttattatgcttcttcttccttagcgtcttcctcttgtacccagatccacatttcctgtgcttctagattcttctagtgtctttctctagtatctgatcacctgcttgctgtctatcctatattctgtctcaaatcatagtttgtgttggagtgaattgagtgtgagttcgtcctaaaaaaaaaaaaataaaaaaaaaataaaaaaattaaaaaaaaaacctataaaatttattattatagaaattcaatctataattgttaaatcaaaaaacaaggggcggccgttttaaaggatccaagtttacttccgcgtgcattgcaagaataagttttttttt

SEQ ID NO: 347316 - DNA, 377 bp, Zea mays
  unsure (1)..(377): unsure at all n locations
tttgagttttggccgcctcgttgttagttgtaatatacagttcattttatattgtgaggtaagctatatgccatgtgtaaacatgagagctcaggaatgttgggtagcatcatgagtgtagctaggcatcgaactatcggccaataaaatgtctgatcgataaagaggtatagttgtttaaaaaaaaaaaaaaaaaaaaaaaaaaaaaaaaaaaaaaaaaaaaaaaaaaaaaaaaaaaaaaaaaaaaaaaaaaaaaaaaaaaaaaaaaaaaaaaaaaaaaaaaaaaaaaaatggggggggccgttttaaaggatccaagtttacttacccgtgcttgcaaagnaatagtttttttttagggccacctaaattaaatt

SEQ ID NO: 347317 - DNA, 312 bp, Zea mays
cggaacggaattgccggcccaacccacgcgtccagtcacggccgtccggcctagaattactgtacacaagggacttcagatatgcgaggtgaggcttgctgccatgtgtaaaccatgatagctcatgatagaagcggtggatcaagtgagtctcttggcattgcactattaaaccataaaaggcgggtgcggcaaagtggtatagatgtttaaaaaaaaaaaaaaaaaaaaaaaaaaaaaaaaaaaaaaaaaaaaaaaaataaatattagggattctttatttgggggcgggcgctttaaaggatcaaactt

SEQ ID NO: 347318 - DNA, 268 bp, Zea mays
gaggctaagtactaacggaagcctttctttctctggtaagcccggatgtgctcctgcggctcgctgtcagcctgttagctaatcaaacgcctcctctcgtgcgaccaggtctccttggcgctcaccaacaccattgactctagtggatcccccatcgccgtccaccaagtaggaaggttctcaatcgccgtaacacttattgcccttccttatcatcgtgctgttctactaccgatgcctctctctttggtagaactgagttgacaac

SEQ ID NO: 347319 - DNA, 200 bp, Zea mays
agaaatagtggttgttatagccataacacaaagctatgttgtatccatatccatgatgagaataatgatgaatttctactcacaataaaaaaaaaaaaattaaataaaaaaaaaaaaagaataacagcggaatgactaaataaaaccccataataaactaactacaatatacaataatataatttctttatcgacaacta

SEQ ID NO: 347320 - DNA, 152 bp, Zea mays
ggaaaacacgggccgacccacgcatccggatactgtaatatgaagatgacctttaagatttctgggacgaacacagggaggctgggtttgtggctattttacaggcactctgcaaggctttcgatcggctctgacacgttaatgaaggttga

SEQ ID NO: 347321 - DNA, 291 bp, Zea mays
ggaccgtacagcatttcattccgtggctttaggcacaatgatcttcgccatcctccttagtcggatccactagtaatgtgttttattcacaagaacgaacaagtgccaccatccatggtattccacatgggggatttcaatagtgaatatatgtgcttgcttatgaagaaaatatacctgttggggctgactgattctatgattcaaacatactttatcgtacttgcgacgttatttcctttttataacgccactttaaaaacagtgactgacacgtgtgttacaaacagt

SEQ ID NO: 347322 - DNA, 192 bp, Zea mays
aaaaaaaaaaaaaaaaaataaataaaaaaattttaaaaaaaaaaaaaaaaaaaaaaaaaaaatagaaaaattgaaaaaaaaataaaaaaaaaaaaaaaaaaaaaagggggggcctttttagaggatccaagtttacttacccgtgcatgcaaaataatattttttttttagggtcacctaaattaaattaat

SEQ ID NO: 347323 - DNA, 236 bp, Zea mays
gcaaagtgtaatcgtaagtccaatgtaaaccccttttataccaggttacgttaccttgctcattttattttgtgggcacagataaatgctcgttaattaggcaggggttgatcttactctaaaaaattgtcctaaggctcagaaataacgatgtttgaagatgcatttgttgcaaaaaacgatgttgggatcagattttgatgaatttattttcctaaataaaaaattatacatat

SEQ ID NO: 347324 - DNA, 166 bp, Zea mays
cggacgcgtgggaaaaaaaaaatgatgtgtttatactaggctccagcagacccatgcgggccgcagcattgactggtgcaaagatacatgccgctgcctgcgacaggcataattctttattaaggcaccaagaaaaaatggaacggccgggggtttacaaacaaaa

SEQ ID NO: 347325 - DNA, 260 bp, Zea mays
gttaactgttctagaaaggtgctatatttttacgtgaaactacgcttatattcctgtgggttaaagggcgtccaatgaactcgtctacacgccttggacggaggttttaagcctgaaggattctgtcgtctggacagcaacagagtaaatattgattttacctgattcagattagaaaaatgtttggaccacatacctgcattctgtgtaagtaggtgagattgagggggaccacaaatgttaaccaatgattggcggtg

SEQ ID NO: 347326 - DNA, 377 bp, Zea mays
ctgttcttcttcttgctcaagctgtttcttttggtaagagcggccgtttaggcctacggaggaggtaccgcactgagtactcgttcatgctgccgtgatcgctgtggattgcctgaatgagggggttgtagattctgtaccaaggaaattaagattctgtcgtaataccgatttgcgatcagataggtccacaagactgcagcctgcacctgtgagcgtgatccagtcgggaccacaaagtttatacattgattatatggtggacttgtgtaattaagacagaggtgtgataccttagacgatcatatgagttgcacaagattttgccttgcccttttggtctgttttataacaatactcaggatactgttctattg

SEQ ID NO: 347327 - DNA, 308 bp, Zea mays
cggacgcgtgggcggacgcgtggggctgacttagaaacaggacgatttgcccagacttggtgtttttggtgctgttgaaatctccgatccctttggggtgtgacccactggacatggccaatttgtcacaatttattattttgacccatgtcatgtgaaactcctttcgttgaagtctggtatctagattgacttgtaccagatctgtggtttacgcagactggattctggagtactggactgtgtgtgtttttataaaaaaattttttttgtatgaattgttcatttatttatatatttcttgtgtt

SEQ ID NO: 347328 - DNA, 233 bp, Zea mays
ttttcaaaccagaaacggggggtgtgggtgatgactattacgaggagcacctatttatccgctacatgatattctttctttagttttatttttgtccgtccaatacctcggtgtactcttgtaattggaactcttaaatgtaaacaaaaattgggtatatttaataaccaatgatcatgtgttcaaaaaaaaaaaaaaaagggcgttcgctatagtagatcctaacttacata

SEQ ID NO: 347329 - DNA, 70 bp, Zea mays
gaccttggggacccaaaatatgttactgctgcctaatggacagccctgcagaagcactggtactccgcat

SEQ ID NO: 347330 - DNA, 420 bp, Zea mays
gtttacacttaaaaaaaaaaaattaaaaaattaaaaaaaaaaaaaaaaaaaaaaaaaaaaaaaaaaaaaaaaaaaaaaaaaaaaaaaaaaaaaaaaagaaaaataaaattaaaaaataaaaaaaaaataaatatgggggggggtgtttaaaggatttttttttttttttcatgtttttctcatttttttattttttttttgtggcacctttatttggttttattgcgggattttttacactgttgcatttgttaaactttggtcttttcccattttaatgttttagtaaaatacccttttttcatgtggtttgttaatagaaaggactcctgtatttttcttgtttccaccttttccttattttttttggttagtgggcctccctttttacccttcccttaaaccgctggtggtttgggg

SEQ ID NO: 347331 - DNA, 254 bp, Zea mays
ataataaatgtcaggtgcacaaaatttttttttagtcctatgacaatgtgcggggcaagaaaacctcgaatctacacctaggtcagtgaaggatgacaacccaatatatggcttcaatgtctgctgcaggcacctcaagcgatacagctttttggggctgcctgagtgtgatgatatcagcgatttaggtgccttgttcaaaagaactacctccttttgatcctagactgttactacatcagggtttggtccat

SEQ ID NO: 347332 - DNA, 336 bp, Zea mays
ggcgagcgggcggtacctctggcgcaccctcgctgcccaagcccagccttccaagtcggcgcggtgaaagtgaaagtgaaaccatctcgtcctgccgatgcagtggagactggtacagtcagtcatgttgttgtaatgctgttacgtattggtatatattcaagtaaatttgcaaaaacaaaaactattcttgtgctgagctgagccttgtgttgtgtgtaaagctggaaagtggtgctgtcctgcaagtgtatactttggccatgagatttgggtccaagtttcgtcggttacgaacattgtttgcattgcaagaaccagtttcgtttttttgtg

SEQ ID NO: 347333 - DNA, 133 bp, Zea mays
aaactctgtaatctgaaactttgcacacccagaataaaagttttcgatttcaaagaagaaagcgaagataatgaaattgaaacccatctcggaggaaaaagccttagaagaatacaacataccatacatttta

SEQ ID NO: 347334 - DNA, 310 bp, Zea mays
gttgaattggaaactaaatttaagttactagattctatgatcattgtgaacatacaacttaaatttagtttccaattcaactgattttatttcttcaaaaaaaaaaaaaaaaaaaaaaaaaaaaaaaaaaaaaaaaaaaaaaaaaaaaaaaaaaaaaaaaaaaaaaaaaaaaaaaaaaaaaaaaaggggggggggccgttttaaagaatccaagtttacgtacccgggcatgcaacgtaatagtttttttatagggtaacctaaattaaattcacgggccgtggtttaacaacgtcgggactggaaaaac

SEQ ID NO: 347335 - DNA, 308 bp, Zea mays
atttgccctgggttaccgttctgaatctgacaagtgatcttcggtccggggcaatttactcatttatggactgaccactggtttctctgagagggttttcttgaacaaaacgaggttcaagcaaactgttccggtccgcctatctattggtccaatgttcttgacccttgcgttccttgaaatataccttggtgaaaagcaccttttgatgcaaattgtccgaacttttaaacattatgacctaagacaacgatttgaatacacaactcatttcattgggtattctttctcgtacgcccgattaaaga

SEQ ID NO: 347336 - DNA, 69 bp, Zea mays
aaaaaaaaaaaaaaaaaaaaaaaaaaaaaaaaaaaaaaaaaaaaaaaaaaaaaaaaaaaaaaaaaaaaa

SEQ ID NO: 347337 - DNA, 61 bp, Zea mays
cggacgcgtgggcaccgattcatgtatctctggttatggctcaagaaaaccgctcatgatc

SEQ ID NO: 347338 - DNA, 382 bp, Zea mays
  unsure (1)..(382): unsure at all n locations
cgaggagtttagacttgtaatagctatcggcagagaagtgcctgatccacacangataaaaaaaaaaaaaaaacaaaaacaaaaaaaaaaaaaaaccaaaaacacaccaaacaaaaaaaacaaaaccaacccaacaaaaaaacacaaacacacaacaaaaacaaaaaaaaaaaagggcccccccccccaaaaggccccaaccttccccccccgcccggccaccacaaaaccttttttatgcggcccccaaaacccaatccccggccccccgtttccccccctccggccgggaaaaccccggccgtcccccacctaaatccccttgcaacccaccccccttcccccagctggcctaaacccaaaaagcccccccccgaccccc

SEQ ID NO: 347339 - DNA, 90 bp, Zea mays
aaaaaaaaaaaaaaaaaaaaaaaaaaaaaatatattattaaaaaaaaaaaaaaaaaaaaaagaaaaaaaaaaaaaaaaaaaaacctaaaa

SEQ ID NO: 347340 - DNA, 407 bp, Zea mays
attaaatttacaggatgaagctctacttacagattggaagcagcagttggatcgtgatgttgaaacccttaaagccaaatcaaacattggtagcattcgcacggactgagattgatggatattgtgaaggtgaactaatcaaggtacctttggtaaggccttctattatattatctgagattgatggatatggtgaatcaaatgaacttcaaaacattggcctttagttaagagatgcctactcactgcctgaaaatcggtgtgcagatcttttagggagtcagcggccttgcaatcccctctgcaaccataagaatttttgtgtgctacagatttagtaccggtgagtatttggtttatagatttgatggattttctgatagatgattacattggtggaacattca

SEQ ID NO: 347341 - DNA, 73 bp, Zea mays
ctcgctagtcgctacagctacagctagtacgtactatactatactaataaaagctacagtttcgtccggttct

SEQ ID NO: 347342 - DNA, 394 bp, Zea mays
aaaaaaaaaaaaaaaaaaaaaaaaaaaaaataaatttaaaaaaacaaaaaaaaaaaaaaaataaggagacatacaaccataaaaaaaagaaacatatcttttaaaaaatacatttattcctatcctaataggggccgctttcttttgcggttcctgttttcatccccttgtttcccacctctttccctttttttagctccccctttttccctttctttgcccctttttttaaaacccccttcctgggaactccttggctttcccccattttttctcttttctgcctttccccctttcccccctcttttttttcacatagagtcccgcctgttccccccttcccaccatttctccactcttatttgtaaagggcccccccccttttttttccttt

SEQ ID NO: 347343 - DNA, 90 bp, Zea mays
gttttgtcctcgtgatctctgcaactgtatttattttaatggatggtatacatggagatatgatcatgataataacaataaggtgattac

SEQ ID NO: 347344 - DNA, 183 bp, Zea mays
cggaattcccgggacgaaccacgcgtacggagatcccagataaatatgatcaaaaaaaatatctctgaaataaataataacaaaaaaaaggtacactaaggggcggcgggtttaggggatccaaaattaccatcgcgtgcatgcaaagaaatggcttttttatagggccaccaaaattaaatt

SEQ ID NO: 347345 - DNA, 408 bp, Zea mays
caatttttcaccactcgtttttcagcaactttttggtagtttctgttttgggtcattgcttcccttccaggcgctgaataaaaggaaacatgtctaaaaaaaatattttatcctcatcaaaaaaaaaaaaaaaaaaaaaaaaaaaaaaaaaaaaaaaaaaaaaaaaaaaaaaaaaaaaaaaaaaaaaaaaaaaaaaaaaaaaaaaaaaaaaaaaaaaacaaaacaaaaagaaaagactaaattagatattgaaactaaaaaaaaaaaactgtacagttggggatgaaaaaaaaattcaatgggggggggatgtctaatttgcaactttgggtgcagcctgggggaaaaacaaaaaaaaacgtgtttttagcgcaaaacaaaaaaaatactcaacgccaatttataaaa

SEQ ID NO: 347346 - DNA, 392 bp, Zea mays
gaattattatgatttgaatctttatctcggggtaaaagcatactgtttttgtttttggtgtatcgcctggccaatctaacaacacatgttttatgttacagacgcagttatcacagatggaaaatatttaatactacgactgctacagaggaaacaagatacctgtactgatggaatatgattcgtgtattattccttgggaacttgaacttatcatatggagttgtaaatttttttgtcatttcgacttatgttcacttcatcattgcctttatgatcatgtaattcagagaccgcagagcaaaggtgggctggggcttaaggcgtatttggaaacaaagtattttaaaactatagttttggaataatataagtttaaagatgtatgacat

SEQ ID NO: 347347 - DNA, 280 bp, Zea mays
gaaaaaaaaaaaataaaaaaaaaaaaaagtgaaaaaaaaaaaaaagaaaaaagattaaagggagtgaaaatggatgaactatgtatacactgtggtgtgtttctactcgggtttttctgttagaggataatgatctggtggtactgtttgttttactgtgagctagtattcttgtactgctgggtgtatgttttgagtttgtcttggttgcgaacttgctcttactgtatgccgttgttaattttttctgcattttgattttttatgagttgctcattgt

SEQ ID NO: 347348 - DNA, 104 bp, Zea mays
cacttgagtgtttttgtcctaatataatagtggtcgcaatgtctagattgccctgatataacttggtgagacggaaattctgtgggataagtatttgcttgtgt

SEQ ID NO: 347349 - DNA, 273 bp, Zea mays
gccacacaaccatcacaacaaggagcaccagcttatgattgaagttgccatacacggtcgatgacatacactgcatttctttctttcttttttatgccgagcgtaatagtggatgtttcttgccggccaaacatttgcagagagaatgtagctagatgtgctcattacaaggaagaagatatagagaaagaagatacacagggtgctgatgtgaataagagaaagctccaaatggcggtccaccgttttagaggatccatgcatacttacgct

SEQ ID NO: 347350 - DNA, 281 bp, Zea mays
ccttcccagtcgagatggaataatgtcaggcgcacgtacagacgtgttattacgatatttctcccctacaaataaaaactcgatctgtggggttaaaaaaaaaaaaaaaaaaaaaaaaaaaaaaaaaaaaaaaaaaaaaaaaaaaaaaaaaaaaaaaaaaaaaaaaaaaaaaaaaaaaaaaaaaaaaaaaaaaaaaaaaaaaaggggggggccgttttaaaggaccaaagtttacttccgcgtgcatgcaaagaaaaagtttttttatggggccacctaaa

SEQ ID NO: 347351 - DNA, 262 bp, Zea mays
aaaaaaaaaaaaagaaaaaaaaaatttattttagaagataaaaaaaaaaaaaaaaaaaaaaaggaaggtcatgaaatgtgatattaggggtacctaggtttgcttccctggccgtcgttgttctgctcgcgtctgggggacccctgtttggtccccggttattcgttttgcaacatgttctcctgtggcgccctggcgttttaacgggaggcgcgttccaaccgcccttcctatcaggtgcttgcgctgaatggcgaatggg

SEQ ID NO: 347352 - DNA, 240 bp, Zea mays
  unsure (1)..(240): unsure at all n locations
ccgggncgacccacgcgnccgaaaaaaaaaaaaaaaaaaaaaaaaaaaaaataaaataaaaaaaaaaaaaaaaaaaaaaaaaaaaaaaaaaaaaaaaaaaaaaaaaaaaaaaaaaaaaaaaaaaaaaaaaaaaaaaaaaaaaaaaaaaaaaagggggggccgttttaagggatccaagtttacttccgcgtgcttgcaacgttttatttttttttttgggccccctaaattaaattcatg

SEQ ID NO: 347353 - DNA, 181 bp, Zea mays
atcgttggaaaaaaaaaaaaacaggaaaaaagatataaaagaaagaacaaaaacatacaaagaaaaaaaaaaaagacaagcaaaaaaacaaaaaagggggcggccgttttagaggatccaagtttactgccgcgtgcatgcgaagacatagttttttaatagggacacctaaattcaatta

SEQ ID NO: 347354 - DNA, 107 bp, Zea mays
ctcccagtcaacttttgggttgctgcaccgttgtctccttataatgtaattatttatttattttgtatagaactcctgttatatagtaaagatgtgacattcgatcc

SEQ ID NO: 347355 - DNA, 118 bp, Zea mays
  unsure (1)..(118): unsure at all n locations
naaaaaaaaaaaaaaaaaaaaaaaaaaaaaaaaaaaaaaaaaaaaaaaaaaaaaaaaaaaaaaaaaaaaaaaaaaaaaaaaaaaaaaaaaaaaaaaaaaaaaaaagaaaaaaaaaaaa

SEQ ID NO: 347356 - DNA, 402 bp, Zea mays
  unsure (1)..(402): unsure at all n locations
gagtcttcatttttttttgtcttagcgatcttcttttttctctttttggttgttgacacatataaatttgtgaatcggcaagcataccagcaaagttgtaagtttgtataggtgttacggcagatggatcactgacgtnaaaaaaaaaaaaaaaaaaaaaaaaaaaaaaaaaaaaaaaaaaaaaaaaaaaaaaaaaaaaaaaaaaaaaaaaaaaaaaaaaaaaaaaaaaaaaaaaaaaaaaaaaaaaaaaaaaaaaaaaaaaaaggggggggcggttttaaaggatcaaagtttacttccggtggtttgggaagaaatagtttttttttggggcccccaaaatcaaatcaatgggccgtgtttttaaaacgtgggaactggaaaaaccttggggttcccaaa

SEQ ID NO: 347357 - DNA, 369 bp, Zea mays
gctgtactatattgcgacccccattgagatgctttattttatatatttattttattgccgttgtttgtatggtaaaaaaaaaaaaaaaaaaaaaaaaaaaaaaaaaaaaaaaaaaaaaaaaaaaaaaaaaaaaaaaaaaaaaaaaaaaaaaaaaaaaaaaaaaaaaaaaaaaaaaaaaaaaaaaaaaaaaaaaaaaaaaaaaaaaaaataaaaaaatatatggggggggaaaatttaaaagtaaaaaaacttggctcccgggaaatgaaatttcatatttttttatattgcacaaaaaaaaaaaactaatgagccaatttttaaaacctaaaggatggaaaaaacattggggtaccaaaattaaagttt

SEQ ID NO: 347358 - DNA, 157 bp, Zea mays
atttagccgtttgtgactggttgtagctagcggtggtgcggtggtgatgttcttgaggcatgaataatgctacatgcatgtgatgtatccatgttttgtgtgtggtaaacctgttgtttgtataagctgtatgcatgtgggtctttaatttgtttta

SEQ ID NO: 347359 - DNA, 108 bp, Zea mays
aaaaaaaaaaaaaaaaaaaaaaaaaaaaaaaaaaaaaaaaaaaaaaaaaaaaaaaaaaaaaaaaaaaaaaaaaaaaaaaaaaaaaaaaaaaaaaaaaaaggggcggcc

SEQ ID NO: 347360 - DNA, 56 bp, Zea mays
cacgattcaaaacttgtgaatttggccgcgtgaggttttacaagtaagttttgttt

SEQ ID NO: 347361 - DNA, 376 bp, Zea mays
gcttgtagtcgctcacaaaaaaaaaaaaattaataaaaaaaaaaaaaaaaaaaacaaaaaatataaaaaatataaaaataaaatacaattacatacaaaaaataaaagggtcctttattataaaaggggccggccttttttggggttccatgtttacttccgcttcttttctacgccttgctttttctattgtgccgcccaattttattcaattgcccgtcttttaacaccctgttgactggtaaatccttttcttttcccaacttattccttttgccgagcttccttttttcgagaggtgccgttttttcctatgctcccaaccctttcgctttttcaataatttgcgcagccttcttgtcaattgggacccccc

SEQ ID NO: 347362 - DNA, 266 bp, Zea mays
ggcggttgctgaccagtgaatatgtgcatttcagacagaaccagcctgtacactggctagaccgatgggtctatcacggtttggaagatctacaggtactgggtcgcacgctatatataaaaataacattggtactcgcgagtgttcagtggaaaacatggtaacgctcgccaaggtaaaaatgtcgggagctatattgacaattcgataattggcggacgcctgaccattaccaacttactatggatgaaactagtgttgcacat

SEQ ID NO: 347363 - DNA, 193 bp, Zea mays
ctcggtacaactccatcacgatccaggcatacaacactagatacagttacaatgccgaacctgagccttgtgaatagatactcctttactgacatacaggttgattgtataccatgtcctatttgttcattgttatattctttatttatacagttacatattattaatcttcatcagttcattattcagttca

SEQ ID NO: 347364 - DNA, 283 bp, Zea mays
cacgcgtcgtcattgcccaaaccggcgtggacaaataactttcaaggacatgtagttattcacgtaaactgcggctaatgctgccacctgccgagaggaggctagcttctatgcgaggatttcacgagcgcggaaagtttatcggttttatgaccacttggcttatgctggactaccttgtggcatgctgatgccatacaaggacgaaagataaaaaatgacggctcttacaacagtacgatcaaatcgagattgactggtgctcagcttcgggaatattttt

SEQ ID NO: 347365 - DNA, 256 bp, Zea mays
gtacgtaattcattgtaggtagctgcgggtttttttttttggttgttgttgtaacgggcgaaagcggaccaccattttaggtagtgtctgtcagccggtgccggtgaagatgatggagaaggatatggtgtgagcggtgatgtattcttttgtgcggtaaatgtgtggaggtggtcatcttgttgtgccgtaaaaaaaaatattataaaagaaaaaaaaagaaaatatactagaaactcaacatcaaatggaaaaa

SEQ ID NO: 347366 - DNA, 124 bp, Zea mays
cgtggattttggtgcaaggagatgccggcttgctttccttggcacaaatgctggtggtagaacattggcccgaatcattggaattttaacctccaaaccccagggggaccagggcagggaaaaa

SEQ ID NO: 347367 - DNA, 119 bp, Zea mays
tgcagaaggacgtgggaacgtctgggatgcaaaaggcgaccatgaaaaaaatggtgcatttggccccccatattcattggttcaaggaacacttgaaggtgatggtgtgccctttaaga

SEQ ID NO: 347368 - DNA, 65 bp, Zea mays
ctcagagcagccgcatccacaacctgccttttttgtcccctggcggcgtccgcggcaagattgcc

SEQ ID NO: 347369 - DNA, 219 bp, Zea mays
atgtcgcgtggggaaaaatagacaatcccttgcattactgaacttggaggcaagctcagggttctttaatataaattctttatttgaggatacggtggaattacttgcctcaaccggaggagaaatacaacctttgtactgtgtactgaaagataactatactgccttactttaaattgggaaatcctatagaaattataccaagatttttatcatgat

SEQ ID NO: 347370 - DNA, 65 bp, Zea mays
cggacgcgtgggatattatttgccaagactgtttggacagaggagcatatgatctctaggctttg

SEQ ID NO: 347371 - DNA, 201 bp, Zea mays
agattagttactttactaatgggggtgtttttctctttactgttcgccgactagtaatggatctgcttttaagaatttcgcgacacatcggctcttaaaagaatactttacaaaaccgaggataataacacaattgttcaattaaatctgggcttgcgatgcatgcgataaataaaaagatgggtttccttgttcttatat

SEQ ID NO: 347372 - DNA, 397 bp, Zea mays
aggtgaggtagccgaatctatgttcatgctaatgggcaagccatgcatgtttatgcagagatgtgtgtgtagtgcaaagataaataaggacgtcgagctaaatctatacaaccctcgacgtggagtgataagtattttgtatatgaatcttgtgaagcatgtgtgtgtgttatgtactcagaggacttcgcgagtcacaagaagcggtctaatacaaggattgactcagataagtgtttgtaatctcttattacatatcatgatataagttgaaagatgattgatccacaaattgttgggatgatgaataatattgagttgtatggttgaatgcatgaaaattcaaaaaaaaaaaaaaaaggcggccggtttttatgatccaagcttacatacgcgt

SEQ ID NO: 347373 - DNA, 159 bp, Zea mays
attcaccactggttcctctaccaaatttttttaggactctgtttgcggcaataacttgcgtggcagcccctccaataaaaagaaacatgtccaaacaaaatattctatctctcctcaaaaaaaaaaaacagatgccacagacgaaaacgctcaaagtgc

SEQ ID NO: 347374 - DNA, 236 bp, Zea mays
atgatggattacttattcaaacgacgaacaacatcgtctcaacaccttggttggcgggaagaagaaatagaaagtgtttttttttttttgcctttcccttacttcatttcatttttcccactgtaatgatcttcgtctgctaaggctgaacctaagaaaaatattgttctgtgctgatcatggcatatagatgtacactttgagcaccccattgttttataatttcattgtttttc

SEQ ID NO: 347375 - DNA, 341 bp, Zea mays
gttgaagcatcaaaaaaaaaaaaaaaaataataaaaaaaaaaaaaaaaaaaaaaaaaaaaggaaaaataaaaaaaaaaaaaaaaaaaaaaaaaaaaaaaaaaaaaaaaaaaaaaaaaaaaaaaaaaaaaaaaaaaaataaaaaaaaaaaaaataaaaaaaccggggccgccctttttataaatccaatttttttttacctttcctttcaaagtttttttttttttttatgttacccaaattttttttccctgcccaatttttttaaaactcgtggatttgaaaaaccctttgctttccaaaatttattttttttccaaacatttccttttttccaacatgg

SEQ ID NO: 347376 - DNA, 354 bp, Zea mays
  unsure (1)..(354): unsure at all n locations
ccacgcgtnccgggacgcgtgggcggacgcgtgggcaaaagtatttcggctcaagacagcgtttcaagatcggtggtttacaaccagactagcagaagatgctctctatatctaccgtcgccttgtattattagtagctgaagtaagttcatgtgaatgttgtcgtgttcccgcagctgcgacgccatggcgtgcgacgtgcgcgttcttggctgtcgcagctgctgaaacttttgatggtttttaacctgtaagctgggggggatgaagtaaattattttgttctacaaaaaaaaaataataacctgtaaggaagggaaatataaatggtaattaacataaattttttttaat

SEQ ID NO: 347377 - DNA, 424 bp, Zea mays
cggtcgcgtgggtaaaaaaaaaatttatttttttaaaaaaaaaaaaaaaaaaaaaaaaagtgatttttattaaatataaatataatttataataattataaaataaataaatttttttatatataggggcgcccgtttttaaggaaccgggtttccttcctcttgcttcctttttaatacctttttttttgtgtcccttatttttatttttttgtccttttttttccacctttttttctgtttattcccttgttttttccacttttttcttttttaaccccttccttttttttctgtttttttttttactaaattggcctctttctttttttttttttatcagtttgtccccctttttgttcttttttcccccctttttgccgttgtttttgctcttgggtttttttttttactcccacttttt

SEQ ID NO: 347378 - DNA, 140 bp, Zea mays
gaaaaaaaaaaaaaaaaaaaaaaaatttttattttaaaaaaaaaaaaaaaaaaatgggggggcggtctttatgatccaagctatactttcgctttcatgcgacgtctaatcttttctattgtgtcacctaaatccaatta

SEQ ID NO: 347379 - DNA, 245 bp, Zea mays
gacccagcgtgcgggtttaataggttggttaaataattatttttatattggatgatggggggggtgggggggaaaaaacacagggcgtggtccatgtctctggtcttggggagtgggtgtgagcctctgagatccttggaaggtcattgattgcatgggtcaagagggagatttgaaacctgtgtatccacttccaacttgttttccacaaatctttttagtttgggagcctgtgaataatctat

SEQ ID NO: 347380 - DNA, 118 bp, Zea mays
cggacgcgtgggattttttgtgatttggagtactaaattaacttgattgggtattagtgggaacctgaatactaaattatctatctggatacataaatggagatgttttctcttgatt

SEQ ID NO: 347381 - DNA, 430 bp, Zea mays
gaaaaccggcccgagcgagcggaagaaaacgcactggctgaagccgctattcgttttagaccctctgctgccacccttatggtgattgtgccgtccaacctccttgcttcccctgtgtgaatctgaacggatttttgtgttctgaaaaaaaaaaaaattcctattataataataaaaaataaaaaaaaaaaaaaaaaaaaaaaaaaattcaaggcacagtgtataaatatggggcggccgttttagaggaaccaagtttacgtacccttccttgctacgtcatattaatttttttttggcaccaaaatttaattaattgggcggcgtttaacaaggtgggattggaaaaaccctggggttacccaactaaatggcttgctccaatttccccttttttacagtgggggaatatgtaataggcccccacctt

SEQ ID NO: 347382 - DNA, 239 bp, Zea mays
  unsure (1)..(239): unsure at all n locations
gcgtncgggacgcgtgggggacatggnacattcaatatttgattttatgagaaccaaagggtggagatgtttctttcaaaaaaaaaactacaaacaacaacaaaaaaaaaaaaaaaaattaaaaaaaaaaaaaataaaaaaaaacaaaaaaaaatgggcggcccctttaaaagatccaaacttacattcccctgcattcgacataataacttttttatagggtcacctaaaataaattt

SEQ ID NO: 347383 - DNA, 291 bp, Zea mays
  unsure (1)..(291): unsure at all n locations
ttcatacattaaatatatcggccgctcngagcacgcgagcggggaaagcttatgcaacaatctcgcccctagcaaccgccaccacatatatagctgaaaaggcgaacatgctcccttgacctaccattattttagcatctccgactccatcaaatccatcatggagcgcctgtcgatcttataattattagatcatcaggttcgtaaaaattgttaaaaaatactctgtaatcaaacttttgaatcaattgaaggtctactgctcttatgttcagtcttacttataatatc

SEQ ID NO: 347384 - DNA, 365 bp, Zea mays
caaactcggattctgagcggtggaagaatttctggctaaagacgcctagagggtatagggctctgcaagctaggaagctcttgtttaattttttctgcttgtgttattagtcattgtattaccatgttttgtctgatggttaaagaaccgtctttatgctatggtgaatttaaaataaaaaaaaaaaaaaagatgactataaaagaacaaattttaataaataaattataccaactcatatgttttatttaaaaaaaaatataattttttttctgggaatcaattaaaaaaaaagtgctgctgtgtataaaaatacaatacgtcttctttttttttgcttactaaaatatttaacattttttgtt

SEQ ID NO: 347385 - DNA, 397 bp, Zea mays
  unsure (1)..(397): unsure at all n locations
cgggcccgacccacgccgtccgtgccctccgttcctntgtgatgaggnaaatattctttttgnttcgttctccgtgggcgttgtgtcctacagaattcacatttgcttnntctgtctctcttctctttatatacacactgtatanaaacanagaanncagctgtttattcatctcttncttatattaaccttttgaacacctctgnaaaaaaaaaaaaaaaaaaaaaaaaaaaaaaaaaaaaaaaaaaaaaaaaaaaaaaaaaaaaaaaaaaaaaaaaaaaaaaaataaaaaaaaaaaaaaaaaaaaaaaaaaaaaaaaaaggggggggcccttttaaaggatccaagtttacttccccttgcttgcaaggatataaattttttttttggggcccca

SEQ ID NO: 347386 - DNA, 150 bp, Zea mays
aaaaaaaaaaaaaaaaaaaaaaaaaaaaattttattaataaaaaaaaaaaaaaaaaataaaggaggggggctgccgttttattgcatctcagctttcatcccccttcttgcgacatcttacctcttttatattgccccctaaattcaatt

SEQ ID NO: 347387 - DNA, 226 bp, Zea mays
cggacgcgtgggttcatttttcatcaaggatcagctgtttaaagacctgtatttgttggctggttaataattggacatgtagagccgacgtttacattgatgtaacgtgttcttgtctgctattgcttcccagcctctgttgtttcttcctgtaagtcattccgaacatgaatccttgttattgaagaaagtatgaaatatacgcgcggtggcggcgcctcctgtc

SEQ ID NO: 347388 - DNA, 238 bp, Zea mays
catggatggattgggatgtaacctgttcataaaaaaaaaaaaaaaaaaaaaaaaagggggggaaaaaaaaaaaaaaaaaaaaaaaaaaaaaaaaaaaaaaaaaaaaaaaaaaaaaaaaaaaaaaaaaaaaaaaaaaaaaaaaaaaaaaaaggggggggccgttttagaggatcaaagtttacttccccgtgcatgcaaggtaaaaacttttttttggggccccctaatttcaattaat

SEQ ID NO: 347389 - DNA, 64 bp, Zea mays
aaaaaacaaaaaaaaataaaaaataaaattttaaaaaaaataaaaacaaaaaaaaaaaaggggg

SEQ ID NO: 347390 - DNA, 335 bp, Zea mays
ttttaataataataaaaataaaaaaaaatatctatactaataaaaaaaaaaaaaacaaagggagaatttttaaaaaaaaaggtattctccccccaaacgattaacttttttttgtcccttccctttattttcctctctctccttcacgtcccctttatttttttcccctccctttcggtccccctttttttttttgtggttcccccttcgtacctctctttctttgctccctctctccttccccttttttcatttttttttttttcctgtttttttcctccaggtgccttttttcttacgtgcttcccacctatttttcctttttcctttctttt

SEQ ID NO: 347391 - DNA, 385 bp, Zea mays
cttgtttttttctctctcccttacgagagagtttggctgttaattgattcgataatagaaagatggaggatgtacaaaaaaaaaaaaaaaaaaaaaaaaaaaaaaaaaaaaaaaaaaaaaaaaaaaaaaaaaaaaaaaaaaaaaaaaaaaaaaaaaaaaaaaaaaaaaaaaaaaaaaaaaaaaaaaaaaaaaagggggggcccttttaaaggataaaattttacgtccgcgggattacaaaataaaaccttttttttagggtaacaaaaataaaataaaagggccgccgttttaaaagatccaaactggaaaaaccctgcctttaacaaaataaatcttttttaaaaaaaccccaatttaacaaactggccaaatatcaaaaagg

SEQ ID NO: 347392 - DNA, 319 bp, Zea mays
  unsure (1)..(319): unsure at all n locations
cttgaattgtgggaccctttgttcgttttcctagactctgatgctgtatgcaactgaaacgagtaaatctatgatcttaaggctgcaaaaaaaaaaaaaaaaaaaaaaaaaaaaaaaaaaaaaaaaaaaaaaaaaaaaaaaaaaaaaaaaaaaaaaaaaaaaaaaaaaaaaaaaaaaaaaaaaaaaaaaaaaaaaaagggggggganaatttaaagaaaccaagnttagntacgagtgcttgcaaaaaaaaaaaatattggttggggcccctaaaataaaataaattgcccggcgttttaaaaccagggaaatggaaaa

SEQ ID NO: 347393 - DNA, 99 bp, Zea mays
aaaaaaaaaaaaaaaaaaaaaaaaaaaaaatttaataaaaaaaaaaaaaaaaaaaaaaaaaagaaaaaaaaatataaaaaaaaaagataaaaaaaaaaa

SEQ ID NO: 347394 - DNA, 177 bp, Zea mays
  unsure (1)..(177): unsure at all n locations
gaaaaaaaggcacgagagggggggggaggtaagtaggttgtaaattaaaaaaaaagaaaaaaatgatttggtaagtatgaagaaagaagaagtggagtatgataggatagaaaagatnggaagaattaaaaatgtgtaagaaatgattgattatgtgaaagaaaaagtttgattgag

SEQ ID NO: 347395 - DNA, 200 bp, Zea mays
  unsure (1)..(200): unsure at all n locations
ggaannncngggnngacccaagcgtccgtttacacaccagtagtggtgcatatgtctttttattggctgtggatatataaagcttcggggatagttctattacatctgtgttgaacgagtactggaactgtacctacttatttctcattttcaatgattagtaattcaacattgcgaccagcaaaaaaaaaaaacaaaaa

SEQ ID NO: 347396 - DNA, 375 bp, Zea mays
aaaaaaaaaaaaaaaaaaaaaaaaaaaaattttttttaaaaaaaaaaaaaaaaaaaaaaagaagggtattataaaaaaaaaaaataattctttaattttatataaataataaaatctaaatatcatttattattatttttttattttttttttttttcattttttataatcattgtggtgcttttttttttgttttcttatttttttacctttttctctttcccttctttttttttttttttttccctttttttttttttttccccccctttttttttactctttcttttctttgtcacctccttttttttcccctttttttatttttgtttaattttttctcttcttttttattcttgtatttttttttaatat

SEQ ID NO: 347397 - DNA, 145 bp, Zea mays
cggacgcgtgggaaaaactgtagcttatgtgtgtcttggcggattagctggttatcttgaactgacgttcatgtgacatggcaatggcacatgaacatacgtttcatgagtttgattgttaattggcgcttgcagcactttgatc

SEQ ID NO: 347398 - DNA, 182 bp, Zea mays
aaaaaaaaaaaaaaaaaaaaaacaaacatatataaaaaaaaaaaaaataaaaaaaacaaggggggtgcttccctcctttcgtgtccttccctcctttgcctttggatacaccctccttgttgtatactactgcgtccctttcggtcctttattttgctccaaaaatacaaaaaaaaggctgg

SEQ ID NO: 347399 - DNA, 143 bp, Zea mays
gcccgacccacgcgttcgtttgccgggaacccgtcgaccgcatgatgtctaaattttgcccacgaggacggggtgggggcatttccatctgtttgaacggcctccactcaaccctgtctctggtctcacctgcctgattatga

SEQ ID NO: 347400 - DNA, 249 bp, Zea mays
gttaaaaaaaaaaacaataacacatttttatctataactaatcatcaaaaacacacacggaggctcatctcaaacacataaacactcccccacctaaactttactcagcaaaaaatactctttcatagaatctcatatgccggcgcccctctttagaacaccccctcttacttccccttctttccgcccatttattttttttttccttcccccttactctaaattcacttcctcttttttctacaactc

SEQ ID NO: 347401 - DNA, 159 bp, Zea mays
ggaggttatacgcagccaacaccgttgttgttctggagctagccaagaggccggggagggaggggtagctcatcgagaccgaccttccgagccttggccagcggtacctgtcgttcgcgctgttcgatgagctgctgaaggaggcacaagccatggaac

SEQ ID NO: 347402 - DNA, 56 bp, Zea mays
  unsure (1)..(56): unsure at all n locations
aaaaaggcatcgncctgcactgcttaaacgactcggccgactacggctttcagttc

SEQ ID NO: 347403 - DNA, 384 bp, Zea mays
atttgatgcagccacaatcaatggctggatgcacaaaaggctgcatgagctgctgggggatcaaatactacaggtgaacccgacggtggctctcatcctagaactggctttgttcgcaccctacatgttggcgcaacaaaagatcctctttctggactattaaataagcgtgcagcgaacttacatacccctatagggaccgttggtgtcacatatcaaccaactggctgagcgacatattgagttctacacaaagaatcatgagacaggcgttaaacttgaactgtgcatcttctatgtgacacattctgaatgtcgtttttataaactccactgaagcaaccctatcaactaccttaggttatgctttaaaccgatcaccat

SEQ ID NO: 347404 - DNA, 54 bp, Zea mays
  unsure (1)..(54): unsure at all n locations
naaaaaaaaaaaaaaaaaaaaaaaaaaaaaaaaaaaaaaaaaaaaaaaaaaaaa

SEQ ID NO: 347405 - DNA, 374 bp, Zea mays
aaacaatctctgttaccatggagtattgttttgtcctaaaaaaaaaaaaaaaaaaggggaaattattataaaaaaaatagggcttccattttaaaagaaccatatattatttaccctaacttgccccgccgttcttgctgttcctgctttctttcgttcacttcctccgccgttgtttttctattgcgtcacctgaaaccccttggctgtcccccttttactccccttgcactccttaatccttttgcctcctccccttttttcgctttggggctcctactcctctttccttcccctctcttttttgccctttttggccctctcctttccccccttttttaccgttgcttttccctattggctatttttactct

SEQ ID NO: 347406 - DNA, 186 bp, Zea mays
gtttgatcattcattccttttctaagtcgtctcccttcagtcgcgaaaaaaaaaaaaaaagagaaaaaaaaaaaaaaaaaaaaaaaaaaaaaaaaaaaaaagggggcggccgttttaaaggatccaagcttacttccccgtgcttgcaacgtcttagcttttttttagggtcacctaaattaaatt

SEQ ID NO: 347407 - DNA, 91 bp, Zea mays
cggacgcgtggggtttggtccatcggtaccatgtttgtaaattgggcagtgatgcacatcattgactggcatgttcttgtcacttttatct

SEQ ID NO: 347408 - DNA, 195 bp, Zea mays
aaactatgttcgatttcatgttcgaagtgtgttaaatgttaataatctgttttagttaaagcattgatgtagtttgcaagtcacagcaaatttcgtgcccgtccccaccttgatcaggtggtcgttctctcgttgagggcggagcaggaccagattttcccagggcacagaaccaccgtaacactccctacacaa

SEQ ID NO: 347409 - DNA, 295 bp, Zea mays
ccggcccgacccacccgtccttataataaaaaaaaaaaaaaaaaaatttatttattaaaaaaaaaacaaaaaaaaaaggcaagaatgattacccatctgtagggtacaagcttacgtacggggggctgctttatagaacccactcttatgatcccacccatgcgaaatacattgtccttttttgcgcaccctaaatacaaggaaaaccccgccgttttcccacttaatcctgttaaaaccatgccttttccccgcctttttgttttaccaaaataccctttccgccatgcgttta

SEQ ID NO: 347410 - DNA, 422 bp, Zea mays
  unsure (1)..(422): unsure at all n locations
gaangnccgggccgacccacgcgtgcgtcgcgtgccaggttccatttcctgttggttttcattgggctgtgccttttggcctgcgcgtgctttgactacttatacagagatgactatgtttacctctttgttcttacccaatcgatcatgtatttcgcgattgggtttcagttcgttggtctcaatgtctctgaagactgaccaattgcaagacaactgaacgttttggttgcgatattatgattgctcgggtcaaggttcttgtatcgatggtctacagaacggcaggtttgtgtgcgatctattatatacgtcatacttcaagagaggataatcacacgctggaggttgagacgaatctattataatccagtaggtgccaaaaaaatgcatttaaaacctgttgacgtttctggaaaaca

SEQ ID NO: 347411 - DNA, 306 bp, Zea mays
gtaattcaagaatcctggactatctttttatgtgcttatttgagtttgcaaaaaaaaaaaaaaaaaaaaaaaaaaaaaaaaaaaaaaaaaaaaaaaaaaaaaaaaaaaaaaaaaaaaaaaaaaaaaaaaaaaaaaaaaaaaaacaaaaaaaaatatgaagataacaactaaatgctaactaaagctattggggatcaaaactcccgtaggggggcggccccttcaagaacctaatactttctgccgtcggtggcgctatatcgaatctttttcgtgccgtccaaatacaaaacgactgcccccttt

SEQ ID NO: 347412 - DNA, 59 bp, Zea mays
  unsure (1)..(59): unsure at all n locations
aaaaaaagaaaaaaaaaaaaaatttaaaaaaaaaaaaaaaaanaaaaaaaagcgagggg

SEQ ID NO: 347413 - DNA, 145 bp, Zea mays
aaccgaccactcgtccaagggacaatcagcaaaattaatcttgttatcctccacctttatattccgccgccgttttaaataataccaatatccaaaatccaaaatacattacaatcatttatggcattaatacataccaaaccta

SEQ ID NO: 347414 - DNA, 55 bp, Zea mays
gaaaaccggcccgaccccgcgtccgcggacgcgtgggctcaaaaaaaaatttttt

SEQ ID NO: 347415 - DNA, 229 bp, Zea mays
ggggggggttttttttttttttttttccccttctcccttccccttttttctcgcataaacacaacttattcccttcttttttcccatacaaaaccaaaataaaggtttttaatttttacttccttccactcccccccaaaaaaaatctttttccaattttttaaactcaaaccccctttctctaactaataaccctcttcccacaaaaaaaaaaaaaccttcccatccc

SEQ ID NO: 347416 - DNA, 293 bp, Zea mays
  unsure (1)..(293): unsure at all n locations
cgcgtncggcacggcacgatacgtcgatgcctcagcttatatagtccacactactgtacgtgcgcgtaggccgtagatgccggcgtgtaaatggtcgtatcgtagagacattgattcgattttgctaccgtctggggtccatggtgcagtgaatttggatccccgtgtgctgaggaattgtatacgtacgagtaaagcagcgcgcatggggggcaggcgggcagggcagtttcgcggccttgcagttgcagcacacgttgcggagattaatgtccgatcctaggcatttgatt

SEQ ID NO: 347417 - DNA, 174 bp, Zea mays
ctgatcccagctcatgtcacctcttttcatcctttgaacggcttgatctctgcgcgaggggttttctctcattaactgcattgctcgaaagacgcctgtcattcattgctgctgataacttttgatgggcttaatatcgaattactacatcttaaaaaaattaaataaaattat

SEQ ID NO: 347418 - DNA, 308 bp, Zea mays
aaaaaaaaattgttctattaaaataactattatattttacctgttataaaaaaaaaaaaaaatggtgtttgatataaataattaaaatttatatatttattcttttgataaaataatttttttattattttaattaaatataattaaattatttttaatttaaatattatttaatgaaaaaaatttttttttttttaacttaatttttttttattatattctatttttataatatttgtttaattatttaatatttttattttttaatttttttttttaatatttttattaactcttaattatatatt

SEQ ID NO: 347419 - DNA, 348 bp, Zea mays
acttgtgatagttaaaacattgggttttttaaaaaaaaaaaaaaaaaaaaaaaaaaaagggaatatttaaaaaaaaaaataataaaaaaaaaaaacaaacataaaaatacaacacaaattatatcactttcttccttctttatatttctttttttttccctccttcattcactcttttttcctttttattctcatcctctttttctgcttaactcccttgcatttccctacttattctccttgtaaaaccttctcctttcctattctttcctccttcccataataccccttcctatcccttttcttttattttttcaacccctttcttcttttccttccccctctttt

SEQ ID NO: 347420 - DNA, 53 bp, Zea mays
caacaacctggctgctgttaccttttatatacttattcctgaagttgtttggt

SEQ ID NO: 347421 - DNA, 109 bp, Zea mays
ggctggagcctggagggagggacgatgatccatcagatgggctatgttactctgtagaggatcgagatgctaattggctgagctgcactgcacaagagacctaattaac

SEQ ID NO: 347422 - DNA, 322 bp, Zea mays
gagatactttgggtataacaagatctttcgtatttactaaactaatgcacagccccgacaatttttcacatttttcaaaaccttctcacgacactggtttgttttgggtcacccacacatttcagttgtcgctgtccctactttgtttcctcagtatttacagctattgttctgttcaccattgattcaagtgttttcctttttttagcgtgttttattttttcttctttttatctcttaacccatatatatgcacttgatcttctctgaatatcggttttccttcaccatgacttaatatgtaaaaatcttttcttttttc

SEQ ID NO: 347423 - DNA, 203 bp, Zea mays
  unsure (1)..(203): unsure at all n locations
gaaggaaaaaccgggccgacccacgcgnccgaaaaaaaaaaaaaaaaaaaaaaaaaaaaaaaaaaaaaaaaaaaaagggaagaaagcgggggggaaaacaagcgaacaaacgcgcgcaagaaacgaaagcagcgcgagaacaggcgaaacaaagacacaaaaaacaggcccaaaagaccacaacgaaaaagacgggaaaaacc

SEQ ID NO: 347424 - DNA, 338 bp, Zea mays
aaaaaaaaaaaaattttttttaaaaaaaaaaaaaaatgaaaaaaggggggggggaaaaaagaaaaggaaggaaagaaaaaaaaagaaataggggaaggaagggggaagtaaagaaaaaaaaaagatagaataataaaaaaggaaaagtgggaaaaaaaggataataaaaagaaaaggggagagaaaaaaatggagagaaggaggaaaaaaggaggaaaaaaaaaaaaaagagtaaaaaaaaaataatggagattgaaaagggaaaaatgaaaaaaggagagaaaaaaaaaaggaaagggaaaaagaatgaggaaggaaaaaggaaaaaaggggatagg

SEQ ID NO: 347425 - DNA, 440 bp, Zea mays
  unsure (1)..(440): unsure at all n locations
ccggcncgacccacccatccgtncgaaaaaaaaatactgttatatcctttttattttttaaaacaaaaaattaacaaatatggagcaatttttaaaaaaaaaaaactacaaaataaaaaaaaaaaaaaaacaataccaaataattgggcccccccttctaaaggatccaacctaccctccccctccttccaactttttaccttttttttaggctcccctaaatccaatcccctcccccccttttaacaacgtcggccctggaaaacccttgcctttccccaactaaatccctttgccaaacatccccttttcccaactggccctaaaaacaaaaagccccccccccatccccttccccaaaatttctccacccctacttcgcaaatggccccccccctttatcccccccttaaaccccccgcgttgtgtgggttcccccc

SEQ ID NO: 347426 - DNA, 333 bp, Zea mays
cggacgcgtgggcggacgcgtgggctgactcgtgggcggacgcgtggggcggtgggttgcgacgctgagccacatgttcgtgatgtccaccgccgtctccgtctccaccaggcacgagccggcgcgccgggactgacccaccggtgcggctcctccctcgaagcaatggacccaccccacccatcacgacgtaaacgaaaacgttgatctgtgtcgatcccatgtgtatttagtactactactgcccatgaactgtatgagtagtatcagcactgcaagctgcaaccaaagattcagatactgtttaaaattctgtaaattcgcatcgttttc

SEQ ID NO: 347427 - DNA, 376 bp, Zea mays
  unsure (1)..(376): unsure at all n locations
cgcatcagaagcaatgcgcagctcctgtggcctcgaccgaacaggacaagaaataggtctagttggatttcttttcgcctttgggtttttgtttaaaaagaaagagaacttgattttccttaaactagaattctctgtcttccattatagtgcacccttttttatactcagattcaaaaccaaaatataaaagaattaagtnaaaaaaaaaaaaaaaaaaaaaaaaaaaaaaaaaaaaaaaataaaaaaaaaaaaaaaaaaaaaaaaaaaaaaataaaaattaatattaataatataaaaattatttaattgggggcggccgttttaagggatccaattttacttccccgtgcttgcaaagtaaaaattttttttt

SEQ ID NO: 347428 - DNA, 269 bp, Zea mays
  unsure (1)..(269): unsure at all n locations
acccacgcgnncgggccgacgggggcgcgcagggccagcaggggaggcggnncgagaacaaggncgagcacggccggggccggccgccgncgcnccggcaccagccgccggcgcccaagggccgcgnccacgcgccgccgccggcgggcacggccgacacgggcaccggcggggncgagcccggcgacggcgccggggacaacggcggcgccggcaggagcggcgcgngcagggcggcggcggcggccagcgcccggaaaacggggggg

SEQ ID NO: 347429 - DNA, 194 bp, Zea mays
  unsure (1)..(194): unsure at all n locations
gagcagcgcaaaaacacgataaaangnngagaaacggcncgaagaacnggcagggaaganccacgagggcccnagncacccggaggaagggnccncnncggngggcaagaggaacancccgaaacagaagcaggaaagncangcaaagaacggcagnggangccgccaanagangcgccganccacgcgacaag

SEQ ID NO: 347430 - DNA, 283 bp, Zea mays
  unsure (1)..(283): unsure at all n locations
cggacgcgtgggatcgcttaccaagggtccaagtctgaatccacgccatgttatgttgcaattgaggattacaatatattgggtaattgtttgatggaataaacgataatgcttttgtagtttcttgcccaaaaaaaaaaaaaaaaaaaaaaaaaaaaaaaaaaaaaaaaaaaaaaaaaaatntaaaaaaaaaaaaaaaaaaaaaaaaattttaaaaaaaataaaaaaaaaaaaatttaattaaacataaattaaaaaaaaaaaaacttttataactttaatt

SEQ ID NO: 347431 - DNA, 243 bp, Zea mays
gaaaacccgggccgacgcacgcgtccgcagagttcatctcccatacagattattctttttaagatggctgaaaagcctagaatataggtggttttatgcgatgagacgcatatacttgataacgagtgcatgttgataggaacacctccaaagattctatttacagtataacagcacacatgttactaaacactaatagagtcatgacagtagaatatatgaacactgatagtttatagaata

SEQ ID NO: 347432 - DNA, 194 bp, Zea mays
cagtattaaggagctaactcagcttttttttttttgcctcaaattaaatactatgggcgagggtgttctatacttccggtcgctaatgtcgaagatggtttgccatgctatcaccatacgtctcaacgtgtcctacgtaggaaaagacaactcagtgtacaaagtcctattgaacatacacaggtccatatatg

SEQ ID NO: 347433 - DNA, 189 bp, Zea mays
aaaaacgggccgacccacgcgtacgaaatatatgtgctctaaacaatattttttgtatttaccccaaacaaaatccaacggggcggagttttttatactatcgttctctcacccaataaaaatatttcctttaatattataatatcattaaaagttcatatatcactataaacaccacacattttaaaa

SEQ ID NO: 347434 - DNA, 163 bp, Zea mays
ggaagagtttgcccttttactagtgtcgatgttgatctggtataccttgctatgaactggttaaagtttgtgctggttaaaaaaaaaaaaaaaaaaaaaaaaaaaaaaaaaaaaaaaaaaaaaaaaaaaaaaaaaaaaaaaaaaaaaaaaataaaaaataaaa

SEQ ID NO: 347435 - DNA, 120 bp, Zea mays
aaaaaaaaaaaaaaaaaaaaaaaaaaaaaaaaaaaaaaaaaaaaaaaaaaaaaaaaaaaaaaaaaaaaaaaaaaaaaaaaaaaaaaaaaaaaaaaaaaaaaaaaaaaaaaaagggggggg

SEQ ID NO: 347436 - DNA, 288 bp, Zea mays
gacaagtagagataataaacaggcgggccgaatttgcatgaactgataaaatataagtgtgatgatgcccgctttgtggggtgtttggagcatgcatgcgcgctcgtctgttggaatggaactgctgttttttttaaaaaaaaaaaaaaaaaaaaaataaaaaaaaaaaaaaaaaaaaaaaaaaaaaaaaatataaaaaaaaaataaaatgtttaaaccctctatataaacaaattaaaacaacacataccaaataacaaattataataaattttaaataaaaggggg

SEQ ID NO: 347437 - DNA, 86 bp, Zea mays
tgtttttacaggcagattgttgagtgctgtaagcttggcgaccctctatgaataaatgaaatatgtgtttatgtttgaaacttaaa

SEQ ID NO: 347438 - DNA, 352 bp, Zea mays
ggaatacccgggtcgacccacgcgttcgaaaaaaaaaaaaaaaaaaaaaaaaatttattttttaaaaaaaaaaaaaataaattatgaagggggttaataaaaataaaaaataaaaaaaaaaaaaaaaaaaaaataggggggggcctttttaaaggattaatatttatttacgcttttttgtaaagtaatatttcttttatggtgtaacctaaattaaattaattggccgtttttttaaaacgtgttgattggaaaaaccttgggtttactaaatttatattttttgaagaaaattcttttttcagaagttggtttaataataaaaaggtctttattgtttgtttttttaaat

SEQ ID NO: 347439 - DNA, 257 bp, Zea mays
cggggccgaccgacgcgtacgatctaattttctctgctgtgatgatttattttttgccatggaggataaagccgtagtgcggcattttttatacggtcttctggtgtctatatgctactgagttgtttattttttattgtcgcatattttgtggttgttgtttggttattctgttaatcatctcatttcaggcttttgttattaaatatttttctattgtaagtatgttaactttctatgaagtcacatgctggatt

SEQ ID NO: 347440 - DNA, 230 bp, Zea mays
ctgagggatgtgtggtaaagagcgattggatgaacatgcgtgcggattacacacgtgtacgactactaccggaagagcattgacaatggactcgatctgatattgtaattggttggatagggatatttattaagagaggacgtgttataaataagggcatatattattagaatgaatggaaaatgtgctttttctccaaatatatattaaaatatatataatataaataa

SEQ ID NO: 347441 - DNA, 87 bp, Zea mays
aatctgatggcttccattgtgacacttgtaggcggctgcaataaacttacttgatgcaaaagataaaaacaaaaaaaaaaaacaaaa

SEQ ID NO: 347442 - DNA, 75 bp, Zea mays
aaaaaaaaaaaaaaaaaaaaaaaaaaaaattttttttttttaaaaaaattaaaataatattggggggggggtttt

SEQ ID NO: 347443 - DNA, 121 bp, Zea mays
cggacccgtgggcgcgagcggtcgttcgttttttataactagtcttaaatgttaaaagtgcccgggttgtgtcaaaaaaaaaaaaaaaaaaaaataaaaataaaaaaaaaaaaataataat

SEQ ID NO: 347444 - DNA, 266 bp, Zea mays
cggggtcgaccaacgcgtccgattgaattaattgaagggtcaatttgtaattttattaacaataaatgtaatgaattgaaaattcggaaggggccatttaaaaaaaaaaaaaaaaaaaaaaaaaaaaaaaaaaaaaaaaaaaaaaaaaaaaaaaaaaaaaaaaaaaaaaaaaaaaaaagggggcggccgttttaaagaatcaaagtttacttacccgtgattgcaacgtaatagtttttttatagggtaacttaaattaaattaat

SEQ ID NO: 347445 - DNA, 259 bp, Zea mays
tttctgtagtagtatataacttgtttttttttttgcaccacattgctacctttgcgggtggtttttatgcagtgtattgagaaactatttaaatataataattttaactaaatttattaattaataattatattttaaatttattatttttttatttatttatttatatttttattaattatcttactctcttatatttttctttctattttatttttgattatttttttttatttaaattaaatattatttatttttt

SEQ ID NO: 347446 - DNA, 159 bp, Zea mays
gaaaaccgggccgaccgacgcgtccgaaaaaaaaaaaaaaaaaaaaaaaaataaatttataaaaaaaaaaaaaaaaaaaaaaggaggcgaagaaataaaaaaaaagtaaagaacaaaaaaaaaaaaaaatcttaatttataaatttaaaaaaaataaaa

SEQ ID NO: 347447 - DNA, 139 bp, Zea mays
gcgaactgtaccgatggacgggggtccggtaaggggaaataaaagaaatgtcatttaccgggctttctaaaaaaaagaaggcagcaagaaaacccaagaacaacgctggagccacaatgaaaggcaacgcagatgatga

SEQ ID NO: 347448 - DNA, 190 bp, Zea mays
cacaaacctcttgtttgttattctactgtgtaattttttttaaagtaggctgacccaaatttggatggccatgatcataatcctttggcgcatggaacatttgctgttgtacacagtactgttcaacacatagccatttgtccgattttttaaaaaaaaaaaaaaaacaaattaaaaaaaataaaataat

SEQ ID NO: 347449 - DNA, 100 bp, Zea mays
caatacccacagaaccaataaatgctgggttttttttacctaaagtaaactaacccaaatgtggggggccttaaaaataatccttacacaacaaaaaaca

SEQ ID NO: 347450 - DNA, 156 bp, Zea mays
gggcggaccaacgcgtccgcggttaacaacaaaataaataataatctgtgttatttgcccaaaaaaaaaataaaataaagggggggggtttaaatgggggcggccgttttaaagaatcaaagttaactaacccttcaatccaacttataagttttt

SEQ ID NO: 347451 - DNA, 304 bp, Zea mays
  unsure (1)..(304): unsure at all n locations
aaaatggtcaatctttaanaaaaaattaaaaaaaaaaaaaaaaaaaaaaaagggaggaaataaaaaaaaaaaaaaaaaaaaaaaaagggggcggccgttttaaagaatcaaacttaactaccccttcattccaaggtaaaactttttttttagggtaactaaaataaaattaattgccggcggtttaaaaacgtcggaattggaaaaaccttgccttaaccaaattaaatggcttggaagaaaatccccttttggcaagttgggtaataacaaaaaaggcccgaacgaatcgcctttccaaaaa

SEQ ID NO: 347452 - DNA, 287 bp, Zea mays
  unsure (1)..(287): unsure at all n locations
aattaanaaaaaaaaaaaaaaaaaaaaaaaaaaaaaaaaaaaaaaaaaaaaaaaaaaaaannnaaaaaaaaaaaaaaaaaaaaaaaaaaaaaaaaaggggggggggggtttaaagggaacaaggttaaggacggggggatgggaaggaaaaagttttttaaagggggaacaaaaataaaataaaggggggggggttaaaaaaggggggaaggggaaaaaccggggggtaacaaaattaaaggggtgggaggaaaaaccccttttggaaggtgggggaaaaagaaaaa

SEQ ID NO: 347453 - DNA, 194 bp, Zea mays
gcctgtttcgaaccaccaaaggacaacttttaggtaccaggggtttccggcatttaatctggttcaaccctgaatccggtggggctggactacctccattctcaacacctggtggtataaaacccgggcgcttttcatgtataattctggattgggggctcgggaaataaaatttggccacgggttatggactt

SEQ ID NO: 347454 - DNA, 258 bp, Zea mays
atcgtaactaagtggaaaatttagatgatgttagtttaagtacgaacaagattaaattatgcggggtgtaatgggattatgtaaatcgaaaaaaaaaaaaaaaaattgggagggtgatgaatgggaaaaagctgacgttacgccagcttagataggttgtagtatattatagtgtcaccataatggcaatatagtgaacatggttgtacaaattgatgactggaataatcgtgcagtttgaaaagtgaatgggattgg

SEQ ID NO: 347455 - DNA, 174 bp, Zea mays
aaaaaaaaaataaataaaaaaatattttttatatttataaaaaaaaaaaaaaaataaggagggttttttataaaaaaataaaaaataaaaaaaaaaaaaaaaaaaaaattttaaaaaaaaatatataaaataaaattttaaataaacttaacttgtttatttttttaatatatt

SEQ ID NO: 347456 - DNA, 76 bp, Zea mays
aataatgtattgttgcagtacaatctagccttgtcgtcatgcaataaataaagcgactggtttccctatttcaatt

SEQ ID NO: 347457 - DNA, 193 bp, Zea mays
aaaaaaaaaaaaaaaaaaaaataattatattataacaagcaaaccaaaaaataaaaaggggggcttatttacaagtatatacgatcacatacacttttatataatatatatatatgttcatttcattaacctaatttctattatgtccttgtcggtttaatactgttttaacacaaataaattgtctttaccc

SEQ ID NO: 347458 - DNA, 55 bp, Zea mays
  unsure (1)..(55): unsure at all n locations
aaaaaaaaaaaaaaaaaaaaaaaaaaaaaaaattttaaaaaaaaaaanaaaaaaa

SEQ ID NO: 347459 - DNA, 161 bp, Zea mays
ggaaattcccgggccgaccaacccgtccggggtttaaatcttttttaacctcctttaattcccttggtacccgaccagccggccttaggaggagggcctggccactcttaattatttggaaggccatgtggttggggaattcaggtttgcccttccatttc

SEQ ID NO: 347460 - DNA, 98 bp, Zea mays
  unsure (1)..(98): unsure at all n locations
gatgcaagagtacactgggccgctctgcccccaccgttatcacataaatntttgaagagtgatttacaatgagttgaggcgcttacacaaattttcat

SEQ ID NO: 347461 - DNA, 170 bp, Zea mays
aattttgggaaccaccggttaaatttaaaggaccttgacctggaaagccagttaaaagggtgggtcttgtgattaataagggccggttggtaaaagaatggcaagatgtggtaaatttggtttgggccttccaaaaaaaaaaaaaaaaaaaaaaagggccggcggtttta

SEQ ID NO: 347462 - DNA, 60 bp, Zea mays
  unsure (1)..(60): unsure at all n locations
gactagnnctaggatgatcactaccgctcaaagcgccacaagaaaagggttaaggtaatg

SEQ ID NO: 347463 - DNA, 320 bp, Zea mays
aaaaaaaaaaagatgatcactccactcaaagctttcaagaaagggataaagtaatgtatgggccgatctctcacacgcagcttgttacataactcgctgcaaggttgggaaaagcctgacaacggggggggccgttttgtagatgcaaagttacctttcgctggttctgaaacttattcttttcttttggtgcccccaaaaaattaaactgcccggcgttttaaaacatagcaactggaaaaaccctcggttttccaaatttatacgcttgacataaaatccccttttccccagttggataaataacaaaaaggcccccc

SEQ ID NO: 347464 - DNA, 364 bp, Zea mays
cttttgtactgcctcggtcctaaaataattgacattcttgtttttaaaaaaaaaaaaaaaaaaggggaaattaaaaaaaaaaaaaaaaaaaaaaaaaaaagggcaaacgatataaaaagatccaatgcttacgttcggcttccatgcaaagacaaagcttatttaatagtgaaacttaaatttaatttaattggaaggggggtcccttttaaggggccagggttaacccccgcgttattcaacttaatcctttttttttgggtcccccaaatttaaaattcgtggcctggttttaaaaacccggatcgttgggaaaatcccagcggttcccaattttaatttttttaaaaaaattccccttttc

SEQ ID NO: 347465 - DNA, 129 bp, Zea mays
ccggacggaatacccgggccgaccccgcgtccgaaaaaaaaaaaaaaagaaaaaaaaaatttttttaaaaaaaacaaacaaaataaaaaaagccccgctatttttcacattcatatcggccttccccct

SEQ ID NO: 347466 - DNA, 71 bp, Zea mays
  unsure (1)..(71): unsure at all n locations
ttttaaatcagagactgatgatgatgagacaccaaagcaaagcaatgcaatgcaatgcaagcaagctntat

SEQ ID NO: 347467 - DNA, 332 bp, Zea mays
cgtacgaggatagcgcgggaagacaacatttttaggttttatctcgagaaccaccagctgcggcgcgactgaaacaagaaacaaaacacatacaccacatatcctaaaaacaaacaaactttcctgcagcaagcttaaaaaaacacactagctagctagagtgctgcatcagcatgtatacttaaactgtaacaacatgtaactgccgcgcatttacaaataaataaataaagcgggaataaattgtaacaaaaaatttttaaaaaaaaaagggcggtcaatctaaaggatccaagcttacatacgcgtgcaatgcaaaaaaaatatttctt

SEQ ID NO: 347468 - DNA, 137 bp, Zea mays
atggcctatgaatgtgggtgtaactttcctgtttaaattaagggtctccagttctggaggattggaggggattgaggtgaaaataaactgatttcctccctcattcacctctaataaagttgacaatttgaatttcg

SEQ ID NO: 347469 - DNA, 86 bp, Zea mays
tggactcacgtgtggacacctgtctgctgtgcttgtgcagacgggtcctctgctctaagactatgggcgctactggtgacaggtac

SEQ ID NO: 347470 - DNA, 262 bp, Zea mays
ggcgtacgcggaagcgttggataaaaaagaaaaaaattttttgtttttgaaagatgaaaaataagagggggagggtattttttaaattgggggtgggttgttttaaaggataaaagtttacttacgggttttgctaggtaattgtttttgtatagtggtatttaaattgaattaattggacgttgatttataatatggtgagtgggaaaacattggtgttgcctaatttaatagaattttaaaaaatgctgattttttaatt

SEQ ID NO: 347471 - DNA, 314 bp, Zea mays
gttatcacacctttgacaagctcggcaactgtctgaataatttctgtttctaatgaaaaaaaaaaaaaaaaaaaaaaaaaaaaaaaaaaaaaaaaaaaaaaaaaaaaaaaaaaaaaaaaaaaaaaaaaaaaaaaaaaaaaaaaaatgctgacacataaaaaaaaataaaaatataataaaaaaagggggccgccccttaaaaaaaaccaaagttaacttacacttcattcacaaggaaaactttttaaattggccaaccaaaaaaaaataaagcgccccccaattaaaaacgcttaaacaaaaaaaaccttgcc

SEQ ID NO: 347472 - DNA, 335 bp, Zea mays
  unsure (1)..(335): unsure at all n locations
ccgggccgacccacgcgtacggttacggtcaggcgagttantcttttttttttctgtgccctgtatccatggctgcggccggctttttttttttgtgaggcatcaataacaaggggctcactaacttcattcgttacgttcgcgattaacgatactttatatgccttttgtacggtaaccttttgcaaacgaaaatttacaatatttgatcaacacttgaaggatttgacaagtttggaaacaaatactattaaaaacttcatgacacttattacttatggtatatgtggttataatatgcatagaaaggtttcttcaatgcattcccaagtgcc

SEQ ID NO: 347473 - DNA, 158 bp, Zea mays
aaaaaaaaaaaaaaaaaaaaaaaaaaaaaataaagggcggacgataataaaagaaacaaaatgaaaaaacacggggctgccgctttataggatccaatacttacgtacgctaacttgacaacacttgccttttttttacagcgacctaaatggaataa

SEQ ID NO: 347474 - DNA, 106 bp, Zea mays
acttggcaaatctttcattcctgttattttgccgggagcactgcaccggaaggttataagtcgagctcggctgagatcagatctatatcatctcctgcaggtggaa

SEQ ID NO: 347475 - DNA, 308 bp, Zea mays
aaaaaaaaaaaaaaaaaaaaaaaaaaaaatttaaaaaaaaaaaaaaaaaaaaaaaaaaaaaaaaaaaggaaggaagatataaaagataaaaaaataaaataaacaagcatgcaaaaaaataaaataattatataaagaaaaataaataaaatgggctggcctttttttttacaacgattttgggtgggaaattttttggaagttacccattttttttggggttgcagaaaattaatttttttgtcgttggtgtaaaaacaaaaaggcgggaaccgtttgtttttcccaacttttgtgcaatttgaatg

SEQ ID NO: 347476 - DNA, 191 bp, Zea mays
ccacgcgttcttttccttactggcaatcctgtcgccttattaactgcagcgctcttgtggggggcagtcgagacttccttttggcacagaaaaatgcaccacccctgataagtgtaccgccgctgatgggttaagtagacctggctgtgattctaattgaacgcatctaccttgtttattggcttgatttc

SEQ ID NO: 347477 - DNA, 330 bp, Zea mays
cggacgcgtgggtggaataacccgttgttatctccgtttggcaaataacataaaaaaaaggggggaataatatatttagagtaaacaaaaaaaaaacaacatgggatgaaaatttaaccgttacgtgttgaataaaaaggggcggccgttttataggatccaaatttacgtccccttacatgcaataaaaaatcttttttttaaagcccccctaaattaaaaaccctgggcgtttttaaaaaataattgtttttgggaaaaccctgctgtttccaaacttaatttttcttgaaaagatacccccttttaccagctggctttaaataaaaa

SEQ ID NO: 347478 - DNA, 398 bp, Zea mays
acgcgtcccagtcgtacgaacaaatctatcgtttttttttacacaaatgaacagacccggaaggggattttgaatcacagggacccaaaatatgcagaccaatcctgtgcaaaaagaacaaagctggaagcatcatattacctaacttcaaattatactacaaaggtgtagtacccaaaacatcatgatgctgtcataaaagcatacacatagactaatggaatagtttatacaaacccagaaataaatccacacatttgcagtcaactcatttttgccaaaggtttcaagaacatatttgagaaaggaccatttcttcaatacatgtttggtgggaaacttagatgttcacatgcagtataaagaaaatcgtctgcccgagtttgccatatatgaaa

SEQ ID NO: 347479 - DNA, 124 bp, Zea mays
  unsure (1)..(124): unsure at all n locations
agggcccnctacccacacatccgcccattttttgattttangttagacgctgcacgaccccgcgcgcgcttgttttcacggcacttgaggcatctctgagatactctgtagttacctcggagcc

SEQ ID NO: 347480 - DNA, 135 bp, Zea mays
cggacgcgtgggtggtttaacccgttgttactccgtttggcaaataaaataaaaaaaaaagtaaaataaaataaattaaaataaaaaaaaaaaaaaaaaatagggataaataatataaagttaacaagtttaatt

SEQ ID NO: 347481 - DNA, 380 bp, Zea mays
cggacgcgtgggcggacgcgtgggcggactcttgttgattgatcaaaaaaaaaaaaaatgggacaggaactattttaatacagacaaaaaaaaaaaaaaaaagaaaaaacaaaaaaaaaaagaactaaaaaacccacaataaaaaaaaaaacctgggggggccgctttaaaaaacccaacttttcttccttggtgttaaaaacattaatttttcttttggcttgcccgtaaatgaaataactgggacgcctttttaaaaatttggaaccgtgaaaacccggtttactcccaccttaaaaaaattaaaaaaaaaacgcctttcccctctatagaatttaagcaaaaggccgcgcccatattactttttaaatattttataa

SEQ ID NO: 347482 - DNA, 85 bp, Zea mays
gttattttgtctttgtaactgaattaagttcagtcctgctggaaaaaaaaaagggttttatttaaaatataccaaactaaaacat

SEQ ID NO: 347483 - DNA, 366 bp, Zea mays
acgcgtggggagggacgacataccgaccagggttttaagctaactaccgggccccctcgtgcgcgggacattgataccgcacactgactcgtttctgctctggagccgagccatgaaccagtgcacatattattgtgctctcccagaagggacgaactggactatgtccgctcttgcattacatgtatgctctgtgtgagcctatatgaacgtgggtgtactgcatgggtgcccctgactactgacttgacgtcatcgaggagccgaagatgtgggcgtagaataggggctgctccaacacggcggctggcaaaggtgacctacgcgggccaccggtcgtatcctaggaaaagggggcgcactttt

SEQ ID NO: 347484 - DNA, 298 bp, Zea mays
taaaaaaaaaaaaaaaaaaaaaaaaaaaaattataataaaaaaaaagggcagtcaataaaagaggaacggagctatacgtacgcgtgcatacaaaaatcatcgctcctttattgggtcacctaaattctattcattggccgcctatttacaactttttgtcttggtaaaacctctgcttttcccatgttaatcccctggtttcccattccctattaacctgctggtgttatactttagaggcccttcctaattgccctttctaacaattttctgttttcctgttttattaatttgacc

SEQ ID NO: 347485 - DNA, 230 bp, Zea mays
  unsure (1)..(230): unsure at all n locations
gagagagagagatagtacattgttcggtgattattttaggtggttgttgcagcnnaaaaaaaaaaaaaaaaaaaaaaaaaaaaaaaaaaaaaaaaaaaaaaaaaaaaaaaaaaaaaaaaaaaaaaaaaaaaaaaaaaaaaaaaaaagggggggccgttttaaaggatccaagtttacttacgcgtgcttgcgacgtaatagtttttttttagggtcacctaaattaaatt

SEQ ID NO: 347486 - DNA, 72 bp, Zea mays
ttaaaggatccaaacttacttacccctgcatgcaacgtaataacttttttatagggtcccctaaattcaatt

SEQ ID NO: 347487 - DNA, 229 bp, Zea mays
acgagacgagacggcggcggcgatctagctctcctttttgctagtagtaattactattgtgaattcaggacttggcaggtgaatgtgaatgctgctgggttggttggatgcataattctggagaagacgatgattgtgctgcgcagacagtagtaaaacaacatgcaattcgaatgatctgttcaatacattatacatagaaagaatgcatggcgttcccgtattctgt

SEQ ID NO: 347488 - DNA, 106 bp, Zea mays
aaaaaaaaaaaaaaaaaaaaaaaaaaaaattaaaaaaaaaaaaaaaaaaaaaaaaaaaaaaaaaaaaaaaaaaaaaaaaaaaaaaaaaaaaaaaaaaaaaaaaaaa

SEQ ID NO: 347489 - DNA, 230 bp, Zea mays
aaataaaaataaaaaaatttaaaacaaaatatttatttaaccaaaaaaacaacaaagggggaggggggaatttaaaaaggaaaaagggccacacaaacgaaaggcaaaaaaaaaaaaagggggggccgaaaaaaaaaaacaaaaatggggcggccgttcaaaagaatccaaacttacttacccgtgcatgcaacgccaaaactcttttataggggcacctaaattcaatt

SEQ ID NO: 347490 - DNA, 60 bp, Zea mays
gttgtcgcgtgctaggttgtattctgaagtggattcctcaataccgcataccgtactgct

SEQ ID NO: 347491 - DNA, 288 bp, Zea mays
gtttggatagcaacacgttagtatacaactttggaataggatttgtttgtaatgttattggatgcgggcacctgttgcccattaagctatggcatggtatccctggtttcttgtatatcttggagagcgtcagctcttttgcaggacatagtgctatgccgtcgaactcttgtagaaatgttgtaggcaataaaccagtgacacttgtcgaactacctgtgggcatccatttttcgtttgccatattactttggatctagaatctgacgctggaggtttagtatttgt

SEQ ID NO: 347492 - DNA, 134 bp, Zea mays
attttatttgtagcccatcgatgcctgtctatataaacttatttccttgctcacttttttattcgttgtccaccgacttttaccgataataaattattcacttcattctatcaaacaataattaacatttcttc

SEQ ID NO: 347493 - DNA, 291 bp, Zea mays
aaaaaaggaacgagccacgcgtacgattttgtttgcaacccgtttgtatacaattttttttttttatgtgcttgctaactaattggttgggggcccaccgtgtctaaccgataataaaatattcacctttttctttcaaacaattattaacatgttttctattttgcttgacaaaaagttatttccataataacattttataaaaatggggcggccttttataaggaaccaattttacattcgcctgcatgcaaccatttagcttttttattgtgtcacctaaatttaatt

SEQ ID NO: 347494 - DNA, 344 bp, Zea mays
gaggaaacatatgcatatgcctagtcatagagagagagagagacatcacaagatcatgacgaagagggtgttcaatttccatgtcgacgtatgtatgacgacgatccacatggtgtgtccttgtcggtatgtatgcgctacgaacggatgtgtgtatctctcgttaagatatatattgatattgatcgaattaagcgttacgtgtgagagttacgttgtagccatgcaattcagactgatattcgaatctatctttccggagaaaaaaatgtttaatagaggatagaagactaactgccaaatatggtaagatctaaaaaagtttctatccgggttggttgttc

SEQ ID NO: 347495 - DNA, 76 bp, Zea mays
aaaaaaaaaaaaaaaaaaaaaaaaaaaaattaaaattttaaaaaaaaaaaaaaaaaaaaaagaaaaaaaaaaaaaa

SEQ ID NO: 347496 - DNA, 216 bp, Zea mays
acaaggcctagttaggtcctagcatctcattatcctagtaatgagacgtgttcttcagacaatttctagctcggatgaccttggatgattgttccttccattggtttgctcatttggggcgcgcaactaaattatgtgaagtagcgtgttgtgttgtgtcaagaagtaccgcttgtcgatggccttttcagatctggaatgaaggtaagttcctgc

SEQ ID NO: 347497 - DNA, 221 bp, Zea mays
aaaaaaaaaaaaaaaaaaccaccaatttatattaaacgaaccaagcaaacagacgcgggcaaccaacaaaaacgcgcgggccaccccgacacctgaatccaacatacgggcgcacgttacacacccccggcaccgggaaaaccagggccgtacccagctgagtcaacaagcaccacatgccccttgcctaagcagacgagacagcaaagaagcccccaccg

SEQ ID NO: 347498 - DNA, 86 bp, Zea mays
cactgacatctatgatttttagagcaaactctgatctgttttgactcgtttacacgtttgtgtgtggaatctgaagagctgttctg

SEQ ID NO: 347499 - DNA, 366 bp, Zea mays
aaccaataaggatgtttgtagacttgctttttatgagggcgatgaattgcaacttaatttgcttcaaaaagaaaaaaaaaaaaaaaaaaaaaaaaaaaaaaaaaacatacttgcaaaaatataaatatatatataaatggggcggccctttttaaaggggccgcctttttaaaggatccaagcttacttaccccttcttgttacgttatactttttttttagggccccctaaatttattccactggccgttgtttaacaacctgggactgcaaaaacccttgctttcccaacttaatccctttgcagaacatccccttttcccgagatggcccaataacaaaaagtcccccaccgttcccccttcc

SEQ ID NO: 347500 - DNA, 338 bp, Zea mays
gtcgacccacgacgtacgcggacgcgtgggcggacgcctgggtgctttcattatatatgtcctatttgagcaaacgtcataggtatggacatcaaattaatggaccggtacatgtatgatgctcaataatttatttgtgcaatactagtaaacgcatagactgtttgaacgagtacttggtttctccggcaaacaaatgaaatgcaaaaaaataaattttttatagggaaaccaaaataaaaaaaaaatggcggggggtccgcatctagaggatccaagataaccttcgcgtgcctgcaactaaatagcttttttatagagccacctaaattcaattg

SEQ ID NO: 347501 - DNA, 71 bp, Zea mays
aaaaaaaaaaaaaaaaaaaaaaaaattaaaaaaaaaaaaaaaaaaaaaaaaaaaaaaaaaaaaaaaaaaaa

SEQ ID NO: 347502 - DNA, 93 bp, Zea mays
aggacatcatgtatactgtttgagacgaggacattatgtatatacttggtacattagaaggccaccgaaaacaaattttgcatctggtttttg

SEQ ID NO: 347503 - DNA, 410 bp, Zea mays
cggacgcgtgggtgacagcagaggctagacagacaatgcgcggcgtagcctctgcacgttcttgagctggcaggtgacgggttccgagaaagcggctggagtagtttttatgcttggaatcttcggtcgcggacggaagtatggctcaacaactccacaactcaagtgtgcatgtgaaagctgtcgatcactcaagttaaccttgatccagcgtcgtaaaaattccattttttttcagatgaactagtggagttagtgtctgtattgttgcctttccgtgcgtgctgatgggtgatggctgatgctgatgcgtgctttggtcttccgccaggtgatggcgatcctggcgcggccggacaagacgtccaaggtgcggcggttctggaactggtaccaccacaacatcgggc

SEQ ID NO: 347504 - DNA, 297 bp, Zea mays
gtagacagagacggcacagaattgctattggacgtgcattgaacctctcgagttgacgggattgcgatataccgcatgccatggttgttacgcttggaaagtgaccgaacgctcggaagtgtgtacgaacaactgacatcctattgaaccatttgaaaactgcctatcactcaagttaaccttgatccatgcgagtaaaaattccattttttttcagatgaactagtggagttagtgtctgttttgttgcctttccgtgcgtgctgaatggtgatggctgatgctgatgcgtgcttt

SEQ ID NO: 347505 - DNA, 337 bp, Zea mays
  unsure (1)..(337): unsure at all n locations
cggncgcgtgggtgcgtactggcttgttatgtcacctgatgggtctggagggacggacatttttttcctgtgcagcgatagaccggattgttgcgtgtaatggtgccttctctagaggcggttgtgtagtgattgactctcgggtcctgggcaagatggaaggcgttgagtcctacaaacgtaaaacatggtgggacattttgtaagatccaaggttactgacacacctgtaccacgtcatgaaaactgttatagaagactgctaaataaaatttactggtcggaggtttacaacgtgacaagtgaataaaccatagctgtacgcaacttaatctga

SEQ ID NO: 347506 - DNA, 194 bp, Zea mays
  unsure (1)..(194): unsure at all n locations
ggaaaangcggcgggagccacgcgttcccgacgcctgggtccnaaactgcctggtttatattcacgtgatggttcttgagacgcgcccatttttttcccatgcaacattatacggcatttttgactgtctttgtaccaactctacaagctgtaattcgaggattcaaaccataaaaaaaaaagaaatttaaaaa

SEQ ID NO: 347507 - DNA, 157 bp, Zea mays
tgtgtgccaagcacgcaatcctgactacattatatttaaatacattgagttcagctcgtcaaaaaaaaattaaaaatatataaagggtggtcgttggaggggattcaaaagtatccaaacttgcttgctgatgttttcactcttttatagtttcact

SEQ ID NO: 347508 - DNA, 188 bp, Zea mays
gtcgaattatcagtagcgcaacataaccgtttgatatgttcgtggattatccgaggtttgtgaattgtcgacttctgcgttgaagctcgagctactgtgtgtgttgcattgtcaggtcacaccaacagctatctgcagattcatggctttttatggttacacctggagatgaattcgcttggggaaaa

SEQ ID NO: 347509 - DNA, 73 bp, Zea mays
tagacccacgcgtcgtttatataactttatttagaagacttaccttgaataaatattctgatgtatggcaaaa

SEQ ID NO: 347510 - DNA, 382 bp, Zea mays
  unsure (1)..(382): unsure at all n locations
gaggcacgcgtccgatttgggggcctggtcaagttaaggtactctgatggccaggcggcgccatccggctgtgctattgaaactgtctaagccaacaaaccatgagaggactcatgaggatgtgcaaaacatgaagacactcgtgggatcacttaaatgagtaatgttatgcccaatgtaactctggtggtctcaaacagcaacaaatgctgaaccaatgatgtattgtgatctttttcttatgcacggataccacagactagttctgataaccaataaggactattcgagaatttcatgtttgacgagacattctacgtctcgaagaggtgngggtggtgttttcaaaccataacttttcattaaatgcttgtgtggtgac

SEQ ID NO: 347511 - DNA, 56 bp, Zea mays
aaaaaaaaaaaaaaaaaaaaaaaaaaaaataaataaaaaaaaaaaaaaaaaaaaaa

SEQ ID NO: 347512 - DNA, 210 bp, Zea mays
  unsure (1)..(210): unsure at all n locations
ctgggtgatgcgaaatgtttgctcctacactaagttcatatatatatatagctactagagagaagatacgtactgtggtgtaaattagcagagaatctgcctgttctgttccactaccagccagcgtaaacggccgtgcgcatctgacttcgtttcttgcacccggttccaacgtgtaatgaaataataacactgctgttgggaagcnna

SEQ ID NO: 347513 - DNA, 297 bp, Zea mays
acatcagaaaaaaaagaaataaaaaaattttataaaaaaaggtcggccgacttagagagatccaagcttaagaaaagatgcatgcaacttaatagactatttaaaagaggaacataagggcagtcgtttggggggatcaatgcaaccgtcgggcgtgggaaaaccctgtggttctcatactgtagctacctaagatcaacttactgtttccggctgctgacggtatggcatggaaaaccgctctggtcgcccttcttaacagttgcgcagactaaacgctttttgggacgcgcccta

SEQ ID NO: 347514 - DNA, 177 bp, Zea mays
aagagtgcaagctaggttccgctgttgatttttgatgtctgataacatgcatacggcccgcagttctagaaagttaggccgcattacctaatcatcattttgttagtgatatacgggcaatatattaaattgtgcttaaataaaagaaactgataaaaactattatatacataaaaa

SEQ ID NO: 347515 - DNA, 258 bp, Zea mays
taccattcagaaaaaaagaaactaccggtatgacatactcggtacatgtcaaagttcacccgaacctggcttttgatgctgtactaggagtaagagatttaaataatgcactggctagctgatagttgaggggggaataataaatgctgttactcgaaatgtactccctgattcgcttaggaattcacgagtacttttacttggccgacgtctgaaagttataataaaaaatgggcgggcggtctataggatccaagc

SEQ ID NO: 347516 - DNA, 367 bp, Zea mays
cggacgcgtgggcttactcatccaccatgtataatctttgctgcagtggagcttggtgtcggcgaacaatgcaaacgttgtacttctttcatgcgattgagtagttgatgttttacttctgttgccaccaacagttgaacgctgtacttgcagattgataagatctccgtgcttcctttctaaaaaaaaaaaaaaaaaaaaaaaaaaaaaaaaaaaaaaaaaaaaaaaaaaaaaaaaaaaaaaaaaaaaaaaaaaaaaaaataaaaaataataatatttatataaaaaaaaaaaaaaaaaaaatgggggggccgttttaaagaatccaagtttacgtccccgggcttgcaaggttttaatttttttt

SEQ ID NO: 347517 - DNA, 382 bp, Zea mays
cttctcctccccctccggttcgggttcgggttcgtgaggttctccggggttcggtttcgtgggtgagcggatcgagatggcggcgtcggatgttgagtaccgctgcttcgtcggcggcctcgcctgggccacggacgaccactccctccacaacgccttcagcacctacggcgaggtcctcgagtccaagattatcctcgatcgggagacgcagaggtcccgcggcttcggcttcgtcaccttctccacggaggaggcgatgcggaacgccatcgatggcatgaacggcaaggagctggacggccgcaacatcaccgtcaacgaggcccattcccgcggcggccgtggaggcggcggcggcggctacagtggtggccgtgga

SEQ ID NO: 347518 - DNA, 364 bp, Zea mays
ctggcgtgctacaacgaaaaactccaaacctttccgcagacttgttacagatggatggcacagcatactcctatagaaccatggtgtgtttgtttactttctagattatataagttggattatggtggaagggtaatatggtaaaatatcactctaggactgtgaagctgaaataatctaacattgggtagtttatttcaactgaacacctacaagatttattcatggactgatactctccattcgaaaggtcacggacaagcccgttctgatatatcccaacaatagcggggggggccgttttaaaaaacaagattacgttccactccattgcaaggtaaaatgtttttttagggtcccctaa

SEQ ID NO: 347519 - DNA, 103 bp, Zea mays
aaaataataaaaaaaaaaaataaaccttatttaaaaaagaaaaattgggcggggggtctagactatccaagctttatatcccttgcttgcttcatcatatttt

SEQ ID NO: 347520 - DNA, 229 bp, Zea mays
gaattgccgcgtcgacccacgcgtgcgaaactattgaaacttttaaccccctttctttaatcatgagtttaaggcagtcagggtcctttgtatcttgaacaaaatccctgtgtgctccttccaaacttaaagataactggaagatttcccgacaaaatatcttcttagtttgttaccaaatccgggcgccctcctcaattgacccacggttaataacactttaacatct

SEQ ID NO: 347521 - DNA, 92 bp, Zea mays
gatcagttgtgtttttgttttctccgacttgacatctatgaaatatgtggcaggagtcaataaagttatctcatacaacagaccgtttactc

SEQ ID NO: 347522 - DNA, 216 bp, Zea mays
cggcgacccacctcaaaaaaaaaaaaaaaaaaaaatttaaaaaaaaaaaaaaaggaaaaaaaaaaaaaaaaaaaaaaaaaaaaaaaaaaaaaaggggcgcctttaaggaccatttcccccctcttcaataatgtttttttttggccctaataattactgccgcttaacactctaactgaaaaacccgcttcccaataatccttgaaaaatcccttt

SEQ ID NO: 347523 - DNA, 117 bp, Zea mays
cttgtgtggccggtcgcatttgcgcaaatgccactttcagtagttatatttgtatgttttctccgtttggagaattagagagatatgtctgtaacgtgaacaagatcatgctgttct

SEQ ID NO: 347524 - DNA, 263 bp, Zea mays
aaaaaaaaaataaaaattaaaaaatttttttgataccaagaatgatgaaaggagaggacagtaatctctatgtttaggatgctgaaactccgcatactgtggagaacatgctgttcgaccaccgcgcgatacagatggtggtgcccgcacgtgatgtaatgctaaaccacgaaattgtgaagaagttcatgtctgagtacccggagactgtctggtctatagcgaaaatgccttgaagatttgttcgagcagttatttcctac

SEQ ID NO: 347525 - DNA, 74 bp, Zea mays
ggaccgggggcattccctgcgacgcggcactggtacatcgagcactggctcattgggaaggtgttggggctgct

SEQ ID NO: 347526 - DNA, 106 bp, Zea mays
atacaagtgacacaaacacatgattttgccttcaaatactcgccccttatgtttgtttgtaatgtgcaacttgccaaaagatagcaatctaaatcattgcttggtt

SEQ ID NO: 347527 - DNA, 95 bp, Zea mays
ttttacctgtgatgtacatcggactagggagctttgtatcattgtgttacaccttttcaatggtggcgaataaatttacagcagatgttttcaat

SEQ ID NO: 347528 - DNA, 54 bp, Zea mays
aaaaaaaaaaaaaaaaaaaaaaaattactttaaaaaaaaaaaaaaaaaaagtaa

SEQ ID NO: 347529 - DNA, 60 bp, Zea mays
cggacgcgtgggcggacgcgtgggttgaattgcatccaatgcatgaagtttctttggttt

SEQ ID NO: 347530 - DNA, 402 bp, Zea mays
aaaaaaaaaaaaaaaaaaaaaaaaaaaaaattataaaaaaaaaaaaaaaaaaaaatgttaattttttaatttaataaaaaaaattaaaaaatactaaaaaaaaataaaaaattggctctcctttctaaattatcccatttttttttccccaatcttcccccgcctttctctatcttattgttcactaaatttcaattcactccccttcttttaacaccttctatacttataaaacctttccttcccctactttattccctttacatttacatacccctttctctaacttttttattattaattaggccctttccttttccctttccaaattatttccctccttaatacgctaattgtaccctccccttataactcattaaacccccttttttttttttttcc

SEQ ID NO: 347531 - DNA, 385 bp, Zea mays
aaaaaaaaaaaaaaaaaaaaaaaaaatttttttaaaaaaaaaaaaaaaaaaaaaaggagattaaatataaaaatattaggtttttataaaatacaaattgtgtttctgtttttgggataactaaattttttggcttgtttgtttcttgataaatgtttttttttttgttctatactggtttcctcttttttatttctttcctccttattgctttttaattccctttgttttcccacttttaggcttttaactgcttattttttttttacaattttatttttcttttttgtaaattcccttctcttcttgtctttttttaataacaccccctgctcttttttttttatccaaacctttttacccattatttctttactttattttc

SEQ ID NO: 347532 - DNA, 218 bp, Zea mays
aaagaggaagcgttctatgaaagatggatttcattttgataatttcgccattatgcctgtttcatgtttgaacatactttttttcatctattttctgggtatgatgccatgtaaggtgtcacaagttacagtttcagcatcatcaaactgcactgttacattttcatatgtgaaatacaagtgctgatttattctattttagaatacaagtgtaaaaa

SEQ ID NO: 347533 - DNA, 118 bp, Zea mays
gagccacgcgtccgcaacctggagctgatccttctaacatcatttttcatacctgaatactagttgatcgagatcaccaatgcttcagaaggctttttttacctggagagcgtcaacg

SEQ ID NO: 347534 - DNA, 328 bp, Zea mays
cccggcccgacccacgcgtcctcggactcttgggaaaaaaaaaaaaataattttataaaaataaaaaaaaaaaaaaaacatatatatttatattaaaaaaactaaccaaaacaaaaataaaattaaaaaatctaatttctacattaatatttaattaataaaaaaaaaattgtcctcccccttttttttttaaatttaattttccctttccttcccttctaatatttttttttttatcacccctccttaaattatcttcccttccccttcctcacaacctccttttttaaacacctccctttcccccacccatatatattttctattc

SEQ ID NO: 347535 - DNA, 64 bp, Zea mays
aaaaaaaaaaaaaaaaaaaaaaaaaaaaatttaaaaaaaaaaaaaaaaaaaaaaagagaaaaaa

SEQ ID NO: 347536 - DNA, 220 bp, Zea mays
gacccacgcgaccgaaccagagggccgaacaaatacttaaaaatatattatcacccgcagcctgaaaaagaaaaattaaaaaaaaacaaaccaacccccaaaaaaaaaaaacaaaaaaacaaaacaacccaaaaacaaaaaacactcttaaataaataatattaaaaaaaaaaaaaaaaaaaaaaaccaactctttcctcttcactaccaacaaaaacaa

SEQ ID NO: 347537 - DNA, 304 bp, Zea mays
ataaaatactgcaaatgttagccttaaaaaaaaaaaaaaaaaaaaaaaaaaaaaaaaaaaaaaaaaaaaaaaaaaaaaaaaaaaaaaaaaaaaataaaaaaaataaaaaaaaaaaaaaaaaaaaaatataaaaaaaaaaggggggggccgttttaaaggaccaaagtttacgtccgcgtgcttgcaacgttattgtttttttttggggccccctaatttaaattaactggccggcgttttaaaacgtttggactggaaaaaccctggcttacccaaatttattggctttgaaacaaatcccctt

SEQ ID NO: 347538 - DNA, 196 bp, Zea mays
  unsure (1)..(196): unsure at all n locations
aaagtcctcttatttaaaaatatccctttctttctcaatttctggcttctaaaactagagcttgtttgaaagcaagtgtaatagatgcgattgagggggttaaaaccttttactatttaaattttgactagtaaaaatttgggtcctcantaaaaaaataaatttaaaaaaaattaattaaaaggggcggcccttt

SEQ ID NO: 347539 - DNA, 229 bp, Zea mays
cggacagcgtgggttttttttttttttttttcacaattggcttttaaaacaatggggctccttcagatgtcccagatacatgatgagaagcacaaaatccaccaaatactaatatggcaaacacaaacacgcccggtaaaaataaaaaaaaaaaaaaaaaaaaggaaaaaaaaaaaataaaaaagggggtcgtggtcatagaaatcaaaaaaggcctggacgggtattt

SEQ ID NO: 347540 - DNA, 69 bp, Zea mays
atgcaaatgtatcctggcgttttgccaattataaaagatcatgctaacagaaacggcgggatttttttt

SEQ ID NO: 347541 - DNA, 72 bp, Zea mays
tggacgcgtgggcggacgcgtgggcggacgcgtgggcggacgcgtgggcggacgcgtgggcggacgcgtggg

SEQ ID NO: 347542 - DNA, 78 bp, Zea mays
aaaaaaaaaaaaaaaaaaaaaaaaaaatttttataaaaaaaaaaaaaaaaaaaaaaaaaaaaaaaaaaaaaaaaaaaa

SEQ ID NO: 347543 - DNA, 147 bp, Zea mays
gatgtttaaagaagagctaccacttcagagataatttgtgacttgcttgcattttttggacggatttgttcgtgtattaataattttgcagtgacgataaataaaaaaaataaatatttatataataaaataaaataataatatttt

SEQ ID NO: 347544 - DNA, 105 bp, Zea mays
tctggactctgagtgtggagagtatgtatcttattattactgtaattggatagtaagtactacactgatatgctggtctaatcgatgttgttgttttatatggat

SEQ ID NO: 347545 - DNA, 70 bp, Zea mays
aaaaaaaaaaaaaaaaaaaaaaaaaaagggcttcgttaaaaaaagaaaccaaaataatagacgcgtgcat

SEQ ID NO: 347546 - DNA, 221 bp, Zea mays
  unsure (1)..(221): unsure at all n locations
atttcttatgtcagttattggtgccgntttttatataaaaaataaaaaaaattaaaataaaaggtaaaaaataaataaaataataaatttttatttataaataaataatattttataattttatatttcttatttattttttttatagtaatctttatttttaatatttattttatttatatttaaatatatattttatatatatatttgctttttctctt

SEQ ID NO: 347547 - DNA, 207 bp, Zea mays
atatgagcagatattgttactttctcttaaatgttcgattcttgattgtttaaatgtaatagcacttgcacaaagctgttgtgcttaactctgttttttaaaaaaaaaaaaaaaaaaaaaaaaaaaataaaaaaaaaaaaaaaaaaaaaaaaaaaaaaaaaaataaaataaaaaaaaaaaaaatttataataaagcgcggccttttt

SEQ ID NO: 347548 - DNA, 411 bp, Zea mays
ggctaggtagggcgactacgcagcacgacgcagaaaacagagcaaacacatgggaactctcctctatacatgtccaaacgggccgggtcggcagtgggcccgtgacccggcatggtcgtagcccggcacgaacacggcccggcccgactagaggcgtgcccgggccggtccaatagtcgtgctgggcttgggctggccgtcgggcccgcggtgcatgtacggggccgacacggttaattggtaggcacggtaacgactcgtttgagggactaattttgtaacggccagtctatttttagctataatacttatgatatgttattatatacgagtattctgacttatgatatgtgtttatatgtgtatctgaaattctttatctaaatatgtatctaaaattataaataaaaa

SEQ ID NO: 347549 - DNA, 234 bp, Zea mays
ctaatttctataaacttagtcataaactagtattttggaaccacctcaatttctataaaccagtttcttaaaaactaggtgtttccaaaaaaaaaaaaaaaaaaaaaaaaaaaaaaaaaaaaaaaaaaaaaaaaaaaaaaataaaaaaattaaaaaaataaaaaaataataatatatatattttttaaatttttatttatttttttattgtatatatattgttttattaaataa

SEQ ID NO: 347550 - DNA, 76 bp, Zea mays
aaaaaaaaaaaaaaaaaaaaaaaaaaaatataaaaaaaaaaaaaaaaaaaaaaaaaaaaaaaaaaaaaaaaaaaaa

SEQ ID NO: 347551 - DNA, 103 bp, Zea mays
aaaaaaaaaaaaaaaaaaaaaaaaaaaaaaaaataataaaaaaaaaaaaagggttccgcttaattggaaaacttcggcgcggctctgctttcattatctttaa

SEQ ID NO: 347552 - DNA, 221 bp, Zea mays
  unsure (1)..(221): unsure at all n locations
ggcgcagaaaaaccatccatcctagagcagcatagcctgctgcatttgtaatatattcgaaatccgtattttttttcttcacaagcactactctatatacgatgaataaaagggcgacaatacagtgtcnaaaaaaaaaaaaaaaaaaaaaaaaaaaaaaaaaaaaaaaaaaaaaaaaaaaaaaaaaaaaaaaataaaaaaaaaaaaaaaaaaaataaaat

SEQ ID NO: 347553 - DNA, 84 bp, Zea mays
aaaaaaaaaaaataaaaaaaaaaaaaaaaatatttttaaaaatctttaaggagaaaaatttaggatgttcgttagggtctctct

SEQ ID NO: 347554 - DNA, 210 bp, Zea mays
cggacgcgtgggaaaaaaaaaaaaaaaaattattattaaaaaaaaaaaaaaaaaaaaaaaaaaaaaataaaaaaaaaaaaaaaaattaaaaaaaataaaaataaaaaaaaaaaataaaaaaaaagggggcggccgttttaaagatcccaagcttacttacccgttcttgcaacattataatttttttttaggttcacctaaattaatata

SEQ ID NO: 347555 - DNA, 141 bp, Zea mays
  unsure (1)..(141): unsure at all n locations
naaaaaaaaaaaaaaaaaaaaaaaaaaaaaaaaaaaaaaaaaaaaaaaaaaaaaaaaaaaaaaaaaaaaaaaaaagggaaaaaaaaaaaaaagaaaaaaaaaaaaaaacagaaaaaaaaaaaaaaaaaaaaagaaaaaaaa

SEQ ID NO: 347556 - DNA, 190 bp, Zea mays
taataaaaaaaaataaaaaaaaaataattttaaaataaaaaaaaaaaaaaaggttgggcgatttaatagtaaaaaagaaaaacatactcatacatgcatcactattatttctaatattgtgtaaccttaaattcaaataaatagaccgttgggggtcctcgtttagattgggaaatccctgtctttgccc

SEQ ID NO: 347557 - DNA, 392 bp, Zea mays
tgcattcctggctaatgtgaaggagctgaacgccataggcagaccagagaggataccttaagacaagcttatgagatcttcggtcctgaaaacaaggacctgttcaccatttttgagggcctaataagtcgcaatattcgctagtctcattacccatccttactagtgattcaagttttaccggtatattgttattacgatattcatcactgtttgtatttgaagtctgtggtctgttacggattcttggtatatagtagttctatagttcatcttttcatgcttatgtccatgtagaattctgggtttgtctggaagctacaatttatattccaatacaaatggaagctaaaattgtacgtaccaacttgcatatttctacattatttatt

SEQ ID NO: 347558 - DNA, 411 bp, Zea mays
gtcaagtgcatgtttctgaacatcattgtcatactgtactatccaagtgctgttgagacacttttttctatcaatcgtgatgtaacagttggtaaaaaaaaaaaaaaaaaaaaaaaaaaaaaaaaaaaaaaaaaaaaaaaaaaaaaaaaaaaaaaaaaaaaaaaaaaaaaaaaaaaaaaaaaaaaaataaaaaaaaaaaataaaaataataaaaaaaaaaaaaaaaaaaaaataatttgggggggctcttttataattacaaatttttttaatgcgtgatagaatatttaatttttttttatagtggaccctaaatatattatagtggggggattttaaaacaagttttaattggaaaaaacatttgttttcaaaaatattattagctttgttaaaaattctaattttttt

SEQ ID NO: 347559 - DNA, 126 bp, Zea mays
aaaaaaaaaaaaaagaaaaaaaaaaagaaagaaaaagaaaaaaaaagaagaaaaaagaaaaaaacaaaaaaaaaaaaggggagggagcaaacaacagaaggaagaaaagcgacgggccgagcgagc

SEQ ID NO: 347560 - DNA, 143 bp, Zea mays
ctcaaaaaaaaaatataagacgcgtaatattttttctaaaaaaaagaccatgtacttataaaaggggagaaattaaaaaaataaaaaaagtggtctcctttattttgaataattgtcttacatataccatttatattacaatt

SEQ ID NO: 347561 - DNA, 260 bp, Zea mays
gtaccgatgaagactgtttgcttgtgtctatttttaaaataaaaattcttaaaaaaaatgagaggggatattaataaataagagtaaagtgggccacacaaacttaaattaacatcttaaccggcaccggcaagcgatttttattagtccttttatagtgagcgcgcatttctttttgttcggggggggcgcccccaatgggtcccagttttcttccccgttgtggccccccttgttttgttttttgtgggggcccccct

SEQ ID NO: 347562 - DNA, 348 bp, Zea mays
gactagttctaggctaaacagtagtattactttgttgtcttcaaaaaaaaaaaaaaaaaaaaaaggaataaaaaataaaaaaaaaaaaaaaaaaaaaaaaaaaaaaaaataaaaaaataaaaaaaaaattaataaaataattaaaaaaaaaaaaaataattataggggggggcctttttaaaggaccaatgttatcttacgtttgcttggaaatatataattttttttttgggccaccaaaataaaattttcgggcgggggtttaaaaacgtggggttgggaaaaacctgggttgttaccaaattaattttttttgagaataatcccctttttgtaatttggtgtaat

SEQ ID NO: 347563 - DNA, 151 bp, Zea mays
gcctgtgcaaccttgttagcccagggccacttcgattttgtctattggttcttttagagagcaaccaccccgagatgcgacgacactgtagctctcttagatagttagattccacgagcttgatgcaaataagaaattttaaaatttcaga

SEQ ID NO: 347564 - DNA, 358 bp, Zea mays
aaaaaaaataataaaaaaaaaaaaataatatatccgggggccctctcgtagtggcaagaatgggacgccctggttcctgcgggctgatgtgacttttatggggccaaacttaataactgtagcggcctgagttgtacatggtgccacatgaaacaaacgagctgctccccatattaaggtggtggaacaacatcaccttctaggcaggtgtggtagtattgaggatgctcatgagctgcaaccataacagcagtttcaccatcttgatctatactacgacgcgctaatgtaaaatgatcataaacgaactgttgttatgttggtttgcttattcgaggcctttcttgttggaaggttt

SEQ ID NO: 347565 - DNA, 270 bp, Zea mays
cggacgcgtgggaaaaaaaaaaaaaaaaaataaaaaaaaaaaaaaaaaaaaaaagggcagagggtgttgaaagatccaagctaacgtacccatccttcctgcaggcgtcgcttttttatggtgtcaagtgttaaccacttctctttccgctggctttacatcttttataactgggaaataccatgaatttaccgctcttaattcttaagcgtctcatccgcatatcccctgttgtcgccatacttaattaggcctagaccgatcgccctt

SEQ ID NO: 347566 - DNA, 81 bp, Zea mays
cggacgcgtgggaaaaaaaaaaaaataaaattttaaaaaaaaataaaaaaaaaaaaaaaaataaaaaaaaaaatttaataa

SEQ ID NO: 347567 - DNA, 132 bp, Zea mays
gtatgaacggcatcggtgtgcttattactgttgttcgatatatgttgcattgtttctagtttcaaagcccatttatttacttatctatgatttctaaaaaaaaaaataaaaaaataaaataaaaaaaaatat

SEQ ID NO: 347568 - DNA, 163 bp, Zea mays
ggccagagtgttgcggaatgtatgttatcatctcttctgctagagcttttctgggttgctgtgtgtttgaaacctcactgtacatgtgcttacatgcatgaaggagcatggttgttggtttgtgtttaatcttcttgtgaattagcatgtgtattttccttgt

SEQ ID NO: 347569 - DNA, 311 bp, Zea mays
taaaaaaaaaaaaataaaaaaaaaaaatttatatatataaaaaaataaataaaaaaaataaaaaaaaaaaataaataaataaaaaaaataaatataagggtctccgtttttatatttacctttattatattcggttgcctgcgctgtttgttcatttttttcgcccctttattctaatttaataagttcgttgtttttctccttggttcctttaatatccctgcctttccccaacttttatctctgtgaaaccctataaacctttcctctttttgcattttttttggatttgcccctttttctcctttttt

SEQ ID NO: 347570 - DNA, 256 bp, Zea mays
cggacgcgtgggcggacgcgtgggttggattagtgttggtaccctgttgttcgctttggttgctcccgctatgaaacgagacgagagaagaatgagcaaggtttttgttcttaaaaaaaaaaaaaaaaataatttaaatataaataaaaaaaaaaataaaaaaaataaatatataaaaaataaaataaaaatttatattattaaaataatattaaaaaaaaaaaattaaaaaggggggccgtttttaaggtccaaa

SEQ ID NO: 347571 - DNA, 214 bp, Zea mays
aaaaaaaaaaaaaaaaaaaaaaaaaaattttttaaaaatataaaaaaaaattaaaaatgggaggaaataataaaataatataataaaatataaaaaaaaaaaaaatttaatttaaaaatataaaaatataaaaattttggtggggttattttgggtgggccttttttttttgctcctttttttcttcctgttgtttttttttttggggtccttt

SEQ ID NO: 347572 - DNA, 352 bp, Zea mays
aaaaaaaaaaaaaaaaaaaaaaaaaaatttatataaaaaaaaaaaaaaaaaaaaaaaaaaaggaaaaaaaataaaaataaatataaaattgtatttaattatatttattaagttaaattataatggttttaattttattataattttttttataattaattatattttggggggggggttttttgtttatatatgtttttggtgggtttttttgatttttttttttttttttttttgggtgtttaaaataataatttttgtgggggtggttttttatattttttttttggggaaatcctagttgtgtttttcttttatttttttttttttttatagtattattttttttttt

SEQ ID NO: 347573 - DNA, 161 bp, Zea mays
gttcttgaagacttgcctttggagtctgtttttggtaatggtttggatgagaacagttcagtaattgcttagtgtatttgtcaggtggatgttatctcattggtcatatactatgtattatggacatccatgtgttgccgaaatgtgctcttttccccatg

SEQ ID NO: 347574 - DNA, 89 bp, Zea mays
ctctctatgtagtaatgtgtggccagtgggtctttgatccagatgtattcgctcgtgagtggtgagtcgtggaagttgatcgtttcagt

SEQ ID NO: 347575 - DNA, 97 bp, Zea mays
  unsure (1)..(97): unsure at all n locations
taaaaaaaaatantattgaaaaaaaaaataatttttaaaaaaaaagggcggaaaatggatagtggcggataatgggtgtatttataatgggcggccg

SEQ ID NO: 347576 - DNA, 290 bp, Zea mays
gcagctgagcgtggatgacggtggccataagtgacgaatatttgtactttgctctaggttggctggggtgagtacaaaccgattattaacacctgtgcattgatggagcacttgcttgtaaactggttggggcagcagtaagcctgatcacagaatgtccttggctgttttcattcacatattgaggggcctacaaaacagcctggagaagccagggatattttgttatctatattaacaatgaaaacactatcaacgccagagagacatatgaaacggtgtgatgctga

SEQ ID NO: 347577 - DNA, 86 bp, Zea mays
aaatataataaaaaaaaaaaaaaaaaaaaattataaaaaaaaaaaaaaaaaaaaaaaaaaaaaaaaaaaaaaaaaaaaaaaaaaaa

SEQ ID NO: 347578 - DNA, 294 bp, Zea mays
gctttctgagcatcatcgcagtagctgttgcggctgcgtgccctacgagtggctattgctaggccggtgcaagaacttcagcgaaggctgttaattctagcaattgggagtctgggaccacaggaaccattttgtgtatgaaactttattatatttagttcaatgctatttggctcgtgtcccaggagcatagtgtttttgttctataatcagattattaacttgaaagaatggcctttcgacgaattgaaagagcccactcaaggaacgattaataattgatgtttcatgtgg

SEQ ID NO: 347579 - DNA, 217 bp, Zea mays
aaaaaaaaaaaaaaaaagaaaaaaaaaatttttaataaaaaaaaaaaaaaaaaaaaaaaaaaaaaaaaaaaaaaaaaaaaaaaaaaaaaaaaaaataaaaaaaaaaaaaaaaaaaaaaaaaaaaaaaaaagggggcggcctttttaaaggttccaactttacttccccgtccttccaacgtattactttttttttagggccccctaaattaaattcc

SEQ ID NO: 347580 - DNA, 253 bp, Zea mays
ccatgaaccctaacctactgtttcactttttttcttttatatcccacaaccggtggggggtgattccacaaacccatggctctccggccagctagcctgcacctacgccattcttatcctcagcgacgatggccttttctttaccgaccagataatcgtcacgatctttatggccgtcaacattaatgtagattactacttggacggtgctcttcgtcaaacttcattaaaagcgcaacgtcaagaacctcat

SEQ ID NO: 347581 - DNA, 229 bp, Zea mays
  unsure (1)..(229): unsure at all n locations
gctctgtactagcagtttgactactggctagaatggggcagctcttctccccttgttcttgtgttattcgcctcaacgttgtaaaactgaattcagaaaattttaaatatagctggcatttggtaaaaaaaaaaaaaaaaaaaaaaaaaaaaaaaaaaaaaaaaaaaaaaaaaaaaaaaaaaaggaaaaaaaaaaaaaaaaaaaaaaaaaaaaaaaanngggggggggg

SEQ ID NO: 347582 - DNA, 147 bp, Zea mays
cacctaccggtgtacctgctcaccgcttgttgtgacccgctaccacatcaggtgcgtgtgccggcatcccaaggacgccttcgtctcgtggtggatctttgacaacagcatgctgcgcaggggcttctcctgctactccggggacct

SEQ ID NO: 347583 - DNA, 62 bp, Zea mays
aaaaaaaaaaaaaaaaaaaaaaaaaaaaaaaaaaaaaaaaaaaaaaaaaaaaaaaaaccaaa

SEQ ID NO: 347584 - DNA, 140 bp, Zea mays
  unsure (1)..(140): unsure at all n locations
gggtcgcgtgggtatgaatacatgatacatgccgtacntgtggatcctaggatgcctatgcatgcacaccactagcgggaggcactactacgactattacatgctttctacggtgagcaccaaattgagagggacgagat

SEQ ID NO: 347585 - DNA, 71 bp, Zea mays
aaaaaaaaaaaaaaaaaaaaaaaaaaaaaaaaaaaaaaaaaaaaaaaaaaaaaaaaaaaaaaaaaaaaaaa

SEQ ID NO: 347586 - DNA, 355 bp, Zea mays
gcgatttgctcaagttatttgtcgtttatgaattacttgctttcctcaacccgggaagggcaatattggactgagtaaaagaatgtggtcaacactgtcatcaatggacactgttatttggtctagcgggccccgtactggctatataatctatatatgcgggggggcccttttaggggtcccttgtttacttccccggcgttggaaggttatattttttctttgtggtccccttattccatttgactggcctaaccttttacaccgtgcgtgcgggaaaaccccgggcttaccccactttattgcctttggagaccttccccttttctggggttggggtttttgccagggggcc

SEQ ID NO: 347587 - DNA, 60 bp, Zea mays
cttggtcaatggaagttgttcatgcgcttcttcattgctgaaagtgttgtcatcttgtcg

SEQ ID NO: 347588 - DNA, 115 bp, Zea mays
ggccagtggcccacattgcacatggtgggtgcgctggcttaccatctccccaagtgggagagtggacgtcataatttgtggtagagggggtacgcgttcgcgcggcccccgcttt

SEQ ID NO: 347589 - DNA, 237 bp, Zea mays
taaaaaaaaaaaaaaaacaaacaatttttttttaaaaaaaaaaccaaaaatcggggggatttaaataaaaaacacaaacaacggacgcccgatctaaggggttcccccttctagacgctccaagctctcgtccccgtgcttccgatcgtataccttaaatttaatcgcccctccgttcttttacatgcccgtttttttacaaccccttgcctggacaaacctagtcgtttgccacca

SEQ ID NO: 347590 - DNA, 215 bp, Zea mays
gaaaatcaatgacaaaaatgtagagtttttatgaaagtcaaaatagagatagatgatttacgctaaaaaaaaaaaaaaaaaaaaaaaaaaaaaaaaaaaaaaaaaaaaagaaaggaaaaaaaaaagggggggcgccctttgtttttgttgttaataaatgggggggggggcgcgagaactgggattaaaaaatgtttttttaaaaaatggaacaa

SEQ ID NO: 347591 - DNA, 96 bp, Zea mays
aaaaaaaaaaaaaaaaaaaaaaaaaaaaattatttaaaaaaaaaaaaaaaaaaaaaaaaaaaaaaaaaaaaaaaaaaaaaaaaaaaaaaaaaaaaa

SEQ ID NO: 347592 - DNA, 106 bp, Zea mays
ggcttatctcggtttatttcttcttcatactctacctgagtgggaacttttgatgctgagtttgtcttatgcctatttattttaagtcgaatgaaatatgaaggcc

SEQ ID NO: 347593 - DNA, 362 bp, Zea mays
ctaatattgcttcgtctttttttaaaaaaaactcttcctgccgaaaaaaaaaaaaaaaaaaaaaaaaaaaaaaaaaaaaaaaaaaaaaaaaaaaaaaaaaaaaaaaaaaaaaaaaaaaaaaaaaaaaaaaaaaaaaaaaaaaaaaaaaaaaaaaaaaaaaaaaaaaaaggggggggccgttttaggggatcaaagtttacgtccgcgggcttgcaaagtaatagtttttttttggggccaccaaaataaaattaatgggcgggggtttaaaaacggggggatgggaaaaaccggggggtaaccaaattaaatggcttggaagaaaatccccttttcgccagtgggggtaataccaaaaaggc

SEQ ID NO: 347594 - DNA, 198 bp, Zea mays
  unsure (1)..(198): unsure at all n locations
aaaagcngcacccacccacgcgtnnnaaaaaaaaaaaaaaaaaataaaaatttattatttcataaaaaataaaaacgcgggggtatattcaaaaaaaaaagcccccctctaattaaaacacctctctaaaaaagtactgcggcttatataaacaatactcattaatgcctctgtgcccctccacccattttttttttt

SEQ ID NO: 347595 - DNA, 303 bp, Zea mays
aaaaaaaaaaaaaaaaaaaaaaaaaaaaattaaaaaaaaaaaaaaagaaaaaaaatataaaaaaaaaaaaaaaaaaaaaaacatacatacaaaaaaataaaatataatataaaaaaacctgggcggccttttttggggttcaaattttcaatccccttgcttgcaaaactttagtttttttttagtttaacttaatttaaattcattgccctttttttaaaaaccttaatattgaaaaaaccttggcttttcccactttattacttttgcacaacatccatttttaatcagttggcgtattat

SEQ ID NO: 347596 - DNA, 58 bp, Zea mays
aaaaaaaaaaaaaaaaaaaaaaaaaaaatttaaaaaaaaaaaaaaaaaaaagggaaaa

SEQ ID NO: 347597 - DNA, 191 bp, Zea mays
ctattgggccatttgttgttggggaaaccgttgtaactagtgtaaatttcgttttttattaccatcatatatcataggtctcgtctcactatagtccgatgtgtattactagtatgtgtcgaagacctcaatagtttacgcgctaccatattttgatggttgcaacttaatctcagttttgcttgtcgtct

SEQ ID NO: 347598 - DNA, 225 bp, Zea mays
cggacgcgtgggaaaaaaaaaaaaaaaatttatataaaaaaaaaagaaaaaaagtgggaaaatttaaaagattaaatacttatgtatgcaaaaattataactcttatattgtgaaataaaggttcctttttttgtgcgttgttttttaattttacatcttggaaaatggtaaattttttttaatttaatacgtttttgaaaatatttgtttttcgctttttagct

SEQ ID NO: 347599 - DNA, 392 bp, Zea mays
cgaggcggtggcgtcctgcgactacgtgttgtactcgcacaagccgggaatggccaaggacagtgccgccgcccactagagcatggtgtgacgagcaccgctacgccaaccgtatgtcatgtgtagtgcggtccggttacggtctgacgtaaccagtcttcacgcggaccgagatgaattatgtatacacgtgactcgagtattgtacacctgcaccgtcgagggaaaaacgaataaaggatcccacccgttttttttggtgtttaaaatgaattcaaataacaaggcttgtacaaaggtgggaatagggaggctacacaaaggcctgattcctagatttgacatgtggtttaggggctgctttcttaacgttcatattatcttgcatattg

SEQ ID NO: 347600 - DNA, 233 bp, Zea mays
cggacgagccaggcgcttctaggtagctttttttttcaaccagacctaacagggaggggatgatacttacattgttcttttactgcaaatactgaactagccactgtaagccaatggcggcagccttacatgcaccggaatgacagtcctaacgctctctgcctttggctctggtataaccaaaacagggtcattgcaaaccttgctggtccccccacttaggactcacattt

SEQ ID NO: 347601 - DNA, 374 bp, Zea mays
aaaaaaaaaaaaaaaaaaaaaaaaatttatataaaaaaaaaaaaaaaaaaaggggggatattaaaaaaaaaaaaaaaaaaaaaaaaaaaaaaaaaaaaaaataaaaaaaagggccgccctttttgggggttccacctttccttccccgtgcttgcccctttatattttttttttggtgtcccctattttaatttctttgcccgtgtttttacaccgtcgtaattggaaaacccttgcctaacccaaattaattgcttttggggaacatccctttttccccctttggttttttagggaaaagcccaacccttgttcccctttccaaatatttgcccacctttatggcaaattggcccccccccttaaccgcccct

SEQ ID NO: 347602 - DNA, 293 bp, Zea mays
  unsure (1)..(293): unsure at all n locations
catgagtcgtaaacaagatgaaagattccagtttcagtggcaatggatcaaagcataaggaatcaccatgggcagcacataagcattcccattttacttttaggactgaaaatcagatagatgtgttctagttgaaggggggggggggatgtgttctggaacttgggtaaatgggggaattctgaaaactgtgtaaatagaaaactgctccctttggatattgtgcatgcatgaagcaaaatgttatatctgaaaagcgcgtaccttgtacccgntaaaaaaaaataatagag

SEQ ID NO: 347603 - DNA, 311 bp, Zea mays
ctattatctcacgaacatcaatcagcattcagacaacatataataattatattgacattggcaatggaacatggtatttgccatgtgcatccttttctctgttgaggtgtatttgttagatgtagcagctgtatattggcattatgatttttgctcctgcatacttatcagcaggtcgcaggatgtagtatgaaagggatacaccaatcagactgcaaaccttgtaagatgattgtggttaagctaagctgcaaatttgaactctgattcagttcaatttacacgttccttctattgctatgcacttactg

SEQ ID NO: 347604 - DNA, 346 bp, Zea mays
atcttcacaagggcgaccatgaggagtgacgagagtgaaatgccgaatttgtagcctattcgagagagagagttgacggtcttgtccaataatcaatactggatttttaagactctcttcaacggtgttctcttcataaaatataaaatgagaaatatatgatacaatttatctaaaaaaaaaaaaaaaaaaaaaaaaaaaaaaaagaaaaaaaaaaaaaaaaaaaaaaaaaaaataaaaaaaaaaaaaaaataaaaaaaaaaaaggggggggccgttttaaagaaccaaattttacttccgcttccttgcaaatttttagtttttttttggggccccctaaatta

SEQ ID NO: 347605 - DNA, 241 bp, Zea mays
  unsure (1)..(241): unsure at all n locations
gtcgacccacgcgtgcgnggacgcgtgggaaaaaaacaatgtttttttaacaaaaaaacaccagaacaaagggcttcgtaaaaagagaggaaataactacatgcacgcactttttaaaaatccggggggcgcaaaaataggcgccnaggggtttcctctcttcccgatctaaggttacaattctatttccctgggacaaaacagcttttttatggggacccttaaataaaagtttttgggg

SEQ ID NO: 347606 - DNA, 280 bp, Zea mays
cggacgcgtgggcgactacgctacgacggtgcatggccaaaaaaaaaaaaaaaaaaaaatgataaataatataaaagttaaatataataaaaacaaaggggtgggctcttttaaggctcctatcttgcgtcctcattcatacgaaatgatacgttttttatagtgtgacttaaattaaattcactggccttacctttgcaaattgttttgtgggaaatccctgtttttccctttcttattctgttttaaacgcattcacctttcgccattttgaataatt

SEQ ID NO: 347607 - DNA, 86 bp, Zea mays
ggtttaccgaactccagttctcttgtcatttttctttattctatagtctgtattatgtatgcgtatgagtattgagatgattctgc

SEQ ID NO: 347608 - DNA, 174 bp, Zea mays
cttgacttgtagctccccttgaaaggtgttttgtattatcttagcaaaaaccttggctggttggaccataaccctgcaggttgagcgctctgactccttctgctgcgcgaaggcacagatcctttataaagagcatgtttacccggacctgtaacgcttgctgttctgccccga

SEQ ID NO: 347609 - DNA, 119 bp, Zea mays
cttttttatctcttgctctctagctacttttggctttatttcctgtctagacagcggattctgcataatgctaatgaactttcatatcaaataagattgctcagttatccataatgttc

SEQ ID NO: 347610 - DNA, 95 bp, Zea mays
aaaaaaaaaaaaaaaaaaaaaaaaaaaaaaaaaaaaaaaaaaaaaaaaaaaaaaaaaaaaaaaaaaaaaaaaaaaaaaaaaaaaaaaaaaaaaaa

SEQ ID NO: 347611 - DNA, 66 bp, Zea mays
aaaaaaaaaaaaaaaaaaaaaaaaaataatttaaaaaaaaaaaaaaaaaaaaaaaaaaaaaaaaaa

SEQ ID NO: 347612 - DNA, 317 bp, Zea mays
taagaaaataatgtttcttttttaagaaaataattgatggaaaatataagaattttgttaaaaggggggattgttttaaaggataaaaatatattttaacgttcatggaaaaaaaaaaatttttttaatgtaaatttatttaaaaatacttgggggggtatataaaattttggaataaaaaattaaaagtgttggttgtaaaaaaatatataatattttgaggggaaaaataataattttttttgaaaaaagttggtattatattaaaaagagagtcggggagaataatgtgtgttttttataaatttttgtataaa

SEQ ID NO: 347613 - DNA, 373 bp, Zea mays
tttgaataataagatgcacctatatgtgtgtgttatatgtaaaaaaaaaaaaaaaaaaaaaaaaaaaaaaaaaaaaaaaaaaaaaaaaaaaaaaaaaaaaaaaaaaaaaaaaaaaaaaaaaaaaaaaaaaaaaaaaaaaaaaaaaaaaaaaaaaaaaaaaaaaaaaaaaaaaaagggggggcccttttaaggggaccaaatttacctgcccgggggtggaaagaaaaaatttttttattggggccccaaaaataaaataacggggcggggttttaaaaacgtgggaaggggaaaaccctgggggtaccaaaataaaaactcttggaaaaaaacccctttttcccagggggggataaaaaaaaaagggcccccc

SEQ ID NO: 347614 - DNA, 268 bp, Zea mays
gtggtataagacggtatgcgcgagagcattgttgtgagttctaatctcagcataacatatacgtttgattataaatattgatgtgaaatgatagggcaccggttagaattaaaaaattgtttaaaaaagggcggccgttttaaaggatccaagtttacgtccgcgtgcttgcaaacgatatattttttttatggtgacctaaaatcaaatggggggggcgctttataaaacaccaattatttggaaaaccttgggagacaaaattttt

SEQ ID NO: 347615 - DNA, 348 bp, Zea mays
  unsure (1)..(348): unsure at all n locations
ccggnccggaattcccgggtcgacccacgcctccggaaaaaaaaaaaaaaaaaaaaaaaaaaaattttatttaaaaaaaaaaaaaaaaaaaaaaaaaaaaaaaaaaaaaaaaaaaaaaaaaaaaaaaaaaaaaaaaaaaaaaaaaaaaaaaaaaaaataaaaaaaaaaaaaagggggggggcgtttttaggggttcaagttttttttccgggggtttggaaggtaaagttttttttttggggccccaaaaaaaaatttaggggggggtttttaaaaacgggggggggggaaaaacctgggggttcccaaattttatttttttggaaaaaattccttttttcaaggggg

SEQ ID NO: 347616 - DNA, 377 bp, Zea mays
aataaaaataaaacaaataaaacaaaattttagtttataaaaaaaaaacaaaaatagggaggggataaaaaacaaaaagacaaaaaacacacaaacaaattaacttactcatgcacttcctcctgctttaaaaaaaaaaaggggcgctccttttaagagttccccatcttggaacccgagcttaccacaggctttgatcttttggtagtgtcctcaaaataaaattctggggcggctttattccaaaacacggcatgggaaacccctgcatctaccaccatttcatttacaaggaccaggcccctgagaacatcctgttgataaccgctctggcggcctcattttctccctttcgcatatttgggcgaccaagaaac

SEQ ID NO: 347617 - DNA, 115 bp, Zea mays
aaaaaaaaaaaaaaaaaaaaaaaaaaaaatggatataaataataaaaaaaaaaaaaaataaatacgcatgaatgcaaactaataggctcttctgttgagacacctaattttttta

SEQ ID NO: 347618 - DNA, 334 bp, Zea mays
  unsure (1)..(334): unsure at all n locations
gaagtaagagatctttgtgtttccatgttatcgcaaagtcttgcaggagttataaacatggtatcatgcttcaaatagctcgtacaatccatcggctttttctttgcttgcctcacgtttatggagttggaaatgctagttccttagtgagttgatagtagttttcaggttgcaatgtgagatgtaaaacgtttttttttttgctttggcccgtgatatcttgagccgggtctaacaccttcaagaaggattttccgttgatggattaaataccagtggggtcgaattgaatcatatgagataatatctcatcagttttgcnaaaccctcaagg

SEQ ID NO: 347619 - DNA, 326 bp, Zea mays
ctacttttctctcgatgacgatgaagaagaggccgcagagatggtgctccgagaagaggaattcgagctatgaagagatgcagcgactcacaaagagtctccatgccacgtcactccctgtgatcttgatcatacctcaaatgcccggacacagctcatagtgttgtatgtaccgaagggatgtgagatcgttttgtccgtcttctagaattcagattttagtattttactgatgaaacacagattacttaacttataccatgttcaagaagttttcttgcttgcaatgcaatcagagaagcaactcctgttttggcttagtttga

SEQ ID NO: 347620 - DNA, 413 bp, Zea mays
cggacgcgtgggcggacgcgtgggcaaattctttgttgtttgcaactttggataggcttgaacagctgttaagaaattcaacatgaagtttgatttttcctgtgaaaaatgtgtgattacgtcatctggcaactctagacaggattcttttcgcatgccatggcaaatcctgctgtataatataagtattaccacacaatattttccctttccaattctgatgccttctgtttttactcatttacctgactgtaatcttttttgcttctgcaggactgctgctttcctgtgctgattgcagtatttctagtggatgatctagcacctttgtggctttgtcgtttagcctgtgcggcttcattaatttcacaagtttgatgccagttgaagcaccgaggtgaactgtgaggaaa

SEQ ID NO: 347621 - DNA, 122 bp, Zea mays
tgttatgcccgccatcctccatttctttttaacgattatctcctctctaacaggggggagtcattgagctggttagcctgcctatgaataaacatatctacggatataaacttactaggctt

SEQ ID NO: 347622 - DNA, 52 bp, Zea mays
aaaaaaaaaaaaaaaaaaaaaaaaaaaaaaaaaaagaaaaaaaaaaaaaaaa

SEQ ID NO: 347623 - DNA, 283 bp, Zea mays
  unsure (1)..(283): unsure at all n locations
nnaaaaaaaaaaaaaaaaaaaaaaaaaaatttaatattaaaaaaaaaaaaaaaaaaaaaaaaaaaaaaaaaaaaaaaaaaaaaaaaaaaaaaaaaaaataaattaaaagggggggccgctctataggatccatctttttttacgcgcccttgcttaatattacctttttttttttttcccttactttaatttaattggccgtcgtttttcaaccacgtgtctggtaaaacctttctttttccaacctaaatttctttttataaaattccctttttttcagttg

SEQ ID NO: 347624 - DNA, 421 bp, Zea mays
cttgaacctgtatgatggctggagagaggagagacggtggcttctctggttgataagttggtcctggtatggtgtgcttgccgccgatgcaaaaaaaaaaaaaaaaaaaaaaaaaaaaaaaaaaaaaaaaaaaaaaaaaaaaaaaaaaaaaaaaaaaaaaaagaaagcaaacaaaaaaaaaaaaaataaaaaaggggcacctaaaaaaaatttaatgtccataattttaaaaactaaaaaaaaaaaaaaggggggggcgtttaaaaaattaaaaatttttaaaacccattcttcaaaaaaaaaatttttttaatagggaaaaaaaaaaaaaataaagggcgcttaaaacaaaaaacgctacaataaagaaaaaaactttgacaaacccaaaaaaaactcattaaaaaaaaaaacccttttt

SEQ ID NO: 347625 - DNA, 430 bp, Zea mays
ttaaaaaaaataataaataaaaaaaaaaatttttttttggacaatctataataaaaaaaaaaaagttaaaaaaacttacaatgataaatattaaatattgtgtcgtgttaaacaaaaattcaatttattaaatctatatggggccgccccttttaagggaccaagttttccgtccccttacttcctcggttttctttttttttttggtctcctaaaattaaattattgggccgcggttttcacccttttgtccttggaaaacctttggctttcccaattttattcgctttgcgccctttccctttttctcctgttgcgttttttgtgaaagggcccctccccgttcccctttccctagggttgcccctcctgatgggtaattgggcccccccttttttcgtccttttaacccgggtggggttgtggtttc

SEQ ID NO: 347626 - DNA, 169 bp, Zea mays
ggaaaacccgggccgacccacgcgtacggccgaccgacctaggggtgcgcaactctatttagcgcatacagctatttctccccgctcggcgccgtttaaaatatctcgtgcacgtgcatgcattatctactgtctaaagccgccgctgcgccggcgccgctcgcatagt

SEQ ID NO: 347627 - DNA, 301 bp, Zea mays
  unsure (1)..(301): unsure at all n locations
gtcgagattatatattaaatatatatgtgaaaaaatgacatacattagaaccaccattcctacactcgtaaaaatcatgtaccttttcttatacactagatatgttgctctattagatattataaatattagttttttttaccggnaataaaaaaaaaaaaaaaaaaaaaaaaaaaaaaaaaaaaaaaaaaaaaaaaaaaaaaaaaaaaaaaaaaaagggggggccgttttagaggatccaagtttacgtacgcgtgcttgcaacgtaatagtttttttatggggtcacctaaattaaatt

SEQ ID NO: 347628 - DNA, 354 bp, Zea mays
cggacgcgtgggcggacgcgtgggcgcgctcattaaaaaaaaaaaaaaaaaaaaaaaaaaaaggaaaaaaaaaaaaaaaaaaaaaaaaaaaaaaaaaaaaaaaaaaaaaaaaaaaaaaaaaaaaaaaaaaataaaaaaaaaaaaaaaaaaaaaaaataaaaaaaaaaaaaaggggggggcctttttaaagaaacaaattttatttccgggtgtttgcaaatttaaattttttttttagggccactaaaaaaaaattattgggccgggttttaaaaactttgggattggaaaaaccttggttttaccaaattaaattgtttggaaaaaattcccttttttccaagttggtttaat

SEQ ID NO: 347629 - DNA, 165 bp, Zea mays
ttaaaaaaaaaaaaaaaaaaaaaaaaaaaaaaaaaacttaaaaaaaaaaaaaaaaaaaaaaaaaagaagagttaataaaaaggggcggcctctttagtggctccacgtttacttacgcttgcttgcgattttttacctcttttattgtggcacctaaattgaatt

SEQ ID NO: 347630 - DNA, 129 bp, Zea mays
aaaaaaaaaaaaaaaaaaaaaaaaaaaaaaaaaaaaaaaaaaaaaaaaaaaaaaaaaaaaaaaaaaaaagacgagcaagcgaaaaaaaaaaaaaaaaaaagcgaaagcgtaaaagaaaaaaaggccggg

SEQ ID NO: 347631 - DNA, 339 bp, Zea mays
  unsure (1)..(339): unsure at all n locations
gacccacgcgttcgnaaaaaaaaaaaaatatatattaaaaatatttttttttaaaaaataaaaaaaaaaaaaaaaggaagagtaatttaaaaaaataaaataaaacttaaataacgggcgccctctttataggacccattctttctttcccgttcatgcatctttatatctttttttttttttcccctaaattaaatccattgccccccttttttcaccttcttcacttgaaaacccctgtctttccctaactaaatctctttgcaaaacatcccccttcctcccgctcgttttttaccaatttaggctccttacttgatcttctttttccaacttttt

SEQ ID NO: 347632 - DNA, 100 bp, Zea mays
atggggtataattgggctgggcagcagccagcattataatgggctgatctttaatctttactagttgggtcgtccgatatctttctttcttttcttcccc

SEQ ID NO: 347633 - DNA, 118 bp, Zea mays
aaaaaaaaaaaaaaaaaaaaaaatttttattattatagaaaaaaaaaaaaaaaaaaagggggggatattataaatggggtggtcgcgttttaattggatcttaactttaatttttact

SEQ ID NO: 347634 - DNA, 339 bp, Zea mays
taaaaaaaaaataaaaataaaaaaaaaaatttttttataaaaaataaaaaaataaaaaaaaaagaaataaaaaaaaaaccgcttttcaatatagaggatctaagttttatttactcttacatgcaattaaaatgtctttactttggagtaccctaattttaacttaacttgacctttttttaacaacatttggggggggtcatctttggatttccctatttttttcgctttgtatgacatttctcatttttttttttggcctaataaaaaaatggcccctccctgtttttttacataacattttcgtaaaataactgtttatcgctacttatttttttt

SEQ ID NO: 347635 - DNA, 266 bp, Zea mays
agccttttgtgagcgagcacaagcgttgcttaaaagcatggcaagtgtgggcaaacgtgctaatctcaacaatcggactgtaggacaagccgaaccgttgaaacgagtaatgaccaagcatgttgtagggattattgacatacattagtttctgaccaatatattttatgataaacccttgatctcatgcaaagacgtaactgaccaggcaagagtggaaaactttgtggaggatgggggatagagtgggctgacaatctaccaga

SEQ ID NO: 347636 - DNA, 268 bp, Zea mays
tgtgtattttgtgatactaccaacgtgggtgaggttgttgagcaagagtttttcacggaagaggttagtgtttaaaaaaaaaaaaaaaaaaaaaaaaaaaaaaaaaaaaaaaaaaaaaaaaaaaaaaaaaaaaaaaaaaaaaaaaaaataataaaatttaaaaaataatatcataatattatatataaaaaaaatttaaaattatacttatattaaataaaaaatatatgggcttgcctttaaaaaaataaaaattttttaaaatttt

SEQ ID NO: 347637 - DNA, 382 bp, Zea mays
  unsure (1)..(382): unsure at all n locations
cggccccttggccggccccttgggcggacccttggggtcgtaccatatcatatactgcgaaatgaggatgtggtgaccgttctcgagatgttcaatagtgtgtttctgtcctcgacaacggagacagtattgaccagtatctgactgaacaaaagcgcttccggaaaattaattaagaaaagaataaccgtgtccgggctccagcaagtcgagtgttaatttccattctggatacgtgtaactgttgtagaagaatgcgtattaatcgcttagggtttgttcggtttanaaaaaaaaaaaaaaaaaaaaaaaagggcggaccgtattaaggatccatgctttacgtccgcgtgccttgcgacttctttcctttttttttgtg

SEQ ID NO: 347638 - DNA, 351 bp, Zea mays
gtgggctgggctgtcttccaagatgcatggagaggcagtacgtatgtacacgtacgtgtatctatctgttcgtgtgtgtgcgcccgctgctgcttgatttatcttgtgcgtccgattggttacgtcaaaaaaaaaaaaaaaaaaaaaaaaaaaaaaaaaaaaaaaaaaaaaaaaaaaaaaaaaaaaaaaaaaaaaaaaaaaaaaaattaaaaatttaaaaattaaaaaaaaaataaaataaaaattaaaaaataaaaaaaaaaaaaaaatggggggggccctttaaaaaaataaaattttttttccccgtgtttgaaaagttaaaattttttttttgtggcaccaaaatta

SEQ ID NO: 347639 - DNA, 124 bp, Zea mays
cggaattcccgggtcgaccaacgcgtccgctctattatatatgtatatatgtgtggcctgcagtgcgagttgcttcaatccacctacttgttcacacagtttaatggttttggtgcctgttatg

SEQ ID NO: 347640 - DNA, 87 bp, Zea mays
agctagtgctttcctttctgtgtgaaataaacctgaaacccagacccaggccaccgcaccaataaagatggggggttactatgcatc

SEQ ID NO: 347641 - DNA, 298 bp, Zea mays
  unsure (1)..(298): unsure at all n locations
cacttttctcatgttgtcagatcatgtggaccaacttgaatggcnnaaaaaaaaaaaaaaaaaaaaagggcagacgaatataaagaaaacaaactaacgtacacatgcatgcgaaaaaaaaagatggggtgtagggtcacctagaatccaaattttcctggccgcgggcttgacaacggctggccttttgtaataccctgacgttacttcacttgactggccggcgttacactacctcttgcggcggctaaaccttttatttacggggccttaatcgccttgcccttccttacagttt

SEQ ID NO: 347642 - DNA, 259 bp, Zea mays
ccaggctcggccgcgtcggcgtcaagaccgacccgtcgctgggggacgtccgccgcgactgcgccttcctcaactgaaaaaggatggagacctggtttagagaaatttgccattatgaaacacggtgcgggcggcttccacgaaatggaggctaaggagagggattcgctgttatgaaaaggcagagcaaagcctacactctgaaatggacatgaagcctccgttaataagttcagaccggtatcagtgtcgttaaaaa

SEQ ID NO: 347643 - DNA, 151 bp, Zea mays
ccggcccgacccactcgtccgctgacacatcagctgacacttatttttttttacaaaaaaaaaaaaaaacataaaaaaagggggtattttaaaatataactttactcaaaaaataatctaaaattaaataaaaaactactaaaaaaataaa

SEQ ID NO: 347644 - DNA, 127 bp, Zea mays
gaaaacccgggccgaccacacccgtccgaacactcagtgatccaaattcgtcattttttttttttaatttacagtttcaaaaaaaaaaaggaatattttaaaaataattatatataataaaaaaata

SEQ ID NO: 347645 - DNA, 409 bp, Zea mays
agggtcttcctcccggtcatcgctggcctttccgcgcgatctacgatgtcgtcgccacgatatgccgcacggcagcgtggcagcagagtggggtccagaggcgtgggtgcggccgacttctgctgacgcccgcgcggagtggtcggtgctgtcagccgccgtagatccggccgaggaggccccgctgggcgcgggcgacgggacggccccaccagcggtggtcgcgcagcgccgcgttcgccgcgagccagccgcacccgccgtgcaccccgccaccgggatggatcgccgcgctgccgaagtacagccccgccaggtgcgtccgcggcccgccgagccccgtcaccggacggaagatcgcctgctggaacagctgctgcgtcccgccgccgacaccggcctgccccag

SEQ ID NO: 347646 - DNA, 55 bp, Zea mays
aaacggttaaaaaaaaaaaaaaaaaaaaaaaaaaaaaaaaaaaaaaaaaaaaaaa

SEQ ID NO: 347647 - DNA, 70 bp, Zea mays
  unsure (1)..(70): unsure at all n locations
tagcctgaaaccttgtttgcaatgtgaaattaatgtgagagattatgaagactattttggctagtcccna

SEQ ID NO: 347648 - DNA, 379 bp, Zea mays
cgaccacgcgtccgccaccctgttgcaggagcgtctccctaatctccaggctctgaggcatggttttcttagttgcattccaaatccctatggcacaagggctcgaagcaggtcatgtcctcaccagttcggcgtctgtttactctccgaaacataccaggagatcttatgcagacctgcaatggcaaaatgtctatatgtgcttggatcacatgggtactgttggtgtttgaccgtctcacgcacatcgaaagaatcaagaatcaccctatttagagtggctcaaggcgcagagcaaacatgcccttagaccagaaagcactgaaccttattattgtgcatgcttaaaacggtaccttatgttctctccaagagggtt

SEQ ID NO: 347649 - DNA, 430 bp, Zea mays
ccaccttgtatgagctatatataattatatatgttaaaaaaaaaaaaaaaaaaaaaaaaaaaggggaaataaaataaaaaaaaaaaaaaaaaaaaaaaaaaaaaataaaaaaaaaaaaaaaaaaaaaaaaaaaaaaaaaaaaaagaaaaaggggggggccgttttaggggtcccaggtttccttccccgggcttgcgaggtattattttttttttggggccccctaatttaatttcccgggccgcggttttccaccggggggcctgggaaaccccgggggttccccaacttattggctttgcagcccttccccttttccccagttggcttataagcaaaggggcccgcccctttcccctttcccaacatttgcccaccctaattggcaaatggcccccccccttttccggccctttaagcccggggggtg

SEQ ID NO: 347650 - DNA, 306 bp, Zea mays
  unsure (1)..(306): unsure at all n locations
cgggacgacccacgcgnacgacacgccgggacaagggcgacgccgaaaacnncaggcnccgagncacgggncncncaggggcaaaccaaaacccaagggcacaagggcacgnagcaagacaaggccccaccagaaaggcggcnncgncagccccaaaacaaagcaagagaaccnccgcaaaaccgagaaggcagaangcnaagacgggcccggaaaaaaaggncacagcnggcnncngaccgncncaggcacagcgaaagaancaagaancagcccagncngangggnncaaggcgcagagcaaac

SEQ ID NO: 347651 - DNA, 377 bp, Zea mays
  unsure (1)..(377): unsure at all n locations
caaaaaaaaaaaaaanaaaaaaagaaaagaaaaaaaaanaaaaaaacaaaagaaaagaaaaaaaaaaaaaagggaaggagaaaagaaaaaaaaaaaaaaaaagagaagaaaagaaaagagaaaaaggaaaaaaaaaaaagaaggaaaagaaagaggaaaaaaaggaaaaaaaaaaaaaaaaaaaaaaaaagaaaaagagaaaaaagaaaggagaaaaaagaaagaggaaaaaaggaaaaggaaaaaaaagacagaaagagaaagaaaaacacgaaggaaaaaaaagaaggggagagagagaaaaaaaaaagggagaagagaggaaggaaaaaaaaaaaaaagaaaaaaaagaaaaaaaaaaagaaaaaagaaagaga

SEQ ID NO: 347652 - DNA, 192 bp, Zea mays
  unsure (1)..(192): unsure at all n locations
gcnnaaaaaaaaaaaaaaaaaaaaaaaaaaaaaaaaaaaaaaaaaaaatnnttgaaaaaaaaaaaaaaaaaaaaaaaaaaaaaaaaaaaaaaaaaaaaaaaaaaaagggggcggccgttttaaaggatccaagtttacttacccgtgcatgcaacgtaaaaacttttttatagggccacctaaattaaatta

SEQ ID NO: 347653 - DNA, 150 bp, Zea mays
gcgccactaaggctggcttaaattttgggttgtcttgatatatttggtgtgtaacgcaatcagcctgttcgatgcgaaaaaaaaaaaaaaaaaaaaaaaaaaaaagaaaaaataaaaaaaaaataaaaatttaaaaaaattaaaggggcg

SEQ ID NO: 347654 - DNA, 210 bp, Zea mays
cgactattcttgtccttcctccgacaataaaccaacgggcctgagatctcactgtgagacgctgtaaataaggaaatatggaagttggagctcgtcattaaggacgagttagcggtgtgcatccagggggcttttgtggctcagtatgtgatgccttttcgcccctcctgattttctgtaaataaaacgatgctgggagccatcggtgtg

SEQ ID NO: 347655 - DNA, 118 bp, Zea mays
ccgaagtgggagattaagaacggtactgtttttttcaagacggcgaacgagctacagccctggagcgagatcccattcttgcaacttataaacaaaacgcttacctacgccagggagc

SEQ ID NO: 347656 - DNA, 228 bp, Zea mays
ccacgcttccggggacgcgtgggttgatgttggatttttaaaaaaaaaaaaaaaaaaaaaaaaaaaaaaaaaaaaaaaaaaaaaaaaaaaaaaaaaaaaaaaaaaaaaaaaaaaaaaaaaaaaaaaaaaaaaaaaaaaaaaaagggggcggccgttttaaaggatccaagtttacgtccgcgtgcttgcaacgtaatagtttttttatagggccacctaaattaaatt

SEQ ID NO: 347657 - DNA, 303 bp, Zea mays
taggtggttacggcgccgaatggaggctttttttcgtccgcgcaggtcattaggaagtgcatgggtatcatggagggtaatcctcatccaagagctataaagggtcggctgtctttccaaaaattcaatccatctatcgataaactaaatgaagaggcacgaggtgaccaccaaacagaatcagctttcctcagtaactgtgaccaagacaatgcaaacttcatctgacgggatgaagttccagcattaagatgtacagactatggcattcccagttcagaaagcatttctctaaatgaactg

SEQ ID NO: 347658 - DNA, 230 bp, Zea mays
gccgctccgtccttaggcatagaggtcatttttcttttctttttttttcttttttaaaaaattatatgtactatgggtggtcgaaataaagtactgatatggtgttacacatgttttataataaataaaaaaaataaaaaataaaaaaaattataatggttgaaaattatttacaaaaaaaaaaagactatattattaatttcacccaaattatattcttttaaaaataa

SEQ ID NO: 347659 - DNA, 253 bp, Zea mays
ttttggttgatgtgctgggttaccttttttcttagttccccaattcgccattttgatgaggagctcttcccactgtgagagctactgcgctcctcccctgtgctaccttccctgcctccccaaatccaaagacgttgcactcggtgacccggagtcctggtcccctagccctgccgctgtctccctggacaatccgcccgcgttccataagatcgaggaatctgtggcggtaaccggcggctatggcgactgt

SEQ ID NO: 347660 - DNA, 226 bp, Zea mays
aattaatgccagatgactgaagatacttattctttctgcatttatagaatttgttctgggagtgttgtgtgctatattgttcatatagtaacttggcacgtttgtacttccacgttcatgcccttgtgacatccaccctataaaggcttgttctgatattttcaattcttatggatttgaagggattgattctgaataaatagggattttgatttactagggattg

SEQ ID NO: 347661 - DNA, 341 bp, Zea mays
agccctactatgtagccagcgggtgtttcttcctgctgtggattaagcccaaccgcgtggttaggcagtcaacgttaggttgcttggccttgcaatgactgtggctgctggaattatggtccaatatggggggcgtgctctggtctggtttattccggcctattaatggcccagggcggacactaacacgttaccagggatgacaccgacttataggccggccgttgtgagggatccagactaatttgcattgacatcacatgtattgaatcctctatatggcacgttaaaataataatgggatggaagcattacaatcaaaaaaatgaaaaaaccggggg

SEQ ID NO: 347662 - DNA, 256 bp, Zea mays
ggttgctgcattccatgcaatgatgcaataaagggtaaagacaggtttgcacctatgaaaaaaaaactaaaaggaattgatcgaggaaaaaaaaaagcagaatataagaaaaaataaaacaaaaaagaaaaggcatatataattcaaaggcacctaaaaataaaaaaggggggggcccttttagaggatccaagtttacttccccgtgcatgcgaggatattgtttttttttgggggcccctaaatcaaattcatg

SEQ ID NO: 347663 - DNA, 274 bp, Zea mays
attccttacacgtaaatcgaccaagggtgggcgcaaggtgattgcccggagaatcgcaaaaggcaggcacagaatttcagtttagcaagatcccatagcagcactggatgttttctgtactacagattcgtatcgtgttctttgtgtgaacgacatatttttaagctttttaaagtttttgcataccaccctgctgaagcatgaagctgagcccccgcgcaagcagctgaaacaaactcttgctgcgaaataaacaagtcaaaggaactggtgg

SEQ ID NO: 347664 - DNA, 181 bp, Zea mays
accaaaagggggggaaagaacaaggaggacggaccaaaacacacaacgacgacaacaacaaaaacacagcgaggacgacccggaaaaaaaaaaaaaacaaacaaaaaaaaaaaaaaacggacaaacaaaaaaaaaaaaggggaagaaacaaaacacagaagaaacagaaaaacaaaaaggg

SEQ ID NO: 347665 - DNA, 68 bp, Zea mays
gcccggaattcccgggtcgacccacccgtccccggacccgtgggtctagaagctcaaccccccaaaaa

SEQ ID NO: 347666 - DNA, 300 bp, Zea mays
caaaagaagcaccggaaagagcagctgctttatctcgttcacaatcagcgagagaggcaagccttcgttcagaacgtgctgctatgcagagatcccaacacgcagtccatcggaggccgcgttacatgctacaagagcaagcagacagggctactgtggcaatgaagcaaaaggcttgcgctgaacgtaaggaaaaagctcttagtaaagccaacgatagggctgaagcatacagatcttctaagatgagagctttccaggaagcgctgaatacagctctaccagcagaagtggaaaggg

SEQ ID NO: 347667 - DNA, 433 bp, Zea mays
  unsure (1)..(433): unsure at all n locations
cggaanncccgggccgacccacgcgttcgatttacattgaaatgctgccggctgtacatgttttttctgagtactacacctgctgggggggcttatgtgacggtgcagtattgtgcctttaatatcaacctaaaaaaaaaaaaaaaataaaaaaaaatataaaaaaagacaacaaaaaaaaatttatagatttaaaaaatatacgaaaagcaaaattgaacaaaaacttaaattgggggctttttttaaaggaacaatttttattttctcatggttgcgaataattagctttattaaagtgtccccaaaaataaatttaagggatgtgttttaataacgtggtgactgataaaaccctggcgaaacaaaataaatttgtattgaaaaaaaattcctattaaatagagcttttaaaaaaaaagagcctcaaaaa

SEQ ID NO: 347668 - DNA, 207 bp, Zea mays
atgccagcagcagatcttaatttgtctcttttaaaaaaaaaaataaaataattatggaggggatctttaacaaaaaatataaaaaaaaaaaaacaaaattaataatataaaaataaataagggccgcccgtttttaaggatccaagtttacatacccttgcattctacttctttgttttttttttacgtcacctaaattaaattaat

SEQ ID NO: 347669 - DNA, 370 bp, Zea mays
cggacgcgtgggttttttttttgagagaatcattgtgtacgtagtaatccctaacgaggccgaacatcgatgcatccacatcaaggcctgattgttgtgtttcctagagattctgactcactaggtcggattcctgatggtcatgcgatctcgctgttctttcttcaaacgtgaagaatcacattgtctttgaaaagtttcagaaaaaaaaaaaaaaaaaaaaaaaaaaaataaaaaaaataaaataaaaaaaaaaataaaaaaaaaacaattagaaaataattataataaaaattaaaattaaaaatggggggggccgttttaaaggaaccaagtttacatacccggccttgcaaagttatattttttt

SEQ ID NO: 347670 - DNA, 279 bp, Zea mays
gtaaaatgaagacttcaccttcaaaaaaaaaattaaaaaaaaaaaaaatacaaacaaatgggggaggacacactaaacagggtgatggttaacaggacaacagtggtcgacgcccaccgtctgtcgacgatactttaatggggatctcataatccattggggtgggcggttttataaattacaagtttatgcacgatgcttgggataacaactttttttttttgtgcgcctaaatttaatttccttggccgggttttctcaccatagggtgcgggaaaa

SEQ ID NO: 347671 - DNA, 104 bp, Zea mays
atccatattaaaggtaaaaacgggctgttgtctttaatgatccaagcatacgaacgggggggagcttctgcaatattctgctatagtgccacctaaaaacaatt

SEQ ID NO: 347672 - DNA, 258 bp, Zea mays
cggacgcgtgggaaaaaaaaaaaatttttttttaaaaaaaaaaaaagacaaacaaaaggggggaaacaaaaaaaaatacacatgcatacaaaaaaaaaatctttttaataatttaatctaagggtcatcttttttggcggttccaaactatcttccccactcttgaaaccctgtcgttaccctatttagtcgcctaaattcaatattctcccctctttttcccacctttttgcctggaaaacccctcgcggttgccca

SEQ ID NO: 347673 - DNA, 324 bp, Zea mays
  unsure (1)..(324): unsure at all n locations
cgggnaganccacgcgnncgangagcnannggggagcgcgaagggaganaanaacaggacagaaagcgaggaagggggaggaggaaggaacggagcaaacgcgacgngacaaaccagcaaaaccggagacgggaaagaaacaaggccccagggccgcnaaaaacaaacaacaaggacaaagccgaggacggcacaccgaacaaaagaggggaaaccaanaggcccagcacggcgaggcccacaccaaagaaaaaaaagaaacaaaaaacaaaaaaaacagaaaacagaaaaaaaaacaaaacgaaaaagaaaaaaaggacaaaa

SEQ ID NO: 347674 - DNA, 268 bp, Zea mays
tcttcttcccagatgattcttaatttacttagctagaagattaattccttttgctaggcattgttgttggggggttaaggataattaatttgtatacagcaaaggaagataggaagtgtataattgtttagtcacacttttttggttctttgttttgcatttgcccgtttttgttctggtgtaccaattttccttgtactcatttttcttccctctgtaaactaaacataagagacacatacatgcatacgtaaatacatatattggt

SEQ ID NO: 347675 - DNA, 278 bp, Zea mays
tcttcttcccacatgactcttaattttcttttcttgaagattaatcccttttgctggggggtgttaatggggggttaatgataatcaatttgtatacagcaaatgatgactggaagcgtataattgtttagtcacactttttcggttcttagatttgcatttgcccgattctgttctagctgtaccaagtctgcttgcactcatttaacttccctctgtaaactaatcatatgagacacatacatgcatacattattacatatttagataaaatattt

SEQ ID NO: 347676 - DNA, 143 bp, Zea mays
gtggattacagttaatgaacggatggatacataccttcgctaaaaaaaaaaaaaaaaaaaagagaataaaaaaaaaatgcaaaaaaaagaaagaaaaaataaaaaacaaaaaaaaaagaatataaaaaaaaagaaaaacatat

SEQ ID NO: 347677 - DNA, 332 bp, Zea mays
  unsure (1)..(332): unsure at all n locations
ccggnccggaattcccgggtcgacccacccgtccggttctgtgtactacaaagttaagtaagtcttgtaaacgtgcacatcctccaggagggttttgtttcaaaaaaaaaaaacaaaaacaaaaaaaaaaaagacaaacaaaaaaaaaaaaaaaaaaaaaaaaaaaaaaaccaaaaaaaaacaaaaaaaaaccaaactaaaaaaaaaaaaaaaaaacaaaggggccgccccctttaaaaaacccaaccttactaccccgtccatccaacgaaaaagttttttaataggggccccaaaattaaatccccggccccccgtttaaaaaccctgga

SEQ ID NO: 347678 - DNA, 411 bp, Zea mays
  unsure (1)..(411): unsure at all n locations
cgggncgacccacgcgnncggnngggngcaccaaaaagaaaagaaaggacagaaaacgagcacagaaacaaggagggaaggggggcaaagaaaaaaaaaaaaaaaaaaaaaaaaaaaaaaaaaaaaaaaggaaaaaaaaaagaaaaaaaaaaagaacagaaaaaaaaaaaaaagaaaaaagagaaaaaaaaaaaaaaaaaaaaaaagggggggcggggcaaaaaaaaaaaaggaaaaaaaagaaggaaagaagaaaaaaagaggaaagaggggaacaaaaagaaaacgagagcaggcgaggaaaaaagaggaaagagaaaaaaaggaagaaaaaacaaaaagccggaaaaaaaaaaaacggaaaaaaaaaggggaaaaaaaaaaaaaggggaaaaaaaaagacaaaagaaa

SEQ ID NO: 347679 - DNA, 75 bp, Zea mays
ggtcgaccacgcgtccggtgtgtgcactacaaagttaagtcagttttgtaatcgtgcacatactccccgagggtg

SEQ ID NO: 347680 - DNA, 58 bp, Zea mays
ggggtccaccggcccggctggattggccggccagggcataggggcggggatttccttt

SEQ ID NO: 347681 - DNA, 190 bp, Zea mays
gtgaatttgttttgagggcttaaggttgtgttgtgcgtgttggattggattgattaaaatcgtagtttcgtacagttttgtcaaaaaaaaaaaaaaaaaaaaaaaaaaaaaaaaaaaaaaatcaaaaaaaaaaaaaaaaaaaaaatatatcaaaaaaaatgaacttgcatgatattttccctatttaaaa

SEQ ID NO: 347682 - DNA, 383 bp, Zea mays
tgattttttgcaacaagagcatggatatattgatcgcgcacacgcacaaaaagcttagagagggatggtgtggataggaaacgtcagctttggttacacgaatgcctcatggtctcgatgtgttgctttgtacattttttatttatatttttccacgctatgtcatcctacaaagatgtggagcaagacatcactctaggagatgattattttttcagtaggtacccatttttgttatataaagttttttaaatattaaatcagattggcgttggtacttaatcggatatttggtggaggtgaagcggatgatataccactacaagtacagtaacagctctaataaaaggaagcatatctattacaaggatttctggaaaaac

SEQ ID NO: 347683 - DNA, 267 bp, Zea mays
aaaaaaaaaaaaaaaaaaaaaaaaaaaaaaaaataaaaaaaaaaaaaaaagaggggcggcccgttttgggggacccattttaagttccccttctttgaaagggaatatcttttttatagggcaacctaaattaaatcaacgggcctttttttaacaccgcgttaaaaaaaaaaaccttggggaaacccaattaattcccctgcaaaaccaccttctttaaacaagctgttttaaaagaaaaaaggcccgcacaaaatcgccctacca

SEQ ID NO: 347684 - DNA, 81 bp, Zea mays
tttggattaaaggcttaaaggtgggtttttgcttgtggaatggattgattaaaatggggagttcattcagttttgctaaaa

SEQ ID NO: 347685 - DNA, 363 bp, Zea mays
attgcatgcaataattggatgaaataaacagcaataagcttcatcagtattattattgttgttgttgaatatatgcatcctctcctctctaaaaaaaaaaaaaaaaaaaaaaaaaaaaaaaaaaaaaaaaaaaaaaaaaaaaaaaaaaaaaaaaaaaaaaaaaaaaaaaaaaaaaaaaaacccaaaaaaaaaaaaaggggccgccctttaaaaagaaccaaatttaactaccccttcattccaacttaaaacttttttttaatgtcccctaaaataaaataaacggcccgtgttttaaaaccgctgtatttgaaaaacccttgctttaccaaaattaatccctttaaaaaaaatacccttttt

SEQ ID NO: 347686 - DNA, 147 bp, Zea mays
attcaacttggacaaggaataatatgctgccactggccaaagctttaagtggcctgtttaaaaaaaaaaaaaaaaaaaaaaaaaaaaaaaaaaaaaaaaaaaaaaaaaaaaaaaaaaaaaaaaaaagggggggccaatttaaagaat

SEQ ID NO: 347687 - DNA, 310 bp, Zea mays
gaagttccgggtcgacccacgcgtgcgtaaaaaaataataaaactaatataaattattttttataataacaaagataaaataaaatgggtgcggatataaaaaatataatatattataaaacaaaaaaaatttaagggcgccctctatatagaacccaagcttacgtacactgtgctggcgaatacatacttcatctttattgacaccaaactccaatcaatgggcctctgtttaacatagtattttctgaaaaatcctttttgataccaaacttaatcccttagtagaaaatccccttttcgcttttcg

SEQ ID NO: 347688 - DNA, 161 bp, Zea mays
cgggtcggcccgcgcgtccggtacgaataaaaatttagtggaaggagaagatgaattttttttaagggagagagaaaaggaaaatataataaaggggggggggggtaatataaaggggggaggacgtaaaagaaactaggtatacgggggggggctggggg

SEQ ID NO: 347689 - DNA, 176 bp, Zea mays
  unsure (1)..(176): unsure at all n locations
naaaaaaaaaaaaaaaaaaaaaaaaaaaaaatttaataaaaaaaaaaaaaaaaaaaaaaaaaaaaaaaaggggtggacgtttatatatttggggcggcctttatagggtgcccgcgctttcttacgcgtgcttgcagagaaatatcttttttttagtggcccgtattttcacttct

SEQ ID NO: 347690 - DNA, 279 bp, Zea mays
gtcgacgagccgtcaagatggcccgtatcctaggtcagtggcccttattgcactccgagggtgtgctggcttaccatatcccaactggagagttgacttaccaatttgttgtcaaggggttacgcttctccacggaccctgctcaaaaaaactaaactaaacagctatgctatgcaacttaattgtctttaggatcgggcggccgttctatacgatccatgcttacttctcgtagcatgcaactgtatatcttttttatagtggcacctaatttgaatt

SEQ ID NO: 347691 - DNA, 241 bp, Zea mays
tgatccttgtgtaattttattaccaagtctctttttatatttaaaaaaaaaaaaaaaaaagaaaaaaaaaaaaaaaaaaaaaaaaaaaaaaaaaatatataaaaaaaaaaaaaaaaaaaaaaaaaaaaaaaaaaaaaaaaaaaaaaaaaaaaaggggggggccgttttaaaggatccaagctttcttacccggtgttgcaaataaataagttttttttgggggcccctaaattaatttcaa

SEQ ID NO: 347692 - DNA, 252 bp, Zea mays
cagttttgagacttgttagaactgagcaaaccatgttaagatgctgctgtgtgtcattccttaaaaaaaaaaaaaaaaaaaaaaaaaaaaaaaaaaaaaaaaaaaaaaaataataaataaatggggggcacgctataggaggtcctatttatcgaacgagcaagcgcaacgtaaatatttcttctattgggacccctatttaaaatacacggcccgtttttataaaacgacgacattgagaaacccctggtg

SEQ ID NO: 347693 - DNA, 108 bp, Zea mays
cggacgcgtgggattttttttctctctcccttgctaccagatcatgtaatccagcaggaacatgtagagaaagatcaaacgaggttatagatcgagaaggtcgcctgc

SEQ ID NO: 347694 - DNA, 197 bp, Zea mays
acgtaccggtactgaattcccgggtcagacccacgcgtccggtactgtttgttccaattgtttgcttcattgcgatccagatatccaatgacataattgttatggtttaaaaaaaaaaaaaaaaaaaaaaaaaaaaaaaaaaaaaaaaaaaaaaaaaaaaataaaacatataaaaatggaaaaaccataactataac

SEQ ID NO: 347695 - DNA, 408 bp, Zea mays
ctagcatcgaaggtattctaagcaagcaaccagaaaaccgaatgcgtattcttccttcaccatacctttgcttaccactgatgagcattgtcaaaattgccagggaatgtggatggaggaaaacttccgcctcatccacttgtcaggatccatgtgtcatatgtttggaggtggaatgcactgtagctgcagaaggttgcggccatgagttctgcaccaaatgtgcactctacttgtgctccaccactagcagctcaacatccacccgtggagttcctggctccatatcatgccctctgtgtcgccatgccatcgtctccttcatgaggctcaccagcactaccccgataaaagagcttccatggacaagcgcgtcactagcctttatgtgcagcgggctcaaacact

SEQ ID NO: 347696 - DNA, 62 bp, Zea mays
gtgctttccaccggccctgatgtcgtcccgttgtaaccgatgttcgtttgtgtttcaatgtg

SEQ ID NO: 347697 - DNA, 217 bp, Zea mays
cgcgcatacgaagaagaaagatatgacgggcattattccgccgtcagcttattagaacagtgcagctagctagctgccatatgcatatgttttaagatacagatatggtgtgtgtgtggtaagtatggtgcatgtatgttgtttgtaaaataaattaacccacatgatgttgtggaaagtaaaattaaaatactcaatggatcggagacctgacata

SEQ ID NO: 347698 - DNA, 305 bp, Zea mays
gttttgtagcgtgagttatcatggctacaatttgttctgaaactagtggtcactaatcttaatttacacagttcagtcaatttaaaaaaaaaaaaaaaaaaaaaaaaaaaaaaaaaaaaaaaaaagaaaaaaaaaaaaaaaaaaaaaaaaaaataaaaaaaggaaaataaaattggaataataaaaaatacttgggtgtaaatgaaggagcgattgggatctaattttttatatagcaaaaaaaggggcgtgaatgagaaagaaaaaattaataaaacggtggttgaaacggaacataatttttt

SEQ ID NO: 347699 - DNA, 202 bp, Zea mays
gaaataaaaaatatatgctagaaagatttgtttttattgtatgcttagattacaagggagggaggtgtgcagttagctggtagtgtatcctgccgttatcgccttatttgtacatggggggaaccgcttgataggctccattgtctgaccggatggtctaatattaatttcttggtcctaggggaacaaaatattaattaac

SEQ ID NO: 347700 - DNA, 83 bp, Zea mays; identical to SEQ ID NO: 61305

SEQ ID NO: 347701 - DNA, 164 bp, Zea mays
  unsure (1)..(164): unsure at all n locations
cgaccctgtgggatcctgggggcccctctttacaacacccccttcggctagatatctgctcctctgatcgcatgaaacagggctgctatatcacctcatggatgctacctcgcatgaacatataggctcttcatctaatttgagctttttnaaaaaaaatataa

SEQ ID NO: 347702 - DNA, 58 bp, Zea mays
tgctgtgttgtgtcaccatccatctataataatcttatctataccccaccttttgtgt

SEQ ID NO: 347703 - DNA, 170 bp, Zea mays
aaaaaaaaaaaaaaaaaaaaaaaaaaaaaaaaaaaaaaaaaaaaaaaaaaaaaaaaaaaaaaaaaaaaaaaaaaaaaaaaaaaggggggggcggccgttctataggatccaagcttccgtacgcttgcatgcgacgtcattgcttttgtgtggcgtcacctaaattcaat

SEQ ID NO: 347704 - DNA, 254 bp, Zea mays
ctggatttgttccattgccaatgaaattttttattcaaaagaaaatagatcttgccaacaaaaagctagtaatcttaaggggtgacgcttctataaggtacgtgctggcctccactttcatccggtccgtaaactcgatctttcttttagcccattgcctatgtcttgcgcctctttgttctgcgttgccactgtgtacacttttactgctccctttttttcttcttttattcacatacctttttttgctactg

SEQ ID NO: 347705 - DNA, 111 bp, Zea mays
gaattcccgggtcgacccacgcgtgcgagaaaaaaaaaaactagaaaagaaacaaaaattaaaaaaaagggggcggccgttctagaggacccaagcttacgtccgcgtgca

SEQ ID NO: 347706 - DNA, 188 bp, Zea mays
aattcccgggtcgacccacgcgtgcgctttgagatttgtttctcttggtgaaacccaataaacatgcaacttctttgacctgtgagaaaaataagaattttgtcaaatattggtaatttttaaatttttaaattataattttaaatcttatatttaaaatttaaaaaggtgtattttaaaagtggggg

SEQ ID NO: 347707 - DNA, 66 bp, Zea mays
  unsure (1)..(66): unsure at all n locations
aaaantntnnnnnaaaaaaaaaaaaaaaaaaaaatnnttntttntttataaaaaaaaaaggggggg

SEQ ID NO: 347708 - DNA, 102 bp, Zea mays
aaaaaaaaaaaaaaaaaaaaaaaaaaaaaaaaaaaaaaaaaaaaaaaaaaaaaaaaaaaaaaaaaaaaaaaaaaaaaaaaaaaaaaaaaaaaaaaaaaaaaa

SEQ ID NO: 347709 - DNA, 240 bp, Zea mays
cgcgaggttccgggacggagactagggcttctgtgcgggacgggcgcctgccggtcgaccagaaacgggaggaggaggagagggagaaggcggtggccaacggcaggaaggcgtgaggtggtgagcgggagcgggaaggcatggtcagggacgacgacgagtggggtgtacatgtacatgtgaatatagtacttttttgtttttgcattcacccgtgatgaccgacccttgttacctttc

SEQ ID NO: 347710 - DNA, 137 bp, Zea mays
  unsure (1)..(137): unsure at all n locations
cccacgcgtccggggattgggnnnaaaaaaaaaaaaaaaaaaaaaaaaaaaaaaaaaaaaaaaaaaaaaaaaaaaaaaaaaaaaaaaaaaaaaaaaaagaagaaaaaaaaaaaaaaaaaaagaaaaggggggagaaa

SEQ ID NO: 347711 - DNA, 174 bp, Zea mays
tagcgctgggggtcaaccgtttggtttaggacctagagttcgacatgaagaagctacgggggaagaaggacaagagccctgatgctggggccgccgttatagaggatccaagattacaaacgcgtgcatgcaacgtaataccttttttatagtggcacctaaatgtaaataacg

SEQ ID NO: 347712 - DNA, 314 bp, Zea mays
gtttgggcctttgtggacctgtagcaagcaaatttattaggaggctggcaagggattcattctagtagttgcagggactcgcctcaagctaccatatgcatcacagaacacatgaaatacatcacgctttaacaagttgggagcgaaaagaaggaactaactaaccttctcttaacttcgcttgctagatgcatgtatcgcaaacatttaacggtgcgctggagaaatatacctttccagcagctgtcggctgcaaagtggattgtgctcaataaacacgtcattgcctgctgtagtgctgatttggttttttt

SEQ ID NO: 347713 - DNA, 362 bp, Zea mays
  unsure (1)..(362): unsure at all n locations
gtacattaagcctattactgtcccaaaaaactcgatgttatctatccgatactggaagtctgtctatcgactgcaacgcttaagcaaaaaaaaaaaaaaaaaaaaaaaaaaaaaaaaaaaaaaaaaaaaaaaaaaaaaaaaaaaaaaaaaaaaaaaaaaaaaaaaaaacccaaaaaaaaaaaaaaaaaaaaaaaaaaaaaaaaaaaaaaaaaaaaaaaaaaaaaaaaaaaaaaaaaaaancgggggggcccttttaaaaaaaaaaaatttaataacccggtgatggaaactaaaaattttttttatggggcaaaaaaaaaaaaaaaaaagggccctgtttaaaaaagaggggaagggaaaaa

SEQ ID NO: 347714 - DNA, 401 bp, Zea mays
  unsure (1)..(401): unsure at all n locations
ggtttgtgctataaatagctactgtagttgcccatcgtcaaagttttgtagagtggttagtgtttttggttgacagacattggtgctagatttgggatcagccttcctaaacagtaccatctacttcagctcaatgatatgaataatgcttgtttgcaggacatattgctaagaatctgccacattatgtttgcttgaggtattaatttatccaggtgtttaatgctggagtacagttagaagatccctaatcaatttcttctcatttcagtcgtgtaagtcactctgtaagttttgctaccattttctaaactccattgttctccatatgattntatttggtcacatgctccttcatgtgatattttgcttcttgcaagttcttgtgatcttgtgttctg

SEQ ID NO: 347715 - DNA, 112 bp, Zea mays
gaagaattggcttcaaaaaaaaaaactgatctttaaaaaaaatataaaaaatacgaggggtggagctactgtaacaatctgattgccgggtcttaacattaaggggaacctt

SEQ ID NO: 347716 - DNA, 377 bp, Zea mays
aaaaaaaaaaaaaaaaaaaaaaaataaataattataaaaaaacaaaaaaaaaaaaaaaaacgggaaaaaaaaaaaaaaaaaaaaaacaaaaaaaaaaaaaaaaaaaaaaaaaaaaaaaagggggcgcccctttaaaaagaccaaagaatccatccccggcctgccgaagttaaagctcgtaattagggccccctaaatcaaaaccacggcccgctataaaaaaacggggggccgggaaaaccccgggcgcccccaacaaaaaatccggagacaaaaacccccctttccccagggggattaatagacaaaaaggccccaaccaatcccccttccaaaaaatcgcacacaccagaagggaaaaaggaacccccccttaa

SEQ ID NO: 347717 - DNA, 53 bp, Zea mays
  unsure (1)..(53): unsure at all n locations
naaaaaaaaaaaaaaaaaaaaaaaaaaaaaaaataaaaaaaaaaaaaaaaaaa

SEQ ID NO: 347718 - DNA, 315 bp, Zea mays
ccgaaaaaaaaaaaaaaaaaaaaaaaaaaaaaattttttaaaaaaaaaaaaaaaaaaaaatatgggggtgtatataaaaatattagggggggccgatgtgggggatcccatgtttgggagcgcgcggttgcctcgccatggctttttctggggggctccttttgggttggttttatttttctggctttttcctggcaatcctttggtttccttgtggggttccttaccttttttgtcctgggcggttttccccctttgcgcctggggagtaccgtcggtggggcccttttgggctgtttttatccattttttttt

SEQ ID NO: 347719 - DNA, 112 bp, Zea mays
gtcgaccacgcgtccgggttacttcgttacaatagaatgctacattagttatccaaatatacaatgacgtcgtccgttctggaggaaaacaaaataaagggcgcgcccatct

SEQ ID NO: 347720 - DNA, 292 bp, Zea mays
gagactcgtgggctatattggaccgtttttttctaacccaccacatctccagacactgcggccatatcaacggaggtgccggtcccaatttcgacaggctatacctgatgaaggccttgtatgaggattagaatactgggttgtgactgaaggctgctagatttagctcgagatactgcttaaaatcacactattgcgatgtaccttacatgagcgcacctgacttgttcttaatgttacccatcatatggataacacacattctgccccacttactaattataccagcatt

SEQ ID NO: 347721 - DNA, 102 bp, Zea mays
cggaaagttcatctgttattaaaagttcatctgttgtgaccatacccatgtaacacagatgctgtagtttcagcaagtaaaaacctaccggcgttattaaaa

SEQ ID NO: 347722 - DNA, 168 bp, Zea mays
  unsure (1)..(168): unsure at all n locations
cccacgcgnccggggacgcttgggcggacgcttggccggattctttttcggactcgtgggttttccttttcccttgagacctatttgctgcaacaagaaataataatgaccaaactcttgtattgacagtgaggttttgactgtgttagctgttaccggcttgtcttc

SEQ ID NO: 347723 - DNA, 407 bp, Zea mays
  unsure (1)..(407): unsure at all n locations
gngatgtgccctccatggttgatcgtagtttaactcaggcttccaggacatgtgttgcgggtaataccttttcagcgttactcatccttcatctgtatttccagtaatccagcttgtggcgagtgacataatgctaataagtgacataaataaccatttgctgatatgctgtatatgttggtcttgtggatggagcgctctgaagattatatccattgccagtaataaatcgtggctttatctgtcctaataaaaaaaatgatcttataaatcatttaatctacttacttacactctttatttcataatttgtgattattttaaaaaataccactattattatgggcgctccttttaaaggacccatctttacttaccctttctttcaacttcttatttttttttta

SEQ ID NO: 347724 - DNA, 337 bp, Zea mays
gtaaatctgaaagaaaatcccagttcttctgcccaaaaaaaaaaaaaaaaaaaaaaaaaaaaaaaaaaaaaaaaaaaaaaaaaaaaaaaaaaaaaaaaaaaaaaaaaaaaaaaaaaaaaaaaaaaaaaaaaaatgaaaagattaaaaaaaaaaaaggacatgccactggcgcgtggtctttagaaatggctatgctgaattcactatgtttgcttatgagttgttctacttttaccttacaaacaaggaaaacaagctggttttctccagtaaaaaattcgatacagcactcgatttcactctatgaaatgtcagtattcgtaagcgggctcttaac

SEQ ID NO: 347725 - DNA, 340 bp, Zea mays
gtaaatctgaaagaaaatcccagttcttctgcccacaacataagaagctagaaaagagggaaaaaacaaattgattatttaaaaaataaaataaaaaaaatgacaaaatctaaaaaataaagagctaaaagcctaaaaagcttaaaatacaataaggacatgccactgccgctggactttataaatggcgatgctgaatttgatatgtttgcggatgacttgtacaactttgaccttccaaacaacgactcaagcttgttttcttcactcccaacatgcgatccagctcctcctctccaccctctgaaatgtcagtctttgcaggggggctttttatttt

SEQ ID NO: 347726 - DNA, 172 bp, Zea mays
  unsure (1)..(172): unsure at all n locations
gaaaaccggcccgacccacgcgtncggagaatcctgattaaaatccaactttttttgttttcatagaaacaggcgaaaagcggcgagggccctcgtctgaatgaagactgatccaatctgaaaatactgagaccctgctttgattgtttggcggcaaaccatattctgaacg

SEQ ID NO: 347727 - DNA, 65 bp, Zea mays
  unsure (1)..(65): unsure at all n locations
cgtgcatgcngaaacgtcataaagctctttctatttagtgtcaacctaaaattcaaattcaactc

SEQ ID NO: 347728 - DNA, 276 bp, Zea mays
  unsure (1)..(276): unsure at all n locations
aaaaaaacananaaaaaaaaaaaaaaaaaatttttaaaaaaaaaaaaaaaaaaaaaaaaaaagggagaaaaatttaaaggggtggacgctttagaggttctcaagcttacctacccgtccatgctaatgtttcacctttttatagggggccgcccgttttaaaggacccaactttacttccccatctttgcaccttcaaacctttttttttgtgccacctaattcaattttccggccctgcgtttacaccgtgtggcctggaaaacccttggcttt

SEQ ID NO: 347729 - DNA, 292 bp, Zea mays
gctaagccttcgtacgacgtgtaaatgtgtttggtacaatgagtgctgcgactacgattgagcacccctctacctagtttgcaaaaaaacagtgtcccatggactgtctgttgtccctctatataaatgtccaatgaagcttgctaatgtgtggtcaaaaaaaaaaaaaaaaaaaaaaaaaaaaatataaaaaaaaaaaaaaaaaaaaaaatacttttttaaaaaaacaaaaaaaatataattacctgggcatttaattaaaaatctaataaaataaaaaatccttaaaagg

SEQ ID NO: 347730 - DNA, 214 bp, Zea mays
gccggcatgagctgaggacggatgaccatgtgtatgaaagcaggaaggagcgtgaaagggaagaggaagaagatagaaggggtgcggcaaatgctgttaggggtggagaattcatttatatctgaactcaacagttccagaatgtaatccctttgatgaacttcgtgattaccatgttgacatctatatatacctagttacttatgcttgagtt

SEQ ID NO: 347731 - DNA, 425 bp, Zea mays
  unsure (1)..(425): unsure at all n locations
gaaaaaccgggnccacccaacccgtccggaaaaaaccaaaaacctttttaggggaaaatgtattaacgggagttctgcccactgaccatgggggttcaaattggacaccacccgatcactcaaggttggtattttgctctccatgttgcattggggcaggtcattgcggggtgtatatagtttagatattacgagcctcacacagatcaaatcttgaatcgtctataaaagctactcgagaccaccacgaattagggtttcaaccgcgatggcggccttctaggctggcggatctagcgcgggcgtcgctggccaagcgcatggcggctgtcaccggcgtggcgaccgtgcatgaacctgctaccactgctgggcccgttcatgatggagaaagcgcgcgctcgatctcgcggttcttcggggcg

SEQ ID NO: 347732 - DNA, 326 bp, Zea mays
ccgacccacgcgtacggacactacccgatctccaccgatggcctttcgttgcctagcatcccccgcatctagggggatgagcacgaacagactgatcctcctgcaaacctttgttctcctctcggacccataaactgcccgggccctccggttcgacctcgagtccggccacaccaagtgcgattacgacgagatcaaggtcaacgccatggccgtcggaaagtaccacattgtcagaccctaccccaactcacccgacgcccagctttcacaagttggaccgcatttcccttatggtgacctcgccgaactggaacagtctgcac

SEQ ID NO: 347733 - DNA, 339 bp, Zea mays
  unsure (1)..(339): unsure at all n locations
ccggtcncnncggtctttgcttnntctcaacnntacnngattcnnttattactttccanacgcttttcnnngaatttctgaatcgactcggccaggagtggggnngcacggttgctttccgggcgaaagttgcattcacttttggaagcgtttggtgaaatgggaatcnaatgaagctnnttggagtacnctcggcnnagagttctttacggtggnnntccccataaccgaggggagagaanntattaaataacccaccanncagttgaaagaacccannaagagttttcatttatgcnncacgagcttgaggggacaaaaatatttgcaaagagtttt

SEQ ID NO: 347734 - DNA, 365 bp, Zea mays
ccgtccgccatttgcgactatgggaggctttgttcgggctacctgtccgtcggagcgcggcctggaggcgacggctcctggctcctcagcgcctacatttggccgcagatggcggcggcgctggagtcggacggcgtctttaagcctctcacggcggagtatctcggtctcacagtcacaccctagcggcgacgtggtcgatctacatgcgctgcatgcatatcagatcagaatcagatatcgttcgtattgctcattgttgattgcatgattgcgcgctaccttgtattgtgtacgtcgttcgtgtaataatggtgcatggtctcgggccagtgctaaataaaaatctctgttaattttctttc

SEQ ID NO: 347735 - DNA, 73 bp, Zea mays
ggcgtaataaaagcagaaggcgagctatatgtatttttgcaaataaagcacattgagatctcataatttgaac

SEQ ID NO: 347736 - DNA, 302 bp, Zea mays
  unsure (1)..(302): unsure at all n locations
ntaaaaaaatataaaaaaaaaaaaaaaaaaataaaataaaaaaaaaaaaaaaaaaaaaaaaaaaaaaaaaaaaataaaaaaaaaaaaaaaaaaaaaaaaaaaaaaaaaaaaattaaaaaaaattatattaatttttgttaaaaaattttaaaaattaaaggggggggggttttttaggggttcaatttttttttccctttttttcccaatttttatttttttttttggggactttaatttaatttgctgggcggtttttttaaacttccgttttggggaaaccttggggtttcccaattttt

SEQ ID NO: 347737 - DNA, 147 bp, Zea mays
aaaaaaaaaataaaaaaaaaaataataactttttttttaattaaaaaaaaaataataaaaaaggggtggtcgttctataggatccaagtttacgtactcttgcatgcaacttcattagctcttctatagagtcaccttttttcattc

SEQ ID NO: 347738 - DNA, 236 bp, Zea mays
  unsure (1)..(236): unsure at all n locations
aaaaaaaaaaaaaaaaaaagggggggggggnggaagaaanaagggaagangagggaggaaaagaagggggggaagaagaaaaaaaaaaaaaaaaaaaaaaaaaaggaaaaaaaaaaaaaaaaaaaaaaaaaaaaaaaaaaaggggggggggggccgcccnnngaaannnnnnnnnnnnnngggaaaaaccaggagaaaangggccgggaaaaaacaaaagaaaagggggggaaaaa

SEQ ID NO: 347739 - DNA, 212 bp, Zea mays
  unsure (1)..(212): unsure at all n locations
ctgttttgtttnnnnnttntnttttttttttttaaaaaaaaaaaaaaaagaaaaagggggagggaaaaaaaaaaaaaaaaaaggggggtcgaatataaggatacaaatatagcgtacgcatgcatgcaaagaactggccaattaattaaggggggggccttttaaaagactcgggggttatttcacatgggtgggagtggaaaaactttttt

SEQ ID NO: 347740 - DNA, 315 bp, Zea mays
cggacgcgtgggcggacgcgtgggctctaacgaagcgattgatagagtttgaaaatacggtttctgccagtttaccgattgaagaatttctagcaccagctgatgaatataatgaagcgtctgtttcaaaacattcgcctaagtctggggaaatcctttgcaaacacaagggtaaagattttgagcattttgcccatggactttgtgaaaaatgcttcaataagttcactaaactgtcgggtggactagaaggtggtgctaaccctccagcattccaacgagctgaaaacaaaagactttgagctgctaaaaggg

SEQ ID NO: 347741 - DNA, 91 bp, Zea mays
aaaaaaaaaaaaaaaaaaaaaaaaaaaaaaaaaaaaaaaaaaagggcgaaagaaagaaaaacaaatacgggcgggcgcctgaaaggaccag

SEQ ID NO: 347742 - DNA, 314 bp, Zea mays
aaaaaaaaaaaaaaaataaaaaaaatttatatttaaaaaaaaaaaaaaaaaaaaaaaaggggaaggaaaaaaaaaaaaaaaaaatattaaattttaattaaaaaaaaaaaatttaaaaaataaaaaatatgggggggccttttttggggttccattttttgtttttctgggttgtaatttttatattttttttttgtggcctctttattaatttcctgggtggtgttttttaattttttttattggggaaacccttgggtgtcccaactatatgggttttgttgattatctcttttttgcttgggtggttttta

SEQ ID NO: 347743 - DNA, 276 bp, Zea mays
ggtgataataatggatatcgtgggtggagccggggtcgtccaaccggaacatttttaaaaacacggcttggtccaactctttattatgggtattaatggagcccccacgagatgaggaagagtggtagaagatcattttttgagccggatttagctcttacaatatcatacccgctctgggggttcgatccatcatagagggctacccgtagtccatacaagttcatgtaacaattaacaaagtgctgctttgggcgacccagatgcagtttcgtt

SEQ ID NO: 347744 - DNA, 377 bp, Zea mays
atttttctccagatatgtcaaaacatctctggttcagcatgttgattcaaaaaatttaaatgaaacttcaagacaggaaagcgggggagcgtcttgttatcatttggagagacatgatgattatccgctagagatccctgtcaaatgctctttggattggattcgtccaagatgaaggattttgtatgaggacgcaacagctgtgtttcgcagtgtcaaatttctatttcaagttcgataaataatatagaatagcttttcagctagtttctaattcaagttcgaccaaggaaaataatctagaatagctttttgtgctaacattgtaattggcgattgcggataattcgttgcttggacaaattacagctatttcg

SEQ ID NO: 347745 - DNA, 57 bp, Zea mays
aaaaaaaaaaaaataaaaaaaaaaaaaaaaatttaattttaaaaaaaaaaaggacgg

SEQ ID NO: 347746 - DNA, 311 bp, Zea mays
  unsure (1)..(311): unsure at all n locations
cggacgcgtgggaattcagtctggccttgtcatgcatgcaataaataaagtgatgggtttccctgtttcaatnaaaaaaaaaaaaaaaaaaaaaaaaaaaaaaaaaaaaaaaaaaaaaaaaaaaaaaaaaaaaaaaatggtggtanataaaaaaaagggcggcttcattaaaacaatcaaacttatttaaagcctctttttaaaataaaaactatatttaaataatctgccaaactaaaaaaaaatatggcggctgttaaaaaaaatgttaattaaaaaaaaaaatctttttacaaaaaataatatttttt

SEQ ID NO: 347747 - DNA, 326 bp, Zea mays
cggacgcgtgggaattaacttatctcttgaaaaaaaaaaaaaaaaaaaaaaaaaaaaaaaaaaaaaaaaaaaaaaaaaaaaaaaaaaaaaaaaaaaagaaaaaaaaaaaaaaaaaaaaaaaaaaaaaaaaagggggcggccgttttaaaggatccaattttgggtccccgtgcttgcaactacatagttttttttttgggcccccaaaattaaaataactggccggggtttcacaacgttggaattggaaaaaccttggcttaccccaatttatgggatttggaagaaatccccctttaaccacttgtctaaaaaaataaaaggcc

SEQ ID NO: 347748 - DNA, 138 bp, Zea mays
cgcgtgccgtgcgcgccctgtggctgtggctgcagtggcgtcgcgttgggtgttttcttgttgtgacgaagaaaaaagggtgtgggttggggtggtccgctggccggcgcaccgggtaaaagacgagaggttttaatc

SEQ ID NO: 347749 - DNA, 313 bp, Zea mays
ggcggcgcgtcggacgggcaggagttcaaggtcgtgtcgcggcttaagaagcggccgacgatcggcgaggtggagtctatgctgtacaacatcatggccgcgaactcgccggtgaccaaatcggccaggttcctccgtgagattgtttccaatgtgactggagcaaagtccaaggcacagtgacagtgagtcaccctgcctgcgtgagcgtgagattcgtcggtctggattttgttggagtgctctgaatttctttgtgccacgcaacgaaaaatgagctgcccctgaacacggtgagctaattttggtcaaa

SEQ ID NO: 347750 - DNA, 306 bp, Zea mays
cggacgcgtgggcgggaattggcagcggacgtgaacaaaaaaaaaaaaaaaaaaaaaaaaaaaaaaaaaaaaaaaaaaaaaaaaaaaaaaaaaaaaaaaaaaaaaaaaaaaaaaaaaaaaaaaaaaaaaaataaaaataggggggggccgttttaaagttccaaattttttttccccttgtttccaagtttagtaaaaaaaaaaagaaagggcaaactctatttattggccgggggtttaaaaccgttttatttgggaaaaccctttttttacccaaattaattgattttgaaaaaatcccttttt

SEQ ID NO: 347751 - DNA, 357 bp, Zea mays
cggacgcgtgggtgcacgcgcaagctatacgcgtgccaagctaaatagctgctgcgtatatatactactactactgccgctgtgtacatgtgcgtgtatgaactgtgtgtgtgtgtatggtctcaagtcactgtgttcgtggctgctttccagatcggtcagtgtgttttctcggtttgcttggatctgcacatcaagttgttgtatcaccagctaccagagggaccatgccctttgctttgaaaaaaaaaaaaaaaaaaaaaaaaaataaaaaaaaaaaaaaaaaaaaaaaaaaataataaaataaaaaaaaataaaaaaaaaaagggggcggccgttttaaaggaccaaatttta

SEQ ID NO: 347752 - DNA, 342 bp, Zea mays
aaacaaaaaaaaaaaaaaaaaaaaaaaaaaaaaaagtaaaaaaaaaaaaaaaaaaaaaaaaaaaaaaaaaaataaaaaaaaaaaaaaaaaaaaaaaaaaaaaaaaaaaaaaaaataaaaaaaaaaaaaaaaaaaaatcggggggcccgttttaaaaaaccaatgttttttcccagcttattggaattttaaatttttttttttgggccccctaatttaaattccggggcggccttttaaaaacgtcgttactgaaaaaaccttggccttaccaaataaaatgacttggaaaaaaatccccttttaaccactggggttataaagaaaaagcccagcacgaatg

SEQ ID NO: 347753 - DNA, 83 bp, Zea mays
gggcggccgatctagaggatccaaccttacctacccgtgcatgcgaacttatagatcgtttattgtgaggcctaaatcaaatt

SEQ ID NO: 347754 - DNA, 72 bp, Zea mays
  unsure (1)..(72): unsure at all n locations
tgtttatctatttttatatttaattatcaataagaaacattcacattttttgttttgagaaagagggcnnat

SEQ ID NO: 347755 - DNA, 126 bp, Zea mays
cggacgcgtggggagtcttcacggcaggcttttcctgttcttggtgggccttgtgtttgctggtgcagctcctacaaccggccaataggacgtgctcaatgccaccttgttataataatgtttgat

SEQ ID NO: 347756 - DNA, 62 bp, Zea mays
cgtctgttcatattccacaccactcctatgtaaataacggcatgcatgataatctctctccc

SEQ ID NO: 347757 - DNA, 412 bp, Zea mays
aaaaaaaaaaaaaaaaaaaaaaaaaaaaaaaaaaaaaaaaaaaaaaaaaaaaaaaaaaaaaaaaaaaaaaaaaaaaaaaaaaaaaaaaaaaaaaaaaaaaaaaaaaaaaaaaaaaaaaaagggggcgcccgttttaaaggatcaaattttacttccccttccttccaacgtaatactttttttttagggcccccaaaattaaattaacggcccgcgttttaaaaactttggaattggaaaaaccctggctttcccaaattaaatccctttgaaaaaaatccccttttccccagttgggtaaataccaaaaaggcccgcaccaatcccctttccaaaaatttgcccaccctaattggaaaatggaaccccccttttaccggcccttaaaccccgggggttgtggtgtttaccc

SEQ ID NO: 347758 - DNA, 123 bp, Zea mays
caagaaattttctcgtgggtttggggaatcctgatacttacacaagatatgcgagatgatatggtttaaattttgagcggaagttgcggatccttttattttttaaaatctcggtgcaatgtt

SEQ ID NO: 347759 - DNA, 266 bp, Zea mays
cggaattcccgggccgacccacccgtccggaagtttttggatggtatctatgtgagcgacaagggtgtgatcgaagaggagcagtgaaggacaagttatcgtttgagttggaattatcgtttggtttgcaattttctcagggtgaactttgtaatcggttaggatgtgttgtggaccattatcttatcctacaatattatcgtatctgtttaagaattaaacacaaaaaaacaaaaaaaaaaaaataaaaaaaagaaaactaaaat

SEQ ID NO: 347760 - DNA, 74 bp, Zea mays
gtagggcatgcatctatttatacttaacatattctttgtgtgcttaaaaaaaataataaaaaagaaagaaatat

SEQ ID NO: 347761 - DNA, 354 bp, Zea mays
ccggaatcgtgaaaaaagatagcatcaagattcacggattttagactgcaaatttgaagtgcttgtgtgtgcctatcatatgataccatatgataccaggtattgaagcttcggaagcttgttggccttcgtaacatcagtagtcgttattcatctgaatatgtgtcattatttgatttgataagactggtattgatgcaagttgtccttgcagtatgttttgtaagtgttacctgcatgaaagtatcgtttgtctggggaactgtctactactgatattgaataacaagagagattgctgttaaaaaaaaaaaaaaataaaaaaaaatatataaaaaaaaataattattaatt

SEQ ID NO: 347762 - DNA, 423 bp, Zea mays
ggcgagttcaaagcttcgaacaacctgaaccgactcttaccatcccgttgcagatctgcagctcatccaacaaaccaatcatcgggcatcctttgctctttggggctgtcgcttcccgcggggctgatgttggcatccaggtctccaagaccggtgaaacattagacgatttcgacgtgatcctttccatcgaccagctgaacaagatgtgccgagatgtcacccagatcaggttctccgctcgctccgaacagaacgtgcacgtcgagcatgtcgacgggcagtgggtcgccgtccagccggaggtggcaaattcccatcgcctgcatgccgaggttacgagtgtcttagactcttgcgctcctgataagctgtgtgtcatggagattgttgagcaataaaagtttcttgcctgtgtactgt

SEQ ID NO: 347763 - DNA, 246 bp, Zea mays
cgggtcgacccacgcgttcgaaggttttatgccgtctatgttgttatcttttgccaacgttgtaacgtcgtatgatgcgtggatggcctgtttcttgacatgcacactctaaatttgatctgttggtttgcatgaggttgatttgtatctcatactaatcgagcgtgagatgtcatctaaaggcttaatgaaggcaactgttgtatgaatcaaactgttaattttattataatttattaaatattg

SEQ ID NO: 347764 - DNA, 404 bp, Zea mays
  unsure (1)..(404): unsure at all n locations
tttggtttgagaaatgagatgagtccatcttctcaaaaaaaaaaaaggaaaaaaaaaaagaaaagaaaaaaaaaaaaaaaaaaaaaannttaaaaaaaaaaaaaaaaaaaaaaaataataaaaaaaaataaaaaaaaataaaaaaaaaaaaaaaggggggggccgttttgggggttccaggtttccttccccgtgcttgcgccgttttggtttttttttggggccccctaatttcatttccctggccggcgttttcccccgtcgggcctgggaaacccctggcgttccccccttttttcgctttgcggcccttccccttttcgccggttggcgtttttccgagggggcccgccccgttcgcctttcccaccagttgccccccctgtttggcgattgggcccccc

SEQ ID NO: 347765 - DNA, 229 bp, Zea mays
ttttatttttcataccggttgtttttgtctgtatagccacatgtcatgtgggtgttcgaactggcctgtaatggtctaccgttcgtgacttgtgttttcccactccatttctgatacttaagcacatatgaaaaagttgtttccggatcaaattcaatggtggtgtatcatggttaaaaaaaaagcaatatttagatttaaaaataaaaaaaacaaagaaagttaaact

SEQ ID NO: 347766 - DNA, 244 bp, Zea mays
attcccgggccaaccaacccttccgaaaaaaaaaaaaaaaaaaaaaaaaaaaaaaaaaaaaaaaaaaaaaaaaaaaaaaaaaaaaaaaaaaaaaaaaaaaaaaaaaaaaaaaaaaaaaaaagggggcggccgttttaaagaatcaaagttaacttccccgtgcatgcaacgtaaaagcttttttatagggccaccaaaattaaattaactggccgccgtttaacaacgtcggaattggaaaaac

SEQ ID NO: 347767 - DNA, 400 bp, Zea mays
cggacgcgtgggaaaaaaaaaaaaaaaaatttttttttaaaaaaaaaaaaaaaaaaaaaaaaggaaaaaaaaaataaaaaaaaaaaaaataaaaaaaaaaaaaaaaaaaaaaaggggccccgtttgcaatttaaaactctaaattttgagcggcccttttaaagaatccaatctttctttcgcgtgcttgctatttaattatttttttttttggtgccccctaaatttatttccttggctcttttttttccaccctttagatttggaaaaacccttggttttcccaatttattccctttgaaaaacatcccctttttcccattgggttttatagcaaaaagcccccctctcttcgccttttcaaaaatttgagaagtcttattggttattcgtcccccct

SEQ ID NO: 347768 - DNA, 301 bp, Zea mays
gcagaccaaacggattagagtggcttcaccaccggtatatacatattggctttggtcatgccaccgaagtctcaggctcggggagctgggggtgctcggaatggcgctggctacctgttttgacaggtgggaaactgactttatgcagggctcggctgggatttgggtcctgtaacaatggtggatcctgaacggacgaaatatttttttttaatagaaactcaccaaattgatcaatttcaaaaaataaaaaatataaatttttttttcccttatttttggggcgggccttttttaaaag

SEQ ID NO: 347769 - DNA, 383 bp, Zea mays
cggacgcgtggggccggagggagggcggtctgtaacgtgccagcaagccgtttccggcacagacaagacaactcacacggatcctcgcccatttgggacgactcgacacagacaacaatggccgtcacacctctcacgtccacgaacaagagatgtaaaaacgtgcgagacgccgagacggctggtgctgacacttggagcggtaaaagatctggaacttctcagccattctcttcccgtgctgatctctggtcgtgcgtcactgtgaatcgcgatcgcgtgagaaatcccatgtctggaccgagagcgccggacggatcggagaggacggtcgcactgcacgagcacgagcggtggctacgggctcaatcccattctggacg

SEQ ID NO: 347770 - DNA, 451 bp, Zea mays
  unsure (1)..(451): unsure at all n locations
cgacccacgcgancgnggacgcaagggaaaaaaaaaaatttattttttttaaaaaaaatttttaaatttataagatgttgtttaaaaaaaaataataaaatataattctataattatattaattattaatttaatttataattaaattttattaattttttattatatatctatatttattcataaattttatatttttatttatataatataataattttaattatttaaaaataatatattataaatatttaaaaaaaaatatataaaaatattatataataattatctattattttaaaatataaaatataattattatatttattataaaatttaataataaattatattttatattatatcttattatttacataatatatatatctaaatattatttaaattctaaatatttttatatatatattatttcattataatatataat

SEQ ID NO: 347771 - DNA, 210 bp, Zea mays
cgaccacgcgtcgttgaaacactacgcttgtatgtttgtaataaacacataagcatggcggactaagtcatgcgaaaaaaaaaaaaaaaaaaaaaaaaaaaaaaaaaaaaaaaaatataaaaggggcgcgttaaggtccaacttcaaccaaatggggggcctttttttataagtactaaattaattcatggcgtgttttaaagtgaactg

SEQ ID NO: 347772 - DNA, 87 bp, Zea mays
gttttgagaaaccattgttactgtatccccttgatgtcaaactttttagtacaatttgtggttctgaaaaggttggttgaatgttgc

SEQ ID NO: 347773 - DNA, 306 bp, Zea mays
tgagaattgatacaccttaataacatcagagggaaaaggaagatgtacttgctagaatgcttcagctggaaaaagagctgcatgagaagcaacagcttgagctcgaagtataacggttgaatggtacactccaagtgatgaaacatatataaggagaccatgacccgggggatattcattaaaagatggagaagctgagtgaaagatttgagcgggaaaagaagcgcctggaggatttgagtggtgatctggtgacaaaagagcgtgaaagtaatgatgagctacaacaagcccgaaaagaattga

SEQ ID NO: 347774 - DNA, 304 bp, Zea mays
ataaaaaaaaaaaaaaaaacaaatataatttaaaaactaaaaactaaaactaaaaaagaaaaggggacacataaaaaaaaggcaaacaatataatgaacacacacactctataacaaaaaaggggcgttcgcgtctttggctcccctttctaaaaaccccagtctttcaaccttataacttgctaaaacgtttcccctatatccatgtctcggcccgttttaaaacacccctctttccagataaccccctttcgaaccccctcttaaccccctggcctaccctccctttttccccctcggtttt

SEQ ID NO: 347775 - DNA, 287 bp, Zea mays
tgtaagaagaaatttggaatgttgacctgaaaaaaaaaaaaaaaaaaaaaaaaaaaaaaaaaaaaaaaaaaaaaaccaaaaaaaaaaaaaaaaaaaaaaaaaaaaaaaaaaaaaaaaaaaaaaaaaaaaaaaaaaaaaaaaaaaaaaaaaaaaaaaaaaaaaaaaaaaaaaaagggggggggcgtttttaggggatcaaattttatttccggttgtttgcaatttaatattttttttttggggccccaaaaataaaataaaggggcggggttttaaaaacttggggt

SEQ ID NO: 347776 - DNA, 317 bp, Zea mays
  unsure (1)..(317): unsure at all n locations
gccggattccgggcgccccgcgccggcccagaaaacagacattcgttgggaaccattagaggagctttatttgcgggnnaaaaaaaaaaaaaaaaaaaaaaaaaaaaaaaaaaaaaaaaaaaaaaaaaaaaaaaaaaaaaaaaaaaaaaaaaaaaaaaaaaaaaaaaaaaaaaaaaaaaaaaaaaaaaaaggggggcggccgcccaaggggacccaggctaccggccgcgggcgggcgacgtaaaagcctttcaagggggcccccaaaatccaatccccgggccgccggtaaccaccgccgggccggggaaaccccg

SEQ ID NO: 347777 - DNA, 304 bp, Zea mays
  unsure (1)..(304): unsure at all n locations
gaaaacctcatctggcgaccatacgttatttaccttgtatgggcgctccgcttgctggtgagacacggtgttacgagttacgactcgatgaacatgtaataaagcttttcagagaaaaaaaaaaaaaaaaaaaaaaaaaaaaaaaaaaaaaaaaaaaaaaaaaaaaaaaaaaaaaaaaaaaaaaaaaaaaaaaaaaaaaaaaaaaaaaaaaaaaaaaaaaaaaaaaaaaaaaaaaaaaaaanggggggggccgttttaaagaatcaaagtttacttccgggggattgcaaggaaaaagtttttt

SEQ ID NO: 347778 - DNA, 311 bp, Zea mays
agttgtgctcttatgcgcactgctacagatatcaagagcaaggcacttcatatcgggaagcttagaaatataatacagtgtgcaatttcattgcagattttttgtgaccctttttgtgcaaggacattgtccacagtgattgttatctgatgatttctcttcccctctcttctcaatcatctaggttgcagttcttctcttcagtgggaatccactctacattgaaagttttgcttgcatatagtccttcagatgcatgtatgttgtaaaaggatgctcagaagcgcaatgtatcatttctatttagttgt

SEQ ID NO: 347779 - DNA, 118 bp, Zea mays
ctgaagttatagtagcctacttagtttgttcagagctttgagtaacaagtgttatgggtatttcatttttatcttgcaattgtttacatctgtgggaaaaaaacccagtttcctacgg

SEQ ID NO: 347780 - DNA, 325 bp, Zea mays
gtcggacatgttcccggtgcgagaggcatggatgatgtaccagcaaggcaggctgctagagatcgtggacgcgagcatggggagctacccggagaaggaggtgctccggtacatcaaggtggggctggcctgcacgcatgccacgcccagcagccgccccacgatgcgccaggtgcttgccttgctgtcggaacggagatgctcccgccgagtttcgccgagcaccgcggccaccacacggcccctgccctggggggtttgcccgccggtccgctaatccatgcgtcgccgaaggcgaagtggccggcggcggcgccgtcagcag

SEQ ID NO: 347781 - DNA, 397 bp, Zea mays
cgcgaacgagctgaactctaatacacactgttttattttttaataacatgccactccatttcgggaggctcataaatataatacattgctcaattttattgcatattcttagtgatcctttttgtgcaacgacatttaccatacagatcgttatctgattatacgtttaccaaatttcttctaactcaaccatgttgcatctcttctctttaatcgaaatccacacctcattaaaatgttttacttccatatatacctttttaatcatgaattgaaataatacccatcctttacaagcaccaatgtattttttctttatttaattatacaatacaatataacttttctaatttttatataataataataaaatattttttcttttccatattttata

SEQ ID NO: 347782 - DNA, 188 bp, Zea mays
tcaaagatctcagttttctttcgcgaacatgggacgccgtcgcttttttatcgcgccttcctagtttcatctcgctggcctccggtccccaccctactgcctgggatagccctgcttccccctttcttattctcctggaatccccttcccctcccccccgttggcgttttaccacagaggccccccct

SEQ ID NO: 347783 - DNA, 76 bp, Zea mays
gctcaagttagcgtcctatgaataaagaatagtggaatcatctctcacgatgattcccttgagagtatcgccaatc

SEQ ID NO: 347784 - DNA, 200 bp, Zea mays
ttttttttctctgccaactttcacagttgggcgggttttttttaaaatttataaaatataaaagcggcgcactcgtgcaaggttagggtccgtgtcaagatctggaagtggacttttatgtacggtctactggaagataggagacaataacttttaggggctgcagcgcgcaaaaaaaaaagattttcgctgtcatttat

SEQ ID NO: 347785 - DNA, 401 bp, Zea mays
cggacgcgtgggatccaggctcaaagcaagctccaggcagcgtcgcgacagagtgagtgagtagcacgacaacaacaatggcttccctgaaggccgcgaagcccagcggagttgcggcgcagggcaaggagccggcgcccaagctcagcgagacggcgacgaagccgtcagccgcgaagagcggcggcgttaagaaggctgagcagaagccccgggaaaccaaaaggaaggtgaagagcagcaaacaggcggcggcggccaaaaagtgacgtacagtacagtacgtgtggagtgtaatggagcttccatgccatgttatgaatctagtccttcctttcttggatcttccatgtgacggcgtgtgcgtcccctcatgtgtgatgatgccagatgattactac

SEQ ID NO: 347786 - DNA, 303 bp, Zea mays
cggacgcgtgggcggacgcggcggccgagagggccgacgtgcgggcgcacgtccccgacgccgggcacgggcaccagcaccacttcttcatgccacacccgcagttcctgcacgggttccgactgctgccaggcaaccccgaagcggtggctggcaatggtaatggcgatggcagcagcagcagcgctagcgtcgctgccggcagcggggacgagatagcgctggcgatggcggcggcggcggaagcgcacgcggcggggtgcatgctgccgctgtcggtgttcaactaagcaggcgtatagc

SEQ ID NO: 347787 - DNA, 248 bp, Zea mays
ccacgcgtccgttcgttcgttcaaatcgcacatatatgttgctgtcgtgactccataccgtgaagaagcttgcccaaagtctgcagttttctaaaaaaaaaaaaaaataaaaaaaaaaaaaaaaaaaaaaaaaaaaaaaaaaaaattaaaaaaaaaaaaaaaaaaaaaaaaaaaaaataaattatttaaaaaaaaaaaaaaattataaaaaaaaaaaaaaaaagggggggcctttttaaagaaacaaa

SEQ ID NO: 347788 - DNA, 86 bp, Zea mays
ggctacctagctccccgccctggtttttttttttaagctctatgagttctgttggtataaattgcgcagcgatcatgcttttccta

SEQ ID NO: 347789 - DNA, 192 bp, Zea mays
gaaagatatgtaattagaaatgaatttttatttgtatggataaaaaaaataaggttgagaaggggaggaataatgtaattgggatgatatattgtttaccaagtgggtataatacttaaaatggatatattttgtggattatattgagcattatattttttttcatacggttatgggagggtttttatattt

SEQ ID NO: 347790 - DNA, 345 bp, Zea mays
  unsure (1)..(345): unsure at all n locations
caaggccgcggcagatctggccgctcatggtaggcagaattaagtgaaaaatagacataaaattcatccttgcagttactaaacatgaggacgaacaccttcaagtgatgttgcttgatgtatatttatgacacacaacagtgtcgtaaattaaaaggagacgaacactgcgtttggaacaaattgtttgctctgataagtttgattattgcaaatgtagtcaagtgatcgtgcttntaaaaataaaataaaaaaaaaaataaaaaaaaaaaattttatatttttttaaattatatatttaataaaatatataaaattttaaaaagggcggccgtttttaaggat

SEQ ID NO: 347791 - DNA, 222 bp, Zea mays
  unsure (1)..(222): unsure at all n locations
accgttctgattcccggtcgaccacgcgtccggctatttcagttgatcntagaaagaagacggttaaaagctcaaacaacaagaaatgacgtcaactgaatctaacagctggtgagtttaggctgttttttccccagcctgttttgacactgattactgtatacttgaactgcggtttggaaatgctccagctgttagattcagttgacctcattttttgtt

SEQ ID NO: 347792 - DNA, 308 bp, Zea mays
aaaaaaaaaaaaaaaaaaaaaaaaaaaataataaaaaaaaaaaaaaaaaaaaaaaaaaaaaaaaaaaaaaaaaaaaaagggcggacgaaaaaggggcgcccggtttaacggactccagcttaacaaccccgggggtccgccgttttggggcttcaattctttcccccgggcgcaggttaccggctcgttttttttgaaggcccctaatgttaaacccctggcccgccttttataacctgcctgtttggaaaaccccttttttcccccatttgtttctccttgagagcccttcccctttttgccctttg

SEQ ID NO: 347793 - DNA, 326 bp, Zea mays
ggcgtggtgggccacgacgtcgcggtaccatcctggcgcagcacggctgtcgctggggcgacaggtgctggacccgtcgcgctccctaggccgccgcctctcggagtcgtcgctagcgtccctggcgacgcgcctggccccgcaccgcggctccgtggcggtcgtggtgacggcgccggacgtgctcgtggacgggttctgcctctcccgctgcggcctccacgcgtcgtccccgaccccgaacgccacccgcgggcgtggccgcgggcggtacgtgtacgcgtgggtggggaaccccgcggagcagtgcccgggggagtgcgcat

SEQ ID NO: 347794 - DNA, 222 bp, Zea mays
tgtagtaaataaaataaagctagctgtattgccaggagcagcatgcattatttatcgatctatatatatatatactgtactgtagtactctattatatatgtatgtgtggcctgcagtgcgagttgcttcgatccacctacttgttcacacagtttaatggttttggtgccaaaaaaaaaaaaaaaaaaaaaaaaaaaaaaaaaaaaaaaaaaattttatat

SEQ ID NO: 347795 - DNA, 275 bp, Zea mays
  unsure (1)..(275): unsure at all n locations
ccgttcgggattcccgggtcgacccacgcgttcgggcttnttttttttttnntttttaattttacaacgagttggtaaactaagtggtttgtctcgattttaaacatgttattgaatgtgtaaattgtagaaaaattggtttgtttttaaaaaaaaaaaaaaaaaaaaagggggggcggttttttagagaacaaatttttttttacggcggggtttgtaaaaaataaattttttttttttttttgaaacaaaaaaatgtggggggtccttttttt

SEQ ID NO: 347796 - DNA, 199 bp, Zea mays
gcaagcagagttcaagactgtcttgtcattcgaacttcaacctagtagggcgggggagcttaatactggaagtatttctcaatttatcaacacttcaggagcagaattctgttgaactagctaggaggtgcaagcatgttgtacgctttcgaatatcaaagtcatcgatgtaatctacaatttagagttcttaaaaata

SEQ ID NO: 347797 - DNA, 66 bp, Zea mays
ttttttttttttttttaacaataaagaataagtaataatgttaaagactagagtcatttacataat

SEQ ID NO: 347798 - DNA, 270 bp, Zea mays
  unsure (1)..(270): unsure at all n locations
ggtccatgtaagctttttgtgggtgtctgtgttcaactgagacgtttttatccggagttgaacatcacaataaagcaaagtcactgataccatgcttgatggggcccgtgttttttagactcacaataaagccggtttgtgtttgtgcctaaaaaaaaaaaaaaaaaaaaaaaaaaaaaaataaataaaatataaaaaaaaaaaaaaaaaaaatataaataaaaaaaaattaaaaaaaaaaaaaaaaaanggggggggccgttttaaagg

SEQ ID NO: 347799 - DNA, 289 bp, Zea mays
gctttctttcaagctggagcttaggtttggttgttgtattcgaacatgctatgatgggtatgatgtagtagtactttcctgggtagcatgttgtatgctaccacttgccctctttcacctagctgcttgatttgctacttgtccgacctcttgtgatcctacttgacattagttctcaatccatattgattgggattgtgtggctttaaatcctaagcaagtcaaactttttatttttttttttcaatcccatctaatttatgtgtaatggaaatgagaataaccgaac

SEQ ID NO: 347800 - DNA, 348 bp, Zea mays
gaaacccggacgacccacgcgtacggaattcatgaagtcgtgatcgattactattgtcgatgccacccttgtttcccaggcgagaggcatcttcagcttacgcttcttcagtttggaggcagagccgtcggtggttgctgcgatgaacgtgatttggttctggaagatacttacggggatggagaaaacctattctaggaggaagctcagcgataatgggataacacattataagggattaaggaaggatgctattttacttcgcacacattatcatcactgttttacgtattcgcacttaccgaatggtactcatactcactcatattctacacagatgtaatttct

SEQ ID NO: 347801 - DNA, 381 bp, Zea mays
cacttgcaaatattagcatatttgaagagttgccattttgatcatcaaaaaaaaaaaaaggaaaaaaaaaaaaaaaaaaaaaaaaaaaaaaaaaaaaaaaaaaaaaaaaaaaaaaaaaaaaaaaaaaaaaaaaaaaagagggcaagcaaaaaaataaaaaaataaaaaatggggggggcctttttaaaggttcaatgttttttacccctgccttgtgtgaaataacttttttttttgggcaacttaatttaatttcaggggccgggtttttacaaagttgggctgggaaaaaactggtcttccctaatttaaattgtcttagtaaaaaacaccctttttgccggtggggttttaaacataaaggcccccttaaatcccctt

SEQ ID NO: 347802 - DNA, 116 bp, Zea mays
  unsure (1)..(116): unsure at all n locations
cggacgcgtgggcaaaaaaagagaggatggaaattattgaagttcctaggatcgtattgtaactgtacttgtgcgagtaacattattggttctctttgtatatccatctctgngac

SEQ ID NO: 347803 - DNA, 253 bp, Zea mays
gccttcagcacatattattgtattatgatttgttcatgctacaaacgaagtgaatacacgttttgtgatttgttcatttgtaataaaaagtttgtataaataaaaaaaaattaaacaaaaaaaaaaaaaaaaataataaaaaaaaaaaataaattaaaaaaaatgtaataaataaaattaagggtccttcttttaataggtggggggttttattttagtggttcatgctataattttccccttatttttaaaa

SEQ ID NO: 347804 - DNA, 375 bp, Zea mays
  unsure (1)..(375): unsure at all n locations
cggacgcctgggccggacgccttgggaaaaaaaaaaaaaaaagatggaaaaattntttggagggggggaaaatttatgagaaaaagaaataataaaaaagggggggaatgtttaggaatttaaattaattagagttgttttgaaagggggggggtttttttagggggcccttaatataaaacaaatgcccccggcggacaacctctttttttggggaaaccctgtagttacccaacctttttttctaaccgcgcatcccccataacccccctggtaaaccaccgaataaccccccaaaaaacgcccttttctaccacttggttttctgtatgggagatgggacaccccccccccccccccataattccccccaat

SEQ ID NO: 347805 - DNA, 261 bp, Zea mays
gttgaactctgacctaccttatttgtgcctgcttacggttatgtcatgaacgagaatttggtagtccaaaaaaaaaaaaaaaaaaaaaaaaaaaaaaaaaaaaaaaaaaaaaaaaaaaaaaaaaaaaaaaaaaaaaaaaaaaaaaaaaaaaaaaaaaaaaaaaaaaaaaaaaaaaagggggcggccgttttaaaggatcaaagtttacttacccgtgcttgcaaagtaaaaatttttttatagggccaccaaaattaaatt

SEQ ID NO: 347806 - DNA, 244 bp, Zea mays
  unsure (1)..(244): unsure at all n locations
ctcgcaaggcggcgttgtgtgggagtccttttggcctgcaagtgttttgctagttttgnaaaanaaaaaaaaaaaaaaaaaaaaatttattantntttttattttaaataaaaaaatataaaaaaaaaaaaaataaaaaaaaaaaanaaaaagccgcccgctctaaaggatccaaccttacttccccttccatccaacgtcataactcttctatagtgccccctaaattcaattccctgccccc

SEQ ID NO: 347807 - DNA, 379 bp, Zea mays
ggtaagggtcccacctgtcatatcaggccctaacgggctgcgaggatggggggtggaacataccctcccccatcgttaatggtttttgcccgtatctttccccacggggagtattttctccccattctcatcccctaatggcttgtttggtaccatagtattcaccctaattcacatgagttaaggggatttgggtataaattaaactaatttgcacccaaatcctcctcaacccatgtgtattggcgtgaatagtagggtatccaaatatagcctaatggaggaattccccgccagagataggggaatggggccattgccatccctacttgttgatgtaatgtacatgatatttttaatttaagcttccattattgaa

SEQ ID NO: 347808 - DNA, 422 bp, Zea mays
taaaaaaaaaaaaaaaaaaaaaaaaaataaaaaaaaaaaaaaaaaaaaaaaaaaaaaaaaaaaaaaaaaaaaaaaaaaaaaaaaaaaaaaaaaaaaaaaaaaaaaaaaaaaaaaaaaaaaaaaaaaaaaggggggggccgttttaggggaccaaagtttacttccccgtgcttgcaacgtattagtttttttttggggcccccaaaattaaattaatgggccgggttttaaaaacttggggcttggaaaaaccttgggtttcccaaattaaatccttttgaaaaaattccccttttccccagttgggttaataccaaaagggcccccccctttcccttttccaaaaatttgcccaccttaattggaaattggaacccccctttttccggccctttaagcgcggggggtgggggggttccccc

SEQ ID NO: 347809 - DNA, 431 bp, Zea mays
taaaaaaaaaaaaaaaaaaaaaaaaaatatataaaaaaaaaaaaaaaaaaaaaaaaaaaaagaaaaaaaaaaaaataaaaaaaaaaaaaaaaaaaaaaaaaaaaatgattatataaattaaattaaaaaatatttaaattaatattaattttaaaaaaatagggggggggggttttttggggttttaattttttttcccgtttttttggaaattttttttttttttttgggttactaaattataattttggggccggtttttttaatcttcgttttgtggaaaattgtttggtttcccaattttatttttttttgcccatttatttttttttcaatttgggtaatttaaaaagaggccccatcagtttccttttctaaaatgttggccccttttttttttttttgggcccttttctttttgtgtcttttat

SEQ ID NO: 347810 - DNA, 159 bp, Zea mays
tttaacaaaggggcaaaactgccagaactcaattgattcttcgcagttcatatacagcccgagcttaggagcataagagcaccggtcagaaacaaatttgtctattcctttgtacagtgagcatcatttccatgcctggtacagtgattgtttgtacta

SEQ ID NO: 347811 - DNA, 393 bp, Zea mays
cggacgcgtgggcgcggcgccggctcgggggcagcttccagctctgcgcgccctgcacctgctgcggcggggccagcggcgcctgcatcctcgcgccctgctgctactccatcaactgcaacatccccaaccgccccttcgggtactgctccttcacgcccaaatcctgccagtgcgtcggatgcaacctctgagctccgtggccgcgggattcattggattggattggtcagagtgtgtttgtgtgtgtgtgtatgagtatgagagagagagtggggtggtaacaaatctgtataaaaaaatccccacaatcctaatttaaggggcgatggcaataacttcaactaagtagaattttgtgggaaccacggttccatccgactaagtggaggg

SEQ ID NO: 347812 - DNA, 63 bp, Zea mays
aaaaaaaaaaaaaaaaaaaaaaaaaaaatatttaaaaaaaaaaaaaaaaaaaaaaaaagaagg

SEQ ID NO: 347813 - DNA, 385 bp, Zea mays
cgaatggcgcctatgaggatctcaatcagggcaagatcgtaggacgagctgtggttgagatcatgtagtgatgacggacaaggtaatcaatcctgtggttccaagtctgggtcacacaacaataaagttttgtgtgctctttcacagcattgtcaaaatctgtagatgaccaaactgcattgtgtgtgtgtgtgacagtgtgttgctggaaaaaaaaaaaaaaaaaaaaaaaaaaaaaaaaaaaaaaaaaaaaaaaaaaaaaaaaaaaggggggggcaatataaaaaaaaaaatttaattaatcacgtatacgaaaaaataaatattttttttagtgacccaaataaataaaaatatgaaaagggggtcctcatttggggttcag

SEQ ID NO: 347814 - DNA, 64 bp, Zea mays
aaaaaaaaaaaaaaaaaaaaaaaaaaaaaattaaaaaaaaaaaaaaaaaaaaaaaaaaaaaaaa

SEQ ID NO: 347815 - DNA, 82 bp, Zea mays
  unsure (1)..(82): unsure at all n locations
naaaaaaaaaaaaaaaaaaaaaaaaaaaaaaataaaaaaaaaaaaaaaaaaaaaaaaaaaaaaaaaaaaaaaaaaaaaaaaa

SEQ ID NO: 347816 - DNA, 123 bp, Zea mays
cggacgcgtgggaaaaaaaaaaaaaataaaaaaaaaagggcggacgataataaaagaaacaagcttacgtacgcatgcatgcagaggacataactcttatatggggcgaccgtaaattcagtt

SEQ ID NO: 347817 - DNA, 412 bp, Zea mays
aaaaaaaaaaaaaaaaaaaaaaaaaaaaattatattattaaaaaaaaaaaaaaaaaaaaaaaaaaaaaaaataaaaaaaaaaaaaaaataaaataaaatataaaaaaaatttaaaaaataaaaaaaaaaaaaaaaggggggcgccctttttaagggtcccaattttccttccccttctttccacctttatacttttttttttttcccccttaatttcattctttttcccttgttttaaaaactttttattttgaaaacccttggttttccccaatttttttctctttcgccctttccccttttttccccttgggtaaaaactaaaaggccccccccttttccccttttttaacattttcccccccttatttgccaaatgggccccccctttaacttctcctttattctcggg

SEQ ID NO: 347818 - DNA, 318 bp, Zea mays
  unsure (1)..(318): unsure at all n locations
gacccacgcgnncgnggacgcgagggggcnggcgcacngccgacggaaccgggcgaccnncaaggggcccaagaagggggacaacacggacgaccggcccaagacggccaccggaaagaaccagcgccgcancgaggcgcagcacaacgagcagccgaccagagccagancgangacccaggagcnagccaagncaggggacgacggaangggaaaacgcaacacaagcgagcnagnnagccaggcggacccgcaaagcgnggcgaggaggacanggccagacggaaccngaanaaacaaacacaggcaacggcncac

SEQ ID NO: 347819 - DNA, 60 bp, Zea mays
tttccattgtaaaaaaaaaaaaaaaaaaaaaaaaaaaaaaaaaaaaaaaaaaataaaaat

SEQ ID NO: 347820 - DNA, 125 bp, Zea mays
aaaagttcgcacactggccggctgagaaaatttctctggacctgcaaaaaaaaaaaaaaagaaaaaaattaatataataataaaaccggtggaagatttaaagaacaagcttaaatacgcattca

SEQ ID NO: 347821 - DNA, 85 bp, Zea mays
gcaggggttgttaatgcgatcgcttgtaatgtgtctgcgatgacgaagatgggtacatgatccttggcttcgtgctgaagccccc

SEQ ID NO: 347822 - DNA, 82 bp, Zea mays
aaaaaaaaaaaaaaataaaaaaaaatatttttttaaaaaaaaaaaaaataaaaaaaagggggggtctatctttactaataaa

SEQ ID NO: 347823 - DNA, 124 bp, Zea mays
atttgtttctatagtttctgtgactacttgtggatcgttcagtgtgaggctgcaatttgtacatgaataatgtaaatctagcattagtgcttattttttaatgttgaaatcaacaacttactgt

SEQ ID NO: 347824 - DNA, 422 bp, Zea mays
ctactttcttccatgccattcagccattgttctactcaaaaaaaaaaaaaaaaaaaaaaaaaaaaaaaaaaaaaaaaaaaaaaaaaaaaaaaaaaaaaaaaaaaaaaaaaaaaaaaaaaaaaaaaaaaaaaaaaaaaaaaaaaaaaaaaaaaaaaaaaaaaaaaaaaaaaaagggggggcctttttaagggaccaaatttttcttcccgggtcttggaaggtaaaattttttttttggggcccccaaaataaaaacaaggggccgggttttaaaaaggggggaaggggaaaaacccgggggtaaccaaattaaatgccttggaaaaaaatccccttttcccaagtggggtaaaaaaaaaaagggcccccacaaatcccctttccaaaaattgtcccaacctaatgggaaaagggaacccccc

SEQ ID NO: 347825 - DNA, 168 bp, Zea mays
gtgagagagagaggagacggagagccggccatgtccttttggctgtttggtttatttttgagttcatgcggtctttatttatttccatgtacgctgcttcctcgtatacccactttaaatttgtaccatgcatgcatgttccttatgatacactcacctctttttgtt

SEQ ID NO: 347826 - DNA, 199 bp, Zea mays
cggacgcgtgggaaaaaaaaaaaaaaaaaaaaaaaaaaaaaaaaaaaaaaaaaaaaaaaaaaaaaaaaaaaaaaaaaaaaaaaaaaaaaaaaaaaaaaaaaaaaaaaaaaaaaagggggcggccgttttaaaggatccaagtttacttccccgtgcttgcaacgtaatagtttttttatagggccacctaaattaaatt

SEQ ID NO: 347827 - DNA, 52 bp, Zea mays
aaaacaaagaaaaggagaagaaaaaaaaaaaatagaagtaaaaaaattacct

SEQ ID NO: 347828 - DNA, 54 bp, Zea mays
aagaaagacactcttacgcactacctatacgttttatggtcacgcccactgtct

SEQ ID NO: 347829 - DNA, 275 bp, Zea mays
accgaattccctgctattcctctcccctcgtctgctcgtctccccctacttgagggtcggagaggaattttatagaggtccggctcatcctaattaattaagccttggagcacattgagtctgggtgccagtcccccgaattacccttcctttgcattaatatctgtggcttttttatcaattcatctaccattatcattttctctaatttctcacaacgagatcattactattcatgattcttgctcatctttcttcctcctctattgacatca

SEQ ID NO: 347830 - DNA, 104 bp, Zea mays
gaatcccgatcgacccacgcgttcaacgaatttcttacaagcccacactcgagcttgctggaccccccctacaagatttctttaggcgaattttcaagaagccc

SEQ ID NO: 347831 - DNA, 441 bp, Zea mays
tcggagcgcacacacacacaaccagatctcccccaaatccacccgtcggcacctccgcttcaagatgcagatctttgtgaaaaccctgactggcaagactatcaccctcgaggtggagtcgtctgacaccattgacaacgttaaggccaagatccaggacaaggagggcatccccccagaccagcagcggctcatctttgctggcaaacagcttgaggacgggcgcacgcttgctgactacaacatccagaaggagagcaccctccaccttgtgctccgtctcaggggaggcatgcagatctttgtgaaaaccctgaccggcaagactatcaccctcgaggtggagtcctctgacaccattgacaacgtcaaggccaagatccaggacaaggagggcatccctccagaccagcagcggctcatctttgctgggaagcagct

SEQ ID NO: 347832 - DNA, 63 bp, Zea mays
gaattcccggatcgacccactcttccgctcacatacctattataattatttttttccaccaaa

SEQ ID NO: 347833 - DNA, 413 bp, Zea mays
tctgcaagtctcgctacgtagcagtgcaataaaaggagcagccgcgggggcgagcagcaccatggccctctcctccacggccttcgccggcaaggccgtgaacgtgccgtcgtcgtccgccttcggcgaggcccgcgtgacgatgcgcaagacggcggcgaaggccaagccagcggcggcgtccgggagcccgtggtacggccccgaccgcgtgctgtacctgggcccactgtccggcgagccgccgagctacctgacgggcgagttcccgggcgactacggctgggacaccgcggtgctgtcggcggacccggagacgttcgccaagaaccgggagctggaggtgatccactcccgctgggccatgcttggcgccgctcgctgcgtctttccggagcttcttgcccgcaacg

SEQ ID NO: 347834 - DNA, 223 bp, Zea mays
gtcctgtctatctaactagcaagacccaaggtcccaccttaccatggctaccgtgactgccggcgacgtccccaccggctgtcacccttaccgtcgttcccgcactcgctgtagctcaccgtacctgcactgtctgctctttcctatcgcatcagcatcacgctttttcttcccttccctacccgtctgtcatgctgccaccgctgtcatatggatgctttct

SEQ ID NO: 347835 - DNA, 291 bp, Zea mays
caacgaagttcgagcgacccacgttcacactacacgaaccaccaccaccaaccagcagctcgggccacgcgaccagctcatagcgatggcgtcgctcaccatgattgcgtccttcgccgccgtggcggttgccgttccctctcacctggtcaccttcgccgtggtcaggtcctccaatgtcgaccgctgccagtagcccgccacgctagcatcaacctaggccaggcccgccgtcgactgacgcctcgccatcatgctcgcggctgttgctgcagccgtggcatccatctg

SEQ ID NO: 347836 - DNA, 227 bp, Zea mays
gaccacgcgtccggagaacttataaacactgttagctccctagacatttaatgatgctttaatatacgaggattgacacttactttctatttaccaacccatcctttgagctcgaaatatcctttcatgatgattggtttacctttttgggttggaaatcaccgaacagtatatttttaaaacaaattaccgtatgcaccatgatgcttgcgccttttgattgctct

SEQ ID NO: 347837 - DNA, 202 bp, Zea mays
  unsure (1)..(202): unsure at all n locations
atttattcttcaatcgaagtagtacatgatcacttgatcaggattgntggtgtactcgatggcggggagatactctccccgagcgattacatcttaaacactcttatacatcattccatcctgctcggtccgttgctacctagacatggctcttttcttgattttgactccattgaccgaccaccttgtagagggggtgctt

SEQ ID NO: 347838 - DNA, 144 bp, Zea mays
aagaaaatcactatcacgaactttaacttgcttatgaataacacacaccgtaacggaatttcgcagttttcaaacttcgataatgttactcatttattcatctacaactacaaaccacttactccttatcggtttggcattaat

SEQ ID NO: 347839 - DNA, 84 bp, Zea mays
taattataccaccatatttatctataactttcttattacctccacacactttagggcatattcgtgagtataaaacctacaata

SEQ ID NO: 347840 - DNA, 190 bp, Zea mays
gcttttaataattggcgtcatctaagccatgcaagcatgtgtgctttataagtaatcatcttgcgctacgctcgtctgtttatttgtatacgtaagtactgtacattgcatgcacatgcactctcatcacctgtaatgttttacttgaaatttattcaaaaataaataaaggctgtctttgccacttgtt

SEQ ID NO: 347841 - DNA, 58 bp, Zea mays
ctcttttttatcaacctcttacatcctcattcttaaattatctacactactaaatact

SEQ ID NO: 347842 - DNA, 431 bp, Zea mays
  unsure (1)..(431): unsure at all n locations
gcacggcaggatccgccgacgccggagaagtacgagcaggcgggtgcgcccaggcacggccggtccggctctctgaaggcgagtgcctctctctctccctgtgtgttgcaaggtttcttcgtgcatcgtgatggtggtgacgatgggtgtggtgtggtgcggtctgtgcaggcgaactcttcgaggacaccgggcggcgagaggctgggcagggagaggtcggaatcctgcgggaggaactggctggaccgctgggtggaggagaggtacatggacgacgagaagaacgccaagattctcgaggtggacaacggcaagccacggcgccggtatgcttccaagaggcgcggcggcggcggcggaaaccaccaccaccaccaccagtcgncgtgctcgacgacgatggggtccgagcagaaacagccgagcta

SEQ ID NO: 347843 - DNA, 173 bp, Zea mays
actcttttcatcaacctcttacatcctacatttgaaatcatctataatactaaatacgttaggattcattgccaactttcataagtcaacattaatacatatttaaacctaacacttaaaaactacattatattaagactttctttaatcctatcatatccatattctcaaca

SEQ ID NO: 347844 - DNA, 269 bp, Zea mays
gggacgcgtcggttcctatctttctatcaagtacatagagctggaagttaactaggtagcgggacatgccacatcaaaaacacaatactcacttaggaggacataatacttgtgcaagtatcgatagttaatgcaaccgacaacaaccacatgcttgaatcccataattatagagtgtccatcttagacaagacatcgcatgaattctgccatgagggcatactgatattttgtcgcgaaacgcatctattgctaccatgctatacaca

SEQ ID NO: 347845 - DNA, 210 bp, Zea mays
aaaattaccgtaatgcttaaaaaaattattaaaataaaaaactaatatcctaaataggacgaatatataaaaaagaaacataaattaaggtcgtacattctaaaggatccaaacttacttacgcgcgcatgcaacgatatagattttatatactgtcacataaattcaattcacatacctattttttacaacgtactaacttgaaaaacc

SEQ ID NO: 347846 - DNA, 112 bp, Zea mays
accggaattgccgggtcgacccaaccgacgcgtgcgtattctcgaagttcaaaagccgctggaggatatcactgacagcctcaatgtcgctggggttcgagcctcgaattca

SEQ ID NO: 347847 - DNA, 316 bp, Zea mays
ctcgcaaactgactgaataatttgtgcttctaatgatggaactgtttttgactaagagggtgatattattacaacaattcatctttgggagaatttccttgcaaaccttggtccaatttttacaagactgttatgttactggatatgataattaggacgataccttgctctgaccaactctatccggatagattgatgtgctactagctcaaataaaagtttgatgttcgtatgggtatgacactcgtggcgatgttaatctcaacctgctatcatatccagtgagttatgtattctgatacaagatcaccaatga

SEQ ID NO: 347848 - DNA, 299 bp, Zea mays
gcgtatgtttacccagcttgacgaggtagccacacgtctacagtcggcatgttccatggcgctacatcgacccgcgcccatgtagctacacctgcatgccctcctacaagcggctattagcaacagggatgccacgcttacaccaactggaatggctcctgctcttccaccaccgcttactacgcggtaggttcagtcaaggaaacgaagacaatcgctgatgaatgacatgacaacaactggtgatgccaacgactcgaaacccgctcaatggccctgttttgtagcgactgactaca

SEQ ID NO: 347849 - DNA, 301 bp, Zea mays
  unsure (1)..(301): unsure at all n locations
acacaccttcgggccaaccttggaccaatggatttgaatgggggccagggatcgacgtcgttggctaaaagtggcatgtgtggcctacctagcgtggttggcagtcccgccttttggtttctacagaataaataatagcttaattggggtatgaatactaattggggaatcggttagtatcatataaatggatgattggagtgtgcgtggtttttaatatgcatgttctatgatgtcctttattccttttaaaatattattatttatatgtagaagttaaaaggtttacagttnanaaaaa

SEQ ID NO: 347850 - DNA, 270 bp, Zea mays
ctcactgttaactatcaagttgactaacgcttgttccgacagagttgtatcacttgagtgctccaataacaaatgttatcgacgatgacttatgcaagccatatcacggtatattattgactgtctggaatatctctttactatgcgctcttcattgttatagcatattgcacagatgttgatctaatgtattgccaccagacaaatcagctatgcaattgcattcagatcgcgtgcgacctgaaccgcgtgagcgcgtactgcgccacg

SEQ ID NO: 347851 - DNA, 371 bp, Zea mays
gttggcttctcctccccctccggttcgggttcgggttcgtgaggttctccggggttcgggttcgtgggtgagcggatcgagatggcggcgtcggatgttgagtaccgctgcttcgtcggcggcctcgcctgggccacggacgaccactccctccacaacgccttcagcacctacggcgaggtcctcgagtccaagattatcctcgatcgggagacgcagaggtcccgcggcttcggcttcgtcaccttctccacggaggaggcgatgcggaacgccatcgagggcatgaacggcaaggagctggacggccgcaacatcaccgtcaacgagggcccagtcccgcggcgggccgtggaaggcggcggcggcgg

SEQ ID NO: 347852 - DNA, 317 bp, Zea mays
cggacgcgtgggcgcgccccccggcagcagcgcggcccaagggctgctgtcattccggggcggacccggatctggggtttgaggcggcggagggcaagatctggtagggttcttgggctcgacaggttcgtattaagctggaaattgtgtggatctagtcttgtagcagtagcttattgcttgcccttccctcttcatgtacctacagatctactggcttagtggtggtttcgattgatgcaccggctgctgcgaagattagcaaattcatcgagattgtaccatatggctgaatgtagtgcccagtatcgagtaat

SEQ ID NO: 347853 - DNA, 339 bp, Zea mays
gtcgacaaggcggaagaagaaaaaagaaaggcccgagctgcccgatttgcagaagcgtgtggtggatcagcagctcgggaaaacggcaaagacagctcgaagccggacgcagccgctgttaccggcacagcttgatttgagcactctgccttggacgaggttcgttaggcaatgctgttaccctcccagaacgacgttttccttaccgagacctgctgctgcagtttccctaacatgaaaagaatcgacttggtctcctgcaagtctcagatatattatctcctaggagactttggtgaagccatagcttttgtacaccactaaccgcatggacggggg

SEQ ID NO: 347854 - DNA, 114 bp, Zea mays
acccacccgtccggtccgcaggcagcgcagcctcaacccgtcgccttggcaagcaaccccttggtcttggcggaaggcttcttcttcttctggccaacggcttggtcggcaacc

SEQ ID NO: 347855 - DNA, 327 bp, Zea mays
cttccggccgcagaaaaaacacactcatccgcttaaatttcggagtaagcatatagttaaagttaggggcaatgccaaagaaatgaaaacggccatgagtgggaatcatgattcagtcgtggatcatgccagaatacatgataagagtaaacggcatgaagatcctgcacgttcagcaaatgcccaaaatgccacgaaatctcaaaagctcacattctactgaaaagatgatggactcggtaatctgcacatcggcatgtatctattctagttcaactccatctatgttactaatgactgcttctgaaagactccttgtccatatat

SEQ ID NO: 347856 - DNA, 162 bp, Zea mays
gggccgacccacgcgtacggacatacccacccatgactctccttcttttttccacccattcctttctcatctccccccgcgctctataccctctagctctctccgcttccaccaatttattctacccctcctcaaagcttcaattcaccaacctttcctccc

SEQ ID NO: 347857 - DNA, 319 bp, Zea mays
ggagctcatcttcaagttccctggctgcaagaccttaatcacgtcaaggtgcaagttccgggggggggttaaacacacgtatgagatccacttgctgcactagccggcggactctgaccgactgctgccgcactacggtcaccagcattgggttgcagaggccggcggacagacatggctcaagcaagtctgtgcagagctcagaggtctctatctagctctgatgtcatcggcgcgtcagttcaccaccagtcatctaagatttggattatcacccaataccagatgtctctacgagaggacatttctgactgtcatg

SEQ ID NO: 347858 - DNA, 133 bp, Zea mays
gtccggacacctcggcccctttgggacttgacccaaaggcccttcaaaaaacttcaagggggggatgggaacttttacccccccgtccaaaaaaaaaaaggctttggttttgccaaggcccaaaatggccaac

SEQ ID NO: 347859 - DNA, 339 bp, Zea mays
gttggcttctcctccccctccggttcgggttcgggttcgtgaggttctccggggtgcgggttcgtgggtgagcggatcgagatggcggcgtcggatgttgagtaccgctgcttcgtcggcggcctcgcctgggccacggacgaccactccctccacaacgccttcagcacctacggcgaggtcctcgagtccaagattatcctcgatcgggagacgcagaggtcccgcggcttcggcttcgtcaccttctccacggaggaggcgatgcggaacgccatcgagggcatgaacggcaaggagctggacggccgcaacatcaccgtcaacgaggcccagtcc

SEQ ID NO: 347860 - DNA, 200 bp, Zea mays
cccacgcgccccggcaaatattttccagtgccaacacctgcactatctacctaccaagtcgctacacttccactgaatgcttttattgaaattgacttcatccctactctctaatcagaacatccaacccctcatttaatcatcaataatcacaccataatcagcggaagacctacctgtaccacgacaattttttaaaa

SEQ ID NO: 347861 - DNA, 205 bp, Zea mays
ctcgccttcccttcccaaccagcccgcctttttttttttttggccttttttctggaagcgggggccacctggcagaagcaggcaggcccgaccaaatggcgcctttaggaaacggcggaactgctgccgcgggggcgtccaacaccctgtgggtgtcgttcggcgagatgctgatcgacttcgtccccgacgtggcccggctgtc

SEQ ID NO: 347862 - DNA, 349 bp, Zea mays
cgtccggccaattatttcccggggccagaacctgcacaataaacttaccaagtgccggccttgcagcggatggcccggttggaaatggatggcttcgttgttctttaatcaaacaatccacccactcattaaacaatcattaaccacccagaatttgggggtaaaggtcccggtccaagttaagggtttgaaaccggcggttaacaaactttggggtccgggataagggatggggtgtgtggtgagtgaacatgctttagtagagaatgtgcgtggttgtacttgattctcgtcttaacagaagtcatgcatacataatgctatgttcttccatagatgatggctccca

SEQ ID NO: 347863 - DNA, 194 bp, Zea mays
cggacgcgtggggctttcttaacattttctaggaggaaaggctcagtttggtttctggggttagagcttccagattttttgttgttgttgatttgttgatccagtcttgtagcagtgtcatgacttacataaagttatcctctactgaaaaaaaaaaaaaaaaaaaaaaaaaaaaaaaaataaaaaaaaacaaa

SEQ ID NO: 347864 - DNA, 107 bp, Zea mays
gccggaatttcccgggtcgcccacacccttccgaaaaaaaaaaaaaaaaaaaaaaaaaaaaaaaaataaaaaaaaaaaaaaaaaaaaaaaaaaggggggggctatat

SEQ ID NO: 347865 - DNA, 288 bp, Zea mays
  unsure (1)..(288): unsure at all n locations
tatgcaatcgttgtgtaagtgagttctgatcataacacgtacatggttcgcaaaagagacgggtttnttgaacaaaaaataaaataaaaaaaaaaaaaaaaaaaaaaaaataaaaataacaaaaaaaacatacacatacattatcccttattctccgttcccgcttcttattttcctttcattcgctcgcctcctttctacttcatcctcacttacttacccttgcgtgcccccttttttaagcttctattttttcatctccccttcattccaactttccctttcttt

SEQ ID NO: 347866 - DNA, 214 bp, Zea mays
cccacccgtccgatgatcccagccggcttcgttttgaccataaccggagggccttaaggggggttttgggcctgggtttcaccccaaacctaaccaggcctggactggggtccaaccccttcggcagggaattattggttaaggacctgggggttatgggggaccatgaaaatgtcactggttggattttgccgaattttaaaaccttggtgga

SEQ ID NO: 347867 - DNA, 327 bp, Zea mays
cgggttggaccaaggcgtcggtggttgggggtttttttggtttttttttttattaattgggtggaaatggatgggttttggtggggaaaaaaaaaaaataaaaaaaaaaaaaaaaaccaaataaaaaaaaaaaaaaaaaaaaaaggatagaaaaaaaaggaaggagaaatttgaacatgaaagaataaaagaaattagaacaaaaaaaaaaaaaaaaagtgtgttttttttgggggggggggttttaaggggacaaagttttattaccgtgggttggaaattaaaaattttttttttggggcccttaaattaaatttatgggggggg

SEQ ID NO: 347868 - DNA, 261 bp, Zea mays
  unsure (1)..(261): unsure at all n locations
gaaaaaaaagccggccgaccgggcggtcgggtcaagttcttgttatttaactttttaatcaagactaccttacaacaccgccgcccttttctaaaaaactacccccttcntaataaatttccacacattctccaaccattatatccccaaaatccataacaacttataaataaccctgttgcccccaccttccaattctgcctcttgaaaccaaaagcaacaccaaattctcgattccatacaactcgtatgcttgtattc

SEQ ID NO: 347869 - DNA, 269 bp, Zea mays
cgtccgaatctgtgctgcccagaaatgattaataaaactgacacgtatgccagtattttgtaccattcagcattcaccgatgagatgacccaaggctaagctcaaagcccagactgttattcggaatcaacctatcactcaagactctagatacaaaaaggaccagagatatagcgggtggaagcttttttgttcgggtattgtcacgatttatagacggataaagtaaaatatttatagagtatatgtgtacgtgtaattgtgtaaaa

SEQ ID NO: 347870 - DNA, 175 bp, Zea mays
caaatattcgagaacggacggaatccttgtcggctgcagttcatttttcggagaggtggcgcggtcaccttttattcttaattggcgtcaaaagaatgtaaaataccttattctggatttggatagtcaatagtggtggcgttatttgcacatgaaggaataaagacattagaac

SEQ ID NO: 347871 - DNA, 188 bp, Zea mays
aataaatatagatagctagctgacgctctatagaatacaagcttactcacgcgcgcgggggacgtcatacttattatataaagccacttaaacgaaatactcaaagtgcccatttacaacctcatgactgccaaaactctggcgtaacccaacttaatctccttcgcacacattcaatattatcccag

SEQ ID NO: 347872 - DNA, 292 bp, Zea mays
ccaacccgtccggttctggaggctgttgcagttaacatttaagggagtgggagaccgcgaccccaattaccggcttgacttttgttcttgcaagccgagacccaaatttaacttggcaaggggcctttagtggccccgggggtggttttacttaacgtttcaacggaattggccgaatggccctaatggggtacaataaaaaaatatgcgtatactgctaaaatagtttagcacaatatatatatagtgtaatagaagaaacaagcaaggcgagcatttcgttcgtgatcgt

SEQ ID NO: 347873 - DNA, 296 bp, Zea mays
  unsure (1)..(296): unsure at all n locations
ccggaacggaatggccgggtcgacccacgcgttcgatgcaatcgtagtgttagcgacttctgatcataacacgtacatcgttcgctttttggaggatttaaaaaacaataggctgctttttggcttactaaagaatgccgcctggtcgtggtacatacaccatcatggtattttaccctgattcggattgtgttgtgtatgatcctgtaaaattncgtacaccctattgggtgagcacacactgacactgttgcggtcggaaattctggtaccagttgtctggattgctgaaactt

SEQ ID NO: 347874 - DNA, 451 bp, Zea mays
ccacgcgtcgcgcttcggattgaataatactattgcggtagctcgttttattattttgaggctccaccactattttgtgacccgccgtctacattaaatatcataatgcgactaatacttggtctaggctgcttgcatgtcttgtcacaatatggtgcagagtaataccttgagcttctgattgacttcggaaattacacaagaggttgctctccctttcgttactcttttcatcttttttggcctatcttcctggacgtgtggaactgcccatgataaatgtatacctagtttgagaattaatcaaagtactggaaactacatttaggtttttttggtgctggcctctctctgttctattgtaaggagttccattccttcaaatattacttgcagctgcacattccaaattcgccttaaattttgcctcctctttattaacttgtttttc

SEQ ID NO: 347875 - DNA, 239 bp, Zea mays
  unsure (1)..(239): unsure at all n locations
cccacccttccgaaaaaaaaaaaaaaaaaaaaaaaaaaaatttaataaaaaaaaaaattaaaaaaaaaaaaaggggaaaaaaaaaaaaaaaacaaaaaaaaaaaatataataaaaaaaaaaaaaatatcaattttattgggcccgggcttttttaaaaaaatacaacttaaaaaccccccccttttcannantacaacctttccccccccccccccccacaaattacctttttttttgg

SEQ ID NO: 347876 - DNA, 88 bp, Zea mays
attattacaacacgaaaagttgttcaagattgtaatgtgcgggttattcgtaaagggaaagaaatatatgtgggttcgcttgattcct

SEQ ID NO: 347877 - DNA, 153 bp, Zea mays
cgtccgaattcccggtcgccaacctcctttacctcctcgctgccgtcaggaccccaatcgtggagaccctgtcccggggctcaggacagggatgaaaacaccccgtcaaacaaaccgcccgcaggcacccttaagcctctctctcgcacggac

SEQ ID NO: 347878 - DNA, 390 bp, Zea mays
  unsure (1)..(390): unsure at all n locations
aaagaacaccagactaatccgaggctgtttgaggcccaactggtccagtttcttggttcaggtgctgctggttggccatgacgcacgcagagcaggctcagctcctctggggggtagtggcagtctgttgcttgttttaagacgatgttgctccggacaagcagctttgtcttctgcacgaggaatttgtgcacacatggcaatgaaaagatccttgaactgctgtcttgagctgtcgttctcgctccatggtttccaatctagttttgatttgtattctctgttcatctaattgttccaatacggtagtagacacatttcaaaacccgtgtttttttgttttttgtttgcttaaaaggcaaaatttacttaagtctncatgcatacacg

SEQ ID NO: 347879 - DNA, 117 bp, Zea mays
ctgattacttacatgtttagttgtttaaaaaaataaaaaaaaaaaaaaaaataaccaggggtaaatttataaaaataaaattattaaataaatatataaattaaaatttttaataat

SEQ ID NO: 347880 - DNA, 177 bp, Zea mays
ctctgcctccctccctcagatcctccctaagattgccatggcggaccagctcaccgacgaccagatcgccgagttcaaggaagcattcagcctcttcgacaaggacggcgacgtataagataacatgttaaagctcaagcttctagttgattgcatgattggatttactgtggaggg

SEQ ID NO: 347881 - DNA, 205 bp, Zea mays
cggaattcccgggtcgacccacgcgttcaaaccaaaccaaatcttgtgatctagctccttcagatatatggagcgtgtatgttggggtggctatatctacatgtcttagtttagtggatataccctttggtccccaaaagatgtaggccagtattgtaacactactattaatggttaaggtgaatgttccttgtagccccccaaa

SEQ ID NO: 347882 - DNA, 184 bp, Zea mays
gcagtgttgaagcgacaaaagaggatgaagaaaagatgagcaaagatcaatcagcaaatgttcatgctgaactgccaaaagagggtcagataaaacttggcacagatcatccaattgttaaccatggcgaaccagcaaaagatggtgatgaaaatattgaacactgatcattcagaagctgttc

SEQ ID NO: 347883 - DNA, 246 bp, Zea mays
  unsure (1)..(246): unsure at all n locations
ccaatgtttagagttttttgagacctatatgccggttttggnttttcagtggcacaaattaaaaattactggaggtattggtagttggatttgggaaacaggaaatatgtttgggtggccctggtnttaaccgaaacttccaggttcttcttggtcaattttttcctttaattcttataggtctggtaattatttgtatgcccgtatgaagttatttgaagaaatgatttctgcattttttgaaaa

SEQ ID NO: 347884 - DNA, 282 bp, Zea mays
atttaccacacctcttactagatatattaggaatagacaactgatgttcagttggcgaactactctttaccctctgatctgatgatgctattgtataccagactcttttgaagctctttaactcatctaagtagaaagtagcttttaatttgaaaaaaagtaatcttggttgggtttcctctatcaatgtaattatgttcatgtcaccagtaccattcaaaattcactaaccatctatatactggactaccatctaattcctcatactcatttttagtactt

SEQ ID NO: 347885 - DNA, 328 bp, Zea mays
aaaaaaaaaaaaaattaaaaaaaaaaaaaaataaaaaaaaaaaaaataaaaataagggaggggtttttatataatataaataaataaaaattattttttggggcggcctgtcttgaggttccttgctttcttcccctttcttgcctcttatttcttttcttttgtcgtccctctaattcaattctttgtcctttgtttacatcgttttatctgggaatttccttttttttcctttcttttatctttgttttatttatcctcttttctcctgtttggtgttttctctattttggcccttttctttttctccctttcctaactttttttc

SEQ ID NO: 347886 - DNA, 411 bp, Zea mays
cggcaaggcagtgaacgtgccgtcgtctctcttcggcgaggcccgcgtgacgatgcgcaagacggcggcgaaggcaaagccggcggcgagctccggcagcccgtggtacggccccgaccgcgtgctctacctgggcccgctgtccggcgcgcccccgagctacctgacgggcgagttcccgggcgactacggctgggacaccgcggggctgtcggcggacccggagacgttcgccaagaaccgggagctggaggtcatccactcccgctgggccatgctgggcgcgttgggctgcgtgttcccggagctgctcgcccgcaacggcgtcaagttcggcgaggccgtgtggttcaaggccgggtcgcagatcttcagcgagggtgggctggactacctcggcaacccgagcct

SEQ ID NO: 347887 - DNA, 181 bp, Zea mays
gcagggtcaaccctggaaaaaaaaggattccaatttcacttctaccaacacaggctcgacattcatttcgaaaatcgaaaatttggcaaagaatttgcggtggaatttgccaaaaaaggatgggggtttggtaaagatggagcctccaaaccccggaaggaagggggtaatggggatcgat

SEQ ID NO: 347888 - DNA, 388 bp, Zea mays
atagcaaccggtccaacactttcacgctcaggcgctcagctctagcaatggctgcctccaccatggcgatctcctccacggcgatggccggtacccccatcaaggtgggctccttcggcgagggccgcatcaccatgcgcaagaccgtgggcaagcccaaggtggcggcgtccggcagcccctggtacggccccgaccgcgtcaagtacctcggccccttctccggcgagcccccgagctacctcaccggcgagttccccggcgactacggctggtacaccgtcgggctgtccgtcgaccccgagaccttctccaagaaccgcgagctggaggtgatccacttcccgtgggccatgctcggcgcgctcggctgcgtcttccccgagct

SEQ ID NO: 347889 - DNA, 141 bp, Zea mays
gtggagtcggcgtggctggggatgctgttcatgtgcgctaactagtaggagagggcggcggcggtgtctcgcgccctctaggcgctcgacgcgctggatggcgcgttccgggactgctccatggggaggccattctttggc

SEQ ID NO: 347890 - DNA, 55 bp, Zea mays
gcgatactaaaccagggttacgtgtggggaaaaaaacatactactaggtcacaaa

SEQ ID NO: 347891 - DNA, 328 bp, Zea mays
cggacgcgtgggcgtggactgcgccgcgccgccgcccgacgcggaggagcccacggtgccgtccagccccagcccgcccaacccggacgcgctggagcccgcgtgggcgctggcgccgttcggctccgcgcccgccgtcgccgcgcagtcccccgcctccgcgccggccccggcgtcggcgctcctgctgctggccgtgccgtggctgctgctgctgctggtggtggtgtagcagttcggtctagcggcgtgcgcgacctgcctgccgtggaccacgccggcctctccacacagctgctgctcctcgtggatcattgtcatgtgcatg

SEQ ID NO: 347892 - DNA, 279 bp, Zea mays
  unsure (1)..(279): unsure at all n locations
cggaaaattcccgggtcgaccccacgcccgtccgggatattattatttgtgcctttaatggtcagaagcaccaggtatcatgttaaataacctatgctatagaagaaagggtgttgataatatcggatgtaccaaagtgatctatgantttgattgggatgatttaccggaagagcccattgaagtggtcttctcgatacccgctgaaggaggagagtacccaattggtttcttgcaaaaagttcgagccctgtctttatgtatgtgtgcagtgggaaa

SEQ ID NO: 347893 - DNA, 114 bp, Zea mays
gaggattgtcacttaaggtatcatgtattttaaaacttgtaaatgttttatacatgcaggttgtaatatttttgaatcaatttttttttgtaataaactccgatgatatatatt

SEQ ID NO: 347894 - DNA, 99 bp, Zea mays
aaaaaaaaaaaaaaaaaaaaaaaataaataaaaaaaaaaaaaaaaaaaaaaaaaaaaaagggaaaaaaaaaaaaaaaaaaaaaaaaaaaaaaaaaaaaa

SEQ ID NO: 347895 - DNA, 137 bp, Zea mays
  unsure (1)..(137): unsure at all n locations
caaataataattttttcgggttgatttannaaaaaaaaaanaaaaaaaaaaaaaaataaaaaaaaaaaaaaaaaaaaaaaaataaaaaaaaaaaaataaaaaaaaaaaaaaaaaatatgggggggcccgtttaaaaa

SEQ ID NO: 347896 - DNA, 268 bp, Zea mays
cgcatattttatcgatggctatgccggtgtagactgcggtgtgcatcgcgcgcaacgtgctctggctgctggacgcttgggtctggacgtgcgtgctcgccgccgatggcgccgcccgccttctccggtcggtcacgcactgatcgatcgatcgtcccccgccgccgattcacggccgtatgtgtctagatgcaaaacgaaagatatcatctgctccacccatatgacctcgtgagtcgatcgtccccttaatattatacagggctcg

SEQ ID NO: 347897 - DNA, 247 bp, Zea mays
ggcaaggcatgagctacacttccgccgccgtggcgctcgagctcctcctggccctgctcggcggagggcagcgccaaaaggaccagctggacgccatagacgccggaaccgggacggagaactacaccgacagcgacgacgccgagtactggggcctctgtcagaaggcacgggccaactgatacggacagcccaacggtgccggccccgaagacaacagaggcgcatgcggattcaagcacacaaa

SEQ ID NO: 347898 - DNA, 51 bp, Zea mays
accggaactgactgtcccgggtcgacgcgatgcggtgcgacagcaccccac

SEQ ID NO: 347899 - DNA, 280 bp, Zea mays
  unsure (1)..(280): unsure at all n locations
cgtccgatgcagatctttgcaaagacactcactgacttgtttatcaccctacaaaaccaatctacgccgtccgtttacaatatcaangccaccatccatcacaaacaatacattccacccaaccaaaaaacgcctcatcttctccctcaatcatctataagatttccgcaccctatcaccttacatcattcacaatgacatcactcttcaccttttgctacatcttattcctaccatgcataattttcctaatacattaactaacaataccatcaccctt

SEQ ID NO: 347900 - DNA, 356 bp, Zea mays
  unsure (1)..(356): unsure at all n locations
cccacgccgtcacggcnnggcggcggcgtgagccaaacgcaggacgaaatgcttatggtgtgaaggggaaggaagccaccagccatgggtgcgactgtcaacttctactcgcaacctatgtgtaagaccgttcaaagaaaaccaagtgcgtcccttatgaagaaggagcccgtcttgatgcctgannactgaagactggttggtgaagtattgggcctgagtgtgccaagcgtgagcctttggaagggtccaagtatgcccactgagcaggatctcgtaattgcttgcaaggcactttgcttcactccttgacgaagaagaaacccccgtcgtatcttttgggggtgaggcacttc

SEQ ID NO: 347901 - DNA, 221 bp, Zea mays
gccaaccggagttgcctggcatcgagtacagattctgatgtggagaacagggcgcctggcatgaatcagtggcatctccacccaactctgatagcctgccacaagggtggaaaagagatcgcagtcgcaagaggaatatcatcctgccaacatgggtgagccgcgggcgcatcatactaaattactaattacgtttcttctctgctcgtccaccgccagtt

SEQ ID NO: 347902 - DNA, 188 bp, Zea mays
cgcaccgcatccacctccaccgcgccgtcgttagagggggaggagggtttccgatggggggcggctaggatacgttcgcctcccccactgccaccgccgccgcggacttcgagatcttcatcaactgcagcgacagcacgcccaagcttcacaatttggcggacgagatggatgccctccgcgcggca

SEQ ID NO: 347903 - DNA, 180 bp, Zea mays
gctaaaaaaaacaatactctccaacaattttttacaaacctaaaaaaccaattactactgttcgtacttttaaactcctcaccataactcaacctaaacaattccactctttacttacttaatcattaaataccactaccaaaactaatccaccttaatctactatgatcatctacatat

SEQ ID NO: 347904 - DNA, 197 bp, Zea mays
  unsure (1)..(197): unsure at all n locations
aaaaanggaacgacccacgcgtccagcctccctttccccttacctacctccctcttctcgcaggccaccaaatacaatctcgccgtcgcttccaccccgattatccctccccccacccaaattacctccaacaaacgcgaatcttaacactacactcatactcgcctctctaattcaacatgaaagcggccaaattc

SEQ ID NO: 347905 - DNA, 389 bp, Zea mays
ccgggccggaatttccggggtcgaccaacccgtccgcccaacgcgagcagcagttgcattggaggcgaggaggacccaccccgggcctcaaggaatggccgttttccgccacctcgccgccggcccaacctgccaccaccaccaccacggcgtcgcggcagccaccgcctccttccggctccatcgcctccccctacccttcgcccccttcgctccgctccgtcccgtcccgctcttaccaggttatgcgactcagcatgacataggtcgaccacgtcagtcacgcgcccatggaagtctaagtctcactaacctgaaaggcctgttcgcagacaaacgctactatgtactgcacacgcgaaaacctcggctgaagacctcagaccatc

SEQ ID NO: 347906 - DNA, 138 bp, Zea mays
ggccattactgctagcgaatactgtgattttgctcttgcattttgggtgcttcacgctcgggtgcaattatcatgtcaaagaaattgttaccctcttgctccttttgttagagacttaatagtattgttttgactggc

SEQ ID NO: 347907 - DNA, 357 bp, Zea mays
ctaattaaacgaggggtctttagggggctaattataaaaaatcaagaggcaaactcttctcgtgaaaaaaaaaaaaaaaaacactataactaaaacaaaaaaaaaacaacaaaaataacctaccatacttcacaataataaaaaataaaaaaaaactacctaaacctaaaaaaccaacaaaaaaaaacacaaaagggcccccattttataaattcaaattttccctcccttcttttccaagatccattttttttttttgtccccccaatttactatcccccccccctgctttcacacttcgtgacttgaaaaccccccccgttacccaatttttttgcctttaaaaaaaaacccatt

SEQ ID NO: 347908 - DNA, 132 bp, Zea mays
  unsure (1)..(132): unsure at all n locations
gaccggaattcccgggtccaaccaacccgtccggcaagaaacgaataacacctgttatgttgtcagcgtcgctactgataatcggttctgttggtgcaatgctactataataatcggttgtggtgcccanna

SEQ ID NO: 347909 - DNA, 98 bp, Zea mays
ccaacgcgtccggtctaaatactgactatgcatgtaatttttttgggttttgaccgtttaaaactggattcaaaataatacctctgttttcaaatttt

SEQ ID NO: 347910 - DNA, 356 bp, Zea mays
aaaaaaacgagtgatcactgaaattaagctacatgtttctctccctctccgctctcccttcgcttccccctcctctcttctcccttctctagttcaagcggagtgcggcgacgatgctccgttggcgttgtccgtggtgtagtcggtggcgacggtgggcgccgaggaggcggcgccgttgatgttgaagccggtggcggccgtcggggacgaggtgaggacgggagggggaggggtgatcctggacgggttgaatgacggtgctgcagcagcgccggcgccggcgccggcggctggggtttggagcgacgcggcggcggccgcgggcgatgaagcgctgcggcgggcgctgtgcc

SEQ ID NO: 347911 - DNA, 253 bp, Zea mays
gaaaaaccggagcgacccacgcgtacgctcatcacaaataaaaagagaacccacttttttttaactgaacaaacacaaacaatctgttgggtttctatcacattacccaacaacaacctttttgttttagatgaaaaaaaacatgcccgaacgcttctatcaaattttgtttgaccaaaccctccatgctattcctcttattacaaaaataaatacatgatcatatggtaaaacacatctctatcagacataa

SEQ ID NO: 347912 - DNA, 219 bp, Zea mays
gggccggaattaccggggccaaccaacccgtccgggaaaaaaaaaaaaaaaaaaaaaaaaaaaaaaaaaaaaaaaaaaaaaaaaaaaaaaaaaaaggggggggatggggggggccgttttaaagaaccaaagttacctaccccggcattccaaggtataagttttctaaaagggaaaccaaaatcaattgactggccgggggtttaaaaccgtgggaac

SEQ ID NO: 347913 - DNA, 185 bp, Zea mays
aaaagggaacctggggcccaacaattttttaattttgcaaatggttaaacacgtttaaatattaacgggtgtaacatgcatgttgtcctgctttatgcatgattatttaaagggggtaccactggaccctactacttattatattatatatattggcaacattaaacgtgccggccggtgtattt

SEQ ID NO: 347914 - DNA, 141 bp, Zea mays
aaaaaacaatgcgtgggggaaatttggaagaagctcaaataggtggacagacattttgaataccagtattcatcccaaaaagatgatgcggtccacataatctggcggtccttgtctataaaggtgccgccaattaaactt

SEQ ID NO: 347915 - DNA, 288 bp, Zea mays
cggacgcgtgggttttggcatgctcatcgccctgccgatcacgctcgtctactacatgctgctcggcctgtgaccgacccgtgggtgatggcaatggcatgccccgcattgctgtaactgtaaagaccgctgctgccactttccgttcaagggaggcaagtgaggagactgtctgctacgacatttgcttggcgcttcaaaaatgagaggctgggggctctctctcttctatctattttttattttttttctaaaactaggtgtgaggattgtatggatggaaagtgt

SEQ ID NO: 347916 - DNA, 341 bp, Zea mays
cctccccctccggttcgggttcgggttcgtgaggttctccggggttcggtttcgtgggtgagcggatcgagatggcggcgtcggatgttgagtaccgctgcttcgtcggcggcctcgcctgggccacggacgaccactccctccacaacgccttcagcacctacggcgaggtcctcgagtccaagattatcctcgatcgggagacgcagaggtcccgcggcttcggcttcgtcaccttctccacggaggaggcgatgcggaacgccatcgagggcatgaacggcaaggagctggacggccgcaacatcaccgtcaacgaggcccagtcccgcggcggccgt

SEQ ID NO: 347917 - DNA, 413 bp, Zea mays
gggtcgaccacgcgtccggtgccgcgccacattcagcttggtgtgcgcaacgactaggagctgaccaaactgacggggggtgcgactatcgaaagcgacagcgactatgcctaacatccatcagcatgtgctcgccaataaggctgccttctctaaggccagtgcagacgacgacaactactgagactgcttgctgtagaaatgatgcgaccaccgtctcgctttgttggaataggatgatgttgtcttcgatctgggaggagtcgcttatacagggcaagagaattagattacaatctgattttttgaatggaatgcgaacgtggctatgaatctcagaattgtatgctcgttcagaaagaaatggaaagacttcgtgatacacgacgctgatgccgcatcatattcatcgt

SEQ ID NO: 347918 - DNA, 474 bp, Zea mays
ccgaaccggacgggtccgggtagagcccacgcagtccgttcggcaaaggcggtggtggtcttggcggaggttgtggctacggtgctggtggcggcgggggccttggtggtggaagtggacatggcatgggtgccggattcgtcaagggtggtggtattggcggtggcgatggccttggtggtggaagtgggcattgcatgtgttcctgatatagcaaggtgggtggtcttggtggcagccacgaaagacgtgatggtagcatcagcagtagatatggcataggatattgctctgggtttgacaaaggcatctgattctgtgttagggtcggcaataagatcgaccaacatggcaactaatgaattcgggatcattaatgatacgtgaagatgacacatacttcttcacaggaattataattcacgtatgcattcattcatgcgtcgtaccttgtcatgtctatgggtgatggtg

SEQ ID NO: 347919 - DNA, 405 bp, Zea mays
agccgtactacatcgccgtcgctgcttcaattctgattatcgctgccgccgcgcgcggtgcagaggcaaaactagctacggccggccgcccagagtgcaacgcgtggcttttgagtcgggtaatctcatcgtctcccgcccctcacttcggtcatcttttgctcctgttcatgctgtcatcccgtctgaacttttaaccacgcaatgcaagcaagcctgcaagctaggatgaggatgatagattggattggataatacacaagtacgcagggagttgtgtaattttttttcaggttggggaagaagatcgaccaacatgtaaactaataagctcggttcaattaagcagatgggaagaacaccatagctacgtgacagtaataataatacatgcatgcgttcatc

SEQ ID NO: 347920 - DNA, 101 bp, Zea mays
gaaggatgcacctgtctgactgactgcaagttactggtaatggtgtggtgtctgactgactgcaagttaccgccaaatacatatttcttgatgttctttca

SEQ ID NO: 347921 - DNA, 294 bp, Zea mays
  unsure (1)..(294): unsure at all n locations
tttctttttctttttttttgataagttgccgacaaacgacagttgtatatttgtaagaagaaatggggaatgttgacctgagagctttcnnnnaaaaaaaaaaaaaaaaaaaaaaaaaaaaaaaaaaaaaaaaaaaaaaaaaaaaaaaaaaaaaaaaaaaaaaaaaaaaaaaaaaaaaaaaaaaaaaaagaaaacaaaaaaaaaaaaaaaaaaaaaaaaaagggggggccgttttaaaaaaacaaaatttacttccccgggattgcaaaaaaaataattttttataaggggaac

SEQ ID NO: 347922 - DNA, 403 bp, Zea mays
tggcatggctggtgctggacggagaccgccccaacgagaagctactgcctccgccatcggatctgcccaaatgttagacgacacgaggaattgctggcctagtcgtcgccatcaacggccgtgattgatcggcccggaccatcttggaacagggattgcgtgctctctaatttgcacaggatatcttaccgtcttttgcttgtgctggggttggtgttatgcttccatttagtggtgtgctttttccggcttgagtcgtcgtctggttagctgtgtgagagacacgggcaggaaggtccgttgatgctactagacagacgccatttttttttattatactttgagttactaccatcttttgtactgcctcagtcctaaaataattgacattcttgtttttaaa

SEQ ID NO: 347923 - DNA, 225 bp, Zea mays
  unsure (1)..(225): unsure at all n locations
cggacgcgtggggagttttgttttattcttatctcctttacgattttttttaattgtttgcttcatttttctccctgtcacaatcaaaccaattatcagtcagtatgcatagtcgtccgctattgctctgtatcttcagcttttgtatgaggatattatatcatttgttttggtatataaatcaaggaacaggccatgtttccagcaggcttgttctgaactnat

SEQ ID NO: 347924 - DNA, 451 bp, Zea mays
gttggcttctcctccccctccggttcgggttcgggttcgtgaggttctccggggttcggtttcgtgggtgagcggatcgagatggcggcgtcggatgttgagtaccgctgcttcgtcggcggcctcgcctgggccacggacgaccactccctccacaacgccttcagcacctacggcgaggtcctcgagtccaagatcatcctcgatcgggagacgcagaggtcccgcggcttcggcttcgtcaccttctccacggaggaggcgatgcggaacgccatcgagggcatgaacggcaaggagctggacggccgcaacatcaccgtcaacgaggcccagtcccgcggcggccgtggaggcggcggcggtgggtacggtggtggccgtggaggcggcggctacggcggtggcgggcgccgtgatggcggcggcggctacggcggtggcggcggcg

SEQ ID NO: 347925 - DNA, 396 bp, Zea mays
cggacgcgtgggtggaggtggagtcgtctgacacaatcgataatgtcaaagccaagatccaggacaaggagggcattccaccggaccagcagcgcctgatctttgctggcaagcagctggaggatggccgtaccctcgccgactacaacatccagaaggagagcaccctccacctggtgctccgcttgcgaggtggtatgcagatctttgtgaagaccttgactggcaagaccataaccctggaggttgagagctccgacaccatcgacaacgtgaaggcgaagatccaggacaaagagggcatccccccagaccagcagcgtctgatcttcgccggcaagcagctggaggatggccgcaccctagcagactacaacatccagaaggagagcactc

SEQ ID NO: 347926 - DNA, 419 bp, Zea mays
cggacgcgtgggataaaccgtcaggtacgcgcgcatacagcatacctccatgcacggcccttcccagttcccacttcccctcggccggtgcccggtggttccaagttttgatttggttaggtcactgcgtattcctcttctgtggattgtctcgcctcttcgaattccccgtgtttaggagtgttaggacaagatggtggccaatggtgatgcacctgctagagggagcgcggcggcagctgcaagcctgcgtaggcgtaggaccacaagtggtgctgctgctggtggaggcggtgccagctcaatgctccaattctacactgacgagactgctgggccgcaaatgtcaccaaacactgttctgatcatgagtattgggttcgtagcccgtcgtgctgtgcttcatgtattcgggaagc

SEQ ID NO: 347927 - DNA, 416 bp, Zea mays
  unsure (1)..(416): unsure at all n locations
cgcaagaacaggaggctgatgccaatcactatggcaaatggacacggatctgggttcggggctggcagagggaagtttgatgttgagaagggaaaggatgcttatccatacctttgggagactgtagaggatctgtcaaaggagcacccgaatggggtagcattcaagaaagcctttgagctgatcgaaggcgccagagcgcgtgggatggaggagaagctacgaaaattcaggctgacagagatcagacaccagctgcgacgtatggaattgatgaaggagacagtgaagatggtgcttgatgcgctggaaggttgactgagtaatgatcttctggtgggtgaagttgtgcaatgtttaaaggagcaatcagtgtcttcttttgtttctagatagagnttctgtgactgaattac

SEQ ID NO: 347928 - DNA, 316 bp, Zea mays
  unsure (1)..(316): unsure at all n locations
aaggnngacccacgcgacgcgtccgcatcaacatgattcttcattaccccatgtttcctctcatcgacaacccatccagcgggggggagcctgctctcccccccaccacccccataatcaagagcttcgctctaccagacaggacgctcatggcgtcgatcaaaatatcagacgctctattgcttagcacctttaaccccatatcaccaatggagcacggcagtttcaacaactcactatctgaaagcattttgtgaaactctaacataaagtcttgctttccctgctcatacgtgcattttaacgcctgcatatt

SEQ ID NO: 347929 - DNA, 74 bp, Zea mays; identical to SEQ ID NO: 79323

SEQ ID NO: 347930 - DNA, 61 bp, Zea mays
cccggtcgcccactcgtgctggcaactgccgtgaagaggtgaggagctgattcgtggagga

SEQ ID NO: 347931 - DNA, 222 bp, Zea mays
cggacgcgtgggtggggaggggcagacatgatctgccatctgaattagaataagaggtatcttgttgccgtctggcaatattgtaacttcagtcacgaattgttatttcagaatcgaagcacttgtacgtactgtgcaatagaatagatgacgcggtcacattcgtattcatatatgttcgcatatctttcagatcgacgtgatgagaaatgtcttagaagg

SEQ ID NO: 347932 - DNA, 312 bp, Zea mays
  unsure (1)..(312): unsure at all n locations
agaggggggcttcgcnnagttgctcccggcggagggggcccaggccccgtgccgcccatgacggagngnngttgcgtgccggagaatnttaaaagaaattacccatgctnnnaaaaacncnnntctgctgaaggggtaagatnngctgcgcttaagccccgttgaagcnntggtggatggtnntctgggttccccaatatnntctttcgcttcttggatgaccaagaaaaaatgccagatgacagggttnttttggagacctganntggtgttagattgggtcgtgggatgaccatctcattataatttcgt

SEQ ID NO: 347933 - DNA, 119 bp, Zea mays
ccgggtcgacccagcgtcgattaccagcgactcacggcgagacaccacaccagacagacagcacggaggcggctcatgactctgacttgcggggctaggcgcgcctgcgcggctctctg

SEQ ID NO: 347934 - DNA, 278 bp, Zea mays
gaccccgaccgtcgtggcgaccgaggaagcgccggtggtggaaaccccggctccgcccgccgtcgtgcccgaggaggctgcccccgccgccgaggccaaggtggaggagccagctgccgccgctgagcccgaggcggcccccgtggcggcggaggaagagacgccaaaggaggaagagacggcaaaggagccggagccggcggcggctgaagaggtgaaggaggaaacggcagcgcccgctgccgagacagaagcagaaccggcagccgctgagcccg

SEQ ID NO: 347935 - DNA, 342 bp, Zea mays
gacccacgcgtgcgcatttattaagtacctgctgattggcgcactgggtccgctggtcataacgtctaaagaggatgtatgtcaaacttcatggccatctatatttttctcttattttgcaacatcacatatctatgtcttttttgcttttaatatataccgttctgtttcttccactatcaaacatttttaattctttattacttcttgtactccttccttatattcttattttcattttttattaacattcctattttttgttttatttttttccatctctctttattttatccacttttctctgttttctttttctaatcaaataactaatatattttt

SEQ ID NO: 347936 - DNA, 266 bp, Zea mays
  unsure (1)..(266): unsure at all n locations
cattccctcttttttacantttatatatactatattaaggtactttttctatctggtagttataaatcacatgaactgcttttcatcttcctccaccttcatctccatctacgattgtgtcttgacaaaatccaaatcccttcagtactaattcactttatttttatttacaaaaaaccacaatnttgttcaatctctctactaatgctcactctgtcccactcagtactaattaacccacctaagctcactttgtcccatctaat

SEQ ID NO: 347937 - DNA, 312 bp, Zea mays
  unsure (1)..(312): unsure at all n locations
cgcgtncgctcgaagccaccatcacaactccacatgttctagaacctaataacctgcagacgagagggtgatgttctcgatgaggagatggccgacgccgctggcgacaggtgcgaggcgctagcaacgcacttttcgaagggcagcctgactgctctgccgtgggcgactgccaacctgctgctagacctccaccacctgctgatgctacacgtaatcaacgattcccgactactatcatagcgaggccattctctacgaatacaacagctccccgataattattctctctgaattctatgaccctatcat

SEQ ID NO: 347938 - DNA, 243 bp, Zea mays
  unsure (1)..(243): unsure at all n locations
taccctataccttccccaagaacctccacgtngattttatacactggggatggcccattctcttcccgctcctttacttctacccagaactgctctcccacaacatcctcaagttctgcgagccaatttacttcaatgcgatctcccatatcttcaacgagggcggactgtactacctaatcaaccctatcctcctccacgcgcttatcatcctacccatcttcacgttccaccatgtactca

SEQ ID NO: 347939 - DNA, 241 bp, Zea mays
cacgtctaagttgaagaccaattttttgggaaatccagtggaaattcacccacttggaaggactggagtgacactaaaaaaatcttgtgtcgaatttgattttgtgccaccactaacagaagttgaccgccgggctatatgtgcacacttgggttgattttcctggagagatggttacgacaaacctacaactgtagacaaagttgtgcttttatttccagtcatgctgctggtttggggc

SEQ ID NO: 347940 - DNA, 366 bp, Zea mays
ctaccagctatgccactaccacacctgcacccgttttaaaacctaggcccctccctctacgtcggccatgttcttctctaggagctcccccacgccgatggccaaatgtgcctgactctaccaacgctcttctcgaagcgtcaccccgctgatctgcactccgtggagaacaacctcctctctgcctaccaccacctcctgttgctcctcgtcataaacgagcccgactaccaacagatccagaccatcctcttcgtatacatccactccccgttgatcatcttctcagaattctattaccctatcattgctaagaactatctatcaaagtcggacatataaaccttggacaattctgaacactac

SEQ ID NO: 347941 - DNA, 315 bp, Zea mays
ggaggctgctcttcgactgtgtcaatgaatcgttgggcgcgagatgcgcttactacttcggcggtggctacggcctgtggttcacgggaacggcggtcctgcagagcttgtcggcagaagggatccaccgagagatgaccagcctgcaggtcggcgaggagtggatggtggacgagctcgtgtacaggagatgagtggtcctctggggagctgggtcgacttcaaggtggagtcgtaccaatgcggcggtgacatggcggcggagctgctctgctccttgatcgactaaagtggtcgctgatcttcttgaccacc

SEQ ID NO: 347942 - DNA, 380 bp, Zea mays
  unsure (1)..(380): unsure at all n locations
ccggnnccggaaacccgggacgacccacgcgnccggaagaaaaagaccagacaancnnccccggcaaacaagaccggaccaaaggaccagcagaaggccgggcccacaacaaagagagggaggcgcaaaggaagaggagcaacacggacacggcaaacaacacncagcgcagcggggagagccagaacggcgacaaaggacaacaggaggcagnggaacaacgcaagccacagaccacggcaacaaacaagaaaacaaaagacaaggcacgaacagacaggagagcagaaaacaggaccaacaaagggagccaacagacaaacaccacccggaggaaaagggaggcgcaacaaagaaacacaaaggaaagaacacggggc

SEQ ID NO: 347943 - DNA, 348 bp, Zea mays
ggaaggccggggcgacccacgcgaccgagcacacggagaggcgcccgaagcgggcgcgaggcgaggggagcacgaagggagccgggggggaggaacggccgagaaggcacgaaacaaacgcccaccaggagccgaccggaccggaccggccgagcaaaggaaaacacaggaagcaagggcaggccaacacagaagagggaaacacggccagaggggaagggaaagaggacaagggacgcaagaggggagaaggcaaaaggaagaaacggaggagcaaaacgcaggaggggggaaagaaaaaaaagccaagcaagaaacaggagcagaggaggaaaaaagcaggggaca

SEQ ID NO: 347944 - DNA, 355 bp, Zea mays
cacaacccctatcctaatcttcttcctttctaacctttccggtcctttattcatttctcgtctcttcaatattcatatcttttataatacccttaccttcaatactatcacccttaatttttaatcttctgacaccatttacaattttttttctaatattcattacaataatttcattctctccttaccatatcttcttatctttttcatctattaatttatatacttactctcactttcttaacttcaacatttattatgatctaacacctacatttttatcttctcctttattataatcatactatatctttttcaatacctattactttcaatacaattcatctctttattt

SEQ ID NO: 347945 - DNA, 266 bp, Zea mays
tgatagcatatcttgaagaggcaacttttctatttgtagtttacgggtctattcaagataggaaggctatctatacataaaaaatattgaaaacaacatattatgctttggaattaaataaaattaaattcaagttcacctaattgatggtggtgtcatttattttttttattctatttatcactgtatatgtcctttatttctatatttttctattttaaatttatatactttatagttgttttttcacgttttgcctactatac

SEQ ID NO: 347946 - DNA, 234 bp, Zea mays
gctcccgcttaacgctaatcagtaatgacagtggtttttcccagcgcttgctctggcggaggtttcatgggctcatgaaggagctctttaccatcgcgtgttctatagctgcacggctccggggctgctgcacatggacgtgccaaacggtgcatagtgctcgtgaggccataatgtatgaacatggcaaggtgtggttgttctcatgtataaagcctatctctttgttgactc

SEQ ID NO: 347947 - DNA, 374 bp, Zea mays
atgcattcatatttactttcccacggtaaatttaataaatcatgattttcatttatccaattatttcatacatatcctttatcgtatctcctctgctttatattccatgcaaattctttactcatgtattctcatactcatcaccttctataaatcaagacatgctatttcattcttgaatgcaaatctttatacacttttcaaaattcttatttttaattcatttaacttaacccaacttatatatgctttcctcatcttattgtatcataacaattttctgcttcttttgttcttattacttaactacacacatttactctttaaaaaaaatatttttattatttttttaaataaaaaaaacaaaaattttc

SEQ ID NO: 347948 - DNA, 434 bp, Zea mays
ggcttttatcattttatgatgctgcagttgattatttgtccaccacaagagttataccaagacttgttgtggttgtcaagggatctactaaatagaattgtggtcagagttgtctgtgttgtctttctgttaattgctggcaaagggtgcatttgctgcccagatgatcgatctttgattgccctaatagttcaaaacttgaaatctcaagcatggactgatgtggatctgttatatgctttgaattatctatagtggggtctcatagaaaatcttattatgttgtgttctttttataaattcaaacattatgtttttctttgtcttacttgactggatcttcattgttctaataattccatgtttctttgcgagggtaacatttactattttttaaaatataattgattcttatatatcttataattatttta

SEQ ID NO: 347949 - DNA, 183 bp, Zea mays
aaagaaaccaccggagcctaaggtgatatgcattcaaagccgcgtgcccctgcataggagggcgtggaggaagatggcagtgcatgctagggttagcactggtagactctcttctgcactttcattgtaagctactgtccctactagttttggatcttctgctatcttttcgtgaagtgtttc

SEQ ID NO: 347950 - DNA, 141 bp, Zea mays
  unsure (1)..(141): unsure at all n locations
cagaaagcacangcaggacggagaagaagcaaagagacgggcaacgagggggcggaaacgaagcgaaggggcaagcaaggaccgaccaaaaagcgggagaggcaaggacgaacgcagaaagaagaaggaaggaggccacga

SEQ ID NO: 347951 - DNA, 184 bp, Zea mays
  unsure (1)..(184): unsure at all n locations
ccgggccgacccacgcggacgagaacacacaggcagacgcgagggcggacgcaaggganccacaaacaaacagagcgggggggggaaaaacaancgaaaaagggcaaggaggaaaaagccacaagagggaaaccaccaaaggaagggacagcggaggcgccgaaagccccgaaaagacaaaaag

SEQ ID NO: 347952 - DNA, 199 bp, Zea mays
aaatataaaaaattaattaaaaattataatttatataataattaaataatttaaaaaaaaaaggtatataatattatatataaaatataaaaattatataaaaaaaataaaaaattaatggggcggcctttctaaagttttcaagtttatttactctatcatgcaatatattatttcttttattatttcccctaaaatt

SEQ ID NO: 347953 - DNA, 340 bp, Zea mays
  unsure (1)..(340): unsure at all n locations
aattcccgggtcggacccacgccgtctcggggaggggttttcaatgagggtcannactcatgcctgtgtatgatattctcttcaaaanntctctcatgtgaacagagcgaaannattagataccctcatatcttctnnggtgattcttttagtagggctgtgtcgatgtcttttgcttaactgacatctgacatttgcctcatatcccaatacttctgttattatgtgtcagaacttgaatgaaatncgacatatgtcacacctaatatttattttgtgcgcgaagatgatgcaaactacccgcaatcatgcaatcgttcntgccgacgagcatngggca

SEQ ID NO: 347954 - DNA, 289 bp, Zea mays
gagcagagacctgagctgtccttcctttacggacggcattctgggtcgaccgcacgatgtcggggcgcacatgggacctgcgacttactggacccgacgcttacctgcaacacgggtctgacccagcagcgccacggccgtcagggcaccgcggaggtctggaagacgacaagctacagacaggactgtggccccggctggcatcgtctgccgacacaccgtttgacacaccggattaaccttaaatccccacgtgtcgctggccagtgacactcgactgtgagatgcc

SEQ ID NO: 347955 - DNA, 269 bp, Zea mays
cgtccggattcccggtcgaccccgcgctcggaaaaaaaaattaatatataataaaaaaaaatttttataaaaaaaaaaaaaaaaaaaatataggggggaatatatatataaaaaaagggggtaagaaaggtaataaaaaattgtaggtggtaatttatgttgggtggggggttttttggtttaaaggttttttggttgtgtttcggggggtttgtttttttttttttggtgttaaatttttttaaattggtgggggtttgtataattgg

SEQ ID NO: 347956 - DNA, 390 bp, Zea mays
  unsure (1)..(390): unsure at all n locations
cggaattccccgggtcgacccacgccgtccgcgaaccgcctctctcttggcgtcggcaacccagcagcgcagcccaggtagcccagtacttccttggctccagcgcgcgccgctctaaaaccggcnnagaagtaagaacccggggagggannagcacgcnncccaaacnngttccgaggggtttcgcctttctttcggagcgccaaccaannngccacccnnggagcgactttcgccacnncggcgccggaagaaggggaagggcggaagggcttaggcngaaatggcggaccgaagannatgaggctntngggaagaaaagaaaggaagaaaggaattnntagcacagggcccnttctgtcagtaccttaatggatgagtgggttaaga

SEQ ID NO: 347957 - DNA, 360 bp, Zea mays
gtccaagatcatcctcgatcgggagacgcagaggtctcgcggcttcggcttcgtcaccttgtccacggaggaggcgatgcggaacgccatcgagggcatgaacggcaaggagctggacggccgcaacatcaccgtcaacgaggcccagtcccgcggcggccgtggaggcggcggcggcgggtacggtggtggccgtggaggcggcggctacggcggtggcgggcgccgtgatggcggcggctacggcggtggcggcggcggctacggtggcggcggtggctacggtggcggtggtggcggctaccgcggtggcaaccgtggcggcggctacggcaactccgacgggaactggaggaactg

SEQ ID NO: 347958 - DNA, 421 bp, Zea mays
cgcgctgaaccctacggggaggcgcgcggcgacgaagctcctgcggaagaagatggtgggcgaccaggtggcgcagtggtacccctacgacatcaagcgcgacgacccgctcgtcatggcgcgcgaggagaaggagcgtctggctaaactggaaatgctgaagcgtcgtggcaagggcccgccgaagaagggtcagggaaggcgtgccgtcaagaggagcaagtagtcgagctgtgctaccctatcaatgctcatctctgtttctggagcttgccttgttcttacattgctgtaacgtactaccagtgatttgtcgggtgagtgggcgacgacagatgcaaaaaaaaacccaccttttctatcaagtttagcttacagatgttttttttttcatcaaattgcaatgaacccgcttttatgt

SEQ ID NO: 347959 - DNA, 394 bp, Zea mays
  unsure (1)..(394): unsure at all n locations
cggnccggaattcccgggtcgacccaacccgtccggagaaggctaaatcgcatactgcaggcactgaaccgtgctggtggcaaggctggaaacaaaggagctgaagctgctcttactgccattgagatggcctcgctgttccggcatcacttaggctgacaccttgtgtattctgattttctatacacgaggcggcagcatttcctcctatcaagagttttggctaatagagagcttttccgccgcggctagtataatttatttccaagtctgttggtccggtgcggattggttgctttccttctatgagacctgaaaagctcacaagacatatctgtaatgtaaacctgacaccatgaataattgtcgccacgaacgaaatatggtcatgaat

SEQ ID NO: 347960 - DNA, 442 bp, Zea mays
ctacactctgctcagttgtggcagctggtgctgttgttggttttgttgtaatgggtcagagggggcagcaggaccattggcaccttcatcaatttaagttcagtgtcagcggtgagagcatgaatcgagtcattggagcattcagtcgtttgaaggatgggcttcctgggagtgagcaactaagatctatgctgccgactcgcgtactcccacaacagccgctgagcgcttgagtacatgcaccaaattttggtgggctgcttctagtgtcaatttttgttgcttatatgatcttgagaaagttcattctttttcttgtgctacttgattttatgttactgtaaattagtggtcgagacttctcacggtgctgttctttaaaacatagcaaccgtgaagggacatggtggaaacacagagggcactataacaatatgtattc

SEQ ID NO: 347961 - DNA, 202 bp, Zea mays
  unsure (1)..(202): unsure at all n locations
cggaattcccgggtcgacccacgcctcccggtgtttaccacctaccgttgtaaaactttattccccccctttgctactgggttattaagtttggcgttattgttttcttgnnaaaaaaaaaaaaaaaaaaaaaaaaannntntaaaacaaaaaaaaaaaaaaaaaaaaaaaaaaaaaaaaaggccgccccctctaaagaacc

SEQ ID NO: 347962 - DNA, 245 bp, Zea mays
cggtccggattccccggtcgacccacggcggtccgggctgtacaacaactgatgataatgagaggttcgctggaagtcagtctgaaaaaaaaaaaaggggaaaaaatggcggacgatataaaaagaaaacaaacttacgtgcgcatgcatacaacggcacggcttttctataggggcatccaacctcaattccctggccatgggtttacaacgttctgtcttgtagaaccctttatcaacccaac

SEQ ID NO: 347963 - DNA, 84 bp, Zea mays
ggggtctctttgtcgattcagcccataaataaagtgtgaaataaaagccgcaggtggaggcaggaacctgctgattgagggaac

SEQ ID NO: 347964 - DNA, 221 bp, Zea mays
ttcccgggtccacccaacccgtccggaaaaaaaaaaattataaaaaaaaaaaaaatttttaaaaaaaataaaaacttttacatttaggggagcattattttacgtgcgcgtgtcttcaaccttattactttggttgggcgttctctagtctccttcccttctctcttattttttcatcttcatgactttttttgccgtttatttaattcacttttttttta

SEQ ID NO: 347965 - DNA, 228 bp, Zea mays
  unsure (1)..(228): unsure at all n locations
cggtccggaattcccgggtccgcccacgccgtccggggcattgtggcatggtgggacgataggagttagagttgttcataactacaccagatgacgagattgtgttgccccttgtctggtgtagcttgtgtagctntctgcgttgcagtgctgtttgtaaaggcgacttcagagttcagaattaaaacatggttgctttttcaagtgtgctgctaaaggcctgtntgg

SEQ ID NO: 347966 - DNA, 488 bp, Zea mays
  unsure (1)..(488): unsure at all n locations
cggtccggaattcccgggtcgacccacgccttcgccgaccccttggccggccccttggcctgaactgttttccccccttcgaagaacaatttccgggcaagggtgacagcggggcaagggctgcagcaaacgcgctcacagtccaggggtttcatgagccccagcatgggcaagcccattggagatcttgaaatggacaggaagccagtagcaccttgggacgagccaaggacggcggctgatatcagggacttggaagcagggcttgnggtcatgttcgatgagaaagagggcagggtagctcatgcatccncagatctgagcagagaccttccagcagagttcgtggaaggccgatctggtatgcactcgaggcagtcaagctgggttcagagaggagacgcaatcgaagcgtcngcggtgcaaatggctaatgcgcgcaccacggaagctagcaacaaaatgtgcctgagcngtacacattaacc

SEQ ID NO: 347967 - DNA, 195 bp, Zea mays
accgtcgtggtcatgagtctgcctctatttggatcccttcgcgcctggatccattttgtgagcttttgggacacctgtaagcttaactttttgaacttgtggatcttctctaaactaaggtttgtttggtttctagaatcaattcatgaggcggtgtatcaaatttactggaataaatccatataaaattagtgt

SEQ ID NO: 347968 - DNA, 351 bp, Zea mays
  unsure (1)..(351): unsure at all n locations
gaanaaccggggcgaccgaggcgtccgcgaccattctgcaaggatgattagatacttattgatgaagatactgactttggctcaggccgctggacctattgtctcatgccacaccatctcagcagattgccaggatagtgaagatgctcatgattaatatgcccaaattgtgacaagttaatgcttaatgatcatctggttgatttttatgcaaatagtattcttaactgtatagattataatggcgtctaggattccaatgtcatcaaacctttcatgcatgacgatcccatttttactgacccatattttttaaatattcatatagaacgattttacacttaaacaaaa

SEQ ID NO: 347969 - DNA, 64 bp, Zea mays
cccgaccccttggttttggtaacaataataattaatttaaaatgtgaaccattgaatgcgttgg

SEQ ID NO: 347970 - DNA, 165 bp, Zea mays
ctccactatccttcccctgacaaacgcttcctccaccatctttgatttcatgtcggactgtgcgaacactctcctccggatcacacacatgacatcccaatcatagtcactattgagctacttaatcccgacgccaaagcccaccttcacatgcttcaatccacc

SEQ ID NO: 347971 - DNA, 285 bp, Zea mays
  unsure (1)..(285): unsure at all n locations
accggacctggaatgtgccgggtcgacccacgcgttcgcttgcgagtggggtcttaattaggatgtgatattgcttaatttcccccctgtttctactcattttttggcccttgataatgtccacgagtatgtaatagggactaatgaatcaaacgttgttaaataaacatttcattccgttttgctaaanaaaaaaaaaaaaaaaaaaaaaaaaaataaaaaaataaaaaaaaaaaaagaaaaaaaaaaaaataaaaaaaaaaaaaattttctttttaaacataa

SEQ ID NO: 347972 - DNA, 425 bp, Zea mays
ccacccgtccggtttcacgcgcacggacatgaccaggggctggggaaagcgcaccgccggcaaggcggccgacgtcggggcgcggttcgcgctgttgccgcccaccgagctccccacggggaccttcttcaagtggcgcacgccgcagctatactctaagctgtgactggctagctgagctgtcgtccgtcggccggggcgtacagcatttcggtccggcggtgtaggcgtgtagccgctcctcctattcctcctgctgaatagtactagcaagtatcaacaacgtgtgcagagaagtcggtaaccggagtgtcgatctgccaaggtgctttggttgaacactggctcagcccgtttgtgactctcagctatgtgtacaatgtgcgcttatatctgtcttaagatttaggccaacttctgagcac

SEQ ID NO: 347973 - DNA, 169 bp, Zea mays
tgaatccgccgctggacgcctctgctttctgttccggtcgcctggtgccacactcatggggcgatctgaaaagatgcgctctgtctattctcctattacttatccatccgttgggcaagctgacctgcatggtcttatttctctgagtgtcttttgcggccaaactctt

SEQ ID NO: 347974 - DNA, 93 bp, Zea mays
attcccgggtcgacccacccgtccgcaatatcacatcctgagttctactgaaataatatccatttccgtggtattatgttttgttactcattt

SEQ ID NO: 347975 - DNA, 165 bp, Zea mays
gtacattgctgtgattatctccacatttttttatgacaagaggaaccaatgtgaacgggcggtgaattttactgccgtgaggctcaactaaaaaacacccccctcattgccaatgctggtcttgagggcctcacattttaccagcttgctctactatgctccact

SEQ ID NO: 347976 - DNA, 419 bp, Zea mays
  unsure (1)..(419): unsure at all n locations
ttnttttttttttttttttttttttttttttttttggagcagggtaaacacccattccgcaggcgacagtgctattatactgtacatggtcaaagtctcacaagaaggataaatgttcaaaaacaaagccgggcaaacccagcagatcccggggtcttcaaatcaaagaagtatctgagcttgtacggaagcggcaaacacaggcatttgaaggaatgcagaaagggttcttcagatgttcggttacaacttgagggaactggagaaaagcaagagcatgaggtcgcagcatctagcgagatgtcaatgactcaatacaaggacaatattccatcttgcatgagttcaactttctctgcatttctccttctattctaccctctgtcttttgttctctcctgctgtcagacacatgaatg

SEQ ID NO: 347977 - DNA, 409 bp, Zea mays
ggcatctatagcaaccggtccaacactttcacgctcaggcgctcagctctagcaatggctgcctccaccatggcgatctcctccacggcgatggccggtacccccatcaaggtgggctccttcggcgagggccgcatcaccatgcgcaagaccgttggcaagcccaaggtggcggcgtccggcagcccctggtacggccccgaccgcgtcaagtacctcggccccttctccggcgagcccccgagctacctcaccggcgagttccccggcgactacggctgggacaccgccgggctgtccgccgaccccgagaccttcgccaagaaccgcgagcttgaggtgatccactcccgctgggcccatgctcgcgcgctcggctgcgtcttccccgagctgctctcccgcaacg

SEQ ID NO: 347978 - DNA, 272 bp, Zea mays
ctagttcttggtgaaaaaaaaaaaaaaaaaaaaaaaaaaaaaaaaaaaaaaaaaaaaaaaaaaaaaaaaaaaaaaaaaaaaaaaaaaaaaaaaaaaaaaaaaaaaaaaaaaaaaaaaaaaaaaaaaaaaaaaaaaaaaaaaaaaggggggggccgttttagaggatcaaagttatcgtccccttgtttgcaatgtaatattttttttttggggcacctaaaattaatttcatgggccggggttttaaaacagtgggatgggaaaaaccttgg

SEQ ID NO: 347979 - DNA, 270 bp, Zea mays
gtcgatccaattgtcacttgctctccctccaacaagctaattaaggccggtcatccctcttctagctcgtttcattatccatggcggaggagaagcaccaccaccaccacctgttccaccacaagaaggacgaggagcagctcgccggcggcgggtacggcgagtccgccgagtacacggaggccacggtgacggaggtggtgtccacgggcgagaacgagtacgacgagtacaagaaggaggagaaggagcacaagcacaagcagcacc

SEQ ID NO: 347980 - DNA, 139 bp, Zea mays
ttccggggtggacccacgcgtccgatcgaacctaacccccgatctgatcgaatcgaaggttgcggcggcaatgggcggggaccatggcggtgggcacgccggcggggacttccgccagaggtatggagcatgacggcgg

SEQ ID NO: 347981 - DNA, 110 bp, Zea mays
accacgcgtccggtgatcggtggctctagaacccatgtactttatttttatcagtctaacaagatcacatccagggggtggacttttttaccttgggcttctacaaaaag

SEQ ID NO: 347982 - DNA, 98 bp, Zea mays
aaaataatggcatcgtcggtatgcatgaataaaatgtatcagaatgttcatcctttcacgattggatatatgaaaatgtgctcagttgtttggtttcc

SEQ ID NO: 347983 - DNA, 414 bp, Zea mays
ctgcaagtctcgctacgtagcagtgcaatacaaaaaaagcagccgcaatggcgagcagcaccatggccctctcctccacggccttcgccggcaaggccgtgaacgtgccgtcgtcgtccgccttcggcgaggcccgcgtgacgatgcgcaagacggcggcgaaggccaagcctgcggcggcgtccgggagcccgtggtacggccccgaccgcgtgctgtacctgggcccactgtccggcgagccaccgagctacctgacgggcgagttcccgggcgactacggctgggacaccgcggggctgtcggcggacccggagacgttcgccaagaaccgggagctggaggtgatccactcccgctgggccatgctgggcgcgctcggctgcgtcttccccgagctgctcgcccgcaacg

SEQ ID NO: 347984 - DNA, 139 bp, Zea mays
gaaaagaatggtgcttctgaatcaaacaaaatattattaaggatataaaaaaaaggaacagaaaaacccgaggcatgatggatgtggtgagtcaactccagaacatgtgcggccgattgcaagatggcgcgcatatggc

SEQ ID NO: 347985 - DNA, 120 bp, Zea mays
cgggccggaaattccggggtggaccacacgcgtccgacgagttgttcttatttttcatccacctcttttttacggaacgtttttttttatataagaaaataaagtcaacagagcagttct

SEQ ID NO: 347986 - DNA, 214 bp, Zea mays
ctttaagaggggatgcttgcagcgtacactttgagtcctggaccgaacctgaagacgtgtttattatctgagggctaagctccactcgagctttactgtctatacaacaaccacatggggtgacgcctcagaaggatcatagttccgtgccacaaggatgcacggctgacgatgaggcttttggtgacatagttgcaatcccatgacatcgttt

SEQ ID NO: 347987 - DNA, 303 bp, Zea mays
  unsure (1)..(303): unsure at all n locations
cgcgaggtggcgacggcgacggagacggccgccgactgccgcgaccgcgcctccaccacctccgggtgaactcgacgtgatgggcattggaatggttgttacagtagttgttcttggatgatttttgagtggattttattgcgtgtactatatgctcgatgcaattaacagcatgcgtgtggatcgtcgttcgtatatacgtacggtgcttgtaactgatgattgtggaccgtggacgtgtatataaataaagtgagtggttcttcaannaaaaaaaannnnaaaaaaattaataaaaataat

SEQ ID NO: 347988 - DNA, 313 bp, Zea mays
  unsure (1)..(313): unsure at all n locations
gtacatgcccttggacaaccaaggagacgttcaaagccattctcatcacattgaaatgtgaggacaggaggatgcaaacttgacaaaggggggggggggggggggggcgacttgatgtaccctatatatacacttgaattagatgttcataactgtaacgatcttatgtttagcatgcttagtccttgaacaatctgtatccctgtggtttctgtgttaaggctgacacggtcttgtttagtaataattgccttctccnaaaaaaaaggngaatatgatatttgttttttgtaaaaaaataatttttaatttt

SEQ ID NO: 347989 - DNA, 406 bp, Zea mays
  unsure (1)..(406): unsure at all n locations
ttctgttccggcgatgtggtgcccggtttcttcgtcgccgaatcagctcttgatgagtggcgctccctgtttttggcctgaggtccaggtaagtagtagagttggaggatgaattagcggcggagtggccagaatctccacgtgaaccttgtccagaggacttcatttcccttgcagagcacatagaaaccttttggggcatcgagtacgactcagataatatgcctagtttctctgattagggggtagttcaggttatgtgatgagttatgtcatgaaccatgtttatgtatcagctatgaaccaagttatgtcatgnaaccatgttatgtctagtgtattagctgtgactagttngtatcagcaaaactgagttcatgtatgtgcttgtgacatgagtaaaact

SEQ ID NO: 347990 - DNA, 402 bp, Zea mays
gctacgggggcgtactgaggcaaggattctgctgatacacgtttatagccaattcatgcggatgaataacacgcgcgagaagcgataacatgctctaatacaagcactgctcgagcgtgcaacgcttactgcagatgagatcaacaaagtagttcacccgtaccaagaagagccccatctttccttccaagacgaggagtttgccctcgcttaaagattcttttgttgcatcaagatatcggtcaccacccgtgagttgtaaatccgtgtacagtaagtgtcgtctagatgagccatggaaagtcctttagatgctctcttctgtaaaacagggcgcaacacctatggtaaattagaagattggtgatgcgaaagctgatgcctgcttattgacaattcttt

SEQ ID NO: 347991 - DNA, 433 bp, Zea mays
atgccaggcccggcccgaccgacgcgtccggatctatggatggttacactatcacatttgggatcagaaatgtgacgcacattgagaaagctctatcagaagcttacagaagatggttctaaagcaagggtggaggttcctatgcttggagttgagtcatgtggatgtccctatttttaaatagatagctggttgatggtgatcggcagatagaagacgggcaacatgctaaccaggcatgtgaaccttgaaccttggcaggaaaagtttgctcagatgattcaggaagccggattccaagaggtggaatatgaaaacctcctgagcggtgtagttgccattcattctggacttgaactgtagagctgaatacggatggatgttttttcatgggtgcaccgcttctaccaataagaagatttggtggttttta

SEQ ID NO: 347992 - DNA, 117 bp, Zea mays
acttcttgtttttcttatcctcagatttgtattccttctttcttactattacattcagtttatgcgtattgctttccaacaatattggcacgtggttaatgtatacattttagtttc

SEQ ID NO: 347993 - DNA, 210 bp, Zea mays
accggaatgccagggccgacccacgcgaccgggctggcaacgatgaggcccagttcttggccactgaggggatttttaaggtcgccgaaggggccactgctttgttcatggagcagctccgaggaatccactacatcaccgaccgaggttcacagcagctcggctgctgacattgagtaccctaacaatgtccctctctgcgctctcgat

SEQ ID NO: 347994 - DNA, 320 bp, Zea mays
aattcattgtcattaattttttgaaaacattcttttagaaataaacaaaaatatttgaatgttggactatagctgatataacgctatgcacattgatgtataaccatgagttactttcagatacaatggttcgccaagctgcaatggctgtcaagtgcatgctgcttctgtactacaagaactgcagaggtcgtaactaccgtagacagggccaaatgttaacccttgtggagtaccttctgcttctttatcgtgctttgttgccaacttctgtttggtatcgcttctttctgaacaaagaatatgggagtctcttctca

SEQ ID NO: 347995 - DNA, 129 bp, Zea mays
acccacgcgtccgggaagcctaaaataactaggctgcatccatttcttatcagccacccaagcaccacctatgggtggggggacttctccccctgccctttattcaaacgccctgaggtgccacggaca

SEQ ID NO: 347996 - DNA, 425 bp, Zea mays
agccaacatatctcctcgcatttccttgcaaccgattgcctatccccctcccaacccaagaccgatggcgcccaaggccgagaagaagcccgcggcgaagaagccggcggaggaggagcccgcggcggagaagacgaccgccgggaagaagcccaaggcggagaagcgggtccccgcgggcaagtccgccggcaaggagggcggcgagggcaagcgtggcaagaagaagggcaagaagagcgtggagacgtacaagatctacatcttcaaggtgctgaagcaggtgcacccggacatcggcatctcctccaaggccatgtccatcatgaactccttcatcaacgacatcttcgagaagctggccggcgaggccgccaagctcgcgcgctacaacaagaagcccaccatcacctcccgcgagatcc

SEQ ID NO: 347997 - DNA, 281 bp, Zea mays
ggtggacttcgcgcgggtcctgcgcggcgcgctggcgctgccgggcgaccggaccgcggccctcggggagcaacccggggcgcggccccggatgctgatcgtctcgcgcgccagcacccggcgggtgctgaacctggacgacgtggcggcggcagcggacgagctggggttcaacgtgactgcggcggaagcccgcgcggacctgccggcgtttgcggtgcaagtgaacgcggacgacgtgctggagggcgtgcactgcgccgggctgacgaaccaggagt

SEQ ID NO: 347998 - DNA, 252 bp, Zea mays
ggtagacagatccgagtcacggttgcagaatcaaagcccaggcgtgaattttgagattttgttaaggtggtttagaggtcaatagcgtgtgttcacaagttctagtttgtagcgtctattctttcttccgtatgagtaacaagaagatgctgataatgagagactggaagtgaaactgctgtccacaggaagatatttttcccaacccttctgtataaaaaaaatacaccatcaacaaaaacaaaataaata

SEQ ID NO: 347999 - DNA, 233 bp, Zea mays
cacttgtgaacattttgattatgctattttggagcaccagttgagtgctgtgcaggtggagcaagaaaaagtttatacttgctctcattcatagtttgttcttagcctatgatctagaagtacttgtttaggttttgctgcaagaagcacccttcataatatgattacggtgctgtgttctgtatttacattaatatgacatggaacatggttatgatgacaagttctctctt

SEQ ID NO: 348000 - DNA, 202 bp, Zea mays
cggactcttgggctagcgggcccgaatctctagctggcagaagacgacggagaacggggtgggatacctgacgattaaccaacttaactggtgggctgaagatgtctttgacaggcagcacgatagccgccacattataacacgctttcattcattttgatggatatgattgaaaataataatcaatcacgtatcactggtg

SEQ ID NO: 348001 - DNA, 306 bp, Zea mays
aaaaaaaaaaaaaaaaaaaaaaaaaaaaaaaaaaaaaaaaaaaaataaaaaaaaaaaaaaaaaaaaaaaaaaaaaaaaaaaaaaaaaaaaggggggacgaattaaagtgtaataaaaataaatacgaatgcatgcaaagttataaactataaaatagagtaacctcaaatgggggggctggtttttaggttacaaatttttggtccgggaatttccctggtttgccctttttttggggccctccaaatgaaattcttttggccggtttttaaaagggcggggaggggaaaaccgggggggtttcca

SEQ ID NO: 348002 - DNA, 371 bp, Zea mays
gttggcttctcctccccctccggttcgggttcgggttcgtgaggttctccggggttcggtttcgtgggtgagcggatcgagatggcggcgtcggatgttgagtaccgctgcttcgtcggcggcctcgcctgggccacggacgaccactccctccacaacgccttcagcacctacggcgaggtcctcgagtccaagattatcctcgatcgggagacgcagaggtcccgcggcttcggcttcgtcaccttctccacggaggaggcgatgcggaacgccatcgagggcatgaacggcaaggagctggacggccgcaacatcaccgtcaacgaggcccagtcccgcggcggccgtggaagcggcggcggcggcta

SEQ ID NO: 348003 - DNA, 361 bp, Zea mays
ctccacttggtgctgcgcctcaggggaggcatgcagatcttcgtgaagaccctgaccggcaagactatcaccctcgaggtggagtcttcagacaccatcgacaatgtcaaggccaagatccaggacaaggagggcatcccaccggaccagcagcgtttgatcttcgctggcaagcagctggaggatggccgcacccttgcggattacaacatccagaaggagagcaccctccacctggtgctccgtctcaggggtggtatgcagatctttgtgaagacactcactggcaagacaatcacccttgaggtggagtcttcggataccattgacaatgtcaaggccaagatccaagacaaggagg

SEQ ID NO: 348004 - DNA, 137 bp, Zea mays
  unsure (1)..(137): unsure at all n locations
gacccacgcgtacgcganggacggccaaaggagangcagggggcaacaaaggagacaagngcgggggcnaaggaggcgagacaacagaacgataagcaagggcacaaaggcaaccacaagaagcggcgaataaagcc

SEQ ID NO: 348005 - DNA, 396 bp, Zea mays
cagagagaagctttttcggcggattttttttctttacagacagacatctgcccaagcgaagatgcttgaatttatgcattgagttatattgtgctggctaatggatatgttgtggcgatttgcttaatactcaggcgcttcaccgtttggtacctgtggtggtgactggcgaggatgctctaaccagttgcgcttgtgttcaatataaggtggagcaaggaagaggagtataaaacgtggaaagaaaacataaagaaagggaaccgatttttttttaatgtgttcctgtcagcaattgcattcttgttctactggaagtagaaggtttcttgctgataccgattggtgtgtatttgctcccttgcctttttcgcttggtctttgtcttaaaggatg

SEQ ID NO: 348006 - DNA, 128 bp, Zea mays
gtgttactacagtggcggatcgtggctaggacacattggtacggatgcctgcctgcgagggtggacccggtgtatttgtggcttacattccttcatctggataataccctgcagattttctttctgaa

SEQ ID NO: 348007 - DNA, 155 bp, Zea mays
aaaaaaaaaaaaaaaaaaaaaaaaaaaaaaaaaaaaaaaaaaaaaaaaaaaaaaaaaaaaaagaaaaggggcggccgatctggaggacccaatcttacatacccgtgcatgcgagcggatatgctattttataatgtcacctaaagtgaaacaaa

SEQ ID NO: 348008 - DNA, 374 bp, Zea mays
  unsure (1)..(374): unsure at all n locations
ctcatgggcgccatcgaggggtaccgcgtcgccggcggcccgctcggagaggtcgtcgacccgctctaccccggcggcagcttcgacccgctcggcctcgccgacgaccccgaggccttcgcggagctcaaggtgaaggagctcaagaacggccgcctcgccatgttctccatgttcgggttcttcgtccaggccatcgtcaccggcaagggcccgctcgagaacctcgccgaccacctcgccgaccccgtcaacaacaacgcatgggcctacgccaccaacttcgtgcccggcaagtgagggggtcggaggcgccacctgccaccgncaccggncaccgntggcgatatctaggtgttcggatgcacgtgagc

SEQ ID NO: 348009 - DNA, 177 bp, Zea mays
caaattgcaagggatactgcatttaacctgttggctgagcaactacagaaaagtgctcaaagcacatgagaacaaggctcaccttcattaaattctcaacaatacatgggaacaatgcaaaagggtatggttaaacccccttttatttacatggtttatacgttttgggaatgctct

SEQ ID NO: 348010 - DNA, 124 bp, Zea mays
cggacgcgtgggcggacgcgtgggcggacgcgtgggttcggcgagggtgtcatgcggctggagaggcggcgcatggaagtgcaatgggagatcgaacgaaggtggcaagaagcggacccccccc

SEQ ID NO: 348011 - DNA, 113 bp, Zea mays
gctagacgtggccggacttcctctaactatcaccacgcggatactacgaccacggggtctgccatcgtatgatcaaagattttattgtgcaaggtgggtgttctaccggaacc

SEQ ID NO: 348012 - DNA, 51 bp, Zea mays
gtgatgtataatacagaactcccttctttttcttttacatccccctataaa

SEQ ID NO: 348013 - DNA, 220 bp, Zea mays
attcccggtcgaccccgcgtccgaaaaaaaaaaaaaaaaaaaaaaaaaaaaattaaaaaaaaaaaaaaaaaaaaaaaaaaaagggaaaaaaggacggacgttctataagattgaaatttgtttacgggggggggcaatcatggtggctccctttttgtgtccccgtccttgaatcgccttgccgtccctttacaaccccttaaatggcaaaactttgccg

SEQ ID NO: 348014 - DNA, 358 bp, Zea mays
  unsure (1)..(358): unsure at all n locations
cttgttccctgtttctgcacgcgctcagttcccatggcagccgcacccttcctctgctcggctgcttgcagtgacctctccaccgccctagatttctctatctccctcacggcgccctccctggcgctcgccctgggtgctatcgtctagctcgaacccgcccccagccgcgcctctctttgtcaagcttcctgacgcacgattttctctgccctagcccagcatttttctcctggtggtcgagctccctcaagcttcttagttcgtccgcccgcgaacgcccatggcgcgatcgcctctctgtgcacacgccgtcgccctgatttnctgctccctggctccaactcaagttcgcatg

SEQ ID NO: 348015 - DNA, 386 bp, Zea mays
taaaaaaaaaaaaaaaaaaaaaaaaaaaaaaaaaataaaaaaaataaattaaaaaaaaaaaagaaggaaaaaataaaaaaaaaaaaaaaaataaaaaaaaaaaaaaaaaaaaaaaaaaaaaaaaaataaaaaaaaaaaaaaaaagatataaaaaaaaaaaaaaaaagggggggcccgttttaagggttcaaactttcctctcccgccctgggaagttttaactttttttttggggcccctaaatttaatttaactgccctacttttaaaaaggcgggtgggggaaaacccttgtggttccaaaatttattggttttgaagcaattccccttttccccagtgggcgtattaccaaagaggcccgcccgaatcccctttccaaaaatt

SEQ ID NO: 348016 - DNA, 71 bp, Zea mays
caaaaaaaaatgacgaattttcctacaactctttatatttctaccgcactcgcaaacacgtggcagggctt

SEQ ID NO: 348017 - DNA, 406 bp, Zea mays
cacatttacgatggcatcatctgcttctacatgtatgcaactgtatataatgtagctaaaaccatttacgatgtgctgacagttccaaattgtactgttgttccttatcaaagtctgtttgttttcctttcaagaaaaaaggtctctccatctcatactgaaagcatagttaaaccctgtatttgtcaagcgaaaacttagttggagtcactctatgttgccaggggaagttcagatggaccgggcgttggagctgctgaatgttcgtccctgcggtttcaggcctcgccactcgaacaaactgggcaacgagttccggctgttcacgaattatgatcctgctgacagacttggtggttgggagcaaagtgatggtgcccccatttaactattaactaatacaatt

SEQ ID NO: 348018 - DNA, 416 bp, Zea mays
cggatcgagatggcggcgtcggatgttgagtaccgctgcttcgtcggcggcctcgcctgggccacggacgaccactccctccacaacgccttcagcacctacggcgaggtcctcgagtccaagatcatcctcgatcgggagacgcagaggtcccgcggcttcggcttcgtcaccttctccacggaggaggcgatgcggaacgccatcgagggcatgaacggcaaggagctggacggccgcaacatcaccgtcaacgaggcccagtcccgcggcggccgtggaggcggcggcggtgggtacggtggtggccgtggaggcggcggctacggcggtggcgggcgccgtgatggcggcggcggctaccgcggtggcggcggctaccgtggcggcggcggctacggtggtggtggcggcgg

SEQ ID NO: 348019 - DNA, 305 bp, Zea mays
ctgcgtacacaactacagtttggatcgatggacacgtacaatctgatctgaatcattggaccccgccacaccactctacgccgtacgtacagtttcgtcgtatgattttatataagcacatgagtctacaggtagacgtaaatcatggatgagctagctacggatgatatatatagcttgtgcgtttttttacaactttttttttggtccttttggtttatacatatttattagcagatacggatcgaatacaaatattaaaaatggttcgttcttttttaaaaaaaaaaaagagtatactaaaa

SEQ ID NO: 348020 - DNA, 59 bp, Zea mays
ctcttggcagctggacttaatgttttgctattcttgtcgacatcacgagttgaattgtc

SEQ ID NO: 348021 - DNA, 379 bp, Zea mays
cggggcggcccacgccttccgggattttggccagggctattccttcaccaaggtttggcaaggccacgaaagcttcgtccctgggatggccctttcctttttgacacacttcccgaaaaaaaaaaggcgctggaggggaaacgcccttcacgagcactctttcttagtggatcccttagattagacacgtttgtggacgccctgcctctatatatattggagctgttcggcgctggaccgccgagcaaatatcaatcgcctcttgataccacaccaccgtcttttgcaggggttgtggcagcagctcatgcagggaatgatgacaacatgttgttattattattgaaaaatgtctgcagtggccgataatcatgtaaaa

SEQ ID NO: 348022 - DNA, 443 bp, Zea mays
gcagaacatggcgcacagcatggccgttgcatccactatgccaatggatggccctatttatcctatggatccctctggcaacccaatgcttccagcggctctcttggcccagtatcctgcattagctcagctgaactggtctgcacctgatgtgaacgctggcatggacgacgaggttagtggtcgttcatcctttgatgccagcgactatgacgaaaacgaagacggtgggtatgtgagtggcccacgcacggggtttggtgagggtgggttgggccaaagctttggcgaaatgggatacgcgagcgacttttggggccggtaaaaatgggatcactggccataaaaacatgcattcatttgtgacgcgatcaatgcccccccttttgtttctttttcttttttagttatcggcgatctgtaccttgcgccttgcttctttt

SEQ ID NO: 348023 - DNA, 387 bp, Zea mays
agtgaaactccttcgcacatcatcttccactgcccgtttgcacgccaattttggagctccatcggattctctgtcgctgatgatctgggcacccaggacctgccaaacatcagtcgccctgatcgccttccgggtgcagaattcaactcctttgtcctcctctgctgctggcaattgtggaaacgcaaaaatggtgtcggattccgtcaggatcatgccactcttgtgaccactttgcattcatgcgcttctgaagcaaaagcttgggcgttcaggcacaacaggaaagaagcacaagtattaggtgcttggctgttggcgttttctaatcctattatgtaatctcatcattgctttcgcccccctgaactatgctagctacaatgc

SEQ ID NO: 348024 - DNA, 274 bp, Zea mays
cacacacagagagagacaagtggtttccaaagccaagtgtgtactagcagtctagcaaccagctagctcgggcggcagcaggcagccatcatgtcggaggagaagcaccaccacttcttcaaccaccacaagaaggacgaggagcagcccgccggcgagtacgggtactccgagaccgaggtggtcaccgccaccggcgagggcgagtacgagaggtacaagaaggaggagaaggagcacaagcacaagcagcacctcggcgaggccggcgcca

SEQ ID NO: 348025 - DNA, 287 bp, Zea mays
gagtgggttaaactgtgtttactttcgctctgcccaccagtgttgtctaaagcccatggggggccctacgacaagggctggtcttggctaatgtactcgatttacgtaaacacttgaacaaagaaatgatttgaagaggtgtgatttatctaggtgacaatctgtccgtacgcaggtgtgctcttttctactggcagatataatgatctctatgttggttttgctcgaaaaatactttcttataaaactgactttgcatattttcttgatgatcaattacatgatta

SEQ ID NO: 348026 - DNA, 153 bp, Zea mays
atcaacaattagcttggtcaacattccctttacccacgccactggtatatccaaaggaggggagctactcacattagaaggtttacactatgctctccagtgtctctccagcttcaatccagacaccgattcatgtggataaaaaataatgtt

SEQ ID NO: 348027 - DNA, 294 bp, Zea mays
  unsure (1)..(294): unsure at all n locations
gaagnacggggccgacccacgcgtacgaactatcatgacatcaattgtgtttttctttaccaaggggtattaccataaacattggcgggtgccgaagaaaaggccttgacaatcttaatgaacagctgtgccatgatataactaactaagagggaatggagtaaatttgtttactgctgacggaatcaaaccatgatgaggcttttgtatttgaaatggataacatgtacaatatctactgggctatgtatgaagacaactctctctcaaacagacataagtatggcatgtgct

SEQ ID NO: 348028 - DNA, 311 bp, Zea mays
ggattaggaactagatcgggcgatttttccaccacatgggggccgaagtcttgcagctgaagctcagcctgcggatcaggttaaagctggatcacccggacgaatggccttctcatgaaggatatatgcaccctcgcgcagcccaccagttcacacttgtttttactgccaaacaaagccgtgcctaaggtcaaaaccgacaacgattgatcaactgagctcctgcacggctgtagctggatacgcatatgtttgttctacccgtacacctgatgatcacatcaatcgaccaccatccatactgaatatta

SEQ ID NO: 348029 - DNA, 207 bp, Zea mays
ggccgcccacgcgtccggggacgagagatcggacgcgtgataagacacatggtcggtcgccgaggtacctatcatggggatgaagaagctggcctcaatctcaatgttaacagctacattaatcgacttgttttaaagtatccggacgggactagtttacccagccaggggctttggaagcatcctcacaagtgaggctagatgcac

SEQ ID NO: 348030 - DNA, 97 bp, Zea mays
  unsure (1)..(97): unsure at all n locations
ggaannnccgggtcgaccccacgcgtccgtgactttaacaataaaaaaataaaaaaaataaattataaaaaaaaataaacacaaacaacactaaaaa

SEQ ID NO: 348031 - DNA, 401 bp, Zea mays
gtcaatacttaaaaaaatatgcatttcatgaatccgcgtacataatattttggcatgtcttgcattaaaacaactcaatgcgtgcactgtgtgttgaaactattgtagcgcactaaacatttcagcgcctgaatggacaataatgatgttaaacggaagcacaatatgaacatggcgaggcatggacattttgattggaaagtatcgaatatatatgctaggcttttcagagagattactctctaagaaactgatcttggcattgggggctagtttatcgggtactgagtaatgcagcttattttaatgtatcccagttgtgttgttagatacaactatgcgttcgaattacccattttattaaaatctagatacgtaaaaaattgtgtttacttatactt

SEQ ID NO: 348032 - DNA, 441 bp, Zea mays
acctgcttctgttttgtttgcatgagattcccccctcctcctttgtgattatttgagcctgccatcttccttaactgcaaacagacatgtctgctggtcttcaaattacaggatggcctgcccatgattcacctgtgagctctgttctttttgggccagcagaaactagcatcttcagcttaggctcggacggaaagatacttgaatggagtttgcacaatcaaggtcagattctttggtcaagagattgcagcagattctgcaatccggagagctttaaaacacgaatgcatgaaatagcattggattcaaatggcaagaggctgctggtcacctccggtttggttcgggccccaatataccaggtacaaggccatgaaagcgaactgaagacactgccgcacagttcatctatcacaagtgtggattggcatccaacac

SEQ ID NO: 348033 - DNA, 342 bp, Zea mays
  unsure (1)..(342): unsure at all n locations
ggncgacccacgcgtgacgcgacgcctgggttgattttttttttgaaaccgaacaacctaacgcagctgcttctgtcgcatcgtgaattggtgaacatcatactaataccttttatttgctcttcaagactgttcctttttttttactggcaccctacaggaacgagagtattgctcttatctgacacggagagaaataggccaccgtcactaacgccaggtatgtctgcgttgttaattttgtagatataaacctcttccaacttctggtggctgccaagaaaccactggcaactttcagaccctcttgtggcgggaataaaaccaaagccgcgtacacag

SEQ ID NO: 348034 - DNA, 295 bp, Zea mays
ggacgataccgaattcttacgagctggagattgaggttgatcttaatatttaattcggttcatagatgggctcgcactctgtggttttagtctttcatgatgatgggggctagcttgccttgaaagctgctgaaaaactgcgcacttatggatgtgacagagaggttgaagtgaacggagttgttcttattgttgtgagcttatcaagagaagtcattcctgcatttgctcatatactcctgcatacaccatataagaaaatgcacatggttctaccacttttacgtactgaaat

SEQ ID NO: 348035 - DNA, 307 bp, Zea mays
gtggcaccagcggtttccgtgcccttgtaatagtattatgacctgccccctctttctcttattaacgctacagatttattcaggaagtggtgtgttttaaaaaaaaaaaaaaaaaataaaataaaaaaaaatagaaaactaaaaaaacaaaaaaaaagaaacatatataaaaaaaaaagaaaaaaaccaccgacaataacaagattatatgtccgggatggttaataaaaaaataaaaaaaaggggggacgcttttaagggagtaaaattaaaccaccggcaaatgtgaaaatttttttttttaatg

SEQ ID NO: 348036 - DNA, 380 bp, Zea mays
cgaaggctttgggttgatcttgtgttgatgtcaaagactactgtcaaaactctggaggcggtaacatctcgcaagaatacgacaaatcgcactatctacagcctgtgagtatatctaaattctcttcaacacttcattacgcaccagctattaaatatgttttcggttcttgccatgagataggagaatagagcactgaaaaagaaagccattgatctcatgagaacgcttcgcatatctagaaactagtcttgtgatagtgataatccgctgccagtacatacacatcaacagctcatgttcatgtttacataagatgaacgttagcattgttggtgtctacaacggcaatacattaaggtcggttgatatcaaggatt

SEQ ID NO: 348037 - DNA, 95 bp, Zea mays
cggggcgacccaccccttccgatgaacaacaaaaggggttccctcttaatttaaaattgcaaaaggcttgggcattgggggattccaacccatgc

SEQ ID NO: 348038 - DNA, 229 bp, Zea mays
  unsure (1)..(229): unsure at all n locations
gaagncccgggtcgacccacgcgtgcggagagcatagtcaatcatgacgggtggcatgaaggaagtggccggtgcgggggtggccgtactgcttgttctgcagctcatggcagctccaccgacggccatggccgcccgctcgccgcacggagccgtgcccgatagcttcctcgccactactcccaatgtgactatgctgtcggccacgctgtgcttctcgggggagaca

SEQ ID NO: 348039 - DNA, 370 bp, Zea mays
gaattcccgggccgacccacgcgtacggccgaggtaacacacaagctgcacacccgtgcgaactatgtcacagtcgggagcgcccatgcccttcgatccttcaacattgctaaagatgagcttcagcacctccggggaggtcgttcttctctgtcaggatgagtggaggccgaagaaactttttactctttcaacagattatgatctgagcgtggcccgctcgacttcaataatcctgatggacatattcatcaagcctatgcctgggtcaattcaccctctctagaacagtacatgcataccgtgtaccaagaacacaagcttgggagctgtacctccaacaacccaacatcttaaccttctttatttt

SEQ ID NO: 348040 - DNA, 356 bp, Zea mays
ggggatgtaatggtgtaaatttgatctggggtggtggaggtaaatggtgagaggggtaaggtattttataattgagggggtcggggatggtatacgtcctggggagaattgggcaggagggtggtgaactggtatactctagtattgtactagctcctttgtgtggtgatgtacataagggaagggtatacatttgtggactctttgaggagggatggatacctaatcctgatcccgatccttgcaatgtttgtttcctaacctggaaaaagactaaggttggtggctcttttttgaaaatggaatgatgattaaccttggtaaaaaaaaaaaaaaaagggccggcccttttaaag

SEQ ID NO: 348041 - DNA, 62 bp, Zea mays
agaaaaagtactgatcaaaaaaaaacaaacataaaaaaaagaaccacaacaaaaaggagggg

SEQ ID NO: 348042 - DNA, 286 bp, Zea mays
gaagtcccgggtcgacccacgcgtgcggttaaagttcatcgccgtcgcattgcattgtacgccctaatgatcaaatgctcgggtgagtgatcgcagtactgcttataagaacactcgcttcttccattgttggatcatgtaacgagatatgaaatttcgctgcagggaaaccaatcagcctggttctgcaaaatctgttgggaacgatatgacactgcctactgttttctggtgcctatttacatgtggataaagaaccacattgtgccaaaaagcatgcctatct

SEQ ID NO: 348043 - DNA, 400 bp, Zea mays
ctatagcaaccggtccagcactttcacgctcagctccagcaatggctgcctccaccatggcgatctcctccacggcgatggccggcacccccatcaaggtgggctccttcggcgagggccgcatcaccatgcgcaagaccgtgggcaagcccaaggtggcggcgtccggcagcccctggtacggccccgaccgcgtcaagtacctcggccccttctccggcgagcccccgagctacctcaccggcgagttccccggcgactacggctgggacaccgccgggctgtccgccgaccccgagaccttcgccaagaaccgcgagctggaggtgatccactcccgctgggccatgctcggcgcgctcggctgcgtcttccccgagctgctctcccgcaacggcgt

SEQ ID NO: 348044 - DNA, 376 bp, Zea mays
gaagtcccgggtcgacccacgcgtacgattgaaggtagctgatgttggcactaacattcagcacagggttggagctcggtgctttgcgcgggcagtcacaaataaaccagattttgtgcatatgaacataaatggaaattttatctccgatgaaagggttgatgaggtgaaagaaattctgaaagctggtcagaaatctctggatgtgctgtgcccactagactagaatgaacctgatggagagcctgatgatgaggatgccgaggaccatgaagacaagctggatttgaatctgataagtgtgaaggttgagcaagatgaggatgattgactatccttatgttaaatatactttgctactcaataatcatttgga

SEQ ID NO: 348045 - DNA, 84 bp, Zea mays
ggttccttctgagtttgatgtgtggtgttcgtttaattcccttgtacaaccccatttagtatcattgtgatgattttggattcc

SEQ ID NO: 348046 - DNA, 127 bp, Zea mays
ccccgttccacttattcttgtcttggtgtgtactaggaaatctgaaaatgtaacaaggttctgaagacaccgaaaagaaatgtaattaaatccctctgtgaagttttcccattctcgcaggaacctc

SEQ ID NO: 348047 - DNA, 79 bp, Zea mays
caaatggcttactgttttggttcactgaataaatttgaaggcttgtatgtccaaaaaaattataaaaaaaaaaaagaaa

SEQ ID NO: 348048 - DNA, 282 bp, Zea mays
gcgcgcgaaccagctggcctcctcctcctccctcatggccgcggcttctcctcgcctctccctctcctggcgccggggaggaggtagcggcagcaacaagctcgactccactccagcaagagcaagcgaggagggagggaaggaggggttacttcgaggtggatctctcttcttctaagctttcctgcccttctctctccactcctttctctctcttgtctctcacacagcacatctgtgtgtctgcgttgctgctaccgctggcgctgccgtgccatgata

SEQ ID NO: 348049 - DNA, 308 bp, Zea mays
gttacacatgggcagccgcctgtgttgtagatcgaaggctacctacgcttacgttccacgctttcgctctcgtgcatgggaacctatatctaattcattgggcgacgtaattcaacgtcactacccgtaaaaccacaacgtcacgactgttaatacccttgcatcacataactttatcgcctggtagcacattagcgtttaggcaggtagcgttctagcttacaagcacgtgcgcatcgtgcatggcaactgttacgcaccctgtatcgccactttaacccccgctggtgcggcgcattcaccccggg

SEQ ID NO: 348050 - DNA, 225 bp, Zea mays
gtgagaatcgagcggcagattggcaggaggcagagaaggcaaagtatcttgcaagaaactaggtttaggatcatctgggctctgtggtaaagaactgcagaacgtacggaagctatgcgaaacaggaggttgcagatttattgtttctttgaccttaaacattatgcaggtttcattgggaggaggcaaagatccaagcttgggaaaatctccagaaagcgaaaa

SEQ ID NO: 348051 - DNA, 282 bp, Zea mays
cggacgcgtgggtagcaaccggtccagcactttcacgctcagctccagcaatggctgcctccaccatggcgatctcctccacggcgatggccggcacccccatcaaggtgggctccttcggcgagggccgcatcaccatgcgcaagaccgtgggcaagcccaaggtggcggcgtccggcagcccctggtacggccccgaccgcgtcaagtacctcggccccttctccggcgagcccccgagctacctcaccggcgagttccccggcgactacggctgggaca

SEQ ID NO: 348052 - DNA, 225 bp, Zea mays
gggcgatggcggcggctgatgtggagtaccgttgcttcgtcggcgggcttgcctgggccaccagcaacgagtcgctggagaatgccttcgcctcctacggcgagatcctcgactccaaggtcatcaccgaccgggagacggggaggtctcgcggcttcggcttcgttaccttctcctccgagaactccatgctcgacgctatcgagaacatgaacggcaaggagc

SEQ ID NO: 348053 - DNA, 131 bp, Zea mays
aaaaaaaaaaaaaaaaaaaaaagggctgaaaaaaaaaaaaaaaacaagggggcgcacgcttgtatgccccagctttcctacgcgttcgtgcgacctaatttctattctatagcgcgacctaaacaaaattt

SEQ ID NO: 348054 - DNA, 228 bp, Zea mays
aaaaaaaaaaaaagaagatgaacaaaaagtttcgttagacatagcaaaattaaaacaaggcaaactgatagttacaacaatggcgctgggctgtcgctgccaactggtactttgagtgcacaagctgcgtgattgttcaagggtgctgcctgagcctgaacaaatgagcatacaaggcagcatcgcatttgtgagtctgaaacaatgccgtgcacaggttgttgcttt

SEQ ID NO: 348055 - DNA, 231 bp, Zea mays
  unsure (1)..(231): unsure at all n locations
ccgacagtcgccaccatacttccctgtccgggacctcctgggctcgccctctggaactctcaggggaatataattaaatacccanntctctatctatatacccgtatcatccttggtcgtcaagtcaagtgcaacccgnngtgtatgtgatgtatctaccgtattgggatttggtatccccatccatgggccgtattgccactattatatantatacacgtattaccagtt

SEQ ID NO: 348056 - DNA, 174 bp, Zea mays
gtacatgtagatagtagaatgagaataatttctgttatttttaacttatataattttgagagagagagaaatgcaggcgttgttttcagactgcttttaaatcatcaatctgttggtttggccgattgagcggaagctcagaaagatgaatttacaaatcatgtttcgtttacc

SEQ ID NO: 348057 - DNA, 113 bp, Zea mays
cgtgccataaccaaggtacgtataagttttttttcaagggaaacaaggagggagtgcaatgcacccgtggccatactggatgttattaacaaaatgaagctatttacagaatc

SEQ ID NO: 348058 - DNA, 75 bp, Zea mays
gggttaccatgccgaggtcatgttgcacaatagaaagtctgcattgtgcccattggaataaatacagtttctcct

SEQ ID NO: 348059 - DNA, 85 bp, Zea mays
  unsure (1)..(85): unsure at all n locations
tgacccttacgccttcgctcgcgccgncgtcgncgacgccgctacgccccgcacctngcttcatttcgtgtcggcaagatgacga

SEQ ID NO: 348060 - DNA, 271 bp, Zea mays
ggctccggcagctggccgccgaggggcaagcgtggctgggcgtcgcccggagccacgaggccgtcgccggggggctccgcgccacgctggaccagctgctgcagcagcagcagcccggcgccggcgttggcggcggcgaagcggaagacgcgcggtcctgcttgttcgagacctccccgccgggccccgtcgccgacgactgcgacgccgcgttccggggctcctcgccgccgtcgtgcaagtcctgcggaggcggcgacgcgttcgtgct

SEQ ID NO: 348061 - DNA, 132 bp, Zea mays
tattcgctcatcatcgtcgtgtgtaaattaaataaataaagctcttgtgccctttttttttttttttataatatgggcacaagagctttatttatttaatttacacacgacgatgatgagcgaatttggacg

SEQ ID NO: 348062 - DNA, 161 bp, Zea mays
  unsure (1)..(161): unsure at all n locations
ccggnncggaattcccgggccgacccacgcgtacgcactgattctataacaccacaaaagccattttcatttaattacttcatacacccaataacgttaatacttctcacctatcccttatctataaacccacccaccaatttttataattatattatttc

SEQ ID NO: 348063 - DNA, 239 bp, Zea mays
gtcggggtggcgatggcgtccgggattaaggccgccgtcgacccgaacatgcactatgggggctcgcgcagccacgacagttatgttctggctggcaagtacgactacgcgatcgaggtggttggggagccgctcctacacgcagacgttctgcgacaacctgaacctagcgatcccggggcccgtaccgagcgtgatccagtcggtgtacggagtcatcaattgcgtcgtgctcctta

SEQ ID NO: 348064 - DNA, 416 bp, Zea mays
cggcagcatatctggctacgtgagcggctcaccaaggcacgccggcgcggggcccatgcttttgcagaacaatttccaccactaccagcaccagtacccgacggcgcccgtgcccgtgcctgtgcccgtgccgcaccacggtgggcggtacgacgcgcgcgggtacgtccgggtaggcaactacctggcgccgatggtgcccgctgccaggccgctctcgaggggaggaccggcgccgcacagcgacatggtgacgccgaataagtctgctattgtgtgggactgacccggccggtcgtacgccggaggggcctcttgtaatgaattttttgcaccagtaattcatcatacgatgggcagtgagttgagtgtttgagactgagatgtgtaaatagactgtcggatggatggatgga

SEQ ID NO: 348065 - DNA, 73 bp, Zea mays
gcgtaatgcctggcgcgcgtatataaaccgtacaattcatcgtgactctcttcaattgttactgatgcttttc

SEQ ID NO: 348066 - DNA, 371 bp, Zea mays
gcgaccgcgagcacggtggcgtcttgtacacgcaagttaactttgtggccgcaggcgtgcgcgtacacgacgttcgcgacgacggtggcggcggcgcaggcgtgcgtggtcgcgctggacggcgcgcacgcgctgcagtggaccaagctctgcaacatctacacgcgcttctgcgagcaggtcgccggcagcctcgtgctcgggatgctggccgccgtcggcaccgccgtcctctcggccgcctgcgcgcgcaacgtattccgccactacgcgtcgttggagacctacgccgcgcactaggctcgcggcccaaggcggcgtcagctgggccgggtgcgccactcctctaaaacactgggccgtaacgaatt

SEQ ID NO: 348067 - DNA, 223 bp, Zea mays
ctccggccggcgctcaaagacatcgtctggtcggcctacccccagcccgccgacgtgtgacgcccgagctggcgcctgcccgctcattgtgtctggatacgagtggtgccatagtttagtcagtgtcactctcattcccatagtgattgcgtcactgttttcgatctgataatgatgtgagatctactgagtgtggggggaagtcaagaatatcaattttacc

SEQ ID NO: 348068 - DNA, 305 bp, Zea mays
  unsure (1)..(305): unsure at all n locations
cggacgcgtgggctattattgtagtgccctcgcctgaagaggatcaaatctattatttcattgttaaccagacaacgcatgaggggacatgatcgcacctacacacaaagggccttgaaaccacgtaccacccactaggcgcacccctgatggtccggcgccgncgcggacgacttcatacatacacacacgtccactaacatctcacacatagacacacacgacacacgatctggactcacgcgcgccataccagacaacttatattttggagcgggaaccacgtatccagctcgtatctagca

SEQ ID NO: 348069 - DNA, 355 bp, Zea mays
gcacacttgaggaagcttattcaccattcattgtcaacactaccagcggcttgggggcaagccgcatttcaagcggtggggattgtcagcatactgtcatgtggggcctcgacagattggcaatgggtcacctccagctacaaaagagggagctgttcaggaaagcacgcatcgaagaatcattttgagaacctagactctatctttcaactactgctcatcttcttccttccttctctcatgtactcggattctcttccttctagaacacgacagctattgtgcttctccaatctacttctcttgctgctacccttcctaaactcctttctgattgtaccatattatatgctta

SEQ ID NO: 348070 - DNA, 249 bp, Zea mays
  unsure (1)..(249): unsure at all n locations
cccacgcgtgctaacacgtcagaaaggacctctgaatgggacctcaccaattctcattgatgagtattttacatcatccttagccactttaacatttttttcccttaccctaccttctacttatcatanctttatattttttattctgtcttatcaaccttgcttgttctaacctttgcttttacagagtttttttttttgtttttattatgctaccaaaattctacttccatagatccttttgatgac

SEQ ID NO: 348071 - DNA, 163 bp, Zea mays
ccacgcgtcgtggtatcccgttagtataattgttctacgtgcactcggagacccgagacatctgcggagagacatcctgcgcagccgcccccctcatccttgctgccgaccagccgactctgacaagctttactgcggcgggcttctacgcgatctacatgaa

SEQ ID NO: 348072 - DNA, 412 bp, Zea mays
  unsure (1)..(412): unsure at all n locations
cccgcttgtactacaaagcgtccctagtagttcgaccgctgtagagactcggttccttcaacagccagcacagcccaacctccaatcctttcagctggctgtacctcctgagatgatcttcgacgaggcggacatgatgctaaagcatcgcctagcttcaggtcgagaaaccacatctctaccagtaggacatgaggccaagcctggtaggcaggaagcatgcatggtaaattctgatatttctaacagaggttcactcgggaaagaagtatntatgccctacttgcatagcttgcagagcggcgatacggagggaggtctgagggcaggatcaaactaactacacgggtggtcaccctgcaggattttcccatcgggattgacagaggtgcctagctaggagtcgctagtc

SEQ ID NO: 348073 - DNA, 102 bp, Zea mays
tacacgcgtgcatacactacagataggactttacaaagctcacactaatctataactctcagtatatacattcccagtgtaaaactcttcattcataccaac

SEQ ID NO: 348074 - DNA, 87 bp, Zea mays
tacaggcgtgagaacacttcagaaaggactattcaagggccacactaatctagaacgcacggtatatacatccccactgtcaaacgc

SEQ ID NO: 348075 - DNA, 398 bp, Zea mays
  unsure (1)..(398): unsure at all n locations
tgacttatttaagttggattatataatctatagagtaaacaaacagggccttagtctaagaaaaaggtagaatcttgacagtacatgacagcagaatcacaagctagggggggtagctatgaaaatcctattaccacatgaacagatgcaatgacatacaaaggacaaaacaatttggtgcctacatagtaaatacttttgatcgtctcactcattttacactcaagccatcaataaaatcgctatcatgctctttctaccatactcttatgccagtattgctgtaaactgcgatttcatcagcctgaaagaaattaaaaaaaactgtaattcctggcangtacctggtggtggcactgctgcacctcccatgctacggnctgttcgccctggtgctg

SEQ ID NO: 348076 - DNA, 394 bp, Zea mays
  unsure (1)..(394): unsure at all n locations
cggacgcgtgggcagcgcacgcaggacatggccggctccggcggcatggagcttccgccgctccgtgacctatcgcgacgggctgcctccttcctgcgcatggcgcggctggcgctcaccggcgccgccactccggcacaactgctcgccggagaggaggtcgtcgtcgacggcggcatcagctgcaacccatactacaagagcatcagcacggaggacgactggggatctgaactctggccggatcaggaggacgaatcggaactgctcgtggacggcgacgaggacgggtcaacgacgagaggtggtggtggtggtgcatctgagagtgtcactctggtcggagccggaagaggcggcgtcngtggcccgctggacagganacctcagttga

SEQ ID NO: 348077 - DNA, 392 bp, Zea mays
  unsure (1)..(392): unsure at all n locations
gtacctaggcatgtccccgtccaaaccgactcctccgcgcacgtatctgcgtgggttcacgacgtaccggcacgggcaccccttcggagaccgtttcctgcgcctgaggggcaggcgcttcttcgtcgggcgctcgcccatgaccgacacccgagtcagcttcttcgtggcctgccacgtcccttctgctgccaccagcagcagcagcagggtggtcgacgcgcgcgacacgaggcatgccgtgctgcagaagctgcgagaccagcggtgccccgccgaggtcgtcgagatggtgcgggacgccgaccccgactcgctgaatgtggtcaccagggtgtggtaccgcccgncgtggcaggtcgcgctcgccgccttccggaagggcgccgtga

SEQ ID NO: 348078 - DNA, 362 bp, Zea mays
tacggttgcgatgacgactgacgggggcgttttttctggttgataccacgattgatgtgtgcgtgtatgagactaatccgtctgtggcgactgcggctccgtgtccgacggcgagtcagtggtaccagtggatggtagagtctcatgtgtttcatatttaccaactcttcgccaccattgcttgtaacgtgctataatgttatgttgtagcttcaacgcgataattacgtctactaagatctccgacatcttaattccgcattttccggttaggacgctaagcactagtgaattcatttcagctgatcttaaaaataaataactagcataccccaatgccgaaaggcttttttcttttcaaa

SEQ ID NO: 348079 - DNA, 92 bp, Zea mays
gttgcgaaggtagttctgtgcagatgaagccttggtgcggcttacctgatgttgagctcatgatgtgaaacaggaacgatacacttgtcttc

SEQ ID NO: 348080 - DNA, 241 bp, Zea mays
accgcgcgtgctgcaaggccggcatgcggccgagttcagaccggaacgttcgcgcgcagtgatcactacctggagagctttccaatctaacctgcctgtctgtataaaatggacagcaaagactctatacccatgctaactaccatatctctctacaagtcctcgcactatataacatgacggtcgacaaccgagcccgcggagtaccacggagagcgaccctttagccgaagaaaagccg

SEQ ID NO: 348081 - DNA, 149 bp, Zea mays
ttatcgagctactgtctaatggtcatgtagattgatctaacgtcggatctgtatcatatacgtataggagtcgggaaagacaaagcgaatatatatgtgcacgtgatccgtgacagttatgatgagcgtattcatgtatcgcatgatgc

SEQ ID NO: 348082 - DNA, 103 bp, Zea mays
  unsure (1)..(103): unsure at all n locations
tacaatgtacgaaacgattcaagatgaatttgaaaggggttatagtgattcattgttgggtgttttaactcgatcttntttttatgatgtactgcaggagaga

SEQ ID NO: 348083 - DNA, 179 bp, Zea mays
cccacgcgtacaaaacgatgggagaagacaactgaaaggggtgatagagattgatttttaggtgttctaactcgatcttgaccttaacatgtactgtgtgagagatcacactttgtctgacctgaaaacgctttgttatggtaaacactgcagctgcagaagcttgtacaaaatcgaca

SEQ ID NO: 348084 - DNA, 272 bp, Zea mays
cgggattcccggcacgccccacgcgtccggtgcaggactacacatctggagacgaaaatgtgtccctcgacgacgaacattccggtgacaatgatgactttgatcggaaagaaggggttgtataggctcagacgcggcggtgtgattgcttctgctgcatgagggaccctgctctagaggctgccatctgcaccgtcgatggaagcataattaacctgcctgtcctgattggttatgggtatacatgaaaactggagtgtcgcgcctaacac

SEQ ID NO: 348085 - DNA, 210 bp, Zea mays
agccatggcaatgtctgcagactcatggatcgagggatggatgctgatatcttcgaatcatgacggcttcattagtttctacaggctaggcatagtatcccagacagacgggctccgtactaattatgggctgcttggacgactctacgatgatctgaagaatgggccgacgctctctatgatccacacttacgtactcctgcatgctat

SEQ ID NO: 348086 - DNA, 242 bp, Zea mays
tacaggcgtgagcacagttgggagttttccttaaaaggcggttcgtttttctctgtattcttctttctttcaaggcatcgctacatagatacagcaaaaacattccaagctacctcaaaaacagctaccgacgtacaccctttcgacatctaagaccaaaatcatatatgcttactactagctattcctgtacttgattctgtctataatgatacctgataaacatgcaccaaaaccaacta

SEQ ID NO: 348087 - DNA, 388 bp, Zea mays
ccgcaatggcgagcagcaccatggccctctcctccacggccttcgccggcaaggccgtgaacgtgccgtcgtcgtccgccttcggcgaggcccgcgtgacgatgcgcaagacggcggcgaaggccaagcctgcggcggcgtccgggagcccgtggtacggccccgaccgcgtgctgtacctgggcccactgtccggcgagccaccgagctacctgacgggcgagttcccgggcgactacggctgggacaccgcggggctgtcggcggacccggagacgttcgccaagaaccgggagctggaggtgatccactcccgctgggccatgctgggcgcgctcggctgcgtcttccccgagctgctcgcccgcaacggcgtcaagttcggcga

SEQ ID NO: 348088 - DNA, 112 bp, Zea mays
  unsure (1)..(112): unsure at all n locations
ttcggtggtgaggtatgttacnaaggttggggtttttccaagaaaccctccggttctcgatgtcggaagcgattcatggggcttttgcgtcgcaagggatgcaatttgtaaa

SEQ ID NO: 348089 - DNA, 139 bp, Zea mays
gggagagagcattgtttgagagggtgagaaagaatagcacagtggaagaggaagtggaaaatgaagtagaggaggaggatgaaagtggcgttagtattacttgagaagagaagaagaaaggggttggtagtaatggtgg

SEQ ID NO: 348090 - DNA, 232 bp, Zea mays
catcacgcccctcttttttttttgacccattgcagaatgcaaaataggaacgtgggctggtgcagtggagtaaggtcgcctggaccagtgttttcttttgttgttctttatcgggtatttgtctctggtttcttaaaagtatgtagagagtgagtgaattcgtggcatttttgcagttgatgggaccgtgttttgagactgtaacctgccaatcaagcgttggagattcccc

SEQ ID NO: 348091 - DNA, 94 bp, Zea mays
gcgccaactaaagaagaagtcagattatgtggctagcaagttccagacccagtgagagaaacacagtgataattcaattcaaaactcggcacag

SEQ ID NO: 348092 - DNA, 361 bp, Zea mays
agtcagacgaaaaaaaaaaaaaaaaaaaaaaaaaaaaaaaaaaaaaaaaaaaaaggaaaaaaaaaaaaaaaaaaaaaaaaaaaaaaaaaaaaaaaaaaaaaaaaaaaaaaaaaaaaaaaaaaaaaaaaaaaaaaaaaaagggggggcggccctttttttttttttttgcctttacccccattttgggattttaaaagttaagggaaaaaacacacgggttaacttttgtttcaaaaatttttttccaggcccaaagaatttttaaaaaaaaataaaaccttttttaattaaaatttgggggcaaaatttaaaaattttgggaaaggggggtacgacaccctttaatttcccgtgaaaggcc

SEQ ID NO: 348093 - DNA, 240 bp, Zea mays
cccactgaagtcgaacccctaatggcttctcaagttcttcttcaacaggcactgtttgcccccaagctaagtttcccttcttcttctcgtaacgtcgcgttaatttctagggttccttccaccccaatttcatggcgttgcactcctctcattgctaagcctagtttcgctgtgagagctgactccaacgtcgaaggcgctggtgaagccaccgaagatgttccttcgtataatgttgat

SEQ ID NO: 348094 - DNA, 125 bp, Zea mays
aaaaaggaaaaaaatactgctaaaacatgaggaggctctaaataggaaagaattttgatggtaagagagaggaatgttggaaaaagaccacaaaaaagtctgaaaagggtagcttggaactggaa

SEQ ID NO: 348095 - DNA, 321 bp, Zea mays
tggaagtctaaaaatattactgctattgacttttcacggaaacacacaagcagctccttcctaagctccatagatagatcatgtaagaaataaatattctacatgaatacactgtaggggaaacaatcgtgaaaatcaactagagttggtctattcatcaggatatttatgtgatttgtgagcttcaatgtattcatctaccgagataggaaacaaccaaagtataacacagtatagccgtatagtgaacatgtagactgaatgtgatattccttgtacttcatgttcctttttaagtttgatgaaggaagtttgtaagtt

SEQ ID NO: 348096 - DNA, 385 bp, Zea mays
cggacgcgtgggaagcatttcacggtttggtgcaaagctggacagtcaacaacatagcggcatgccggcatcacgattcaaccaacagaattgcagctcagcttgataaggcatgaacataaaagcattgaaggccagaaaagtgtatgtgatgaaggattgaagtttttggaaacgtagcagcatcaggatcttggagattatattatagtaggcgtacctacatttatacgaacaaaaaacgctggtcttaaaggccagaaaagcaagctaatgagcgctacagaaaatatgtgttattttgaactgcaatgttcagtctttatggaggtaaaccaaaagtactggttttgaaggggctgcagaagcatgttaagagcactac

SEQ ID NO: 348097 - DNA, 96 bp, Zea mays
aaaaaaaaaaagggggcggccgttttgggggtcccaagcttacttccgcgtgcttgcgaggtaatacctcttttttggggccacctaaatcaaatt

SEQ ID NO: 348098 - DNA, 255 bp, Zea mays
caacaccaatgaaatccagtgtatcctctcaatggctatgagattgatatacatcatcatctatcaaggtaatgctcagttacctgaacctatgcctaatcaaacaaccatggtgttctacctacaagacataacaaaagggtctagagccacagtgaccccagtggctggcatcaagggaagcgataggacctacaccacatttggatccatatttgtggtggatgaccctgtcacgctgagcataagcccaac

SEQ ID NO: 348099 - DNA, 257 bp, Zea mays
ctcatatagcagatcaggatgtgacgaaaccatgtgatgtagccttatgcaatacttcagatgattgctcccatggacagtggggaaatattgtgctaaagcatttatatcagtcattaggtgatggcaatggcggcatagaggggtgcataagggaagcacttattcattatcctaaacataatcataccactacagttatggaaacttttaaaattgacaaagatggacaagaatgctctttgcaatttgagcca

SEQ ID NO: 348100 - DNA, 259 bp, Zea mays
ttccccttaatctgtgaggaaaagggaattatgggttctctttatttcagttcaatttttccttttagtgttaaaaatattacctttattattattattattattgtgtggagattgattcatgtaatttgttgaacggttgaagatgagaatttgtggagcagcaatcagcagcagctacaccaccacgtgcaattcccttatagtgtttgcttgctcttacctctccagtcctgcaaaaaccaagttcctgccctca

SEQ ID NO: 348101 - DNA, 385 bp, Zea mays
atttacatccctataaccaagggagagttttctgtcattgtatcaactttcaattacatcataccgcacctcatgggctggagcacatttgtaagttcaatcaaacccgaggagtcacggccatacagcaggccgcagtccacgtctgagtacgaatggcgaacgtgatgtgttgatcaactacagcaaaatggctgagacccacactgaagggatgagattgttggtattgtttggctgggtaatctcatatgtggctagttgatggacgcctttttggggtactccttttgtttcctttctagttcagcaggcaggtagcactacttgtatccagagtttcacggggcggttggagagggggcatattttgggcagcaaacct

SEQ ID NO: 348102 - DNA, 310 bp, Zea mays
gtcccgccctcgcccccatcctccttctacccacagccactgcctcgccaccacccgcctccacctccgctccacatccaccatcatccgccgcagcagcagcagcagcagcagcatgatgcatgagtatcgagtagccgcagagcagcgcgagaggatcagacgatgccattagcttattagctcctttatttatccttcttcttcttcttcttcttcccttgtaatttcagtgacatcccagttgttaaggagttgactcatcatgcagcagttaggagggattaatatgattgtgtgacctaatctc

SEQ ID NO: 348103 - DNA, 310 bp, Zea mays
cggacgcgtgggaaaaaaaaaaaaaaaaaaaataaaaaaaaaaaaaaaaaaaaaaaaagaaaaaaaaaaaaaaaaaaattataaagataaaaaaaattaaaaaaaaataatttaaaatatataaaatattctttattgtcaatataaaataatttcgtttgtctttttttttctaattttttttttgtaaaatcctgtggtaaaccatttttttttctttgattaaaatactcttttggcatggtgtttttttatcgagtatgttttaaccgatcgcctttctaaacagttttttatcctgtttggcaaa

SEQ ID NO: 348104 - DNA, 162 bp, Zea mays
agtatttagtatagtcacaccttcaataaagtagttttgtttgactgcattgacatcacattgttaagaggtatgctcaactttatgtttcttatcgcatccattttgctttttatatgcctttaacgcttgtgctctttccaggattggttttctttacta

SEQ ID NO: 348105 - DNA, 250 bp, Zea mays
actcccttaacctcatgcaacacaccatattgggaaggttgcaggatagcaatgcggtgttgtcgcatttcaacgacttctctcagcactgctttgctgaaatttccggcgacatcgctaggaacacgcggtgtttggagtctgtcaagtccgaccttgattatatctttcagaagctcaggtattcttttttaggagggtagtttgtcctgaaaactgcatattttgtgagatgttttgtggatgtaag

SEQ ID NO: 348106 - DNA, 358 bp, Zea mays
gcactgcatatggcttcatacctatagtagtagttgaatctttgttgggtggggcccaccgtccagcagacatgtaactttctcttttcttgcgctataaaagagattagagtaatgtagaaataaatcagacccaggcgaacacactcacctgggctggtacaggtctagtcaatccagaatctgtttaattccacaagttaggtcgaaccaagggttcaagtgaaccagaggtcagttagtctataacactcactagaaccaaaaggaacgagagagctatttggtcatctgtgtctcgagcaatatctgagtgtgtaatcttcttcgcctctgtttcaatcaatccatttatcac

SEQ ID NO: 348107 - DNA, 261 bp, Zea mays
gtcagcttcagcaccacgagcaagattgtcctcgcgctcgccacgaccccacgggggcattttgcattatccccgaccacgatcaactgcacctaatactcgatgctcttcgcttgccgctttgcttttccagagaaaagctacaaagttcacaagtagataaatctttatctagaaactaaagtacgctaactgttatctgagcgcatgcaactcttgttttggatagaaaagctccaaattgcccaaatacccgtatct

SEQ ID NO: 348108 - DNA, 382 bp, Zea mays
ggccgagcagagcacgcacagtgtgattgtgtgtgtgtctgacatggcgtcgctctggctagcgagagcgtcgtcacagctggcgcgccgtgccgccgccaggaggcctcctccacgtcctgggcgccacggctccggccaacccaccagttcgtggttcttgggctcggtgccgcaggcggcccttgggtcaccagcgctggacacaagccgccggggcttctgctccgtccggcgcttcgcaggggagagcagcgctgctgctgctgcggcggctgtcgtcgacgaggagccggagagcgggttcgcagccggcgatcagcaagtatgcgtcgaccagagcagcagctagatagattctgaactactagtatgaactttc

SEQ ID NO: 348109 - DNA, 287 bp, Zea mays
taaaagtcatgccgggacatgattcttatattgaaccttttgttcactctatactgtatttgttaactctaaacagcaccgccttctgtttggtcatactcaaaactggcgaaaaggctatggtcgttcaacgaaaaacttgtcaagatctatgcttatatgtcacaaaccacacccgccagcgaaaaggggggaacccccggttccaaaaacgtttttcaaaacaaggggcgggcctatatgggggttcgatttttactttttgtgcatgtccccttgggccccat

SEQ ID NO: 348110 - DNA, 248 bp, Zea mays
caatcggtgcttcctccggcggcgcgtgggagtgtctttggcgcgtgattcctagttccccgcttacctatgcttcgctcgacccacattgtagagttcacgccggagagacggcggaatctcaccggacgatcgtgatttcgcatcttcatggcttccgcctaccggaacgaacctaattggccacggcatagaagcggtggagctggattcatgggaaaagtacctttctctaaccctaaccctac

SEQ ID NO: 348111 - DNA, 202 bp, Zea mays
taaaaaaaaaaaaaaaaaaaaaaattttaaaaaaaaaaaaaaaaaaaaaaaaaaagtaaaaaaaaaaaaaaaaaaaacaaaaaaaaaaaaaacaaaataatataatagggggggcctttttttgggttccacgctttttttcccctggcttgcggggaaaaagctttttttttggggcccctaatttcattcccgcggcggc

SEQ ID NO: 348112 - DNA, 416 bp, Zea mays
  unsure (1)..(416): unsure at all n locations
tccgggtcggccccacccgtccgcgagcttgcaagtcaggggctcatgaacagtgaccagttcagcggcggcggttcggaggcacaggcggcggcagggatttttggcgggaacttcgttagtgctggtggagatcaagttccaccgccggtgctctacagagaccaagcctccatgctgccgcagatgtcggcgaccgctctgctccagaaggcggcgcagatgggcgcgaccacgagcgccaacggcgccggcgcggcgtccatgttccgaggcttcgcgggctcttccccacacgtgcggccagcgacgccgcacatggaacagagcgacgcgaacctgaacgacctgatgaactcgctcgctggaggcggtggcctcngtgccggcggaggaatgttncgcggcggcagcaa

SEQ ID NO: 348113 - DNA, 203 bp, Zea mays
attacgcttgtagtcattattgggcatcacaaaaattatggctctctgaactcgtcgattgttattacatgccatgttccttcaatccaaacctaaaaaaaagtaaattagaatgaacaaactaaaacgcataaactaaaaaaaaaacttctgcgatggactgaaacagcacacctggcataaggaagaacggctcgcctaac

SEQ ID NO: 348114 - DNA, 331 bp, Zea mays
agcaatccacacaagcacttcgaagtcgaacgggcgctgcacacagacacaccaagcgtcggcaccaatggcttactaccaggaggtggactactgctcggaggaggtgaggtcggtggccccggccggcttcggccgccacggcggcggcgtccagcagcacgtcgtcaaggagaagttcgaggaggtcgacacggtctcacgcgccggcgccaaccaccaccaccaccaccatggtcaccacggcggccacggcttcatggtgcgcgagaccagggtcgaggaggacatcaacacctgcaccggcgaggtccacgagcgcagggagagc

SEQ ID NO: 348115 - DNA, 261 bp, Zea mays
gaggaggggaattcaacatcaagacgatgtactgctaaaattttacttgccttacactactatcgttgaggttcacgtctgcgtattgattagaaccttgtttgatcgataatccaagatactagtagtatgtgtgtggttgatgatctgtctgaaattctacacgaaaagcctgcagaggatgaggatccgagttggccatgccctctgttcttcagctcgaaatgtactgatttccttgctattgttaaggttcatatt

SEQ ID NO: 348116 - DNA, 352 bp, Zea mays
cggcgacgggcacggcgcggcgaacggcacggtcaacggcaacgacgtcgctgtcgccatcgcggtgtaacagtaatgaactggaggatagggacgaacgaacgactggtaggtgtggcgtacctgccgcgtgcccaccggccggccatatatatcgaatcccggcccggcgcggcagcacgtgctattgttacgtgtcaccagcgtacgtgtctgtgtagtgcctcgatcgtatctgtacgtctttaggaaaaggtgtgtccgtgtgtattgtatgtgtgtgagcaagcgtgcgtgacgcgctctgcctgtgtgacaaagcaaagcaatacaagctcaggcattttctgtc

SEQ ID NO: 348117 - DNA, 145 bp, Zea mays
ccgggtcgacccaagccttccggaacgttattaacccccctgcctactgttgtgcacacggcgctcatcaaggcggtggcccatgccatgtcaggggcgcatcgcgcaccgaccttctccatcctggacacgtgcttctagggcc

SEQ ID NO: 348118 - DNA, 336 bp, Zea mays
cggacgcgtgggcgacccacgcgttcgcccacgcgtccggtgcagtggtgttgttgctttggtttcatttctggatgcatgcgtcatctttcatacttggatctaagtgtgcagtagtcgtaaatgattggaatttctgttttagtttggtgcccattcgatctcgagtcgattttcactcatgtaatttgcaaatcttgtacgaagaaatgatccaataaaattcagcatttgtgtcaaaaaaaaaaactaaaaaaagacatgaacaagccaaacaactaaaaaaaaaaaaaaaagcatgacaagccaaaaacaaaaaaatattcggggcggccg

SEQ ID NO: 348119 - DNA, 305 bp, Zea mays
cggacgcgtgggcgctgtcgtttttgctcgcggttcccaggccttcagtgcccgtcaccgttgtttatagtaacagatattgattcttgacaaaggaattgtaggatattgagatagatgatagtatatatgtgaaaggttctatgtaaccattatatattaatattttgtatgtagtggcaacacatcacgactctttgacgatgattaatgtgaactacttcaaggaattgatgcgtacgagtctgttgttgcattcattgctggacttacggcacccaccgtccgtttgatgggtcaatgct

SEQ ID NO: 348120 - DNA, 286 bp, Zea mays
cggacgcgtgggctttttatatggtaacttattttttctcatgcagtgcatgtgacttgaaactttgttaggacatagtttgtgaaagggaaatggacccaacattttctatagtcgattttggtatttgacgtctgtctcataaaaaaaaaaaaaaaattaatgaaaaaaaaaacaaaaaaaaaatataaaaaaaataattataaaaaagctataaaatgagtaaaaccaaccgatccatccattttccatgcacacgtcttgtcaagtttattgattagtaagg

SEQ ID NO: 348121 - DNA, 97 bp, Zea mays
cggtccggaatttccgggttggaccaacccgtccgtccgagttaacctgcttaatagatggtccgactgccggttacatgtttggctctagtcaata

SEQ ID NO: 348122 - DNA, 223 bp, Zea mays
  unsure (1)..(223): unsure at all n locations
accggtccggaatttccgggtcgacccacagccttccgggaactcctaaaccttaaatctaaaaatagctggggattgagtttgcattgcatcgggtttttgccggtctaccaggggactataaaaatatgggaataaccaataacccatgggggtaaaaaaaaaaaaactaaaaatgaccgcactcggaatgataacagacaacaccaactaaattnanttt

SEQ ID NO: 348123 - DNA, 89 bp, Zea mays
gtaaatgtattaatcctactgtctcagtaaatgcgctggcttggaaataatgtaaatgatggaacatcatggaacgtttgtttcccttc

SEQ ID NO: 348124 - DNA, 398 bp, Zea mays
  unsure (1)..(398): unsure at all n locations
gtccggttcttcccttgggtcccgcagctgcaatccctttccttcctcgggggacctagaaactcgtttttcaaaacccccatgccaactggccctggtctgtgtgtgctttagttgcgtccatgaccatgaatgagaatgaacctgtggctggttggttggctggttggctggcatggcatgcangggagttcgcggcgttcctgacgggggcgaacctgatcatggagtacgtcttatccaatgccgctgtggtgcgcagcttcacggcgtacctcggcaaggcggtgggcgtggacgcgcccagcaagtggaggatccccgtgccgggcctgccccaggggttcaaccaggtgggaccttgtgtattataatgtatctgccaacatctgatgctc

SEQ ID NO: 348125 - DNA, 143 bp, Zea mays
atttttgagtccctttaatatattgccgtgtatatagggtattctgcacatcgccaaatgtggcgaggtcttatacagatttctagccatttaactgtggaaaattgcaagagcaaaactatgatattttttcccggacgcct

SEQ ID NO: 348126 - DNA, 225 bp, Zea mays
  unsure (1)..(225): unsure at all n locations
accggtccggaatttcccggttcgacccacccgtccgaaaatgcagaaaagggtgtcgatttcgtgcgcctgttcaaagctgttttgagtcagccacgcctttgaaaaatctgaggtggtcatcgctgggttaagccgtgttcacaggttggtcgcctactttgttattactggtgatgtaagttgacctggtccttttgaaagagaaggtttacccgtcttana

SEQ ID NO: 348127 - DNA, 317 bp, Zea mays
gttccaaccttaatgcactgccaaattgtggtggcatttttgcgtacaatgctgtaactgtacagttgtgtgtgaagtcaaatgggcaggctgcattactcggaaaaaaaaaaaaactaataaaacacaaaatcacgtaggacagccactataaataattcaacgctccacacctcggcaagcgtacgctgggcgtatctattggatcgcatattcgtatgcatgcgtgtgtattattgcatgcaatagttgggtgaaaaaaacaccaataccactctttagtctctaaaaaacaaatctgtttttaccagaaggcg

SEQ ID NO: 348128 - DNA, 301 bp, Zea mays
ctcctatttgcaacctccaccaccctacaacatgcccctacgcttttcacaacaccaccccccacttaacaaactatgtccattagtatacccccttcctaactacctacttgaatcattcagcagcaatgatatactcataactacccacgcatcaacatccctgccatcatcagtgataccaatgacctgaatgaacaattaaactgaaaaaaaccaaaaaagtccattccctctagaacatccaaacttacgtacgcatgcattcaacttcataacaattctataagcttaactaaat

SEQ ID NO: 348129 - DNA, 328 bp, Zea mays
  unsure (1)..(328): unsure at all n locations
gacccacacgtccgcacaccaagcgaagcgcactatcaacaacctatcaacaatggctaccaagatattanccctgcttgcgcgtcttgcccttttagtgagcgcaacaaatgcgttcattattccacagtgctcacttgctcctagtgccattattccacagttcctcccaccagttacttcaatgggcttcgaacatccagccgtgcaagcctacaggctacaactagcgcttgcggcgagcgtcttacaacaaccaattgtccaattgcaacaacaatccttgtcacatctaaacctacataccatctcaacgcaacagcaacaa

SEQ ID NO: 348130 - DNA, 306 bp, Zea mays
  unsure (1)..(306): unsure at all n locations
cgggncgacccacacgggcgaggccatatcttcagcaataaacccaaaacagtcacatctctcgtcttttccacactcacaggaggcactgactgacttctaagtgcagccttcaataaccgaatgcattcccctacactgtttgcagaggggtgccccacttaaaaaactatatgctttaatataaaccctggctacctagatagatgaaacatttaacggggatcattgaataataatgtgtcacacattaccattggtttaagattcacactgagcaatgacacttaatgaacaattgaaatg

SEQ ID NO: 348131 - DNA, 322 bp, Zea mays
caatttcacccaaaaaaccaaactggggtaatctgcgaattttaaaagcaaacttccctaccttaaccattaacccacatatttcacaaactctataacctacctacttctatacatacctctcaccatcttttactataatgattcaaaacccaatccaccaaccctacatcatccaacattcaatctcaacattcatattaccattattaccctatttccttcaacaaccttcaaccctattacttcatttacctttacttcattattattcacatatcattatttcacaacaactacaacaactttttctatcaaacct

SEQ ID NO: 348132 - DNA, 301 bp, Zea mays
cgcgtccgacaccaatctattctcactatcaacaaccttacaacaatggctaccaagatattatccctgcttgcgcgggttgcccttttagtgagcgcaccatattctttcattattccacagtgctcacttgctcctagtgccattattccacagttcctcccaccagttacttcaatgggcttctaacattcagccgtgcaagcctacaggctacaactagcgcttgcggcgtgcgttttacaacaaccaattgcccaattgcaacaacattccttggcacatctaaacctacaaacca

SEQ ID NO: 348133 - DNA, 53 bp, Zea mays
  unsure (1)..(53): unsure at all n locations
gacccacgcggccgaagaaacacatccagaggacatcnacaggggaattaatg

SEQ ID NO: 348134 - DNA, 235 bp, Zea mays
acccacgcgtccggcgcagaataacccgatcgacaccacgagggtgttgctcgttgccctcgctctcctggctggcgctgtgggcgccacctccacgcatacaagctgcggctgcggctgccagccaccgccgtctgttcatataccgccgccggtgcatctgccacctccggttcacctgccacctccggtgcatataccaccgtcggtccacctgccgtcgccggtgcacctg

SEQ ID NO: 348135 - DNA, 226 bp, Zea mays
atcgcgcataatttctcgtaaaaaatcctgctccccagcatacctgctcccaatcttcccggacctatcgctgcattttctcccccttctactcttccttattcagccaatcctatctttgactcatacaatgtactaacactttaaattattattaatctactgaaatgcttcataaattttacatgccaacttctctttaatgtttattattataaaattcttt

SEQ ID NO: 348136 - DNA, 187 bp, Zea mays
gacccacacgtccggcgcataataacacaatccacaccatgatgttttttctcgtttccctaacatctccttactcgatatttgacgccatctccactcatacaatctttctcatcgcaccaacagccacacactatttttcatataccaccgcctcttcatctcccaattccacatcacctcccac

SEQ ID NO: 348137 - DNA, 300 bp, Zea mays
cggacgcatgctatctaccataaaattttgagcattcaaaaacacacaacttgaatctgcacgtgcaactgggccaacaacaacaggctaccaaaacattatacctccttgccctcctttgccggacctgacacgcgaataaactactcattatatcacaaggcctactagatcatcacgacaggatctcacattttcattatagaagctcaagaattgctactccacaccctatacttcatgtcatcttgcttcaacaggctcctaattggactattctacaacaaccgtattgacgat

SEQ ID NO: 348138 - DNA, 206 bp, Zea mays
  unsure (1)..(206): unsure at all n locations
ggaanncccgggncgacccacacgtccacaaaaatccattacccacaaaataacaacatttcacacccacacatcctaatagacgaaaagaatcatctcaatctccattcattcctatcacttcatccctccctatctactaactatcccatacattttactaattttactcaaacaaccaatcaattcaacttataaaaattcta

SEQ ID NO: 348139 - DNA, 311 bp, Zea mays
ttactttataaaacttatcaacaattgggttccatggattaatctcacttttacctctttccccatttcaaaacccaacacatactctcataaacccacaattcatacactctcttacatctattttaccacaaattcttatatccattaccataattagccttaaacaacttaatatcccaatctaccacctaaaataaaccctttccatcaacttctttcctccacccatttaaccatttccaccaccatcctttgccaattctaccatttcaaacatttccacacaaccccaacaacaatttcttaca

SEQ ID NO: 348140 - DNA, 428 bp, Zea mays
gcgaagcgcactagcaacaacctaacaacaatggctaccaagatattagccctccttgcgcttcttgccgttttagtgagcgcaacaaatgcgttcattattccacagtgctcacttgctcctagtgccattattccacagttcctcccaccagttacttcaatgggcttcgaacatccagccgtgcaagcctacaggctacaactagcgcttgcggcgaccgtcttacaacaaccaattgcccaattgcaacaacaatccttggcacatctaaacctacaaaccatcgcaacgcaacagcaacaacagtttctgccatcactgagccacctagccgtggtgaaccctgtcgcctacttgcaacagcagctacttgcatccaacccacttgctctggcgaacgtagctgcataccagcaacaacaacg

SEQ ID NO: 348141 - DNA, 414 bp, Zea mays
gacccacacgtttcggtttttacaatgacaaacacaccaaccaaaatttcctatcaacaatttatccaccatttgcgccaatgtattattccaacttgcgcttcttgcaccatttttcaccacaacaaatacgctcattaatccacaacttcttactcccttctatttacactataccacaattccttctaacaactcctttaattgacctttaacaactcaacatgcaaacccacatggtataacaaactctttaccctagcgtcttacaacaaccaaataaccaatttctacaacaactcttgtgccattttaccctacaaaccattgggcacaaaacaacaaaattttatcaaaattttctatctatttgaacctttttcttttttaaacaattcttatataacccttttt

SEQ ID NO: 348142 - DNA, 352 bp, Zea mays
cgacgactgggcaactaccgctgcccaaggtcaggtgctcgagtatccgtcgacccctgcgctaggccattcccgttgacagcaagcatcagttcaataattccaataaggatctcaagacctacagctggggaatgttatttgacaatggtttcaagttgaccaaacagagtggatacagtcatgctcaaagttggcaagctgtgtcaacaagcatgccccatctgctactcgcttcatgggcatgcaacaaagccttggtattcagccgacgcagcttgggaaggatgcacctgcagcaggagttgcacgtagagttagtgcttaatgaaagaagatcgagggtgagtct

SEQ ID NO: 348143 - DNA, 155 bp, Zea mays
ttcagatccgcataaaacctcgctccccttttggtttgtgccacgtgacaggatctgtgccgcgatggcgacgtcgaacaccgctctgatggaggacggctgcggctacctgagaagcaccatcaagaagtggaacatgatctaccctgtctacc

SEQ ID NO: 348144 - DNA, 293 bp, Zea mays
gggtcggcccacgccttccgttaaggcccatttccatttaacgcaaaaaggttcattacaagctatatggcctctctttgggtgaggcttaagggttaccaaagcttatttcttgttacattgaatgtttgaatatccaatgtttaaatatcaatttttagtattaaatataagcttattatatttaataaatctgcctcgtttttttatttaatactcattattgatatttaaacattcgaaatcattacataaactaattttcttgttccttcactcatgcgtgattgcac

SEQ ID NO: 348145 - DNA, 305 bp, Zea mays
atattgcaacagggcggcacgttaaatatgatcagcgttcagatgttttcagttcatccacgagaggatcactaggccgtggtcaagcatttgatgcgctaaatcaagggcctgatcagggagtcgcctcccccaagatctgtggagaggaaatgcagctcaagggcttcagcgacagcgacatggtaggctgttagagtatatttactgtgttgccactattgtaatgggcttggcccacctaactcagaccatatatatatatatatcacccaaccccctgttagggttagggttttgcattc

SEQ ID NO: 348146 - DNA, 200 bp, Zea mays
  unsure (1)..(200): unsure at all n locations
ccggnccggaanncccgggncgacccacgcgnccgcggacaagccncncaacagcaagggagnccaccaagcccnccgcgccgcnggggcccgggaggcncgcgcccnccncgnccccgcccgcncncgcgngggagaaggcggaaccggagngccacncgngcgagnccggcncgccacccacgaaccggcggcgcccc

SEQ ID NO: 348147 - DNA, 138 bp, Zea mays
  unsure (1)..(138): unsure at all n locations
ccgcccggaancccgggcgacccacgcgtcgggggctcctgatggtctacccccctgttcatttgatgccattccataccaagggctatgggtgccggtcaaagcacctcaaggacgtgaagaacaatcatattaaga

SEQ ID NO: 348148 - DNA, 185 bp, Zea mays
gaccgccggaatccggtcgacccactcgtgcggaatgtcgcttgatctccgtccaaattggaatggtaaatcagcctcagcagaatgttacctacatttgcttggatcgtataattattgtagactaagattattagttatggccaataacctttgcttactagccctttcacgtgatgccgatg

SEQ ID NO: 348149 - DNA, 156 bp, Zea mays
ggacgcgtgcaattacgtgatgggttgcaaactctacaaactggtgcacgtatgccgggccacgctcattaatcgtctctgatactatgctattggcagctccagctcggttcatgaccgatcaatgacaggattggcagcggctcacagctggct

SEQ ID NO: 348150 - DNA, 290 bp, Zea mays
accggccggaatcggtcgacccacctctgcctattttagcggagagagagaggaaagctagctgctgcatggaggcgcgcagaagcagagcgggtgtgcctgtctttcactgggttagctcacgacgcacgcccctctgcaggatcctcacgggtggctgacatatccgagggatttggcatcatgaagcatcttggggaaactggtttctaccatgcttcggagcatggttgcaagcatgccaaattgatgaggaatctgactacgctttgtaattggtggagaacaca

SEQ ID NO: 348151 - DNA, 365 bp, Zea mays
ggctcggcaagactctccaggcgattgctatagcatgctgtttcaaggacgagggctctatattgatagtatgtccagctgtattgcgttattcttgggcagaggaattggaacgctggcatccttcatttatgccaaaagatattcatattgtatttggtcgtcaagacagtcttgaacatctaaatgctactccaagggcagtgattatatcttaccagatgctaagtcgccttagagaaagtatggtgaatagaacatgggcactgatgattgttgatgaatcacataacatacgctgcacgaagaaactagaagaaaaaatatgagacaaaaagctgtgctacatctagctttaaaaactg

SEQ ID NO: 348152 - DNA, 110 bp, Zea mays
acaaatcattatcccccctacatttttcatctatatcacgaactcgcttatagtgtgcgggtatcaaacggatttaccgtaccttacccagtgttttttctttacatact

SEQ ID NO: 348153 - DNA, 407 bp, Zea mays
ttctttgtcgcgctcttggcgcccctctcggcgatttgcttgactctgatgggtttggggtgtggtgcgtgcaggcagggggcagcactaatcgaatcgagactagcgccatgaacccgagaggttagtctctcttcgtctattgattgtatgccctgttcctattggaaaatttatgcactttgtgcagccatcgtagcaacagaacttctctcttcgatggcattgaggagggtggaatccgagcaacatcctattcttctcatgagatagatgaacaagaaaatgatggaactattgatggactggaagatcgtgtcaacattctcaagcgggtggcaagcgatattcatgaagaagtggagacttataacaaaatgcttgaccgaatggggaacgatatggat

SEQ ID NO: 348154 - DNA, 114 bp, Zea mays
ggcaggcgtgtggatcgttctcggttggtggacaggtccgggacatggacataatcaatctgcgagaggacaaaatcctggatgattagtagggttcacagtatggataattcg

SEQ ID NO: 348155 - DNA, 441 bp, Zea mays
gccgggccggaatttccccggcgacgccacacgcgcggcggtaagctggccagccaccagggctccaccacctctgttcccgctcccgcctctcctggggctcctcgtcatcgtgcctctgttccccaccgccgcgcggacggccacgacgctgccgctgtaccgccacctaccgcacgtagccgaggccgtggcatcgcaccaccacccgctgtcccgcctggccgccgcgtcgctggcccgcgcgttgcacctcaagcgccgggaccccaaccaccacagccagaaaggatcaggcggccacccgtcagtaccagccaccgtcgcgctgtacccgcactcctacggcggctacgccttcacggcgtcgctcgggacgccgccggagccgctccccgtgctgcttgacaccggcaggcaccttacgtgggggccatgcac

SEQ ID NO: 348156 - DNA, 191 bp, Zea mays
accgtttcgattcccgggtcgaccacgcgtcctgaggtcgaggctcatgaggagatccatatgctcgtccagcatatcccgagggcggggtcatgtcaagtttggcgtcctcttcaatacaaccggtgtcaaatatcttgaagctattttagctccttgagggccgtcaagaagaggaagattctaaccta

SEQ ID NO: 348157 - DNA, 276 bp, Zea mays
  unsure (1)..(276): unsure at all n locations
aacccgccaaccccagccgaaagccgggcggaggaagagggacggagggcagcacggccgccgccggggcagccgcagcaaggagctgaggacggccgccggcgacgacaactccgacgccgacgcgggcgnggaaacggcggcggcggcggcgaggaagccgacgaacgcgncccggagcaccggcaagagccggcgggcccggngcgcgggccgccacgcgcacccgggctccaaggcgcgcgacaaggcccaaggcgcgcgcaagctgcgcgc

SEQ ID NO: 348158 - DNA, 162 bp, Zea mays
ggacaccatctatgcttcaaatgattgatcaactttcggactcaactggaaatgccttgtcaccaatccccttattgtttggttttgcagtatttgctggagcatttgaagcatagttggtgtccttactattggcaggcaccactggctgaccatagcttc

SEQ ID NO: 348159 - DNA, 334 bp, Zea mays
accggtccggaatttccgtttcgacccacgcgttcggtcgttctcaatccagagagccgtaccattcctcatcgccccagaccagaccaacagtgagtacagcagcagcagctgagagcgtcatgcgtgagagcgtgcgaagcatgagggaggacaagaagaagccgatggcggttgtgagcggcagcggcgggaggctgaacccctgggcaaagcccttcgtgcctttcggggcgtggtaccgcggcctgcggaccgtggaggcgactccggattaagaggtggatgacttctcccccgagtggttggcgcctggtgtctggctccccggcct

SEQ ID NO: 348160 - DNA, 280 bp, Zea mays
ccggtccgaatcccgggcgcgcacccgtcccctgacgaaccacttccatggcggaccactcagggcgagcagatcgcggattgaggaggcctcagcctctcgaaaggaggcgacgctgcatcactaccaagggcttggaactggatgcgctcccttggcagaccccactgaagcagagctgaggacatgacaacgagttgatgctgatggaatgggacattgacttccagagtcctgacctgatggcaggaagatgaggacaccgcctcgaggaggagct

SEQ ID NO: 348161 - DNA, 256 bp, Zea mays
caacataatcttgttgaacagtctgttttttttggcgattaggacaaaatgtataaagatctatttatgaaagcaatgtcaatccaagcttaccttttttttttttttcacagaaaaacccacgcgttcgcccacgcgtccgcccacactttctaaaaatatataaaaaaaatattaatattagtttaggtaattaactactttattatatatataaatatagattattaggcgggccgttctaaaggatccattt

SEQ ID NO: 348162 - DNA, 167 bp, Zea mays
ctatgacaaaacattccgaagcttttgaatggtgaaggcagacattgtgggccgctgaaatggagggacatgtatggctgcacaagaccctatcaagggtgacaccaaaggctttagtgcataaattcgtggagattggaagcttttgagaacaaaaagcatgtttt

SEQ ID NO: 348163 - DNA, 180 bp, Zea mays
ggggggggacgagggggggggggggggagacacagagaagggagggggggggagggggggggggggggggggggggggggggggaggggggaaagggggggggggggggggggggggggggggagaaaggggggggggggagggggaggggaggagaggaggggggggggggggggaggg

SEQ ID NO: 348164 - DNA, 440 bp, Zea mays
gggccacccacgcgtccgttccaggtgaggaaagttacctttgtgatgaacctttatcaccaagcagggctcttcgtgcagcaatgctcaggagtcgttttgctgggactatagtgaaggctcaacagaaggcacttctggatcatgggaagaatatagaccctgtgaaattgcaattggaaaaggagaggctggaaaagaggcagcaagaagagaaagcaaggattgaggctcaggtgaaggctgctgaagcagctgcacaacaaaagtttgaggaagaaatgagggtgaagcgagagcaggaaagggaagcagcacggctggcagtacgcatggtacaacctgcttgcggttttctgacctgcaagtttatatgcttgatggtatgaagggataaatctcctcttgtgcagatgaagaagactgttgatattgacaac

SEQ ID NO: 348165 - DNA, 350 bp, Zea mays
gggggggggagagaagaaaaaaagggggggggagggaaggaaagggggaggaaaaaaagggggggaagagggggggggggaaaaaaaaaaaaaaaggggaggaggggggggggggagggggggggggggggagagggggggggggggggggggggaaggggggggggggggggaggggggggggagggggggggggggggaggggggagggggaggggggggggaggggggagggggggaggaggggggggggagaagggggggggggggaagggaggaggggagggaaagagagggggggggaaggggggggggggagggaggggggggagaggggggggggggggagg

SEQ ID NO: 348166 - DNA, 356 bp, Zea mays
aaaaatataaaaaaaaacgcgtggatgaaaaaaataattaattctaatttttttaaaatatagtattatttaattaaatataataaataaatgctgttgaatttttaaaaaagaggggggggataaaaaaaaaatattattaaaattatttatttattttaaattttcattttattatattaattaaaatattataattattttaatttataatataaatataatcttattataatttatcttttatttatatatataatatatattaatataattaaaaaatatttttaattaaataatttattaaataaatattaatatatatattaatatattaatataaattaataatacta

SEQ ID NO: 348167 - DNA, 273 bp, Zea mays
accgataaaaaacccgtcgcccaacatcaccatcactagacatcagcaggttttttcatatatattcctgttaacaagggcgggatttatcccagtgcgggaactctacaattttatttttaattctcaattctattcatctgtcatcataaatccatattcttaattaaatatttatcataccccaccaaaactatcttcttttaactcattttctaaaatttcttctaataatattatttttctcttttatctattattccatactatttc

SEQ ID NO: 348168 - DNA, 266 bp, Zea mays
ccacccgtccggaaaggagggacaaagggaggtcaagcacctcctatgctaaatgaatttctcttttatgcacatgatattttgctgtataattcaacaaaaatattgagttaccccctaataatatatcttttagcacttggcccttcttaaaaaaaaaaaaaaaaaaaaaaaaaaaaaaagaaagaaaatatataaaatataaaaataatttatgcgtccatgcgacggcatagcttttctcttagtgttacaccaaatccaat

SEQ ID NO: 348169 - DNA, 103 bp, Zea mays
cgaaaaaaaaaaaaagaagagaaaaagagggaaaaaaaaagaaaaaaggaagaacaaaggggggggaaaaaaaaaaggggggggggggcaacaaaaccaaaga

SEQ ID NO: 348170 - DNA, 429 bp, Zea mays
aagtaatcaaatgtttgtttcattatggcaagtaatcggtgatggttgaacaagaccgttgtaatttgaaagcatgcagctgattctattgattgcagttttatattgtgatgttgtgcgaggcatatgagtaccattttttcttcttaatatagcactagtgttctgataggcgcaggaaatcaacagctcgtgcagatgggtttcttcgagcaccctctcttgtcgacaaccttgttatatttcagaggttatttgtttgacatccatccatccatcttctctccaaatttaggtcggatgtacgagctctatcgacgttatagttgtgcctccgcgagtccgagctgacccagcagcgagtcaggtaccagcagtagagttgtttgttttgtcgtcccatactgaaaaatttatcatctatgcaca

SEQ ID NO: 348171 - DNA, 210 bp, Zea mays
ccccaccaaaagggaaaaatttttaaattaaacccatcccttttttaattctttttaacataaacactttttaacaaaaaaaaagaaaaaatttttgggttttttaaaaccaaaacaaaccggaaaaatactttatctttccattacaaaaggcttgacggaaaaccctttaaaaaaaaaattacctcccaacgtatttaaaaaaacaaa

SEQ ID NO: 348172 - DNA, 373 bp, Zea mays
gctttcccaaccaaccatgaactcacccgcaccacgccgttaacgggtccagaacctcgcttccaatctgccctcccgtgtccccctccctgtccgattccccacagtagcgcctcgccctcgtcctcctcctccagtccggatcgccatttcccaccgatccgtcccggcatcggcatggctgcgcccaagccaaaggcgccggcgcccagtgcttcggcagcctagcgtttgtttgcctccgaggatttccgcctatcgcgttaccggatcttcggtgggccggcgaccctctacgccactatgagctccgacgggcgcctccgccgcgcgctggccgcgttcggcggcgacgtgtgggacctcgtggacg

SEQ ID NO: 348173 - DNA, 394 bp, Zea mays
gtccgccgagtacacggaggccacggtgacggaggtggtgtccacgggcgagaacgagtgcgacgagtacaagaaggaggagaaggagcacaagcacaagcagcacctcggcgaggccggcgccatcgccgccggcgccttcgcactctacgagaagcacgaggcgaagaaggacccggagcacgcgcaccgccacaagatcgaggaggaggtcgcggcggcggcggccgtcggctccggcggcttcgccttccacgagcaccacgagaagaagaaggaccacaaggaggccgaagaggccggcggcgagaagaagcaccacttcttcggctgattgatcctcccgtatcgtcgtccctccccgtgtgctacgcgtgcgtgtgagagtgatatc

SEQ ID NO: 348174 - DNA, 436 bp, Zea mays
gcaatggcgagcagcaccatggccctctcctccacagccttcgccggcaaggcagtgaacgtgccgtcgtctctcttcggcgaggcccgcgtgacgatgcgcaagacggcggcgaaggcaaagccggcggcgagctccggcagcccgtggtacggccccgaccgcgtgctctacctgggcccgctgtccggcgcgcccccgagctacctgacgggcgagttcccgggcgactacggctgggacaccgcggggctgtcggcggacccggagacgttcgccaagaaccgggagctggaggtcatccactcccgctgggccatgctgggcgcgttgggctgcgtgttcccggagctgctcgcccgcaacggcgtcaagttcggcgaggccgtgtggttcaaggccgggtcgcaaatcttcaacgagggtgggctgggct

SEQ ID NO: 348175 - DNA, 370 bp, Zea mays
  unsure (1)..(370): unsure at all n locations
ccgggtcgacgccacgcgtncggcagaacaagaatatgaaaaggaaatgctcaatgagaggatagcaaagctttccgcgctgcgcctactcgatgcgggccaagtggaaaaagaaaatgatgctgaagctcaagatgaagcacctgaagatgacgtaaatatctaatagctgcttttatgaccgattattgttagcttatgctgcaccatggctgtgacgcgttgggatgattgtctccctttgtagacatgctttgctgtaaacgtaagcgatgtaaaccgtactttttgattaattctaaactttctgagactgcgtttatatttgaatttgacgataattatatgatgctctaactttattgatatt

SEQ ID NO: 348176 - DNA, 341 bp, Zea mays
aacgccacacactcaaccaacttaccaacttttttacccaccccgctcacaaaatattccctgtgctctatttaaaaacggtccctcccacaacaaactcaatacaccccctctcctctacccaactaatgaaacaaccttcatatgccatcaaacacatctatccattcctcctccctcttctcaaaaactactactgcttctaccctaacctcaagcatatccaccatctccaatacaccacccccacattctggctctcttctattcccccattaacaaaacttacatcacctactcctttctacctcgcctattaaaaataaatctattatttccac

SEQ ID NO: 348177 - DNA, 65 bp, Zea mays
aaaaaaaaccgccggacccaaacaaaaaattaaattccattaatacaccccttttttttaccaca

SEQ ID NO: 348178 - DNA, 187 bp, Zea mays
tcgacccagcttcgatagtggcgcttacaaacttctgtttgggatctcacagcagcccatggcggatggtctgtctcaaccagagcaaagatatcgtgaccagtggtgaaataaccagataggttttcttacaattaacagccaacctgctttaatggagagaaatcctactcgcctactgttggtt

SEQ ID NO: 348179 - DNA, 193 bp, Zea mays
ttttatataagaattccagagagattttttgaacatgcggatcgtggcttgctcgggtgggtaaggttgggaagaggagtatttacccaccttaaggtatacaaagggacgaacatccgcacgaggctcaaaaacctgtcccactcccgatcagggattaaataattcaaattactggattctagatattcat

SEQ ID NO: 348180 - DNA, 258 bp, Zea mays
aaaaccggccgagccacgcgtccgcagtgtgctctttaactgtgaacactttttttaggattataagcaattaatatccttcagcggttctttaaacagagaaggggcgtccacttttaatgatccaaactaacgtgccgatcggcatagatacacaggttcataaccatactcatatgcatatcttcgccctcttattcacaacgctgtgactggaaaaacctttaagacactaagcaaaatcatttatcccctaaa

SEQ ID NO: 348181 - DNA, 62 bp, Zea mays
ggaaaaaccggccgacccacgcgttcggccgcataagcagaatgcggagaatggaacgacta

SEQ ID NO: 348182 - DNA, 226 bp, Zea mays
gctgtagcggctgttaagaaatatgactttgtccaacttgatggtaagcccattaagagagagtatagttggttccaatgcgtccatctgcatcatctgctcatccagtccctatggtggtcatgctaggaatgctgtgaggagtgcaccaaaggatgctgcttcagcaggtatgtcgtatcatactacctcattattatggtgggaggcttgcttttctatcttt

SEQ ID NO: 348183 - DNA, 228 bp, Zea mays
cgctggtgaggtactcgatcgcggtcaacttcctggggctgccagctatcaccgtgccgcggtgttattacaggggagggctccctctttatctccatttcatcatcccctctttttctttatccacgcttttttaccttttctactctattcattatgctttctgttagtattttttttctttatctttaatttcatttcttattttcttatctattattaacttct

SEQ ID NO: 348184 - DNA, 227 bp, Zea mays
  unsure (1)..(227): unsure at all n locations
acccacaccgccgccgcagcgcccccgccccagcgccgacaccgccaacaagaagcacaccgaggcgacccccgggcccaacccncaggagcccaccgagccccaccgggacgacgaggacgcgcagcccccaaaggccggggncaacggcgacaacgaccccgccggcgagcagcagaacgacgggaaancgcgcaacgacagggccagcaccgagggccaccggc

SEQ ID NO: 348185 - DNA, 129 bp, Zea mays
tcttctccctcttgtccggttcgggtggtcctcggtcgttgtgagtgagttagtcatctttctttttttatctccttaattccttccctccccagcccccccggcccggctgctgttcttgaccctgac

SEQ ID NO: 348186 - DNA, 189 bp, Zea mays
ctacgactttgaccttctctctttctccgcggcctccgggacttcgttgcatcctccgaccccgcctatgaccccaacctcctccaatctgttaggtgggcgtgcgagatgttcccaacggctaatgaatctaatgactatatggtttcgcagtcgtactctgtgatgggcaagcttatttttagctat

SEQ ID NO: 348187 - DNA, 171 bp, Zea mays
acccacgcgtccgggcaaaactgactctgtggcaagcattttctttgcggagaggagaaacaaaaggattggggggtcttttaggcggagtcggcacgtctattatggcactgctgcgttctactatctgctactgagggtgatccgagggctgccatgacggagtacttt

SEQ ID NO: 348188 - DNA, 300 bp, Zea mays
cccacgcgttcgagggaagcggccttcctatgtgtagccaacaaggccttctggcccacgtttggcattcatgggggccttctaaagctacgcccagggtgaccttcttctctacaacttctcctatataagcgagctgcatgagctgccccggccttcaacaaatgctggttaggttggatattctgtgccctctggtttaaaggcggccgatgtctactgctgtatccaccacccgtgtcacacccccatcacatacggcgtttccactcccatgaccacctgtttccatgactctta

SEQ ID NO: 348189 - DNA, 232 bp, Zea mays
aatttcccgggtcgacccacgcttccgtccgggtggccttcctttcggcatgcgggagcacaaaattctaaagagaccacgccttgacgatgtcctcaataccgcccatcttttcctctgactgccccttttccttctaacgacaccaggagagaaatttcctcctgtgcgcgtgaaacaattttccttctcgccacgagatcatctccaactcaatggaagacctaaaagt

SEQ ID NO: 348190 - DNA, 52 bp, Zea mays
acatgacccggtgctgggcgccctcagtggctacatcacgctgcgggagctc

SEQ ID NO: 348191 - DNA, 277 bp, Zea mays
  unsure (1)..(277): unsure at all n locations
ccggnccggaanncccgggccgacccacgcgnccgcgcatcccctccgcctcgnncctggcncggcncgccccaacnncgctgccggccgccgccggcgcaanccccgcggggacgcgcgccacgncgcaccccggagaagacaggcggaaacgcanggacgccaccgccancgcacggaaacggaaccgagncnagcggcacggcgaaacgcgccggcgagccagaggcgaggaccaacagcgacggcggcggcggcggcagcaaggacgcgggca

SEQ ID NO: 348192 - DNA, 451 bp, Zea mays
  unsure (1)..(451): unsure at all n locations
acccacccgnccgcaaaaaannccgccgcggcgccggcngggaaggcngcccagccagcggcgaccaccaaggggcggaccaagcccgcaccggcggcgcagacgggacgggacgcacgcggcggcggcncaacagcacggggaggcaanggccgaggcgaacgaggccgaggcagaggcggacggggatangggcagaaccggggctacaagggcgacaacgggaacgagggccagggaggcnanggcggcggacgctanggggacggcgcccgaaccgggggaccgaaggagaaagggagagagacactcggcccccgacccggggcggaggcagacggaggggaaacaggaaaggcgacgccgcggacgacnctgagaggccaccacggagaaactaggagcgccacagcgggaccggccacggctacgagacgaaagcggatggcgc

SEQ ID NO: 348193 - DNA, 277 bp, Zea mays
  unsure (1)..(277): unsure at all n locations
ccggccgaanccgggcgaccacgcgccgcaccgaccgcaagaacggaaataaacgggnnccagaaggaggccaacggcaaggacgaggccagcacgacgcggaacagnncggcggaccncncancnccnnncacgnggaacacaaaacaggganccggcnncgcggcagcagagaacgagacncgacaaaacgcgggaaagcaaggcgccctgcgggaaggcaacacaccngcaaaggagcaggccaaggncnggaaccanacaacaaacaaggaca

SEQ ID NO: 348194 - DNA, 448 bp, Zea mays
gggcgaccgagcgccgacggacacgctagctctcctctcgagtacctggccgggcgccgctggcctgaccagtccccacgggccgcggtcaatgtttcttccggtcgactcgacgtggctcgctcgccagggggacgtcgaggctgagccgaccccgacggcgtccccgggccggggccgctacttccggggggggaccgccggcgggtgcgcgtcaccgtgcgcaagtccaccaagttgggctccgaagccggtgcttgcacctggaactccagaccatgagccccgtgtgtccaacctcttcggggtggagatctactggctgagtcgtcgcgcaaccccaccccggggcgggtccagctttaaaccacgccgactttttcaacatcgtcggcgccgcccgcaaaggaagcggaagagcggcggtggacgaggagaatggcgcatg

SEQ ID NO: 348195 - DNA, 465 bp, Zea mays
cgacgacgaagggtgtgggctggtcaacatgatcttcttgatttcagatttatttgatttgtgtgtcataatcgtttcgctttcagtttagcttcccttttcaattgtaacattgcaatcgacgctctctgatcgattgccctggtgcaatcagagaaaaggatgtgaactcgtgaatcatatatggtaagcacaggcagaggcccttagagttgcatctttaatttggttggatgctcactgtttttgtgtttagctggggatgaatgaggtacactggtgcatcaaccatcggatcaaaatattatgccaggatcattgtcatacacattcaagctacaggattaggctgatgtgatttaactgcgctcatcaaattgctatgcgtctagtagattagtttcatgtagagggtatttagcgctgaatatttttggtcagcgtctgtttgtaatgtacattctg

SEQ ID NO: 348196 - DNA, 172 bp, Zea mays
  unsure (1)..(172): unsure at all n locations
gaggagaagcaccaccaccaccaccggggccaccacaagaaggacgaggagcagcncgccgccggcgggaacggagagaccgccgagaacacggaggccacggcgacggaggaggngnccacgggcgaaaacgaggacaacgaggacaagaaggaggagaaggagcacaagc

SEQ ID NO: 348197 - DNA, 163 bp, Zea mays
  unsure (1)..(163): unsure at all n locations
ccgggccggcccacgcgnccggcacgcccaaaaanaccaagggccnncaccccngggagcgcaccaacaccacccggagaggggagcgacacgccgccggcgcggaaaaggagggcggaggcacgacggcggaagagaacgccggaaagaaagaggaggagga

SEQ ID NO: 348198 - DNA, 280 bp, Zea mays
  unsure (1)..(280): unsure at all n locations
attcccgggtcgacgccacgcgtccgaccagctncagncgccgccaggcttccgacgcaacttctaactccgttcgccttcaggcgagaccattgcccgctggcacgccgccacannnnggtaacacaatctggcccggagcttagttgaatcctgcttccgccactgcggacaaccatggcgtctgcgaagctgcagctgcctgctgactacacgcgtctcctgctcatcacccactccaatctcaccaccttggcaacggacatccgcgtcttgcaac

SEQ ID NO: 348199 - DNA, 415 bp, Zea mays
aagccattccctcttttttacagtttagaagggctatatgaaggtagtgtggctatcggagagttaaatttcacatgaactgcttttgatcttcctccaccttcagctccatctaggagtgtgtctggacaaagtccaaatcccttgagtactaattcacttgatttggatggacaagaaaccacaagtgtgttcaatctgtctactaatgctcactctgtcccagtcagtactaatgaacccaccgaagctcagtttgtcccatctaatcaagaatcaagccaaagagaaggtgccagtgggagaaagcgtaagcaaagccatgttggattagccttgaaagttatgtggagtttaaaaagatcaattttctattagcaagtgtcaggctgaattgaaagaaatggatggatta

SEQ ID NO: 348200 - DNA, 304 bp, Zea mays
ttgtacctcctagctttctttgactgtgcaaggtgcccgccgcctttatgatcccggaacgttggctccaagagtagcggcggagactgacgtgatctgatgcctggaactatgagaatgataacagaggagaggtactgctacgagcaacatgggactgacgatcatacgcagctccttggacatccgacatggcacgtctaggtgtgcgcaactcttgagcgtggacgtcggtcagccatgcgctggcagctggcgcctggcgctgtcgccgccgccggcagctcaagaaagagaagagctc

SEQ ID NO: 348201 - DNA, 276 bp, Zea mays
tctttccttctacctctttcttttcttatcaactcagacccgcaatatctccgggcgatgctctctcacacaaggtgcggacgttccactgtgcgtcattcatagcagatcaaccctccccatacctccccaacatatccccctccgaaatgcagtacaatgctgatgataacattgcccaaatcgtacccaacatcctcatggaccccctcaacatgatctgttgcgatttcggccccttctttcctcatatttccaccaaggagcctatttggc

SEQ ID NO: 348202 - DNA, 403 bp, Zea mays
gctgcagctacttatccgttctcttctccctgaaaagatcaacaaacccatctccagcccggaaggccacaggctagatctgaccgaccgtccatgcatggcttccctgtgcatgtttaccatcagcagcaccccacatgttccgcagggctgcaggcgacgatgtagcgacgccgtgtcgtctaggccgagatcctacctcgtctgccaaagtcaccttccgtccgggccgccggcaagcggcggcggcgggggaggaggtggtgaggagaagacgaccccgtggtgggctgccacggccgagaggctgcgcggcgacgtggtgaatgccgggatggcagcgcgggagagcctgagccccaagcagaagggggactggaaggacgtcacgctcatgagcttc

SEQ ID NO: 348203 - DNA, 451 bp, Zea mays
accggggcgacggacgcgtcctcctgtttcttgtactcatccattcttttctctctgcatagaacaacaaacccaacttcccacgcagtaggtcacagaaagagctgtcctacctttcatgcattgctcatcctgtgcatttttaccatcaccaccaccccacatgttatctacgactgcagacgactatatagccacgccatctcgactaggccgaaatcctacctcgtctgccaaagtcacctctcgacctggccgtcggttatcgacatcctcagtggaggacgtggtaaagataaaaccacccctttttgtgctggcaaggtcgaaacgctgcgcggctacttggcgaaagccggtatcgcagcgcgggagagcctgatccccaagcagaaaggtgactggaaggacgtcacgctcatgaacttcttcttcgccgtgtacgtgtaca

SEQ ID NO: 348204 - DNA, 454 bp, Zea mays
gggcgacggacgcgtcctacgttcacttctgcccttccctaccaaacatttattcctactgatcgcttggcacacatcttgcgtgtgccaagataatagggcaggcatcactgcctccataaagcacccagatgtttcttcatactcaactgtacctccctgtatatatccacttgttgctctttccaatcgttgtactcgagggtctctaatctcattgctggcaagcaaaaggctcctctcccataattctctggtcagtgatttataactgactgttcgttttctctctatataacgagagatgtatatttgcgaacttgttatgcttatgttcgccaaccactatatattgttgctgaataattgcaacttcctacacaccgtattttgttgcacctgcatactcccctgaaattttgttataatcttactaacctcttttttttttttt

SEQ ID NO: 348205 - DNA, 379 bp, Zea mays
  unsure (1)..(379): unsure at all n locations
cgaacggagggaaagccagacagaagaacaggaggacacgcacaggggcacccgcaacccaaacgaggggggcgggcaagaccgggaggccgnccagcccagaaagaaaaaggcgaaagagganggacaagcgacaccagaagaaggggaagcagacgaagaaaagccgaacgacggacgcaagaaagggccagaaagagaaanaaagccgaaaagaaagcggcacaacgaagaagggcagcgaaagcacgaagaccgcgcggaagaaggagaaaaaggagcaccaaaagaacaagacacgagcagggagaaaaaaggaaggaaacggaggcaaaacaaaagggggcagcgcaggcncngccaccaacaaaagaaagga

SEQ ID NO: 348206 - DNA, 315 bp, Zea mays
  unsure (1)..(315): unsure at all n locations
tcctaatcatnacataccttactcatgaacatttttactctcacatattcaaccacaatccactctacgtttcttcactaaaaccggatgcctctcttctttttaaaaaaaataatatataccattttacaccttctccctaaaatttctttcctaactacaaacaaatgtatcattttctttatttttaactctaaaattattccaatcttaaaataatcctccaacaactacactctttattaaattcaatcacaccattttcaacaattataacaatttctaattctataactattacttatcatttagaat

SEQ ID NO: 348207 - DNA, 424 bp, Zea mays
  unsure (1)..(424): unsure at all n locations
ggaanacccgggtcgaccgcacgcgtccgggttttggttctcttccagccagccaccgtatatcgcgcagcaaagctggcgtcacgcgcatcgttcaatgcgttgggagagatggcagaggatacgcaaccagaggccgccgcagccgtcgtcgcgcccgccgcgtccgaggtagtcgtgaccgaagctgcgccggcggaggcggatgtgcctgctgctgcggaagctgaagccgaggccaaggatgagaagaaaggtgacgatgcggagctcaccgccgatgacgcgggggtggtgaccggctcgttcaaggaggaaagcaacctggtggaagacctgccctacccggagaagaatgcgctcgacgagttcaagcagctgatcgctgccgtcctcgccgcatgtgagttcaacctgccttccc

SEQ ID NO: 348208 - DNA, 90 bp, Zea mays
tcctcataacaaagacaatttcaaaatctgctagacacacacctattttccctacacaatgcctcaacttgtcccaccttcaccaccact

SEQ ID NO: 348209 - DNA, 450 bp, Zea mays
  unsure (1)..(450): unsure at all n locations
gaanaaccgggncgaccgacgcgtccgctggtgtatatacgcgacatcaaataggatgaatggggcaatatgtatgacgaggaaaagggggggacattggttggggaaatggttatctaccaaaatggggcggtggagatcattggaacgctacaaatccaccaaatattcaatcttgaagtatcagtaacagcaccaaatcatatggccaaaatcagtcttccacttggaataatccaaaagataacaaaccatctgtttgttaacatggtgatccttgtacaaacaatgtgtcttctactgaacgttaatgactacacaatgattctcggtcaagtaagatgacttcttatgacactgagaataccactcattgctgtgacagcaatgagatagcatcttgcttctatgatgtctgttaatgaatacaaattgatccatggactaaca

SEQ ID NO: 348210 - DNA, 236 bp, Zea mays
aaaacccgggcggacgcacgcatccgcaagatcttcaccaccatcctcactatcatattcaatgttgaaactgtactctataagggcattttctccactgggggggactcttctggccactacatctatcacgcccctgtttatgcactactttcataacacacatgtacttattcttgttgtatacatcatctacacgaaaccttttgtttatgctactaattatctcctcatta

SEQ ID NO: 348211 - DNA, 275 bp, Zea mays
  unsure (1)..(275): unsure at all n locations
cgcgtccgacatcgagcacaatctattaacaacacatgccctacctctccgcctccgcggcactccccgcaggtcgtctctacaaagcgggccgcctctcattcctncgccattttatcactccacttcctgagcctccgctccttctcctgctcctgctcacgcgctctcttttctttcttcttcataactgtgacgtcgtactcacttatgatcatgatcatattcatactcatacggcaccgctgacattctactaactgctcgtgatctcg

SEQ ID NO: 348212 - DNA, 350 bp, Zea mays
ctgacgcttgggttgctattcactctctcgatcctagctgtcctcccaagaatcgcagcagccattgtcatcaccacgcatgccttcgtcaacactcgccacctgcttgccgacgcctgagcgcctgctgctaaaccgctgcatctgagctcgcatctcacgctgccgtcgtctttcttccgcggaccggccccgctccgctgcgtccacatagtaggcggaggaggcgcccaatgtgttcgtagccccgcatctggaccccatttctccatacctgatcttatgtggaaacaatgtcgggctgctccttaattcacatgttgagtatttctacttcatcacgttgactt

SEQ ID NO: 348213 - DNA, 346 bp, Zea mays
  unsure (1)..(346): unsure at all n locations
ggaannnccggccggacgcacgcgtccgctcagttccaaccccagctcctcagttctcgtcatcgtcctcgcgctcattgtcatttgcagtttccggtagcaggcatggcttctgtgcatctgtctgggccgcgggtggtggctgctgctaaacctgctgcgttgggcgggctcctcctgacgccgtcccttgtggtgccaaaggggctgagggccatgggcctcttgttgagggccgtcactgtcgtgtcacctaagtattctttcataaaaccattggtagacagagttcttgtgaaaatcaaaacctttgatgctaaattctgatggaggtattttacttttc

SEQ ID NO: 348214 - DNA, 317 bp, Zea mays
ccgggcgaccgacgcgtccgggacgcgtgggctcaatttcaagcactgcctgttggccagtccatctcacttaacacctggggttgatcataagactctagggtccataaccttatatcctatctaccaggactaacgtccatgcaccatcactatctgctcgctttccgacgacaactatgtctattactgtacagctactgcatacaccatacctacaagaaaatgaaccgaccaaagcccgaatcctcctattatcaattgaagatggaagtatgcattaattgcccagaaagaaccaattgatcatctattcg

SEQ ID NO: 348215 - DNA, 382 bp, Zea mays
cgggccgaccgacgcgtccgcttcggctcctcccctctagctcatatcctctcacctacaatggccaccgccatttcctctctagtaactctctagaccgtacaccgccgatgccaggcccctgcctgattcttcgtatacctgtgcacccctatccgtatttacttccggccccacgccgtgcctaatgtgtcccgccgaagctcggacctgccactatcctcctgaccccatgtgctatacgcaccaaacacggtgacctcccataagctctacatgcggaatattcacaagaccgttacaaactacgagctccgcgacatgttcgctgcgcactgcaacatatatctgtccgcggatatgtacgacaagtatacaaatc

SEQ ID NO: 348216 - DNA, 332 bp, Zea mays
ccgggccgaccgacgcgtccgcctcgatcccatctcccaacgcccccgcctcgcctcgggatcccgccgccgctccatctgggtgtgctctcccacccgcaggcagcgagcgacatctactgctatggatggccaatgccatgttgttggcgaatcagaaacatgctctattttcaaacggcggcggtaaccactcgctttatttcaagctcgtccggttccttgacctctaggcctccttggacaatgaccaactgctgtacgcgtagcactggatccttcagtctatggggctcatatgcagacttctctggtgagccgacaccctcttt

SEQ ID NO: 348217 - DNA, 396 bp, Zea mays
  unsure (1)..(396): unsure at all n locations
cggaanncccgggtcgaccgcacgcgtccgcaagaagcagacccagggagaagtgaccaagtgtctcaagcaacctcccgtccttcccgccgcggcttcctcgtttctctcctgcaatccacacccacccaccactctcctcttctcttctctcgaaaaaagaaccagctagcgagcaatccatatccccgccatgtccgcttcgcctgagttctacaagccagcgccgccggcgttctctccgccgacactcctcctgcacggtgcaggggcggacgacagcgccgccgccgttaccatgttgcaagaggattcatgactaccgtttccggactccgactggcggcgagagccatgtgaagccgcccggtactttcccgcctgctccgcagaagc

SEQ ID NO: 348218 - DNA, 477 bp, Zea mays
ggtcgaccgcacgcgtccggcggcgctggtctggccggccatgtcctgcctcgcggcgccgtcggctgcaccgacaaaggcgggggagcgcatgctccgcgccggcgctcctttgcactcgactttgccgtgccagggcctgcattacacggcgcggtggactggagggcgagaaacctggtgcgggcggcggcagatagctctgctgcgcagactaccatctggcaaagtactggcgaccagggacggatggtctctccactttctgaataagtgaaggtccagagacgatccaggactccgctcaaatgctatcggaggagacagaagaaacatcatgagccgacgcaccaaaaatcttcttctgatggaacaggctatgacggctgctagtgccgcagcgtattcgaactagtgaaagctaagattccaaccctgaacgaaatgaaacgcctgagattccatcaagtattccat

SEQ ID NO: 348219 - DNA, 193 bp, Zea mays
actgtctcgtgtggccgccgtctcccgagcggaacgtctagccatcgctctggcgaaggggcccccatgcgaggagggaaggcgccgataccagacaacaagaagacggataacgtgacgaaccctgtattcgtgaagaggccgaatctatgctgcatcggcggcgcggaggcgcacacgaatgacctgcacc

SEQ ID NO: 348220 - DNA, 152 bp, Zea mays
gaataaccgggtcgaccgacgcattcgtacttgagaaagtagaaatttgaactcccataccaaccaacagattacgctcatttttccggcgcaaatgttcaaccacccaaccttaacggcctaacatcctcccgctaaagcacgcccccaac

SEQ ID NO: 348221 - DNA, 172 bp, Zea mays
atcgtacgtgagcccggccgagcgagagcgagggagaggcatggctgctccgaagcgcgcgacgctggcgctggccgtgctcctggcggcgaccgtggtggctcccccggccgcggtgcgcgcggcgatgtcgtgctccaccgtgtacagcacgctgatgccgtgcctgccg

SEQ ID NO: 348222 - DNA, 270 bp, Zea mays
  unsure (1)..(270): unsure at all n locations
ccggtntggaatacccggggcgacccacgcgtacggtgaaaaggaagggaaacaacataacaaattgcaaagaggcgtctttcaagcttgtgcgtgactcggatcggaggagcatccccgcctacgtcaccacaaccatggatcgcggatcgctaggcaagcttgcgttgcgcgccctctccgttgtcgggagatggtagcaccagcagcttcgccgcctcaacatccacaagtaccattgtgctgtgttgatggagaatgtacgtgatc

SEQ ID NO: 348223 - DNA, 330 bp, Zea mays
tcgccatcacataaaaccagtgcaagcagaagcagcgcaatggcgagcagcaccatgggcgggtcctccacagccttcgccggcaaggcagtgaacgtgccgtcgtctctcttcggcgaggcccgcgtgacgatgcgcaagacggcggcgaaggcaaagccggcggcgagctccggcagcccgtggtacggccccgaccgcgtgctctacctgggcccgctgtccggcgcgcccccgagctacctgacgggcgagttcccgggcgactacggctgggacaccgcggggctgtcggcggacccggagacgttcgccaaaaaaccggagctg

SEQ ID NO: 348224 - DNA, 315 bp, Zea mays
ggaaaacccggggcgagcgacgcgtgcgcggacgcttgtgccacccacttctctttcataacaacgcctgaggcgccctctctccgcctctactaaaaagcccaggtcgtcttctatccctatgtcggcgagccatgggacactttatttggtatgaaaggatcaatgtccaatcatgattattatcacgagcactataaggaggactgaagacgactatgatcatggatgattctgctgatgacatgttacactaacagctatgggttatggattacgatgcgcgggataatgattatggacaacccaaagaca

SEQ ID NO: 348225 - DNA, 392 bp, Zea mays
ccggctggttcctttttatcgacacaggattgcttgttaatctggcgcgcctcacatgtgtgcggcggcttgctcatatgatcggcctctctctcttttgcaggtgttcatcacttgagctcatatcatcgtcagaggcaggcagcagtaagcagattccgctgttgctgagcattgtcgtcgtgggcgtggcaggccagttcgcgtggagacggggagggaacatctggtgtgcgtttgctaaccggggggcggccggcgggtggaggcgaccaggcgaggactgctctgcggcggcaaagggtttcaaaatgctggcgtgcatcgcctgctcggccaaggacggcggggatcaggacggctcccgcgccggcacgccccacggaagggac

SEQ ID NO: 348226 - DNA, 66 bp, Zea mays
acgcgtccgctcaattttctcacctgtaaacgacgagcaggagccgtacgcagattatctgtacaa

SEQ ID NO: 348227 - DNA, 190 bp, Zea mays
aaaacccgcccgcccacacctatcaaaaattatctttttactttcatcacttttatactttcacacctacatcaatccccccgccctttttttttaatatcaacccccattcctttatataatttccaaacactccctactacttacctaactaccaacctcactttctatcatcaatttttaaaccact

SEQ ID NO: 348228 - DNA, 356 bp, Zea mays
tccttttcccagacagacagactccctagtccccacacaccaccatttccccccacggcgcccatccgtccgtctccgtggctcgcctccacgccccgtaccggcgatggccgccgaggcagcgtgctgcgacgacagcgcctgctcgacgcccttcgtgagcgcgccgtccagccccgcccgggacagggacagggaaagggacacctacccgtcccacttcttcttcagcgcgccgaccagccccacccgcggcaaggacgccgccgtcccggacctggacttcgacttcgacttcgacttctcgtcgcgctttccgtcgcccgtcgccggcgtcatgtgctccggcgacgagc

SEQ ID NO: 348229 - DNA, 212 bp, Zea mays
cccggccggaattccggtcgaccacgcgtccggtgaagcatcatgttgtggcagtgttgcttgaattcttccacgcttacatttgcctgtgctagctgtttttttattgcaaggtgatggctatagatatcttccaagcactcgctgtttctttcctaactaccgcctttgttgtctggcatgtattcttaaacgacaatgtggttcagagt

SEQ ID NO: 348230 - DNA, 184 bp, Zea mays
  unsure (1)..(184): unsure at all n locations
cactgggcgatcnctcacctcttttcaatcctccccccccttcacctnacccggccatttttatagagaggagtactaccctaacataactaaataactcatattatgattattctctgtacaatatcacatacgactataccaacccacacaccataactctccccctttctttctttcacac

SEQ ID NO: 348231 - DNA, 276 bp, Zea mays
  unsure (1)..(276): unsure at all n locations
tttttnnatnttttttttttttattttttttttttccttcttcttttttttattcggcgcgtttttttttagaacaaggggggttttttttgctcccaataataaacctctcacatttttatacataccccgcccacaatattataccccttaaggttttggcaaaaataatgtcagtgcaaaacaaaaaattcaaatgcccttgtaacatgtttagagaaaaaaaaaaaacactttctggttaggggagcaaactttttctgaaagcaccccaat

SEQ ID NO: 348232 - DNA, 203 bp, Zea mays
ggtctttactttggtatgtattatttttttaaaccactgcttcttattaatacccccgccgattatcttattagccagcttctttcttcaatagaatataaccattgatgctggccttgcctcctaccccatttacactgttccccctcccatgatgatgacatcttgtgaggccgtcaaatacaacaactccttggacgctt

SEQ ID NO: 348233 - DNA, 416 bp, Zea mays
  unsure (1)..(416): unsure at all n locations
atccaattgtcacttgctctccctccaattagctaattaaggccggtcatccctctgctagctcgtttcattatccatggcggaggagaagcaccaccaccaccacctgttccaccacaagaaggacgaggagcagctcgccgccggcgggtacggcgagtccgccgagtacacggaggccacggtgacggaggtggtgtccacgggcgagaacgagtacgacgagtacaagaaggaggagaaggagcacaagcacaagcagcacctcggcgaggccggcgccatcgccgccggcgccttcgcactctacgagaagcacgaggcgaagaaggacccggagcacgcgcaccgccacaagatcgangaggaggtcgcggcggcggcggccgtcggctccggggcttcgccttcacgag

SEQ ID NO: 348234 - DNA, 320 bp, Zea mays
  unsure (1)..(320): unsure at all n locations
ttggcttctcctccccctccggttcgggttcgggttcgtgaggttctccggggttcggggtcgtgggtgagcggatcgagatggcggcgtcngatgttgagtaccgctgcttcgtcggcggcctcgcctgggccacggacgaccactccctccacaacgccttcagcacctacggcgaggtcctcgagtccaagatcattcttgatcgggagacgcaaaggtcccgcggcttcggctttgtcaccttcttcaccgaggaagcgatgccgaacgccatcgagggcatgaaccgcaaggagctggacggccgcaacatcacc

SEQ ID NO: 348235 - DNA, 247 bp, Zea mays
acgcctacattctccttactgccacatactacagttgtatctctcccgattattctactaacacccgcccgctttaaaaaggggaggctgctataactaaaaaacttctataagatttaccccatcaattttgctcccatgataattatccctctattctacaaaacaggggatgattcttacaccctgtgcctaaccccccatcatctctacaccttccaccttccaaccaatgttagtgatatca

SEQ ID NO: 348236 - DNA, 406 bp, Zea mays
cggacttgaacaaccgggtcgacccacgcgttcgatctggtgatataattgagtttatagctccaagaggtggcttgtataatttcgggttccatgacccatatggagcacctgaaactgtttctttctacatccatgttgtgcacatacccaatgagcacaatctggcgaaagatgagcactcggaccctatcaacgttaaaatcgcggagctgaatgaagcattagaatccgtttccgtcgagcataagtacctaaaagcacgctaagctcgttacctacacaccaatgagagcaccatatatcgtgtcttgttctatacgatggcagagtacctggctttcatggctgatatcactttgtaagtccttttcattcgtcgctttgtcattaaaaattgtggtat

SEQ ID NO: 348237 - DNA, 268 bp, Zea mays
aggaaatgaaccgaaagttagaggtgtatgataagcagatgaaggcagccaggatgtctgggagcaagggcgcacatgataaggttaatggtcaggctctgtcaaaggctgctaaagaggccgccaagaacaaggggaaggggaagagtgctgcatatgatgacgattaccagaaacatgtggctgttccacagaactggcgagactacatcggtttagttctcattttccatatccgatcaatctcacatccacctcttcttcatct

SEQ ID NO: 348238 - DNA, 387 bp, Zea mays
cgagttacatgttcggtggaacaattattggcaccgggagtttgccgggcatgtcaaaatggctatgggcagattctgacaggaagttgactttgtgctgttatttttgcaggaagttgactttcctctgttgctgctatgctcagtgtggatgacattgtgctgcctcagatcaacgtccgctggtccgccctcagtacgcacctgccgttcgttgctgctagaagcatcgcgttgcagatcgactttcttcgtgctccacaccttcgcctcgcccgttctcatgccccgcagctaatactttccatccggcttctacaccttacgggtcgaatgggccatccttaccgtccaactcggggacatttttgaccatgggaaacgagc

SEQ ID NO: 348239 - DNA, 161 bp, Zea mays
atctaactcccacttgtaccaactctgcaggtcactagccaacatcggcctgaatataaaagccattgacgactctcgcccggacataagagactgcaccaacaaaataatcccgtacacactgcccgaccaagtgaaaaccatgctcaatgccatgttct

SEQ ID NO: 348240 - DNA, 78 bp, Zea mays
ccgggacgaccgacgcgaccggaagggcgcaaagaaaccccaagcaaacaaacagggaacagggagaggagaggagag

SEQ ID NO: 348241 - DNA, 364 bp, Zea mays
ggggggggggagaagggaaaaaaaaaaagggggggggggagggggggggaaaaaaaaaggggagggggaaaagggggggggacgaaaggaaggaaaaaggggggggaaggggggggaaggagggggggggggggggggagggagggagggggagggggggagggggggagggaggaaggggggggagggggggggagggggggggggggggggggggggggggggaggggggggagggggggggggaggggggggggggggagggggagggggggggagggggaggggggggggggaggggaggaagaggggggggagggggggggggggggggagggagggagggaaaggagggagggggggg

SEQ ID NO: 348242 - DNA, 229 bp, Zea mays
ataaccgggccgaccgacgcgtccgctttttttttttctttttttttttattcctttttttttttttttttcttcagggtttttaggacccctcaaaaaaaccacagatttacccttccaaccaaataccaatccccgttcaaaaagagtacaaatatttatcaccactgaccaacttaactaaacttgattcataatccattccacctttcaactaacaagaacaaaa

SEQ ID NO: 348243 - DNA, 253 bp, Zea mays
  unsure (1)..(253): unsure at all n locations
cgggggacggcacgcgtccgatttccttctttagccgcctcctccgatccccttccgaggctacagaaccagttcatccgancgctaatggcggcggcgaggagcctgcttctgaggcacctccgcttgtcggcggccccttcagcggcgtccgtgaggccgtcggcgtctatgcatgaggccctgtgtgggcagcggtggatgtcttctgaggattccaatggctctttcctgtacaagagcgatgtcactg

SEQ ID NO: 348244 - DNA, 230 bp, Zea mays
tccttcccctcagctatcatcctaccttaaacccactaaataccgctacaaacccaagcgcttttgcatattatattgtcgatcaccacattccaaccttcctccccttttctctctctttcactctttttctctctccaacaaacaattgactccaaaaccaaccgccacaagcacaaccccttgcttgctagatatcactctttctctctctgctagctctaacgcca

SEQ ID NO: 348245 - DNA, 289 bp, Zea mays
atcttctccttcccccggcaatcgtcctagctgcaacgcactagatctgtcgacaaacccagccagaactgcataaaatagtgtcgatcaccacaagcaaacctccctccccgtttctctctctttcactctttttctctctccaagaaataattgactccaacgccaagcgccacaagcacaagcccttgcttgcttgatgtcactctttcgctctcgctagctctaacgccaccgctgacggcgctgccgatccctcagtccaccgcccaacgtcatacaccaagtc

SEQ ID NO: 348246 - DNA, 238 bp, Zea mays
gaacgacccacgcgtttcagtcttcttgatacatttttggactattacaataaaggtgatagatgtcataatgggtgttgcgctcatttttacacatgtgcgtttaataatgttaataagaattgttttgtcaccattactaatgaaaatattatcttcttgcaacaagaccttttattagcactacaatatcattaatgagtttgtattcactaatttatttttgaatagttttgtt

SEQ ID NO: 348247 - DNA, 338 bp, Zea mays
cgcgtccgatcttctccttcccccggcaatcgtcctatttgcaacgcactagatctgtcgacaaacccagacagatctccataaaatagtggcgatcaccacaggcatacctccctccccgtttctctctctttcactctttttctctctccaagaaataattgactccatcgcctatcgccactagcacagtcccttgcttgcttgatgtcactctctcactgtagctacctctaacgccaccgctgacagcgctgccgagccttcagtccaccgtccaacgtcattacaccatattcatgtcatcaaccccacaataaacactttcttatgtcaac

SEQ ID NO: 348248 - DNA, 201 bp, Zea mays
cgtctccagttcttccaacttgtttgaatttacacatattgaatgaagacacagaatgttcaagaggccaccctcttcagctctgactttatcaatgagccaaaagccttcaacaagcccctgcgttcccccttcaagatggtcaagattgaaggattggaactgtcctgtggacggttagactgggtcattaacctgtta

SEQ ID NO: 348249 - DNA, 327 bp, Zea mays
  unsure (1)..(327): unsure at all n locations
agagtttcctgcatccgcctccgccccccaccttctccaccttctccccccacctcccggcggcacattattaaggattgaagcccctttctccctctactccttctcgccgtaatccgcccccaagcttgccccacgctcccctttgtagcagcatcagtctcccttctatgaaggatattacatggataaaccaacacattttagatttctagtgtctaatactgcagcacgtttcatcattcgcaatggttgatcaaccannnangatttttaatcctagtctttgtcctttattcanttatcacctaccaatgatttttttcc

SEQ ID NO: 348250 - DNA, 414 bp, Zea mays
ggagcacaaactgccccccctccacagcatctggaagcaatggctcgagtggagtgacagaagaccatgctaatctgaaagcttccatctggcttaagagtgccgtgagggtgaggaggacagaactgacctacatagggtctgtaaatgacgacagctgatacgtgtatgattatcttggtgaattggaggcaaagaatttggtctcacttgttggcatttgtgtcgtgtgcaagttaaaagcaccaactgcatcgaattctttgagagctctgtaccacaaggtggaatggaaaccatatggcttttaggtaggttgtgtaatgttagaatacatcactgcccccaatttgttttagttaaggcctgtggaggcggctgaatataagtggaatccatttctggattcaatgg

SEQ ID NO: 348251 - DNA, 186 bp, Zea mays
gcaggacctattcgccaccagtccttcatcatgtccgacggctaccgcattcttgacgacatagatgctttctaatacaccgtcggcagccgcatctacagccgcgccaaggcccttgatgtcaccgcgcccggcagcggcccgcttgccggcggggaacgtcccaacggcggcaacagcggttgt

SEQ ID NO: 348252 - DNA, 279 bp, Zea mays
  unsure (1)..(279): unsure at all n locations
gcgtccgntgatccactactntactcaatgtctagatttagcattntgctttgctcacggcgcaaaaagaagtttttggaggggaccacgcatctcccccacctcctgcatcgactatgccaagacgccgcttcataggccaaggtcgcgcctccgacaccatgcaacaatgccaacccatttcagaacagatccgccgccactaattgcggccgtatcaccataagcaactacctgtgatacagaccggaccattataaataccttagcctctatatt

SEQ ID NO: 348253 - DNA, 348 bp, Zea mays
ccgggccgaccgacgcgtccgctgactcatgtgtccgaattcccatgcaggcttgtcggcgaggacggcttgatgaccgaagagcgatctttgcgggggctcgggaccgtaacgtcacaggaccctataatctcagatccttcctgccacttcccgccgtgcccgtcaacacatctttcttgccggacgcgctcaacgtctgctctctcctcctacagggggatcggatacaccacatgctgcgcgttagtgctctgggtcttgtgctacggttcactcatttggaaccccggctaagactattacgacaaaatactccgtttcatctaaggctacaagcgcaccttt

SEQ ID NO: 348254 - DNA, 96 bp, Zea mays
  unsure (1)..(96): unsure at all n locations
atgctgagaacctcggtagctgagttataagagaacgcagtccttcactttatttttagttcttacnaagttttgggagtaggagactttggacac

SEQ ID NO: 348255 - DNA, 224 bp, Zea mays
caggtttacagaatgggctctaaagtgtatcgggctgcattcacgtgttcgagagaacgggggcaaaggaaaccacgacactgtaattgaggttcagcttcagttgattggtttcaaaaaaattccttgaacttgctgataatgagcttaccgggaaggattttaccgagggttttgatgctgcatgctttcctcttacactcttttcaaccacctttgaccta

SEQ ID NO: 348256 - DNA, 274 bp, Zea mays
  unsure (1)..(274): unsure at all n locations
ggaannnccgggccgacgcacgcgtccgtgtctacattattttgtctcgtcaacattgtctattattacttaagcaatatggctgtagctactttaaaaggacaagcactgtcttattagttcggtatcaattttttttaaactagtgctaatactaacctgtatgatgatcaagtgtttttctccattttacgtgacatcattcatttgcttgcttatactgattcatagccttaggacaatgcattcataatttatatgccataccagtgtt

SEQ ID NO: 348257 - DNA, 326 bp, Zea mays
gttggcttctcctccccctccggttcgggttcgggttcgtgaggttctccggggttgggattcgtgggtgagcggatcgagatggcggcttctgatgttgagtaccgctgcttcgtcggcggcctcgcctgggccacggacgaccactccctccacaacgccttcagcacctacggcgaggtcctcgagtccaagatcatcctcgatcgggagacgcagaggtcccgcggcttcggcttcgtcaccttctccacggaggaggcgatgcggaacgccatcgagggcatgaacggctaggagctggacggccgcaacatcaccgtcaa

SEQ ID NO: 348258 - DNA, 245 bp, Zea mays
gtctctcccactccttagatgtccgatgacgctgacccacctctgaattctactaggggtgcgttgcccttgtccctcttatccacatagcgaggagctcacatgttgcccttttcgtgttgaccttgccacccccgtctctaacatgtaatccccgaccacgcccctccagacggaccctacgaagctggtcatcagccactacacctaggcgatggtgaaccatggtatgcactaactcttgg

SEQ ID NO: 348259 - DNA, 137 bp, Zea mays
ggaaaaccgggccgacccacgcgtccagcccttaattatataattatttatttttttcactaaatatttttctcttttttctactcgatttttttaaatttcttatataaaatacaattcaactaattattctttat

SEQ ID NO: 348260 - DNA, 331 bp, Zea mays
gcggtgacgcgtcccggccccggcggccggtgggtctgcctaccggtaccggcccgcgtggctcgtcgagtcaacggcttgactgctcccgtccgccacgttcgtattactatacaagatactgaactgccatctcagttaaatgatatactgcacaacattgggcatcgatagtttgagacacattatcaatgagttgtttttctcaccttttcaagagataaagggtgccacaacaacaagactatccatctgacaattatttcactggttctgagaatataacaagaatcatctacagggaactggttatagccacattatattttga

SEQ ID NO: 348261 - DNA, 264 bp, Zea mays
ccgggccggaattcccgggtcgacccagcgtccggttctcaccccctccagctctccttcgtcggccatgggtcaagcctggggtaatgtaggagataggctccaagggcgtcgatggaaggagcaccatgtgaggaagatcaccgacatagtgttcgaccgactcacagatgacgcctataatctcgtcatggaagccctcttattcgaggaggtcttcatcgccgtccttttcgtctacaatgacatcaataagctctttcc

SEQ ID NO: 348262 - DNA, 169 bp, Zea mays
  unsure (1)..(169): unsure at all n locations
ggaaaaanngggcgcgcgcacgcgttcgctcgcatttttcttgcttccgattgcctattcttctcccaacccaagaccgatgtcgcgcaaggtttatattaagcccgcgtctaataatcctttttattatgagcccgctgcttttattactacctccgttaataatccc

SEQ ID NO: 348263 - DNA, 201 bp, Zea mays
aaaaaaccgccgacccactcatacgtatctatttatcttcttatcaatattttctcttcccaaataatattattcattcgctgctttattttaaaatcctatcccacccaaaaaactatcacatcatataatttaaatttacactacactaattacttatctatttaatatataacaactcatcattcttatttattactt

SEQ ID NO: 348264 - DNA, 285 bp, Zea mays
  unsure (1)..(285): unsure at all n locations
cggtctcggaattcccgggtcgacccacagcgtccgtgctttttcctaggcatagttctgatagttatattctggctgtatacatgaagcatcatagcttgttctggttgagaaaaatcttancctaaaaaaaaaaaaaaaaaaaaaaaaaaaaaaaaaaaaaaaaaaaaaaaaaaaaaaaaaaaaaaaaaaaaaaaaaaaaaaaaaaaaaaaaaaaaaaaaaaaatgggcgccccctttaaaaataccaatctttcttacccttgcatccaaactattaacttt

SEQ ID NO: 348265 - DNA, 313 bp, Zea mays
  unsure (1)..(313): unsure at all n locations
gaatancaggcgcgacccacgcgtgcgaccgctacttgaattgctaatcatcgtacatagtaacccaccgcttcaccctgaaagaacattttactatgctgctcctccannctctcctcctctcagtatcagaagacctagcacgattctcgcttaataatctgcccttcgaccataacagccgcgtctccgctcacctctccaccaaagataggcatctccttcttcttctctgctccaacgccctgagctcaagcagcgactactactcctacgtcatctctctcaataactacatgaacacacagtactt

SEQ ID NO: 348266 - DNA, 302 bp, Zea mays
gggagccatgcctgcaagtcatgcagcaaatctttcggcagtgcgtcagcacttgagatgcaacattagcaacattcgacgacgaccaaaactgggccagcaggacctgttctaacctgacatttcccatgttcttaaccaggcataccgcgtatgtcccaaactagacaattcccaagttcaaagaaaaataacaccactaatcagatgactactgggcaagttccaaacttggacattttcaagttcaaaaataaaaccactgattttgataacgagtagattgtataacacgtgctcta

SEQ ID NO: 348267 - DNA, 167 bp, Zea mays
gacccacgcgtgcgagtcactcccgcagactatgtcattaccttcgcgccgtcaccgtatcctcagtgagaggcgttcttaaaccataccactctactaacgcccgaccaggtacactttctctcacccgctttttttcctttttttttccatccacaaaatacttt

SEQ ID NO: 348268 - DNA, 339 bp, Zea mays
atcgggacatttcaacagattatagacacatttcatcagatgaagaaaaatgagcaaggtaggaatgcttatctaacaataaagaatcactaagcataacccaatcccccgcccacctccttccttcctcctctaacataccacccaaaatttctggctttagtttgttatacagctagcaacctcttgtcatgtccaaaagttcgaatccaccacgatagccaccgcaatgctaagtaccaaccgaaggaagagcaacagccctttgtccctcccagttcttagtctccatatcgcagatccctcagcgtcacttgtaggcgtcgaaaatgtgttcgt

SEQ ID NO: 348269 - DNA, 359 bp, Zea mays
cagatgtggccgccttcaaattccgaggtgcatgggctccctttcccaatgaaccggggctggagtacccttttatttattagggctttgtactttggtgtctgggtctttcaagtgctactcatcttgttttaccgaggagagagggtgagaataatagcgcccggacaaggataaataagtttgggttgctttaaatttgttttaaagtagtattaatcaaaaatcattttttttttgtttcctgactatgtaccttggacttgtttatgtactgatgcataaggctatcttcgacagctaattatcataattattttttttatcattactttgttattatatttattttaattatt

SEQ ID NO: 348270 - DNA, 397 bp, Zea mays
ctcatgctcttccctaatgatactagactggacactataggtggcagtgcaaaatggagtcttaaggattcttgcacagctgctgatgtgcatgttgcagttggctacccttcaacatttcgtttaaagtatggttggtttggacctgatttgaaccaacaaagtagtgaaccatccttggcatcagcgtactctgcagacaagattattggcagcaggcctcctgatcttgttttcaatgaacaaaaacatatggctggttcagatgaatttgcaaatcattttgtgacaccctccattgtggatgaaataaatacatcacaaatggcggagaatccaagcaaggtggcacaactttcatggcttgactccatatctaatattaagtttggagcac

SEQ ID NO: 348271 - DNA, 246 bp, Zea mays
aaggcggcccccaactacaaccctttcctttaaccccaacccccaacccaggggggccccacaacaacggtgggggggggggccgaacccaagattaagttttccaagccgcggcttcattccccgcccttgcggaacctcaacccggccaaggccaagggcctggccgaaattggcggtcctgggcccaacggccagccttcctggaaccggtattccccgaccaagccgttccctccttgccgg

SEQ ID NO: 348272 - DNA, 361 bp, Zea mays
gacccactcctccggttcaagctatatcgaggtgtgcctgtctctagtcatttattatggtgtttaggagtgggctacacagttcgtaacggtgtatcgtggatgcatgttgccgcgagcagagtacgtaggcatgaaccgatgtgtgcgcttctgtctgtttactctctctatgtagtaatgtgtgggtgctttgatccagatgtattcgctcgtgagtcgtggaagtagatcgtttcagtatcattaccgtgtgttctttcttaattgtacattcgattctgaataaaactaatgtatgaacttgtgtgtttgaacttgtgaacctaaaatgggaactatagatgtgaacttgtgagaa

SEQ ID NO: 348273 - DNA, 338 bp, Zea mays
ggctgactaggcgggcgccagccacgtacggttttctctgtgtgtttgcttgattgagtggttggttggttggttggttgagaaagtgtaaaagtagtggggccgggtggggtgtacatgcatgcatgtaaatacaggtgtgcatgctcacgacttttgagctagtgagctgtggctttgaaacactgtacatttctctttgtgggcttggcgttgaggaatttgggatttgagactgaccatgatttagaatgtttgattctattatgtataaaaaagcagcagcgtgctcactggctccacactacggtggtctgattgagatttgaagagttatt

SEQ ID NO: 348274 - DNA, 383 bp, Zea mays
atgaagggcaattgctacccacctcactgcttttctttggactcctgtctaatgctcgggggggctgttatctcaagggatgggaatactgacgaaggcatcataaacaatacactctctatacatggtattaactgataccgacttagatatagctgcaatttaaactacctaaacactagaatcttgcctgcttacaactcctctagaggacatgaaacgggagctttttaatctaactgatcaacatgtaaaagaagtgcctagctgatagtctacttgtgaatctcttatgtcaaaactcgtagcatcagacaatgcatgccttagatatgaaaaagaatacggcgaattttataatgaacttgaattacagttgtcaa

SEQ ID NO: 348275 - DNA, 416 bp, Zea mays
agagaaggaaaaatatccccaaaccctagctccctatctcgatggcgaaccctcgcgtggggttcgacatgaccgtcggcggcgccccggcgggccggatcgtgatggagctgtacgccaacgaggtgcccaagaccgcggagaacttccgcgcgctgtgcacgggcgagaagggcgtgggcaagtccgggaagccgttccactacaagggctccaccttccaccgcgtcatccccgagttcatgtgccagggcggcgacttcacccgcggcaacggcaccggcggcgagtccatctacggcgagaagttccccgacgagaagttcgtgcgcaagcacaccgcccccggtgtgctctccatggccaacgccgggcccaacaccaacggctcccagttcttcatctgcaccgtcgcg

SEQ ID NO: 348276 - DNA, 289 bp, Zea mays
cgtacgggctgatgaacgcaatggcggcttctgagactaatttaaacccaacacccaccgagatgacggatacttttaaagagaagtgggccaccacaacaaggacgacaatccacgctctcactgtgctggatactacgacagacagactgctgatgcacaaccgtgctactatgcgcacgctgcttgaaaggatctacactcagcatacggatatcaacgcgtatgatgttacgaagcgtgttactggccatgcgagagtttcgagaacacaatgctacacatgttc

SEQ ID NO: 348277 - DNA, 93 bp, Zea mays
gtggcgagtatcattgcctacgcccatccacctaataattactgcgctgtcctgtacgatcgagtactccagtccgtgcggaagtgcgctcaa

SEQ ID NO: 348278 - DNA, 311 bp, Zea mays
cccacgcgtacgaagaaactcagacacagctacttcgccccaatcattaaacacaaccacaccctcaacgttgggtttcttctagctaccgcagccctaaatacaatcttacagctccctgactaacaaaccacactcgcactacccctagaaactgaaccagctcaacccaactccaaacagcatcatcagccctcactactagcgcagtcaacttgcaacttcaccaactaataccacctctgcatcgaacctctcgccgactaccacgccagatacaccgacgacctacatgacctcagtgccatcca

SEQ ID NO: 348279 - DNA, 317 bp, Zea mays
ttcgtccgtgttacaattcggggggttttacacaagagggtgcggcttctatctacctactatatagtacacgacctgcctccctagctcttgcactacgagcagccgcgcgcaaacgatcgatcgagcagtcctagtaatataccccacaaacaacctgccgtacggatcgacatgcttgaagagcacaaatctattgcgctcattgtggagactcagtgcatctaccctactctatcactctagtccattgcggtgctcaccgacgctatgagcccgctactgttaaacaaatacaggcaggccgactgcaccat

SEQ ID NO: 348280 - DNA, 295 bp, Zea mays
attccttattgcggagctgttagcgctctgatgggggacagacattgggcgcgctcctgaccaaaaagcgaagacactagaccaataagacaggctggacactgacactacctgtgcaggagccaggggatcacttgagaggtcacaacctttcttagaaaggctgcgcttcgaaggagtccacagcgcacaactgagaagagtgaccacgttggcgggcgtgcaactgctagagatgacttattgcacgaaaagctcgcatgtgtaagttgacgctctatccaactagtttagc

SEQ ID NO: 348281 - DNA, 483 bp, Zea mays
  unsure (1)..(483): unsure at all n locations
cgcagacgcgtggttaaattncaattacttcatagcttatttcatcgcagctcngctgatggcggtttatcttaatagggggacgcctgtgtctatcaaaatgtgtgtactatatactaataaataccaaaatctggactagaactgatgtggggaacaacgattatttatgagaaacacgtgcctgctctcatccatagaccattaacaacatcttggtggcgcagcccccagccctgagctctaagtttacctagttaaacaagtactccttggctcttaccaaccattatcattgataatcaagcattattgttcagcgtcacctgtttctgccccctggaagctattaacctaaccaaatgttgaactttcaatgaataacattacattagatcaggatgtctgactccggcaactttttcccactcatattgggagagcatgtcagtcatgtactttttctgaccgtgccaaaagatc

SEQ ID NO: 348282 - DNA, 405 bp, Zea mays
  unsure (1)..(405): unsure at all n locations
aaagcggaggggccacccacatcccctcttaantttactcttacatccacgatttaaattttcactacatcctanctagaccagaaactttcaattttaccatcacatatcaataaaccattccttccttcctcctgccgtacctccattatcgccatcgattcatactcttactatcacatactattagacccataattattcatcatgtcagtaattcagtatccaaacaattatattagattggcatactattataatactaccttatattacaatgtactcccttcaccatttcattcatttattgtccaaacaatttgatacatttcattatattaaaattttattatatatatcttgtgctcttagaacccaaacttagtattttatacaacattttca

SEQ ID NO: 348283 - DNA, 243 bp, Zea mays
ccgggtcgagccacgcgtccgagcgcgcttggatgcaatgtctatgatacggttcttccgcctaccgtgcgaaacagggtggtttgaacaggtgggtggggcggccggagccatgggcctcctctgcgcagagctaattcttgtaacgatcatcacacacgatgcctggtcggcagaagacaacgttttccacaacatggacaacaccgatatgctcaacctgaagtacgaccactcggacag

SEQ ID NO: 348284 - DNA, 322 bp, Zea mays
  unsure (1)..(322): unsure at all n locations
ctttcttctccaccgcanaacctactcctagatcttcttaaaatcgccgggctgcccctcccctactnctccacctccctcttctaccacttccgctcctcatctcccccaacttaatctcgcccaactttcctttttttctctctacgctcctcactcaccttcccgtcgttgtactccctgcacaccacgactttctcccttactcccagcaacaacctcatttcttatatcccaagccccttactctccaatcttgaccgccccttcctttctccttctacttctttacatctcctttacaactccccttttttttttt

SEQ ID NO: 348285 - DNA, 424 bp, Zea mays
  unsure (1)..(424): unsure at all n locations
cgccgctcggcgggccacgcggacgctaagcgcgctccccggggtgacgccggaggggccgcggctcgcgccgtgtgccttacttgccggaatctccttcgtcgggttcgccgtcgtcgaccgcctcctccggcacgggtacacggtccgcttggcgctggaaacgcaggaggacttgaccaacttccggagaatgaaatatttcgccaggaccgccgggatgggggggtgtcnaccgtgatggcgaacgtgatggacccggacggcctgcgccgcgccttcgacgggtgcgccggcgtgttccacaccttcgccttcgtcgaccccgggggcatgtccggctacacgaagcacatggcagcgttagaagcccaagcagcggagcgggtgattgaggcctgcgtcaggacagagtccgtcagga

SEQ ID NO: 348286 - DNA, 437 bp, Zea mays
  unsure (1)..(437): unsure at all n locations
cgcgaacggtcccaaaacccacaccgccacacggtcacgcccaattctcccctctctcgctgcgcatcgacgacggcgagggcgccatgatcgtgcgcacgtacaggcgtagaccccgttccatctcggaaggcgggggcggggtctcgtcctcgcaggaggcgttcgacttcgatgccgacgtcgacgtgctgggatcgtcggcctcgcagccgctcccgccatcgcaggaatcctcctcgatgtgggacttcgacgaggacccgcctccgtccncgccgcggccccggaaggaggggaggcgaagcgggcggtgcggggccagaagaggaggagggttggagctcgcggaagctcccgtgatggcgccgacggtgacgctgatggaggcggaggaatacggagagatgatggagagcgtggacgacgtcacgttc

SEQ ID NO: 348287 - DNA, 454 bp, Zea mays
  unsure (1)..(454): unsure at all n locations
cctatctaacggcttcttagccacttttcttaccagccaaaaatacaaacccggtgggccttctactcacggatgatgccgaccaccttacaactacgcacaagagacntgcaaggcaacaataacccgtccaagcaagtgtcatactgacacatcaccgtgcatcagactatcttgttaacggggcgacaatcgccctcagactactgcactagaatgcattctgagcatccgcttaatctgactagagatcactgaaaagcaacattattttactatcggacaaaaccaatccatgatcttgcgcactgaaaccgtaatcctccttgcggtgagagcagcatcgcactcatttagcataatccggtactctaaatcgaccaatacaagantatttccaccagcaccaggcaacatgctgttggatcgtcagtttggtgtcttgttcctgatc

SEQ ID NO: 348288 - DNA, 492 bp, Zea mays
gcgggcggcaacgatggttcaatgcaagttaattcataccttttcttgacaagcccgacactgaacaggcgggtgttaaccatgggcagggggcggcctatatcgtgaacttagacgctgcgcgctcattgctacttccaacgccaccgtgaccgatcaaatatttacccatacgcattaacagcagtcgagctgacatgtgcagtctcacaatccttgcatgaacttgcagtgaaggttgttgcagccaatatctacagaacagacaaatcgatatctgacacacatcttatatgcgctgccggaacatatcaagaagcatgtgcacagcttcaatatactgggtgttggaatgatacaactactatggccgcaggccatttgcatggatctgactacgcaagggtgctgcagaggtgggccgattatgttcttcgtggtgagcacaatatgtggagagctcttatcctatacgttgctgctggagcactg

SEQ ID NO: 348289 - DNA, 402 bp, Zea mays
cgtacgcaaacaccaagtctgggtttggtgtttatgctttactacctggccgaggcggtgatcgatggggatttggatggcgtgggcacactacacccgttggtcgcgtggacgatgcccatccactcgtgattaagcctcaacctttggtccttgctcacgtcgaaggtgtgaaaatgaaggtcaactcttgcaagctttttggaatccatctcgacaggccagccaaataagaacctttgaagtctacaccaaacgttgccacaccggcagatgagatttggatggcagacggaatcgacgcacacataagcggtgagatcgacaagactccaaagcaactcggtgctacacaagtggatcctgaaccagagagatgcgcatacgctttaaggggcacac

SEQ ID NO: 348290 - DNA, 304 bp, Zea mays
actaccatcaaaatctttcaattccaccacatactatattaccttttctacaactgctttcactctctttctaactattcttacattaacttttcttccactaaataccattattataaactactctacaaatatattcaacgatattcttatcttctttacatcttaaaacatcattattatctttataatcattaaactattctattacaccttatttactcatccaccaatattttctttcatctttcatcactattatattttcttcaccttcttataacatattaatctttcctttctc

SEQ ID NO: 348291 - DNA, 244 bp, Zea mays
gccgagatccccccttcgctttgcgagggggcttatgggaggttttagtgctagggtatacaggagtgctctgcgcatggtgaaggcggggcaacaactccatgttatcggcggcggctgcaagaatgcgcccgcgctggggctgcacaagcagaactcgtggtcgccggacatcgagcgcgacaaggcgtggtagcgccggcgcatggacatgcgccgcgggagcacggtgctgcaccctgcc

SEQ ID NO: 348292 - DNA, 54 bp, Zea mays
cggacgcgtgggcaccatgacagcttgttttgcttctatgtttttgcttgagct

SEQ ID NO: 348293 - DNA, 516 bp, Zea mays
  unsure (1)..(516): unsure at all n locations
ccgggncgagcccacgccgtcacgcagtagacacataatcagaggtcatactacaaaacacttctgaaaagtacgagttactgaattctcgctgagcgcgcgaagtgagctacttctgtattctgctgaacgctanacactctaacaaggcgaattcaaccaaccttcaaggttacctagagggcatgcaaaagttccgctcgtaatctcgaaagtctcctggcgaagaaggttcataccgagcaattacaaanagtgcatctctcaagaagggagaactcaagcatcatggggtgacgtgaagggcaccacatatgctcataatctgccttttggtcgggataagactctcgtgtacactatgctgtagcccgccccactcatggaaggaaggataccggtctggaagtaagaagtcttttattggagcgcaaaggattcactatgtattataaaactagcttaaagtgcatgtgtgttaacccttttcttttacgttgctcgaattatactttt

SEQ ID NO: 348294 - DNA, 466 bp, Zea mays
cgggccgaccgcacgcgtccgggctgctcctcccccacctgttcgtgttcatgttctggttcgtgggcgagagggaagagagggcggcgtcggacgttgagtaccgttgcttcgttggcggcctcgcctgggccaccgacgaccactccctcaacaacgccttcagcacctacggcgaggtcctcgagtcgaagatcatcctgtatcgggagacgcagaggtcccgcggcttcggcttcgtcaccttctccacggaggacgcgatgcgcagcgccatcgagggcatgaacggcaaggagctcgacggccgcaacatcaccgttaacgaggcccagtcccgcggcggccgtggaggcggcggtggcggatactgtggcgggcgccgtgatggaggcggctacggcggtggcggtggaggctactgcggtggtcgtggaggctactgcggcggtgggggatacggtgg

SEQ ID NO: 348295 - DNA, 331 bp, Zea mays
  unsure (1)..(331): unsure at all n locations
actattagttttttttcccttatttcttgtcctcttaacacaacacaccanagaggtctttcgagagtgtcttaaaagacaccgccccataccttccacttttttctctcactctttcacactctgaataatccactcttttttactaaaaagtactaatgactatatatttttataacaatgttttcatccttattattactctctccatcttcatctttgctcacaacattatatctctctttttatcaataccctcaatgcatctcttctctctctttatcttcatcttatttatttccataacaaatctttattcataacattacta

SEQ ID NO: 348296 - DNA, 442 bp, Zea mays
ctcacactaaactagagagctactcaagaaaataaatgcctcttcttcttgctctcgtcggggtcgtctccgtcccaatggagttgagcgccgtcacctgtcgcactgccgctgctccagttgcagcctgggcgccatttgggcgtccaagggagcagacgacgaagcgaacaagcctcacagacaggcgaggcggccggccggcgagcagctcgcgttgagccctctcgcaccactacatacgctgttgcatgctttgctgcgagctgtgcgcgcggagcatggagatgcatggaggcggcagaggtggtgggtgtgagcgcgtacgtggggaattgaggcgtcatggtccgagatatatacatgtctctcttgctaggtaccttagattattcttagattattcttagttctgttgttagtacgtacttcgtccgacgat

SEQ ID NO: 348297 - DNA, 184 bp, Zea mays
  unsure (1)..(184): unsure at all n locations
gcgtacgtancagcatacctacggatttaattgttgtttttatttgaaaggccaaatggttgttctggggtaaagtaaggggagggattcctccccctacgcctgcttaaaatacttatatgaacatatcagtctttcttgtttttaaaaaaaaaacaaaaaaaaataaaaataatattaaaaa

SEQ ID NO: 348298 - DNA, 457 bp, Zea mays
cgaccacgcgtccggtggcttctcctccccctccggttcgggttttggttcgttagggtctccggggttcgggtgcgtgggtgggcggatcgagatggcggcgtctgatgttgagtaccgctgcttcgtcggcggcctcgcctgggccacggacgaccactccctccacaacgccttcagcacctacggcgaggtcctcgagtccaagatcatcctcgatcgggagacgcagaggtcccgcggcttcggcttcgtcaccttctccacggaggaggcgatgcggaacgccatcgagggcatgaacggcaaggagctggacggccgcaacatcaccgtcaacgaggcccagtcccgcggcggccgtggaggcggcggcggtgggtacggtggtggccgtggaggcggcggctactgcggtggcgggcgccgtgatggcggtggcggctactgcggtggc

SEQ ID NO: 348299 - DNA, 340 bp, Zea mays
gcccacgcgtccggggagacaccatggaatgtctccgctccatgtttatgctgctattgctgatgcccatcatcaggctaaatatgagaggctcctatgcattaataatatggaaagatttgctcataatcacggggagcaagtgaccacatgtactgcagctaatgagctaacaaggagcctggatttaaaatcgcgcgatatcctgcttttgcatatgagcagagaatctctgaggacaggagaaatacctgcctgcagtgtccatgggcgtgagactgcaactgttcacagagtgattaatgtccatgaacattacgacactgtcaacatggacata

SEQ ID NO: 348300 - DNA, 273 bp, Zea mays
aatattttatggtaacttttactttcgtattccaattacaataaatggggtgaataaagagggtttaatcagagcctatgaatatttcaacaattgtttcaaggatccattagcttttacggtggtaatagttggaaaaatagacccagccatctcacttccactggttctgcaatacttgggtggaatacctagggtacaggatgctactcaaccacttagtcgtgatgatctaagaggattgccatttaagtttcctgcaaccatcattag

SEQ ID NO: 348301 - DNA, 310 bp, Zea mays
  unsure (1)..(310): unsure at all n locations
cgggccggccggcgcgtccgcngcggtnggtccttccttttnncgtnggcttgtggtgccgncgngngcggggngtttctggccnnggtgcngctgnntggtgnngcttnngnnngggttgcgngtgctgctggnngtgcccggttccngtnnntnntngtnttttnggcgcngnttgcttcnccgtgttgntcccggtgntgctgtttctgcttggnnnttcttncccntgtgntgttctttcnnctctggnnntnngngcnccctcttccnngtcngnnngtgnnntnntccttccngtgtcggttct

SEQ ID NO: 348302 - DNA, 199 bp, Zea mays
gaccacgcgtacgcgctgtcctcgcctgggttactggactccttttgcgcctcctcctacatccactgcaccgggtcctctagcaacagcaggccggcacggcattgcctccccttgctcatctctcgcgctcgccgccagtattccggcagacccacctccggaacaggcagaatgtagtgccgctatagataaaccg

SEQ ID NO: 348303 - DNA, 168 bp, Zea mays
cgggcaccccgcggcaaggcccagaacccaagaggccaccaacaaaaaggcttccaacaccgcaagttacttggccagaaaaaccaacaaggccaaccccaaggccgccaaaacaacgaaggcaaccaaccaaaaggccgccaaaacaaccgaggccgccaaccaaaa

SEQ ID NO: 348304 - DNA, 392 bp, Zea mays
  unsure (1)..(392): unsure at all n locations
gntgggttggcttctcctcccccttcggttctggttcggcttcgtgaggttctgcggcgtgcgggttcgtgggtgagcgggtggagatcgcnccntcggatgttgagtaccgctgcttcgtcggcggcctcgcctgggccacggacgaccactccctccacaacgccttcagcacctacggcgaggtcctcgagtccaagatcatcctcgatcgggagacgcagaggtcccgcggcttcagcttcgtcaccttctccacggaggaggcgatgcggaacgccatcgagggcatgaacggcaaggagctggacggccgcaacatcaccgtcaacgaagcccagtcccgcggcggccgtcgaggcggcagcggtcggtacagtagtggccgtgga

SEQ ID NO: 348305 - DNA, 258 bp, Zea mays
  unsure (1)..(258): unsure at all n locations
agccggtctccacccaagttctgatatgctttctgctctgattagggttttgtgtcttgcggcttgggttgtcaatacaagggttagattctttgagcgaactctggcgtaacatggatttttttacctgacatttcttccattttccttatgtgcaattttcgagtccatctcacgcacaaagtggacaggtttgggtttatatctttgtttttgtaaacattttttctgtatcttgtaaattacgccnaanaaaaa

SEQ ID NO: 348306 - DNA, 377 bp, Zea mays
  unsure (1)..(377): unsure at all n locations
caatttgcatttccgtttacatgcataatgcttgggttgtacgtaacaaaccatgtacctggcatagtgaaggggattgaccaatcacagtgcantatcacttgatgggacacacgatcatttggctcatgttggtgtatgtcggtatttgctgaaagttgcagcctcattagagttgaattgtactcattgtcattggttaccatgggcctattcatttaaaccctcagatagatgccgttttgagctacaatctgctactgctgctgtgaggattgaaatctggttaaaactattaaagctagcaaaagtgatgtatggcttttgacatgatatatcatgtaacctggtttttctaggatgccctcctgtgaatg

SEQ ID NO: 348307 - DNA, 220 bp, Zea mays
ccgggccgaccgcacgcgtccggaaaagtctgttcaccttttgcacttagatttattgaccgcgccatgcaatttgggtatcgtaactttagaacaggtgccgatacataacatcaatcatctcccctctgtatcttttctccaaaggctcttctactacatatggcatccatgatatcctccattattcttcaaaggcactctctagagcaccatgctt

SEQ ID NO: 348308 - DNA, 379 bp, Zea mays
cgcgtgcgcgccgcgacaacttcgtcttccgccagtccgtcgccttaaacaactgggccaacgatctctggaccggggcctcctaacaggttggcatggatctcttcaatgatatggactctgcatctttcttccaaaggtacggatggtactatgtcatgcatgatatccttcatgatttttcacagtcactctctatagaagactgctttagattagaagatgataatgtgacagagataccatgcactgttcgacatctatctgttcccgttgaaagtatgcccaagcataaggcaattaatttccaacctcattatttacgcactgttatctacactcgattcactaatggatcatgccagtattatttttgatc

SEQ ID NO: 348309 - DNA, 448 bp, Zea mays
  unsure (1)..(448): unsure at all n locations
cgggacgacccacgcgtggcggaccgaccactccctccacaaccgccttcagcactctacggtcgagggtcctcgagtnnccaagatcagtggctcgagtcgggagacagcaggagggtcccgcggctttcggctttcgtcaaccttctccacgtgaggagggcgatgacggaaccgccatcgagggcantgaacggcaagagagcctggactggccgcaacaaatcaccgtcaaccgagggcccagtctccgcgtgcggcacgtggagggcggcggctggtcgggtaccggtggtgagccgtggagggcggcggctacgtgcggtgtgcgggcgccgtgatggcaggtggcggctacgggcggtgtgcggcggctaccggtggacggcgggagcttaccgtggtggtggcggctgtacttgcggtggcataccgtggcggcgggcta

SEQ ID NO: 348310 - DNA, 74 bp, Zea mays
  unsure (1)..(74): unsure at all n locations
cgggccgacggacgcgtacgcnccatcacataaaaccagtgcaagcagatttagcgcaanggcgagcatcacca

SEQ ID NO: 348311 - DNA, 473 bp, Zea mays
cgggccgaccgcacgcgtccgtgcctgtcgtactcgccaaccgaccggccattcagcgacgagctcgtcgccatgctaacgcggctccacagcttataattaatcaccatatatcgcaaatttcttgagcgcggcgcccgatcatgttggatcagtgcttcctgtttcacagctagcacgggtgagtgcagcagatctcgttgtgtggtgcttgtgagtcacaagcgccgaaatggtcgacgagggagctggcagttcaaggccatataggacaggcgcaggcgcaggcgctgtgtcccctgtacgattcatctgtgatgtagtagctactaggtacaatacaagatggtggttgagcttcctgggttgttttgcgcgtgggttgtgaatatgtcttggtagaaaaaaaaactctgtgccgtggatctgatctgttggtgttagctgtagcctgtgtatagcctgtagaaaga

SEQ ID NO: 348312 - DNA, 183 bp, Zea mays
gtgcgtccgaggcatggggtagtatgggcttgtgttgtaccatcccctcctcgtctgccatgagtgagaagatgaagctgcttgcttggattggaacgaggggacggagatggagagagatagaaaagctttaatttgtgcatccaaccaagtggagtggagtggaatgatgtgtggtcgctt

SEQ ID NO: 348313 - DNA, 297 bp, Zea mays
  unsure (1)..(297): unsure at all n locations
gcgggcggaaaatcttgtgaatgtccanattagctttttctttttcaaccttgatcagtttccacgggcagtatgctcttgaaaaggtccttgacatcaaccacctctttgatccggacgatgtcagtcataattcaaattgtatgacaactgaggacataacagctgcaacaaatgcgatgttctacaatacagaatactctgatgcttcttcaccctaccttagtcatttacacacagatcgattggcagctcaaaatcaatatttctatcccacttacagactaattcataacc

SEQ ID NO: 348314 - DNA, 474 bp, Zea mays
  unsure (1)..(474): unsure at all n locations
ctgaaaatngggcgacccacgcgtgcgcggacgcgtggggtttgtctgccaaaaaaaatgcatactattaatgaggtagtaagatttcgatgcaggttacacttaattagacccataatctttttatcatcaagacctgtgcacttttgggtttcatttttgactgttacaactcttgggtcttcaccaatgatctttagtgccaaagttatgtgcatctatgttctccaatccccaagatgcttttaagtttctctctttcaattgtcgcacaattacttcgttcttttgatgcaccagtttattgttgagaatgttgaaataatgcttttcgctcatatatttaggttcattgaatttggaaatgacggtggacctgcagcgaagaccttgaagccaaagttcaatttgttcgtcaagctagtgtccaagaatactggactggggctgccgcatatggatataaaaactgtc

SEQ ID NO: 348315 - DNA, 115 bp, Zea mays
gagatagcgcgggcggggaggggaatgagacatgtgatctcagagaagaactagccaccacgggcgagcatcgcaagccgagctgcaggacccgagcggaaccggagagggagac

SEQ ID NO: 348316 - DNA, 342 bp, Zea mays
  unsure (1)..(342): unsure at all n locations
ccgggccgaccgcacgcgtccggcagtgtatgggcacctctccgctatgacaaatctccgcctgggggtgtttcacatgcctgggcgncagattattggcaaatgcagncacaatctggagataatgtttcacatctaacagacggncatggagacagaaagacaaacccaaggggtcagggaggaacccggggggtcccggtggaaaaggaccataggcatgccacccgccggggaccccaatgtgacccaaaggaaccacaaaaatcggctagcgcgccggagggaaaaaataaagagaggggctctgctagctatggtgctcatgagagacaagaatgg

SEQ ID NO: 348317 - DNA, 123 bp, Zea mays
  unsure (1)..(123): unsure at all n locations
gggggggacagccccaaagaacaancatattatttcagaaacaccctagacaaaacgctaaccatgagcattaacaaaatactgagaatgattagcaacactgctgggcgaccactaatagcc

SEQ ID NO: 348318 - DNA, 344 bp, Zea mays
  unsure (1)..(344): unsure at all n locations
gccccgtantgcantgcatcagtgtgctacctcctcattcctctcactccatcacaaacgcggagcggtctctaaagctcggagcgaggctcaaaagcnatggcggcatccaagaggctgctgctggcggcgctgtgcgtggtggccgtggcgctgctcgccgagcagtctgagtcccacggcctgaaggaatacgtaggcagcgactcgacgcccgagatgcagaccttcttcaagcccagaggccgtggcgctcccgagaggccctggacgcgtcctacatgcccgccgccaccatggccgcaaagccggaggccactgtaatcccgaccaccacgggcacc

SEQ ID NO: 348319 - DNA, 169 bp, Zea mays
  unsure (1)..(169): unsure at all n locations
gattgtgaatataacggtttcatttaacgggttaccctctttctgaatctggcgggatgatcgcaccatttaacggaggatcacgcctcnnatagctctaacaacagcagaananncggcacangaangngggtagcatgtactttttttttttatttttattacctct

SEQ ID NO: 348320 - DNA, 179 bp, Zea mays
aggggcgacgacgcgtccgcttgcttccatgcttgacattgaacacggagcatgctcctgaacttgatgcctatgaggcgcgactctttctctaccttggcagtggaggaagttgatgctgaatcctccctggccctggagctgctcttcatcagctctagcaggcctgcaaacggcct

SEQ ID NO: 348321 - DNA, 265 bp, Zea mays
cgcgtccgatccgattcgctcttttggagtatacatcatatcctcactactaaccaagttaatactgcagtgacaacatgccacagagtgaacttgtattgatcgctcatcatttgaagtgtcacctccaactcatatgctgcacaatttgcgtacacccttattcataataactgctagaccaaagtagcttgtgtgccactttcattgtattgctgactcttaaaaaccagtatgttaaacaccagttggattttatacattt

SEQ ID NO: 348322 - DNA, 371 bp, Zea mays
cggacgcgtgggcggacgcgtggggtttgatatcaggtaaacatctgctattcgacacgtgtgtaatagtaagcagagaggagcaagtcctcattttttatatgtgcaatgttgctttcatgctacacgagaggggtgaatgctagttataaaacaatggattatttgacataatgtatatgagattttcgcaactattcttatgtactgcaatatttgaaataaacagcccttgcaagatgttagggtcctcctaaaacatatgaatgaccattggattagtctaacattactctttatgctttctataccatgtaagcatgacttttacaagttcacgaagaacttaatttaaacatggagttagcaca

SEQ ID NO: 348323 - DNA, 184 bp, Zea mays
gaatacccggggcgacccacgcgtcctagatccttattatctttaatgacaacttttacttcatgccctatattatcatcatcggggcgtttctataaaagggcgggggcacttccattataaccttctattacattcattatttcctttactactccaactttacctgttatgtgattaatcc

SEQ ID NO: 348324 - DNA, 341 bp, Zea mays
ccttattggccttcaggctatgttgagttatagctagttctggggatctgttcataatataaatttatataatgaaaagaaagcaaatcgattgatcaaaaaaaaaaaaaaaaaaaaaaaaaaaaaaaaaaaaaaatttaaaaaaaaaaaaaaaaaataaaaaaaaaaaaaaaaaaaaaaaaaaaataaaaaaataaaaaaattaaaaaaaaaataaataaaaaaaaaaataataaaaatataaataaagggggcgccctctaaaaagattcaatataatcttccctttctttaaaattttaaatttttttataggggtaccaaaattaaaaaacttggcc

SEQ ID NO: 348325 - DNA, 476 bp, Zea mays
cgggtcgacccaagccttcgggccaggttcggccggccgcggccaatctgggagcgcgcccgcggcaaggtggaaaagggggagcgcgtcaaggccatggccgcgcgccggatcgccgctggcgcctccgccgccgcgctcgagatcacctgccacgcctgcatgcagcgcttccacccttagtaataatatataatactatatataatcagcatcagcacgccatgcatgcatgttattggcttaattattttgttatatatagctaccgtgactatatagtactcctgtactactagctagtattaattacattcgttagctgtgttaagaactttgtttatgagttaatgcaggcttgcgatcgcatcaccataggtaaagggaaaagacagatcgatgttcttctcttgctttcttgcagaatacacaccgcatcgtttgagccagcctaaaaagagaaggaaagggaatct

SEQ ID NO: 348326 - DNA, 68 bp, Zea mays
cggaaaaccccgggcgagcccacgcgtccgcgtacacttggtgctctttctcgatgctctcacctatc

SEQ ID NO: 348327 - DNA, 344 bp, Zea mays
  unsure (1)..(344): unsure at all n locations
aaaaaaaaaagggggggggggaaaanaaaaaaaaaaaaaaaagaaagaaaaaagaaaaaagagaaaaaaaaaaaaggagagggaaagaaggaaaaaaaaaaggaaaaaaaagaagaaggaaaaaaaagagaaagaaaaaaaaaaaaaaaaaaaaaaagaaaaaaaaaaaangaaaggaaaagagaagaaaaaaaaaaaaaaaaaaaaaaaaaaaaaaaaaaagaaaaaaggaaaaaaaaagaaaagaaaaaaaaaagaaaaaaaaaaaaaaggaaaagagaaaaaaaagagggaaagaaaaaaaaaaggaaaagaaaaaaaaaaaagaaaaaaaaagaaagaaa

SEQ ID NO: 348328 - DNA, 346 bp, Zea mays
ccgggtcgacccaagccttccgaacaaacagacggaccttcggccttaggccccaacgcggggggtaccgaacccgtacggggaagctcgtaggcgacatgaatccgcccgcacaacacgcgtacaccggcgcaggatgccacaccgcggcgcctgcggcagccccggagtacgcgcactacccgaggctctcgtcagaggaggtggtcaacgaccgtcgaccgcgcgttatgacgccgtcaccgacgggccgtacgcctacggaggcaacctctacatctactaccccgtctgcggcgccgacatctacgcgaagaatacgatggactacgtgaaggacgtgctc

SEQ ID NO: 348329 - DNA, 249 bp, Zea mays
acgcgtccggtcatcaccttctctactactatggcattctttctccaagccgcggccaccctgaggcgccgttcaaaatcggtggtcgggcaccctttgcctcactgccttcccgcccttcgtcgcaactcgcctgcagggcgttcggcgtttactccagcgccgtcataatcacatgctccctgcatgacgtcgccagcatgttcgtctactcctctaatcttgccagcttcgcgctctccacctttg

SEQ ID NO: 348330 - DNA, 75 bp, Zea mays
ccagcttacaagttaaaaaaccatcaaaagtttcagcagctgcgaggatgaagtaaatgggtttgttctacaaaa

SEQ ID NO: 348331 - DNA, 375 bp, Zea mays
  unsure (1)..(375): unsure at all n locations
gctttctcgagctccaccggcagccaagctacgtgttcccaccctagtctactctagcggcccttgtcctgctgcttgccttgcttgcgcctgtgatactgagcgggagatggaagcgtacgcggcaatggcgtcgccgcccacgaaaggcatgggcgtggacaagctcagctacgagatcttctccctgctcgagagaacgttcctcctcggccccggcacgcctccccgggcgcttctggacggcgggcgcgtgcgggtactggcgatcgacggctgcggcgcgggcgccgaggacgcgctcctggccgncgncgcgctcgcgcggttcgaggccgggctgcgcgaccgcaccggcgacccggacgcgcgcgt

SEQ ID NO: 348332 - DNA, 188 bp, Zea mays
cactcactcaactcgaggccatggcgacttgattagtgttagcaccacagggggagcggcagggaattcaagcaagtggtgtgaggagttatggactgttgcatatgcagacccacggcttacgtgtacaggctttcgaggaactccatctgtgctccatgccacgagggcaccaaggcactcacctc

SEQ ID NO: 348333 - DNA, 147 bp, Zea mays
gttggattgattttgattctcctgcagctggatgactgggtgctgtgccgcctgttcagcaggaagatctagtgggagaagatgcatcatcataaggagaaggagaaggagaagaaggcgatggagtcggatgcgttgcttttgcac

SEQ ID NO: 348334 - DNA, 176 bp, Zea mays
  unsure (1)..(176): unsure at all n locations
cggaatancngggtcgaccgacgcgtccgcccggattcccgatgcttggtctgtgatgtaataaatcctggaattcaacagttgttgaggaggggataaattaaaaaaagtataacataactaaaaatttctggggctgccgctctataggatccaaacttacgtactcttgcatt

SEQ ID NO: 348335 - DNA, 245 bp, Zea mays
ataatatacttgcatgttgctgtgatccaagtgacgtgaatatatatatgctactatgtcgtgctttagtttgttctgttgtgaaatgaatatgtaatcttcgattggaaggaacgatcgatttgctatcccaatctagtgtatgttttgacaaaatcctgaataaactatgccttctagtaacgcgcgcgcgctcttgtgcttgtgtgattcgtttattttgaatttattttttagggataaaa

SEQ ID NO: 348336 - DNA, 52 bp, Zea mays
cacgcgtgcatgcaacatgtcggctcttttataaaggggcgtacggccaatt

SEQ ID NO: 348337 - DNA, 258 bp, Zea mays
gacgcgttcccttcgtcttctctggtgtcaacacccacagagcggcttggattctagccggcgggcgccccttcctcctctcatcagtgtgctccgcaaccaatcgaatcgccttgccccaaaccacaatccgtcttgaagctacagaaggaagtgaggggagtgcagacgcaggagtcaggtgctggaggagctgctgcggaccctggcctatcttccacctgcgtgcagaggctaccgcctgccggtgtcaagtct

SEQ ID NO: 348338 - DNA, 366 bp, Zea mays
  unsure (1)..(366): unsure at all n locations
cttcaatcctcatnattttttccccaanttttttttaccccccanaaanaataccttcacacctggttttttttgacaatgctgctctccaacaccttattttctnntnaaaatncttttttcctacttttacataaatttaatatattttttctcttatcacaacatttattttttttttttaatcttaacatatatttaatcctttatattttcactctatcttcaatctccttccatttattctttatcttaacctttatttttatattctctttttacctatccttattatttctcttctaattttttttttttttatatatactttttattttttctctttcttctttttcatctttcatt

SEQ ID NO: 348339 - DNA, 336 bp, Zea mays
  unsure (1)..(336): unsure at all n locations
ccgggccgacccacgcgtacgattgtagtctcgtgtctgacgattctctatatgcatctatgatcaccatgccgatcccggccacagcccgaaacgcggacctgccagacatacacctgatgcagcagcagcatgactcatcagccgccggtgccgacgcactgacgactgccgacctctgtgatgccgccgccttgtccttaacgaagacacatgcctttcggcaacgactactgaaaatgcgattgcgtgaaggtcaaggtctgggttggtgagaacgccgaccactactacgtnctctgcaggctactgatcagcaggatgctcacagtcacc

SEQ ID NO: 348340 - DNA, 392 bp, Zea mays
  unsure (1)..(392): unsure at all n locations
gctgactcacacccatggcgcccaagccctttttcttcctcaagccagcggcgccctcattgctccctgcgcagcgccccttttcttgtgcctccagcagcaagaagccatcgcccctctccattttcccccacgtctcttccctctgtttttcctgtacgtgcgcaggagtatggggcctcccatggcgccctcctccctggtctcccttgcgcagggcagccatggccgagctcgccctcgcctcctgctctccatgggcgtgggtccccatcctctccctcctcccaaagtgcaggtagcagtccagcagccatggacgcccaggctgggaaacgctggaactcgcgctctctctggtttgggtggagcagcgcctntccctgcgctca

SEQ ID NO: 348341 - DNA, 287 bp, Zea mays
cactttttcaagaaccgcctaatgtaccggactgccggcggttccatgcgcaaccttcccaagggggcagggccgcacaaaaacaacaacgcgtccgccactttccactttcttcagaaggtcaaggccggtctgcccgtcgacccgctcgtctgcgcggcagccaatactaacggcaccgtgctcaacttctgctctgccatgttcagcttaaacctcacggagcataataaacacctcaaggaaaagctcgttcccatagcgggggaccagccctcaaatgggtc

SEQ ID NO: 348342 - DNA, 264 bp, Zea mays
gcgtccgccgttctccctccctttctgcctgaccatataggaccagccgaaccaccaatgcatatggcaccttcccacgggctgaggacctcccaataccaatacctcctcagtcatttaccacttgcttcacagggacaacgcctgactgacctactgacccaatcgtcttccctgtgaccaaaactaacggtaccgtgctcagattccgctttgccaatgtcaactacaaccttacggatcatattatacaggctaaggaaa

SEQ ID NO: 348343 - DNA, 280 bp, Zea mays
cctgattcaagtggacaaccagacggtgaaatccttgctaccttacatgagtaagttcatgaagctgctgacctttgctctgaagatcggcgcgcatttcatcgttgggatgggagagatgatacctgacctgagcagggaggtggtgcgcctgctggactcctcggccttgtacggcacaactgcatctgccatgtccgtgggggctctgggcgcggcagcactgtatggcaagtcaaggaatggtagcacgagcgacatgggagaggatatgacagca

SEQ ID NO: 348344 - DNA, 96 bp, Zea mays
gggccgacccacgcgtacgaaaaaaacttccatttttttccgaagagattataaacacgggaagcccgaaaaagaagggcgcatgaaaaagggcga

SEQ ID NO: 348345 - DNA, 284 bp, Zea mays
ccgggtcgagcccacgcgtccgccttggatttagagtgtataataattgtataatcaacattgtataaattctcacagacgaagcgggaaccacacacgtgaaattttccgatgggagttgtgggttcttgtagaattttagttggcacaatttttttaacaacataaatttattattcatgggagcggataattataccatatctatgtccaatggataatttgttatccacatgtatgagtatgaacataataaggtattcattgataaatttttttttctg

SEQ ID NO: 348346 - DNA, 358 bp, Zea mays
cggccgacccacgcgtaccggagcaaccttctttatgataagggagccctgatgttgtaacagcacgcaacgcactgaaccgcggcgactattaagagggcgcgggggcctcctaatcgtgaccgtccttgtacttcgtggagcagcagctctcgccactgcttcggccctcacgctccctgcaccttgccctcggcgctgacctccaaattacttggagcgtggacggggaggtccactagctctgcctcagactggggctctcagggcccgaggatttcgtgcgtcacgtcgcctactgggaggcgcgcaagttgctgtctaactccgacctccttacccgctcccgtattgaccc

SEQ ID NO: 348347 - DNA, 367 bp, Zea mays
cgtacgcgccgaactcgcccgtgttgacgcattcgatcacgacccatgcagctagcggcagcggcgggaacatctagatagggagggaagcggccaccaccatcgtagcactggccggtctcgctatgctcagctttattggcgccaccatttggttcgtcaagaaaaagcgccggcgcattgagcccccggagacactgtctacacagcaaccagctcctccgccaccgcccaactacattccatcttcggctggatcctcactagcttcaaatgggttctactcgagatcgccagggtattctttcatgaggtacagaactgggagccgtggttttccatactccccagccgactctgggattgg

SEQ ID NO: 348348 - DNA, 444 bp, Zea mays
atttttactcttttcgatccatggacaacaccgagctctttccttgttcatcttttcatgtctctggatccaatctaatcctgcacatacacatgcatatgcatgcatagaggacacgtacgtgagattcaccgtacatatacgtatagatggtggtgctatattggaggagaaagctgatgagggtgtggggggtacatatcgtgtgttactgcaatacactacacagtttgttgtatggtacgtacaacaaagactcaaagagacatcttgagctgatggaaacatatacatgtgctcatgcatgcgggaatttctttctttcttcttcttttttcttttttgcacccccttttaagaagagttgttaccgaactgtccattctgtaatttattataaattcgttaattattacaaatactggggttatataaatggctttt

SEQ ID NO: 348349 - DNA, 225 bp, Zea mays
cgtccgcgaacccttggccccgtttccgccccgtattaactgccccacaacgtggcttccactcggcggcctttctaaggggttcggggcttccccaccccggggaaaattaaaccaaacggcttccccgttaacttttctttttgactggcgtgggatcaaagaatcaaaaccattcttctcctccccgcccggccagcgtgcccgcgggggcctctttttttg

SEQ ID NO: 348350 - DNA, 241 bp, Zea mays
ggagcgagcaagcagaaagttagctagctgctagcgtggaagtgcccaaggcgagagagagagacaagcctaggacggccgcgccaggctagccagccagttgttagctcctgcggacaagccgatggttggcgcacacttacacttggacagagctctcgctcggcctgccgggaggaggcgccgcggcggccaagaaggacaccatcgacctcaagctgaagctgcccaccgccggcat

SEQ ID NO: 348351 - DNA, 321 bp, Zea mays
acgagtccaaccttgatgggaccccgcttatcaaggggggaaggaccgtggggttgggggccgcccacccgcggggggtggcaagaaccggggtgctttccaaggcgaattcattcaaggtggcttttaaggatttggaccccttttattagttgcagcatttggtggccaatctggtggcaatgctgtccaagttgggacaaaagaaattccatccaagatgagggatgggggctattaacaaaaagtgaatgaaactgtgaatggtgtgttgcaatataaactgccgaaaatggaaaccagacttgggggatcattaaa

SEQ ID NO: 348352 - DNA, 297 bp, Zea mays
  unsure (1)..(297): unsure at all n locations
naggcgcatgggctgaactcaatgaaaattttggcgctgacggagtagacagccaagagtgcaagactgatggtgctcaatgtggacagcaaaacctcaatttattgcttgctgcgacacaaccatataagatctgatctgacgttggtatgagcacttctgtttgcacccatggcgtcagctgcttgcattcataacgctgcgtacgatgaagctgtgacattaactggtgctgtcacgagagacccaatgggcactgcttgccatatggacgttggatgcatgctcacccctctc

SEQ ID NO: 348353 - DNA, 301 bp, Zea mays
tcctcgcccccatggtacgcggcgttctttttataaacgggctaccggccccatctattctcctttctcttcctcttcctgcctgtgatttgttaggccaactctcccaacttcccgcatgcccacaagaataatctttcctacccgattctgtagatcaatgttcataagctcgtcctcaatatctccttccgatagagctacgaccgtctcaccctctccacaaatgttctctatcatttcatcattcatacccccgtcttctccaaatctatgtacactgatctgtctttctacatcc

SEQ ID NO: 348354 - DNA, 292 bp, Zea mays
taccaggacacggacggtggcctcatactcatctgagacttaccgattgagatgttctttagcacctgcaggaagctgacgatcatgaagagatctgaaaccacaagcctgcgatcggcgagacaattaacaatgtgtgacgacgaccgagggcccgacaacgttcatgtcgagctcttctttttttttatttgagccccagtattttatttggttcttcttgtgcgaaagaccaccagccaaaagggtgagctttgggggtggtgcataatctacaaagcgcatgcatata

SEQ ID NO: 348355 - DNA, 341 bp, Zea mays
ctacaaaaagcatgtgacgtattcggtgtttaagatgcacacctagaagatatcatccatgacgatgatcaggacgctgatggcctgatcgactacaactagtatgtcataacgatgcgaaaggctattaacccactacggaaaaaggggcactgccctatgtatttttgtcatacataatcttcgtaccttcattaacctgcatgctcaatggttattgcagtgacttttgctttcctatgcccactgtaggtgacgtaactacttccgagctttggtgacagcgttacaactggccgcatatgtgctggatacgacaatctcccagacaccacctctgc

SEQ ID NO: 348356 - DNA, 264 bp, Zea mays
gcgtcgtgaacacaccccaccacactacccacggaatccgccacccgcacccgacaaggagatatgtcgctgggaagggaggagcgttaggaaggaggaggtggtcaccaaggagtacaccatcaacctccacaagcgcctaccggttgcacattcaataagaaggcacccaacgccatcaaggagatcaggaagtttgctcaaagccatggcaccaccgacattaggattgatgtgaactctcaagcacatctggacagcggg

SEQ ID NO: 348357 - DNA, 55 bp, Zea mays
atcaacacaaaatcttaccacactacacacatttatatattcatacacaccctca

SEQ ID NO: 348358 - DNA, 377 bp, Zea mays
ggcattttgtccacgtacctacctacctagaagtagaacaagagaggaggacgcctaaaattctgtcgcattgggcaccgcgtactggactggacaggcgggtcgggatccatcatccatcgtcagccagaaaattgtcgctgtccaagcagcctgggcagcttgtgtgtgactgtgtgtgctgatatcttgagctagctgtggcagaaactggaaaccctactgtgtgtgtgctgatatcttgtcatagcgagctgtgtgatgccgactggtgtagagctgtatcgctgattgcgtgaaaccgaaatgctgtggctttatttagactgatgttgtcacttccagtcatcggatcactcccagcactttgttcgttc

SEQ ID NO: 348359 - DNA, 361 bp, Zea mays
ggtcgacccacgcgttcgatcaaatcctgattaaatgcagtctattctctcttctgaaggagattcatgtcctgtaaggtcatgtacagattgagctgttcttgatcaacttgttggtttcctggaatctcgataggctggatatccaacatctttggatgttgattaatctatagttgctgatagctttttttaaccaaagaaggaatgtgcttctatgcttgtttagtttgttaataagatgcttcattcctgtcttcatgccacaaatgtgtttataaactactttgtcaacctcacattgtctccctgtcctgtttcatattcccctgaattgaaatgagattgcatgttttttttt

SEQ ID NO: 348360 - DNA, 117 bp, Zea mays
gtgctatctaggcgaagcatccggccaatctagcattttcgcgcggggtctgagtgcagaccgggggggggttttgacgtaagatggcctgcacccatgccttcgtcttgtggaggt

SEQ ID NO: 348361 - DNA, 330 bp, Zea mays
aactccagggcgacccacgcgctcggagcccaggaattctataaagtcgaccttcgcgcctacgcgcttgactataatctagcggggcgtacatccattaacggtgtcactgccatcattggttgctgtgactatttgatttctgttcacaatgccacactgcatcccaacatgagccatatttcgaccagcctcggggccctcttgagtctcctggctcacattactctacttgcgctccctgccctctatcacgcctagaaaccttgctggtgatgttactcaaggaatctcacatctccctgtgagattctctttgaccattgtgca

SEQ ID NO: 348362 - DNA, 254 bp, Zea mays
gcaaaactcagttgacgaacgtggaaacgactattgatcggcctcccccgcttcctgcctgggcgagcagtcagcgcagtctggcgcgtacccatgccctcggcaacctggtgggcaacagagccaatcaacagacaacaagagatgggcgctgggctgcagtgctacctaattggccactgccttgcgtgctcacaaactacatcgtgctgatagcgcccacagctaagcgctaaccgaatcgcctgtccagg

SEQ ID NO: 348363 - DNA, 441 bp, Zea mays
  unsure (1)..(441): unsure at all n locations
gtgaagcgggagcagcagcgaaagccagcgggtgcatggcgcccttcatgcccccgctgccaccagcgagtaaccgtgctgctgtgaagcgggagcagcagcgaaggccagcgggtggtggtgaccgtggcggggacaggttcgagacagtgtctgagcagggcggcaggggccatgacaacactggaaactctggtgcagatggagccagaccccagcctggagacaggtctggtagaagcgcccttcaagacgacggcagcgagagcgaagaggagacggctcccagacgatcaaggaaacgatagagggattctgagattctattcatactggacatggtgaaaacagatcatctcttatttttgtaactgagattagaactaaggtagtgagagagaaaaaatgtggtgggcagngacattgttagttgaaaatttt

SEQ ID NO: 348364 - DNA, 313 bp, Zea mays
gtgctctgcgtcgcgggcgccaccgtcatcacgctcttcaagggccccgccgtcttcggcccggcgccctccgtggccgcagccgtgcccgtgcccatgcccgcgccgggtggcggcaacagcagcaacaacaacaacaagagctgggcgctggggtgcgtctacctcatgggccactgcctgtcgtggtccggctggctcgtgctgcaggcgcccgtgctcaagcgctacccggcgcgcctgtccgtcacctcctacacctgcttcttcggcctcctccagttcctcgccgttgccgccgtcttcgagcgcg

SEQ ID NO: 348365 - DNA, 256 bp, Zea mays
atgtcacttgctggcacaagaaaaatgtcttttttcgctttccaccttctcctacaccctggtgggctctttgttttgaatcagcatcacctaatacttctctcgaaaatacacattctatgttgtctatctctaatatttttaaattttatgtcctattacagtttcacaacctctccatataaactggattctattgaaccttatattatcaatataacagtttaacttcaattgttttagcaccatcaatatt

SEQ ID NO: 348366 - DNA, 379 bp, Zea mays
  unsure (1)..(379): unsure at all n locations
gggcaaagctacagccacgtgcaaggcacgccgcgtaggggttcttcttcctcggctcctcgcgccgcactacgccgcatcgcgtcctcgcttggtagatatagggaagggattcggcgggtggtggtggcggcggcggcgagtgcgaaccattggaggaggcacaagaccctcacgggttttctagtagtagatactagatagtgataaccgattttctcctctagaatcccactcccactcgcgcacaattacgcactcaaagcccggcctcccccaccactagtccaccaccgggaaactttcccccgatctgtcttctcgccgttccgtcggcatgcacgacattggcctctccgcccgcgcggncggcgcgacg

SEQ ID NO: 348367 - DNA, 252 bp, Zea mays
cgctttgtttacaaataattccctcatagccacctttcggcgtcgccgtcgccgctcatcttgccgagaggtgatgggaccgatgaactcgcctagttctaatatagataatcgcttttcacagcctgaggtctgctgtgtaaggtggtgttgatggagataagtttaaaatctgttccacatatcacgcgtgcacactcgctaatcataggttccacacatatctttgatgcttcgaatattttgtactaa

SEQ ID NO: 348368 - DNA, 264 bp, Zea mays
cagcaaagtgatcagtgtgatcgatcacacactgtcatggccgtcatgggcaaggaggaggaggagcagcagcatcttcacaaggaggaggaggtggtccaaggagatgttcgagtcgttgtccatcatgagacggttgtggacgagtaggccgattcggcgctggtgcgcaagatctccggcctgaccgacgccatcggcagtcttgtctacatgaacccgccatctgaggtgaacgcgctcttcatcgaccttttcacagtc

SEQ ID NO: 348369 - DNA, 232 bp, Zea mays
cgggtagacccacgcgtccggcgtccttcttctggtgcttctcacaggttatgctcccacgcactcctttctcaactaagagggggttgatctgccgctctgtgtgcaatctctctttcttaaggagtggaccacctcgctctcttaccaatagctcctcattttccaaaaactggtagaagagatagagcctctccttcaactatcaatcgactgttctcttcagcacccc

SEQ ID NO: 348370 - DNA, 388 bp, Zea mays
gccagcgccatccacccgctcccctccgcgcccggccgcaccgctcccctccgctcggccttgggcggcgccacagccgcaagcgactggcgtcatatcccatcctgatctctccttccttcttcagtgcagctgcaggccagctgcactccacccgcctcactcccgcctccgatcctctgcttactcgccacccgtagatggccaccttctccggcttctctgtattctcttctgctgtcttcttcaattgtctttcttttcatcatttttttttaggttctaatattaaatctatctttgtttgttatttctctttcttcctcttatatttttagaattatttttgttcttttttttttctaattttcaacccctttttctaaat

SEQ ID NO: 348371 - DNA, 195 bp, Zea mays
tcgctcttctcctcctcctcgaagctccgatccgatcccccaatgtctgacagcagtccaggtcccggcgcctactactccggccctcccgccgcgcctccgtccgaatcttatcccgttgactgctgtcaggtcaacgccgatgatcctggctactacttcttcgtccctgctgcgaaatctggctccttctgt

SEQ ID NO: 348372 - DNA, 259 bp, Zea mays
gaaccttgctgactaagagtgatacagcaacctggtcgcaacgtatgacctaaacgcgtaggtaggggagtattgctggttgacaaaagacactgttcggacaacaaattaaaccataccagactgctgtgagcgactacccgatggagatagatacagatccttgagtcccatgtccctactgtcagctcactaagatgaatcgtcatatacatctagcttcatacaaatagtcagacatgacctattgctgcccacg

SEQ ID NO: 348373 - DNA, 264 bp, Zea mays
atcgtggagtggtaaccctactcgtccccttccgcatccgtcgccgcccaattcccccaccgaggggccactctccagtcgacagatccatacatgattggagaggccaaagataacgacgtctatgaagaggagcttctggactacgaggaggactactacaatacggtcgatggctccgctgcctatcccaccggataggtcactaagaaaggctacttctggatccacagtttcatgtttcagatacttactgctcaatcc

SEQ ID NO: 348374 - DNA, 162 bp, Zea mays
ttccggttcgacccacgcgttcgcaataccccctcggtagacgcgtttctaatggctgtgttcctctcctggcagggtggcgcgcgcctcaccctcacccaggttccactcctacttctcctatgacctatatcatctgttctggtctgcgcctcgtggccg

SEQ ID NO: 348375 - DNA, 391 bp, Zea mays
gtttacaatgactagttcatgatgtgtcagaaaatttttgaattcacatggatttccataggaattagtgcggaggagttatagctataggaatgtacagtgagaaaatgtcaaggtatccaacaaactcatactgttaacaacgtgctaacttgctgcaagtgcagcacttattttaaccacgtacctcctatcattcggcacaatacataaatagaatattaacagtagaatcaattaatctgaatggacgatacagctgccgatacctcccttgttcttgggtcatcatcttccaatgagacaccacggcagtcttctctaacgagaagtggcaaaacgccagcagaactccaagcattttgctaccagaattactggcatcccccaa

SEQ ID NO: 348376 - DNA, 271 bp, Zea mays
cggttttgagttaccgggtccacccacgcgtccggccagtttgcgttcgccactttttcaaaacctctctaccaaagcccgcaccggcagcccccagcgcagcatttttcaatggctgcgccgcctgtccaacctgtgccaaccgctgctgcagcagcagcggctgtgaaccgggacgcgttccatctgtgcttcgtctgctcggacaacctggccgagatcatcgcccgctgtctggcagctgttagtcgttcttcctggcctccaccat

SEQ ID NO: 348377 - DNA, 61 bp, Zea mays
  unsure (1)..(61): unsure at all n locations
atttttctttattctatagtctgtattatgtatgcgtatgagtattgagatgattctgcnt

SEQ ID NO: 348378 - DNA, 329 bp, Zea mays
gccgccgccgccgcctgcatcctgctaccacgggtcgagacgggtagatgaggaggaggaggagaacagctcgtcactgacgctgtgagttgcggggcgaccacatccatccgttccccctttcccttctccatttcccctttccggagccagggtaatggggcagatgggaggaccagacggcgacggcccgcaccaccagtaccactaccaggcgctcctcgccgccgtgcagaaccccagccagggcctgcacgtgcctctccacgcaagagcgggagcgcccgccgccggaccaggacccagacctggagctgatgctgatgcct

SEQ ID NO: 348379 - DNA, 212 bp, Zea mays
gcagatgcccttgttcttaatgctgcggcgtcccttcttgtcagtggggaaatgaaaaattttcatgacggggttgctttttcacacgagacacaacggggccgggaaaacacctatacaccttgggcctggataaaaaaatcaaatagttccccaaactgagggaagatgggttgccatatataggtttttgcgataagacatgaggaatg

SEQ ID NO: 348380 - DNA, 341 bp, Zea mays
  unsure (1)..(341): unsure at all n locations
ggccgtccatcgcttctttagcaacctctttttctgtaccggcgccggaacccttgcggagtgtctcatggagaaagccgcgcgccagctccataangaacaggaggagccagccgctttggctgctgcaacggatccttatcgttacgtccagaagccgaaaccgattcctgatccacaggacactgtccttatctatgggaagaagagggagcctaccaaatctcaagattagctagcgccctgggcacatcttgtaccaaatgtgcccccagtttatgtgcaacaataccaggaatggtttctgcgtattttctggatacaaggtaaaacgttttttt

SEQ ID NO: 348381 - DNA, 312 bp, Zea mays
ccggccgtaacagggcgccagcgtcaccatgacttgctaactcctacaattttttaactagctgggaaacgcgtgtcttgatgaacaggggacggaacagctgcaagcactgctcttaggagatgatcaacgatgtttcacctgctgatacatatctctaaagcaagttgtaaccatggagtctcgtctgccacattcagcaacaatgttttactacacgtgctatctatataaatgaggctcttcactgaactaatgttcgatgttataagtctacagctttgttgatctacctattaagtgaatgacttt

SEQ ID NO: 348382 - DNA, 313 bp, Zea mays
atgaaggccaattgttacccacgccattgctagtacttggactgatgtctaatgttcggaggtgctgttggctgaagggatgtcaatgctgatgagggcatcataaacactacactctctatccatggcattaattgataccgacttggatataagtgcgatttaaactacctaactactagaagctggcctggttacaactgttctagaggacatgaaacgcgaggtattatatctaactgatgaacatgagagagaagggcatagctgatagtctacttgtgaatctcttaggtcacagctggtagcatca

SEQ ID NO: 348383 - DNA, 347 bp, Zea mays
cgacccacgcgtgcgcgcaccgcggtgacatggactatatttagcacgccctcaccctcttcaccgacgtcggggctgtccttgaccgcatccgtgtcatcatgctcaagaacgcggctgacaagtcggaggacaagaggaggaagaggaggaggtggtgaaaatctgtgtgcgaacacagcactcaagggaagggaaggaactggtgcgtctgaaatgaagctcgcacataactaggtgtatacatatataggagcgaggagttactttgcggtggaactgaactgtgcaagtgtcgttccttttgttttctcttgcctgttgaatgaatgtgacaaatctccacc

SEQ ID NO: 348384 - DNA, 432 bp, Zea mays
ccggaagacccggcgcgagccacgcgtccgcggacgcgtgggctgacgcgtgggtgtggttagacttcctgcccagcgaccggcgagtgggtgctgtcccaccagcggacgctgccacgcttcactccgccgggctcctacacgatctacatgaagattgtcggggacgacaacgaggagctgagctgcatctcgttcgggttcagcatcggcttcgtcgcgtccagctgaacacgtccgagcccgggcacgagaggcatccagctcatggatgtaattacgtgaagcacactctgtatcctatgactttttgtgggtgtctgtgttcaactgagacgtttttatccggagttgaacatcacagtaaagcaaagtcactgataccatgtaatggaactctgagcgcttgatggggcccgcgttttttagact

SEQ ID NO: 348385 - DNA, 396 bp, Zea mays
ggcgtgggataaaatgatgctgctgaaagtactcttgagccagtttttttccctacaagaaacaacaacgggggggcttgtttgacgaactggggggtacttgttgataacctcaaccagcttattactgctgatgtatttcaacaatggaatggtgtaagccaagaatggagtactaactccctaaagctttgctgttcagcaatatgcttcatctgagaaaacaaaatctcaggtgaaatctttcttaagtcacaacgcagaacagctatacgtgtacagatcgctaccccttggacatgatcggagacagaaccggtattggcagaattctgcctcttcatcatcctatgaccctggctcgggaagagacttttttgaatctagagatggata

SEQ ID NO: 348386 - DNA, 409 bp, Zea mays
gggtccacccacgcgtccgggctgatgaacgcaatggcgggttctgagactgttgcaaactgtgcacccaccgtggtgaggtatacttgtttggcgaagtgcctctgcaggacggggacgacagtccaggctctcactgtgctggataggacgacagacagacggctgatgccaaaccgtgcttttatgcgcacgctgcttgaagggatctaccctgagcatacggatatcaactcgtatgatgtggcgaagctttgtattgctgatcggagtgtttcgagtacacagtgctacacatgttctactcgtttacttgtggaaggtcgccatgacgagaacaagctgcatgactggcacggatgatgatgacgaacggtgtgcaactgaccccactcgattgcagttgtat

SEQ ID NO: 348387 - DNA, 252 bp, Zea mays
ccataaaagactgcatcccaatccacatcctcctaccactttcaccacgtcgcaaacccctactgctacctctactcccttgagcatgacaatcaacctcacgattacatacaagacgacaagaccatttacgaatcttattacgctcccaacaccatcttcaagaaaactgatgctaacaaacactttcaaattactgtttttgacgaccttgaaaccaatctcatacatgagctcaaaacagaattctac

SEQ ID NO: 348388 - DNA, 313 bp, Zea mays
gttcctacttcgtgtcacgcacatgttccatgctgctgccccacactctctgagggggcctattatggacggaggaggaggacaaccccctcatcaacctcccactgatcaataagaccaactcaaacgcatatgactacactgccgacgtcatccacactatcatacccgacctattcatgcatactcataacacgccattcactcctctgaaaaataatactgccatactcaacctcactccagaccataacagcaacttccacggctgcttagactaaatcctcaataccgactacacgaccattgatat

SEQ ID NO: 348389 - DNA, 350 bp, Zea mays
  unsure (1)..(350): unsure at all n locations
gcgtacgnttgaagaatgccaatgctattttatatggattaataacagaaacaaagcctatgggtggtgtgtaaaatgagtgccgggctgctgctaggtttaagaacctgccattggaagcaatgaggtttggtgagcatacttatggagtgagtttccttcaccaaccagttcatccgaaaacttaatttcactttctttagttcttgcttggagttctattattctttaggcaatggtggtcaaaattgttttcatcgttgatcacattcattgcacgtaggaattatcattgattctagttttaggtaactttggttactgttccaatccatatcctgtcatgcttt

SEQ ID NO: 348390 - DNA, 325 bp, Zea mays
aaaccagcggcgagccacgcgtccggtgagcttctcctttttttacccctttttttcggagaaaggaaatctgaattagggacgggattcaacggggatgcagcggcacacaaagatgaaagaaaagccaacatatcaccacaatgctttttgttacactgaattgatcatacaccaccataaatgtagaacattaacagaacacctcacactcgttataaaaaggatgactctcatgaatatagtcaaaatacactttgaaatacaaacacatacatatctctagactatacatatttctaatacccctgccgcattcacatct

SEQ ID NO: 348391 - DNA, 308 bp, Zea mays
ctcctcccacctcattttctacatttataaaaacccacccgcatcctcgccctgctccttttaataagccggcgggcccaccatctcctgctaccacatctttccaacaaacaaccaacccgcacttttcatagcactcacacatcatccagtcagctttaccatcctagcctacaccaacaactttcatatctacaactaccacttcatctatggccccttactcactcagataaaccacttagtaccagcctatccttacatcacagcagccaacgcccattactacatcatcatcaacaactcat

SEQ ID NO: 348392 - DNA, 258 bp, Zea mays
gagaaacactcattcattgatacctttgtttatttactcggccacaacagaccatgggggtgctttgacgagagagggcggctcaccaagcatgtacacggtatatgcactgtccccttgatgtaccatgcccgcggcatacatcagttcggtcagcagagacactccaccatacacaactcgaacgatcaagtggacgtggatgcactgctgctctgacatcataatctgatactgcgaattatgagatggctgcac

SEQ ID NO: 348393 - DNA, 234 bp, Zea mays
  unsure (1)..(234): unsure at all n locations
tcacaaccccccaccacaagaactggttggatttaatagaagttggctgcccctcacggnaacccaaggaaagaggtataatacatgcttctcacacggtttccccttagttgttttttctttgggctccattaacatcatcaagcacgcgcttatttacatcttcgtggccaatggctctgtctagcatgctgaacacacagacttattctgtaaacttatcaccgttgcctt

SEQ ID NO: 348394 - DNA, 326 bp, Zea mays
  unsure (1)..(326): unsure at all n locations
atacaaatttttctacgactaatccatcacccactacgccttcncggcggattcttttaaaaggaggtgcgccccccctacctttctntnctcatntccaacatttctactctatccgatcctgaagaatacaccgagctcgcccaaaattattcttttttcgttgctgagacacataaaccatatctcaacctgtaagtcaacactgcctcctgtaaggacacaaatcgtatcaacatccattcataattccaaacagaactcgtccaataccaatattctaactatccatatatacattcatgtaagcaactctataacatcat

SEQ ID NO: 348395 - DNA, 242 bp, Zea mays
  unsure (1)..(242): unsure at all n locations
ccagcgcacaaacactacgggcggtctttttaagaaggctggcggccccaatacacancccctcctacttcctcaacaacctaccaaccaacgaactcaccaccgaatactccaatggcacaacacttcaccactacaccataaacacatcattcctccactcatccatttatctataaccaccccccaacctattctacagctacccccaccatctcaatctatcaaaacttccacttaca

SEQ ID NO: 348396 - DNA, 220 bp, Zea mays
cggaaaacccgcggcgagccacgcgtgcgggcccggattgctttggtccgtgtgttccgagcgatcaggaacggtcctatgaggggggaggatccacctggggagcgcactatcatgagaagcctccttcaggctctcgaaaagtctattcagatcgctcgtgtttgaccgtgtaaacgccacacgatcaagcgctgcatctctgtaactattaattaag

SEQ ID NO: 348397 - DNA, 295 bp, Zea mays
  unsure (1)..(295): unsure at all n locations
cacatcactgcantacaaatagagcatgtcctgatcttccaaaatataattggattgcattgtattacctctctcaatctggatatccatagtttttatatctatccttccaacatcactgactcaatcttctcccctcccccttctcaaatcatgaccaatcatccatcctagttgatttttatcccttgtttagcaagctaacaccgatatttttgttctacaatgaaatctcaaacccaattttattttacgttttatctccccattagcaataaaaattttctttacattc

SEQ ID NO: 348398 - DNA, 210 bp, Zea mays
ccacgcgtacggggccactcaccttatttacccgactcttttcaacaccacccctttcatgcactcggccgacatctacacagcctgggcgagcacaaacacgaccaacccgatttaatcaacccaagaatccgccaaaaccgacgactacggagtaccaacacgtcgtctcacccaacactcccacttatagaaggacagcacccttaa

SEQ ID NO: 348399 - DNA, 326 bp, Zea mays
  unsure (1)..(326): unsure at all n locations
aaacccgcaggagccacgcgtncgggtcacaccattatatccccctttctttttaacaccgccaccctcagcaagcaggctgcgatcttctaaaggttgtggacgaactcaacaactaactcacttcatttattcagctacttgttcaccacactcccattattatctactgacaacatttagcatcatacaacataaactactatagctcctcatcaccacctaatccagctatactttgagaccactattataccttacactattaaaaaggttgaatatgacgctcattacaatatgattttttatctacaaccctatgtata

SEQ ID NO: 348400 - DNA, 347 bp, Zea mays
cccaccccccccaagcaagaggggggcttctataagaaggtgggcgggctaaacaacctactgaaggaatttaataaaaaaataaatagcccaatcccatgaatcattagcaacaacagtttgttttattacaacatcaactcctatatataatgatcacaatcaaattcatctattctttggtagcatgagaatcatcctacaatattaaaaagggtgaataaaacaccccttttaattaatttttttttgtacatacaacgtatatattttactccttttgtagtacgtacaataaagggaaacatatttttcttgactataatttcattgattaaatttttaat

SEQ ID NO: 348401 - DNA, 388 bp, Zea mays
ccacgcgtacgggcatgtgcaatgtttttttcctgtttcttaacatccaaaggatgctatactcaccgagggatttttacgagagcaggtgcatatatatcaaccttgtggattggcaaagaatcctacctggaaacccaataagcaaactaatgacgcccgcaaagctgagaaacatgcacgcaaaaatatgaagatgagaaccataagctctgttgatcaggagaacaagaacaggacaagagattctaatgatcatgaccaccacaaaccaaagacaggaaagcacaaatcaccaagagatggggttgtccttttgcagaaaaggcaggagaagcgttctttggacaagaacaagcccgctgaacatgatattaaaatgcatatt

SEQ ID NO: 348402 - DNA, 275 bp, Zea mays
ctatccatgccctcccctcttccccctcctctatcatctctcatgcgcccactccccatcacatctcatctcctatattctccatccttgtatcatctcctcgtgatttcatctcaaggactctatggaaggcagcattcttctatcccttccttgctagaataaataacaacagataaaacatcacatctaataacatttggtctcgtaggtcttctattttgcctgaatttgttttttccactgtactcatttacaatgtgaaaagtcatgtc

SEQ ID NO: 348403 - DNA, 364 bp, Zea mays
gacgcatgcgtgccggtgtatattatttcaactgcttattacgcagcctgtcgcatcggctagcgggcggggggttaggtacgctgtgctttgcacacgagctgcgctgcgcgctccgaccaggatcgacccgaccgccgatacacgggtgaactcccggcgcatatcccacagacgacacccggcggaggtgcatcacggctcctcgccacgaaatttatcctgttcgaccacacgcaggaacaggacaaggataatgtgcacatactgacgaaggaaggcatcgcgccagacgccaaaaggattgacgtttttaaccacttgccgtgggacgtggaccaaacgaggctcatgggagacttga

SEQ ID NO: 348404 - DNA, 257 bp, Zea mays
cggacgcgtgggtttttctatctttttcttagtttatattcagttgctgcttgctggtgtttatttgattgatggcggcttcaacatcgttgaatacatccagtacccgactggaacatcaagaaccccgcacgccgaggcgaacgaaaaaccattcgctgaaaaagagagggttccaagccgcaactgcgttcaaaaaatatgggaccacatcatcactacagaaactagaacatgagcaaatatatccacgcaaa

SEQ ID NO: 348405 - DNA, 343 bp, Zea mays
gcgacccacgcgtacgaggacactttattttagctgctttgttcgtggtccgcaaaaactgttagatagcgggggcataatggcaacagcagtgccgcacacattgtaatacctggctctctatgcattgtacctaaaatactgtggctctttatgaactgaagaaagatttgaaggtaatgtgagacttgtccgcatcatatgtgctcagatgatattctacctcataattacacagctgtctcatgcagaactacttctcgacgccaaagccaccttttgatgcctgaacacagactactttacttgacgtctttctatggaactattatgcaatatacag

SEQ ID NO: 348406 - DNA, 162 bp, Zea mays
atgttcagatggagcttcagctccgtttgcgcttcacctgctatttgcctcagctcgagcaggggagattcggtttagggccgccgacctgaacacgagcgatagacgcgcgtgagacatgctcctaggggaggacatccgtaaggtctcgcgccaggacat

SEQ ID NO: 348407 - DNA, 218 bp, Zea mays
gggacgccctggcaaggaagctgtcttgacacttcctgctgaacgatacaggattggacattgggagacacccaaagatcctgcaaaagtacaatataacaaggaaactagaagtgtcgaacaggacccacccagagatcctgcagaggtacaacataacaaggaagctagaagtgtagaacaggacccacacatatatcctgtccaagtccaacata

SEQ ID NO: 348408 - DNA, 404 bp, Zea mays
ccctacctctccagcatcctcccgtctccgtcgtctcgtctccgctcctcacctcgccagccatgggcaagatcaagatcggaatcaacggtttcggaaggatcggcaggctcgtggccagggtcgccctgcagagcgaggatgtcgagctcgtcgccgtcaacgaccccttcatcaccacggattacatgacgtacatgttcaagtacgacaccgtgcacggccaatggaagcacagcgacatcgccctcaaggactccaagacgcttctcttcggcgagaagccggtcaccgtctttggcatcaggaaccccgaggagatcccgtggggtgaggctggtgctgagtatgtcgtggagtccaccggtgtcttcactgacaaggacaaggctgctgcacatctg

SEQ ID NO: 348409 - DNA, 274 bp, Zea mays
ggttgagcaaagtctagctagtgaaaaataaggctctagctcatcacgggcgacggctgcctcggccttccggactgataagccagactcccataacagctctgataatcatatatggcttgacccccgcggaagtggaagtgcacacaatcttcatgcagatgatctaatcacatgtacaagatatccactggtacttgtaattgatagtgaaaatacccatgcattcaatgtcatacatactgtacagaagggagaaccacctgctgtatta

SEQ ID NO: 348410 - DNA, 302 bp, Zea mays
  unsure (1)..(302): unsure at all n locations
cgtncgatcacactcgtagagagaaggaaaaatatccccaaaccctagctcccgatctcgatggcgaaccctcgcgtcttcttcgacatgaccgtcggcggcgccccggcgggccggatcgtgatggagctgtacgccaacgaggtgcccaagaccgcggagaacttccgcgcgctgtgcacgggcgagaagggcgtgggcaagtccgggaagccgctccactacaagggctccaccttccaccgcgtcatccccgagttcatgtgccagggcggcgacttcacccgcggcaacggcaccgg

SEQ ID NO: 348411 - DNA, 162 bp, Zea mays
cgtgcgtaccttcctgatcctgccttacaactgtcagtttaaaagacgggggaaaaccttgagctgggggtatactgaaatagagggctagactctcaattctcacttgcttcctcaagttctgtctgtatatacgatcatcttcacagtgtcaaaagactc

SEQ ID NO: 348412 - DNA, 359 bp, Zea mays
tccttatatgagcaggggcgctactactttgcatgggtttctgcaagacggtcaccagcaggacatgagctcagcaactgagcagagctccatgaccgcatcaagcctgatgaacccttcatccaataacctagccctggcgctgcaaggtcaccaccaccaccaccaggagcatgagcaccagcagcagatgctgtccagcttcggatccgagctgctcttgtcgccgacgacctcaccctacgggttccagtcctctctgctacgaagcctcatggagccggccgcggcgacgaagcatgcttttgccgggtaccagcagcagcagtatgatcagtaccagcagcagatgggcatgg

SEQ ID NO: 348413 - DNA, 237 bp, Zea mays
cgcgtacgagaaaaatagggtttcagtgtcggcagcctcttctcacgctggcgtcacctccgagccccacgtgccgagccagacaaccaccgggcccagatccatatccacctgttctggatctcacagccttcgcttatgctgttctttatgttcgccaccgcgatgtcttgggacgggtactgcggacagatctaccctggaagcgttgttccatcgacctgaaacgacccccct

SEQ ID NO: 348414 - DNA, 275 bp, Zea mays
  unsure (1)..(275): unsure at all n locations
gtttccttcccggtcttgctgcctaaagcctctctttctgccattcgatcccgtcgtcagtccccgcccggcgtgccgcagacttccacgagggtggcctctactcggaccaacnnctgctggatagaaagaaggatagcggttaaaagccctcgtccccggcttgcgaagcgcttgcttgccgtgcggtctgctattgtgaccgtgcgcttatccccctaccgagctttcattgcatgtacccacgcnncctctttccttcttcnngcagtctt

SEQ ID NO: 348415 - DNA, 122 bp, Zea mays
  unsure (1)..(122): unsure at all n locations
catataacctcatacattntatttatatttttagcccgcaccaaaacaaatgcgaatttgtttatatactaatggggccgggcaaaatcttactcccatacggtgcaatcataattcttgac

SEQ ID NO: 348416 - DNA, 318 bp, Zea mays
gtcaaactcgccttccttctgatgcccaaatctctctgggattgggatctccagttgcccgacgcccttccatgacacgcgaaatgcacgccatcctcgctgggattccgcagtccctccggcccgcggtgctgatcgcctcgacgtgcgcgctgctcctcctcgccaccgcgctactccttccgcgcgctcctccggcggcgccggcggcggcgctgaccactgtcaccgacgcggacgccgtccgcttggacgctagcgtcacccgaaggaacggcaacgaagtgctgtggcagctacccgccccgtcgtccccac

SEQ ID NO: 348417 - DNA, 389 bp, Zea mays
  unsure (1)..(389): unsure at all n locations
cgggtccgacccacgccgtcncggaccccttacgtccttcgcttcgtcgccgccgtccgtctgtcgtcgtttacgtccccgcacctcgctttcattgtcgtggtcgcccaagatgaccgaagtcgcactaagaagggcaggaattgtttnggcaatatatggaacccaggtatnnggtgctagcttgcgtaagccaaatcaagaaagatggaagggtatctcatgcattccaagtaccttttgcgaagttctgtgggaaagtttggctgtgaaagaggaaaagcaagttggaaatttgtggggtgcaaaggacctgtgggaaaggtgaaagggctggtggtgctttacanccatgatacactgctagttgcggtcatccgtcagggagc

SEQ ID NO: 348418 - DNA, 72 bp, Zea mays
  unsure (1)..(72): unsure at all n locations
acccacgcgtcacgtatgatctactacttggncatattcctgtattaaattatttcacacatgcagttttgc

SEQ ID NO: 348419 - DNA, 97 bp, Zea mays
gtacttcatgagcgaagattgtgactctatcgtgcgaagattggcacaaaaaactgttgcgctgacaaactcctagacactatacgacgaaccctcc

SEQ ID NO: 348420 - DNA, 377 bp, Zea mays
  unsure (1)..(377): unsure at all n locations
aggcaatttaggttcaggttgtccatttccacaacataaagnttctctagggtaagtgtgaaacataaagtggggagggcatttctaatccttattatcacaatcttaaatattatcattatcaacttaaatacaaccaactgataactcatattaccatttcttattattctgcgaatcatttattcatcctcaaaccaccatatctatttacacaacatcctatatttaaaatccttttattttcatttgtcaattcacaacattataatcccacctattataattaaacttctctcaatttaacccccataacttatacttttcttaatcccttcccccttttttaacccatttttttaaccctacaataaaaa

SEQ ID NO: 348421 - DNA, 367 bp, Zea mays
ggacgagctacaattacttgaaggagttccaccagtttctagaagttgtaaagaggtaaatgactttgttggtactaaacaagacccactaataccgataacgaagaagacacacagatcatgccgtcttttttggtggatcaggtttgcattccattacttattcctgccattgatcgcatggtgggtgcatcaaaatcttgataatattttgttatagtttcacctaaaaaacttgtacataagatgaatcagcaaaagtttcttggagaatgcaaatttttttagataattgaagaaatatccagcttcatcctttaaagagaggaatgggaccaaaattattataagttaaaccacaacaacg

SEQ ID NO: 348422 - DNA, 319 bp, Zea mays
gacgcggccacgacgctagtcgtcgtcgtcgtttcgcaactcgcggcgccggctgccggctgcccctactgtccgacgccgacaccgacacctacgacaacgaacacacacacagcggggaacccgccgccgtcgatcacgccgggacctccgtcttcatacttgccattcacgccaacgggcaagcgccacaaggacacgctgaatctgctggagtgcgaggacgcactcaacggcctagtgcacaccatcgaaaggaccaacgacaacgacaactgctgtacactgctgaacaaagaggcagatctatactccaaac

SEQ ID NO: 348423 - DNA, 321 bp, Zea mays
caactagtattttagtagtatcagtttcttttttttcaaggttcagtcagtgatagggcggggtaattttcgatttggggtgggcagctgccgaggatcgatggcattttagacatctgccatggcggctgtgttgtgatgcataagtaaacgtacttactaatctcctggatgagctgccggttgatttttctcacggcacggacagtcgagaaagtcagcgtaatcccctgttatgatctcctatgatgcaacttaattaattcttctggcgtatgtatgtaaccatgtgtgtacatctagaacgaatcgtgatgctga

SEQ ID NO: 348424 - DNA, 305 bp, Zea mays
ttcgtggactagacaggctcgtctaagagggtgtccgttacgacatgtcgagtcaaccagtacagctgcgtacggtgctacccgacgtgaccggcgcctacgaggcaccgtacctgggcatcgaccctgccgctccccgggaactacaccatgctcgacttccgcctgtaatgcgggagatctaccgcctgccgtcccaggctcagcatgccatcaaggaggcgaacagcaactctgtggcagatgcgcccggcgccccagctgagcagatgcagcggaagccatgactgatgcttatcaaccgt

SEQ ID NO: 348425 - DNA, 324 bp, Zea mays
gaccgacgcgtacgcacagatgctaaaatggtggttccttctgatgtttattaacacatggaactgttctcgaggaggagtctttattattgtgcgcgagttcatcacaacccattactaccaagatggcattcattctattccgggggctcgagatgctctccaaactctttcatatttatgtagcttgtctgtaccaacatctcggcaggatgtaactaaaaatcacacattgctatggattgacaactactatccatgcttatttcagcatatccattaccataatcatttctctatgaaaagtcaatccacgccaaaatc

SEQ ID NO: 348426 - DNA, 264 bp, Zea mays
tccgcagaagtgctctgtccactactctttctcctattttttctgacaacccacgtctctatagagttgtgtacaaaaagcgtgctgcgacgatacaacaatccctcgacaattataaatctgctacttattattattcccattcactctgatagactccggcctaaaaaatgccatacctgaagctgatctattatttgttttgtaatcaaataaacgtgtgattatctggcacacaaaataaaatcttgcgtattttggaac

SEQ ID NO: 348427 - DNA, 187 bp, Zea mays
gtctcttatattgtacccaccccttttttctacacctaggctactttcttccgtcgcatttcaaagaggcgtgcgcactctctataccctatcacatagagaaactcatctcatcctaacccttcatactactacacaaccagtaacgccgcccacatgcccccaacattaaaaaacaaattcattc

SEQ ID NO: 348428 - DNA, 445 bp, Zea mays
  unsure (1)..(445): unsure at all n locations
cgggcccgaccgcgacgcgtaacgggcagctacctaactagatactattttatgaccagtttttttccagatggtgctgtacgcgctgtggggcatcgcgacggccagggtgcctctcaacgacgtcgccgacgacgccagcaaggacaaggcgcccggcgaacatgtggaggttaccattgccaagctgaccgatgatactacggaacctgcaactgccgtggcggaggatcttgttaaggtacacgacggccaccctgaggaagcagccaagggcgccgacaagccggcgtagaacagctcgggacgcagcgacgacgagcaagtctagattcctcgctcgatcagatcagaattcatgaacaagaacatgcgtatgtatgtgtatccggtaggtcgtaacataacatanattaagtgcgcatgcatgttggcaactcatgtt

SEQ ID NO: 348429 - DNA, 212 bp, Zea mays
ggaccttaattaccgggtgcgacccacgcgtacggaaagattcaagcaaatggtttacacctacttatattatgcctctaggcaatgagcagcgacaggtgaaggcagttctgttgtggacagtatgactaaagcaattgatgaggtaatcaaaataaacgatggagacttcacctgttgtaatccaacttaggagccgattccatttttga

SEQ ID NO: 348430 - DNA, 155 bp, Zea mays
actatggtaagacgttcaagaaaccaaagacctcttatgacaatgaccgtcttgatgctgcactgaagctgatcctttactatcgactctggcccaagcctcagcttttgagggatcaaaatacactgagcaacatccttaatacttcatggcac

SEQ ID NO: 348431 - DNA, 216 bp, Zea mays
ccggggcgacccacgcgtacggttattctgcccaaaatgccttgtgctgtgaattacatctcctgcttgtcccaaggacagggggggaacatacccaacctggagcagcattatggtctgagcaagaactgcacatgaagtgactatcctgatagaggcctacacgaccctgagggacacgggccctgtcccatgcaatcaacatgtgagagacct

SEQ ID NO: 348432 - DNA, 266 bp, Zea mays
aaaacccggccgacccacgcgtacggggacgatgaggataaaaattttgagattttataacagcatgaggagggattagaggtcgcttataaatacaacggggccgacccaaataatgatgataatgatcaaaatactttatatcttacgccaccaatccctcaccctttaaccatgggtactaaaacttaatcacatttatttgaccatgataattctgaccattacaatgatgacgatcataactatcattatatttatacaaa

SEQ ID NO: 348433 - DNA, 230 bp, Zea mays
ccggggcgaccgacgcgtacgcaccgatgttacttactaccatcataccttcatttttcctccgaccaccctatctcaccggagtggtacccaacaggttgggtcactaccagctgttatgaccaaaactcctcatcaaaaactattaacacgggctcaacaaccatttgatccattaactcattatttactatgtcatctacatctatttaacctaattgttcctcaat

SEQ ID NO: 348434 - DNA, 356 bp, Zea mays
tctgcaactgttatctgcctgatcttatctgctttatttgaaacacgcacaaaattcttttacgcacacaacatcatgaggtccattgcaactacccttgcatacataacatttccttcacttacaactcattcaacacacactaatgattctgatactgtctacaattgagacattattgctaaaaacgcaagtccagttgtccaatctctttttggagcattgtctataccatatgacaataccaaagctcgcaagctcattagtaacgcatcaccagaaaacatgcctactcataattagcaaatattcaatgagatactacattatatacatcggtctcttcccgacatctc

SEQ ID NO: 348435 - DNA, 246 bp, Zea mays
acccggccgacccacgcgtacgatgagtctgaacacactttttttgaacgtttcttttcccccacaaaaacatttctgggcgttctacataaaaaggaggaggcttattatacattataccttaatacctaccttcatatcgatcttattaaaataaacctcctccagttcctcaaaaccacatctgaaaatcctctagttcactaaaatattgacccagccatcaacctccataaacataaatat

SEQ ID NO: 348436 - DNA, 215 bp, Zea mays
ccgggccgacccacgcgtacgcttggtcctactactgattcttttacaccatgttttcccctacgaaatcacatcgaagaggagacatttaaaagagaggaagggctcttcaatatgcactttacatactactctcttatacaccccagaaaataaaagaaccacttcacaatctcataggcgtcaaagctctgctagatcttactcaaacaaca

SEQ ID NO: 348437 - DNA, 350 bp, Zea mays
  unsure (1)..(350): unsure at all n locations
ccgggccgacccacgcgtacgncgggcattcattacaatggttgtgtggcttttttagggcgcatgtatgtgcaaagggcagcatattatcaatcccggtacggctacccacaagcctttgtatattcttcttatgggccatcagcatatggacctcaatacctatatcagcacaatgcatatggtacatatgttggacaacagtatatttcaatttacgctggcccaaggacagtaggcccagcaatctacccatatcggcagactggccaacctgtaccaagtgatcatgcttattctcttggatatgccccaagtaccgttctcccactatcgaatcaaaatgttaa

SEQ ID NO: 348438 - DNA, 276 bp, Zea mays
gcaggccatacctctcagacttggaacatgcgcttgaaccaacgaccgcacgccgatgcgggggccatgatgagccaccagtgagctctccggggacactgcagcctctaccttctcaagatcggcaggagagagaaaaaaccattcgacagcacacaacagcagaaggaaggaatctgcgcgcgccgataggcggaaaaacgatgagcagaaactgactctcgtatgcttcggtaatgtgacgagccggcggcgcattgcaactagcttggacta

SEQ ID NO: 348439 - DNA, 370 bp, Zea mays
cacacacacacacacacagacaagtggtttccatagccaagtgtgtgtactagcaaccagcgtagctcgggcggcagcaggcagccatcatgtcggaggagaagcaccaccacttcttcaaccaccacaagaaggacgaggagcagcccgccggcgagtacgggtactccgagaccgaggtggtcaccgccaccggcgagggcgagtacgagaggacaagaggaggagaagagcacagccaagcgacctggcgaggcggcgccatcgccgcggcgccttcgactctacgagagcacgaggcgaagaagacccgagcacgcgcacaggcacaagatcacggaggagggtcgcttgccgcgggcgggccgtc

SEQ ID NO: 348440 - DNA, 455 bp, Zea mays
cccacgcgtccgggcttctcctccccctccggttcggtttcgggttcgtgaggttctccggggtgcgggttcgtgggtgagcggatcgagatggcggcgtcggatgttgagtaccgctgcttcgtcggcggcctcgcctgggccacggacgaccactccctccacaacgccttcagcacctacggcgaggtcctcgagtccaagatcatcctcgatcgggagacgcagaggtcccgcggcttcggcttcgtcaccttctccacggaggaggcgatgcggaacgccatcgagggcatgaacggcaaggagctggacggccgcaacatcaccgtcaacgaggcccagtcccgcggcggccgtggaggcggcggcggtgggtacggtggtggccgtggaagcggcggctaccgcggtggcgggcgccgtgatggcggtggcggctaccgcggtggcgg

SEQ ID NO: 348441 - DNA, 157 bp, Zea mays
gtttgcagtatcaaagagtttaaactgatgttgtaaccatgcaaaggctgaaaattttaaagagtatgggagaaaccttaatctaaagaaaaaaaaaaaaaaaaaaaaaaaaaaaaaaaaaaaaaaaaaaaaaaaaaaaaataaaaataaattataa

SEQ ID NO: 348442 - DNA, 256 bp, Zea mays
caacccttccggtttgtgtttaaagtttgcattttttttgcagagctggcggatacggagtcgtaggtgggcttggtacgttgatgatcacagacaggacacgatcggatcggggtagataaagagggataaaagtggaggacggctgtacagacacgtacggagatgccactgctgtgatgagacacgctatttgcagggcgaaccctgttactatcatgtgcttcttgtcaggtaccatatgctactcgatggt

SEQ ID NO: 348443 - DNA, 317 bp, Zea mays
  unsure (1)..(317): unsure at all n locations
ctttatccaagctccattttctctgaggaagcgaaccttccctttccccaggcacagatccggctctccgccgccgctatggccgctcgccgcctcctccttctcctcgccgttgtcgccgcgtccctcctggctgccgacgcgcggccgtgccacggcttcctcgtcgccatcccgtccgatcccaaccccgaccccagcagaggcgacggcgccgtcaaccgccacctcggcgctccccacgtcgccacggtcatcaccgtcttccgcgtccgccgcctcggtccacacgtnccccacggtccaccgaaccacca

SEQ ID NO: 348444 - DNA, 145 bp, Zea mays
ggttggtgtacgaggactccaatgttttttatgagttcgcggagacggtgttcggggaggtttttagaggtcttagccagctccactatacgaccggtacgggtactaaaaagactgacatagctaaaggcgcccgttttaaact

SEQ ID NO: 348445 - DNA, 258 bp, Zea mays
caccatattattctcaattcactttgtttcttcataaatcacaaaagatatcacagccaactcaactgcctctgccccggcaaaaacaactccaaagacctataaaactgtctctttacccgcccagcttctgataatccgaaatggagcagcatgtatgtatattaccaaaaacaagatggaaaaaagcacaaacacccgctgctccaatagcacccgtaaataaaccaatgcccgcatgaacttgacttacaaata

SEQ ID NO: 348446 - DNA, 127 bp, Zea mays
accctagaggccacaactgccaacttgccaatggctgtcgtccgacagcgccggcagctgtcgaaccttaccctcccgctggaccacttcgccctgcgcgtgccatcgcagtcttagaccaccgtcg

SEQ ID NO: 348447 - DNA, 266 bp, Zea mays
tccatcttctgctgggtagcagcttgcagtatacaagagcttgcttgctgtcctagtcctacctactgacgagctcgccatggcctccctctcctctgccgccgtcaccgccccttccttcgccgcaccagcgccagcccgcgccgtggtcagaaggaggtccttcaccgtgcgcgcctctctccgcaaggccaccggcaccgccgccgtggcaatggctgccagcgccctgcttgccggcggtgccatggtccaagaggtgctgt

SEQ ID NO: 348448 - DNA, 214 bp, Zea mays
cgacccacgcgtacgtatacgatcccactcggcagcggggtgtcgcaatggacacccacgcagctctcggcgccttccgcatacacgccggcgcccggctgcacagcagggcgccgtggttggcaggcacggcgtgcagaggttggacattcgctcacttcttcgggctcacgccggggtcatggtccgcgagcgctgtctgacgggaggcagg

SEQ ID NO: 348449 - DNA, 209 bp, Zea mays
acgggcataaaatgaataggcaacttttttacaatcaatacgatgtgactgcggggggggaggtaccagtacatcaataaggacagccaaaccaaaataagtctgttatgaatcatattatcgtgctggctgatacacgtggttgtcctgacaaggtgccacattctcacggcatacgttagacccttggggtgttaacggcaggtgct

SEQ ID NO: 348450 - DNA, 119 bp, Zea mays
  unsure (1)..(119): unsure at all n locations
cgaggacaaaatggaaaagaaacatgtggtatgtgtgtgttaataaggagcgaggtcgagttggctgccatacataggtatngtgtggtgtgtgttagagagagagaaacaggttttta

SEQ ID NO: 348451 - DNA, 136 bp, Zea mays
gacagataaagtatcctacacctctatttactatagccatttttccctctggcggcggtcttaaattttatcaaccatcacctacaccgtaaaaccattatccgagcctaatctgaagagcggtcatacgaaacct

SEQ ID NO: 348452 - DNA, 251 bp, Zea mays
ggcaaacacaagcttccaattagttattaataccagacggcagagggagcgcgcggggggtgacaatggttcatacgtacggcggaaggaacggtcatttgacgctgctgggcgcgtggccgagcccattggagaaccgcgagcgcatggcgctgtacctcaaggggctggagtacgagaacgtggtggaggacctgatcaacaagagcgacctgtttattgtctttaacctcagctacacgctcgttatg

SEQ ID NO: 348453 - DNA, 60 bp, Zea mays
accggatctaggatcgcgagtcgtgccgcttctatatggatccaagtcttactgtacgcg

SEQ ID NO: 348454 - DNA, 178 bp, Zea mays
  unsure (1)..(178): unsure at all n locations
gcaatatcattttctaccactttttattcctaacgctgagctttatatgtactacgatatcttatatgatgaataataatatgaccgccttgtgatctaaaaaaaaaaaaaaaaaaatantaaaaaaaaaaaataaaaaaaaaataaaaaaaaaaaaaaaaaaaaaaaaatttttttt

SEQ ID NO: 348455 - DNA, 364 bp, Zea mays
gcgaccacgcgtccggcatgtcttccctgtgcatgctttctatcagcagcaccccacatgttccgcacggctgcattcgacgatttatcgaccccgactcatataggtccagatcctacctcgtttgccaaagtcacctcccgtccgggccgttgtcaagtgtttgtttcttcgtaggtaggattgttctatttcttaccttctttatattattgtcattttatttatttacaatcttaaattattatcatattatatttttatgatatcttttattcctatgttatattattatttattttttggtggggggtggtttttattttatttttttttatctctgttatatatatatttaatttat

SEQ ID NO: 348456 - DNA, 555 bp, Zea mays
cggaaaacccggggtttgcagtatcaaaagagtttaaactgattttgtaaccattcaaatttttaaaattttaaagagtattgttacaaacgcgtaattttaataaaaagagatggtgttaaaaaaaaaaaaaaatataaaaaaaataaaatatatttttattaaaaaaaattatttttaaataaaattttttgttttttaaaaattattttttttttattatatattttttattattaataataattttttatttaccttttatttttttttttatataaattatttttatttattctactaacattattttttttttataatttattatttaaattttttttataatttatatttaattatttattattttttattttataaattttaatataattaaatttatttattattctatattatatataatattttttaatttttcatattcttctatttatttttatattataattataattatatatattttctcatattattttatattattatataattttatataatataattattatattaatattttat

SEQ ID NO: 348457 - DNA, 313 bp, Zea mays
  unsure (1)..(313): unsure at all n locations
tcggctgcgttgacctcgggttntggtcgacaatatttgtggttctgtgccgggtaatggccggttgcatgcattatgtgaagtacagatgttggaggctcgttgtctcggtgccttgctcgagatgctgcttttcctgtgatgtcattttgattacattataatgcttgtacgtgtttgtaacgttgtctcagactttctgttgacctatcgtttggtctattcgttaactttgtcgttagtatatattatttttactttatcaattaatctctattatcttaattgtttttcctctaattaattttttttt

SEQ ID NO: 348458 - DNA, 54 bp, Zea mays
  unsure (1)..(54): unsure at all n locations
gcgccagcgcgtgccagctttaatcccaagcctccnaattttctnnctgaggaa

SEQ ID NO: 348459 - DNA, 317 bp, Zea mays
  unsure (1)..(317): unsure at all n locations
cggaanacccgggctcgccgagaactccataaccccacaggccacaacttccaacaatccaatttctctcttccgccagcgcccccagctgccgggaccttaccctaccgggggaggacttctccctgccccttccacctcatcctcattccaccgcctctccgtccaccttcacgttctactccctcctctcctactactatttgctctccgttctcggccacaacaacttcggcaccgtttacaatgctctgcaccacctttcctctcaatctattcgtacttaatctattcgcattcttttacaccttttcttt

SEQ ID NO: 348460 - DNA, 75 bp, Zea mays
  unsure (1)..(75): unsure at all n locations
actaacttgnttcaaaaaaaaaaaaacaatctatatttataaaaaaaaaaaaaaaaaaaaaaaacagaatggttt

SEQ ID NO: 348461 - DNA, 254 bp, Zea mays
  unsure (1)..(254): unsure at all n locations
cacagctcgcagcacctgcaccacttgacaaccagccagctagctaaccaaccnncntatccgggggcaagcaagagacgagggtgcgcgcgtccaggcatcatgtgcaactccaacgtcaagtccgcgggcgtcgcccatatcgacggccgcccggtgctgcagccggcggtcaactctcgtggcgtgtctttactccaaccgtctcttcaagaagaatctgttcatgtccttttttattccgtctttctact

SEQ ID NO: 348462 - DNA, 167 bp, Zea mays
gccacaccgtccaccgtcacgtccacctttttccatggcgctccacgccgtctcctgcgcggcggtcttctacccggggggcgcgctcttacacaaccttccccatcgcccatgctgtggtttgtttaccaaagcagtccttcttgtattacttcacaaaatttgca

SEQ ID NO: 348463 - DNA, 314 bp, Zea mays
aaatttttatttttatataaaaaaataaaaaaaattaaaaaaatttatataaattagataaaataaatttttttttgtaaaaaaaaaaaaaaaaaaaatatataaaaataataaaaaaaaattaattaataaaaaaataaaataaaaataaaataaaaaaaattaattaattaaaaaattatataaaaataaaaatttaaaaaaataatttttttaaaaaaaaaaaatttaaaaaataaataattaaataaaaatataatataataataaaaaaaaaatatattaaaaaaatataaaattaaaaaattaattat

SEQ ID NO: 348464 - DNA, 60 bp, Zea mays
tacgatcccacccggcagcggcgctcgctttttatacccacgcagctcttgccaccttcc

SEQ ID NO: 348465 - DNA, 394 bp, Zea mays
catcttctgctgtgtaacatctaactttattcaaaatctttctttctttcctaatcctacgctacttacaaacatttcgtgtgctccctctcctcttcctccttcacctccccttccttcttcttaccatctccattcctctcccttttcataattattttctttatctttctctcctttcttcacaaaaccaccttcacccctctcttttcaataactttcatttcccttctttccttcttttccattacccattattttctcctttactctttcttctatcttcttttttttttaccctatctattttatttttaaattctctttatttcttcacaataaatttttttttccccccttcccttttctattttttataattttcttttttctt

SEQ ID NO: 348466 - DNA, 279 bp, Zea mays
  unsure (1)..(279): unsure at all n locations
aaaaaaaaanaaaaaaaaaaaaaaagaaaaaaaaaaaaaaaaaaaaaaaaaaaaaaaaanaaaaaaaaaaaaaaaaaaaaaaagaaaaaaaaaaaaaaaaaaaaaaaaaagaaaaaaaaaaaaaaaaaaaaaaaaaaaanaaaaaaaaaaaaaaaaaaagaaaaaaaaaaanaaaanaaaaaaaaaaaaaaaaaaaaaaaaaaaaagaaaaaagaaagaaaaaaaaaaaaaaaaaaagaagaaaaaaaaaaaaaaaaaaaaaggaaaaaaaaaaaaaaa

SEQ ID NO: 348467 - DNA, 212 bp, Zea mays
atccactactttactcaaagtctagagccatttttttgctttgctcaccagacaaaccgcaggagattgcgtcgacggtgatgggcgccacctcccgcatcgtcgcggccaagacgccgtatcttggccagggtcgcgccgccttcgtcgtcgtcaatgccagcccctttcgcgacgtcgccgtcgtcgctgctggctgtctgatcaccatg

SEQ ID NO: 348468 - DNA, 406 bp, Zea mays
  unsure (1)..(406): unsure at all n locations
acatacatttctagatcgctatcttcctctctattttttccaaacttacttacgcttncatactgcgtggtttctattatatagtggtacctaaatacaattcactttccttcnttatacaacttctttactgttaaaaccctttccttacccatcttaatctccttacattttttttttcctttctccatttaacaaaataactaaaatttcctcacctatctctctttccaacaatttttcatccttaattactatttttactcactcttttatcttttcattatatatttttattttttttattattctttttttttatatcttttttttttttctcatcatttatttttttcctttataatactatattattttttttcttaaatttaattttttttttttt

SEQ ID NO: 348469 - DNA, 163 bp, Zea mays
acactgctcaactatcgtccacctccacttcctatttccatctctccccctttcttcatcctggtctctcctcatacatcgggtgcgccgacccaccatcatcctctcctaatcttaaatgctgcctcctctacctatctccgcatcatattcatatccccct

SEQ ID NO: 348470 - DNA, 448 bp, Zea mays
  unsure (1)..(448): unsure at all n locations
tctgtctctctttatgtttcaagcttacgtacgcntncatnctgcgtcgtttctataatatagtggtaggtaaaatcaattcacttnccntctttttacaactttttttacttttaaaaccctttcttttacccaacttaatcttctttcatttttttttttttttttcctnctaacataataactaanatttcctcacctatcttccttttcaacattttctcatccttaatttcttattttactctctctttatctactcattaatttcttttttttttttatattctcttcatttttccttttctactttttattctctatctcctttttttttccttttctttctcttcttttttttcacttttttctacttttctcttttttcttttatattttttcttttttttatatttctttttttttttttttctaaattttttctttt

SEQ ID NO: 348471 - DNA, 350 bp, Zea mays
  unsure (1)..(350): unsure at all n locations
gacacaacaccaantctagtagctctatttcaccaattattttccgcgtgaactccancntcntcgggctcgatcccaaccaacagtggcgggggccaccaccncctcatcttcttctaaacgttttcatctttcctctccctatttccgcctctccgctctgctcggcctattttttttttttttcgtcacggacaccacctaatcttccaattccacgatcttctattaatacctttataatagcatagccaacaatgatcttaactacaataatattcttttcaccattttctcctacttttctctctccttcatctttttatttcttttactttccttttccccta

SEQ ID NO: 348472 - DNA, 407 bp, Zea mays
  unsure (1)..(407): unsure at all n locations
cgggcccggnctttttttaaatgacaataaacgtttgaatgctattaaatattttattttcgctcactttcttcntaatattctatggggcatactacaaagttggtgtgtcatgaatatatatacatatctaccaaaaaaagggttacaccttcatagttgctgcagctaattttacaatttacataaacttaatttatttaaggaccaatcacctctccaaggtctctatggctgctatctggagttgtccttttaagcatctggtgtggaggttctatcaaaattccttgcctcttactattcgtttgagtacatcaacaatattttgacccatacaagcttcacacagtccacccatagaaatcttttctcaacaggaaccacaccatattttaattaattgt

SEQ ID NO: 348473 - DNA, 258 bp, Zea mays
ataccaaaaattctcctacctatcttcctttttaacattttctcattcttaattactaatgttactctccctttatcttttcattaaacactttattttttttttttacctctcttttttacctcttcattttttcttttccctatctccttcttcctttcaactttttttccttctctatcttatctttttttcctctgtttattctctttttttctttatattcttattttttcttttaaaactactaattttttt

SEQ ID NO: 348474 - DNA, 369 bp, Zea mays
  unsure (1)..(369): unsure at all n locations
cctcaactacanntaaatctnccattttttcttcttcccccaanccaaccacctncggcaggtttttatacatatttgtctgcggccaaaacatcttttaanccaatattttttttctttctaacaatccttttctcccacattttttttctttcccaccaccactttttttttttcctcctatctttaaaacaaccttttttctttttttacaatcttttttcttttcccatacttcctttttttttactttttctttttttcctctcctctactatttttttcaccactctttcttttttttctctcacccaacattttttttttctctctcatttattttttctctttcccttactattctttttt

SEQ ID NO: 348475 - DNA, 183 bp, Zea mays
  unsure (1)..(183): unsure at all n locations
atatcattttctaccacttttcattcctatactcttagctttntatgnactactatatctgataggtttaataatatattacgtccttgagaacaaaaaaaaaaaaaaaaaaaaaaaaaaaaaaaaaaaaaaataataattataaaataattaaggttaaaaaaaataattttttattttttt

SEQ ID NO: 348476 - DNA, 206 bp, Zea mays
  unsure (1)..(206): unsure at all n locations
agagcgcttatagcttgtcagccatggcctctcttcttcacgtctagcctcctcaagtcctgcttgtcttactcccaaatccgggcgtccacncaaaccacaccttcttccctctttttgtccaccttccctctcgtcgccttctctattcctatctgttcttccatctttttttttttctttaaccctttctacaacctgacatt

SEQ ID NO: 348477 - DNA, 361 bp, Zea mays
  unsure (1)..(361): unsure at all n locations
cttccctnttcatttttaccattattatcaccccacatgttccncannncttcatgcgttcttatagaatctcggttgcgtctaaaccaacatcctacctcttcttccaaattcacctcccttccgttcctccatcaatcttcttcttctatttacgatttttttttttttctctctcccctataaacccaccttctttttttttctctctcttatttttttctacacaaatttatttttttttctaccatttcttcttatctccaattttttttttttttcacactctatttttttttctacatataatatttttttttcaactttattttattattttcttcactctttcctttttttc

SEQ ID NO: 348478 - DNA, 227 bp, Zea mays
  unsure (1)..(227): unsure at all n locations
cggcggccgggggaacaaccccacccaaaaaaacaacccaaggccggaggaggggccncccgggggaggaggagcaaccggaaccaaaacccaagcaggggggaacggaaagggaaggcaggaggccaggcngggaagccaccaggaaggggcccccaccgagggcaagcaccagggaagggaaggcggacccggaccaaaaaacccaacgcccaaaaagggggggg

SEQ ID NO: 348479 - DNA, 247 bp, Zea mays
cgaaatccccgggccgccccacccgtccgaacctgcaagctttcacttgcaaacttttttttatttaaaaaaaaaaaaaaatcaacaaggcgccaaaaattatttattacgaagggccatttttcaaacataataaattaattctctcacatcattttcttcaccccccaaattttttctaaggggccgtcttctcacaaagaccccatttctcccccccacatcctttctcccccccaaacttttt

SEQ ID NO: 348480 - DNA, 345 bp, Zea mays
attcccataggctaattaatggaaccgcaaatcagggggccggtaattttaaaaggaatttggaccaattaattggagggagggttcctttcctgggttggaatttattcctccttaaaatgggatttgcctaaagtcttccaatactttcctataaggccggaaccaattttctccatatggcaaattcttatttaatttgaggtttttaactaccttttccattatctaatttgatccatttaaattaaattcgaaaaattctttggaaaaaaaaaaggaaggggtatatattttaccgggatattcttttctataatcctaaatatagtgcccctttctttt

SEQ ID NO: 348481 - DNA, 156 bp, Zea mays
ccgcccgataggacctgataaaggaaaaaattccaatttttttttttaggagaaaaaaaaaaaaaaaagggggggccgttttaaaggacccaggctaacttccccaggcttccaacgtattagctttcttatggggtcacctaaatcaaattaacg

SEQ ID NO: 348482 - DNA, 395 bp, Zea mays
atttccggggcggacccaggcgtcgggcctggcctctttttttggtgaggcggaggttcattttctggccggagcgtcaggataagaaccggccgttggaaggaagttcctcttgcaactgcaagcccccgtccaagggggtccctttccccttccttcaaccttcttggaaattaaggaccgggtttctttggaaggacacttgggattcgccctggggttttcctggcgggaagagttggattggtaaaaccagtatgggaaggcagggaatttagaatgggaaggcggcccatcgaagtcccatcaaaggttacctctaacataaaaaaagcagttggtaaaagttaagggtccgctgggggagtgatctctgagctttcaaggggacttga

SEQ ID NO: 348483 - DNA, 411 bp, Zea mays
  unsure (1)..(411): unsure at all n locations
cgggggccggaaaacccccggcggacaacccggaggccnagggggggccaaaggggaaggagccaagaaccggcggcccggccagggcctccaggacgggggggggggcccagaccaacgcaaccggaaggggcccgttggggaacccggccgacaacccggcggacccggaaaaaaacaccgcaggggccaaggcaaccaactaggggcccggaaggggggggggggggggggcaaccgccaacgggccacggcgggggaaaacaaggggacagaaggacacggggcccccacggggccaagaaggacccaggggggaaaaaaccgaacggacccaggaggcaagggggaaggaagaagggcggcgccaaaaaaaaaaaaaaaagggggggccggcccaaaaggaaccag

SEQ ID NO: 348484 - DNA, 430 bp, Zea mays
  unsure (1)..(430): unsure at all n locations
acccggggcggacccagccgcccggccaaagaganggagaagccaacccccagaattttcccacacaaaaacgcctcaacccgaagggggaagaacccaagggcccccaggcgggacctcggaaggtggagggaggtccagggggccaccaaaagggacgcgggggggaacctggagaggccggccaggggggaagaggcaatgcagggggcggcggcggccgagaagacaattggcacccccctaaacaagccgaaccgggacggggggcccccaaaagaccgaacgccaaaaaaagggcgggcgaaaggtttaccccggacccggcccaaaacccaaaacccaaggggaaacggaaccagggggccaagagaaatttcgggccaaaaaggtcacccgacaaaaagaaaggaaaaaaaaaaaagggggg

SEQ ID NO: 348485 - DNA, 322 bp, Zea mays
  unsure (1)..(322): unsure at all n locations
ggcgggaaaaacccgggcggaccaaggcgnccgaaaaaaaaaaaaaaaaaaaaagggggggcggaaaaaaaaggaaacaaagaaaacgaccgggggggggaaagaaaaaaagggggggggggggcaaccaaaaacaaaacaacgggccggggaaaaacaaagccgagacgggaaaaacccgggggaacccaaacaaaaaggccaggcagaaaaaacccaaacagacagcgggggaaaaagaaaaaaggcccgaacggaaggcccaaccaaaaaaaggggcagccggaaggggaaagggaacgcgcccagaaccggaccaaaa

SEQ ID NO: 348486 - DNA, 216 bp, Zea mays
accggcctgaccctgagtgctcgaccggtggagggccatccttactttcagttggaatcggaggacattgtggccccaattttgaggttaataacctacaaccccaaggtgaacggaaaacggttggggcgtttcaagtcaacccttttcggcaggtcttggaggtggtgccccaactggttttggtccgcaaccttcatcacctgttctataaat

SEQ ID NO: 348487 - DNA, 198 bp, Zea mays
  unsure (1)..(198): unsure at all n locations
cgggggggggcggaacaaaagagaganaaaacggaggnggcaaccaggttagtttttgaaaatttaaaagagattgggggaaaccttattttatggaaaaagggggggtaaaaaaattaaaaaaaaaaaaaaaaaaaaaaaaaaaaaaaaaaaaaaataaataaaatataaaaataattattttatttttttataaaa

SEQ ID NO: 348488 - DNA, 309 bp, Zea mays
cggaccacacccttccggttgcattgactcggtttgggccaattttttttgtttttggccgggaaatgccggtggcataattatggaaaacagaggggggggccctagcctcgaccctgttttggaagccctttccttggatgccattggattaatattaaccaatgccctaaaaaaccaagggccaaccaacttgtttccacatgatgggaaatttgttgaactatccgtttgtttcattatttaaattttctcattatcccctttattgaagtgtaatccccttaaaaggttttcgattgttacttt

SEQ ID NO: 348489 - DNA, 327 bp, Zea mays
cgcggccccgggggctaccaacgccgacctgtttgtttggaaaaacctttgtgccacgtaggcccggggatatggaatcgccgggggccatcggaccggtggtgttcaagcgggggccgttcttagtggaggctaggaacgtttattacagcagggtccccagggggccaaaacctttaatgggggtggccccaaccaacaccgtggggacccccggggccgttttccagaaacggttgaacaacggccaaaagttggtattgaaagccttttgtggatcgtggggatcaaaggattatattgcaggggggccccagcttaactggg

SEQ ID NO: 348490 - DNA, 272 bp, Zea mays
ggggaaaaacagggggcccaaaaaaaaaaaaaagaaaaagggaaaaaacggccgggcccggaaaaaaaacgcaaggacaaaaaaacgggcactaaccggccggccccggaaaacccgaaagggggcacgagggaggggaattccaaaaaacaggggggaaaaagggccaaaccccggggggccaaaaaggcccggaaaaaaaacaaagggccgcaggaaacgggcgaaaaaaagggggggggggggagccaaagaggggaaaaggttggccc

SEQ ID NO: 348491 - DNA, 263 bp, Zea mays
  unsure (1)..(263): unsure at all n locations
cgggnccggaatcccggggcggacccacccgtccgtgcatgataggattattaaactggggttatttttttttgtggtcaaatggtttaaaccaatcccagcaaaggatttggcatggcccatggtggcttttgttgccatgaaccttataaacaggctgttggatagagttgatggtttggtcaaggagccagacctgaaggacatccccttaacctttgaggagttaaaggcattggctgatttggtccaaaaatggaagc

SEQ ID NO: 348492 - DNA, 95 bp, Zea mays
ttttagatggggggttgccgttttttttgatccaggcttacgtccgcgggctggcgaggtatttgttttttattgggggaacctaaatcaaatta

SEQ ID NO: 348493 - DNA, 292 bp, Zea mays
  unsure (1)..(292): unsure at all n locations
gggcggacccaggcgaccgaccagcnggaagaaccggcaccacaggacaaccagccagcaggcaaacaaaccgggggggccaggaccaggcaagagacaacgggcccggcccaggcagaaggggcaaccccaacgccaagcccgggggcgcggcccaaacggacggccgcccggggcggaagccggggggaaaccgggggggggagccggacgcagcccgacagaaaaaaagggcccggcgaaggaccaaaacaaagcggccgcccaccaaaaacaaggcaacggggccggc

SEQ ID NO: 348494 - DNA, 393 bp, Zea mays
tccttgaggggattattcaacgggggttaattctttatgaggtaaaatggtttaaaccattcccggcaaaggatttggcttgggccagggtggtttttgctgccatgacccatataaccaggctgttggatagagtggatggttgggccaaggggccagatttgagggccttccccttaactttggaggggttaagggcattggctgattggcaccaataatgggagccacggtcgatggttatcttggcttacggtaaattgattgggtattggccaaaggtggatttaaaacgtgcagggcacacttgttggcggggcgcgtttacacagatggggtggtggactttattttccatgggttggacccaaataaggttgggaacttgggccc

SEQ ID NO: 348495 - DNA, 280 bp, Zea mays
tggatatgggatcaaaaatttctttttgtcctcaaaggctataattccgttggggaaggttttaaaaatggggggccgtgaaactgaaattagtttttttaataaaatagattttttacttaatatttattataaaaaaaaaaatggtgggcctttttaaaggttccaagttaacttttctgggattgcgacgttatataattttattagtgtccccaaatttaaattaattggccgctgttttaaaaagtggagatgggaaaaactttgtgtttcccaa

SEQ ID NO: 348496 - DNA, 111 bp, Zea mays
ccgggccggatccccgggccgaccacacccttccttcaacacaaccgagagcccaggcacttcttttttctgaagctaaagtataaaaagcgccggtccctgatcaatggg

SEQ ID NO: 348497 - DNA, 258 bp, Zea mays
ccaagtttcctacccctggcatgcgaggcgttatcttttttatgggggggcctaaatcaaatcaacgggccgccgtttaacaactcctggtctggtaaaacccggccatttcctatcttatttgcttggcagcacaactcttcttttttcagttgggtttttttctaaaagttttgtcccgattttcttttccctacaaaaatcttattttgtaagcgaaatggttcccccccttttttcttcccaataatctttttt

SEQ ID NO: 348498 - DNA, 353 bp, Zea mays
cggaattccggggctccgggaaactcctaacccaaaaggccacaacggccaacaggctcattggttttggtccgccagggccgccggttgcggaactttaccttccggtgggacaatttggccttgggcgtgcaaccgaagcctaagccaaccgccgggccgtcaacttcaacgtccgacgcccgcctttccgattacaaggggttttccgttttgggccacggaaacgggggaaccgggtccaaggggcggaaccgccggtccgggcagccggtcgaactaaagctattgggggacggggccaccttgggggcccccgaggccaaaaaactgatgttggccggggacccccc

SEQ ID NO: 348499 - DNA, 339 bp, Zea mays
  unsure (1)..(339): unsure at all n locations
gaatnccgggcctgaactccagggaaataagccatgatggcgtcgtcggcaaaccatatcatcttttgaaagacgccggggccgaagggggtcggctttaccgtcaaggaagccaaaaaggggattctggcggccaagccgaacgccgacttcggggggttgcccacaaccacccaggcggggccctccgactttgggttcaaccggttccgggttttcgtcggaaccgtcgcccaaacccccaaggttggctaggttaaagcctaagcctaaaggttgtgggacccgccggccattgacaacctgttttttgtaccttcctagttattaaggtttaaa

SEQ ID NO: 348500 - DNA, 271 bp, Zea mays
ttttataatggtggtggtaataataaattttttctgtttttgggggccgggtcaatagaaccaccaccgtcccattgactggccaaacctgtgctttgttttgaacgtaacgtgcgagtccaactacgggaaaaaaggcatggtatttggggggtggcttttcaaaaaaaaaaattattataaatatttatattaaggggcggccgttttaggggacccaagcttccgtccccgggcatgctacgtaatagtttttttttggggcaaccta

SEQ ID NO: 348501 - DNA, 184 bp, Zea mays
attccaatcccacccggaagcggggttccctttgtttccacctacccagttttggccgcttcccgattccccgccggggccgggttgaacagaaggaccctctcttctaccaggaacggatggcatgggctggacttttccaacttttctggggtaagcccgggttaaggctctcgaggcgttt

SEQ ID NO: 348502 - DNA, 313 bp, Zea mays
cggaatcccgggcggcccacccgtccgttagtttgaccgcggccggccgttttattgttccaagctcctccccgcctggcgacgcttattttttaatggggtccctaaatacaattaactggccgccgttttcaacttcgggcctgggaaaccccggccgttccccaccttaatggccttgtataccattcccctttttgccagtgggcgtataatcaaaaaggccttaacctttcgcctttcctaacaattgtcctacctgattggcaattggaacctcccctgtattggcccattatcccctgtcggtttt

SEQ ID NO: 348503 - DNA, 299 bp, Zea mays
gggccggaaatcccgggccgggccgacattggccttgccgttgttaaggtaaaattttaagttgttttttgccgccgccttgaattcggggaggggggccgaccgttgccttgggacattacacctgggcaggttccatgaccacggcctaaggtccggccgttttaagagatccggttaagcgggggggggcgccttcccgtcgttggacggggtgccgttgatggggacaatgggggagcacgtggccatgtcggggaattacttggggaccaagtccatttggcatttaatggacg

SEQ ID NO: 348504 - DNA, 395 bp, Zea mays
gaccacacccgtccgtccatttttggttgggtggcagctagcattttccaagagctggctggcggtcctagccctacctactgacaggctggcaagggcctccttttctttggccgccgtaaccgccctttctttggcggaacaagggcaggcccgggccggggtaagaagggggtccttaacggggcgcgcttttttccgaagggccactggaaccgccgccgtggcatgggttgcaagctccctgttggccggcggtgccagggccaaggaggggtttttggctcatggtatcgggggtttagttttatgtcccagtattatatacctgtatggtcgtcttctctttaaatttaatatcagtccggttttctaaaaatttttttttataatat

SEQ ID NO: 348505 - DNA, 348 bp, Zea mays
gcccggaatcccgggccggggccaaaagggaaaggaaccagggggatggggggggaaattatggggcggggccgacctgcctgccatccataggtattgtttggggtgtgtgagaaaaaaaaaaccaaagtccttaagttggttatctttttttgcaggttgggcgtcggccttggtcctcatgtccgaccgggggtctacctccttgtgggttgacccgatggcttttgctgtacccatttattaatgggcccacgatgttatgattggatcctatattaatcctaaacccggcctttttattttaaaaaaaaaaaaaaaaaaagggccggccgttttagaggatcc

SEQ ID NO: 348506 - DNA, 314 bp, Zea mays
gcattttggggatcccctgggggtatgacgttttctcatcgtggaaatgaacgggtttaaggcggggcagcctgtttaactatacctggtcccgggggggatgggtttggccgcttttcccggcctggggtttggtgaagggaaactccttctggggtttgttttgtaaaaaactgttttgtgggagggcttttcttattaggactctgatgttgttagttccatgggcaccaaaatggttgttctcgcagagattttttttccgggggttttttgttcctggtattctctgttttttctgtaatttttgtttt

SEQ ID NO: 348507 - DNA, 120 bp, Zea mays
ggggcggccccacgcgtccgactggttttggatcgcgggcggccgtttttttggttccaagctaacgtcccctggcttgcgaggggtttgttttctaatagggggacctaaatccaatta

SEQ ID NO: 348508 - DNA, 226 bp, Zea mays
cggaccacacccttccgcccacccgtccggttttagatcgggggcggtcgttttagaggatccaacctaccttccgcgggcatgtaacttcttagcggggcaatagggtaacctaaattcaattaacgggccgtcgattttcaactcctggccgggtaaaccccggccttaccccaccttaatcgctttgtaccacatccccttttgtccagctggcttaatttct

SEQ ID NO: 348509 - DNA, 313 bp, Zea mays
accgggccggaaattccgggggaaggtcccgaccataaggatcctccggagttggaataacctcccgggttttttggggaggaatgggaatccgcctaaaacttttttagtaataaaagtgggaagggaaaacaactccaacccgtaactggggtttgtccagaatatatatgaataaccaattcttggttccatctttgaaggggaatctgtggggattttgggagggggctaaattaaaatgcggttaaagggccttggggttttacggggcaacaagggaggggagaaggaaaggaaagggaagggatgg

SEQ ID NO: 348510 - DNA, 190 bp, Zea mays
cggaccacacccttccgatcacactactttactaaaagcctaatgtccttttttttggtttggttaaccaaacaaaccgaagcaaatggcgtcgacgatcagggccgccacctcccgaatggtgggggccaaaaccccgtttttgggccagggtggggccgccaccgcctctgccaaggcaagccccttc

SEQ ID NO: 348511 - DNA, 328 bp, Zea mays
  unsure (1)..(328): unsure at all n locations
gggggcggccgcccaggaggatccaagcnaacgaccgcgggcaggcgaggagaaagcccaccaaaggggggaccaaaaacaaaacaacgggccgcggnaaacaacgcggggacggggaaaacccgggggnaaccaaacaaaaaggccgggaagaaaaacccccgnnggccagcgggggaaaaaacaaaaaggcccgaaccgacggccctcccaaaaagaggcgcagccggaagggggaagggaacgcgcccggaagggggccaaaaaggccgggggaggggggggcaacccgcagggggaccgcaacacaggcaagggcccaaggcgc

SEQ ID NO: 348512 - DNA, 197 bp, Zea mays
cttccgactggttttggatcgcgggcggccgtttttgtggttccaagtttacgtccgctggcttgcgaggtgttagttttctattggggcggcctaaattaaattaactggccgcggttttacaccgtcttgcctgggaaaaccttggctttccccaacttaattgcttggcagacattccccttttcgccggttgg

SEQ ID NO: 348513 - DNA, 126 bp, Zea mays
cggaattccggggcggaccacacccgtccggttttagatggggggcggccgttttataggttccaggcttacgtccgcgggcatgcgagggattagtttttttatggggtgacttaaattaaatca

SEQ ID NO: 348514 - DNA, 422 bp, Zea mays
gcgtccgggcgcccggggcccttggcggtttccgccgtttaggagccaggaggctccccgaagccggcctggatttcccggggaaatcctttttgggggcgccgttggccgccaccggggcctccgtggggtggccgttccggggcaggccggccacctcaacaacttggttgggggtcgtcgggggggggaggaggggctccaagaggaagacccccaaggggtcggcaaaccggttccggttgccgggggggggcaggatcgggcgggggtgtcccgggaagcataactggtttgccaggaggaccaccaagcccaggaggggcgtctcgaagatgggccaggtcaccaggggggcctccgccatgtgttcggtggcactgcctctccttaaggggaatgggaaggcaacctgagggctt

SEQ ID NO: 348515 - DNA, 405 bp, Zea mays
aacaaacaagaagccgaacaacgcaccaatttaaatagcgatggcgtcgttaacaatgatggcgtcctttgccgccggggcgggggccggcccttttggccggggaacttttgccggggtaaggtccgccaaggtcaaccgttgccagaagcccgcaacgttagcagaaaccaaggccaggcccgccgccaacggaccccgggccttaatcttctcggttgttttgtcggcccaggaagccatcggaggtgccgtttctcccatggcgggcccaaaaaaatgaacccccaaggttaaaaaaaaattacccggaaatttgtttaacaattccaaccgccaagggtttgcacataatttaccatccctcttttttaatttaagggccgtgggggggttttttattta

SEQ ID NO: 348516 - DNA, 117 bp, Zea mays
  unsure (1)..(117): unsure at all n locations
gaatnccggggcaaacccgaacgacacaacaccaagtcgaggagctggagggcaccattatttgccggcgtgaactccagcgtcttcgggttaaatcccgccggggaagggcggaag

SEQ ID NO: 348517 - DNA, 56 bp, Zea mays
ccggcctggaattcccgggccgtcccttctttcaagaaaaaaaatttggaagcctc

SEQ ID NO: 348518 - DNA, 129 bp, Zea mays
gcctggaattcccgggcggaccacacccgtccggttttagatcgggggcggccgttttggaggttccaggctaacgtccgcgggcatgcgaggtattagttttccaatggggtgaccaaaatcaaatta

SEQ ID NO: 348519 - DNA, 106 bp, Zea mays
cacccttcggtttttggttgggggggggccgttttgggggttccaggtttacttccgcgggcttgcaacgtaatagtttttttttggggtcacctaaattaaatta

SEQ ID NO: 348520 - DNA, 218 bp, Zea mays
  unsure (1)..(218): unsure at all n locations
aataccggggccgaccacacccttccgccttaaatatccagggaaataagcctttatgtcttcttcggcaaacccagccaccggcggcgggacttcntggccgaaggtggccggcctgaccttcaaggaacccaaaaaggtgattttggcggccaagccgaaccccaccatcgtggggctgccaaccaccacccaggcggggacctccgattttgggt

SEQ ID NO: 348521 - DNA, 282 bp, Zea mays
  unsure (1)..(282): unsure at all n locations
cggggcggaccgaggcgaccggccgcccggggccagcggcggnncccgggggcccaggagccgggaagcaacccgcagccggccgggcatccccggggaaaaccgggggggcgcgccccgggccccacccccgacctcggggggaggggccacccggggcaggcggggaaccacaaccacgggggagggggcgcccggggcggggaggaaggcctccaagaggaacccccccaaggggccggcaaaccggccccggaggccggggggggaaaggaccaggcc

SEQ ID NO: 348522 - DNA, 98 bp, Zea mays
gattataattttctacacacttttaatccttaacgttgggcttttaaggacctacaatatgtaaaaggaggaataataaaaggaccgcttggggatct

SEQ ID NO: 348523 - DNA, 250 bp, Zea mays
ggacttcaatgccggtcccacccaacccgtccggaaacgggtatgggaagccctgggctttttttttggaacacgccgaacaagttgaacggccggggattctttttccggcggagccggcttttcctgcgcaggggcaaccggcctttaatatggttggttgccccggggctggagcccaagcgccgccgccggaagggcctccgttgggctgccgtcaacggggacggggccctccgggggtttgggc

SEQ ID NO: 348524 - DNA, 194 bp, Zea mays
gcatggtttccttgggcaggtttaccttcattagcacccaaaatgttccgaagggttgaaggcaacaatttaccaaccccgggtcgtttaggccgaaatcctacctggttggcaaaagtaacttcctgtccgggccgccggaaagcggtgatgtcggggaaggaggtgttttggtaaaaactcccctttgttgg

SEQ ID NO: 348525 - DNA, 196 bp, Zea mays
acccgtccgccatttgggggcctaaaggaggagccttcttttgaatccgaggttggttcggaggggggggcaataatttaacaattgggaccagggttggcgggccccaactcctaaggggaggcctttttttattgttgccctgaactttggggagattgttctacccaagttggattttgcactgaggggcctt

SEQ ID NO: 348526 - DNA, 255 bp, Zea mays
gttgaagcgggaccccatggtctcgaggatccaagcttagtcgcgcatgtaccagaccgagtagctcttgtagggactaggctacatggaaccaggtgacctcaaggggacagcgtagtgacatgctgaagcgctgacggatcctaactttgttggctccacgcacacgatgaatgacgccgtgtgcgttgaaccaggaaggcatgcacatagcgccgttcctatacagtcagcaggctgcctgacgaacgggac

SEQ ID NO: 348527 - DNA, 228 bp, Zea mays
  unsure (1)..(228): unsure at all n locations
aaatgattcatcagtgcgtcgtcagcttttttctttcaccggaggcaagacgtcgtgggcgggggtgtttttgctgagcgtcaagtaagccaaaaagatgattctggcggacaagccnatcgccgacatcgtggtgctgctccaccaccactcattcggtgacctcctactttgggttcgactcggtccgtttttttctttggtaccattatttttacgctccatgat

SEQ ID NO: 348528 - DNA, 306 bp, Zea mays
taaaaaaaaaaaaaaaaaataaaatttaaaaaaaaaaaaaaaaaaaaaaaaaaaaaagaaaaaaaaaaaaaaaaaaaaaaaaaaaaaaaaaaaaaaaaaaaaaataaagggaaaaaaaaaaaaaaaaaaggggggggccgttttatgggacccaggttttctaccgggggtttgggagggaatagttttttttttgggccccctaaattaaattcttgggccggggtttaaaaacggggggccgggaaaaccccgggggttcccaaattaaatggcttgggaaaaaatccccttttccccggtggg

SEQ ID NO: 348529 - DNA, 242 bp, Zea mays
  unsure (1)..(242): unsure at all n locations
aaccataaatttggggacgcttggttcaaagtttctttttgaggaatcgagccggcggctgggggggggttctgctatggcggccaaacgatagatccctgtttcaccctcaggaaccttaagnctatgcagcgctgctcggctgctcacaatgcctaggagaatgccgttgtggaggtacaggaggaggcttttgttatgtgtcactattgaagtgcttctcctcgtttttttctttttct

SEQ ID NO: 348530 - DNA, 71 bp, Zea mays
cttgtacacatccatcttgaggtgaccgaggatataagacgcaccaaggtgaggatgaaagtttttgagtc

SEQ ID NO: 348531 - DNA, 227 bp, Zea mays
cgcctcatcgccaccctcttttcacaccccacaggccaagccagccgtggcgggccgcaccgcattttggacatggcgtcgtcctcctgcctcgcctcgccgtgtggcgccacgctctgccgtccgcggcggccgaggtgccgtgtggcgtgctcggcggcccacgcccgcgatcgcactgggcctgtttctgctcaggagccagtcttacccatacccttgccgct

SEQ ID NO: 348532 - DNA, 70 bp, Zea mays
  unsure (1)..(70): unsure at all n locations
agagganccaagcnnacgnacgcgngcangcgacgncanagcncnncnanaggggcacccaaanncaann

SEQ ID NO: 348533 - DNA, 291 bp, Zea mays
  unsure (1)..(291): unsure at all n locations
aagctggccnnncngnnnacaccctaaaacnaaaacnagagncgncggcggcaacaagcggnacgnacgnagaggangaagagcaggagcagcactcngnnggnganccnagnncnccaggcccnncngcnctcngcggcgggggccaaaggaccngcagggccgaagaagcagggcnggngcggcgagggcaccagcnggncgggcgngnggaccngcgacgaccnccncaccaagggcgccgccaccggcaagaacccgcgccccgnngccacgggcaagggcgccacc

SEQ ID NO: 348534 - DNA, 279 bp, Zea mays
  unsure (1)..(279): unsure at all n locations
gacccacgacgtccgcaagtcgcgtccgacaccattctctttttatggccaaggcaccgcaatcgggcgcgggtgggtgtggcctcagatcactggtaggcccctgggctctcttactacgtggactagagcnnagttgctaaccttctgccaacgacgtcgcaccatatcaacaagcacaacttccgcttcccctatcgtctgctgttgtcgcgaccttggcgaggcgctcctcagggtgcgcgagggcgccgtcttgatcctcaccaaggtggaggt

SEQ ID NO: 348535 - DNA, 82 bp, Zea mays
  unsure (1)..(82): unsure at all n locations
tttttcttttctagagganccaagcttacgggggcgggcatgctacttcatatctcttctatagngtctcctaaattcaatt

SEQ ID NO: 348536 - DNA, 337 bp, Zea mays
aaaaaaaaaaaaaaaaaaattaaatttaaaaaaaaaaaaaaaaaaaaaaaaaaaagaaaaaaaaaaaaaaaaaaaaaaaaaaaaatattaaaaaaaaaaataaaaaaaaaaataaaaaaaatttaattaattattttttgggggggcctttttagggaaccaaattttttttccggtttatttgaatttaaaagtttttttttgggggacccaaattttatttatttggcgggggtttaaaaatgttttttttggaaaaactttgtttttcccaaattattattttttgtataaattctccttttctcagtttgattttttttttaattgttctttt

SEQ ID NO: 348537 - DNA, 303 bp, Zea mays
  unsure (1)..(303): unsure at all n locations
ccagagggnnataaaagaccncgccctncaagacangngaaccancaggcggagaaaaangacacngaaganggcacagcgaccaggncnccagacaggcaacngaagagaaagcanganncngcnggaaccganganancaggnangcaaagagggcancgaccagcccagnncaaccgaaaaanncaccncaancnggaagcacnggcgangagaccagagggaacaaccaaaaaaaaagggcnccnagcgaagcaaggggnggcaagccggcnaaaccacaggcaaggaagagaagccca

SEQ ID NO: 348538 - DNA, 73 bp, Zea mays
  unsure (1)..(73): unsure at all n locations
tctagagganccaagcnnacgnacgcgggcatgcgacgncanagcncnnctatagngncaccgaaanncaann

SEQ ID NO: 348539 - DNA, 266 bp, Zea mays
tgtgaagcgagagcccactgtctccaagatccaagcttagtcgcgcatgtaccagaccgagaagcaactgtatggactaggggacatggacccaactgacctcaaggtgacagcctcgtcgcagctgcaagagctcacggttcctaatgctatcggctccacgcacacgattaatgacgccatttgcgttgtaccagaaagtcatgcacatatcgcccttcctataaagtccgcagtgtgtttgaagaacgggacccgccccatat

SEQ ID NO: 348540 - DNA, 403 bp, Zea mays
ctcaactacagcgaaatatgccatgagtgcgtcagtacagcaaaaccattcacttttcaaaaaaacaaaaataaaaaaaaggaaaaaggtaaaaaaaaaaaggggagacgaaaaaaaaaaatctaaaaaacaagcctaacaaaaaaaaaaaaaggggcggccctttttaaggtacccagttttcctcccccttggttgcaacctaatactttttttttgggggccccaaaattaaatcccctgcccctgttttaacaacagccttattgtaaaacccttggtttccccaaattaattccctttgcaaaaattccccttttttcagggtggttaaataccaaaagggcccaaccatattcctttttcaaaaaattgccaaccttttatggtaaatggccccccc

SEQ ID NO: 348541 - DNA, 127 bp, Zea mays
  unsure (1)..(127): unsure at all n locations
cgggcctggtacaacatccatnncttgaggtgactcgnnaggatataagaacgctaccatagtgtgaggatnngaaagtttnnttgagtcaagaggagagaaaaaaaaaagaaagggagggagggag

SEQ ID NO: 348542 - DNA, 174 bp, Zea mays
ctcctcatctccaccctctcttcacattttatataccaagccagccctacctcaccggaccgtattttatacatggggggcggcttcttactcacattgccatctcacgccactctattccgtcctctactaccacggttccaactaccttgctcacctgtacactatctcttt

SEQ ID NO: 348543 - DNA, 188 bp, Zea mays
aaaacaacttgatccattgattcttcaaaatatctttcttcttttccaccacaagcacaaggatgtcttccaactgcggagggagctccaacttcaactcaatctgcaaatgcgtacaaaagtaccattacctagaccatactagcacctacatgcattccaccgacgaacttaccttttaccccaat

SEQ ID NO: 348544 - DNA, 97 bp, Zea mays
actagatctagagcggaacgctctatttgtttcaagctcacgttcacgtacatgcgcctgcgtagctatagtatagcgggaggtaaatctaattcaa

SEQ ID NO: 348545 - DNA, 408 bp, Zea mays
acatctctctatttctattatctctagctccctcatcttttttatccactacttacctacaccattcgtgctacttttataactctgtgtggcgtgacactctaaattcaattcactattccctctttctacaacattcttacttttaaaaccctttctttacccaacttaatctccttttatttcattccctcttctccaactatcattatattctacattccttcacctatctcctctcccaacttcttctcatctctattataactatatcctctctctctttatcttccctttaacctctatcttttctttttttattcttaacctttctcctactcctttcctaatatccttacctttcctttattttttactctctattccatcactttctccccctctttt

SEQ ID NO: 348546 - DNA, 304 bp, Zea mays
aaaaaaaaaaaaaaaaaaaaaaaaaaaaaatttaaaaaaaaaaaaaaaaaaaaaaaaaaaagggaaaaataaaaaggaggggaggaaaaaaaaaaaaaaaaaaaaaaaaaaaaaaaaaaaaaaaaaaaaaaaaaaaagggcccccctttttagagaaccaaatttttcttccttttttttccaattattaattttttttttttggccccttaatttaaattccttgccctttttttaaaaacttggttcttgaaaaacccttgttattcccaaatttaattcttttatataatattcctttttc

SEQ ID NO: 348547 - DNA, 152 bp, Zea mays
ccgggcagacacagtgtcactgcatgacactctatcctgtttcgcctatttttcatcttcacacacagctcttcctctttcgggtggagaatctaacatgagcgcggaggtttcttcaaaacgagcacctttcgtgaggccattcacttctc

SEQ ID NO: 348548 - DNA, 200 bp, Zea mays
  unsure (1)..(200): unsure at all n locations
acgctcannagttttgttctcctcttcctagtctagcctagcacctnngcagatctgctcgttgccgttgggcgtacttgatattatggggaggcggagagcggatggcttcnngcagcggcngcccgnttggtttcccttggcatgccctgctcnnctggtggtngnngcggcgctaaccctgtctcatgnngtgatgg

SEQ ID NO: 348549 - DNA, 290 bp, Zea mays
tcgcccacacccttccgtttaaaccgggaccccctgttctccaggatccaagcttagttggccttctacccaaccgagaggctttttatggacctaggggacatggacccaggtgccctcaagggtaaagcctattacatgtaaaaaccctcagggttcctatttttgtgggttccccccaaaccctgattgcccccttttgctttttaccaaaaaggcctgcacatggggccgtccctttcaatccagcaggttgcccgaggaccgggacccgccccagttggtgcttt

SEQ ID NO: 348550 - DNA, 448 bp, Zea mays
  unsure (1)..(448): unsure at all n locations
gggncggatttccggggcggccccgccgtccgcgaggctaattcgggtggcggcagagggtttcaccaaggttatggctccagaggagggtcctgagcaggattggcagatgcatcctttacggttcaataatcctggagagggggttccgcaatatagccatccggttaaaaatctaattaataagccaggaaaatttgaccttttccccttggagaaagtcaaggtggggagaagtaccacccagcctccaggttccaccaaaaagggtcctgtaaaggctaacactatcgacttccatcctttttggcaaagaccagaagtggtggtgcttattgttgtcccagattttgatagtaccctggattaccatcagtctgttaataccatgagcaaggttccagtggttgaccagtcaacggttgggcaggcttccccaggccctttt

SEQ ID NO: 348551 - DNA, 418 bp, Zea mays
cgggccgggatttccgggcctacaactccagggaaataagccatgagggcgtggtcggcaaagccagccaccggcggaaggacttcttggccggagggggtcggcctgaccgtcaaggaagccaaaaaggtgtttttggcggccaggccgaacgccgccttcggggtgctgccaacaaccacccaggcggggccctccgactttgggttcgaccgtgtccggtttttcgtgggacccgtcgcccaaacccccaatgtgggttgggctggagcctaagcctagaggtggtgggaaccgccggccttgaccacctgttttttgtaactcctggtattaaggtttaaataccaggggggaggcttgctaatcctgggaatcgtgccgctggtgggactactactgggctacttgaaacgaa

SEQ ID NO: 348552 - DNA, 124 bp, Zea mays
tggccccaggcttccgcccacccttccggttttggaccgggggcggccgttttggaggacccaggcttacgtccgcgggctggcgacgtattagtttttttatggggcaacctaaatcaaatta

SEQ ID NO: 348553 - DNA, 468 bp, Zea mays
aaaaaaaaacccctttccccaaagatttttttttttttaaaaaaaaaaaaaaaaaaaaagggataatatttaaattaaagaagggataaacaaattaactactataaaggtaaaaaaaatataataaaagggggggccctttttaaaattccattgtttctccccccctctttcaaaactttaattttttttttttggaccctaaattaaaatcccctcccccttttttaacaatttcgtgccgggaaaaccccgggcctccccaattttatccccttttaacaattcccctttttctccttttgggaaaaatgaaaaaggccccccccaatcccctttttaaaaatttgccccccttggatgctcaatgggccccccccttgtcgggaacattaaacccggggggggggggttttaccgcacacaagtccccttcactttccaagcccctttacccttttttttttt

SEQ ID NO: 348554 - DNA, 424 bp, Zea mays
gtttttggggggcccagaggcgtaaaacagttgttttttttccaggcgaccactgggggtccttaatactgaacattttaacgttaatgggtttggttttaaccttaaaaccgtttttggttgggggcagggccaagcactgaaccatggttgaagcggccgacgccccatgggtttcctatccaggggcaatcgattttagattttttgggggcggggccaagggcggtgccaggcctgtcccagtccgacgcctaaggccagaccacacggggtttggtttggtccacagaagggccgggtggtggctgaaggtttggaaattccggttccctttttttgggtttcgaagaatgcagttgcgtgttttgatggaggaccactttgttactgggcttgtggggcggtttcaacgcgtgtaagt

SEQ ID NO: 348555 - DNA, 95 bp, Zea mays
gttttggatcgggggcggccgttttttttttccaagcttacttccccttgcttgcgaggggttagtttttttttggggcaacctaattcaaatta

SEQ ID NO: 348556 - DNA, 432 bp, Zea mays
acgaattgctagcgaccaacgtcaacattattctaacaacaacaacaaaccagaagcggaacaacgcaccaagggaaaagggatggcttcgttaaccatgatggcgtccttggccgccgggggggtggccggcccttcgggccggggaaccttcgccggggtaaggtccgccagggtcgaccgttgccagaagcccgccacgttggcagtaaccgaggccaggcccgccgcctacggacgccgggccgtattgctcgcggttgttgcggcggccttggaagccatggggggtgccggggccgccatggtgggcccaatgaacgggacccccgaggcgaaaaaaaataccgcggccttttggtgaaccttgccaaccgccatggtttgccacatcttgacacgcccgctttgattgcatttgcagggccgggg

SEQ ID NO: 348557 - DNA, 341 bp, Zea mays
gccttaatcgcaacctttttttaaaaccctttaggcaaagcaagccgaacgggcccgaacggaatttgggacttggggtgggcctcctgcttggcctggccggtgggggcaacgctttgccgcccgggggggccaaggtgccagtgggcttgctgggcggccaacgccggcggaggcaccggcccggcttgggctaagggcccgggccgctctagttgcggggtgctgccggttggtcccgctgggtccggttcaaatccgttaattgccgtaggcaagagttggcctcaattttaaacggagccaaacggatgctagctgccattcgtggggaccaaatt

SEQ ID NO: 348558 - DNA, 100 bp, Zea mays
attggttttggttggggggcggccgtttttgtttttccaggtttacgtccgcttgcttgcgaggtaatagtttttttttggggcaacctaaattaaatta

SEQ ID NO: 348559 - DNA, 274 bp, Zea mays
gcccgcccggaggcgtggaacctgaacgctgttgttgggggcagccgccaagcctttttggggcggaaggcacaaaacaaccacccgatggccctgttgttgttgggcggttgccccgggccgccggccgtcaacgcggccccgggggggtccgggttgttccttccggggctgccggggggggggttgggggccgccgccttttgggcctcttcggggccgtccggcaggggggcgtctgtcgtccaaggacggccggggttacggaaccggg

SEQ ID NO: 348560 - DNA, 291 bp, Zea mays
aggacaactggtttaatggatcctcgaatttttttttttctttggcacaacagggccagggaggttttgcaactgaggaccaggctgtgcttgctgttaaggctccaagcccggaaagaggtaccctgacctggaggggacgggccccgccggccaggcaacggaggtcctagcattgtccccgaataggaaggccagccccgatttcttcaaggccgccatggattttttgcgggcctccaatccttgcggttgtggaggcagctgcaaaggcggcccccacagctgttg

SEQ ID NO: 348561 - DNA, 344 bp, Zea mays
gtggccccacccttccggcaggggaaccatccaaatggctgagaaaatggtccaccgggggccactaaggccgtgttgggttggcaattcaagtggtcccggcttgagctgttcctgcatgaggccgtccgttgtttttttgggagtgacccggggctgcttaatggcccttttaccgagcactccttggagtttctgatgtcggccgacccaaatctttgttgtaacccaaccaattttattaggtccggttttaggaccggttgattccggggaccgttgtccggcaaaccaaccacgtggtaaataaaatcgttggatccaagagtttgctgaacctaact

SEQ ID NO: 348562 - DNA, 396 bp, Zea mays
attaagcgggcggaaaaaaaaaaaaaaaaatgttttttttaaaaaaaaaaaaaaaaaaaaaaaaaaggggaaaaaataaaaaaaaaaaaaaggggggggccgttttaaagaaccaaagttaccttcccctgcctggcaaggaaaaagttttttattggggcacccaaaattaaattaacggcccgggttttaaaaccgtgtggacgggaaaaccccggggttacccaaattaaatggcttggaagaaaatccccttttggcaagtggggtaaaaaccaaaaaggcccgaaccaatcgcctttccaaaaattggcccaccctaaagtggcaatgggacccccccctttacggcccctttaagcccggggggggggggggttcccccaagggtaccct

SEQ ID NO: 348563 - DNA, 427 bp, Zea mays
aagttggccttttggtttacaccttaatattaaaactggagtcgtcggcggaaccagggggtccttccttaaaggttgaagagcaggaccaccattttgtgggggatcctagttttcaaggcccttttgttttttggggttggggccaaaggacctgcagggccaaaaaaccattgctgttccggcaagtgcacaacttggtcggccttttggacctgcaacaacctcttaacaaagtgcgccgccacctgaaaaaactggttccccgtgtccacgggcaagggcgccaccaattccaggtgccgggatttcttccccgaaaactggggttgcaggatccactaaactaatccatttccaccatggccacagaagccgatggatcctttttccatatgcagtgtttcctccgtccgtccgcttagtt

SEQ ID NO: 348564 - DNA, 477 bp, Zea mays
tccgggttggacccacccttccgaaacgccgccctttttggtttggacctttcttttccggttaaccttagaagcggaacccggccgacggcaaccagtaaagggctggtccccccaccgccaaagggattaaggggtttacccgtcctccgccacaggcccgggggcttcctgaaaataattatgggttggtggcaaaaggtttacggaggcaactttgaccaattctgggggtcctgaatctgaatggctgtaactggaccagctggttgaagttttgggaaggttaaaaactaacaccgaaccatttttgattttgcaaaagggcttaaaaggggaggattttgaagggcttttcctaagccttgatgagtcgaccaaaaccaagtttgatgaactggtaaagaaggagtaggctttaaaagaaaaaaaagctgaaccttttggtttgtttgcaaaaaaagaggctaaagtttt

SEQ ID NO: 348565 - DNA, 438 bp, Zea mays
cggttccggatttccgcggtgcggccccaccctccctataaaactggggcggccgccccaaatttttttagcctaagttcccttccctgcgagggggaagttttttattattgtgggcgaaacccaattcacgggccggggttttccatctacaagcctgggaaaaccttatccttccccaaccaaaactcttggcagtacatccccattccccctgttgccgtaattgtaaaaaggccgggcccgttcccctttcccaacagtatccaatcctaattggtaatgggaactggccctgtcccggtcctttaaccccaagggctgtggtggtaacccctaccgtaccctttccatttgcaatggccttatccccggttcctttactttatttcctttacttttccgcacattcacccgttttcccctttaaagtttaaa

SEQ ID NO: 348566 - DNA, 123 bp, Zea mays
gttttggatcgcggccggccgttttagaggttccaggcttccgtccccttgcttgcgacgtattagtttttttttggggcaacctaaatcaaattaacgggccgcggtttaccaccgtctggc

SEQ ID NO: 348567 - DNA, 75 bp, Zea mays
ttttagaggttccaagcttacgtccgcgtgcttgcgacgtattagttctcttatggggcaacctaatataatata

SEQ ID NO: 348568 - DNA, 392 bp, Zea mays
cacccttccgaacccaactggttaattggttcctggaaattttttacctcctttggaaccacaaggacaaggaggtttttcaactgcggataaggctcaacttgcggttaaggctcaaaggccggaaagaggtaccctgacctggaggaaactggcaccgccggccaggcaacggtggtcctaggtttggccccgaatagtgaaggccagccccgatttctttatggcctcgaaggattcctgccaggcctccaattcttgcggttggggtggcagctgcaagtgcgccccccgcacctgttgtccacatgaatcgacgccctgggatatgataattacttatctagctggggggggaggtggaccattaatagggggggccgggctggctg

SEQ ID NO: 348569 - DNA, 144 bp, Zea mays
tatggggccccccccttaaccggccctttaagcccggcggttggggtgtgtccccccagggtgcccgttacccttgccatgcccctagcccccgttcttttggtttttttcccttcctttttggcaccgttggccggttttccc

SEQ ID NO: 348570 - DNA, 387 bp, Zea mays
gaaccaaaaagggaccccgtttcaatggagttgttggccggcttgtccttaaggccgtcgccggggccggcccgaatccggactaccttgcaacccgtggacgtaggcggacgcttctttttccgccggttcggggggcgccagccgccaaggccccccctgttcttggaggcccggggcggaaggggctgttcgaagcggaaaatgcagaagaagccccggccgccgttgttgccgaaaatggaggacaacggcaacccgggattggtaattttaatccgaaccgccaatgtttacttttggtacccgttaaacataataacgggcggtacaacgggaaaaataatgttggctgcaaaggacaactttttgggagggtacatttac

SEQ ID NO: 348571 - DNA, 485 bp, Zea mays
ccgggtccggatttccggggtggcccacacccgtccgaaaaaaaaaaaaaaaaaaaaaaaaaaatttatataaaaaaaaaaaaaaaaaaaaaaaaaaggggaaaaaaaaaaaaaaaaaagaaaaaaaaaaaaaaaaaaaaaaaaaaaaaaaaaaaaaaaaaaaaaaaaaaaaaaggggggggcccttttaggggtaccaaggttacgtccccgggggtggcggcttaaaactttttttttggggcccccaattttaatttatgggccggttttttaaaaccgtttgggggggaaaaccctggggtcccccaaataaaatttctggaaaaaattccccctttacccggggggggtattaactaaaggggccctcctgtaccccctttcaaaaattgtccccccctttttgggtattgggcccccccctttttcggtcttttaaaggcggggggttgtgggttttcccccatatgtgcccctttttt

SEQ ID NO: 348572 - DNA, 393 bp, Zea mays
ggggttaaatgttggcccttattggttaattcggttttgggacaaaccaattaaccggtcgggccttccttgcgcggggaaccaaccgggaacgggaacaagaacaacggccggccgggggccggtaaggttggaagggggggggaagaaaaagggactgggcaacagcccgcgatggccgccgtcttttgcttaaccggcgccggcggtttaatgggttgggggttggtaaggatcttcttggccgggggttccgcgttcgggggaacttccggccgggaagttgttgacccaaagaacgcgcacttgtggccgttcaacggcccgggggtacgcttaacaatgtctgaggtggacctgttggacggggcaagcttcggggcggctttcggg

SEQ ID NO: 348573 - DNA, 186 bp, Zea mays
aattccaatccgaggcacaggagaggccatgtatgctgttccggagctcccccttcgggtccgggtggccgccgccgccgcggttaagttccaatggggctggcccggggctgcggatcggggcggccagccagttgacggggcggttggtgccaacacaaggcggccaagacggccgggggggag

SEQ ID NO: 348574 - DNA, 295 bp, Zea mays
ttgattttaaaattaggcgtttttccctgcgtttttcttagcctttggcattccagggaaccattaaacacccggggtttttccacccccgccaggaccgggggcaccaccaccagggttcttggaaccattcaattttaatccatggcgaagttaatgaccaggtgggcggtttggttggggcacgacaggttaccggccgtcggtgtgttgcgcgccgggctggccaagttggtcctaaccttctttttggttttaacgggcgtttccgccgccatggccgccggttccgacg

SEQ ID NO: 348575 - DNA, 359 bp, Zea mays
acccttccaaggaagtggtggaacccggtcctttcgaggttaccgggaaaaagaagcatgaggcccaaggggctgttggtcgaactggccgttttcgccgtcctggaagttttgccactggccaaagcccacaagggggaggaggaggaaggcctggaactcaaacccagcaggaggcggtggccgtcctgcaaccagtgcggatttggaacaaggtcgaagccgccgttttgcaagggcagggccacttgaacaaccggttgcaacccggttggaaaggcttgcgccttgtcaatttccaacggccttttgtggggcagggccaagaccgtaaacttttgaaagcgccgttgaacccg

SEQ ID NO: 348576 - DNA, 380 bp, Zea mays
cggatttccggggggttcctaaaccatggttttgggcaccaaaattggcccccaaccggtattttgtccgtccatggccatagcgggggtggctgggtcctctaccattagggttaggatggaaggggggaaagggaaaaggggcgcttgcctgtggggaatattatattggggccctccttgggccccaccattgtggccattaacgccctactttattatctggtttggttttaatctggggccagccggtccattgtttgtccccagtttggtgttaaaaagtccgcaaatcctgttggtggattgggcggcgttccaaatttggtttttttaagtaaacccggttgccggtattttaatttcttcgtttacttttt

SEQ ID NO: 348577 - DNA, 415 bp, Zea mays
gaagcctcaacggtggttgcgccttaacttctttttccgttctgaaaccaaaattccttaactccggcaacaaccaagttgcgacccgcccaatggccggaccagaagggttggaggcggcggcaggggccttcgtaaccggtaagaggaaggccaccggggtagccaaggcgtccgggaaaaatatggtcaaaaagggggatccgggggcggatgccacatgcggccatgcggaatggacattgacacgctggttctgttaaagaggggggctgccaaaacaggccggggttgtgtttatgggagggccatcaaagattctgcgatggaaaatactcccttttttttgaaaatggccggggatgatgaacataaggggtggtttggaactataaagctttaacctaatttcccc

SEQ ID NO: 348578 - DNA, 204 bp, Zea mays
ggcaacactttttccggccggctgggttcaaatgtagaagggcttcgaacgtccatatcccgggtttgggcaaacgacaaaccggtttaggggggccttggggtccgcaaggggccaattggggcgtggaaacgttgcaaccggggctttcttttcaaccagaacgtccaaagggtgttgccgtaccatttcggggttgccccg

SEQ ID NO: 348579 - DNA, 330 bp, Zea mays
aaattcaagacgaaaccaaaattcccaacctttcgcaacctaaaatttcccaatccttcttggatcaagcccgggggggaaaagccatggccgtttccgaaaccaacgacgcccccttggtggccggcaaccagccaacggaggaggaggtgccggtggaaaggcccgcgccaccggaggaccaggagggggagaggttgcgttccctgaggttcgggcagaaggcggcggcccaggccctgttgctggcggccgttttagaggatccaggtttacttccgcgtgcttgcaacgtaatagtttttttatggggcaacctaaatcaaatta

SEQ ID NO: 348580 - DNA, 131 bp, Zea mays
aaacccgctttgtcaatcaaaatgcccgggtttaattttgagggggtcggaaacggttccacaagggggattggaaggtccatctaaaaccccgccgaagggttggccacctttccttccttgtttccatt

SEQ ID NO: 348581 - DNA, 120 bp, Zea mays
gggggggcccaccccgtcgtttggttttggatcgtggccggccgttctggtgtgttccaggctaccttccgcttgcttgcaaggtcatagtttttttatgggggaacctaatttaaatca

SEQ ID NO: 348582 - DNA, 438 bp, Zea mays
ggaaataaaagcaccaaagttgccggccttttgaggcacccttgaaacctaaggcgtggttcctggtaacactggctgtaatggtcgccgtccttgcagttttgccactaacaaaagggccggaggaggaaggaggaggggggccattccccgccgtggcccccgccgaaccaggttctgggccgtcctgaaccaggggcggtttttgttacctgtttaacccgccgaatggccaatgcctgaccttttggacggcgggtggccaccaatggtgcaggcggtgcttaaggaccaccgccaacggtgggtgtaccatccggcccttgcccccttaccgttgctccaccttttttttaaatttttgtaagggctgttgtaaaactcccgttcccttcgattttttgtcaccatatttccggttccttttccttgcattct

SEQ ID NO: 348583 - DNA, 464 bp, Zea mays
acacccttccggcggaagcaaggcggaagcaaaggaaagggtttttgtcaaggccgccaaacaggagcaacgggaacttttccgccaaggacaaggcggccctgaaggccaaggtccggaagtcctacaacaccccggggcaaaagcgcaaaacaaagccttcccgaaggaggaactccgccgggaacgtaaacccgttggtcccgaacttcggctgaaactccaacccgaagctgaacaagtccaaagagctgaaagccaaaaccaagaggtggtggtacaagggcccaaagggggaaaataagttcgtggaaacggattcctacatggaccttgggggtattgtctagcaaaacaaaacaaccgaaccggtcttaataaaattgacaaaagttaaaggctcccccttaaaactgtttgaagatccaaatgcaaagaaccgacattgctttttagagggaaaa

SEQ ID NO: 348584 - DNA, 82 bp, Zea mays
gcggccgttttagtggttccaagcttacgtccgcgtgcttgcgacgtaatagcttttttttggggcaacctaaattcaatta

SEQ ID NO: 348585 - DNA, 145 bp, Zea mays
aaattaccttttttccggttggccatggtagttggtggggctttttaacccctccttggttacctttccatttttgggtttaaattctaggtggcccactattttggcttaaaaaggggcagttttggtggggccttcaactttt

SEQ ID NO: 348586 - DNA, 239 bp, Zea mays
ttttaaaggacccaagtttacttccccttgcttgcaacgtattagtttttttttggggcaacctaattcaattcaactgcccgcggtttaacaccgtctggcctggaaaacccctgcctttcccaaactaattggcttggaagaaattccccttttcgccagttggcttattaccaaaaaggcccgaaccgttggcctttccaaccatttgcccaccctgattggcaattggaaccccc

SEQ ID NO: 348587 - DNA, 447 bp, Zea mays
ttcaggtttggttctcctttcctagctggcctgcacctgcaaatctgttcgtggcctggggctcctgatttgggggaccgaaccgatggctcgcaccggccccggggtttcctgcatgctgttccgggggggggcggcccacctgttaagggggatggccacccaaccagcggcggcggcggcggcggcggccaaccaacccggagctggcccccggctgttggggcaggtgaccggccactccagcacctgtaatggccgaactggcccaatttatggttggccgtgctgaacaactggctgctagctagctggctagctggggggagtctttccggccccgcaagcagccttggcataccaccctttttgcttagctaatgcatgtccagcattacccggtggctgggctcgtcgccgtctttttctgcggcggcggcgccgggg

SEQ ID NO: 348588 - DNA, 177 bp, Zea mays
acccaggcgtccgaaaaaaaaaaaaaaaaaaaactaataaaaaaatttattatttaaataaaaaaaaaaaaaaaaagggggggtaaataaacgggccgggcggtttaaagaatcaaactttactaacgcgtgcatgcaaaataataacttttttatagtgcaacataaattaaatta

SEQ ID NO: 348589 - DNA, 427 bp, Zea mays
gaaacattgtgtcagtttttgcggaatttgttttgatttccaagtatgccaaaaaaaggggtgggtgctcaaaaaaaaggaaggaaaaaaaaaaaaaaaaaaaaaaaaaaaaaaaaaaaaaaaaaaaaaaaaaaaaaaaaaaaaaaaaaaaaaaaaaaaaaaaaaaaataaaagggggcgtccgcttaaaagaaccaaaattaacttcacctacaatgcaacctaaaatttttataatagggccaccaaaaaaaaaataactggccggtttttaaaaaagcgaaaactggaaaacccctggctttacaaaaaaaaatcccctagaaaaaaaacccctttaagccactggggtaaaaaacaaaaaggccccaaacaacccccctcccaacaattttcccacccaaaaagcgaaaaggacccccccctt

SEQ ID NO: 348590 - DNA, 215 bp, Zea mays
aaacggggccgacccacgcttccggaatgacaaaatcaacctcccctactttctttctttacaatcccccaccttccccggcggggatttcttaatataagggggtctcccattacacccaaaactacctcaaccaccgccacatcgccctcacttcttatacaacttaccatacttaccctaccttcttctttcttatccacactcacaactat

SEQ ID NO: 348591 - DNA, 151 bp, Zea mays
taaataaaaaacactgtccttatttttacaacttcttaactgttaaaacctttctctaacccaactaaatctcctatcatttttattcccttttcaccactttacataatatccaattattcccaaacctatcatcttttccaacattttt

SEQ ID NO: 348592 - DNA, 456 bp, Zea mays
gggccgaccaggcgtacgaactaaaccaacatcaaatcccttcctccttttttttaataaccaaccaataccctctaggggggggctcattaaaactatggccggccaaaaaaaacaaccccccaacccaaacctctcaaccactataacttacaccccatttaccatatccctctccaaactccaatttttacccattagactaacttccacaactactaccttaacccccctctaaatcacaacctaaaatctaaccgaaactatcaatttctaaaataccaaataaactatatgtcacataatcaaaaaaataaataatctcaatttaatacaacttattaaactaaaaaaccaatcatcaattaacaaaactcttctcaaataacactaattaaaccttctctatatataaacatcaacaccattcttaaccatattatttttactcatctt

SEQ ID NO: 348593 - DNA, 95 bp, Zea mays
  unsure (1)..(95): unsure at all n locations
cggggaaaaaaaaaaaaaaanaaaaaaaaaaaaaaaaaaaaaaaaaaaagggttttttttttaaaaaaaagggccggcctttctggggggtccaa

SEQ ID NO: 348594 - DNA, 221 bp, Zea mays
catccaacctttcataactactttcctattttatccttctatttcatctcttcctatcattgtaaatcaaaattacaccaaatgttgttatcttcacccaccaatatgtaacgttatctgtttttaaaccttcctaagacatcttatttttaccctactgattaccacccctttacagtaattcaacctatttcaataagaacccatattttacacaattt

SEQ ID NO: 348595 - DNA, 477 bp, Zea mays
  unsure (1)..(477): unsure at all n locations
aaaccggggcgggngggcttcctagacacgtactctttgtcctctttaactactattttatcacngcctaatccaaaactcgggttcgttgataatctaacttgcctgggcacctcaatcctcaacaaatatggcacatagccattcttagtaaacttcacatcattgtttgtcttgttatttgttccctcttttgtgggggctgctatagctccagttcgccttgaaaaaccacaggtttataacccatttccataaaactatctcaaataaaatttacaccatttccatttcccaatattgtctttcaccacattgtagataagatattcatgtctctttattgacaaaaaatttcattaatttatcacaataaacacgtatccataaatttttctatatacattcttgtacacttcaaagtttcattatatgcataactgaaatatctgctcaaaaaatttatgtattctcttt

SEQ ID NO: 348596 - DNA, 175 bp, Zea mays
cccggggccccaccacctacactgcgcggtcccgctcaggcgcttcgtttcctccgagtccgccgtaaccgggcggcggtccaatcctgacgttgaggctcctccatcgcccctccttaaccccgccttgcccgcgccagacaaaccctgttctgacaaaaccgtggcgcgcccc

SEQ ID NO: 348597 - DNA, 448 bp, Zea mays
gaattccgggggcaaatatacctcaggaatagtgactctacttaagatctacttgctgagataggtcgtgaattgcctaaggtgggccatctcttcttctcgagtgatgctctcgagttatgcatatgccaccactctgccttaaaaagaacatctggcaatattctgaatccagccgaggagtgagcataaaaggtttagcaattaacaaataatctatgttcaatgggcatgagtgaagaataattagtaagtgcttttcactggctgacttgatagcaaagtagtgtaaaaataatggtaaaagtggttacgccttataaactgggacgtagggagtactgttatattagcaagtacaaaagcattccccgctaacactgtttgtgtattagaagtgagcagtctgtgaaatagaaagtgacatccatttgctattgttaggtgc

SEQ ID NO: 348598 - DNA, 75 bp, Zea mays
actctagttgtattaatcttacgtacccatgcatgcgaggggggtcttcttcaatagggcgacgtaaattcaaaa

SEQ ID NO: 348599 - DNA, 376 bp, Zea mays
cggcccaggcggttcgaataacactccgttttttatttgcgtcaagcggatctgatctgcttgtcctcgtgagggccacgcgccggtcgttacgtctggattttgtccacgtcaaccgaaaagctccttgctcttggtttttggggtacatccctccttgccaaaattagcgcccgggtactaggggtggtggcccccaccgggtcgtattactcaccacccggtttgtgatgtataaacgcctgctgaagttatcatgttatggcttatggatcgtttaagaatgggaaaaacctggatggactttgactcactataaaggtaaaaacaaaaaaattgggcggccggtgtaggggacccaagcttacgaacgcgt

SEQ ID NO: 348600 - DNA, 74 bp, Zea mays
tctttaaattttcttttttacttccacgtgcatgcaacggggggggttttttatagtgtcgccgggattcaatt

SEQ ID NO: 348601 - DNA, 266 bp, Zea mays
  unsure (1)..(266): unsure at all n locations
gggcggggggggggtnanaaaacaaaaaattcctaattgcctcttattatctttatccgatcagctaattccaccctgggctgtctatttttatgcaagggggggccctttttaattaatttttaagaccaaggtaaattcatcatacacaagagaggggtaatgttcaattatacacgacttcttcatttagtttttttaaatacaacagaccacttgcattctttcctcctacaccaaaagccatgtttcccacgtacaagaac

SEQ ID NO: 348602 - DNA, 330 bp, Zea mays
ggcgtccggaatgaaatgcaggaggaactcaccttatccttgttatcagatggtgtctcacgagacaaggtgtgaacttactactgaaagcgagctccggtctctgatgtattttatgaccagttaggcctcaacgtgtaaactttattgcttaggcctggctgtgatgttccagtgatatatgaataaactactgaacttgagacgaggatgtaatgttcagtgatatattatatgaataaactactgaatttgaggcgaggccataatatatataaaaactcataatattataaaaaaaattttaagttatgtgtttatttttttttc

SEQ ID NO: 348603 - DNA, 219 bp, Zea mays
tgaaccccttgttcccataacggtgtcttttctagagtctactccatttaagggagggaatttccttgctacgggggatacactcatacaaatttttcgctagtgccaacggctgacaagcaaacagctattatccaattgcaaactgtgtgtaagctctgcggtggtaaatagcatccaactttgctcgttgtacttgtaagctagcatttttgtgct

SEQ ID NO: 348604 - DNA, 168 bp, Zea mays
gaccacgcgtccgttcattgttggtcccagtccaccaatccattttctttctcctcacattctcatacccgcggggtggtgtgtcttttataagggaacgtaaatgcaatcaaccttccgatggtttgcaaaaaagctacttgcaaaacccaacccttcccaacttaa

SEQ ID NO: 348605 - DNA, 430 bp, Zea mays
  unsure (1)..(430): unsure at all n locations
tttaaaaaaatttttatttaaaaaaaaaaaaagaaaaaaaaaaaggaagaggtattaaaaaaaataggggggggataaaaaaaaaaaaantgttattataagataaaaaaaaaaagataaaaaaaaaaaaaaagtaaaaaaaaaaaaaaaaattaataaaaaaaaaaataaatataaaaagaaaaaaaaaaaaaaaaaaataaaaaaataaataaaaaaaaatnataaaaaaataaaaaaaaaaaaaaaaaaaaaaataataaaaataaaaaaaaaaaaaaatataaaaaaaaaaaataaaaaaaaataataaaaaataaaaaaaaatatagaataaaaaaaaaaaaggaaaaaataaaaaatataaagataaaaaatattataaaaaagaaaaaaaaaaaatttataaaaaaataaaaaaaatataaaa

SEQ ID NO: 348606 - DNA, 333 bp, Zea mays
  unsure (1)..(333): unsure at all n locations
aaaaaanaaaaaaatatataaaaattttataaaaaaaaaaaaaaagaggggaataaaaaaaatagggaaaaaaaaaaaaatataaaaaaaaaaaaaaaataaaaaaaaaaaaaaaaaaaaaaaaaaaaaaaaaaaaaaaaaaaaataacaataaaaaaaaaaaaaaaaaaatataaaaaataaaaaaataaaaaaaaaacaaaaaacaaaaaaaaaaaattaaaaaaaaaaaaaaaaaatataaaaaaaaaaaaaacacaaaaaaaaaaaaaaaaaaatacaaaaaagacaaaaaaaaaaattcaaaaaaataaaagaaataaaaaaaaataa

SEQ ID NO: 348607 - DNA, 362 bp, Zea mays
gaaaacaaataaataattaacaaaagatacccaatataatttattatgcatcatgctgggattttatttggggtgcattttgtgacagcataaaataatataaaagaaaagaattatgttaaaaatccaaagtggaatataaatcctaaaggaaaattcaggaatctagaaaaagagaagaagggaatcaactatgcaaataaaaataaatataaatataaatatgtatattatttttacacggatctgagtttataaaattgactcaaagttgaatttcataacatgactctaattcaaattagggattcaattgaaaagaaattgtttcaaacaaattattattttaaaaaattattttt

SEQ ID NO: 348608 - DNA, 177 bp, Zea mays
  unsure (1)..(177): unsure at all n locations
aaaaaaaaaagggaggtggaaaaaaaaagaggggggagagaaaaaaaaaaanaanaaaaaaaaaaattatttttaataaaaaaaaaatataaaaataaaaaaaaaaaaataattaaaataaaaaaaaataataataataaaaaaaaaaattttttaagaaaaaaaaaaaaataaaaa

SEQ ID NO: 348609 - DNA, 368 bp, Zea mays
ccgggcgtccggtttgttatcacaccagccagtggcggttcattttgcaccaccggccccgtcagaaacccggaggggcatggtttaaacgtggagcggcctggccgtggccctggtcatgggcaccgtgctcctagggggtgccggtacgtgccacgcgggccgccgcctcgacaaactgccgccggtgcctcaagtcccagcaggtattccgagtctgccggcgccccaagtgcctgagctgccagtgccgccggagcccgagctgccaatggtgcctaaactgccgggcgtgccgttgccgcccgccgcggtgccgtaggtgcccctcgcgttgatgttggatcgttcccccgtgccgtcctttt

SEQ ID NO: 348610 - DNA, 118 bp, Zea mays
  unsure (1)..(118): unsure at all n locations
cggaaancccggggccgcccgacgcgtccgtttgtccttgatgtgctaaacgcgtgcattcaggcgcgatctgcgggccggcaagcctggtgaacgcgatgatggacctgcaggaggg

SEQ ID NO: 348611 - DNA, 86 bp, Zea mays
  unsure (1)..(86): unsure at all n locations
gaaaaaccgggccggcccacgcgtccgccactacacaacaccaattttagaacctttatgtcaccaatcatgccccncttaaactc

SEQ ID NO: 348612 - DNA, 298 bp, Zea mays
ttcatcaaatgaaacgcgtgtgcttccttcttcatcctttcttccacctttcatcacttgtcaaaatactcttggcctatttcatctaacccttattaattcatctacttttcatccagggatgtattcactttccatattgcattttgttccaataaaaaataaacatgttcatctaattttttcaaaatatctttatgatcaatcacctttttaaacctttatattaaccccttaaagttacctttccctgttttttaagttttttatatatacaccactttttattcccacattc

SEQ ID NO: 348613 - DNA, 315 bp, Zea mays
  unsure (1)..(315): unsure at all n locations
cctcatttctccatccccttcccgccgcattttctataccgtcgccgaaaaaaatntttggcgtgattttttaccaacgtaggggtgctaaacccntnttaaattcccacacccaccaccgtaatgtcccctcccttttcctttccttctactttttcaagctcatcttttacctaaattactttttcaccgacttaattcacaaccccttccttttcacccctttcttcaatttcactttcctccacccattcagttacaatcaccatatattattctttttctcatcctttctcatttacactttccattttt

SEQ ID NO: 348614 - DNA, 390 bp, Zea mays
  unsure (1)..(390): unsure at all n locations
gcagatggtgtctcacgagacaaaatctttatgaactactgaaagcgatctccgnccggtgatgtattttatgaccagggggggctcaacatgtaaactttattgcttaggcctggctgtgatgttccagtgatatatgaataaactactgaacttgagacgaggatttaatgttcagtgatttattatatgaataaactactgaatttgaggcgaggccaaaaaaaaaaaaaaaataaaaataaaacaatatataacaaataaataataaaacaaaatattattcttatataaaaaattaataaaaggggcgccccttttaaaggatccaagtttacttccccgttttttcaacttattaatttttttatagggtcccctaaattaaat

SEQ ID NO: 348615 - DNA, 69 bp, Zea mays
cccgggccgacccacgcttccagcactacacaacaccaattctaaaaccccatcatcaccaatcatgcc

SEQ ID NO: 348616 - DNA, 212 bp, Zea mays
  unsure (1)..(212): unsure at all n locations
ggggccggccgactctttcgccaaactgcggatagagcagcgagccatctatattancgcgagcgcaagcacgtacgtgtggtgaagtttaagttagaagaggcaccactccctgatcgatggttgcccatgcttttctttccgtccggaagttgctgggccgccccttgcatttgtccgtttttagttcgtcttcaagtaaagctcccttc

SEQ ID NO: 348617 - DNA, 381 bp, Zea mays
  unsure (1)..(381): unsure at all n locations
gtgtgtcaatgcaacaagaggcacgtttgatattttgagntaatcccaaaaaaaaggaagggaaaaaataaaaaaataaaaaaaaaaataaaaaaaaataaatataaaaaaaaataaaaaaaataaaaataaaaataaaaaaaaaaaaaaaaaaaaaaaaaaaaaatggggctgccctttttagggatcccaactttccttccccttcattcccacttaaaacttttttttttgggtccctaaaatcaatttcattgcccgttttttaacaactttgtacctgaaaaacccctgtttttcccaaataaatttcttttgcaacaattcccctttttccaagttgttaaattttaaaaaggccccccccctttcccttttcct

SEQ ID NO: 348618 - DNA, 124 bp, Zea mays
  unsure (1)..(124): unsure at all n locations
gggaccacgcgtccgggaaagcccncgctctcgctcaccaccccggtcgttcgtttgctaatccctggagcggacgggagtaaggccagccaaccaaattgtctatttactgaagggaaggagg

SEQ ID NO: 348619 - DNA, 305 bp, Zea mays
ggcgatcgatagcacaaggctgcgtctgcgtgctcggccgccgcccgacccgaccggacaaggaggggaggaggcaaaaaaaaatatatagttagtcacacgcacgcagcacaggagggaggagagggattgagggataaagaaatttcgggagacaaggagagagagacagagatggagaggagcggctggacttggaggcaggcctttcactactcccgcacacagataacgatgtggtagctagctcctcttaggctaaggaaggaggtcgtggccgggatcccgccgatgatgatgacagt

SEQ ID NO: 348620 - DNA, 170 bp, Zea mays
ccgaacattttttttaattccccttccccttcccaacgcgggggaaaagaccaaagtttggggggccccaaacccttaaatgcttcccaaattggccttcggggccaactttttttctacggcttttccgttccaaatgcgcgcgttcccttaattttaaagctgttacc

SEQ ID NO: 348621 - DNA, 143 bp, Zea mays
  unsure (1)..(143): unsure at all n locations
aaccgnccggattcccgccgggcgtcgcgctgttcatcttgtacaacgcgctcaagcgcttccatgggggtggtggtgccatcgtgggtgcgatggctgaccatcctcgtcgcctggggcacatcacctctatttatctccta

SEQ ID NO: 348622 - DNA, 397 bp, Zea mays
ccggttataatccattatgagactatattattggtatatcttagcacaatctattttgggtccggtggattcgtaattggggccggttcggtagtggtgtcatggttaatgacttatggtgccgcatcaaaactgaaagcctcctatgaatgcgcacacaggattgtgctactcctcgatgctggtatcaaggtctctagtcatgatccattgtggaactgcattgatgtgtgaccttccgtggaacttcccttgaaataatttctatgttgtttgtccaacaatattataatattattcttttttttattgggtcgccccttttatagatcctaagtttacgtattcttgcattttacgatttatcttttttattttgttactataattttatatt

SEQ ID NO: 348623 - DNA, 83 bp, Zea mays
ccttacaaaataacaaaaactcctctacctattctcccttcccaaacatttttctttcctatattgttaattcttctccccct

SEQ ID NO: 348624 - DNA, 236 bp, Zea mays
cggacaccatcgacaatgtgaaggcgatagatccaggacaaggagggcatccccccggaccagcagcgtctgatcttcgccggcaaacagctggaggatggccgcaccctagcagactacaacatccaaaaggagagcaccctccaccttgtgctccgtctccgtggtggtcagtaagtcatgggtcgtttaagctgccgatgtgcctgcgtcgtctggtgccctctccatatgga

SEQ ID NO: 348625 - DNA, 74 bp, Zea mays
tctagttttatccaagcttacgtccgcgtccatgcgaggggatatctctcctatcgtgtgacctaaattcaatt

SEQ ID NO: 348626 - DNA, 304 bp, Zea mays
gcgtcttaacaataatgactgtgaaggaggagattttattttaaaccacaaatatttaaaaaccacaggcggtggactataatcatgatgcacctatcagacatcactgccataactaactacagcaagaaatatgcacccgcctctgacctatcgctttgttttcggcatagaaagaaacacacgccttgtttctttttcattagttgctctatgataacataaaccgtctgctttcatatgaagttactgtgaatagtgcagagatatcacatggacctatataagattcaatgaatattct

SEQ ID NO: 348627 - DNA, 82 bp, Zea mays
gcggccgttttagaggttttcttttttacgtccgcgggcatgcgacgggatgggttttttatagggtcacgtaaattcaatt

SEQ ID NO: 348628 - DNA, 414 bp, Zea mays
tcgctccttttgctcggaacgcacacaccggccggtccccgatctccgatcccctcgtcgatccaaagatgcagatcttcgtcaagaccctcactggaaagactatcaccctcgaggtggagtcttctgacaccattgacaacgtcaaggccaagatccaggacaaggagggcatccccccggaccagcagcggctcatctttgctggcaagcagctcgaggacgggcgcacacttgccgactacaacatccagaaggagagcaccctccaccttgttctccgcctcaggggaggcatgcagatcttcgtcaagaccctcactggaaaagactatcaccctcgaggtggagtcttctgacaccatcgacaacgtcaaggccaagatccaggacaaggagggcattccttcagac

SEQ ID NO: 348629 - DNA, 401 bp, Zea mays
tcgaacaaccccgattgacaaattatggccaccgcaagagacttaaatagggggatgtgcacgcaccgacatcagcaccgcgtacttcatgcccgtctacttccacctcacgtctaaattccttggctacacagactacaggctcctactaaggctggtcttccaagacaaagacaactccaatacatcgacatacagatttgttgaccgatttaccaacatggtcatcacagcactaatcatttatgatcgtataccatcacgatatgcatcttacttctgattactcccatcagttgccacgatatgctcttgaagttggtctgactaactattcagctgtctactggactgaccttttgttagctggtcatgttctcacaaaccgtaatttatattat

SEQ ID NO: 348630 - DNA, 361 bp, Zea mays
cactattagatctagcaggcagaacatcattaaagatcacagtctttcacaaaaccacaactttaaaccaaaagacctaaaacactaatgtgcaatgcccactatgcagtattaagatttcaactaaagcagacctagcgatgttatttgcttcgagatacttggagaagcaatcaacatccatctatgacatttaaccggtcactaaggccctgtttggacagctccagctccagaaaattcggtagagttggtggagcaggtcattaggtgctccataaaatcgtggagttggagctgtaagccttcagaagacattttgtctttgataagtcatgcccccgcagtctaatcgggagca

SEQ ID NO: 348631 - DNA, 131 bp, Zea mays
tcgtgtacgcgtgtcgtctattcgaactggcagctatggcttatgagaacgtccatatcaacataggcgatgtaggctacttgcgctacgatacgtatacaaccttatgacacctggtctacaaactggag

SEQ ID NO: 348632 - DNA, 417 bp, Zea mays
tcgaagtcaaatgatctccagcagaaattacgtcacctgaattatgaactgaaagagttaaggtatcgggtagaaataaaaaatccttatgccacacaaagtagatggatgaaaaatgaccaagtaagcaatagttcaggactcgtggagaatcagcagcgtgctatgcccacagcctcagagcatcttgaagaggctgaacaggttaatgttggagttaacctgaacaaccctgctgaaggggttcctgctgcactattggatgtgggtaaaccttgcagtactgacaatggcatatccagcacatctgttattgaaggaaataaatctttggggctttcagaacaaccatcaaagataattactgaccagactgatcgggactctatttgccgaggatccaatagttgcgagaaa

SEQ ID NO: 348633 - DNA, 343 bp, Zea mays
  unsure (1)..(343): unsure at all n locations
tcgctcgcaactgaagaccaaaggcgagccggctgcccggattccggaagcgcccaagccccccaacgcgaccgtcgctgtcgccaccgcgctcggctcgcccgcgtccacagaagccgccagggccatacgccgatgaatcctgccgcgacggcggatcccagcagctccagcacctcggcggccacgctgcggaagcggatgatctctatagacacggctcgacgaggagccgacggcgcgtcgcctgagaccgcgcccaggccagatcgggcgggtagtgataaggcgccgcangagcgggaggaggagggctcgatggcagcctccgcgcctgcggcgg

SEQ ID NO: 348634 - DNA, 398 bp, Zea mays
gaccaactagcaacatagaaagcacaatagtgtaccaacaatggcagccaaaatattttgcctccttatgctccttggtctttctgcaagtgctgctacggcgaccattttcccgaaatgctcgcaagctcctatagcttcccttcttcccccgtacctctcaccagcggtgtcttcggtatgtgaaaacccaattcttcaaccctacaggatccaacaggcaatcacagctggcatcttacctttatcacccttgttcctccaacaatcatcagccctattacatcagttacctttggtgcatttattggcacaaaacatcagggcacaacaactacaacaacttggtgctagcaaaccttgctgcctactctcagcaacagcagtttcttccattc

SEQ ID NO: 348635 - DNA, 289 bp, Zea mays
acactcggtgaccacacaccaatacctctatctagttcacaacgcatcagaacccacccgacaccctgagggctgagcttgatgagctcgctctcctgcatctggctgaaagctcgaccttcacgcatacaagctgtttgtggaggtgtccatcaccgacgacgaactagatagccccctccggtcattggcaaacaactgaaccgtgcagctagcctgactgtgacaaaagaagaacagctgctgccggcggtacagctgacagaggcgcttgatgacacgacgccta

SEQ ID NO: 348636 - DNA, 110 bp, Zea mays
cggccgattcggtcgaccacgcgtcgattagcttattactcagacgcaagaaccgacgcaccatgaggggtgctcgtgccctcgtctctgggtctgctggagcgcactca

SEQ ID NO: 348637 - DNA, 82 bp, Zea mays
tctagtgttgcctcattggcaaatgataaccaggcaccgccctcatctgggtctagtacaaaaaatacttttagcagggatt

SEQ ID NO: 348638 - DNA, 354 bp, Zea mays
  unsure (1)..(354): unsure at all n locations
gcgagacgggaccgagcccgagggcaggctgcagctgcactgccggttcgtcaccaagcttctcaacgacctgttcggcgtgcaggcgcgcgcgggttgcgcgtgcgcggngccctacgcgcaccggctcctcggcatcagtccggcgcgcgccaaagccatcagatcagccgtcgaacagggctaccacggggttctgcccgggtggacgcgcgtcagcctggcatactacacgtcgatgcaggagggccgagttcgtgctggacgccgttgccttcgtcgncagcttcggncaccggtttctgccgctgtacacgttcgactggaaaaccggagactggcactacgatcaca

SEQ ID NO: 348639 - DNA, 387 bp, Zea mays
ctagccgatcactgggtgggctaccggcgccgccaccctgcgctaggtgccgaggccttcgtcggtctcttctccggcgacgagcacccaccagagtaagcagctgctgtcgaagtgtacatgagcaatggtttgtgttgggtccaaggcaattagacccaaggggagcacaataaatggcttgggagatggagctttagacgatagctcacacaagaagaggacaaggaaggatacgagcgagaaacacgggaaagggggtcacagctcaagtaaaggaccttctgtagggaaacctcggcatgtgaaggataggaagcagagaaatgatgatgggaagaaagggaagggtcgacgaaaggaccatcattcaggaagctccgtgat

SEQ ID NO: 348640 - DNA, 244 bp, Zea mays
tcgagcttgtgaggacccagatgcaatagagctatatgagacccatatgccgcggcgaggtcaatggatataccttggttgaacactgctcagaagcagcagaatcgcaagaagaggatgctgtatggaagatggctgttcttacattggcacatacagagagctatgcaagcatatgcaagagaaacatattactgtaaacacactagctgcggtacagtggcatgcttacataaggaaacgg

SEQ ID NO: 348641 - DNA, 365 bp, Zea mays
  unsure (1)..(365): unsure at all n locations
gttctagatcgcgagcggccgccctttttttttttttttttgttaaatttagaaagttcatttagagaactgttggagaatagttttcatattaactatctaaattattgatttaggaagtcttttagagaactactggagttgctctaagggagataaaaatgacccaattttccgtcgtccttgtctttttaaccaaaccgtttgttttattcgtcacgttctccgagaaccggcgcagcgccgtgcgggcaaggacggaggatgtgatttacagccatgcggggttcttgatgggtgtgacgacggcctttgtnctgaggtagttgcggagggcgtagatgccctttttcccgcccgacgcc

SEQ ID NO: 348642 - DNA, 241 bp, Zea mays
gtctaactcgacctagatgaactacggttaggacctcacgaaaacgcccgacatggaacgacacgcgaacgccggcatctcaaggtcataacaaccaggcggtgtgacttaacacgcgcatcatatagtcgcacacggatattgtctgtgtgtagatcatctgaaattgtggcgacgcactgcccaagatcaaagagcagagtcttaatcacaaaatacaacttcatgcgcaacctgaact

SEQ ID NO: 348643 - DNA, 88 bp, Zea mays
tcgcatccaggcaacatagaaagtggaatccagtagccaccaatagagcaacaatggcgaccaaaatattttcccctcctatgctcct

SEQ ID NO: 348644 - DNA, 390 bp, Zea mays
gttccttgcttgcctcgccagacagcctgtatcctcctccccctcccccgtatccgtcgagtagcaccttacgctgccgccgtcgtcatccgggcgaccaccctgccaaccaccatttcgctccgcccgcctcgcttttccctccccccaaccaaccactcccctcgtcccacttcttgcgtcaccgacccaatccgatcctatcccacccgcacggccgcacggcaacccgccgccgccgcccgagatcccgccccagtgttccgtcccgtgtgatgcgcggatccggctgagggcgagccatgccgagcgtcggcgtgaagatctacagcgtcttctttcaagctcttcctccgccaccgcctccagtcgctggccgccgccgcccgc

SEQ ID NO: 348645 - DNA, 165 bp, Zea mays
  unsure (1)..(165): unsure at all n locations
ccgtgctgctatcccccgataccgatcgatagccgncgcgctgctgcggctcgactnccttcccaacacgccccgccgtcgcctcctatcgatcactcattttaccccgagcttaagctcgcgcgtacctgcctaccaatccgtaggagaggaagaggggacaag

SEQ ID NO: 348646 - DNA, 398 bp, Zea mays
ggttagggatacagagtatgaaaatccggatattaaaccttgagagcaatatctagggctgtttggatccttggatagaggtgtggtgagtagcaataatcccatgcaatatctactgttagctgggtggagccagattatgggattataggaatctgggtggttggatatatatttttttcaatctacatcgtaatgtgagctggtttgatcctttacatatatttttagctggttttcataatgtgtagccttccaaacattgccttagacttccttttccagtcttacccttccttaaatgcatcactagctgatgtcttattgctagcatgcaagcatgtatatatttggtaccatacagtaattgtacacgtttctcctaaccaaataatctt

SEQ ID NO: 348647 - DNA, 264 bp, Zea mays
gttctagatcgcgagcggccgcactagttttttttaattaaacgggtactacatactcggaagcctcaccaaggatagctgggggaggaatcaggttgagactagacatttattgcacaaatgctccaccatgcatgtatggaaggtttaagcatgaaccatggcaagctatacagcagtatgatgggacgttgaaacccatacgcaaaagcgtctggaaccagactacggttagaagtttatgctgtgatgctactggatcca

SEQ ID NO: 348648 - DNA, 62 bp, Zea mays
  unsure (1)..(62): unsure at all n locations
cgtctcgtgtttnncgcctcttctttcctcccttctggccggggtcccttaataaagagcag

SEQ ID NO: 348649 - DNA, 157 bp, Zea mays
ggggaacggccggtggtccacggaagcgcttttagccccaatccgagctccaaccagcgcgtttatccggcgctcccagtacctgtaatggcctcacttactaaatgccgcgcgctgggcatcgtccgggcgtgtgcgggggcagactgcgctagcg

SEQ ID NO: 348650 - DNA, 382 bp, Zea mays
  unsure (1)..(382): unsure at all n locations
ccttgctgactacaacatccagaaggagagcaccctccacttggtgctgcgtcttaggggtggaatgcagatctttgtgaaaacccttactggcaagaccatcactcttgaggtggagtcttcagataccattgacaatgtcaaggccaagatccaggacaaggagggcatcccgccggaccagcagcgtcttatctttgccggcaagcagctggaggatggacgcacccttgcggattacaacattcagaaggagagcaccctccacctggtgctgcgcctcangggaggaatgcagatcttcgtgaagacattgactggcaagaccatcacctttgaggttgagagctccgacaccattgataatgtgaaggcccaagat

SEQ ID NO: 348651 - DNA, 338 bp, Zea mays
  unsure (1)..(338): unsure at all n locations
tcgctccctcctccttcctccaaaccctggcgcaaaccctaatgtccaccgccggggacccttcccgcctctccggcgagtcctcgccgtcgtcctccacgtcctccggctcctcctcccactcctctggcgccgccgatgccgccgccaccaacctcgccctgacagcaccaacctccgccctcgccgatgacacagacgccgattcccccaccttcccgcgcgtggggacgtactttgagaccgaggacgacgcgtacgagttctacaaggcctacccggcccgtnttggctttgtcgttcgcaagtccaacaagtccaagaactcacggtacacc

SEQ ID NO: 348652 - DNA, 137 bp, Zea mays
ctgggctcctctgtttcctttcgtcaccgtcctcaccgttgtgttcccctctcagtctcggggcttcttctcgcgggcacctccggctgcttcttgccacgagaccacctgccagagcccgcgttctgtgagagagg

SEQ ID NO: 348653 - DNA, 85 bp, Zea mays
gtgggaataacctagcctaacgaactttcgctctacaggtcgtaaattagccccaagcgagacctaatggggagtaaccctcccc

SEQ ID NO: 348654 - DNA, 395 bp, Zea mays
gggtcttcagaccattagctttatctactccagagcgcagaagaacccgatcgacaccatgagggtgttgctcgttgccctcgctctcctggctctcgctgcgagcgccacctccacgcatacaagcggcggctgcggctgccagccaccgccgccggttcatctaccgccgccggtgcatctgccacctccggttcacctgccacctccggtgcatctcccaccgccggtccacctgccgccgccggtccacctgccaccgccggtccatgtgccgccgccggttcatctgccgccgccaccatgccactaccctactcaaccgccccggcctcagcctcatccccagccacacccatgcccgtgccaacagccgcatccaagcccgtgccagc

SEQ ID NO: 348655 - DNA, 214 bp, Zea mays
agaaaagggaaaaatcggagttctccctcgtgtcgtcttcctctccgccgcttctcctgtccaccctcgactgcttgcgcgtgacctgagccgccgccgcctaaatccgttcatcccggggcccgcctaaaccacgccgccaccgaccacgtataatcctgcctccctttgggccggtttcaaggctcgtttccttggggaccgttcgtttgcc

SEQ ID NO: 348656 - DNA, 81 bp, Zea mays
agcgcgcgtgcgttagaacaaagcatagccacggactacgaagatgctgacccaatgactagcctgcccaccactatgaat

SEQ ID NO: 348657 - DNA, 331 bp, Zea mays
tcggccgccatttcccgtgccccccaccggcgccccgccgccgacgcgatccccatcacgcgccgcccatggcgccccacctactcaccccaccagccctcaccgttacgggcgccgccgccccaggtcgcgtcggcagcgccggatcggcggacccgcggacgcccaggccacgcgcgccgtggcccaccttctgctcctcccccagcagagggcggcgggagctgaggaagaggaagggcttgagcgtcgcggcggcggcggaagtagcggagccgggtgggcccgctggggcgatgcggctcaacgagtacatggtcgctgtggaccg

SEQ ID NO: 348658 - DNA, 286 bp, Zea mays
  unsure (1)..(286): unsure at all n locations
ctcgggaaattactggactccatcatgctttatttgctgtctgataatcatgtgcttcattaggcatatgaagcatgttcgcataaaatggaactgactatctttgcggcagtaaactgaccgcgcnnaaaaaaaaatgaaaaaagcaaataaaaaagaactagataaaaaagggcggcgttaaggatccagctactcgctgctgcactctacttttatggcacctaatcaattatgccgcgttacaactctgctgggaacctgcgaccaactaatgctgagacat

SEQ ID NO: 348659 - DNA, 297 bp, Zea mays
ctcgtggcccacgtgcgggaaaactaccccaagtctgaagtggttgctccggcggattgcatcatgctagcgctgcgaacaactcaaacacaccggctttctttgaggacctgttgacatggaatctaatcctgtcagaacctgtgacgttcttagaggttctgctttggatcatcatgccttgaaaagaggaaccaatcatgtcaggtgatgctatttgagcaaagcaattctgactattcggacgcaacagtcatatagtcacagcggtataaaggatgcggatgcattgtgtgg

SEQ ID NO: 348660 - DNA, 368 bp, Zea mays
gttctagatcgcgagcggccgcccttttttttttttttttttttttttttttttttttttttttttttttttttttttttttttttaaagtaaaaaacggtaagagggcatgcatgaaacattaattttactcatgatcgaccacgacacacaacaattgagcacgcatgcaagctgtttttttttattcaaaaaattccgagggggggggacgacgacgacgtcctgctggtcctgcatgcatgtagtcctttacccacgacgggggtcgccgaaatttggggcgggcttcttcttcttcttgggggccgtgccggcgacgaggggcttgtagaccaccccggaaaggccggcgccaaccatgggcc

SEQ ID NO: 348661 - DNA, 361 bp, Zea mays
cacagccgcggatagagaaggaaaaatttccccaaaccctagcttcggatctcgatggcgaacccccgcgtcttcttcgacatgaccgtcggcggtgccccagccggccggatcgtgatggagctgtacgccaacgaggtgcccaagaccgcggagaacttccgcgcgctgtgcacgggcgagaagggcgtgggcaagtccgggaagccgctccactacaagggctctaccttccaccgcgtcatcccccagttcatgtgccagggcggcgacttcacccgcggcaacggcaccggcggcgagtccatctacggcgagaagttccccgacgagaagttcgtccgcaagcacactcggcccc

SEQ ID NO: 348662 - DNA, 374 bp, Zea mays
cagaccattagctttatctactccagagcgcagaagaacccgatcgacaccatgagggtgttgctcgttgccctcgctctcctggctctcgctgcgagcgccacctccacgcatacaagcggcggctgcggctgccagccaccgccgccggttcatctaccgccgccggtgcatctgccacctccggttcacctgccacctccggtgcatctcccaccgccggtccacctgccgccgccggtccacctgccaccgccggtccatgtgccgccgccggttcatctgccgccgccaccatgccactaccctactcaaccgccccggcctcagcctcatccccagccacacccatgcccgtgccaacagccgcattc

SEQ ID NO: 348663 - DNA, 322 bp, Zea mays
cggacgcgtgggggaccttacgcgccgtgggcctattgctcttcgactatccggcccacacccattgccacccaccagcaccttcggcggtccccacccccgcctacttccctcgtgttcgcggtgtggaccccgcgtaccttgcggcgttgacgcgcgaacgtcccgtcatccggtgagtgactgggagaccgagccttaggcgggggggtggaaccggacaccctcgccgggttgcagtatattgggcgtggggcgcatgcgctctctgctgctttcgttcacgccaccacctgacgtctattcgccactgagccaggat

SEQ ID NO: 348664 - DNA, 353 bp, Zea mays
  unsure (1)..(353): unsure at all n locations
cgctctcagggcagcaccagcgtgtatctgttaactagaagtaattcctctcgacatttatntttttcccgagcgtcctcttttcttncagcggcgcgtctcgactcctccncttcgtccgcatcggagcacaagcaagctcccaggatccgcgtctggatcccctcccgccgcccctggatccgctcccgccagcgcccctgggtccgctcccgcgcggcgcccctggatccgctcccgcgcggcgcccctgggtccgctcccgcgcggcgcccctgggtcctctaccgacgccgcccctgggtcctctaccgacgccgcccctgggtctcctccgcccgcccgccctgggt

SEQ ID NO: 348665 - DNA, 369 bp, Zea mays
cagaagtggataaggccgttagatgggctagaaaccactatctgtcatcaacagctcttccttctatcaagggagacaagttaatcattctccatgagagatatatcaattgagaggctgaaggaacatggtataacaactaagaaatcctctcaaaatctgaagaaaatgggggttggcacaccagccttaatcaaaggtgtgttataggtaacatttagaagtattggctttatttgttctcctagcatgtgctatctgcttcttttgttctgatgttgtcctgcgctgaatattgttctaatattgcccaaatttgcatattctaactttgctcatgtattttgagcacatgaacaaaaagagcag

SEQ ID NO: 348666 - DNA, 379 bp, Zea mays
ccagtagcaacaatagagcaacaatggcgaccaagatattttccctccttatgctccttgctctttctgcatgtgttgctaacgcgacaattttccctcaatgctcacaagctcctatagcttcccttcttcccccataccttccatcaatgatagcttcagtatgtgaaaacccagctcttcaaccctataggctccaacaagcaatcgcagcaagcaacatacctttatcacccttgtttcaacaatcgccagccctatctttggtgcagtcattggtacaaaccatcagggcacagcagctgcagcaactcgtgctacctgtgatcaaccaagtagctctggcaaacctttctccctactctcagcaacaacaatt

SEQ ID NO: 348667 - DNA, 214 bp, Zea mays
  unsure (1)..(214): unsure at all n locations
tgcagccgccgncgncaaaccacaccgggctcctntntggcggatagcggattgtgattttgatcggccgnccttanaccnnagnccagcccggcccgcgaaggagaagacaaagctgccgctgccgctaccgctacccctggtgcacggcgagcgtntgtgggcgcggccggggcggcggctgaagacggccgcggtcacccgccggacaaac

SEQ ID NO: 348668 - DNA, 346 bp, Zea mays
gccaacgaggtgcccaagaccgcggagaacttccgcgcgctgtgcacgggcgagaagggcgtgggcaagtccgggaagccgctccactacaagggctccaccttccaccgcgtcatccccgagttcatgtgccagggcggcgacttcacccgcggcaacggcaccggcggcgagtccatctacggcgagaagttccccgacgagaagttcgtgcgcaagcacaccgcccccggtgtgctctccatggccaacgccgggcccaacaccaacggctcccagttcttcatctgcaccgtcgcgaccccttggctcgacggcaagcacgtcgtcttcggccaggtcgtcg

SEQ ID NO: 348669 - DNA, 193 bp, Zea mays
aagactaaaatcgttctacacatggttggggccataactccagccgtgaggctttatcgcatatttaggaaaagaactaagggttttccttaaacaagatgaaaatcatccatttaggaatgggattaccacatatgcatccagtgatttggagaccaatgcactccaaatagaagaatcgctggacaaacta

SEQ ID NO: 348670 - DNA, 284 bp, Zea mays
ttctggaacaacactggttggatgcaagcggatgggggaggaagtcttgaagacagtggagtcactgaaggaagtggctgctgtgaactgatgcatgctggtacttgattcattgcattttattagaagtcgagccgagtgtaagagagcatggtgtggctgaactgatagccacttcgcatttctgtggtttgtttgtctccctgtagttttttctttggtacaaggaaaggataggcatatgtttgctcaataaaatgggatagtttatgccgctttgaatt

SEQ ID NO: 348671 - DNA, 383 bp, Zea mays
tgcgttcattattccacaatgctcactggctcctagtgccattataccacagttcctccgaccagttacttcaatgggcttcgaacacctagctgtgcaagcctacaggctacaacaagcgcttgcggcgagcgtcttacaacaaccaattaaccaattgcaacaacaatccttggcacatctaaccatacaaaccatcgcaacacaacagcaacaacagttcctaccagcactgagccaactagatgtggtgaaccctgtcgcctacttgcaacagcaggtgcttgcatccaacccacttgctctggcaaacgtagctgcataccaacaacaacaacaattgcaacagtttctgccagcgctcagtcaactagccatggtga

SEQ ID NO: 348672 - DNA, 360 bp, Zea mays
gttctagatcgcgagcggccgccctttttttttttttttttttatacacaccataatcatatttcattcttttaaaagctaggtgtagcaggacaattgaaagtctcatgcgatgagtgcacataattctcaaaaatacattaggaaattttggctagcggttaagtctatgtattttgttttaacaaaattacactacacacataccgacgtacgccgtacagttgtacatttgacctatgctcttgggctcaagtgttgagtgaccggcggcggcgagctggagttagacgtccccgtcgccgtcgtcgcacggctcgtggtcgaagtgtacggcacggtaacagaagacccaacgga

SEQ ID NO: 348673 - DNA, 261 bp, Zea mays
ggaagcggcgcctgcaggccggccgattccgtcgacccacctcgttcgcaggcgcacgaagccaaacctacctcataaacctacgctggtccgttgctcgcgcgtccatggctcagagcgtatgggactacgtcggtctaacagggcgagagcagagcatatcggacagttacacttaaggtggtggacaacccaagggcctgtggttgacagtgcagatggagcctgaaagctgatgggttaagcttaaacaacgcagct

SEQ ID NO: 348674 - DNA, 249 bp, Zea mays
ttgatcgcgagcggccgcccttttttttttttttttttaactcctaattcactcttttgatggaggacaatttgatgaggctatagtgtttgacaaactttgttttgtgaattagaggtattttgactgaatagttaagaaaactatacgaagtagtgtgaccggacacagccagacatttgatgatgctgctgcactgaaacactgacgcggaccacaataaaaaaccctgaaactttatcactactg

SEQ ID NO: 348675 - DNA, 222 bp, Zea mays
cgctagcggccgccctttttttttttgttgggtttttttttgatattttcttcattttttatgttggttgttttttatatacaatataaattataaaagagttgtaaccaaacaacacccaaatcccacaccaaatttaattattgaatatacgacaaaaatcatattatcttagactcccacacacgactatttgaagccaaaagcacgcatccattacac

SEQ ID NO: 348676 - DNA, 377 bp, Zea mays
atgcgtgccaatgcagttgccgccgtcaccagagcagtccaccttggtctgatatggcgaccggaagtgcaagtgccatcacgtccttctccatgggcgggtcagacagtgctgatgtccgcgatatgaggtcatgcgctcgagctggcgcttgggccgactactatcaaccgcaatcaggcatactggtgagcctaaagagtggcgcctaactggaacaacaagttcttctgaggggcacacagtcctatgccgaggccagttgatgccaagctcaggtcgttggatctcaagtaccagagacctacccgtcgcaagctttacctacacgatcgaggagtctctccttgccggcgctgggtgccagctgagcgtcg

SEQ ID NO: 348677 - DNA, 62 bp, Zea mays
  unsure (1)..(62): unsure at all n locations
aagaaggaaacccgccccccaaaacaataccgcccctacccnttaccccaacaacatttttt

SEQ ID NO: 348678 - DNA, 369 bp, Zea mays
ttggcaaattccacgccgatccggccccaccggtacttcaacgggcgccttcccttccgaattccgatccatcttcattcagccggcggcggcattcgcgagaggccatggacgtgagcaggaagaagaagtgggtggcctgggcggtggcggccggcatcttcgtcggccttatgcttgtgacgcccggcattccgcaggacgaagcctaccacgacttcgcggaccagcgcacccttttcttagggattcccaacaccttgaatgggatctcaaacattcctttcttctttggtggcgtcacggggctcattctgtgccacttcaacaactatttcaggctaagcttgcagggggagctctggagtt

SEQ ID NO: 348679 - DNA, 299 bp, Zea mays
tcggggtaaactggagtgatttaagactgtggtattgtcattcctgcgttggtgtaaacgagaaatgtgatttgacattgcggagggtaatgcttccgaggatagcttacagggatgcataagtgcttccttgcttaaagatgaaccgttcccaagaggagcacaaacctggtgggagggttcaaccgtacttaaaacattagcgcatgatttttcaaattctgggtactatgctggttgggcaatacaatctgaacggtgcacaaacaattgctggccttgcgctcgaatgcctattc

SEQ ID NO: 348680 - DNA, 202 bp, Zea mays
  unsure (1)..(202): unsure at all n locations
tcggaaacgatggacgataacccttgtgtccattccgaaaataacttggtttcttctggtctaatacaaatgcgctgggcatggattggtgggtgttgcaggggtgtaccagagcacgggtaatgcggcggagggcaaggggacggttttttnttnttttnntntttttttttttttttttttttttttttttttattttta

SEQ ID NO: 348681 - DNA, 341 bp, Zea mays
  unsure (1)..(341): unsure at all n locations
cgaaanncccggntttcccacccctttggcaaaatccacgccgaacccnccccaccgctactttaacaagcgccttcgcttcctaattccgatccattttcattcaaccggcggcggcattcccgagaggccatggacctgagcaagaagaaaaagtttgtttacttttccggggggggcagcaattttccaaatcttattcttggtatcaaccttacctaaaacaatagcgcaaaaattttcaaattctgtgtccccacccttttttttaaggatttccaacacccttgatgtgatctcaaacatccctttcttttttggtggggtcaccgggcttattc

SEQ ID NO: 348682 - DNA, 161 bp, Zea mays
gacttactatagggaaagccggcacgcctgtccgtacccgaatttccttttcgacccaccccttccgtaacttattgaccataacccttgtgcccggtgggaaaataaaatgttgtggggtgttctaatacaaaagcccttggcatggattggtggttgtt

SEQ ID NO: 348683 - DNA, 285 bp, Zea mays
tggaggagcggcggcgaggtctatgggggggatttttaagtacctggggcggttctcaaatcaaaacgtgctgatgttctttccctaccaaatggataattatggcccttttggggcaattgttttttgtggaggaattcaattagaaagaataaattattggtctacttcgtttgcttggtgaaaaaatgtaaccttaatttattcttacttgggacaaaaaaaaaattgcacttcatgttgctaaattttaataagtagcttattataacagggcttaatttt

SEQ ID NO: 348684 - DNA, 196 bp, Zea mays
tcgcgtcttcacacgggccacggcgtcgtcttcggcgaaccttcgcgaggccttgggttccctttaccaccggtggcgcgaccccggctacggagcattcttgggtagcgctctggctttccgtgccggcggacgttctgcaggagggggggggcttcggggcatggtgatgagggccgtcggttatcttcctttg

SEQ ID NO: 348685 - DNA, 144 bp, Zea mays
acacaagtgcaacaagagcggcgtacgggctatgcgctaaaggcgtttcttaacctactgctacactctgtgatgacatatgccctgattacggagacggccgtacgggcctgtcgcagccccgccctgggcccgcgcagtctg

SEQ ID NO: 348686 - DNA, 364 bp, Zea mays
tcgtttgaatctaacgcgctgtcaaactacaatcgttctacaaaaccactaaaggcggctgatcatttggcgggaaggccttttttgcgtgtagtccaatccttggaggcccgttcaacctttgcgctgcgcaataaaagttcgaccatcctatgatcattacttatgttctaggccaacccaatacatccttggttggtttttttaccgagtccgagagagttattcgaaatccaacctaccaccagggtttcttaaaccctagtaagactgctgtttaatgacaatcggcatttctttcagatgctacaaaactcaccatggctgggagttattttgacctggcccatcaaggaagtttaaa

SEQ ID NO: 348687 - DNA, 154 bp, Zea mays
tcgttgtcccggactactatccccgctaccggtagccgccccgctgctcatttgggggctgctcgccttccttcccccattcggcggcggcggcttcttctttagctccctccttaccccgagctttaagcttgggctaccttcctacctaacc

SEQ ID NO: 348688 - DNA, 402 bp, Zea mays
ttgagcaatcgcagcaagcaacatacctttatcgcccttggtgggtcaacaatcgccagccctatctttggtgcagtcattggtacaaaccatcagggcacaacagctgcagcaactcgtgctacctgtgatcaaccaagtagctttggcaaacctttcttcctactcttcgcaacaacaatttcttccattcaaccaactgtctacactgaaccctgctgcttatttgcagcaacaactattaccatttagccagctagctactggctactcttaacaacaacaacttctttcatttaaccaattggccgcactgaaccccgctgcttatttgcagcagcaaatactactaccatttagccagctagctacagcaaggcgtgctttcttcttgacacaaca

SEQ ID NO: 348689 - DNA, 279 bp, Zea mays
tcgcgcttgaggagcacaacaatagcttggtgcataaggaggcgcttcggttacagatggccttcaaggagaagttgcagccttccgagattgaggggccggtctatgtcaaaggtaaagctttatcgaaaacagcagcatcaatacttgaatgtgtcctaaggagggatccccatgaagctgaatatatacagtcgatccaagaggtgggtcattccttagaacctgttttggtgaagaatgcccaatatattcaaattttggagccgttggtggaac

SEQ ID NO: 348690 - DNA, 146 bp, Zea mays
gggaaggcgggcccccggccggaaccgttacggaatttccgggccgctttaaaagatgcttgattaccgacgcttccatgcgagggtatagcttttttaaaggggcaccgaaaatgaatttagtggaccctggttaacaacggtcc

SEQ ID NO: 348691 - DNA, 227 bp, Zea mays
gtcgcagcagcttctgcttgctctggggggaaggagagagagagagagccagagagagatctaatagagaggctagtaggtggtcctcgaacgaagatgttggcggtgttcaacgggcaggtggtggaggtgccggcggaccttgtggcggcgggcaaccggacgccgtcgcccaagacgaaggcgttgcaactggtggggcgcttcctggccccgttcgaaccggt

SEQ ID NO: 348692 - DNA, 130 bp, Zea mays
tgtcgtataattctaactaacagcccttgaccggcttatgttataagcggggggggggggctacctgcattacagttgcagggcccaccttccggcgtggcgggggcttgggccgacttacaggggtggg

SEQ ID NO: 348693 - DNA, 90 bp, Zea mays
tttgtaggggggattcggaggagtaaatcctaacagccgttttgcgccggtggtccggtgcccgcccgagatcggggggggggggggggg

SEQ ID NO: 348694 - DNA, 348 bp, Zea mays
tcgccttcccttccggttgcctcctctcgctggctcgtagcttctttccttcggcgaccgctgggcgagcggccgccagtcggtcccttcgtcggcgacgagcattcacctgcgccggcgccccatcttccggtccctttcttactcgcgctcggccacaggcgacggcggcggcgctcaagatcgggctatcaccgacggggtccggctttttcggccggcttttgccactcgccttgcgttcttgccttcgggtcttcggacaccggccggtgatcctgcaagggttggatgatgggcgagatctgaaagatgctgatttttataagcagcaagctaaactttttt

SEQ ID NO: 348695 - DNA, 256 bp, Zea mays
tcgatcaaacttttatcttgatggcttccaagggccctagggccctagactttggaatcttgcatttgggctcttctgatctggtgtgatactgatgtaactgaacaacgaactaattatattagaggtggggtggactctttttttctttctaggggttttttacgagggggaaggttttacctagaaagggttttaggggggcctaataaaaataataattaatattttaaatataatagtattaattttatct

SEQ ID NO: 348696 - DNA, 337 bp, Zea mays
tcgttttccgctttgcattcgtcaatctggttgccatcagcccccacgggccacggcgccgaccacttaacattccgccttggacttggacgggatcagcacgttggtcggggaagcaagggtccagtccattcattcgcgaccgcgagtaggaacaggaattgacggcggcaagggagtagaggagggaccggacacgggaagagaggaggagcttgcttggacaggcggtggactggtgctggtatatagatagctactagaggtaggccggcggacgggcgggccggcggccaatgctgtcgggcgcgtaaggctaggaacattggccgagggg

SEQ ID NO: 348697 - DNA, 368 bp, Zea mays
tcgcacgaatggcagatgcgctcttttcgggcgttgctggtggtccccttcgtgatggaatccgccagttcaaccaccaggtctgcttttgccgaccaggcaagccttttggcgggctgcagccttgccggcagcaggtttcttaaagctgccttgtaccaaggatgctgagacattaacctcttgattggcttctcttcagaatcgcttcacggaacaacgttcagcgcccggcggcggacccagcaaagcaagaggcgggcattcggtgaccgacgacagccgcacggaaacagacgaacccacggaggcaggcaaggtcgggtcgttgattggggataccccttcccgggagccgattccgtcgg

SEQ ID NO: 348698 - DNA, 223 bp, Zea mays
tcggaagaatgttgctgtcaaggatctcaagcgtgggtttgtggccttcaactccaaggatgaccctgccaaggaggctgccagcttcacctcccaggtcatcatcatgaaccaccctgggcagattggcaacggctttgccccagggctggactgccaaacctcccaaatggttgtcaagtttgctgagctcattaccaaaatcgacaggcgtgttggcaag

SEQ ID NO: 348699 - DNA, 252 bp, Zea mays
  unsure (1)..(252): unsure at all n locations
agatcgggagcggccggccttttttttgtttttttttgggngaacggacaaggataccgaatcattaattcaattacatgagcgacttggcccttacgtacctttttttaaaacataggttcctacctatatatatctatatctatatatttcctccaaaccggattttacggaaggaaaggaaggggaaaatttggtgggaacccattatttcaaggaccaggaccaatttgccaggaggagaagaatttt

SEQ ID NO: 348700 - DNA, 351 bp, Zea mays
tcgttccgatccccccgggggttttccagctgggggctttgtttaccggaaccaaaaactaccccccaaaaaaaagaagaaaaccccaaattcttgagatctattaatttcgagccacttaccaatccgattgctagggtttaggttcggaaaaatctgaaaaaaaattcttgtcgaggggaggaggccatgtccgcccaagtggcggtggttcctaatgggggcccgggcgctgtccccgcggtggtgtcttccggagctgtcggcatggcttaagcccttccgaccaccttgctttacattggcgaacttgaaggggccggcttggactttcaggtgtaccaacttttc

SEQ ID NO: 348701 - DNA, 150 bp, Zea mays
  unsure (1)..(150): unsure at all n locations
tcggtagttctagatcgcgagcggccgccctttgttttttttaacttctttgctgcggcgaccggtgggcgagcggccgccagtangttcctttgtcggggacgaggattcaactgggccggggccccatatttcggttccttttttttt

SEQ ID NO: 348702 - DNA, 232 bp, Zea mays
tcgtttcgagtacgccggcaactttcccattcaggagtttctgcaggcgcagagcattgtggcgcccaacggctacattctggggggtggttttggcgaccaggcaagccttttggggggctggaagcttgccggcaggatgtttcttaaagctggcttggaccaaggatgctgagacattaaggttgctgagcttattaccaaaaacgacaggccggttggcaaggagctt

SEQ ID NO: 348703 - DNA, 246 bp, Zea mays
  unsure (1)..(246): unsure at all n locations
cccgtccgtgagatagtgctaacaaagatctcgcgtaacattccaaacgcttggggttcggggtttccattgccgccgccgccagnaattttaccttccaagtcattatcaataaccacccttggcagattggcaaccgcccttatgactggaacgtatatctcttctttcaccatatcttaaaaantnnaagggctttccctcgctcgccgaaggccaagaagttgaatttttccttttggaagg

SEQ ID NO: 348704 - DNA, 310 bp, Zea mays
tcggtcccgaccccgtcctggtcggttcggcgttcttcggccggcaaccggcggactggcaaagcccggaggcctgaggcccgagttacccgaggagcagcagaaccagggggccggggccttattccttaacgggcacgccagtgcgccgtcggcgcggagtgagcaagaacaacccgtggctggcgggcaatcgctggctagctggagcctggaggtgcgacttgggagccgcggtaggactcggcctacctataaattttggctggcttccgcactgattccaaccgttctggtggcggcgacagaa

SEQ ID NO: 348705 - DNA, 237 bp, Zea mays
tcgaaaaaatcgagccgaaaaagatcaaaagaaaaaaaaagaagaaaaaaaccctaaccactccgatcgaattattcgagggccgcagcagcccggcgaggctatgtcttaagcaaccggcggcttccgggatcgctttccctggtgatacaactcgggccggtcatttcgtcttttcgtggggatatgagggccggttcgaccgatccggccacggggccggcgaagtcgatgctt

SEQ ID NO: 348706 - DNA, 167 bp, Zea mays
tcggcgcaagcggcgccggcacacggagcagcggcgagattgaccaggtggtagaagcggaccccgataccgaggccgaggatcaagaagagaggtgggccaggcttcttcccgagcttcttttcgacctggtgcggcgcgtttaggcgttccgcggcgaacggtgg

SEQ ID NO: 348707 - DNA, 379 bp, Zea mays
tcgcagatgcgcacgctggaggcgggcaccggggtgctggccggaacgcaactggcgtacgtgctgatgctgcaccgcgccgccaccgtcgggtacgcttgtgatgaaaccggtgctaccggctaagccggcgctggtggggaccagtgcgagcctggctgattcaaccgcaccgacgacgagggcgactactaatgtcaaggcgcgcagttgcagaacgatggacgacaccagcaacaacccaggcagggccgggggcccttgctcaacgttatgtgaactaggatacccatggcatcatgtttggttggagaagctttttgggctagcgattttcggggaagagtttagtcacgtggaaaataagcaattgaaactt

SEQ ID NO: 348708 - DNA, 275 bp, Zea mays
tcgggggttctcttttttggccgggaccgctggtcaagtttcggccgtccggtcaaggttcattgagcccttccccacgacggattattctttagatggaaggcaccatgggttggggcatgcaatttttataacttgctgctaccaatggggtcccttctaagggttacggcgccaagggcccatctgtgtacatttcaattgtctttcacgggcgtgcggaatcctttgaatatcgggatgcacccttagataaaaagcttgtccttaatgat

SEQ ID NO: 348709 - DNA, 319 bp, Zea mays
cttccatttctcgtggggcccaccggccacgggcacgccgtagatcttcttcttggcgcagggcttcggcggtcttgccggcggtgagctgaaacgatggagctttggagcaagctgcgaaacctggatgcctacccgaaagggaacgaggacttctacaggcggacccttttcggcgggcttattaccattcttttcttccttggcattcttcttcttttcttcttcgagatccgactttatctatattctgccacggaaaggaagctcactggtgataccttgagaggggaaagactacatatcaattttgatggta

SEQ ID NO: 348710 - DNA, 381 bp, Zea mays
tcggagaaacacaccaagcgaagcacattagcaacaacctaacaacaatggctaccaagatattatccctccttgcgcttcttgcgctttttgcgagcgcaacaaatgcgttcattattccacaatgctcacttgcttcaaggtccattattacacaggtccttccaccaggtacttcaatgggcttcgaacacccagctgtgcaagcctataggctacaacaagcaattgcggcgagcgtcttacaacaaccaattttccaggtgcaacaacaattcttggcacatctaacaatacaaaccatcgcaacgcaacagcaacaacaatttctaccagcactgagccacctagccatggtggaccctggcggctacttgcaac

SEQ ID NO: 348711 - DNA, 114 bp, Zea mays
caagacgccagtagaattatctcggcatcatctgcaacgcctgtgcggggtacaatgagagagcgagtgataggccagataaggagccgccggctttcggtggcagcttcattt

SEQ ID NO: 348712 - DNA, 75 bp, Zea mays
tcggttctagaacgcgagcggccgccctgtgggttattttataagaaccgggggggacaccaaaaaaggaagaga

SEQ ID NO: 348713 - DNA, 288 bp, Zea mays
tcgtaacaagcctatatcatcttccaaatatacttggtccgtgccggcgggcttcccttctacgcccctggcgattcttcaatcttcaccaacgtctgggcgtagcaagcttgcaatcggcacgactttcttagatctggcggacgacttgctggtcggtaccgacttaccagcaaccaacgtgaggcattagccggcagcaggggaagctgggcggagggtcattgcggcacggcgttcaagcgtacagcaggcaccagcaacaggccatggcaaacgatgacccta

SEQ ID NO: 348714 - DNA, 85 bp, Zea mays
ccccgcacctacccggcccgcaatccccggtccacccacaccttccgttccaaaaccccaaccgccccccctttttttttttttt

SEQ ID NO: 348715 - DNA, 85 bp, Zea mays
acctaacaaggctaattatattccaaatattgtttgccagggccagagagataggattctacgcccctggcggatttaaggtgcg

SEQ ID NO: 348716 - DNA, 342 bp, Zea mays
tcgggccgccctttttttttttttttgggacggtactttttttcttttgatgtcaaatggataaataggttattggctaaactgaccatgctacccatggggattctttacacatttaatattcctttgacccacaattgcagttgccagcttcatgtttccagggcttgcgacctggttcttaatttaatgaccttttgtaaggatctaggggtctttttggcgattcagcccataaataaagtgtgaaataaaagccgcaggttgaggcaggaaccttcttatttgagggaacagatttgcctgtgtttggttacattaaatatctgtttcacagatttt

SEQ ID NO: 348717 - DNA, 348 bp, Zea mays
tcggtcaggcacacaccttaccacggcagacgggaccacccttcttcaccttcacgccagaattcatgctttcagagctaaattaaccacgcttcggtcatcggttcttccaccttcaaaataatccaggctcaggccccacactggccgcaaatccaacctttttgggctcaatcaaccttcaaatctacctttttcgtcactccatcctggcctaaatcccgtccctcccccccaaagtcatacctttcccactgcgcccccctgcagaaattcatagattcttcgccacttcgattgtccgcttcatgaatccggcttcgcgcgcccaatttcctgtaaaggccc

SEQ ID NO: 348718 - DNA, 293 bp, Zea mays
tcttccggaggcaccgaaattttccaggcaagggaaaatcccgttcgaaatccaacgcttcaaattcgttcgtcttctaggcgcttccccgaacccgtcacgaattccttagatccccgctgaaatcccttaatccttcgtgcttggcggcgccggcttcttccttggaccgggccgccttctttcgcaatcgtggccgcattttttcacccgagggttttggtttgcttttgctcttttcggtttactggcttcacagattggcgcgacccgtccgtcattgtggacctttt

SEQ ID NO: 348719 - DNA, 195 bp, Zea mays
  unsure (1)..(195): unsure at all n locations
tcggccggtaatccccttcctaatcaccattcatccatccatccggtaggatttcccagccatgtcggcgactgcggggaagtttcccggggaggcgccgcccaggacagtgaagggcaccaacgtctttcttagggcaaccgtgccaggccntaaggggttctttttcttttcaggagatattgaacatgttga

SEQ ID NO: 348720 - DNA, 55 bp, Zea mays
tcttttttagattgcttatgagggataggtcgataatggaattttgtgggaaggg

SEQ ID NO: 348721 - DNA, 201 bp, Zea mays
cccaccgtccgtgagatggatcggccaggcagttttatcggggatttcctgggaacacggggagaagctgacgagcacttttccgctacgggaggtaacgcaggccgcgtatgcgcgacaagatcaccggccgcccccgcggttgggttcgcgcttcgggtcccgccgcgtcacagagcgctgaagaccccccaccctgac

SEQ ID NO: 348722 - DNA, 250 bp, Zea mays
  unsure (1)..(250): unsure at all n locations
ttggttctagatcgcgagggggcggcctttgtttttttttttttttttttagggtttttttttattttttttttttttttttttttttttttttttttgggaaaaagtttgtaataggaagggggaattttaaaaattaatgaaaaagccntttttgggaattggaggaataattaaccgaaaattaaaaaagttcaaaanttgtatgatagtaaaattttaaaaaataaggttacatcaaatataaaaa

SEQ ID NO: 348723 - DNA, 84 bp, Zea mays
tcttatccactcaaaaaccctccagcttctcatctttcttactttcatacaattcttggtaccagcgcactatccatgaggacc

SEQ ID NO: 348724 - DNA, 92 bp, Zea mays
cttctgtagaatcgggatcggacccattgccgggtttagcaccaatagtagcgaagccacttgttgttggtaggaacactcaacccaacccc

SEQ ID NO: 348725 - DNA, 333 bp, Zea mays
  unsure (1)..(333): unsure at all n locations
tctagatcgcgagcggccgccccttttttttttttttttaggcatagaaagacctatggcatagaactaaatctcacgaagaatcagaataagattgaacttaccaaaccgacccttacaaacaccgatgccggcacaaacaaacagncccacgcacatactgggagacacaagcatgttgacacacacataccaccataatagatagggggcatacacaccaaaacggacacctgacataccgggaattaaaccaaggttaaaatgcttattttccacgagaccaaacacgagcaccggaaatggcaaggccagggagcgacaccaccaaaa

SEQ ID NO: 348726 - DNA, 66 bp, Zea mays
tcggattgtcggcccagtttaaattaacccattcttgcttgctccgactagcaagctgggaccctt

SEQ ID NO: 348727 - DNA, 132 bp, Zea mays
taactcggtgtcctcgttcaccccgggttccggtcggtccattgagccaacacgccagtagctgctgacgcctaaaacaccgggaaagacccggcttcctttctgggggcagccaggtccaacgcccgtagt

SEQ ID NO: 348728 - DNA, 141 bp, Zea mays
cagtaaataaagggcggtcgctgatttattgactgggctccttgcaacttttgttaaatccaaaagaccctgattgcaaatagaaaggacttgcacgcaaaaacaccacgagggagaccaataattcgaatttatttgggc

SEQ ID NO: 348729 - DNA, 338 bp, Zea mays
  unsure (1)..(338): unsure at all n locations
tctttcaggcaatggcgcgaaccaatcgggaggtgcacggatcggattcggggagcactcaaacccgcagatccttaacttgctccgatcaaaccatggtgaccgccttcaagtgcttttgaacagcgaccgcagaaaggtgtgggttcaggngccaacccatccatcaacgttctttggcaatggtggtgatcttcttcatgtaaaatagacaggcactgcggctaggagattaggtaaattagaattgcttctatttattagctaccaacggccgggggttctaaacagacaaccaggttaattagcaattgcttctttttttgtgaaaagattgg

SEQ ID NO: 348730 - DNA, 77 bp, Zea mays
  unsure (1)..(77): unsure at all n locations
tttggaaaattnggtnttttaaaaaaaggggggaaaaaaaaaaaaaaaaaaggggaaattaaaaaaaaaatacttaa

SEQ ID NO: 348731 - DNA, 246 bp, Zea mays
ttctttcccgagggctgaggatatccttcaacccatccacctcacgaggaatcagcactcgcttttgctccgcgatttattgctcagggttcttgctgggtggtggtggccggtggcaccagcagtagttcacaagagcaagctgttcttgtgtgcgtgggtctatgcctgcttgcttgcccaggggaggagaaggaggccgagttctgggaagtggggagttcaagtaccggcatttcttgggcg

SEQ ID NO: 348732 - DNA, 194 bp, Zea mays
  unsure (1)..(194): unsure at all n locations
tcttgcaggtccccgtgcgaggaacaggaaccggtgctgctttttggcttcggttcgaaccttcttgcgctcgagaaccgggacgcccacgcccttccttgacgcgttggtgatccgcgagctcagaactgcatattaaagaagaatttnccnatattccggggaacatgaaaagaaaggccccattaggaaaa

SEQ ID NO: 348733 - DNA, 311 bp, Zea mays
tcgtcttggacccggcccttaacttccatgggctttcgccgtcggttacactggggcccaacgctcttccccgcgttcgggcccggcttcttccccttacccttctccttcttttggtggctccactgactttaggcgaccggccccggccaccggcattggaaggcctagctgctgcaggaactggcctggcggcccgccggttcttcggttggagcgtttccggtttcttggatgcaccggctgcttcgatggctggcctttcgcccgccggagagggccccgacgccgtggagatccgtgaagtttgg

SEQ ID NO: 348734 - DNA, 244 bp, Zea mays
tcgatatactagagagggacaaagaaaattctatgggctctaagatgggcttaacaagcgccactggctttgacctactttgctccttaagtcatgacttggtggtgtaactaaacatacccagtttacaactttgggcatgcctctaccgattttttgcatcagtctgacattgagcctaccttcagcttagggttttgggatcagatctttattgtttccacttagggggggtcttccacta

SEQ ID NO: 348735 - DNA, 185 bp, Zea mays
tctacactggggaccctagaccccaagcaccggcgcggctgcggcggcttccatggcaatcgggaagaacaagaggatctccaagggaaagaagggtggttagaaaaagaccgtcgattccttcttttagaaggactggtattacattaatgccccatcggtcttcaatggtggcaacaattgga

SEQ ID NO: 348736 - DNA, 298 bp, Zea mays
tcggagtcttcacgcggaagcagcgcctagcaccgcttctacccaatggcgccgacgttgaagctggcgatgggcattaagcgcgcgtcgcggtcgcacgcgtaccaacggcgtgggctctgggccattaaggccaagaacgggggcgttttccccaagggcctgaaggcccgccccctcttggtacccaagttataccccgacgactccagtacgtctgggttcccaggaccagtaagccttattccagcaaggttagggggtgcatcacgccttcgtcggggctgaaccttcttgc

SEQ ID NO: 348737 - DNA, 259 bp, Zea mays
tcggtcaaacacgtcaatagtagagattttggactagatttgtgcaaaacacttgaaaagaaaagggcatcgtaaacgccgccggcggctttgatgcttttcgccgtgcgatgtggtgcccttcggcggtggggcccggctacgtaacttcttccacgcattctttactgcttctttggtacattttccgcgcgaccacctgggggggctcttgtggagctccccgagggggaggaggtactttgcgaattacgagctg

SEQ ID NO: 348738 - DNA, 299 bp, Zea mays
tcggccaacaagcaagaccggttctgcttggggtccgaaacctttctttgaacgcaaaaagaaccccacccgacgtaccgcgagccggcgatggcgaccgtggccatggacatcttgaagcccacgccggcagcgttcggtgaccaggcaacggcggcggccaaagggaggagcggccgctggggccaggggcttccgcagttctacctgcaagacattcatgaccttgagcttcagatccggccgaagacccataaccttaaccggcttgagggccagggcaacgaccttaacttccg

SEQ ID NO: 348739 - DNA, 319 bp, Zea mays
acgaccttccccttacctattcgccgtcccttttctggtggccttcccacgccggcggcctacgggccaacccggcgacgcgccaacttcgtatttttctttcccggctacgcgggcgggggatcttcggatccgcgcgggggagggagatccggattggatgggcctcttcgggcgcgggtaggccgggctgatctgatccgacccgtgccggcggggcaatccgggcagggtggctgggaaatttcggacctgggcggtggtgatcccgggggagagggcgggccttgctcgatctccggataaaagctgggaattt

SEQ ID NO: 348740 - DNA, 147 bp, Zea mays
gtttctctcccggttcgtcccctcttctgcgacgtcagggttgggttacggcactcgccgacgacgtcctacgcaagtgccgaggccttcatcgatctcttagccgtcgacaagcacccaagagatgcaagattgaatgagaccgca

SEQ ID NO: 348741 - DNA, 263 bp, Zea mays
cccttctttgtaagaacttcctccttaactacttggcggcctccgttattggcaggtggtattccaactccatggaggaagcttgagatctcaacaaccgttggaaagcattagctggctgtgcttactcctgctggaatgtgaagttccaacaagggccaactgggcatacccaacaattagcacaaccctaaagtgaactgtcctgaataaggcctctaaaacttgattaattaaccaaaccttgctcatggtttaaaaat

SEQ ID NO: 348742 - DNA, 196 bp, Zea mays
tgctgtctaacgagtctgggagtgctgtttcaggtttactttatcaaggattgagggcgaaacaaaacttctactttcatccactgacaaatgatgtgacaattgcttttagctcaagcaattcagacaagcttctcatcttcaatggtaaactaccaacatattttgacctgaaggcctcaacaacttttggtta

SEQ ID NO: 348743 - DNA, 219 bp, Zea mays
agccttccatcgttcgcgcgggagacgtaaattgcggcttcggaagcggcagcagcggcggcaacacccgtgactccctcagaggggaccgtgattcccatccacaagctggaggagtggagcattcaaatcgaggaggcccacaggaccaagaaaatgggggcgaacgacttcactggaacattgtgtgcttccttccagggcattgcctcaattttt

SEQ ID NO: 348744 - DNA, 393 bp, Zea mays
atttagcatgcgagaatttagggccaatatcagggttatttaacagttttacacacgaactgctgctgcaaatacagagtcaacttctgtcactaaactaccattgacatttcaatagcccctataaagctattggagatggatattcaaataaaaagacttaccacatatcgtataggtgaagaagtgcatgctctttatgtttccaaaaagacaaaaaaataactttggaaggggttaatggatttcaacataacttttggtatctttttttgcgatggaagcttttggtatcatcttttggatgggaagcatatgtcagttcaactaaatacaattctatggaatgtgcttcataaatttagcttggcactacattgggaaagggtttgt

SEQ ID NO: 348745 - DNA, 340 bp, Zea mays
tcttccaaatccacccgtcggcaccttcgcttcaagatgcaaatctttgtgaaaaccctgaccggcaagactatcaccctcgaggtggagtcgtctgacaccattgacaacgtttagggcaagatccaggacaaggagggcattcccccagaccagcagcggcttatcttcgctggcaaacagcttgaggacgggcgcacgcttgctgacttcaacattcagaaggagagcacccttcaccttgtgcttcggcttaggggaggcatgcagatctttgtgaaaacccttgccggcaagactatcaccctcgaggtggagtcctctgacaccattgacaacg

SEQ ID NO: 348746 - DNA, 289 bp, Zea mays
cgggaagaacttcgtcctgagcgacttggcggccgccgtcatcgccagctcgtatgccatcttcatggaggaagctgcagagctcaagaaccgttggaagcatgagcttgctttgcttacttcttcttgcaatggcaactaccaacaaggtcaagctggcaacgcccaacaataggcacaaccttaaagggatcctgccgaattaggacctgtagaccggaataattaaacaaaacttgctcattggttaaaaaaaaaaaaaaaaaaaaaaggggcgggcggttttaaa

SEQ ID NO: 348747 - DNA, 349 bp, Zea mays
gcaacatagaaagcacaatagtgtaccaacaatggcagccaaaatattttgcttccttatgctccttggtctttctgcaagtgttgctacagcaaccattttcccacaatgctcacaagctcctatagcttcccttcttcccccatacctctcaccagcggtgtcttcaatgtgtgaaaacccaattgttcaaccctacaggatccaacaggcaatcgcaacaggcatcttaccattatcacccttgttccttcaacaaccgtcagccctattacagcagttacctttggtccatttggtggcacaaaacatcagggcacaacaactacaacaacttgtgctagcaaac

SEQ ID NO: 348748 - DNA, 74 bp, Zea mays
tctgaccattagctttatctacttcagagcgcagaagaacccgatcgacaccatgagggtgttgctcgttgccc

SEQ ID NO: 348749 - DNA, 244 bp, Zea mays
tcggttctagatcgcgagcgggcggccttttttttttttttttaacaaaaaattaatttaccggtgaaaaggagtttaacaatgtcttgccatggatgaatgatgattcaaatttgttcacgcctattggtacaagcttacgcttcaaaagtacaattgaaaggtcggtcttttttggcaattccaaggctttgtaaaaagggcattaaaaggaaggccgggagagcttttacaaatggatggg

SEQ ID NO: 348750 - DNA, 339 bp, Zea mays
gtggtgttcaaccttcgccggcttcttcaccggcagttgcaaatggtccgcggccaatgattccaccgccacctaacttcacttctggagcacccccaccacgcccttcaatgcatggttttcctgggcaacaacagcagtagttaagtgcttagcaatgttccagtaattgacagtcggcaaaagtttcacgcttgcttgtgttgccttatgttttccaactcgaaactttgaatggtgtcataggcttacatggtctctagactatactcaaatttggtcaaattgcaagaaattgagttacatcaaaatattagggtccaaggaaggagaccattt

SEQ ID NO: 348751 - DNA, 302 bp, Zea mays
tcggagcttgcttcaacttcgacccacaaccacgggacggcagtcggcagcaggcagcgtctaacgcaattcccttttgttttgttgcttctaccttcccggccagtattaattacaagcttccactttcgagttttggttgcaacctgttcttctggggtcccatcggaggggggtgaggagattgaaccagattccgcttcctccaggctcgcatttgttgcgcttattcttcttgcggcgcccggccggccagccttggtgggtaccgtggaggatggcctggttaacaatagtgactt

SEQ ID NO: 348752 - DNA, 269 bp, Zea mays
ccggttacgctgttcctttagtggacatgtatttactgggcccggcgttggttcaatggtgaacccagttaagttttttgccgaaaaatcaggttaagattggccctccgggacattgaatatacttcggggcgatcatgacggaatatgaagctttttcccaaggtggggacttccgtgaattacggcagatcatatcgagatcggttattatttgaaaagataaaagcaacttgggaggagtgtgaatcaacatggaatggtcttat

SEQ ID NO: 348753 - DNA, 354 bp, Zea mays
gcgcgtacgcgtacacagccccgatccgaatcgtccttctcgcgagccttgccgatcccccactccccttcccttgcttcaagatgcagatctttgtgaagaccctcaccggcaagactatcaccctcgaggtggagtcttctgacaccattgacaatgtcaaggctaagatccaggacaaggagggcattccttctgaccagcagcggcttatcttcgccggcaagcagcttgaggacggccgcacacttgctgactacaacatccagaaggagtcaacccttcatttggtgctgcgccttaagggaggcatgcagatctttgtcaagaccttgactggcaagacaatcaccc

SEQ ID NO: 348754 - DNA, 142 bp, Zea mays
tctgcgatcgatcggcagcgggtccttctggcgcaccttcttcccttcccctccggcggcttcttggaggcttagcttgcggcgtcggcgtgcgcggccggggacagggccgcctaccagaggtccttcttcttcggggacg

SEQ ID NO: 348755 - DNA, 274 bp, Zea mays
tctttttattctttcttcgtgggcaacaagggagcacttttaagggtttcgggccggttcgtggcctgttactcgttataactcgtcttcggtgcctttttttttgtagttgagcatgcttgagaatttggttctagttatttgcatttctgagcgtttccttgcacgttattttctaccccttttgtgaattgtgtttttttttcttcctttttttacctgttacattttcttttctattatcaattttttcttttctacactttttttattt

SEQ ID NO: 348756 - DNA, 387 bp, Zea mays
gagaaattccccatcgatctcggtcttcttttttcttccttttttggggcatggatcgcgccggcgcattggcggccggcgtggaggaacccgtcagggccaccttcgttcttgacaggcttggcgcggaggtgcttgcggtcatgtccccggtcttcatctgcatggccctcgtcgtgctccttattttccttcttttgccggcggtctacgggttcgcggcgggttcgcccccgtcagttatcggtgtcacaattgtttaccttgtggtcccttacctactcctggtcctaaagcttctttttgagcttttttgtctccttcttatatttttccttttttactgtttaacctttcattcattttattgttttaatttttctgcta

SEQ ID NO: 348757 - DNA, 310 bp, Zea mays
tcggtatctatccccttgccttacctaacaatctcgcgaatccaaagagtgtgagaggcggttcgctaaaccatcgacgggaaagaagacgattctaaaccccgaagcccaagaatcatgggcgtcaacgcttaaccctacttgttcaccaccggcaaaccgtccaccccctgcggccaccggtcggcgttcggcccgttccccttcattttcgttcgcgccggcgtcgtattcccccgggcccggtacttaatctattggcttttcggcggcgggaacgcgttcttcaacaccgttcggcttcctgcgc

SEQ ID NO: 348758 - DNA, 103 bp, Zea mays
cttcttttttcaaacccatcatcgttctaccaacaacccatcattggtggtgcccgggggtagaattcttattcattatagttccaaaaaaaaaactttacct

SEQ ID NO: 348759 - DNA, 264 bp, Zea mays
ttttccgtctagcgagaccgataggcgaggcgagccaccgcggcggcggttgcagccattgtgtccattacgatcggtgccaatttcaagaccacgttcaatgtcccctgtacccctttcattcttcgcattaacggttataggtttacctttaccccttattatccacaatcttcattttaatttaactctatctttttgaatcgttataccatatatgtttctgttctttttaaaagtatgtaattcaatcttttttttatt

SEQ ID NO: 348760 - DNA, 232 bp, Zea mays
ttgttctactgctagcaccagaccgctgtcttcttgagcacattgagggcttcggatttctcccggggtggcccctcgccacaccccaaaaatgcgtatacaagccacccctgaccggccttttcttgtcatgtcaagccaattgctccaaagtttcaggaccttaacagggcgttacccaaccagccaatcatctgggagattccttgcttaatgggtaatttttgctacc

SEQ ID NO: 348761 - DNA, 53 bp, Zea mays
agccttcttgtttttaatactaacacaagaacaaaaaaggggggagctcaaaa

SEQ ID NO: 348762 - DNA, 194 bp, Zea mays
cttggtgcgggggggccaagccttggcttttcggaccctggcatcgaagaagggcctatccttcccggtcggcggcgcgggccggccgttggcggcggcggcgtctgctaggggggtgtccactggtacactccccgtccttttctacgtcttgggcgcgcctgaacccggcctatgggggggggtcattgctc

SEQ ID NO: 348763 - DNA, 283 bp, Zea mays
  unsure (1)..(283): unsure at all n locations
tacttttattaaacttactatttcgttttttggctaccacgaacaacggttgctggcaccttcattatctatcccttacctttttttcattccatatttttttttcatatatcccattttgtattattaaattctttaaaaattaaggccttgttcttctaacttattaggtatattaagagaacatctatttttacntcnagaatattaactccttcaagaaaattgcaagatccattggataccgcgaggattatctttnnttaattatatattaattctt

SEQ ID NO: 348764 - DNA, 141 bp, Zea mays
gaaagccttccccctgcaagttacccttccctaattcccttttccacccacccttcttttttaacatacttttaacttaaaacgggtgatctatatatgagtgcggacccctccaaaattattctctttacccaacatttt

SEQ ID NO: 348765 - DNA, 161 bp, Zea mays
tcgttcttcttccccttcggttcgggttcgggttcgtgagggtcttcggggttcggtttcgtgggtgagccgatcgagattgccgcgtcggatgttgagtaccggtgctttgtcggcgggcttgcctgggccacggacgaccacttccttcacaacgcctt

SEQ ID NO: 348766 - DNA, 262 bp, Zea mays
tctgttctagatcgcgagcgggcgccctttttttttttttttttttttttatggcatcaaaaaaacatagtgcaagattaaattaaaaaccattctaattgaacagttgttgacaggacccttaacaacatgataaaagcaaacccaaaataccccttggcaaaagaaataaaggtgctctattataacgaaattattccagttcaacaaaatatatcaaatggtaaaggtttattatcttgccagacattcattttttttt

SEQ ID NO: 348767 - DNA, 262 bp, Zea mays
ccatgcgttgtcttccacaggattgaacattttgtacaccaaaccattggcttttccacccgcggcaggcgaaacgggggagggaggtgcgccaccgactgccccccacctgctgagccccggctgaagatctacgagcagcttattctgaggcaggaacaagatgggtgccagcggctcgatgaccggaaaggggcgggagaagcaagaacagctcgcccgagctaacggtggcgccgcgatgcagctgttgtcggttgag

SEQ ID NO: 348768 - DNA, 74 bp, Zea mays
  unsure (1)..(74): unsure at all n locations
tatanntagcggtacaaaaaacgtgggggattttttcttttaagccaccgggttgttctagccggccttttttt

SEQ ID NO: 348769 - DNA, 273 bp, Zea mays
aagtgtaacgggtgactcctcgcgtctttgaggagcgtgcgaccttaccggcggcgtccatgcccccaccctggccttggcccctagcttacaccatatgtgtctagcggcttctgctggtttgtcgggccacccggcttcttccccaaacttttgaccacttcattcccaaacatttgcattgtgacgtcggcgcccttaatgtcgcacaactgtcatttggcaccgtactgtgagacgacgaccccttcggcctttccgacttttcggctt

SEQ ID NO: 348770 - DNA, 237 bp, Zea mays
tcgtgtgctttggactggacgacttcttccccatgtaccactacctggctacctacccagcccatcgactggcccttggaacgcaatggcgcttggcaccaacttcggcggtggcgcagcagctggcgtattcggcggggcgggattccaggcggaccgggcggtcacgtttcttccgttgaagaggggcaccattttcggcattcacgccggcgacccgtttaagaacaacgggcc

SEQ ID NO: 348771 - DNA, 374 bp, Zea mays
ttgcttccttctgcttgcaaattctgtagacaccaccatttggttttctatccgggacaggagaaaaggggagagagaggtgaggccccgtatcccccccatctgctctgccccgacgcaactgttaccaccttctcagtctcaatcaggaacaagatgggtgccggccgcaggatgaccgagaaggagccggagaagcaagagcagcttgcccgagctaccggtggcgccccgatgcaacggtcgccggtggtgaaaccttcgtttactttgggtcagggccagaatgtccacccgccacactttttcaagcgctcggtgcttaaggccttctcgtacgttgtccaagacccggtgatcgcccaggcgcttct

SEQ ID NO: 348772 - DNA, 253 bp, Zea mays
tcggagctaataaggtttttataccggcggctgggcgggttggcctgccgcccgaattttgctccgggcgtaaaaaacaccggacctgtcccgtggctttcaaccgaacttggaacggagacacaattcgcggttgatggaatcctgtaggggattgagggacatgcttgagtctacaccgcagtactcagtgtttggacggcaagggggggcatggaaaacaagcaatggacaattattttgccaccagaca

SEQ ID NO: 348773 - DNA, 255 bp, Zea mays
tcggctttggtcggttcttgggacccttgatcccgagcgtggttaattcacgcattgaccggcgaacgccaccgtattccattttgaataccttcgcgcttagcgtcatggacgggtttttcaaaacgatcggggggggtgggcctaacgttccggcgggatcccaccccgcgggcgggagccaggccgcggcagggggaggcgccacccaacggacgcaatattccgatgtgactggtacttcaggcattggct

SEQ ID NO: 348774 - DNA, 220 bp, Zea mays
ccttctctttttaattcaataataagcaatctaaaagggggcccctctaattgtgtttttgttttttctttattttctactcttattatttctttttcttacactctgcttttttctatttcttttatttcttttattttcttttttttgtttttctttttcacttgttttttttatttctcatttttccattcttctttttttttatcattttttcttt

SEQ ID NO: 348775 - DNA, 408 bp, Zea mays
ttttagaaaccccggttgggtaccctgggtctcgagtggcggcctacctgtggaaattttgctggtggcctcacttacaatggaacaactggtggattccaaactatcccagttattgaaacggattggggggaaccggtttcagagataacaaatttcattgagcttgaacctgaaaatgaagttatctcttacgatactgattctgggtacaatggcatggattagtattcaagtgaaggagaacaggatattattagtggtgattcttcaggtacttcatattcgagtggagaaattgatgcagataaccctgatagtgctcatctccgccgatcaagaagaaaggagaaaaaatcttgggctgatcttgttacttcatctggtcggcgagtcattaggaaaaga

SEQ ID NO: 348776 - DNA, 70 bp, Zea mays
cgtcgtctagaacgcgagcggccgcccctgggtttgaattgcctgcccccgacggaaacattggacctgc

SEQ ID NO: 348777 - DNA, 294 bp, Zea mays
tcgtgtaacttgcgtgggtctcttcctgcgacggaagcaaacactggccgagacataaacagcgggacgtcgagatggcccaccgggaggacgcccgcgtccctcccccacggacctgtatcacaaactaccggaagaagctgcttaactggaaggaggttgaatcgggcgtcggccctcggagggaaagctcttaaaacggcaaagaagggtttttccaaggctttggacgagttaaaagctgttgagagcggggggctaattagtggcgaagtactccgacctgttgataat

SEQ ID NO: 348778 - DNA, 351 bp, Zea mays
tcttggacgcctgggttggggctaccgaactagcattagttgagagaagatggtgggggtaatatataatggggtttgggtggcctggatcagttcattacgaaaaatgctacacttacttatgggaatgaaactttcccttgctcaattagatcaatgaatttttccgtctttctctgttgtgcgtgttgcttttcaatgcaaggttgtctttttccttatcaagctagttttaagtttttagcgcataacatagtcttattctaatgttctttgttcaatggaagaattttgttaggatatttttttttgaacttgtagacctctaatttgagattttgctttatgatt

SEQ ID NO: 348779 - DNA, 159 bp, Zea mays
tcggttactctttactaggcctctggttctctggaatggggggggggactttctttttcacctaacttggcattgggcggaaaaacctaaaacccggccccttcggaggcacaggcggcaacttcgggttctttcccggcacgcaaaattcattgcttg

SEQ ID NO: 348780 - DNA, 309 bp, Zea mays
ttttaatgatccggtaacctggtagggaataagcaagggtcagttgccgattgtccgggttgtaacacttgctctattgattgtctggagcccatgattaccaacaatgctactcttactaatgagaatgaaactgcctcttgcccaattacaacaattaaattgttccggtcttctttttggcttgttgcatatcaatgcaagggtgacttttggcttcttaaagtaggttacaggttgaaagcgctatgaacggtttggacttagggtactcggaaaaggggacaattttgacggcatttcttttgt

SEQ ID NO: 348781 - DNA, 400 bp, Zea mays
ttttgttacacttcgtcggttgccaactcgcgcgcaacatgggccgttcgaccggcccccttcacacttccgccctgtcttcttctcccttcgcagaggccgaggttggacctttactggatcaaaagggcttttctgctgctgccccttaataccatgcgcccgcgcccgggcccgggccgtaaaagtggaagcttgaggaagcagggtttcacaccttcgaatactacaagatcctggccgctgtccccgatttgtgtattcggttcaggcatggtcaccaagctactgatttgctgaacacttgatcttcaccttagaatttgagaggtatattaatgaaaccctattatgatctggtaggatgacaattgtttttcaattgaatggattccagcca

SEQ ID NO: 348782 - DNA, 244 bp, Zea mays
  unsure (1)..(244): unsure at all n locations
tcggcacttaccagtcaccagtccagcaagcaacaacaaaggcgtaggaggaagcttggtttggaccgagcaagcgagccaacccagcgtgggagagagagaaagaggaattaattgatgggcgaggaggccagcttcgacgccgtcaggctgaccgaggccggcaccaacgccaagccggtgggcaagggggctttcttnatccttattctacccctttctattttacacaatccttactttt

SEQ ID NO: 348783 - DNA, 230 bp, Zea mays
tatgatctaaatgtttggggcaaaagctggattcatcatacctaaaaacaggctggccggttaattcgtaatccggggccccagggccaggaatgaaaccccaactgtttccaacgaaattggcagcaggcttgttaccagaaggccaaagggggggcctgaccttgctttggaccctttcgggggcaaaggaagggttttggcctaccagactcgggtggggcaaattt

SEQ ID NO: 348784 - DNA, 98 bp, Zea mays
gtttctctgtcgggcgttaccgggaggcccgtacatggtgcagtgcttggaatgttgttcgtcaccttcgtcagggtccacactgtaagggtggaaaa

SEQ ID NO: 348785 - DNA, 398 bp, Zea mays
tttggctacactagctcgtttcccaacgcggacccaacatgggcggtgcaaccggccccttcgacactggccccccggcttcttcttccttggcagaagccgcggctgcacctgtactggatcaaaagggcttttctgctggtgccccttaacccgatgcgcccgcgcccgcgcccgggccgaagaagcggaagctcgaggaagcggggtttcacaccttccaatactacaagatccgtgccggcgtcgccgatctgcgtgttcggttcgtccaagttcaccaagctactgattttcgcaacaccgatgctgcacctgagaatattagagggatattaatgaaacctatttctggcttggtaggaagaccattggtggccaaatgaaaggattcgagc

SEQ ID NO: 348786 - DNA, 220 bp, Zea mays
  unsure (1)..(220): unsure at all n locations
ttggcttacactcgctcggttcccaacgcgcacccaacatgggcggttcgaccggcgccgtcgacactggcggcccggcttcttcttccttggcagaggccgcggctggacctgtactggatcaaaagggcttttctgctggtggcccttaggccgatgcgcccgcgcccgcgcccgngccgaagaagcggaagctcgaggaagcggggtttcacacctt

SEQ ID NO: 348787 - DNA, 412 bp, Zea mays
ttgtgttctcgctcaccttgtccgaactcgggagctacatctgccttccctttggacagcttcagccttcaaccatttttccccacctgtacacaagtacaaagcttggcactttgcaggttgcaattgcatgctctttggcccctcgcgcttaccggtggcccgccttccgacttggcgcctacgactagcttctggctttacaatggccttcatgcttggcattcttaaggcctcggcgccgggcccgcttgcgggacgcccggccaaggctggccagccagctaccggtagggtggccctatttaccaaatcttggtatttgtcaggcatggtggtgctaggcttccaaggttcagtgggcccccaaccgctctttaatttatataaattcaaccacgatttgctattt

SEQ ID NO: 348788 - DNA, 401 bp, Zea mays
  unsure (1)..(401): unsure at all n locations
catcctactgccgacggcttatgtggtnctgacgggtacgcttccactgtggtccctttggatgcgaggataatttaagcctttagccatgggtttggagaagtgccaaatttggaattttgctgtttgcaatcgtatttttttttggtgctccagcttaccgtttgcccgccttccgacttggcccctataactagcttctggatttacaatgggctccaatcttcccattcttaaggccttggggccgggccccgttgttggaagtctgttcagggctgttcagccagctaccggtatggtggtcctttttaccagatcttggtttttgataggcattgtaatgatacccttttatgttttagtaggattacaatcgcttttcaaattatattaatcca

SEQ ID NO: 348789 - DNA, 344 bp, Zea mays
tcttcctagcccggcccccatgggccatcccttcttcgccttcaacaagcacaagcgcaagcgggggctcaagcccaagggggttgcctccttccccgaccggttcttccccttttccttggccgggcccggttctgctgggccccccggccccaagcctggacgtcattagttccccgccggcgcggacgccacgcggtcgccgatcccgaaccgacgaggggaggccaaaccggttgcaaacagaagccatttggttgcatacgccgaaacagggcccgccagcttggattacgttgtgaggggttttgcatgcatttacccctctgtttagtggacctggg

SEQ ID NO: 348790 - DNA, 214 bp, Zea mays
tttcaattaataatggcttttgaaggaatggccttttttccgggccgtcggattcccccttggtttccgtgaggggcaaaatttcaaacccggggaggcctttttaggagctgggggcgggcctccccaaaccgttggatttttttttattaggcaacttgttcaaggccccaccgttaaagaggagggttggccaaattgcaggggacccttg

SEQ ID NO: 348791 - DNA, 307 bp, Zea mays
tcggtgccagggccggctggtcaacagatttttggcctgcgctgtcacttcaccacgctgcttgtactgaaagcttttttccagaataaaagctggggaggaggaagcggccgccgctgcgctcaaaaaagagggtgagatgaagactctgagctcaacgagaggggagcctgggcgttttggaaatgcggcttttttggcgctcatgctctgtttcggtgtcgcgcttttccttattcgggggggattcgccccattggagatgccattaaattcgagggcgacgcttcggtggttgctcttaggg

SEQ ID NO: 348792 - DNA, 259 bp, Zea mays
cttttgccggtgacccaaaaaattggttgacaaccggggatccgggcggggggttaaccatgtttaagtaggaaccgctgttcctgttgcttgaccttgtgaggttcgggtccgaccaattggggtaatattggccctttggggccatggttttttttggggggggtccatgccgaagggggacctgtttgcccgcttccgttggctgggggaacaacggaaccgggtttgtagcctgccggggccaaaagaagaactg

SEQ ID NO: 348793 - DNA, 87 bp, Zea mays
tttgtgccagcttccctttggaagaatgagggggccattagttaggaatgtgggaacctgttaaaacctaaacctttttctcaaaat

SEQ ID NO: 348794 - DNA, 258 bp, Zea mays
tctttgacgctgggaggcgctgcctttctgtatggcttgctaaaaggcggggactggttgggcttctaccgctgccgggccttggcgaccttttgtccgcgaataggtacgacatgtaaaagactaaccgcccgccagtacccttgctgatggccactatccacaaacctgaggacgcccttcagctaggcgaaccattaaacgatgatcggaaaatgacgatcctgacgtatactgatgtattcctcaaaagggcag

SEQ ID NO: 348795 - DNA, 399 bp, Zea mays
  unsure (1)..(399): unsure at all n locations
tgctgccgctgggaggcgtcttgcctgtggtggatgtcatgctaaaagggccgcgactggttgggctttctaccgctgccccggcccttggcgacctttttgtccgcgaataggttccgacatgtacaagggacttcactgctcccccaataccccatgcttatggccacttatccacaaacctgagaacgtcttctagctaggcgaaccattaaatgatgactctgtaaaaggacttatacctgaaagaattacatgatcttattaccttcaaaaggtgcagggtacacgtaaaatccttagcctaggttatggatcanattagtgcaccaaaagcttaactttgggaaaatggtattgccaaatgtggatctctttaaccttggacttgttttccca

SEQ ID NO: 348796 - DNA, 303 bp, Zea mays
tcggcggtcttccccattccaaacgggcgtgttcgtcacttcttaacttcgacctttacggggcccacggggcccgacgcttggcgggtttacttaatggaccatgggctttttttcggcactggcggcggtctttccaacttttggaacctttcgagcccattccgcttggagggttcgggcccatgcaccccggagaatcgtggcgttctggttggccccttccgacctcgtggtgacccccgagccaggaaaggacccccggcttattttcgcgcttgaaaagcataatgtacacccttt

SEQ ID NO: 348797 - DNA, 144 bp, Zea mays
tcggtcacaagcacccttcgaaacacaaacgcaaagacccgctcacagatcgaaacggaggatgaaggtggagggggcggttaccctactggtgccaccgtcaaaggccatccccccgttcatgccgtgggtttgcgacctttt

SEQ ID NO: 348798 - DNA, 57 bp, Zea mays
cggattccacgaatcgctccctttcaggcattgtcatttatagtagagaaagaccta

SEQ ID NO: 348799 - DNA, 185 bp, Zea mays
gggggacccccatttatttgtcaagcgacgccgcggccttgatcagagtcggaggcgaccaccccaatggcggcggttgccggcggcccagaagggaagggttccttaaaaacaatcttaacttccgaccccaagttccttttaaaagggttaagggggcccaaggcgggcccctttacgggggg

SEQ ID NO: 348800 - DNA, 297 bp, Zea mays
tcgcagtacttctcttcccggtccctggatgccacccacaacgttttgatccggcccgatcggaacttcggaccgggcttctggtcttagatacacactggcaactcaatatcaaaatattcataccattcaaccgcagcatggggatggtagtaaacagcagtgcagtttcggtcttcattgcgctggttggcggcgttattgcgggaggagtaattaccaagggtggactgggacgacgaccaacaggcggaggcaacaacccaggaccaacaacccggaacgacgttgacaccg

SEQ ID NO: 348801 - DNA, 71 bp, Zea mays
cttctttaaacttcaatatacaatccatggaggccttccaaaaagtattaaatcaacattatttcttactt

SEQ ID NO: 348802 - DNA, 204 bp, Zea mays
tcgcttagttctacggcggcgatacccccctgcacttcccaccctgttacccccacaaaataagttctgcggcggcgatggcgcttttcttcttccgggcgaagcaccttctgtgccccattctgcgggggttccacgccttaacgcgggcccttgcgcgggtggagccgcacgagtttttcaaggccagcgagttcctgggca

SEQ ID NO: 348803 - DNA, 134 bp, Zea mays
tcggcggcattgatcttggtttaaaatcaatcaatcttggtttcttcgggccggaagattttaaacccatgggccagaataaaatcgggatcaaatgggttcggaggattcggaaggttgggggccaggtgggc

SEQ ID NO: 348804 - DNA, 122 bp, Zea mays
tcgacgggagtgtgcactactgtgacaatttggagaaaattaaatcaaggggcgagctctacaaatgtcgacaccttgtctgcaagggttttccgctgtcttattccttcggacacgcttcc

SEQ ID NO: 348805 - DNA, 332 bp, Zea mays
tcgtaacctgcaacccttgccgcgacacgacgacgcctttaaacttagggggctggttcaagctataaagctcaagagtcagggcggcatgtccacagaaacagacacctttgccttttaagctgagatcaacccgaaactcttactaatcaacaacaccctttatcgcaacacggttaatttttaaggggaagttatttcccactttttcgatgcgttggacgcaaattagtttttttagcctctcttactagatctagcttatcgggcattcggcgctttttatacacattgtaccaaacaaagttttgaatacactttttattatttac

SEQ ID NO: 348806 - DNA, 77 bp, Zea mays
tcgggtcaatttacattggcggcaagcctggccttagaacttttcgtgcggccaaagctaatccataacaatattgc

SEQ ID NO: 348807 - DNA, 103 bp, Zea mays
tgtaaaagacaacgcaacccccaaacccaaaaccctaccacggggcccatgggttttgccggcggcggcgccttcttcttctggccgggacccgaactttcga

SEQ ID NO: 348808 - DNA, 326 bp, Zea mays
tctgtgaggtccaactcgttcttacaggacttcaataattttagccctgctggaaacaaactccaacccggttaaaagtccttcgcatttgaagcatatgccgcgaactgggaccaaccaccagaccttcaaaagcaagacttcttccagcgacctgggctatatcggtagccattattgcaaggggaaaagtcctttgcctcctgggcatattccgcggaatggagcctattaccatcacttggtcatatatcacactattcctttctagtcctaagcatattcgctgaaatgggaagaaccactaccattagggcaaccatctc

SEQ ID NO: 348809 - DNA, 287 bp, Zea mays
cttcgctttagatacaaaatactcttatcaaaccattggggaagacaccaaccttttaatagattaggattaagggtttctttttgaggggttcaagattctttcacaagagaaaaataaaattgtgggttcttttagggaggttaaccgaatttgcctaccttagaggtttggacaatggaatctttgtttgaaatgggtgtaccaacaactttttttttgggtttacaattgggaactttgggttgtttataattttgagaacaactaaatttatacttgatttt

SEQ ID NO: 348810 - DNA, 120 bp, Zea mays
tcggttctagatacgggagcggccggcctttttttttttttttttttaatgggtcatttttttaatgataaggggttttttttgaagattttgaaatctattaaatataaaaaataatat

SEQ ID NO: 348811 - DNA, 370 bp, Zea mays
tcttttgagaccaactagcaacataaaaagcacaatagtgtaccaacaatggcaggcaaaatattttgcctccttatgctccttggtctttctgcaagggctgctaccgcgaccatttttccacaatgcttacaagctcctatagcttcccttctttccccggacctcttaccagcggtgtctttggtatgtgaaaacccaattcttcaaccctataggatccaacaggcaatcgcagcttgcatcttacctttatcaaccttggtccttcaaccaacaataggcctaataccggaagtaccctttggtgcatttattggcacaaaacattaaggcacaacaaccaccacaacttgtgctagcaaacctt

SEQ ID NO: 348812 - DNA, 215 bp, Zea mays
tcgttacccctaggcgtgacaacaacttcttcctttcttcttttaagcaacgggctggttcaagccggcctcttttttcctcttgttgtccatggcgagcagcaaggtgggagcttttttcttcttccatgggacagcagcaaaataacatggggcagcgggttccttccccaaggttcggcacgcacacgacagcagcaaccagcagatttttc

SEQ ID NO: 348813 - DNA, 168 bp, Zea mays
tcgttcgttaaggttggccaattcaacaaaagggggccttttccaaaaggggggccagcaaccaattttcctttgcccggaaaaagccaacctatacccatttgacaggcctcaaaaacccccgcaagcaaattttcccaaagtccgcacaaatttaaatcccaaaaa

SEQ ID NO: 348814 - DNA, 205 bp, Zea mays
tgcctcaaatactgatctcactgatccagggtggctttttcaaaggcaggggcgcgccttgatcttctcggtccaacttttgactttcataccatcactcctctgccatcattgcggctcccctgtttcttcttcttctttctcttgctttttttacaaacttaaaccccccctttttcttttgccttaaaaactttccccccca

SEQ ID NO: 348815 - DNA, 51 bp, Zea mays
tttttccccacacgggcacaccaaacccaggtgtccccattgggcgcacac

SEQ ID NO: 348816 - DNA, 100 bp, Zea mays
ccccctgttctttttgtttttagcccattacgatgaaatttcccaagattacccgggcctgtcggccaaggctatatactcgcccacgcgttcggttgca

SEQ ID NO: 348817 - DNA, 274 bp, Zea mays
atctttcggtcaaaaccgggaacacgccccccgtgggttcacccattgagtgaagcccgttaattcctgttgcttccccttgtatgctaccactcccaaatacttcaaagaactttatccatagatccagtaggtagtcttattctacctcatgaagttaggttcaacccttgtcagacttcccttggttccatttctagttttgcgggctaccaccttgtcgggaaggccaccaaccctgactcttacaaatgcccaacccttattgaagctt

SEQ ID NO: 348818 - DNA, 360 bp, Zea mays
accccttcaagtacccttccctaattcccttttcgacccactcctcctggatttcaaagactggacaaattggctggtttattgaaataggatgggcggtaaaaaacctcaacgtttccaaatttacttacaacaataacttcatcattttttcattttttcccactatatacctcaattcttttttttccttactcttctcatacttcaaatctcattcattctcctcatttattatataatattctgtttccttttatattttcaactattactcgtttatttttatccctatttttcttttatattatttttaataataatttttttttaattatctttattttttcatatttataa

SEQ ID NO: 348819 - DNA, 344 bp, Zea mays
tcggcttttttcttcttccttggacagttcacgaggtgaccacatatatacccccacggggccccccacctcgcaatctccttaacccggtcggtttatttggcttcttcttggcaatccgagagcactcggacttccacttggccaaattatggtggattgaccggattgcgggaggccaggcttgaagcttgagatttcttctccggttcgacccggcatgggccgggcttgaccgggcgcttcttggctttttctttttcggcctttttaagcggcttgtcgttggatggagcaagcaccgccaaaccggaagaggaggaggaagatggtcccccgtgatc

SEQ ID NO: 348820 - DNA, 83 bp, Zea mays
ttgctattcctcccaacaccaccttgcctgggatctccgtagcctccgtcgggtcgagcattgatcatgtcggcctactgggg

SEQ ID NO: 348821 - DNA, 338 bp, Zea mays
tcggtcaccgacgtggtcctccccgcaggcccgaggtctgcaggcggccgcctccacgggtccaggctttcccgatcacgggagggccgtccttcgcccccccctccccccttttaggtttggcctggtgaggactggaggttcatccattccgaccttggtgatttcttctggtggcacttgggtgttcagctcaaaatgaaaggagtgcttccgattaagggggcatcaagccgtgaaaagaaagcgccttaggagctcgagagcgtcttggaccgatatttcgggtattcggggtttcgaggaaaacaacttggagctatcgaagctggtctatc

SEQ ID NO: 348822 - DNA, 221 bp, Zea mays
gtcttccttttgtgtcgtggcgaccactgggggggctttctcatatgcgacctagggcaagttgccaggtcgtattaaggcactttgcccgcgaccaataccacaagttttcaagcagtggacactttctttggtatcaaaaggtcaatggccaattattaatatgacctccatgacattgaccagattgtagatgattattatattgattatcccatttt

SEQ ID NO: 348823 - DNA, 235 bp, Zea mays
atctttcggtcaaggcatggggtggcgccaatgggttcttcatgcttcaaatggcaacccttttacccattgattgaacatgaatcacttctgagtgcgaggatgaggaactattatatgccttaagaggaaggtagttgatggaaatggaaatcattagaataggttcaatgacgtgcctgggttcattgattagtcaaatattggtagctgattgaaaagcgtaggggttgga

SEQ ID NO: 348824 - DNA, 143 bp, Zea mays
tgtcgttcggttgatcgcgagcggccggcctttgtttttttttttagtaaaggaggaccgtttattcatttggattgcccttttaagttcgtggtcacacaaacggcgtaatcaatggccttccgtgccattgtttctcttaa

SEQ ID NO: 348825 - DNA, 315 bp, Zea mays
tcgttttcaggaacaatacgctttgttgtctgacggtgttttcacgaccttggattgacaagcaacggggtgcaaaccagctttagcacattcctcgttgcctgagccttatgcattattttacgcagcattcccttggcaattttatgcttctgacatgacccacgcttgaccgaattcgaccgcttatccatgggccggcggccgcgcagcttacttgtattgtacagcatcagcaggcacaatgccgtctgtttaccagaatgcttaccgcgatcaaagcaagcagggtgcgttcaggtcttattgatcttt

SEQ ID NO: 348826 - DNA, 381 bp, Zea mays
aattccccggtttacccacccctctcttaaaccgaaaggaccgcaaaaaacacgtgctttttatagggggccgcccattaaaattgtttttaataccttctttgaaaaagattaaaattataaatttaaaggcattggaaaccaaaaactccctgattttttttgagaatattaaacaaaaaaaacacctcattcctattgtccctcttggcacccatgttttaaccttttaatattttaaagctcaacttttgactactattaatctttacctcttcatatacaccttgtttatcaatattcaatcatgtatttattttaccttccccattgttcttcttttccctatttgaaatatccacttatttatttttttacaac

SEQ ID NO: 348827 - DNA, 330 bp, Zea mays
tcggtaattgcagggcttgggttgaggcgggggtggattaaccctaggcgggggtttagcttggttggtggctctgattccgtcgtcggcccaattgttcccggaatatagtgaggtgacgaaagctgccattggctattactatgccacgattggattctaagatagtcgctggccgcttccaaatttctagaaccaatttgtgtttaacgagaagcgtgacttttgattaattctttcaccctcttcattggtggtgttttgtccagggagacaagccaacttgtggttgaaagttacccttttcaaaccttcccaaggtttttaaaa

SEQ ID NO: 348828 - DNA, 177 bp, Zea mays
tcggtaggcgcgtccgccgcacgtcgcattggccggccccatcatagcccggaggtgggcttgccgaccttctcgcggtcggcggccttaagtgctgggccgttgcggagacccccccgaacgaggggtgccatcttcttgtttttcttaacggtaccccaaaaaaaccgccgtttg

SEQ ID NO: 348829 - DNA, 302 bp, Zea mays
tcgttctaatcacaaccttgcattcttttctggcgcggccccaagtatttggtcggtgcccttttggccgcccgtttcccccggggccgaggagccgccaatagcaaggagagggtttccttctccctccacggttccaccgagctccccgatcccttcgtcccaaatcccacacacccggttggccaccggctcgctatggatttggatctgtggatctccaaggtcaaggagggtcagcaccttgcggagcacgagcttaagtccctttgcgaattttggaaggaaatcctaatcgaaaa

SEQ ID NO: 348830 - DNA, 403 bp, Zea mays
tttgatcttcatattttcacaacgaaaacgggtcgggttcagtaggaatctggcaaagcagcaggcgaggaggtgtagaccgactccgcgctaagcggcagagcttcaaagtttccagcagcataaaaggaagctacgtcgccaagactagcgtccctcgtccgaagccaggggacagcctgagccagtctgcgacagcgctgcgcggggtcaggaagaacacgaccgctggtgaagttggccatcctgtgagtttgaagccaaacgctgttcgctcggtcgccaaggacccatcatccagcagaggaccacccagggatagcctgagccagtctgcgatagcgctgcctaaacacagaaaggacgccactgctgttaagagcaagacttattattaaccttg

SEQ ID NO: 348831 - DNA, 147 bp, Zea mays
gttggaaacacaatgctggatgattgggttcgcttcttccttggttaaccgggcaaaaattttttccagaagcacctacagtttcttgttaattgcattggagcaccttttcaatttatttcaaagtccttcctggatgaagattta

SEQ ID NO: 348832 - DNA, 307 bp, Zea mays
tcggcattacctgcgtacgagcagcgggcaaggatcttgtttcgcccggaaggccaccaacccccggggtacacgaggagggtgacaggtgggccattcggggttcgggcgagcccaacttaaaccccgcaccaattcccactttagtactttacacccagcgcacttgagcttgagcccttggccttttcttaaacacaagccttaaatctcaatcacctgcgccggcgctttgttcgtgtggaggggagaaaagaggaaatggcggcgaccgagggcgttcttcttgggattggcaacccccttc

SEQ ID NO: 348833 - DNA, 300 bp, Zea mays
tcgggacccaatcgcagtcgccttcaacactatggtgacttcttccactgtcgagcaagaagaccaggagattgctctgccccggcaggaagcggtcgacaacgacgcaacgcaagccattgaaatggtcgcacagactgaagtggtgagcaccgccgaaaagcaacctttggaaaatccggaaacattaccggtcaattggacaattgaaaaccttaacaaggtcaatgagaagaaacactatttaaagggttttggtggtggcggattcaaatggagtgggccgatttttcccaaggg

SEQ ID NO: 348834 - DNA, 250 bp, Zea mays
tcggtatttctcgataattagccgggttggtggttctcgaataaaccaggggtcctcttaacaatgtgttactcgacttggatgccaagggggccatcgcaacaaagactgatgcttacaacgacaaaaagctatgcgccgtggcgagccaaccacttagcgcagttatcccgtcggcgccggccattacgccagcggaacaagaattttcggattccaatctgttttatttaccatcgtattactacgg

SEQ ID NO: 348835 - DNA, 355 bp, Zea mays
ctaggtctagatcgcgagcggccggccttttttattattcaagggggagctctaaaacctcacaattaccctaggaagataacacgcccaccaacaccctgttgaaggccacccaataaacaccacagaccaattcaccccaccgatctagaaaaccagtacacataagcttgatccctcgtccaagtaccaaacacaaaccgtaaaatttcaattaatctttccatcctatttctaccgtatttgaatggatgtatattaaataaaatttggtaactttacttaaaatacaaattttttattcataagttccatttatcataaaataataaaaaataacagatactatattaat

SEQ ID NO: 348836 - DNA, 149 bp, Zea mays
tggcacgcctgcaagttcccttcccgaatttccttgtcgacccactcatcctctaactatagatcaccagccgccggcctttttcaataatcagtcaggaccccttattcctacttcttcccctccccagttcttaaacaaacaacctt

SEQ ID NO: 348837 - DNA, 151 bp, Zea mays
tctgtttccttcggttccctttcccttgtgcgcagtgcgcttcttgagcaccccacacttcagatcttcgaaccccttccacatgccactgcactgagcggcagccagttaccaacttgccacacgccatggcgcaatcctgcaattgggg

SEQ ID NO: 348838 - DNA, 281 bp, Zea mays
tcggtttgctgcaagcatatctggatcagaaggatcaattgacctttcctttactggtaccctttccccttctccatcatttgatgccaaggtagttagtaactcaaactcaacacctgctgctagcacagatctttcattggcattggcctcaagtgatagtttaacaccatctttgagtcatgattccaatactgaggtagtggactctagtagcaaaattaatttttcatatgatgaaaaacagaaggtctggatcccacaagataaaaaggatgaaa

SEQ ID NO: 348839 - DNA, 88 bp, Zea mays
ttttcggaatttccaacgcctttgccttaccagccacgttttttggagggcggtcgaccaaacaaaaggtggcaatggcggcggcggc

SEQ ID NO: 348840 - DNA, 260 bp, Zea mays
tcggcggctcgacccattcttcccccctgccgttgcgccagtcaacaggctgtctttctttttcctcggcacccatgggcaccgtagcgcgcacccttgtcggcgcatgtgcggcacgggctcttcttcaccttcggtctcggggccttccgttgttcttttgtattcgtcccgcgcgggaacgtgccggcgtcgggtctggccgctggatggctcggcgaccggattccttctatttccccgttcgttcggggcaaggc

SEQ ID NO: 348841 - DNA, 287 bp, Zea mays
tcggcaaattccactttcccaggccccaagttcaggttggctattccccttaacagggccgcaagaagatcgcgcttggcccggcgtcttacgaggaggcattgatcggcgccgtggcatttaagaagaggaaggggaggctggaccctggtgaccgggtcttaattaggccgggagccgccagattagcattttccggagggacccctggggcgggccggttgagatattccacgacttggccacggaccacgaccggagcccgaacctggacattgaccggggcg

SEQ ID NO: 348842 - DNA, 351 bp, Zea mays
tcggaagaaagccgggaagcctggtgggaagaagaactggaacatatttacaggattccatggatgatactggaaaccatattaaggccgaggtttttgatttttcaaatccgaggtgattaacacaagaatgctttcggaggaaagacaagtttattggtggattggaattcctgggctgggcctggtggcccttttatgctcctattggtctttggggtaaaccccaagggcatggtacatttcccattggtcctgcgtttggtcaaaagcgtaaacctcttgatggatttggctgtgtttgtcccggcaattttgtttaccaaacttaatgtgagaaatgtttttgct

SEQ ID NO: 348843 - DNA, 222 bp, Zea mays
  unsure (1)..(222): unsure at all n locations
cccttctccccgcctcttcctcctctttttttttcanactccaacaaccccccccccccctctccccccctcctctcccccccctcctctctccctttctccccctcccccttccttcccccattcccctacttactccctcccctctcctctttcccccctctccttcctccctcctctctctctcctcccttttcctctcatttcctcccctttccctcc

SEQ ID NO: 348844 - DNA, 238 bp, Zea mays
tttaggacccgtgggtgggtcttcagaccaggggctttatctactgcagaggggagaagaacccgatcgacaccatgagggtgttgctcgttgccctcgctctcctggctctcgctgcgagcgccaccttcacgcatacaagcggcggctgcggctggcaaccaccgccgccggttcatctaccggcggcggtgcatctgccaccttcggttcacctgccaccttcggtgcattttcc

SEQ ID NO: 348845 - DNA, 94 bp, Zea mays
cgccgccgccgtttgttttcctgggaggtgccggaaccgaggatttggcccaattttaggtagagaatcggttttacttggttaaacccggggt

SEQ ID NO: 348846 - DNA, 231 bp, Zea mays
accggacccccagttcctgccacacccactcgttttcccaccccaccacccacaccggggggaggtttaaacaaaagcagggggcggacccaaacaataccgagaacatggaacaccacccccccgagtgcaaccaaaactagaggattccgaagcacccaatgctaggcctaaattcgccaaccaaaccaaccctaccatacccaacatcccgtccacatggtgaacaag

SEQ ID NO: 348847 - DNA, 186 bp, Zea mays
ttcgttcggcactccctgacattgagaccgggtgcgggaaccaaggtgcggcgatgcctgtggacccctttctttgcgcttgcagccccaatattttgcataaatatcaaacattgtagcttcaacaagcggatgcccagtgcgcacgcttgcccaaaaggagcaggacatacaaatgatgctcgc

SEQ ID NO: 348848 - DNA, 299 bp, Zea mays
tcggcgggccgtacgccaccacggcaacggagaagaggactttcaactgcggcggctggcccgcgcggcgaccgggattggggatgggcgcacaagccgggccaaccgtccggggtggctgcaacaataccaactgattggcaagaatggggaagggacctatgggcttgtctttcttgcgcgccttaaggcgtcccaaccggcaccttgccgacgcgggccccctattggcataaagaagtttaagcagtcaaaggagggggaccgagtatcacccaacgcaatttgagagatcatgc

SEQ ID NO: 348849 - DNA, 265 bp, Zea mays
tttgtcgtagcacccgcaggagagcttttcttcccgggaaacaaggagaccttcggagggctcttcctttcacgagggctgcggctgttggattgtgcttaaagatctcaatttttatcttcaaggaaggattactcatcgcgaatcccgatctgtcggtggtggaaaccggaaaggtgccacttttatgaagcgaggctttgaggaacccgtgtgccttccgtggatgtggtgagcccttattggcgcaccaagccagaagggg

SEQ ID NO: 348850 - DNA, 238 bp, Zea mays
  unsure (1)..(238): unsure at all n locations
tgatacaaaacgcggcttgcttcttccgacggttaccttcaatccctgagcatgcaccacttgccattcctttcttatttgtacatttgtgcccattatgtcattaacttcgtaccaaaagtttcctattcctaagttacctattttaccgtatacctgaagattgtaggatggatgttgtgtccgttggttaaaaagtgtnctattggtctaatctgggaaggtacttttgagaggt

SEQ ID NO: 348851 - DNA, 196 bp, Zea mays
agatcgcgagcgggccgcctttttttttttttttagagttaagggccgttgcttcatatattattaaaacctttcatcggtttttttttggtattaaatccattaacctcattgctattttctttatattggtaacttcccccaaattcttcccccattttttcattacttcccttccaaaggatggtcctccccc

SEQ ID NO: 348852 - DNA, 259 bp, Zea mays
tcggttctagatcgcgagcggccggccttttttttttttttttttttttttgtgggggttaaacaaaaatttgacgggctttaatggccaaattttcacgaaattaccattaccatttgtttaaatccaggaaggggaaccgaaaaaaaaaccctcctcatgataatgtttctgggttttagtttggaaaatgtcaaaacctaaaccctttgggtttgaaaatacactaaaacaattggttaagttattttccttcctt

SEQ ID NO: 348853 - DNA, 346 bp, Zea mays
tcgattttgagcattcagaaacacaccaagcgaagcacattagcaacaacctaacaacaatggctaccaagatattatcccttcttgcgcttcttgcgctttttgcgagcgcaacaaatgcgttcattattccacaatgctcacttgctccaaggtccattattacacagttccttccaccaggtacttcaatgggcttcgaacacccagctgtgcaagcctataggctacaacaagcaattgcggcgagcgtcttacaacaaccaatttcccaggtgcaacaacaatccttggcacatttaacaatacaaaccattgcaacgcaacagcaacaacaatttctacc

SEQ ID NO: 348854 - DNA, 201 bp, Zea mays
tcgtactgttttaaaccatccccactctttttttttcacccgcgagcggacacactccctgtcctcttggcccgataccggtcccggccggccggcccggcggcgggggcggttgttccgacgcttgggcccctgtgaacccgttggtgccacaaagggggctttgccacaaatggcggttccgggggtttttccggttcc

SEQ ID NO: 348855 - DNA, 171 bp, Zea mays
tcgttgacgcgtgggtaacacttcaccgacggccagatctggttcttctttttttcacggcggcggcggcggcggccttgaattttcgaattcttaggaacaattgggcgggcggcatgggggggatccctcacattcagggggggcagggggggaaccagatcgggggcc

SEQ ID NO: 348856 - DNA, 234 bp, Zea mays
tcgtcccggttcggccgtgtaaaccaaaccccggttcggcggggggggggactgggccaccaggctttttggaacgacgcattcggcaaccatggtggggttgcacaagccaacggaatggggccgggcggcggttcggcaacaagggaggggggaggcggcttcgggggggggtccccccgggggaatgccgtgccccccgggttccccccaagtgttccggatcgaaggggg

SEQ ID NO: 348857 - DNA, 243 bp, Zea mays
tcgtttttcacacacacacacacatgcataatgggtggtacatggtaaaactataggaagctaaggtcgatcgctcgtctatagctagaccactatcaccaagtccaccttcatgggttcttgaccgatagatagaccgaccagaatgaaaaagctagctagctactaaatatatcatcagtagagtgttcaagtggtgatgatggccttcttcttgcccctggtcaccaatgggcttggcca

SEQ ID NO: 348858 - DNA, 193 bp, Zea mays
tggtataaaacgcgaacggccggccttttggttttttttaaaaattttttggggtttttaaaattttttttttttttttttatttttatatataattatttaattatttttttatttaaaaattaaaaaaaaaaatttttaataaaaattaaaataaaaaattaaataaatatttaaaataaattatttatat

SEQ ID NO: 348859 - DNA, 244 bp, Zea mays
tcctcctgttcttttgaaggggggaccccaagagaggggccccgcttgttgcattccaatgggaaccgtgcccccggaatctttttctttcttggccggcgcgcccttcccccaccggattcaagggacacccctgtatttgagtggaagtttgggggaacctcctgaatcctatattggattaaccaaaaattaaatggctggggggaccaattgagccaaatggaaggcaacacctaacccc

SEQ ID NO: 348860 - DNA, 297 bp, Zea mays
tcgtccacgcgtgcgttaaagagcgggttaaaccctagcttggcgtggtgctcgggtccacatcccttgccagcttatttgatggcctaaccgctttccggcactcattggagcactcccggtagcccacctaatgacatggagaagaagcgggagcgcaccgacgcccccggagaggcgaacggcgcagaatatgctgacgacttttcggcggggccccctgtgcgcacgcttgtccggttcaaggaccccgtacccgactccgaggccgccttcgccggcgccgagggccgtgtg

SEQ ID NO: 348861 - DNA, 212 bp, Zea mays
tcggcggctcaacttcagccttacgggcccgcgaccgctatggccgacgcgtactggaagtacccggcccctgccccgcgccagcagcaacagcaacaacaaccgccggccttcgccagggggggcgtcgcgcaccccggcatgggccgcggcgcaccgcaaatggcccccgccggggggcaacaacaacccatgaaaccggcccgccccaa

SEQ ID NO: 348862 - DNA, 339 bp, Zea mays
gttggcttctcctccccctccggttcgggttcgggttcgtgaggttctccggggttcggtttcgtgggtgagcggatcgagatggcggcgtcggatgttgagtaccgctgcttcgtcggcggcctcgcctgggccacggacgaccactcccttcacaacgccttcagcacctacggcgaggtcctcgagtccaagatcatcctcgatcgggagacgcagaggtcccgcggcttcggcttcgtcaccttctccacggaggaggcgatgcggaacgccatcgagggcatgaacggcaaggagcttgacggccgcaacattaccgtcaacgaggcccattcc

SEQ ID NO: 348863 - DNA, 203 bp, Zea mays
aactgcccggtccacgcgttcgtttttttacgtacacggtctccctctttctgacactagctagtgagagtgaggcaatcaagagcagacaaggggtaattgagaagctaacccaatggcgccactcatttgagcactcccagaagcacaactaataccatggagaataaccgggagcccacagaagcccccggagaagggaa

SEQ ID NO: 348864 - DNA, 294 bp, Zea mays
cctgctccgtcccaaacttcgctgcgactttccgaggggcttttcttaaggaaccgggggctataaaaatccaccgatccattttgttctcggcatttctttttcttcaataccggcaaatcttccatctttttgccagcaaactttacaaacggggtgcatgaccctttttggagtatacgcaagcttttaggaaaatctctagcatatcccttttacaaaattgtctaataacatttttctttactaagtactttatttccaacaagcaaatctgtataaacaaaaagagca

SEQ ID NO: 348865 - DNA, 235 bp, Zea mays
tcgtggcttgtcgcggtcgaggtgcaatgccaggaccttgtggcaggggcattcccaagccataaactgggtcacgtagatcatggtcagatttttttttgcctgtttgcgagtgcttttgtgccttacaacacattttttgacccttcacttactattgtgccctttttgttgtgaaacaatcctaaacctttttggttcaaaagagatgcaccaagcgtttatcggtgtacct

SEQ ID NO: 348866 - DNA, 151 bp, Zea mays
cttccggcaagaccggcgaccacattctccaccttaataaaaaaaagcagggggaccgaaggggccgcaacaacaacaacaaccaaggggcaaccggcatccaaaaaggcagccgccgccaagcccgtaaaggacaaccttgaagcatcca

SEQ ID NO: 348867 - DNA, 317 bp, Zea mays
tcagaacagtcgtcttcctcgtggagaagcggcaaggcgagtttgtcggagtctcacgccccgttcgtcgtcgacggcggccacgggacgtgacagactccagctcggacagctcgtcggagaacttgtacagcccccgctacgagtcgagtcggctgctcgctccgagtcgggcgttcctagggccttcaacaccgagctggacagggagttaagcaccgcctctgccttcgtcatagcttcgccgcctctggcagaggcacaactgcacctctacgacctctacacaatcgccacttaggggcccttcaccgtgc

SEQ ID NO: 348868 - DNA, 156 bp, Zea mays
ttcttggcaaaagcattgcgaccacagacagggcgcgcttcaagggcttttttttttgagataacaaggaggagaggaggagattgcggtcaccatcaccttggttaaggccaggcatatcttaaacaggcccggcaaccccaccgtttaggtggg

SEQ ID NO: 348869 - DNA, 185 bp, Zea mays
cccgtcccggatttcccggttggaccaagccgtctttttttacttgttattaaccaccaacttttgggggcccggaccaattggatttttaaaaaaggaattcgggagggttcccaaggcttgggacccgagaaagggggtaataatccccaacaatttatttttaacaagggacagggggccca

SEQ ID NO: 348870 - DNA, 242 bp, Zea mays
tcggctggtcttcctggatctctgactgactgactgaccttaattgggggccgggggcaagagagagagagagagagccattgcggcggaccaacaaccgcaactgcaggaggagatgaacgacgcttcccgcggcgggcttaagctggcttcagggttccgctttcaaccgagcgacttcgagattgtgaggttctaccttaacaacaaggtgcgtaacaagcgctttaacttgaacggca

SEQ ID NO: 348871 - DNA, 321 bp, Zea mays
tgtcaacgcaacatgtactacatacggtctggttagcttgctttttcacactataaatacactgccctagctatggcgattcgcatcacaatcggtcgagctgggtcgaagaaactttagagaggagaacacgcgcgcacacacacaacatacgtatacacaggctgctgcagtagtataggagctagatcgagctagcatggcggtgaaggtgtgggtgttccccgtggcaccgacgatgtgcgctggtgtagggcttggagcttgcgaccaccaccgcagcagtgccgggcgtagtatggattctgtttgcaggcccct

SEQ ID NO: 348872 - DNA, 331 bp, Zea mays
ttctcacgcgtgtcgtcgtaatacagcaccacacaacttttctgggagatcattcaacaccagcggtggcgttcaaacctaacccttcacgacttggctttccctaacttccttcgaacccttaactttcaagaacaccacaagaaatcctttcccgcacccgcacaatggtttccggcaccggcttaaacctttccggcaccgggacgcgcttcaacaacgtgcaaccttacacaaccggctttttcgggccgtggttccccaacaaccggttttggacccgcaacaaccacaattgccgcaacggcaacggggccgggttccccggctt

SEQ ID NO: 348873 - DNA, 275 bp, Zea mays
tcggtccttattcgtccaggggagcaaacaagcaagcaagttaaccggccaggagcttgattgaggcccgcgacttgaaacaaccggccatcggagccccggcttaagaggaggagccagctccagattgtgggtcttgtcggcggcaacaccgggccggccgagcacgttgtggccaacgcccgaggagagaccgagttcctgcgccggctgtaccggcacgcgccgggcgagcaccaatgtactttcacccttgttaagcacattaaggggcc

SEQ ID NO: 348874 - DNA, 118 bp, Zea mays
ggcaaatttttgaaagccggggaaacccaaccctcaaggtggacctgggccttatcaaccgaaattacccaaggggggccctaccaaaggggccatcaaatggaaatattgaggcctt

SEQ ID NO: 348875 - DNA, 373 bp, Zea mays
tgtttcacaaggagacacgctttcacgattccaccaccttgcgccataagatggccgattgtataaccgcccgaaaggcaaagcctactagctcctgtccaaccccctgatggcggtgggggtcaaacccttgcacaacgtacgcgcaagccctgccggttacattgcgcacctccacccattgctgagctcttcgcgccccttcgctccggcggccgcggatcccgtgtctgcaccttcaaccccgtcaaggtctcgtgcgcgaggagcactggctcatgtcacttcggctgcgccttcccctacatagggccttctgttcggctgggaggaaccttgagccggtgagggcgatagccacgcaagcgccccc

SEQ ID NO: 348876 - DNA, 278 bp, Zea mays
tctgtccgatccctcgtcagtcaccaaacaacagtgagtgccccaatactgggcgagcctcttaatgttgaacgattcgcgcgtcgtgttcccagacgggataggggccttaatcgtcgagagcgatgaaagggttctaagatcggctggcttgatgctctctcttctaaactaccgagtggccacgtgcgagaggccaacgtcggtagtcaagctcatcaccggaagactcaaagacgccgacgtcgtcttcatcgacgctctgagaggcgcaacct

SEQ ID NO: 348877 - DNA, 137 bp, Zea mays
tctttcgtcgtcagggtcgtgtactcgttttgcctttcaaggcacccgttgcgggggccgatgcccccattgcccgggcgggggccggtgccggagccggggcccttgccggtcttgcaaggggcgcgacccttgcg

SEQ ID NO: 348878 - DNA, 153 bp, Zea mays
tggttaacccggtggctgatgcccaaatgacggtgggtatccgggatgggaggcaggaagccgccaacttcaaacaggttaagaagggggccaaaggagctcccagaccctggatagggccatataggagtgcgctacaacctcggcttccaa

SEQ ID NO: 348879 - DNA, 119 bp, Zea mays
  unsure (1)..(119): unsure at all n locations
cttaataaccctcanaatncgggtgttggtcttttgcagggaggggggttaaaaacaggttcagcagctctcgaagaaaacgaagaaaggccccaagggggagcttggaactggaacaa

SEQ ID NO: 348880 - DNA, 230 bp, Zea mays
tcgtcctttgtcttcactggtttgcttcttctggggccgtcgcaaggacgtaatggcttccgccccggtgcttccgaacgcccgcttccggggcctttttttctaccctacttttcgcgccggttcgatatatgtaccttcttcgcttcccgatgcgcccgcggcggcggtagcgcccgtccaaccgccaccgattggccggaccctcttggcgaggttcattggcaact

SEQ ID NO: 348881 - DNA, 172 bp, Zea mays
tcttccacgcgttcgacagggaccaccggcctggagcttgttaccttgtgggggggcccaacttttggtccaacgcgttgccttcggttgttgtgggcccgaaccccaaattcccttcccagggcccaagcaagtaacatttttgcctaccttccccccgtgacaaacaccc

SEQ ID NO: 348882 - DNA, 159 bp, Zea mays
ttttctaaagcggcagtgcgtagagaggatcgtcgaacagaacagcatgaagatggtcatcgttctcgtcgtgtgcctggctctgtcagctgccagcgcctctgcaatgcaaatgccctgcccctgcgcggggcttcagggcttgtaccgcgcttgcgc

SEQ ID NO: 348883 - DNA, 385 bp, Zea mays
tcggaggatttatacccacccccgtcggtcgatccccttccttccggcggcggcggcggcggcgtcggccgtagccaagaccaagatcccgtcttggcccgcgcacgcacctgacctaaccctgagccctgtgatatgccggttcaggtcggaggcagcaagggggcggacccgaggccggccaggggtgggggcctatcgcccgtaggcgacagggtccgggccttcttcaagaagaaccggcgtcgccacaagaaggccgacgccggctttttcgttttggccatgcaaaggcttttctacaccaagaggggggtttttggcaaattctaaccgggcttttgtccggcggcggacggcgtgtgccggcttttgggccttccta

SEQ ID NO: 348884 - DNA, 118 bp, Zea mays
tcggtcaaaataaacatagatgccatttggaataaaaaaatgctatattccttgggctaacaaacttttaacctccttggcaaaaacaaaaaaccgggggcaggcggtcttgaggatc

SEQ ID NO: 348885 - DNA, 317 bp, Zea mays
tctgtcatcgatctcgtttcaaatccatccatgctcgtttccttcgtcccggaggatcttaaccccatggccaagatcaagatcgggatcaatgggttcggcaggatcggaaggctggtggccagggtggccctgcagagtgaccatgtctagctcgtcgccgtgaacgaccccttcatcagcaccgactacatgacctacatgttcaagtacgacactttgcacggacagtggaagcaccatgaagtcaaggtgaaggacttcaaaacccttctctttggtgagaaggaggttgctgagattggctgcaagaaccc

SEQ ID NO: 348886 - DNA, 329 bp, Zea mays
attgttgatttttttgcccacacactatacacgggcaacttttctacattgacggggttccctttaaaccccacacttacgacctactccttataaccgactactaaaaggcccatccaaccgaacaacccatggcccccttgcatacacttttcccttccccctcgccggccaatgtataccttccctcttccccatgcatgcatcgaggactaactgaagccgccgattcgaccgctccggtcgcatcattttcttttttcggaccaaaattacgttcctccaatctgattttattaaaaacctcaattctaacccaaatatttttg

SEQ ID NO: 348887 - DNA, 230 bp, Zea mays
agccaccttttttgagcacagcagcatcatacaaaagagggatgcaagtgcaacaattgggcgacgatggaaaccaagatatttttccttcttatgctccttggtttttttacatggggtggttacgcgacaaattttccttaatggttacaaacttctattggtttccttttttccccatacctttcattaaattattggttcaagatgtgaaaacccaactttttaaa

SEQ ID NO: 348888 - DNA, 256 bp, Zea mays
tctggcactttcgcagtttgcatttgtaaatcgggacaggtgctgggaagaacttgagtggaaaggcaagcatgggcaattttcggctgtagttgctaccaaaccttactattttcgggaacttgatgttcttgagacaatcgagaatttcttaaagtatgtcccaaatttctggtcttctgatgagcttgcttattctattaaaaatggggaaatactgcaaattgatgaagaatattttggagaacaaatttta

SEQ ID NO: 348889 - DNA, 252 bp, Zea mays
tctagccggtctggccggcgaccactggccccaaattcttttgaggccctagggaattctacttccgcccggctttatagaattcccgggccggcccccctttcccgacttccttttttttcttaaataggcattccggttttcccagaggcaccccttcttcccttggaatcgagaggccctaaggccggaaggccgtaaccataagttcttcttcttttttcgagggcccggcggccgggccccggacct

SEQ ID NO: 348890 - DNA, 415 bp, Zea mays
tgttttagatcgcgagcggccgccctttttttttggttttttttttaagcgggccggcccctaaaacatttaatttcttttttgttgcaaccataaaaaaccgaatgatttgcccccccaccccttcccttattttgaaagaccggatcaccccaaaaaaaactcgctgttttgggaaatccacccaaaaaacaaacttcaaggggttgggaaaaaaaaaaaatgggaggaatggaaccgcttaattaagcctccccttaaatttttttctggacggagtaaaacttggtgctcaggaaaaaggaccccaaggttaatggcaccaacctcactttatcccccttgttgggaaaaaaaaattcggggttcccaattgcccaaggggggtttttgaaagaagggggaaattgggggg

SEQ ID NO: 348891 - DNA, 139 bp, Zea mays
acggtttttggggtttacaaaattttcccaccctactagaaatccccatattcgggggggcgccgcccatcggattggatccttctaacaagtcgacttcatctgatcggcggagccggggcaccaaccaccattttgg

SEQ ID NO: 348892 - DNA, 249 bp, Zea mays
  unsure (1)..(249): unsure at all n locations
ttgtggacggtttcccttcccgcttcactcttgcccgcgccctgtcccggtgggcgcgaatggttctcgcgcgagtccttccgctggccggcccgtnggtcgggccccaccggcggttacttctggcgacttagcggggccggacccgccgggtgtgcttaccgtgcgggccgtcggctggcgcgcaacgaacgccatggcgggcggtgcttttgacccgnccttggacggttccagccccgcagaggt

SEQ ID NO: 348893 - DNA, 193 bp, Zea mays
aacattttgtggccaccggcgacccggcgcctgtattggccatttttcaagcagaagcccttacaaacgcggatggcccacaaaaacacaccaacccaacatcgggagaaatattggcgtccgggagaataggctctgtacgggcgcgggcttttaccaacacaaaaccattttcttcccttagggacccctg

SEQ ID NO: 348894 - DNA, 265 bp, Zea mays
ttttggacgcgtgggcttttagatcgcacgggcgcccttttttttttttttttttttttttttttttttttttttttttttttttttttttttttttttttttttttttttttttttttttttttttttttttttttttttgggaaatggggggtttttattattttcccccccctttgggtatattacaatttttttcttttctaaggctgtctgaatttcgcccaaaaatgaattttttgactttgggctttcccgaattttt

SEQ ID NO: 348895 - DNA, 312 bp, Zea mays
gttctagatcgcgagcgggcgcccttttttgttttttttttttctgggcaaaacagggattacttttagcgcaccttaaaagggggggtttccaggaacacaccagggaaacttccaaggttttgaccatattaaggttgggcttagtttggccaccatataaaggcataacttggttaatggaaatggttaaaattaccaaggggggaaccaggtacttgcattcaatttgggggggaacaatgactttcacaaaaaattttaagattcccttaaaaaaacttttggttaaaaaaaagttggaaagcctgg

SEQ ID NO: 348896 - DNA, 394 bp, Zea mays
tttgcacgcatcgatgcattcaatcatattgtcaccgcggtcggccgggtttaaaccgagggccaagatggggcaaagaggacgtggacaccctcggggaggccgttctggagggggagaaggagggggagaaggccgacttaacgtccagcttaacgatgcccttacaataccgacgacatcagcattcgcacctgcattcccaccatcaaggtcatcattaagaagggcgtcaaggagatctcaagggccaccttggcaggccaaaaggtggtaccaaaagggacaacttgaagcctattgttacacccttggctgaactccttggagatgtaattgggattgacaatgatttgatttatgaatgaattggggaagtagctggcaatttggc

SEQ ID NO: 348897 - DNA, 172 bp, Zea mays
tctgaacttgggctggcgcgccaatctaatgttgcacaataatgcgaggggtgtgcatgtgctcctaccaaccatcggaccgattgtatttaaaaaagcgcccgcttagcttatctttgcccctaacaaccctgctattaaagttaataggggtgctaccctttaactgcta

SEQ ID NO: 348898 - DNA, 233 bp, Zea mays
tttttgagcattcagaaacacaccaagcgggggacattagcaacaacctagcaacaatggctaccaagatattatgcctgcttgcgcttcttgagctttttgcgagcgcaacaaatgcgttcattattgcacaatgctcacttgcttcaaggtccattattacacaggtgcttccaccaggtacttcaatgggcttcgaacacccagctgtgcaagcctataggctacaacaa

SEQ ID NO: 348899 - DNA, 120 bp, Zea mays
tttaaacacacaatctaatgctgactagtgatggtgagttgcaaattaagggcctgattttggccttgccttgacccgtaggggatattggattggaaagggttctttcggtattggttt

SEQ ID NO: 348900 - DNA, 210 bp, Zea mays
gctggggaatacttcctttgccccgcggggggtgattttttaaaattgaattggaattcgccccgaacacccaccttatggggggcaaaggggacttttgggggaagaccaaagccggttaggggggaggacccttaaaccgcccccccccggggggggaggggggcaccggggcccaagttggttccattaggacggtttgggggggag

SEQ ID NO: 348901 - DNA, 144 bp, Zea mays
cttccgggggagggcgtaaagaggcttcaccaacaggacaggcttgaaaagggtggtggggtccttattacttgcaagttcattaattggttccaaactttcaaaggtgaattggctggctacactttggtttcggctggttcc

SEQ ID NO: 348902 - DNA, 330 bp, Zea mays
tcggcggtggggccgagagcgaccggcttgcctttttatcctccccggcttccggcggcgtctttactggttcacttcgacgccttccctggcggtggcgcaactgggaggcgggccctggcgcgcgcgacgaccagccttcatgacggggacacgctggtgattcatagcgcaccacccgccgggtcggcctcgggctcttttgcgccccttcaacggattactggtgcccaacgcttgtgcttgctgtgtaaccggcgcgtctgcttgcgggcgataccttcgcgggcggcggcgatgggccaggaccttgtcgagatccattcgagc

SEQ ID NO: 348903 - DNA, 398 bp, Zea mays
tcgtttagatcgcgagcgggcggccttttttttttttttttttttttttttttttggttttttttttttttttttttttttttttttttttttttaaaaaattaaacgggggggatttttttattaaaaccattatttgaaatgggactttataaggattttttggtacaaggggtgaaaaaaaacttggttttaaaaaggttggcgttctaaaaattatttttgattaagggcaaattttttccaggggaaaaaaaactattttgcctgtttaatgagtttcttttattaaaaaggttaaggacaaatttttcgttacgattaaaaaaagatttgggaacttaaattttgaatgtgttatacaatatcaattttacaaaatttattttagggggaac

SEQ ID NO: 348904 - DNA, 410 bp, Zea mays
tcggctggaaccgggtccgaacgtccgcttggctttccttggattaccatgggactcggccgtccgactgccgggaagcaaaagcaaagcctgcaaacccaaccattgataacgccaacgatcggcagggggtccttctggcgtacatcctcccattccccttcttcgcatgcttaaaggctcaatttgccgactctgcgtgcccggccggaaacagcgccacctaccagaagtcctagttgttatgggacaatgacgtttcgacgctgcctacatgacgcccttatgcaaagacaaactgggaggttttaaagacacctatctacaagaccctcctaatgcatttataaaggctggtatggacaacacttaaattaaatgctgtgacatggtggacataggttataaaa

SEQ ID NO: 348905 - DNA, 313 bp, Zea mays
ttttaaaaaaaaccccaaaggccaaaagcggaccaaaaatagcattccccgcggtcaaagaagggaacaaaacaccaacccctaacaaacgggcccccccctaaaaaacattatagccacaaagcgcaaacactttcccaaagcaaaaaaacccattttccccgttaaaggagggcccttaaataaaaagaaacccgacaaaatttcccttccataaaaaaaaaaatgcgaaaccaaaccttcagcccgctaaaacaaatccaccctacccaaaattaacttacgggacccacgaaaaaaaaaaacaaccccc

SEQ ID NO: 348906 - DNA, 225 bp, Zea mays
ggttaaaaacgcgaacggccgcccttttttttaagatttaaacgggggtgggggggattgaaggctgaacatagaacacaacagaactatcaacccaaactattaaaacccctgtttggcattggtaataaaggaaaaaataaaaaacgaaataaagaataaatgactgactaccttgaaagaaagaaaaaaaaaaacagaaatgtaaaaaaaactgaactaaaa

SEQ ID NO: 348907 - DNA, 294 bp, Zea mays
  unsure (1)..(294): unsure at all n locations
ttgatcgcgagcggccgccctttttttttttggtttttttttattgggagggggggcacttttccctcgattttcttaacaagaaaaggtaattggggcaacaaaaccagtgcattttacccccataaagccccccaagaaacctttgcaaaccaccggcttccccaactggaaaggcctaaaaacaaacaaacacctcangcccaaaaaccaagatccaagcaccaaaagcacgaaaccctccaagaagaaaaaaaacccaaacccattcaatgaaaaaaaacgacccgcggc

SEQ ID NO: 348908 - DNA, 427 bp, Zea mays
tcttctagatcgcgagcggccggcctttttttttttttttttttaacttagaagaacatcatcactccaccggatcgactacaggagcagccgatcgatcgatagatcgcgatcgaacgatcaactacacctagctataggtacaaaggaagcaacacgacaatcggcggcaagattaacattatcctttggttgggttggcggccttactagctctctcttccccggccgggcctaactggctctacctgcaagctctgtcttgatgacgaacgacacaccatgcatgcgcccatgcacgactcatatatgcatgaatggacacatgcgcgtgtggcgccgttgtatgcggcggccggcgataaccattaataagggccgccggaaccagttggggccttataattgttcctgcggggccctgggg

SEQ ID NO: 348909 - DNA, 201 bp, Zea mays
agcctttttgggggaaaaacgacacaccaccgggggaggcgtaaaaccaagagggggggggcgcgctaaaacaaccaaaggaaagggcagtggttgggcaaaaggacaatttgacgaaggaagaagaagaggaaccaagaactgagaaccggaggggccacccacaaaaggggcacaaagacgggcaagtgggaggaaaaa

SEQ ID NO: 348910 - DNA, 246 bp, Zea mays
tttgaggagcccagattagacaaaccctaaggggaagattacgaacggggggggggctaccgaacccaacccaaaccaacctcatggccccgagaaagggcacaaggacaaaacggatcgggccaaggacgaaggaacagcccgcagccggacccaaaaataatgccaagggaaggaaaagaaaagaaaaccaaaccccagaagcgggagtaccgggcaaaagcaagcaaacgggggggagcccca

SEQ ID NO: 348911 - DNA, 270 bp, Zea mays
  unsure (1)..(270): unsure at all n locations
accggccgggtcaagaaatgaccgagggggaaattgaactcagaaggggggggggaaccgagcgtgaccctgcaatacatgaaattaacaggctaagggattggaacggggcatacccagaaagacgtgaagatgaactggtagaagcttcaaataacgcccacaacaatgatattaaaggaggcttaattttcaaaaaactggctacactgagacaatggctacaggaatatagcgggaatcgcaagaagggagnaaagggagaaaatt

SEQ ID NO: 348912 - DNA, 364 bp, Zea mays
  unsure (1)..(364): unsure at all n locations
aaaganaaggggggagggggggggagaagggagagggggagaagggagggggggacggttttttttagagggggggagaaacgggggggggaggggggggggggggggtaaaaaataagatgggggggggggaagggggggggggggggggagggggggggggggggaggggggggggggggggggggggtgggggggggggggggggggggggggggggaggggggggggggggtgggggggggggagggggggggggaggggaggaggaagggggggagggggggaggagagggggagggggggggggaaggggggggggggagggggggggggagaggaggggggggagaggggggggggg

SEQ ID NO: 348913 - DNA, 264 bp, Zea mays
  unsure (1)..(264): unsure at all n locations
aaagggggggtggttnttaggagaggggggggggggggggggggaaaatagggaaaaaaggggaggggggagggggacaaaaggaatgcaggaaactgggtgttgtttgggtggggagaactaaggaatggggggggcggggaggtggcgtggggggggggggcacgggggggggggcgggctaagaacaaaaatgggtggacggttgggccgggggagggaaacggggaggagatattgaggtggtgggcggggggatggggg

SEQ ID NO: 348914 - DNA, 127 bp, Zea mays
  unsure (1)..(127): unsure at all n locations
ttgtggacgcgtgggccgcctccgcccaccggtcgccgccgncgaggtgttctcgtcggccgcggcggaggcggagagggcgatacgggacgggccgtggaacgactggagccggtccgagatccaa

SEQ ID NO: 348915 - DNA, 162 bp, Zea mays
tcttctataacagcatgcgaaacttggcatccatgcgcagtagtcgtccaagacgggggctctgtatatggaggctgcctgcattgcatgtagcacccaccgttggctaactatgaggtgtattttggatccttgcagtaagaatctcagaatctatgccct

SEQ ID NO: 348916 - DNA, 326 bp, Zea mays
tcgattttgagcattcagaaacacaccaagcgaagcgcactagcaacgacctaacaacaatggctaccaagatattagcccttcttgcgcttcttgccctttttgtgagcgcaacaaatgcgttcattattccacaatgctcacttgctcctagggccattattccacagttccttccaacagttacttcaatgggcttcgaacacctagctgggcaagccaacatgcaacaacaagggctttgggcgagcggcttacaacaaccaattgcccaattgcaacaacaattcttggcacattttacaatacaaggcattacaacgcaa

SEQ ID NO: 348917 - DNA, 330 bp, Zea mays
ggctcttgtctccaggctccagccggaggaggtgctggttttggacgcggtccggagcgggacgtaccggggccgcctcgccgcggacgagcccgtggaagggaagttggagacccgcgcggcgcgcgcgcggggaggcgtgggggctgccaaggcagtccaggctctggtcccacccggcagcgtggtggacgggctcggcgccgccgtgctcgcggagtgcgagatccggggcaaggcggccagcatggtggtgacgtggccggcggacgccaggcccgcggagtttggggtcatgcggcgcgttgcggcggaacttggcgttgacac

SEQ ID NO: 348918 - DNA, 407 bp, Zea mays
gccatcatgtcgcgcaggctataccaacacgcagcggtgatgtctgcttgggctccggctgcctatacgctcgtcttgctcctgtatcttctagcaggtgctgtcgtcactgctaagaccaacaatggtgttgatcctggtcctaggcagcaggagccctctatgcccgtggactccagcggtgacgaagccctctctgcgttgacctgcactgaaccttctcgcgctcggcagttggcagtcctgtcctgtggaccgtatgacgtgtttatttatgggcggcgccttcgtctccactccccaccgaaggaagcgagaagcccagaagggatggcaaccggtagtgaggccttcaaagcagctgaggctgtggttgactggcataaacaggacagcaagaggatgct

SEQ ID NO: 348919 - DNA, 344 bp, Zea mays
gaaacacaccaagcgaagcgcactagcaacgacctaacaacaatggctaccaagatattagccctccttgcgcttcttgccctttttgtgagcgcaacaaatgcgttcattattccacaatgctcacttgctcctagtgccattattccacagttcctcccaccagttacttcaatgggcttcgaacacctagctgtgcaagccaacatgcaacaacaagcgcttgcggcgagcgtcttacaacaaccaattgcccaattgcaacaacaattcttgccacatctaacaatacaagccattacaacgcaacagcaacaacagtttctaccagcactgagccacct

SEQ ID NO: 348920 - DNA, 218 bp, Zea mays
ttttcttgtccatatgtacttcaagtgtagacggtggcgggacgctcacaatgtttgcaccttgatcagagagaggaattcccatgtttatgaggcgtttttcaagggttatggagacgactacttgatctaaggattacgcactagagtctgaatatgccagatactgtggatagacatcttaaatgcacatactttgttgggtgcaagctagcagt

SEQ ID NO: 348921 - DNA, 190 bp, Zea mays
cccttcttttctatcccttggcccgccggtccgccaagggcattggccttgggaatgccggttcccaacaagtttaattgattgggaggccccggctaatcccttgggaaaaagaatccttctttcaccaccccgaccaggggttttgccttggcccccgggaatttgaacaaaccttcaaatccccgca

SEQ ID NO: 348922 - DNA, 374 bp, Zea mays
  unsure (1)..(374): unsure at all n locations
tcgtcaccgggggcatcacacaacacctccggacctcccctcccggtcgacgcctcgacggtccgctcccttccaaaaacccacagcccgcttcgacgcttccttccaaaacccacaggccgcttcggcgcttcctcacaaaaacctaccacctggcacttttacttcaccacacacccacacccccgngccatgggctnttcttccccgaccttccttttcttcccccaccttattcattttcggcttcaacccctacccagcgtnccgccggttcaccttactacccttccctttctgcgcttccttccggttcaccttcactcggttcggcttaaccgaccccaccttccttccctaccggttggcttttt

SEQ ID NO: 348923 - DNA, 356 bp, Zea mays
tgaatacgttttcactcatggaatcactggtgggggacactatatactacaggggggattggctacaacacctgcaatgttcaacaggtcacttacaggagatgagagaagtcatttacctgtttatggagccataatgataacagcaagccatctacgctacaatcggaatgggctcaagtatgatacaagaaaactattgctaaataaagctgatatcaaagatagacctgagcgggctttcaaaatatatcaggaatctgcacattataacctgtaagaacatggagaaggtttgaaagtagatagcaataatgcgtactttcgtgttattttatgcttttggtcaggtacaa

SEQ ID NO: 348924 - DNA, 69 bp, Zea mays
tagtggaccgccggccaaccacaaccaacggggggaggcccaagaacacgggcggcccaaaaacccaca

SEQ ID NO: 348925 - DNA, 99 bp, Zea mays
cttggacgcgtgggttgagaatgaagacatagatgaagcctttaggtgtataagagagctcaaccttccatttttccatcatgagggtgtgaagcgtgc

SEQ ID NO: 348926 - DNA, 366 bp, Zea mays
tgctaatcgcgagcgggcgacctttttttttttttttgagagacgatgcatgtgatggctattcagggaggcccatacaagccatgtgcacattcgcaatgcgggaacaacggtaaaaagctatctagtgtagcgaaaacccaatacgtcgacccatgacttggcaagcactaggatcaaccatcaggcactggtcggctgcacgaagtgctgagccacgaagcggcgctggaactttacggtggctgacttgggcaggtcagagcgcgatgaacaccctcttgggcaccttgaatgactgcaggattccgcgacagtgctccagtaacttcatcttccgcagagccaaaccttcctgcggcatca

SEQ ID NO: 348927 - DNA, 380 bp, Zea mays
agccgaccacccgccgaaggccagagagaaatatctcatcttctctgcaccggatcggttcaatcgagagcgagggagaaagggaggtggtgcgtctaggggggccgagatttagccggtttggagccagataggggtatgagctgctttgcgcaccggcggcggtccgacgttcgccgtcgtcaggacggactactcgtattcgtgttcttcctctcgatctgacatctgccacttcttagaaaatccccagatcaaccgagaaatgatggggttgattgagtccttgcaacgcaaggctgttgaagaaggcaagatggctgcaggggatgcctaggaaatatggtgatggtgacttcggggaaaaaagggggtgcttt

SEQ ID NO: 348928 - DNA, 116 bp, Zea mays
ttctgacttcacgagggcaacaagcacttggggggcattctaaagccggcggggggcccctaccagaacatcaacctccaatctctcacggaaaccatctagttaacattaatatt

SEQ ID NO: 348929 - DNA, 186 bp, Zea mays
  unsure (1)..(186): unsure at all n locations
cgtctctgctcgtcccctcggtttctcagactgnnctccctcgnngtctcatacgaaaacctctcctcgtgtttatattccctctgcgtctcctnnctccgcttctcttccacataantcctaccacggcaccaanctcgcatcgtgtggctcacgtcaagatcccccgtccccgcatattcctaa

SEQ ID NO: 348930 - DNA, 197 bp, Zea mays
taggtactggtgccactggtggattgggagggcttggttcaccagatttgagtagtttgcttggtggtcttgcttgcagctcaagaactggtgcttctggtggtttaggaggtttgagatccccaatgtgtaaaatgtgcttgggaactgttgcatatactttgtgacaacatggttgtgactttcccgatttttgt

SEQ ID NO: 348931 - DNA, 323 bp, Zea mays
tttttctttctatcagggtgcttctcctcgggttttcggtgctgctcaagccaggacatgttgcctttgagggtattatcttcctgtcattcttgatgatgctgtcctgcacgactgttgggatactcttgctggtttactaccctgtagctgattcattggccctccgagatataggccagagggacatagcataaatggtgccttatgatgattactactatgaaggcacatcgcttgtggcccaccagagtttccgagaaatcgagcggaattctgacacttcaacggagccgggatccatatcctttcggacaatgatc

SEQ ID NO: 348932 - DNA, 362 bp, Zea mays
ttgggtcttcagaccattagctttatctactccagagcgcagaagaacccgatcgacaccatgagggtgttgctcgttgccctcgctctcctggctctcgctgcgagcgccacctccacgcatacaagcggcggctgcggctgccagccaccgccgccggttcatctaccgccgccggtgcatctgccacctccggttcacctgccacctccggtgcatctcccaccgccggtccacctgccgccgccggtccacctgccaccgtcggtccatgtgccgccgccggttcatttgccgccgccaccatgccactaccctactcaaccgccccggtctcagccttattcccagtcacacccatg

SEQ ID NO: 348933 - DNA, 109 bp, Zea mays
gtcttgttccatcattgatccgggtgtcgcttttttagtagtctgatggactgttagtagtttgcgttgcgtcggttgagagggaacgttggtggtggtggtgtgtttg

SEQ ID NO: 348934 - DNA, 133 bp, Zea mays
tcggtggaggtttagaggattaggcttatttacctgatacttcaagaactccatggtggaacctatagggaacatgaacgggacggagctctactggctttacatgaccgcgaaacattcacagatacaaggg

SEQ ID NO: 348935 - DNA, 262 bp, Zea mays
  unsure (1)..(262): unsure at all n locations
cctcactaattctttatcttccgagatacatacgcaggcctcatgttatgtgtggcgggtcccccttcccntgcttttttaatattttataattaacaactccataattcaactttttcttntnnnccttatatcgtttttttctccaatctttttttcctnttaatccacccctgtnttcctttttctttttcaaaattnttttatttttttcttttagatttttcattattatttactataattctcttttttttttctt

SEQ ID NO: 348936 - DNA, 238 bp, Zea mays
tcaaacagtttgctgacgaggttatctctggcccagtcatgggggagctggggaccgatgcatttgaggtgcttaatccggtagcggcattggctggcatcgcttttccggtgttcttgaatgatttacaaagcacagtacctaaagactctgacccgcatcgaggactggaatgttttcggatttaaaacaaccaactggtggatcattgtcctatgggttcgagaagaaaaaatat

SEQ ID NO: 348937 - DNA, 277 bp, Zea mays
ttatctcgtttcaaatccatccatcctcgtttcctccgtcccgcagcatctcaaccccatggccaagatcaagatcgggatcaatgggttcggcaggatcggaaggctggtggccagggtggccctgcagagtgacgatgtcgagctcgtcgccgtgaacgaccccttcatcagcaccgactacatgacctacatgttcaagtacgacactgtgcacggacagtggaagcaccatgaagtcaaggtgaaggactccaaaacccttctctttggtgag

SEQ ID NO: 348938 - DNA, 135 bp, Zea mays
  unsure (1)..(135): unsure at all n locations
gactcactaatagggaaagactggtancgcgctgcagtgtacacggtaccaggaattacccagggntcgaacccacagcattttctgtacatagttcataagaatcgtcgagcaggaccgccgcgtgtgtttttt

SEQ ID NO: 348939 - DNA, 145 bp, Zea mays
tcgtaatcttttctcaaatccatcaaaccgcggttgtttcccacactataatggggacctcccagccaatatcaagatcaaaaacatggcgagcggacaaaccagaaggctgagaaagaaaggcggcaagaggggtgacaatgtc

SEQ ID NO: 348940 - DNA, 395 bp, Zea mays
  unsure (1)..(395): unsure at all n locations
ctcgccgcggcgaccatccccgcagttctcactccagtcttcacacacctntcacgagcgcgcgcgcgcgcgttcgccatggcgccgtctaagcctttattccccgtcgccgtacccgtccccgacccgttcgacgaggtcgtgcgcgagttcggcccactgctccggatctacaagagcggccgcattgagcgggccctggtggccccggccgtggtgcctgtgcacgccgcctgcactggtgtgctttccttgggcgtttgtcattgaattcctcacctgggcggttttgttcccatctcaagggttttgccccggatcttagttggtctaggttcaattgtcactatcttttttttactatttctttaatgcttcgcgtgcttatttgtatt

SEQ ID NO: 348941 - DNA, 407 bp, Zea mays
tcggtgctagcaaaccttgctgcatactctcagcaacatcagtttcttccattcaaccaactggctgcattgaactctgctgcttatttgcaacaacaattaccattcagccagctagttgctgcctacccccagcaatttcttccattcaaccaactagcagcattgaactctgctgcttatttacagcagcaacaactactaccattcagccagctagctgatgtgagccctgctgccttcttgacacaacaacagttgttgccgttctacctgcacgctatgcctaacgctggcaccctcttacaactgcaacaaatgcttgcattcaacccacttggtttgacaaactcaacagtgttctaccaacaacccatcattggtggtgccctcttttagattgctta

SEQ ID NO: 348942 - DNA, 177 bp, Zea mays
ccacccttcaaatatggccacttccaccggtacttctcttttggcgctgccggaaattcatggtaactatttttttggtgcggctacatcagaatctcataaggcaatttgtcaggttattgggacattcaacttgcatgaggtggtcaacaaggccatctctggttcctgatgggg

SEQ ID NO: 348943 - DNA, 95 bp, Zea mays
ttctcccgttggtggatcttggcactgatcagggttgtttggtttgctttggcgggctaatggcgcccgcttcatgtgggcgttcgtcgcaaagg

SEQ ID NO: 348944 - DNA, 408 bp, Zea mays
ggggcgcgagggttaccacaatccacagggatcaaccggacgccgcgggtgaccaacccacccgcgcttaaccccgtcagatccccagatccccctcccagctagccatgggcgcgctccgctctggtcgccggccgcactggcactgctagccatggccgccgacgccgcctgccggagcccgctggtctggctcttcgcgctcgtcaccgcactcttcttcttctcctggtacctactcctcgactccgccgcgggcccagccggcgcccgccgccccaaccagtggctccgcctcggcggcggcgggcggcgctccggtcccggtaggaaatgcgaccccgcggaggcgctgctgcgagtgttcatgtacgacctgccccccgagttccacttcggactgctcga

SEQ ID NO: 348945 - DNA, 362 bp, Zea mays
gcacaatagtgtaccaacaatggcagccaaaatattttgcctccttatgctccttggtatttctgcaagtgctgctacggcgaccattttcccgcaatggttaccaagctcctatagcttcccttctttccccgtacctctcaccagcggtgtcttcggtatgtgaaaacccaattcttcaaccctacaggatccaacaggcaatcgcagctggcatcttacctttatcacccttggtccttcaacaatcatcagccctattacagcaggtacctttggtgcatttattggcacaaaacatcaaggcacaacaactacaacaacttgtgctagcaaaccttgctgcctactctcagcaacag

SEQ ID NO: 348946 - DNA, 230 bp, Zea mays
gttctagatcgcgagcggccgcccttttttttttttttttttttttttttgtctttttctttttttttttttttttttttttttttttaagaacccggaaatgtaacctcttatttttgggtggccccatacctcctccaaaaaaccctttttttggaaccccccctctacccactgtgggggggccccccccccccgttgtgccaccggggggacccaagatttttccc

SEQ ID NO: 348947 - DNA, 223 bp, Zea mays
tcatagcggcagtgcgtagagaggatcgtcgaacagaacagcatgaagatggtcatcgttctcgtcgtgtgcctggctctgtcagctgccagcgcctctgcaatgcagatgccctgcccctgcgcggggctgcagggcttgtacggcgctggcgccggcctgacgacgatgatgggcgccggcgggctgtacccctacgcggagtacctgaggcagccgtagt

SEQ ID NO: 348948 - DNA, 387 bp, Zea mays
  unsure (1)..(387): unsure at all n locations
ttttgttcgcacaccccgttcgtgccacactggcacctaaccccccgtccttccccacgatcccgaggctactagcactaggcgtcgtcctcggcagcaacggcggctgggctcccgccgatggcggngttcctcgccgccggcggcttttgcctcggcggcaccggcggcgagttgtcgtggtcggcgcggccctgccccgggagtctcgtggcgagctttcccagcgccgggcggctccggcgccccgcttcgggcgtgcggtgcggaggtggggttttgcccgcggccgcggggacgggggcggaagcggaggaagggggccgcttcgctggctggttccgggaggcgtggccttacatacggggcccccggggcagcaccttc

SEQ ID NO: 348949 - DNA, 175 bp, Zea mays
gtcccctgctccattctcagccgccgccaatcccttcccgtgctccgcaaccgctgagtgagaagaagagatggccggcaagggcgatggcccggctatcggcatcgatctcggcacgacgtactcttgcgtcggcgtgtggcagcacgaccgcgtcgagatcattgccaacgac

SEQ ID NO: 348950 - DNA, 212 bp, Zea mays
tcgcgcccgctgcctgactggcattattggcttccgggcttcgctattcatccgaccgtccgtgggttcttccttcggttcccggtacccggcccggcccggcgagaagcttcgggctagctagcaaggtagctaggcacctacccgtgctttggttcggttgggtggcgccataaccattgccgaggagcgagggagcaacccggcgggca

SEQ ID NO: 348951 - DNA, 109 bp, Zea mays
  unsure (1)..(109): unsure at all n locations
gnttcagatcgcgagcggccgccctttttttttgtgtttatgagatgatggcggagatagggacaaaataaatgcaacgaaatgattgataccacagtactggccaggg

SEQ ID NO: 348952 - DNA, 198 bp, Zea mays
tcgcaggcagcatctgcatctctcgcccacctccgctccgactgctgctgctggtggtagggaggcggagaaggaggccccagcgcccgcccggcggccggatcagagacgcagcaaccaccacccatggcggacgtgcacgaaccttttgtgcgccgtaagaggaagaaggttttgagactccaacttggggaaaca

SEQ ID NO: 348953 - DNA, 211 bp, Zea mays
tgctggttcgtgaggttctccggggttcggcttcgtgggtaagcggatcagagaaggcggcgtcagatgttgagtaccgctgcttcgtcggcggcctcccctgggccacggacgaccactcccttcacaacgccttcagcacctacagcgaggatctcgagttcaagatcatccccgatcgggagacacatagagatccggtagcttcgga

SEQ ID NO: 348954 - DNA, 204 bp, Zea mays
gtctgtttacaaacatgccctcaagcttatgcccacgcgagtgagaagtgagaatctcctaggaaagagaaacaacgaagactcgaaacgagtacaccaacctttctttctcttctctcgcttctgcggcgaattttcttgtcccgtgccggccgccgtgtctaccctgagccaccgtccctaccaacgcctggcgtgaagaca

SEQ ID NO: 348955 - DNA, 197 bp, Zea mays
  unsure (1)..(197): unsure at all n locations
ctagntctagatcgcgaacngccaccctttttttttttttaangnctggggggncngactctgaagagtagcataatttaccaaccagaaacccgaaacttatgttctgaggatcgcgtaacagccacaagttttaattatgtaacttgggcagcaaaattaatgtattnntgttatggggtaaggttgacaacaaa

SEQ ID NO: 348956 - DNA, 215 bp, Zea mays
  unsure (1)..(215): unsure at all n locations
agtctagatcgcgagcggccgccccttttttttttttttttttttttttatttttttntcctttttcccccttaaaaccaaaacttttttttgatgcattttttattggtcctcccccacatgattatgggcggcggcttaccgcatttttcccttttttgatagggaggggtggtttggggggttttcccaaattttatgattcaggtgggggg

SEQ ID NO: 348957 - DNA, 87 bp, Zea mays
tcggcgcctgcagcgggagaaggccgccgcgcaaattgaggcccgccagttcaagcgctacgcccagggccgcgaggacagggagcg

SEQ ID NO: 348958 - DNA, 71 bp, Zea mays
tctcatcaatgagaagacctgcaatgctctcctcttgtaagtgaaccaaatcgggtctgtgaccgagagta

SEQ ID NO: 348959 - DNA, 127 bp, Zea mays
tgcattgattcctccccggtccccacatcctgccgccaatggatgtcgacgggcccgcccccgccgacgcctctgccaggcccgccaccaacggcgaggcccccttcggcgcccgcgaggtcgacgt

SEQ ID NO: 348960 - DNA, 187 bp, Zea mays
gtcgactcctgcgtcctagtcgactccgaagaggtgatgagagcacgaatcggcggatgtggactccaccggcttgtctcctttgggccacacgttaggtggccgtatactgttccaggtttgtttgatttattaactctcattttctttatattgttatcatctcactttctatattattttttat

SEQ ID NO: 348961 - DNA, 94 bp, Zea mays
tggatcgcgagcggccgccctttttttttttttttttttttttttttttttttttttttttttttttttttttttttttttttttttttttttt

SEQ ID NO: 348962 - DNA, 153 bp, Zea mays
  unsure (1)..(153): unsure at all n locations
gtgcctccatnaaggcccctgtcccttgctagttcagagttgggtgcgaccatgggtaatgagtactcccacatcaacattgtggttattggtcatgttttctttgtcaagccttcctcctcatgacaccttttctacaatctagctggcttt

SEQ ID NO: 348963 - DNA, 128 bp, Zea mays
tttcttactcctcgtccgtccgtcccccatacgggcacgcctttgagtctacagagctgccatggacggtggaagagagcattatgctccttcagtgtttcattcaagtataaagtaccattatatac

SEQ ID NO: 348964 - DNA, 228 bp, Zea mays
  unsure (1)..(228): unsure at all n locations
tcgtgattaccccgcgcttctcctctaccgcgcgtgccacctttcgagaggctggagccctgatcccacgctgtgggcggcggtgttaaggagtntaacgttagcgaggtggcggccggtggcactgcttgtagtggcgctgacagcggttctgtcatcagttcagtggacggatgctctctcagtgacggtgaccgacacctaatgaatttcactagttcgttcata

SEQ ID NO: 348965 - DNA, 116 bp, Zea mays
ctcgtagagagaaggaaaaatatccccaaaccctagctcccgatctcgatggcgaaccctcgcgtcttcttcgacatgaccgtcggcggcgccccggcgggccggatcgtgatgga

SEQ ID NO: 348966 - DNA, 177 bp, Zea mays
ttcttcttatagagtaagcaaaacctccttaagcccttgctcccgatctagatggggaaccctctctttttcttagacaagaccctgggtattgccccgagggaccggatcttaattgagctactctccaacgaggctcccaaaaccagttttaacttccatgccgctttcacgggc

SEQ ID NO: 348967 - DNA, 227 bp, Zea mays
tcttctgttcgctagctgtgcatcatccgtcgttctggcgagcgagcgagcgagggagagacctagcttgactgaccggacgtcagcaggccgagaacgaatcgcgtgtttgtgcatgagccatggcggaccaacagcagccacagcatcagccgcaagagatggacctcgttcgtaccggaggcctcgaactgccttcagggttccgtttttcacccgagcgactt

SEQ ID NO: 348968 - DNA, 112 bp, Zea mays
tctgttctagtctcttactatacagctactggggacccccttgaccctacagaggatgctctcttccagggctgtctcgtagaagacgtctgttaatcacatggccagggct

SEQ ID NO: 348969 - DNA, 267 bp, Zea mays
gggggggtaattaacatatatatgaggttttgggtcacgattattttggtccaaactcgaatttggttcttacaaccatcaattattagcacaaccaagcagattacttacaccaaacgagacattttccacacatgccatggttccgggcatgttcttagttggtcattcatacacacacattagttaccaacttctggtttttaccggattttcaaaccatgcatgcattatattttacaaaaagcaatgcagatattgattttt

SEQ ID NO: 348970 - DNA, 255 bp, Zea mays
tagcctacgccttttcctcctccttggcttgttcctcgctgcagctctcggcggcgaggtcctgggcgccgtcgacaaaccaccttcctcccccgtctctcgtcgtctcggaaggaacggccgtccgtcgcgccaaggattcaaggtgcgtgcaccgcgcttcttgcagagagaaaggtgtgggtgctgtgttgggaggaggtctgctgctgcagctcatagtaagccctcattctcttcagaggcttaagtacc

SEQ ID NO: 348971 - DNA, 372 bp, Zea mays
aaaaattttcccgttcacctcgcctgcgggacaactggggcaaccgccgccgcccgtctgcccgccccccctacgcccagctgcccagatccgagccctttgcccggcgatcacaccaggcctgctcagctgacctcacctggacaatcaagctgaagagaaatatcatagtgtgcatggtttttcaggaatgaagcgttttgtctacataaatgatgagtcttatcagaacgactactgtgataaccgagtttctaatacaaagtataccttattgaacttcgtgccaaaaaacctatgggaacagttcaggcgcttcatgaatcaatatttcttagtgatagcttgtctgcaactatggtcacttatcac

SEQ ID NO: 348972 - DNA, 140 bp, Zea mays
  unsure (1)..(140): unsure at all n locations
tnctcgttaactttggatgntgaacatacaggagactccatttttgagtcaaaagaaaacaaaaaaaaaaaaaaaaaaacaaaaaaaaaaaaaaaaaaaaaaaactaaaaaaaaaaaaaaaaaaaaaaactacggggggt

SEQ ID NO: 348973 - DNA, 274 bp, Zea mays
gctagatttgtattactgttattcacttgacatgatgcaagaaaaggggaggtgcacctaaaggattatatcaaatttttattctcgaatgtgcaagagaactgcacatctttatattaagggggtgtttgcatacaccttgtccttattattcagtggcattactttattgtgtttacatttatacattttctatttatttcatttatttccctatgtttttcctatattttatatatttttaactattttctttatcattgttatttatttt

SEQ ID NO: 348974 - DNA, 94 bp, Zea mays
  unsure (1)..(94): unsure at all n locations
tgctcggttagaagcaacaagcgnacagaaaggaagaggtacataagtgagcagggagcccccaatactcgccaagacgaacaactcgtcccaa

SEQ ID NO: 348975 - DNA, 103 bp, Zea mays
  unsure (1)..(103): unsure at all n locations
taaagaaagctcggacgcctgcacttaccgttccgtaattcccgtttccacccacttgnctgtgtattgcgcatttgcaaacacacccgcaagtgcttctctt

SEQ ID NO: 348976 - DNA, 162 bp, Zea mays
ttgttcggtctcatctccatcgtcaaccacatgaggacccttctacagatcgagcagaagggcctctcccaggtgcacatagatgctgtactagaccatgcatcacctcacccacggccatcttgaccggcattcatacgcccatgcacatttgtgcttctt

SEQ ID NO: 348977 - DNA, 72 bp, Zea mays
ccggcaaattctattccttcccccttccttcggcgggcgcgcgcgggggagttccaaacccttagaccggaa

SEQ ID NO: 348978 - DNA, 152 bp, Zea mays
agtcgtcgttcgtgtattgcagccatcgcacggcaaattggccagcagcggcgggaggtggtgtttttagcctgcctggtttccttcctgcgcttgatattttgtctcctcgaattccccctattatacttaaattttctattattctgata

SEQ ID NO: 348979 - DNA, 154 bp, Zea mays
gttctagctgatcccacccgaatgctagggaggacttattgaccgtgcggaacgagccagaaaacaggtctagccgccgctcggcacctctgatccggcctgccgccggtgagcgatcaccttgaaaactgcggatcccatgtcagccatcaag

SEQ ID NO: 348980 - DNA, 144 bp, Zea mays
tttccgggttgtctccacagcgttcttgttggttttcccaagttttttttcacaagaattttttgtttgctggcttggaaattagtttacctaatccgttgggggacctgtggttcctttgggtgcctccaagttttttccttt

SEQ ID NO: 348981 - DNA, 285 bp, Zea mays
tctagcgagtcggcgcgagcctgaccagccacctagctgaacccgaactggcgcacgaaccctagctactacctactagacgtccctgcccccttcccctccggaggtgctggattcacccctcctctccctagcgggtcccggcgcggacgcaaggcaaaggcaaaaggcgacagaggtggccctgcagtccaccaattagcggcttttgggctcggcaagaacgccattttcatcgtctccggagctatcggatccattcttacatgtggattagtctggtct

SEQ ID NO: 348982 - DNA, 407 bp, Zea mays
gttctagatcgcgagcggacggccttttttttttttttttgaacacaagggtcttgaacatcacaaaatacaatatcgaatgctcatgtaaaatgcattttaacctttcaccattgatcaagtcagtccgaccaaacaattacactgttgcgctttacaataccaaaaccatgaatgctaactcttaggtattcaatatacaagcgattcattctatttaactacttgaaacatgattcatcaacatagaagtctgtcgtagaacaatgaggtcaggaaacacctttatgagggcatatcatggaggaacaacaactacaacaacctgtacaggaaaagcttgatgtacactatcatttacaacagatcattccattcaagcatcgatctgcattgtcctttacttc

SEQ ID NO: 348983 - DNA, 154 bp, Zea mays
gtcgccatgggaaccaggaatcttacgcggaaccgcgccgcttccatggcgacggcatccactacgctgctcctctcccttgccttcctcgccttcgcctgggcggcgtcgccgtcgccggatgcggaggcgatctcccggttccaggagttcc

SEQ ID NO: 348984 - DNA, 71 bp, Zea mays
tctttcgggcgaagaggcaaccagggagcatgggcgggaccgcaccactgccagggggacatcatcctctt

SEQ ID NO: 348985 - DNA, 288 bp, Zea mays
ctgttggagagggacaaacaagaaaaccggctggaccttaccagctgacgccgtggtccactagcgccttcctcttccgtcgctcggcttgttcaaccgccttctacagataggctaccccacggtttcaagggctttttcataactactaaatgtaagaatagcatttcttatccaacaactcattaagagttttattaagtcttagattttgtgttcctttatgatataaagctattatctgcttgttgaacattaaatctagttttttcttttaattataaatat

SEQ ID NO: 348986 - DNA, 384 bp, Zea mays
  unsure (1)..(384): unsure at all n locations
tgtaacgaatgtcggtgcggccgtgctggccgtggagccgcatagcgcagcagtcacaaccccggtggcttcgatcggtcctgctgccacgccggcgtcgaggggcaagaaaccgcggaggcctcgtatactgcgtggccggaacgcggtctcagctgggttgtctatctaacttccgtgttcttttttggattctcttttagattcccgagttaagattttcaattccatnntgtctggcttcattattatttggttctttgctggattcttttaatgtgacatttattaattgtttaatcttgaaatctctcgttggctcctttttttatttattcttttttttttgattctttccttttttcttttattttatttagtcta

SEQ ID NO: 348987 - DNA, 73 bp, Zea mays
gctggacttcctcgagccggagtctctggctgtcgctcttgctcttaaaccacctgggccgcccccctttggg

SEQ ID NO: 348988 - DNA, 183 bp, Zea mays
caatgctcacaagctcctatagcttcccttcttcccccataccttccatcaatgatagcttcagtatgtgaaaacccagctcttcaaccctataggctccaacaagcaatcgcagcaagcaacatacctttatcacccttgtttcaacaatcgccagccctatctttggtgcagtcattggta

SEQ ID NO: 348989 - DNA, 75 bp, Zea mays
tcgcgccactacacgggctccagggtcgcgcaccaccgcatgttccgcggtggctggcagggctcctcggcgtcg

SEQ ID NO: 348990 - DNA, 225 bp, Zea mays
  unsure (1)..(225): unsure at all n locations
tcgaaaaaaacagagaatccaatagaaaggaacaggaaagggacgcccgtctcancacgtcccgcaccccccggcgccttcatggctgccctgggcctgctcctcctcctcctagccgtcgccggtgccgccaacgccgcggcgcccggcggcagaatgtccatcatcttctacaacgaggagcacgccgcgcgcgggctggagcggacggagccggaggccccg

SEQ ID NO: 348991 - DNA, 416 bp, Zea mays
  unsure (1)..(416): unsure at all n locations
attgagaccaactagcaacatagaaagcacaatagtgtaccaacaatggcagccaaaatattttgcctccttatgctccttggtctttctgcaagtgctgctacggcgaccattttcccacaatgctcacaagctcctatagcttcccttcttcccccgtacctctcaccagcggtgtcttcggtatgtgaaaacccaattcttcaaccctataggatccaacaggcaatcgcagctggcatcttacctttatcacccttgttcctccaacaatcatcagccctattacagcagttacctttggtgcatttattggcacaaaacatcagggcacaacaactacaacaacttgtgctagcaaaccttgctgnctactctcagcaacaacagtttcttccattcaaccaactagctgc

SEQ ID NO: 348992 - DNA, 69 bp, Zea mays
  unsure (1)..(69): unsure at all n locations
tgttgggtccacccgnccgtttggtcctagatctggagcggntcaagaaccagaaattgtacggtcata

SEQ ID NO: 348993 - DNA, 363 bp, Zea mays
  unsure (1)..(363): unsure at all n locations
gtggataaaaaactttgttaccaatttcatgaagaaagttagtaatatatgatgntgacttgcaagttgcaaccaccaaataatttgttggacgtccatagctagaatgctacattntgtgtagaataactaaacatgattaatgttttcagtgtggtgtagaccaactaaacatgattaatgttttcagttttagaatgtgatcaagccatgttctgttgtcaatttctacctttctatatttggggctttgagctgacttccaagttggaaatattataattcggatggagaaggtccttagcctcttatgaaatactctctggacatcaagggcaagcactattatgagatggctcgact

SEQ ID NO: 348994 - DNA, 415 bp, Zea mays
  unsure (1)..(415): unsure at all n locations
gttaacccaattcttcaaccctacaggagccaacaggcaatcgcagctgggagnttacctttatcacccttgttccntcaacaatcatcagccctattacaacagttacctttggtacatttattggcacaaaacatcagggcacaacaactacaacaacttgtgctagcaaaccttgctgcctactctcagcaacagcagtttctttcattcaaccaactagctgcattgaactctgcttcttatttgcaacaacaacaactaccattcagccagctacctgttgcctacccccagcaatttctttcattcaaccaactggcagcattgaaccttttctggtttatttacagcagcaacaaccactaccattcaagcagctagctggtgtgagccctgctacctttttgacaca

SEQ ID NO: 348995 - DNA, 88 bp, Zea mays
tcggttctagatcgcgagcggccgcccttttttttttttttgaagggtggtggatttttttttttttttttaaaaattttttttgaac

SEQ ID NO: 348996 - DNA, 81 bp, Zea mays
  unsure (1)..(81): unsure at all n locations
ggtcttcagaccattagctttatctactccagagcgcagaagaacccgancgacaccatgagggtgttgctcnntgccctc

SEQ ID NO: 348997 - DNA, 366 bp, Zea mays
tagcaacatagaaagcacaatagtgtaccaacaatggcagccaaaatattttgcctccttatgctccttggtctttctgcaagtgctgctacggcgaccattttcccgaaatgctcacaagctcctatagcttcccttctttccccgtacctctcaccagcggtgtcttcggtatgtgaaaacccaattcttcaaccctacaggatccaacaggcaatcacagctggcatcttacctttatcacccttgttccttcaacaatcatcagccctattacatcagttacctttggtgcatttattggcacaaaacatcaaggcacaacaactacaacaacttgtgctagcaaaccttgctggctacttt

SEQ ID NO: 348998 - DNA, 95 bp, Zea mays
  unsure (1)..(95): unsure at all n locations
tcggttttttgatatattctctctctctctggggtggaaaaaaaggggttcaggggnaaagggcatcgacttacctggntttgaggttttttatg

SEQ ID NO: 348999 - DNA, 422 bp, Zea mays
gggacgggaaggggaataagctgaggggaaggcaaggcaagcaggaatcggctggattgcgcgccgacttcctggccgagtttttctagccatccgagcgaggcagtcccatctgcgaagacccggttccgttcggcggccatgcggatggtttctctgcttggtctgtcaggtaggctggcgtgtggcgtccccctgattgatgtccaagtgaagtgatcttggtttggagttctgcaattgctcttgtcgtgctgggctctgctcagttacttgttgatctgcggtagcttggtcttgcttattccgatcgacaataaagatagcaaagcttttcttcgtgttcgtgcaaaatctgtgcttttacctttcttgcgcttatagcagcctgcctgtgaagaagtccctgtttcaaatccagc

SEQ ID NO: 349000 - DNA, 391 bp, Zea mays
  unsure (1)..(391): unsure at all n locations
ntcgttttgctcctcccctgcctcgcctctctctctctctcccctctcctcgccttcagcttctgctcggcccgctcgcgntcagctgcgcgcgcgtctgcggtggccgtgaaggacagcccgagggacgcgccgggtgcactgatctgggggccgcgtgtccccggtggtggggcgaggcggcccccgcttccaagaatgtgaggtcccgctacacaaggggtggggcagcttggagtggctggttcttttgcatatgcgctttctattggtggtgtcatttcaaaggaggccatagtcttctggattttggatgccttgttatctggaattggtgaccatagatgtcatttcgtagcataatccgtgatgttagggatggctttcgcag

SEQ ID NO: 349001 - DNA, 121 bp, Zea mays
  unsure (1)..(121): unsure at all n locations
ctaatttttttgagcacaacacctgcggtcccttggtgcttttttcagggggtttttttttttttaaaaaaaaaaaaaaaaantttttatttttttttttttttttttttttttttttttt

SEQ ID NO: 349002 - DNA, 54 bp, Zea mays
  unsure (1)..(54): unsure at all n locations
nntcttttttttgcctctgcaaccccatcatcgccaaggggttctcgggcgggg

SEQ ID NO: 349003 - DNA, 282 bp, Zea mays
gccagatattgaaaggaccaattggaccaggcaacagaatcatagatatggtcacaggaccatacaaactcattagacggtgtgaaatgactgcaattcttatacagtacgcgctgccaaggtgatttttttctctcattatttaacaaactaattacaattgatgcagtttccctttgatgaaggttgattctagtgccaatcctgttgccgcttgtccacggcagtcagggcagagcgataggatttgtttgcaattaacctgatcgtggcctcgtccac

SEQ ID NO: 349004 - DNA, 421 bp, Zea mays
gtttcaaatccatccatcctcgtttcctccgtcccgcagcatctcaaccccatggccaagatcaagatcgggatcaatgggttcggcaggatcggaaggctggtggccagggtggccctgcagagtgacgatgtcgagctcgtcgccgtgaacgaccccttcatcagcaccgactacatgacctacatgttcaagtacgacactgtgcacggacagtggaagcaccatgaagtcaaggtgaaggactccaaaacccttctctttggtgagaaggaggttgctgtgtttggctgcaggaaccctgaggagatcccgtgggggttcggtggtgctgaatatgttgtgagtctactgggttttcactgaccaggagaaggctgcagctcacttgaagggggtgccaaagaagtgtcatctctgc

SEQ ID NO: 349005 - DNA, 422 bp, Zea mays
  unsure (1)..(422): unsure at all n locations
gaccaaagcagaccagaatccgccctaccaatgcgcctcccagatcggcggtccacccggaggcggcgatggcgtcctcgcatgcgaacctcgacaagatgcagcttcgccagagctaccgcaacgtctggcacaccgacatgacgaacgccattcaggccgacttcccctactgctgcctcgcgctgtggtggtgagccatccatcgaccctgcctagcagatctcaccgtcaccgtcttctgcgggctttgagtctcgaacccctagccttccgtagatccgaggacacttaatttgtcgctgtggctagggttattgncaggtttggtctccaagggttccgcgttgtgcattgccgctttttcgaggagcatatcctgaactaaattgntgcagtataaaagctcattctacattata

SEQ ID NO: 349006 - DNA, 254 bp, Zea mays
  unsure (1)..(254): unsure at all n locations
cgtcgtttacgcgtncgnccacgcgtnncgccacgcgtgcgtccaacgcgtgcgtccacgcgttctgccacgcgttcgtcacnnctaaacccagaacccagcccggcccaaccctagtcgtcgtcggcgcgcgcgcgcgggattacaccactggcggcngcacccccatggccgggccgtcagaggacgcgttggggcgcgcgctcgcgggtcgcaaggctgccgtggacccccaagcctaggccgtgcgcgcg

SEQ ID NO: 349007 - DNA, 229 bp, Zea mays
  unsure (1)..(229): unsure at all n locations
tggttctagatcgcgagcggccgccctttggttttttttttaattttttnggtttttttaatattttttatanattttattttttgtatttttagtatttattttttttttntttttttttttttataaattagttttgtactaaataactactaaataccgattaattaagcaanctcataaataaaccataggcaatttttggaatgaaaggaaacaaaggtacaaa

SEQ ID NO: 349008 - DNA, 243 bp, Zea mays
  unsure (1)..(243): unsure at all n locations
tttttgtcgcgtgggcacaaccacaggtggtggcggtctaacaacacgcttgggctaacgcttgcacccttttacaactgcaacaaatggtggcattcaaacaaattggtttggccaaaccaagaggattttaaccacaacccaataatggggggggccttttttagaattcttatgaggtataggtcaataaataaggtttttggcttgaaaaaaaaaaaaataaanaaaaaaaaggggggg

SEQ ID NO: 349009 - DNA, 75 bp, Zea mays
ttttagagcagacccggatttcgctcttgcgggcgcttttgtaaagcatggggggatcaaacgatccgtccgctg

SEQ ID NO: 349010 - DNA, 282 bp, Zea mays
  unsure (1)..(282): unsure at all n locations
tcggggctgaggcctgaggctcataaggcacgcaccatgccaaacggtgtccagtatatataataaaagacaancaacgacaccgaaaaaacataataaactacaactccaggngcgttacaaacaagagggcacgtcgcgtcccgtcgagaagcgctgcacttgtagctggattgcatgcaccaacacaggagtgtttttccacttttctaaaccctctgaccccggccctgacctcaaaacccatgactactttgtttgaaacacaggggggacgccttc

SEQ ID NO: 349011 - DNA, 335 bp, Zea mays
caaaaaaacaaaaatatatatcccaatcctattccttgcttgtctgaagcgatcccggcccccccggatctcccataactttctttctggccggcgcaatatagaagcaagacaaaattgctgcggcgcctgcccgcgcaaaggaaataattagcacttgtttgccaaatgcagcttctgacgcatggctagttcttaaggatactttattgtcattgcataccatgaagattgattactaaaggtcttaccaaactcatatttttcatgatcttgcatttaactgcattcctaaattagactgttatgcttaaatacaatttaatcataaattt

SEQ ID NO: 349012 - DNA, 430 bp, Zea mays
ctggacgtcagcctagcaattagctcatcgactccagattggagaactcgacaccatgaaggtgctgatcgttgcccttgctctcctggcgctcgctgcgagcgccgcctccagtacaagcggcggctgtggctgccagacaccaccgtttcatctaccgcctccgttctatatgccgcctccgttctatctgccgccgcagcagcagccgcagccatggcaataccccactcaaccaccgcagctaagcccgtgccagcagttcggatcctgcggcgtcggcagcgtcggcagcccgttcctgggccagtgcgtcgagttcctgaggcaccagtgcagcccggcggcgacgccctacggctcgccacagtgccaggcgctgcagcagcagtgctgccaccagatcaggcaggtggagccgcttgaccgg

SEQ ID NO: 349013 - DNA, 124 bp, Zea mays
ttgtttacgcgttcccctcctgcatgcaacgggatcttttcctacagatccaggatggccattctccttgcgaccttgccatcccttgtgctcacagagagctactatgtttcttcttattaag

SEQ ID NO: 349014 - DNA, 184 bp, Zea mays
gtgagttacaagtcgggggattaagtgtaggtgggattggaacttaaacggtggagcctttactcatcatttctgcaaggcagggggaatatttttaggttttgtaaagttcatacagggatcttgatttttatatttgttggaactggaggttattgcaatgaaaaatttgagttaattttta

SEQ ID NO: 349015 - DNA, 210 bp, Zea mays
acgcgttctgctgcaccaccacaccacacgatcgcccgcaacactttagctagaagctagacggattaagtaaggtctgtgcttaaagactcgattggttaggacttgggagtaagctactagctagaagctccagtagtcgatcgacagcaatggccaacttcgctgctcagattaaggacaagttcctcggcctcgtcgaccgtgtcg

SEQ ID NO: 349016 - DNA, 260 bp, Zea mays
ttttcactgcccaccggtctctctcacacaacacagggatataagcccagtccacgagatctcccgtagaccagtggcgagtgaagggaaggaacgaaacagagcccgatcctagcgacaggccagggaagatcgccatgatgatgatgggcgaaggcgtgagcgtgcctccgtggtcccaccacttccaacttagcggagttgtcaataaattttttgttttactttaatttttgccctcactttttaatatctaatcc

SEQ ID NO: 349017 - DNA, 231 bp, Zea mays
tgcgagcggccgccctttttttttttttttttgtttttttagaagggggggggggttagaaaaaaaaagggttccccggtacacttattattcatccttgaacacaaaatctagacaccgccttttaccctatgttttaaaaccaaggagccagacattatcttataattccaactaaaaattacaatatcttgttacagttatgaatattatatttttttagcccatatt

SEQ ID NO: 349018 - DNA, 102 bp, Zea mays
tttttaaaacaggagtattggtacttactcgggagctttttcaagtaagcctggatctaatgcttctggtgataaaaggaaaaggccaactttcaaaaacag

SEQ ID NO: 349019 - DNA, 261 bp, Zea mays
tcgtgacaaacagttaatttttcgagtgaacaaagagacgggggcacagtagtagaccgcggaatccgatctgacccaaaagaaaggaagcaagtcaacacaacgccccaccaccccgaatcccaaacggaagagggcactcggcgaggcaggtggcgattctgctgtcaccttccgtcgtctccatccccttccattttcggcgagggtcaaagcaggcctcttgctcttgggggtggtttgagagagggagagaacatg

SEQ ID NO: 349020 - DNA, 145 bp, Zea mays
tacgcagccggcccaagcccaaaaacctgtgtccatcctctactctgatgccgacgatggccgacgccgccaccacgccgtactccctcctcctcccgctcgccccgacccccatcggccgggctgggggcgaggcgatgtgggc

SEQ ID NO: 349021 - DNA, 321 bp, Zea mays
gtgaatggcggcgcggatctcggaggcggccggtgtcaacgggagaaagggcgtctctgcgcccgtggtcttggggcttgcgcatgggtgcggtgagttctttaccaatatcttttttgtcaccctggccactcatgctcttctggtctctttcacctgtttttacttttttttgttatccttttattattttttttttcttctaaatttttttttctattttttatttctttttttttttcttccttttttttcttgtcttctttttgttttttcttattttgtcttgtattttttttctctttttctcatttttctttt

SEQ ID NO: 349022 - DNA, 296 bp, Zea mays
tcggtccccactactgctactgcgagacagcgcagcacaggctgccgcccgctggccgctgcgagcagagagaatccaagaacgcgcaagagccccccctcgtcaccgccgtccatgggcggcgctgcgggcgaggcgatgtgggccgctgttgtggcggcgacggtggtcttcttggccgtcgaggtttcgggtgccgcgtcggcgttgccacggttcgcggaggcgcctgggtaccggaacggggaaggttgctcaactacccttgttttaacattattacctccttatttttg

SEQ ID NO: 349023 - DNA, 279 bp, Zea mays
ttctattgagaccaacaagcaacatagaaagtggaatccagtagcaacaatagagcaacaatggcgaccaagatattttccctccttatgctccttgctctttctgcatgtgttgctaacgcgacaatttttcctcaatgctcacaagctcctatagctttccttctttccccatacctttcatcaatgatagcttcagtatgtgaaaacccagctcttcaaccctataggcttcaacaagcaatcgtagcaagcaacatacctttattacccttggtt

SEQ ID NO: 349024 - DNA, 319 bp, Zea mays
tgtgacggttgctctagatccgttcatcctggtggttttgtgaggtcgaaagcggctagcgaattataagatgctggacaagctgtggtacgacttttgtggtctttttcttattatttttactttatttaattttatctttcttatattattatattttttatgtttatattttattttatattatttattttattattttattattactatttattttttttcattttatattatctatttatttttttatatatttatattaatatttaattattaattctttttattttttatatattatcattttatttattat

SEQ ID NO: 349025 - DNA, 375 bp, Zea mays
tcttaactagcaacatagaaagcacaatagtgtaccaacaatggcagccaaaatattttgcctccttatgctccttggtctttctgcaagtgctgctacggcgaccattttcccgaaatgctcgcaagctcctatagcttcccttcttcccccgtacctctcaccagcggtgtcttcggtatgtgaaaacccaatttttcaaccctacaggatccaacaggcaatcacagctggcatcttacctttatcacccttgtttctccaacaatcattagccctattacatcagttacctttggtgcatttattggctcaaaacattagggcacaacaacttacaacaacttgtgctagcaaaccttgttgcctactttt

SEQ ID NO: 349026 - DNA, 236 bp, Zea mays
tgttggactcccagaggcggccgtggtgggggtctttttatagtatgggggggttaaatattattattcctattttttcttttatttttttattcttttttttttattatttatttatattttttttattttttttattttttatatttaatttattttatttttatttaattatttttttttttttttatttttttattatttttattatattttatttttattttatatttttt

SEQ ID NO: 349027 - DNA, 265 bp, Zea mays
tcatgattctgaaagcaggaaaggagatcggcactttactcaagaaggcgggctcccttgccactcctttaccttgagatgacgacgacgatgaagaagaagcatcagcagcagctcctcctcctcctttctctcatgtttctcgttgctgtcacagcaaccgctgttgctgtcgaaccacattcacagctgcatgtgcaggtgcatcatcatcatttagcacagattatgattaacaggtccaccagattccttttattcttat

SEQ ID NO: 349028 - DNA, 341 bp, Zea mays
tctgagaccaactagcaacatagaaagcgcgatagtgtaccaacaatggcaggcaaaatattttgcctccttatgctccttggtctttctgcaagtgctgctacggcgaccattttcccacaatgctcacaagctcctatagcttcccttcttcccccgtacctctcaccagcggtgtcttcggtatgtgaaaacccaattcttcaaccctataggatccaacaggcaatcgcagctggcatcttacctttatcacccttgttccttcaacaatcatcagccctattacagcagttaccttttggtgcatttattggcacaaaacatcagggcacaacaac

SEQ ID NO: 349029 - DNA, 377 bp, Zea mays
taagatacgtaacgtttacgtgggttatacatgcctttttttttgttagagattgatgatcggactacctttttacaagtactgtccagagagctacccttcacatgcatgcgtgcgtgcacgtccttcctcgctctagggggtaggcagaccaatatgcaagctgttaattaggccatgttgttgttgtcttgttgatcccggccggaccacgtgcttctcgtcgtctccttctcgcgaagcacatgcctgcacgtacggagtcggagacacatcagtttaggccggacggtttggacgaccgattggtttttaattagctacaggtttctaacattagtttttcgatagcgcgagtgtgtgtttgagatttttta

SEQ ID NO: 349030 - DNA, 184 bp, Zea mays
gcggcagtgcgtagagaggatcgtcgaacagaacagcatgaagatggtcatcgttctcgtcgtgtgcctggctctgtcagctgccagcgcctctgcaatgcagatgccctgcccctgcgcggggctgcagggcttgtacggcgctggcgccggcctgactacgattattggctcttcatctttt

SEQ ID NO: 349031 - DNA, 509 bp, Zea mays
  unsure (1)..(509): unsure at all n locations
natgactatgatcgcgagcggccgcccttttgtgggttattttataaaaagtagagggggattatataataatatatnttnaatatattattattaatatattaaatataataaaatataatatattaaattatataatttattattttaaatatttattttttcaatattaattataaatataataatttttattttttattatttatataaaattaaattaatttttaacttattatttaatatattaaaatattaatatatttatattattttataaattatatatatatagaattatataatatattttatataataatattatctatatattaaaattttattttatattatattatatttaattaataattaataattaaaatattttatataaaaatatttaaatatattttaataataaaattatatataaattaatattttaaattatataataaacttatttaatttattaaatatatatattttatattatttatata

SEQ ID NO: 349032 - DNA, 146 bp, Zea mays
aaaacaacaccacaaattcctcacttacaacatttaacactaaaacaaggccaaaataaccctactttaaaaacctttcttttcaccacttctttaccaaatcaaaaaccttaaaacatcactactcattttctaccatttataaa

SEQ ID NO: 349033 - DNA, 361 bp, Zea mays
ttatcaaatggatttgaaattgatgttgtcacatatggaacactcattaatgggctatgcaaggctggtaggactcaggttgctttgaagcttttaagaggcatgcgaattaaagggattagacctactccaaaagcttacaacccggtgatacagtctttgtttagacggaataatttaagagatgctcttagtcttttcagggagatgactgtagttgatgattctatttgttgctcttatctttatcttatttttttcgtgtttattgtttttatttatattttttttttatttaattttttttattttatttcttattatatttatctatatcctataatatttatctatctcatat

SEQ ID NO: 349034 - DNA, 83 bp, Zea mays
tcttttctagatcgcgagcggccgcccttgtggttttataataccaaaggggggggttaaatattattttttaaattttttat

SEQ ID NO: 349035 - DNA, 397 bp, Zea mays
gttcctgtaggtaatattgcagcccgacggcgacgccctactgctttcctcagtgccagggggtgcattaaaattgttttcagtttattatgttttagtgtctatattattttcttattatatttatttatatattttttaatacttattacttatttattattattttatatattttttaatttttttatattttaattttttactttattttttctcatttttatctatttatttttttttttttttatttcatattttttttttatttttatttatataattttattttttttatattatatatttttttaacatatattctaattactattttacatcttatttatttgtactatacttttatatctattatatatctttctaattattatta

SEQ ID NO: 349036 - DNA, 295 bp, Zea mays
  unsure (1)..(295): unsure at all n locations
tcgctacngactagagggggagagagagaggcgaggaagtatggagagagcacggggtctatatctaatattgattctattgcaaatgtttttatatatattaaattattatttttattatatattttttttatttttttaataattattattattattttattatttatttatattatattatatttatttaattatttttttaatttttttttatttaattttatttattattataattattttatattattttatatttttatttaatttactttttatttatattatttta

SEQ ID NO: 349037 - DNA, 406 bp, Zea mays
tcgaagccgccgcctgctcgctcgcctccggtccggcagcgagctctatctcccgcgacgagcagcaactgccaccgcgcaagcagaccggggaataaatattggtattggtagggggatatctataagaaggcaaggtggttaagttcacaactgtagagctccgggccatcattgacaaaaagaacaacatttgtaacatgtctgtcattgctcatgaggtccatggcaagtctacgcttacagatatccttgatgcagatgttgtgattaaagtccatgtagttactataataatttttaatgactcctactatttcaaatatatttattacttatttttttctttattaaattatatttgctttattatctttttatttaaaattcttatatatatatttaa

SEQ ID NO: 349038 - DNA, 391 bp, Zea mays
taatgatctgttcgaccaagcataccccagcggataagtgaagtgtcgtcggttcattaataaagcttttataaacatttttttttttttttattttatttttcaaatatctttttttattttttttttttatattggttttaatctatatttgttttatttattttcatattaatttttattatatttttttatttgttatttttattattttgtataattttattattattattttaatttattatttttttttttatttttttttatttatttttaattatgatttcttttctttatttatttatttttttttcttatatttatatatttttattttttatttctaatttatttatctcttatatattattattattattctatttat

SEQ ID NO: 349039 - DNA, 126 bp, Zea mays
ccctttttcttttttttttttgaccccggatcaggagggatcttttactccaccagtccgggcccattaatttactggcagtacaaatggaccgatcggggcttaactacacacgcaagcatttgg

SEQ ID NO: 349040 - DNA, 197 bp, Zea mays
tcgttgatctccggcggaggcgagcaaccgcgcaccatgagtgaagaaggaacgctgatgcacgctggtgaccctcttgaggccatgcacaaacaactagcgtcatcatggttacaaacatccattgggtttatgtatggggagccattgaccaagagataacgcttatgcaagtggtgtggttgcaaccacaagat

SEQ ID NO: 349041 - DNA, 174 bp, Zea mays
tcttatcgatcgccgacccctcgagcaacgcgatcgcccgccgacccgacggcggcatggacaccgaatacctgcaacaggggagctcctagtggtggcacacgacgggcgccgtgtcgtgtggagccgcgcagcagcagaagcgccagcggtgccagggttctttcagcgatc

SEQ ID NO: 349042 - DNA, 58 bp, Zea mays
acaaacgagcacatctgatatatttcattctttggattaaatctggataccttcattt

SEQ ID NO: 349043 - DNA, 319 bp, Zea mays
tcttctaacctcgcgccggagtcgtcgcccacgatggcctaccgatccgcagtgctcttgcccgccctcctactggccgtcgccgtcgtcgtggcctccgccgccgccggggatgggaggcggcgggaggagcatactgcggaccgggcgaaccggtagccgacacacggctataacaccagctttgcgcagaacgccgggtacgttaccgttatcgagcagcgtagtgctgcactcttattctgtttcattgagggccagaaggacccgcggtccaagaccccttttccttggatccaccgatggtctggatgcctcg

SEQ ID NO: 349044 - DNA, 273 bp, Zea mays
cgttccggatttcccgggtggcccaaaacgtttttcctcctccggtgtttctccccgttccagctagactgtcctgccaccctcgctgttgaatccggttaagcttccgaagttccacctcgtactacaggtcgatcgcgttcgctgtaccccactccgtgctccagaaatgagtcgccggcggattgctaaccccatggtccgccgtcgctggggaggtggacaactgtacggtgctgtctggccaacggctacgcaggatgtaggggaggc

SEQ ID NO: 349045 - DNA, 231 bp, Zea mays
tggagaaatgttcttgactttggatacacccgaggagcgctttcagtggttatcaatgaagtatgaatggatgacaatgaacaagaagggctagttagagctactttgttatgcatttatcgtgtcattttttgtttttaccttaccaaacttatctattagaataaattcaaacattctggggaaacaattagtagaaaatttatggaaattttctggtgtgtggtgggc

SEQ ID NO: 349046 - DNA, 383 bp, Zea mays
gctggtatagcttacgcaagagcttagactgggggactttgcactagtagctgggagagcgaaccggacatactggcagcctggcattatacgcaatgccgccggccacaagcacgcgcccgccgtttagtctaccggtaccattgctgacggaggtcgtttccgtggcgctcctgtcactcgtgtgctttcttgtagctgctgatgcaagcagatcgctgtactaccactaccaccttcggaagcaccggaagcaccactggcaccaccgcgcggagaactacagacacatttccctgccccctgccgcgccttctactggcgctgatagcgattcttccgccggaccggtgggtcttgctccagacatatagcagaacact

SEQ ID NO: 349047 - DNA, 401 bp, Zea mays
tctgggtttcctccgcggcagacggcgatggcggagaccgtgcttctccacgtcgcgcccatggatctcctcgcgcttgccgacccatgcgggcccaccgcaccggcgtcctcttccacgcgccgtcctggccagaggaggaaggggaggagcgcgtgtgggccacaaccacaaatcccatccctcttccttctcaaacaccatcgccgtcaccgtgtcatcgcgggccgaagtcctctctcctccatctcaagcgatggcatgaggtggatctgtagcacgtaccaggacgcggtcgacgacgagctagggtgcgcgttcccgcccgtcttccccaccgaggcgctggactgccacgcttctgttgccactggacgtttgcgccgccatctgccgtgagc

SEQ ID NO: 349048 - DNA, 65 bp, Zea mays
  unsure (1)..(65): unsure at all n locations
tttcgagcggccgccctttnttttttttttgttttttgaaaacaagtaggacaacttgttatcat

SEQ ID NO: 349049 - DNA, 387 bp, Zea mays
  unsure (1)..(387): unsure at all n locations
tttaccaactagcaacatagaaagcacaatagtgtaccaacaatggcagccaaaatattttgcctccttatgctccttggtctttctgcaagtgctgctacggcgaccattttcccacaatgctcacaagctcctatagcttcccttcttcccccgtacctctcaccagcggtgtcttcggtatgtgaaaacccaattcttcaaccctataggatccaacaggcaatcgcagctggcatcttacctttatcacccttgttcctccaacaatcatcagccctattacagcagttacctttggtgcatttattggcacaaaacatcagggcacaacaactacaacaacttgtgctagcaaaccttgctgnctactctcagcaacaacag

SEQ ID NO: 349050 - DNA, 324 bp, Zea mays
tctgatgaaacacgcgcaattctggacctcaaggtccagtatcggacaaggagagggcggccatatgtccctggaaactatggcggaaggacctgttttggcagatagtatgcgcagagactattgaacaaatggcatattgttgatgtggttcgagtgccattgcagcacaagatctccggccgggtgcttgaatgggcttggcacacctatctgtgcaagccgtcaagctacaacaagctgctgtcgtgagggtcttacaacatccaattaaacaatcgcagctacaattcttggctcatgtgaccatgcctaccatctctt

SEQ ID NO: 349051 - DNA, 95 bp, Zea mays
tccccacaaccatgaatccacatgctgctgaatttgtgcctggaaaaacttcgcaacaatctgatgtggctggcagagaacccagtcctgctaat

SEQ ID NO: 349052 - DNA, 318 bp, Zea mays
tgttaggacggggagaggaacaaagaaacatataacgatctgcaggaaggactaaggaggcaggaagtcgcagaacagaattggggatgtccaattaacaccccttgtaattactaaaactgtgagcgaatgttgcgtttttcttgcactccccccttcgccctcctaattaaactgcctaatgttcaggattagtttttctccagcttcaaaataacaacgcatagatggttttgatgttctgtcctctgtccaaaaaaaaaaaaaaaaaaataaaaaaaaaaaaaaaaaaaaaaaaaaaaaaaaaaaaaaaacaag

SEQ ID NO: 349053 - DNA, 317 bp, Zea mays
ccgggtggcccagctctttcgacccccaaccctagctcccgggcacgccccttccccgcttccgggcgctggtgacacccgctcgtacgaaacactgggcggggtgcctacggcggccatggcgtaacgggctggaggcaacgcgggcggccatgagaccggaaggtggagcggttggggcgcgagctcaacgggcccgtacccggtgacgcttttagcccaccggtcgcacatgctgactcgcgtctcacctcgcagctcgggaattacgggacaggacatgctggaagatgagatcacactatttactgacccac

SEQ ID NO: 349054 - DNA, 358 bp, Zea mays
tcaacaagcaacatagaaagtggaatacagtagcaacaatagagcaacaatggcggccaagatattttccatccttatgctccttgctctttctgcatgtgttgctaacgcgaccatttttcctcaatactcacaagctcctatagctgcccttcttcccccataccttccatcaatgaccgcttcagtatgtgaaaacccagcccttcaaccctacaggctccaacaagcaatcgcaacaagcaacttacctttatcacccctgttctttcaacaatcgccagccctatctttggtgcagtcattggtacaaaccatcagggcacaacagctgcagcaactcgtgctaccagtgatc

SEQ ID NO: 349055 - DNA, 270 bp, Zea mays
tggactcgactagctcgaacaccacaaccgtgccctttttaattagcccataagcaagcgccgccgctagtaggctcttacgctcgatgccaaaagcccgatccttacatgggcattggctaccatgccacgaatcgcgcgctgtgcagcctcgccgagggcaagcttccggaggaggcgatcgaaggcaccgtcgatgagccgctagtgcacgagccagatgccgaagtatgacacagggcactgacagaggaagcagacacagggcaa

SEQ ID NO: 349056 - DNA, 350 bp, Zea mays
ttttctacatacccccatcttcttccttaccctcatcacagatatcatattctcctcatctttctctctcccatcctccctattatttattggaggctacttattgatggtatcttaattatttttcctctcatcttcctccttttgaaggagtacattttatttttgccagcgttcctgtagtactattagtgcttcctaccccttcttctctggctacttacttcttctgcatctctttccctttccccccctctctggcctgcttgccttctacatactcttattcctctgaggtccgtctctcctcttcccagttgtccttgccttccacctttttcacctacccc

SEQ ID NO: 349057 - DNA, 138 bp, Zea mays
gctcataaagaggactcaagatttatgtgattgagtgaggatacagatctcaccagtataaggcaatgatgattaaccagggcatatagtctttttatagatgctcggcactgaaacattatactgtagttatatgga

SEQ ID NO: 349058 - DNA, 393 bp, Zea mays
tcttgacgcgtgggtagttctagatcgcgagcggccggccttttttttttttttttttttttttttttttttttttttttttttttttttttttttttttttttttttttttttcaaaaaaaaaatttttaataaaataaaaaaaaaatttctttaaaaattgaaataaaattgaaatttaaaaaaaaaattaaaattaatttttaaaaggaaaaaaaaattaaaaaaatcaaacctattccctttaaaaaaatctaataaaaaccctttcaaatttaaaaaaaacttgtgtttttaaaaaaaccaaatttttggaaaattgtttaattttttataaaatataataaacccaaaggtaacaccttattttttccttataaacaaatttttttt

SEQ ID NO: 349059 - DNA, 253 bp, Zea mays
ttcgtgctttcctctaccggatctgcttgtgagcccggtgtcagtattactggggcggtgcgcgctctctctttcctcgccttcgccggcggcgacgagcttgagctcgagctggatgctggaatagaacacaaccgccgtgtgttcgaacccatgaacgtgcactactgaaagttgcgcagccattgatgctcagattgacacttgatgcagtgacggccgctcgccgagcaagaggttaaggcactgcgcg

SEQ ID NO: 349060 - DNA, 264 bp, Zea mays
  unsure (1)..(264): unsure at all n locations
gtcggttctagatcgcgagcggccgcccttgttttttttttttttaggtaacagacccaccaattactaagacatcatncagaaccaactgaccaaaaccaagcattgacacctaactaaaacaaggcggccaaccaaagaaaggtgaaagcaaaactctgaccaaaccacacacgcgaaaggaaccaaaaaaaactggacctgcaagagccctcccaaccaacactacacaaaaaaccttggcaagacaagggaaaaacagca

SEQ ID NO: 349061 - DNA, 98 bp, Zea mays
tcttaataaaccctggtgctctcacactggcgttgtggtgagcagtgagctcttctattatccggcaggtctggcacactagtgccactatatgagcc

SEQ ID NO: 349062 - DNA, 66 bp, Zea mays
ttggttgcatttgcatctgagttcctgatggttgaattccagtttcttctgtgaggtttgtgggat

SEQ ID NO: 349063 - DNA, 412 bp, Zea mays
tcggttctagatcgcgagcggccgcccttttttttttttttttttcaggaaaccatcacaactcgcagcattatgagagcgactaattcaaattaaattaatcttactcaggggcacaacagcggggggtgagaccatgaaccctaactctcctagctagcttagcttaagtagcagatcgacacgtcgtcactgaccagagcacagacgacgcgcaagaggaccgtttcatagcagcagtaccaacctaaccatcagcaggttcctttccttcctctccagcccaaacaccaacgaatggggcgcctgttagttcgacatcatcttcatgtcagaatcatgcctgttctgctggtgcaccgagagggaccagcccccggacgcgtaggcaggcggcatgtgctgctggtgc

SEQ ID NO: 349064 - DNA, 356 bp, Zea mays
tgccaagagagtgagcgagcgagcagaggcagcgcagcaatggcggcggcaatagtactctccggccaggtgcggccgcttccctcgtcgctgcccctgtccctgctgctgctcctcctcctgtgctgctccggcacctcgtggggatggagcacgtcccggggaggagccgtcagggtgtgccgcttcgatggcttggctgatgcaaacgacccgcaagaggaccgttttattgcagcaggtccaacctaaccatcagcaggtttctttttctttctttccagcccaaacaccaaccaaatggggcccctggtagtttcgaaaaaatctttcatgtcagaaataatgccctgttt

SEQ ID NO: 349065 - DNA, 73 bp, Zea mays
tttgtcagataggcctgatgagttggaaaggggtgaattagcgggcgggaggggtattaactggaaagggtac

SEQ ID NO: 349066 - DNA, 321 bp, Zea mays
tcggcaacaatgagcagccaggaatcccttttggaacaagggctacacgggttgatggtgatagccaacgtcgaatatctgttgtttctccatcttacttcagcaatgggtaaattatactcatccctcgggagttatgttatgactatgctacgaaaatatgagattttgaattcatgcattgtactctgagaagatggaaccatttttttagtaaaatgaatctaaacaaacagtgaacacctgagtctcttagcagatgtgagatatcatctgtgaacactgttaaaaaaattctttaccatatttcttgatgttaca

SEQ ID NO: 349067 - DNA, 76 bp, Zea mays
tcggccgctcgccgcatcaggtagtaggggctagctagccatggctcggatggccgccatggtggtggtgatcatt

SEQ ID NO: 349068 - DNA, 178 bp, Zea mays
tcgccgtcatcgatctcgtttcaaatccatccatcctcgtttcctccgtcccgcagcatctcaaccccatggccaagatcaagatcgggatcaatgggttcggcaggatcggaaggctggtggccagggtggccctgcagagtgacgatgtcaagctcgtcgccgggaacgacccctt

SEQ ID NO: 349069 - DNA, 401 bp, Zea mays
tcgataaactaacatgttatcttttgtgcagaccatgctaagcagtaagcacggaatcaaacgacaagctgagtgcaagaagtacctgcaacactgggttcctgtgtagcgccttcctgccgcgcggtcgccctgcagcaaccgagtgacctctgcgcgggggcgacggaggccttgagggggaccctgccgttcttcacccccgccgccgcggcgtccaaggcatggagcctcgtggcggaggaaggcgggaagctgcatgccatggagttgatggatcgacgcgctgatggcgcgagcgcaggttgccacgaagggataagctggagcttaaagccgtgaaagacggttctgcaagctatgctgctctagaaaagaaagcagagctgtatgaaaaatta

SEQ ID NO: 349070 - DNA, 385 bp, Zea mays
taaacgttttgcagcgaccccttgttttgctctccgtcagtttgctggccagcaagcggccttgggattggattggagctctcatcagctcctatcttatcaccagagccagacagacagtcatcgtctccgatccgatccatctccgtcttcgtcctcctcgctcgacaacccaccaaggagcaagagaagaagatcgacgacgacgacggctgccctctgcgttcctcaagaataatactccgttgcgtcccttccgtgctccaagaaagatccggctgcgggccacacgatgagcaatcttaagcttggcgtcgagggtaccagcgctcacgatctccctcccgaagagcagggcacggcgaaccctttcgtggaggtcgag

SEQ ID NO: 349071 - DNA, 285 bp, Zea mays
  unsure (1)..(285): unsure at all n locations
cacaggcagttcnagagagagagagagagagggcagaggctaaagatgtcgtgggttcgaccaccaccaccacaaccagccggctcccccggcgtcgggccccaaccaggtgttcaagatcttctgccgcgccaacgagaactactgcctggccgtccgcgacggcgccgtcgtgctttccccggtcaaccccaaggactaccaccaccactggtacaaggacatgcgcttcaccacccgggtcagggacnaggaaagcatgccggcgttcgcgcttgtcaacaa

SEQ ID NO: 349072 - DNA, 301 bp, Zea mays
tcggagagagcgcggctcacttcaaactaccgctttctttctacttatgagaggtgcactagaaagacagaagtggaaagagacagagaggagactagtaaagccaatttcacctaaaaagcggaaaatgacactaacttctactgtgggcaagtcatcatttccagaatggattcagtcgtagaatgctgaagtagagcagtaccaaggttcggttttgggacagacagaaagttggataagaggattcgtcttagccccaacctcgagagaataatttgcaatctttcggtatttcatt

SEQ ID NO: 349073 - DNA, 392 bp, Zea mays
tcgcagaaacacaccaagcgaagcgcactagcaacaacctaacaacaatggctaccaagatattatccctccttgcgcttcttgcgctttttgcgagcgcaacaaatgcgtccattattccacaatgctcacttgctcctagttccattattccacagttcctcccaccagttacttcaatggccttcgaacacccagctgtgcaagcctataggctacaacaagcgattgcggcgagcgtcttacaacaaccaattgcccaattgcaacaacaatccttggcacatctaacaatacaaaccatcgcaacgcaacagcaacaacagttcctaccagcactgagccacctagccatggtgaaccctgtcgcctacttgcaacagcagctgctt

SEQ ID NO: 349074 - DNA, 255 bp, Zea mays
tctagatcgcgagcggcggccctttttgggttttttttttttgtgtggggggttttattttttttttttttttttttttgttttttttttttgtagcgggaaaaaattcaaacaaaataatggttatttgtggggaacccccggggggatgggggcccccttctgggggacccctcatatggaaacaaaaagggggcccccccaacggaggggtggtgcctcggcaaggcagggttcatcaaagagaaccgggtg

SEQ ID NO: 349075 - DNA, 379 bp, Zea mays
ccgtcatcgatctcgtttcaaatccatccatcctcgtttcctccgtcccgcagcatctcaaccccatggccaagatcaagatcgggatcaatgggttcggcaggatcggaaggctggtggccagggtggccctgcagagtgacgatgtcgagctcgtcgccgtgaacgaccccttcatcagcaccgactacatgacctacatgttcaagtacgacactgtgcacggacagtggaagcaccatgaagtcaaggtgaaggactccaaaacccttctctttggtgagaaggaggttgctgtgtttggctgcaggaaccctgaggagatcccgtggggttcggttggtgctgaatatgttgttgagtctactggtgttttcac

SEQ ID NO: 349076 - DNA, 104 bp, Zea mays
tgtcgttcggtctgattgtgattgcggcagcaccgtcgaccacgagcccggcgtaaggctcctcctcctgccgtttcagggtgcactttctccattgctcattt

SEQ ID NO: 349077 - DNA, 354 bp, Zea mays
  unsure (1)..(354): unsure at all n locations
tcgctagatcgcgagcggccgccctttttttttttttttnnnnggggaggcgggtgnactatctttcatttttatttgtagtaaatggtgtattcaattttatatttctttattctgggtagttttttttaaattgttttatttagattaatttttttttggttgtctttttttgtttctattttattttttttttttttatttttttttttttttgttttaatattttattttatattttttttttatattttttttttgtattattttatttttttattatttttttttttttttattttttttttttatatattttttttttttatttttatttttcttttttttttattt

SEQ ID NO: 349078 - DNA, 135 bp, Zea mays
tcggctgcccgtcacccgccggtctgttccagccagcctgcgccggtcccaggggcccgccattccgccgcgcgccgccggcagggcgccgcgttccgggaacgcgcgcgtgcggtgcgggcgcggtttgttttt

SEQ ID NO: 349079 - DNA, 424 bp, Zea mays
  unsure (1)..(424): unsure at all n locations
tcgcaaaatccgaaacggttcgaacgatcagaacgattcagcttcagctcctgaatccagcagcaatggatcgctcccgctccaagcgcggctaccactacgaccaggactccccggcgncccgcttcaagcagggcttcgaccgccgcaacggtggcggccagaatgcttactcgagctatcaccggcgggggcccctcggcggttatcaccaagatctcaagggattcgccccaaatgaaaaggttggaaacttttatgattcgtactggacacttagtgcatatgaagtttcagaggatgttaaaaattctggccccttcgtacgtttggataatttattataaatcttaccaaagacctttaaatctctaatgctagctttaatatccttgggagaaccctttttttattggattttttc

SEQ ID NO: 349080 - DNA, 92 bp, Zea mays
ccactttgttgtttgtccgtaacccgcccatctgtttcatacaatctgcgccggtgccaggggccccccaatccgtcgcgcgccgtcataat

SEQ ID NO: 349081 - DNA, 71 bp, Zea mays
ttggatgcggacgctcgggcgagcaagggggggtcaagaagcgcgggggggggattactaatctataccct

SEQ ID NO: 349082 - DNA, 306 bp, Zea mays
atcggttctagatcgcgagcggccgccctttttttttttttaatactgggggcggcctaaaacataaacaaactcaatgatcataaacaatactaatcgccacaaaacaaaccaaacacaacatacaaaatacccaatcagttactaacaaaatcaaacgaaaacccgatcccaaaaacaccatcactaaaacaacctgtttaacaaaatcaacttcctaaaaaaaaaacaaacccaccagacccattttcaacaaaacccaacttaaaacaaatttaaattcaaaaaaaaccacttcccccaaaa

SEQ ID NO: 349083 - DNA, 67 bp, Zea mays
tcggcaccctgctcattatccgatccgggtactgctccatgaacttagagaggatctgcttgcccat

SEQ ID NO: 349084 - DNA, 357 bp, Zea mays
tcgcgcgcagccaccagacgatccgtcgacgttgaccatgctgtggggaccgcccggcgaggtgcccgttgccggcttcgctgcggcaccggaagggcgaccggatgcgttcgctggcagcgcgtcgtgcctgccgctcgcgaggcaggtcggcggccagcagggggcgcgcaacttcgtggtgtcgccgctgtcgttccacgcggcgctcgcgctggtggccgcgggcgcgcggtgcgagacgcaacgggagctcctgcgcttcttggactccgagtcgctgggcgagctgcaccgcgccgcggcgacggcgctgttcggccggctcagtgacctcccgcaggcgttcttcgcctg

SEQ ID NO: 349085 - DNA, 83 bp, Zea mays
tcttattttagatagaacactactcaagggcggagatcgtacatatagcggcgatgagcgaatatcctaatgaccatgttgag

SEQ ID NO: 349086 - DNA, 427 bp, Zea mays
tcgtcaacatccataaattatcgcgcgtgcacgtcaatgcacaatgctgatcccaatccagccatcaaggtcgtcgtctgccgggccgccggagtcgtcggggcgggcgtccaggtgggggtggccacctccgacgagacggacggctccaactaccatgaaccggcgccggaggtggactgtatttcccaggccgtcagcctgatcgactgcatcgactacgtccagaaggggagcagcgcgcgccgtccgtccgatgtctgctgcggagaggtcaagactcgagctgtcagctttatattactgggactatttttgtaattttaaagttatctatttttcttaatctatacttttattcagaatttatttgtgaggcatgtcttttttcgtatttttatttattatttcatttcttgttttaatt

SEQ ID NO: 349087 - DNA, 233 bp, Zea mays
tgctcacctgggtgcggagcgtcattcggacacggagatacagcgagcattgcgacgatggagttcgtgaaccctttcaccggtttgcgtgtctgcggtcgccgtcccaacgagaatcggcaactaaaggtcgagggctgctatagtttgcgttcataccgggtacgctctgatcaggaggggctacagcatgggaaaagccaatgtttacagcctacaagaggctaaaagca

SEQ ID NO: 349088 - DNA, 407 bp, Zea mays
  unsure (1)..(407): unsure at all n locations
agaccattagctttatctactccagagcgcagaagaacccgatcgacaccatgagggtgttgctcgttgccctcgctctcctggctctcgctgcgagcgccaccttcacgcatacaagcggcggctgcggctgccagccaccgccgccggttcatctaccgccgccggtgcatctgccacctccggttcacctgccacctccggtgcatctcccaccgccggtccacctgccgccgccggtccacctgccaccgncggtccatgtgccgccgccggttcatctgccgccgccaccatgccactaccctactcaaccggcccggtctcagccttattcccagccacacccatgcccgtgccaacagccgcattcaagcccgtgccagctgcagggaacctgcggcgtt

SEQ ID NO: 349089 - DNA, 125 bp, Zea mays
acactctgtttcattatctttacctactccagagcgcagaagaacctgatcgacaccaggggggtgtttattccacccctcactatcctggaatctcgcagttagcgccaactccattcatacaa

SEQ ID NO: 349090 - DNA, 67 bp, Zea mays
gactcactatagggcaaagctggcacgaccagcaggaacacggaccggaatacccgagacgacccac

SEQ ID NO: 349091 - DNA, 123 bp, Zea mays
tcgtgagaagaaagtagaacaaaaacagactgtaaataaaaaaatactggctggtttaaatgtaatcccttaagtgtatacctaaataaacaaattaggtcggtcggtttagttgattctagt

SEQ ID NO: 349092 - DNA, 364 bp, Zea mays
  unsure (1)..(364): unsure at all n locations
tcgaggagatcaatccaatattgctgtttcagaggaacaaactccaacatataatggagaaacaccagaagatcatcatgtagaatcaaatgaaggaacgatggggaatgaaactgacaatatcattttggcacacggaatcaaagatgaaatacagaagtcagcagaactaaaggacggtccatgtgatttgtctgaaactgttttaacaactcggagaagtgagaacatgattgatgaagataatgttcaaacttatggcaatgatacagtagaggcttcaaacagtatccatcaagtcaaagaagagccagatgctggaaccgaacataattcaagccaaaatgntagtgaatgttgtgga

SEQ ID NO: 349093 - DNA, 253 bp, Zea mays
tgctccgacgcagccacaaaatggctcgcgtctggtcttttctgaacggccgttacatgcgcctcttctagtacactactattacgggcaagttctatatatgtacctattgcgataccctatgcgcccgcagcgggggtagcgccatcccagacagcaccgatggtcggcaccctctggactaggtccacatccagattgacaggcacgaagccctatgtcaacgtcggctcgattgggctcgaccttcacg

SEQ ID NO: 349094 - DNA, 202 bp, Zea mays
aaaaggcttagtggcttttgtaatcgggtgggttccgggggcctggaatatggaggtccggaaccggcccggttacctttaaaaacctttgccgggctcaaggattaaccaggggtcctacaataaacctaaaaagggggtattttttaaagggctggccatcctttattttatggggaagtggcggccaccatttaatcca

SEQ ID NO: 349095 - DNA, 348 bp, Zea mays
attgagaccaactagcaacatagaaagcacaatagtgtaccaacaatggcagccaaaatattttgcctccttatgctccttggtctttctgcaagtgctgctacggcgaccattttcccgaaatgctcgcaagctcctatagcttcccttcttcccccgtacctctcaccagcggtgtcttcggtatgtgaaaacccaattcttcaaccctacaggatccaacaggcaatcacagctggcatcttacctttatcacccttgttcctccaacaatcatcagccctattacatcagttacctttggtgcatttattggcacaaaacatcagggcacaacaactacaacaa

SEQ ID NO: 349096 - DNA, 372 bp, Zea mays
gggaacgctggtacgcctgcacggtaccgggactgaacggctcgacccacgcgtttcttttgtacaggccaacactgacggtggcaggtgaccaacgaaccccgggtggctctacagcgactccgtcggcggcttgccttcccgcgccgcgccgggcccggatcgctcgccctttccgactgtcctgctcaacgccgccaccagcacgtactttcccgcgccggaggtcccgctcggctgacacaacggagcggcgcaagctcccccactggttctgaagatgcgagaaagaaaaagagggggagaacgagggtggcgtctatgggcaccgcggaccaatcagaatgagagctgagtgatggctcgcaagcg

SEQ ID NO: 349097 - DNA, 201 bp, Zea mays
tcttttacaaatgacaccacgggaacagcatttacttgcaaaagagagagcgagcgaacaaaaggaacgcaacaaatggggggggaataagaattttccggccaggggcggccgtttcctttggggttgcccttgaccttgttgttgttcttcctcctgggctgttccggaacttggggggaatggagaacgtccggggag

SEQ ID NO: 349098 - DNA, 137 bp, Zea mays
tctttcttttcgtacaccgtcttcctctttctttcaataataaaatgagaatgaggccaccagtgggaaaccaagggaaaatgggaaaggagcccaagggaaccattccgccgccgccggcccgcaagttgaagaaa

SEQ ID NO: 349099 - DNA, 148 bp, Zea mays
tcggggggtgactgactcaagagaagggcctggtcataggctgctgcattatgaatttctgatcatgtcttatgtctgtactctgaatcaactatgtatgagatctcatctcctttctcctactgaatgaatgaatcattattggctt

SEQ ID NO: 349100 - DNA, 186 bp, Zea mays
tcggctacaacacacacacacacacatgcataatggttggtacatggtaaaactatagcaagctaaagtcgatcgctcggctataggctgaccactattaccaagtccaacttcattggttcttggcttgtagatagaccggccagaattaaaaaacttgcttgcttctaaatatattattaagag

SEQ ID NO: 349101 - DNA, 279 bp, Zea mays
tcggcaaggcttgtctgctgggggcatatgataaccagtcctccgtgagagaaagaagccatggcggccgcactctgagggctcaaaagatcgtcaagagatgtccatcctgtgcaactgacatcagcgacttcctagcggatccacagatcaaccgagacataatggatgtgattgagtcactgcaacggaaaggcgacaccaccaccaaggacgacgctgcttcatatggatatggggctgacaaggccgaggaattccgtggtggtgacctgcaag

SEQ ID NO: 349102 - DNA, 259 bp, Zea mays
aatcggaggcggccgccctttttggtttttttttagggggggggggaaacacccgccctttgctggattttgggaccaaggcgaccggtaaccaggattcaatttccaggagtgggaaatttcctttttttccaaatttttttggggttccagaagctcccaaattgtgggagaagacaccatgccagggcattattgttacttacactgaacgccaaatccaacacatgtaagttcttggcggaccactaaattttta

SEQ ID NO: 349103 - DNA, 175 bp, Zea mays
tgtttgtccaccaggcacctttaaagggggaatccggtggcaccattggggcgccatgggggcccaaaaaattttccctccttttggcccttggcttttttacaagggggggtaacccgaaaattttccctcaatgtttacaaggttctttagtttccctttttcccccaaacct

SEQ ID NO: 349104 - DNA, 54 bp, Zea mays
tcgcaaaccctgccctggcaccggcggcgccatggtgcttgaggcaacgatgat

SEQ ID NO: 349105 - DNA, 407 bp, Zea mays
  unsure (1)..(407): unsure at all n locations
tctttttggggccttattaaaagtttaactttcggtttgaaaggttaaggggggggctttccgggggttaaaaaggacccccgggttcaaaaaaacggttgggccggattaccaggtggccatggccggggctgagatggttcagaatcagaacaccattccggccttcccaatcccaatgccgttgaagttgccactgcccgtgccaatgcaaatgcattttcccatcttgcagatttgccatggacccggtggccnctactaccccaacccaaatgccggcgcggngatgatgccgnctatggcattggcaggtatgggtggcgccggcgggctccagatcaacggcgctctgttcggcaatccggtgcccgcgccgctgccgatgaacttctaccaccaccaga

SEQ ID NO: 349106 - DNA, 231 bp, Zea mays
tcgttcacgcgcgcgaccgacttccccggggtcaccgactacactaccggggtgtgctactaccaactctcgaaaccctacccaacccatgagagatcgatcgttcgggcccgaattacccagccgtgagcggaggtatcggtcaccgccattggcactaggaaccccgagccgattccacgccgtcaagacgtagttgagcttgcatctgccaaccccatttttctttca

SEQ ID NO: 349107 - DNA, 139 bp, Zea mays
  unsure (1)..(139): unsure at all n locations
ngtcgttcaaccacaccaccccacaacaggggggcacactttacactaccggggggggacacaacaaaatctcgaaactcaacttcaaccacgggacattgaccggaaatgcgccaattccccatccgctagcctccga

SEQ ID NO: 349108 - DNA, 174 bp, Zea mays
acttccgttttggtgcttgatgccacaaggggggaaaataaaggcccaagtggttaatgggtcaacttccacttgggagattttggaaatagtagaatagagtttttgttttgtcaaaaacttttattggctcttattggctctattggcaaaaggtgggtttttttggggaga

SEQ ID NO: 349109 - DNA, 93 bp, Zea mays
tcttatgaaagagggggtgaagccaaaggggggggaaataaaagccaaaggggggaagggaacaactaccacttgagagaatctgaaaatagg

SEQ ID NO: 349110 - DNA, 97 bp, Zea mays
ttgttcgtgggcgtgaacgacctcttcatgatcacggattacattacctggatgttcaagtacgaaaccttggaacgccaatggaaggacaagggaa

SEQ ID NO: 349111 - DNA, 327 bp, Zea mays
tctgctgctcggacgacttcgaggctgtgaggtggctcgcgaacaagcacggggtcaccgtgatccccgggagcgccagcggaggccccctgtacatacaaatgtccttcagggggctcaaggtagaaaacaccaagctggcttgtgagaggctcacacgcggtctgcaagagctggttaccgctggaacggtgaagtgaccgatacatagctgttaggtaaagcttcaattttgcaacactgctaattgcccctggatttattcgtggtgctattagcgcgctatgttgctcgcttgaaggatgacaaccctcttttcgggtcttt

SEQ ID NO: 349112 - DNA, 145 bp, Zea mays
tttttggggctggccagggtaagtttttttgctttggaaaagttttcttacgcaggaccaaaattttagttttagacagggcaacagaatccatggactttgcaacagatgcaatcctgcaaaaggtaataaggcagaagtttta

SEQ ID NO: 349113 - DNA, 300 bp, Zea mays
tcgtatgcatctgctaagaacaagttatccaggtgcccatatcggaccagagccaaccattggctttgcatcaaaatcactacttgtcagcaaaggggaaacgaaatcattgaacttgtatgtaacttccaaaggcttcaacttttcgatgtaaaggtttttcaagccatcgataacagaagtgacggctgtcagaggtatcttctttgatgactttgagctaaaccatttgtttgttaaaggagattgttcctgaggatatccatccatttctggatcaacacgctacaccaaatgctt

SEQ ID NO: 349114 - DNA, 217 bp, Zea mays
  unsure (1)..(217): unsure at all n locations
cgttcggtccnttctaaaatgtacaaagggattagggaccattcaagggcgcttgggggtgtattaaaagaaagtggtaaaagcttggaagaacttaaaagaaaatattgatagggttaaccaaaaggtgaacactattcttaattggggatttcaaaaccgcaaaaaatatttttccaacaagaaggaccggctttcaagttaattgaattggttt

SEQ ID NO: 349115 - DNA, 331 bp, Zea mays
tcttcccgtcatcgatctcgtttcaaatccatccatcctcgtttcctccgtgccgcaacatctcaaccccatggccaagatcaagatcgggatcaatgggttcggcaggatcggaaggctggtggccagggtggccctgcagagtgacgatgtcgagctcgtcgccgtgaacgaccccttcatcagcaccgactacatgacctacatgttcaagtacgacactgtgcacggacagtggaagcaccatgaagtcaaggtgaaggactccaaaacccttctctttggtgagaaggaggttgctgtgtttggctgcaggaaccctgaggagatc

SEQ ID NO: 349116 - DNA, 61 bp, Zea mays
tcggtcgtcccgtcctccgctgggcatcgaaagtcgaacgccttcccccttccttccttcc

SEQ ID NO: 349117 - DNA, 53 bp, Zea mays
ccctttttccgagcgcccgaaaggggaaggaaagggaaaagaacgccttttgc

SEQ ID NO: 349118 - DNA, 406 bp, Zea mays
cagtaccattagctttatctactccagagcgcagaagaacccgatcgacaccatgagggtgttgctcgttgccctcgctctcctggctctcgctgcgagcgccacctccacgcatacaagcggcggctgcggctgccagccaccgccgccggttcatctaccgccgccggtgcatctgccacctccggttcacctgccacctccggtgcatcttccaccgccggtccacctgccgccgccggtccacctgccaccgccggtccatgtgccgccgccggttcatctgccgccgccaccatgccactaccctactcaaccgccccggcctcagcctcatccccagccacacccatgcccgtgccaacagccgcatccaagcccgtgccagctgcagggaacctgcggc

SEQ ID NO: 349119 - DNA, 362 bp, Zea mays
gttgatatatatagcgagcgggcccccctttgttttttttttttggggggggggggttttggaagcaactgacaattttgcaggggttcattaccacatgatatttttattccccttggggcttttttaatggcagggattttacaaggcgcatggaggacattgggagaatcattgataggttaatattagggggaatttatgtcatgtgatttggggattaaattaccacaacaggcacttagaggacacacatttggggggccaaatattttcagcttgggaaactttgagaggaactggttcgacttccgcaaaaagcagcaggtttagcttgattgttaggaaagagcacctgcacc

SEQ ID NO: 349120 - DNA, 88 bp, Zea mays
tttcgttcaagccgcccaagtgccctacgtgcagcccttcttacaagcctgcgggggcttgaaaagaaacgccgtatgtaataccata

SEQ ID NO: 349121 - DNA, 355 bp, Zea mays
tcttgccgtcgaaacgccagtgagaaacagggctcttaggcttacaatggaggcctgatccattatgcccttcatgccttcgctggacgtaacggcaaccgtagatgaagccatgtgaatgggaacatacaataacaggcatgatatgcttatgagaggttaccacaccataattacaaactcgctgttcatgccctaaataattatcaacctggtcagttctaatgtcaaggatacagagtatcaaaacaaaggattcttagtgattattgggataggaaagagttatctacacttaaactttcaaaaagtatgaagcggaaaaaccaacaagtttataaatatttcaaaaagg

SEQ ID NO: 349122 - DNA, 221 bp, Zea mays
tcggttctaatcgcgagcggccgcccttttttttttttttttttgtagagactggcaaatacaaaatccatcttacgtatctcatttggctacaggatgcggtcaagagggtttcaaatgtgagaaccacatgtcggtggagcaaatcaagttacagaggggtaaaaccaagacatggcggttgggcaaatcaggttacaggggggtaaaaccaagacaag

SEQ ID NO: 349123 - DNA, 89 bp, Zea mays
tgttgccatggcgagggccaccccgtcaagctggtgccctacaaccccgggtgccaggacgagtcggtgctgtggaccgagagccgcga

SEQ ID NO: 349124 - DNA, 389 bp, Zea mays
  unsure (1)..(389): unsure at all n locations
atcttctctccttttgctcggaacgcacacaccggccggtccccgatctccgatcccctcgtcgatccaaagatgcagatcttcgtcaagaccctcactggaaagactatcaccctcgaggtggagtcttctgacaccattgacaacgtcaaggccaagatccaggacaaggagggcattcccccggaccagcagcggctcatctttgctggcaagcagctcgaggacgggcgcacacttgccgactacaacattcagaaggggagcaccctccaccttgttctccgnctcaagggaggcatgcagatcttcgtcaagaccctcactggaaagactatcaccctcgaggtggagtcttctgacaccatcgacaacgtcaaggccaagat

SEQ ID NO: 349125 - DNA, 194 bp, Zea mays
ccaaaaaaagccgacgccgaccaacctacttaattctcgacccacccctttggtctttctttgtgtaatataccctgggggcgtcacattgtttgggggcctgagaagatgcctttggaaattcaagatagtgaggttaacattgtgatcgtgtgacttcggcccaaactaaacaccttgttacacgcatggtg

SEQ ID NO: 349126 - DNA, 263 bp, Zea mays
  unsure (1)..(263): unsure at all n locations
gtctacacaagcggnggggggagcaaaatctgcgacaggtggccggggctacttatacactccgatcgcccccgggagttactcgacttcgcttccttttccttcttccagattcggacccggcttcgggtctcacgcactaagcaaagatggcaccaccatccatgtgtcttgcggcaaagggggggcttcccttttcggaacttatttaaaggggggttacacaaaggccagggtcagggaccctttccttggggcccaaa

SEQ ID NO: 349127 - DNA, 67 bp, Zea mays
ctgcaaattaggtaattacagttgcaccttttgtattttatagcaaacccagacttctatttgattc

SEQ ID NO: 349128 - DNA, 218 bp, Zea mays
tctttcctgttcttccggttttcccttccttgtcaaccccggaaccactaactgggccgggtttccgaggggcaattccgatccgttgatgggttccaccccttgaagccgcttgccttaggtgatggccaagccgggtaacaagacttgcgtggactgagcgcagcgtaacccgtactgggcgagcgtctcctatggggtgtccatgggcctcgagt

SEQ ID NO: 349129 - DNA, 243 bp, Zea mays
tctttcggacataccatgaagttgcaaagctaggctttccttcaaaatagggggagtctttgaaggtagcaatgagggtaccagcaatggtaaaaggttctgggaattgaaggaccttggtatgccaattcttttgggacttggtgggccaaatttctagggtaacatctagacattttccaaatttggttgtccatgtgtaacttcttaacatagatgatagctactctaacctatagagtt

SEQ ID NO: 349130 - DNA, 100 bp, Zea mays
tcggttttccccaacaaaaggatattcctcccctttcttaaaaagggtggcaaggttgggctttttgcccccgcaacggggcaaattcaggggccaaacc

SEQ ID NO: 349131 - DNA, 156 bp, Zea mays
ttcctggaccaagggatgcgccgatgcactgttttatccggagggacaaagaaaattaaaccttttttttttatttaagtttaacgcaggccttacgggtaaagggaaagttcttttggctggtcgaagggtcaaaccaggggcacattccggata

SEQ ID NO: 349132 - DNA, 266 bp, Zea mays
tcgtctagatcgcgagcggccgccccttgttttttttttttttggcgggaggaagaatttttttgaccttccggatagagagaaaacgaagcctggcccagaccaaaagaatctagggcacgcacccatgctaaatgaaagtcctgatccggaacatcaagtgaaacccgactacaaggaaagatactatataggagttgaagtacctgcacatgatccataagcaaacaggtcattttatgggccaaatcaacgaccctctaaag

SEQ ID NO: 349133 - DNA, 262 bp, Zea mays
tttctaatgagaatccataggctcacgtctttaaagcaaaaataccagggctggagaaagaccttgtcctcgtagaagttaaaggcatgccccaacctaagctcaagggggaactcacagggaatttgtctagattccgttcaccttgctcttcaaggcgctacccagtggttgatttcttggcttgatccgaccttcctataaccatgagttctttcttaccaagcccggcattgggaaccgagtgctttccgtcactttt

SEQ ID NO: 349134 - DNA, 97 bp, Zea mays
tcgttctgagcttagctcctaataccgtcgtcgttttgctccattcgaccgcccgttgccgttctatgcactctgccaactccacccgcgcttaaaa

SEQ ID NO: 349135 - DNA, 187 bp, Zea mays
ccacaacctcaccggacgtgtcttcattccgaccggaggggtcaaattatacacggtgctctttccagtcatagatgaatgacactagtcactctgccattgttttcaagacttctatttttcacaactactcgcgtttcacctcaactccaaaaaattaatgtgtaacgaagactttttattttta

SEQ ID NO: 349136 - DNA, 77 bp, Zea mays
  unsure (1)..(77): unsure at all n locations
tcactataaagaaagcccgcacgcctgcatataccgaaccctaattcccatcncnacccacttgtcttttagagtac

SEQ ID NO: 349137 - DNA, 413 bp, Zea mays
gcaacatagaaagtggaatacagtagcaacaatagagcaacaatggcgggcaagatattttccatccttatgctccttgctctttctgcatgtgttgctaacgcgaccatttttcctcaatactcacaagctcctatagctgcccttcttcccccataccttccatcaatgaccgcttcagtatgtgaaaacccagcccttcaaccctacaggctccaacaagcaatcgcaacaagcaacttacctttatcacccctgttctttcaacaatcgccagccctatctttggtgcagtcattggtacaaaccatcagggcacaacagctgcagcaactcgtgctaccagtgatcagccaagtagctttggcaaacctttctccctactctcagcaacaacaatttcttccattcaa

SEQ ID NO: 349138 - DNA, 171 bp, Zea mays
cggatttcccggttggcccaccccttcctttgtattccgagggggccccccttttttttttttttaaaaaaataaaaaagggcccttttaatttttgggaagccccaaccctcaaccaaaaaactttttttttgaaccttacctaaaaaaaaacttaaaaaagggcccccc

SEQ ID NO: 349139 - DNA, 403 bp, Zea mays
  unsure (1)..(403): unsure at all n locations
cagaccattagctttatctactccagagcgcagaagaacccgatcgacaccatgagggtgttgctcgttgccctcgctctcctggctctcgctgcgagcgccacctccacgcatacaagcggcggctgcggctgccagccaccgccgccggttcatctaccgccgccggtgcatctgccacctccggttcacctgccacctccggtgcatctcccaccgccggtccacctgccgccgccggtccacctgccaccgtcggtccatgtgccgccgccggttcatctgccgtcgtcaccatgccactaccctactcaaccgccccggcctcagcctcatccccagccacacccatgcccgtgccaacagncgnattcaagcccgtgccagctgcagggaacctgcg

SEQ ID NO: 349140 - DNA, 255 bp, Zea mays
tatctagcaacatagaatgtggaatcgaggagcaacaatagtgcaacagtggccaccaagatatttttcctgcttatgctccttgctctctctgcatgtgtgtgtaacccgacaatttttcctcaatggtcacaagctcctatagcttgccttctttccccataccttgcatcaatgatagcttcagtatgtgaaaacccagctcttcaaccctataggctccaacaggcaatcgcagcaagcaacataccttta

SEQ ID NO: 349141 - DNA, 67 bp, Zea mays
aataccgactcactattagggaaaggctggtaccgcctgcaggtacccaggtccggaattctccggg

SEQ ID NO: 349142 - DNA, 141 bp, Zea mays
  unsure (1)..(141): unsure at all n locations
tctatcaaacaaagcttgccnnnnccctgttaggaatcccctaatgaccaattgtgaacctatttattcaattcaccattcccttccttgacccattctttgccataaaactttatgggattcccccttattcttttcatt

SEQ ID NO: 349143 - DNA, 96 bp, Zea mays
tcttatcgatcgccacaggcaacaccacccggcgaggctacacgacaggcggcaggaggaaggaataaactcactgccagccagtgaagggggaga

SEQ ID NO: 349144 - DNA, 109 bp, Zea mays
ttctgtaaccagctggggctgcctctcgcgctcttgtttgccgatctggtgggaggcccgcaatgccagagctctcacggcggtggcggaagacccgcttaccttactt

SEQ ID NO: 349145 - DNA, 130 bp, Zea mays
ataaagaaatccgccacgcctgcaaataccgctccttaattcccaattcaacccacatcctccttctacaaccatctatcgctaccacccgagctcttctaaaaccaatcaagaaccactcacacaattc

SEQ ID NO: 349146 - DNA, 68 bp, Zea mays
ttttcctgcaacaaccagaaggagacgacaggggggctcttaaaaaagggggggggggacccaccaat

SEQ ID NO: 349147 - DNA, 91 bp, Zea mays
tttgtaacacccccggacagacgggcgcgaacgcaaaccctaaaaacgggagccatggattcgggaggcggaggaaggaaccgcccgcaca

SEQ ID NO: 349148 - DNA, 402 bp, Zea mays
  unsure (1)..(402): unsure at all n locations
tctgagcccccaaaatcccatttccctctgccacaccacgcgctgcgcccgcctgattccgcccgccagccacgctcgcagatctcgcttggacgccctgattgcgtcgtatgaaagatcactgccccgccttccatcgtcgcccccatgccacgctccccttccattctcgctcacttncagccgcccccattcccagttgaaggagccgtccaagaaccgggaaccccatcaccggatcaggagcagccgtgtcgcgccactcgtgcgcctgcgcctcgaacctgactttggacgacgccgacggggaccaccctccctccgcatcgaagccgatgagcctctggtggggtgtccgcggtcgattgaccgattgagccaccaaacagcaccaatcgagcg

SEQ ID NO: 349149 - DNA, 204 bp, Zea mays
tgttgttactagagaggttgaaaggggttccaggtacacacgggatgccactggcttgcttgaagctatggcgggggattgctagccgttcatttgctcttgctggccgattttttcgttccggtgcttttccccccaagatttttctttgcaccagctgattctttcctacagaggatacaatcagggacggggatgttcaag

SEQ ID NO: 349150 - DNA, 177 bp, Zea mays
ttctttatctactccagagcgcagaagaacccgatcgacaccatgagggtggtgctcgttgccctcgctctcctggctctcgctgggagcgccaccttcacgcatacaagcggtggctgcggctggcagccaccgccgccggttcatttaccgccgacggtgcatttgccaccttcg

SEQ ID NO: 349151 - DNA, 125 bp, Zea mays
agcccacgcgcaactcttattcaaatgtcttgaaaaaacagcccctcccattatccttatggctgaaaattattatccacacggccaaaataaagaacgtgataaaagggtaccaccgatccgga

SEQ ID NO: 349152 - DNA, 75 bp, Zea mays
  unsure (1)..(75): unsure at all n locations
tctttcttttgttntatcttgacacttatcaagggtggtttctttagtatgcggggccgattgcccaccgctcca

SEQ ID NO: 349153 - DNA, 123 bp, Zea mays
cccggtgtcggacccacgtcttctcgtctccgtagatcctacctcttagtccgacgccgcgcggctcgttcggcagtcccggggccctctgtagcccccttccgcttctcctctccgggaatg

SEQ ID NO: 349154 - DNA, 127 bp, Zea mays
tcgtctagatcgcgggcgggcgctcgcgatctagaggtccccgccaggcgttggccaccgttcgtgcaagactcatgtgagccgcgagcccgcgagtgatgagcgccgccgccgccggtgccaagaa

SEQ ID NO: 349155 - DNA, 62 bp, Zea mays
tggactcgtgggtgcgtattgagggcattttcagtggaactttgagttatatatttaaaatt

SEQ ID NO: 349156 - DNA, 66 bp, Zea mays
gtgagcttcgttcgttcagttcatccgtgttcttgtttgccaggtcgagagagagaggatgtcgtg

SEQ ID NO: 349157 - DNA, 375 bp, Zea mays
tcttttgtattctcaaggaaacctttatccggggctcgaggtatcatactacggctgcttgtcatccccctcgtcgtgagaattgaagggagtgtcatgggggagagatccaactcgttctcacaggactccaataattctagccctgctgaaaacaaactccaaccaggtgaaaagtccttcgcatcggaagcatatgcggctaactggaacgaaccaccagaccttcaaatgcaagactccttcgagcgacctgagctatatcggtagctattagaggggggggattaattcttcccattcgttgcattattcgttgatttttttgcatttttaccatcacttggatttagctatttttcatgtatatttttt

SEQ ID NO: 349158 - DNA, 211 bp, Zea mays
aattctacccactcatcctgtcatcacaacgatcccccatactcagagtaacttttcaacaatatatgaagaagccctcatcaccctcattatcattcccttcaaccttccatccctttctccttatcacctactttttcacatgaatactcttttattttttttctatatatcctcactttatctaattcttttacttccttttcttttt

SEQ ID NO: 349159 - DNA, 294 bp, Zea mays
attattattatttttttttatttttttttttttttttaattttattttttttttttttttttttttttttttttatttttttttttatttttttttttttttttttattttttttttttttttttttttttttggtgtttttttttttattttattatttgtttattttttatttttttttttaaatttttttaatttttttttatttttttatttttttttcttttaatttttttttttgttttttttaattttatttattgttgtatttttttttttttttgtaattttttt

SEQ ID NO: 349160 - DNA, 349 bp, Zea mays
aggggaaaaggctggtagcgcctagcagagtacccaggtccgagaatttcccggtgtcgatcccacagcgttttctgggctaattttattcatacacagaattataacgtagaaggtttggtataaaaggagttagggagatatatttcataaagcctttcccatattaggtataagaagtgcacttcatattagatttagtgaaaactccacgttattgtttagttttactagagagctagttcctgtttagcctaacacaaaatagagtggagcctcgttcactggtgagagtttcattctaagtaacatggcttgaattaggcttcttccaatctatgagaagact

SEQ ID NO: 349161 - DNA, 255 bp, Zea mays
acattctgtcaccccttatttcaattccctttacaagctctattcccaaaaaaccaggggccctttcttctccttttgtcgcgcccttcatgatagaaccctcaataactccgatttctaagtggataactctcttaatctttttttccctatctctcaattaattatttttttttattctttttttattacttatcatttttctttttttttatttctttattttttcattttttatcttatttttattttttt

SEQ ID NO: 349162 - DNA, 100 bp, Zea mays
  unsure (1)..(100): unsure at all n locations
acccatatttataatatttccactacaggttgtgccctctctanctctccttcttcctctttcacacttttcattccttttatctttctctccctttttt

SEQ ID NO: 349163 - DNA, 304 bp, Zea mays
ttcacaagtcagtcagaggaatgattatcgggaaatcggactactaaccgaggctgagatcttcatgctacgcatatctgccctagtagaaaataggaaccatgaatatgagtactttagaacactgcatgctgataatgttccaaataacaatgcttttatggaaaatgagagcaacttgaaagaaacagagggtacatgcacagggaacatcattgtaaagacttggataaagctcctaaaagacgctacatcaggctagatttgttttgggatggagggaggctttcttttctccttttta

SEQ ID NO: 349164 - DNA, 414 bp, Zea mays
tttcttggcacatctaaacctacaaaccatcgcaacgcaacagcaacaacaggttctgccatcactgagccacctagccgtggtgaaccctgtcgcctacttgcaacagcagctacttgcatccaacccacttgctctggcgaacgtagctgcataccagcaacaacaacgtctgcaacagtttatgccagcgctcagtcaactagccatggtgaaccctgtcgcctacctacaacagcaacaattgctttcatctagcccgctcgctgtgggcaatgcacctacgtacctacaacaacagttgctgcaacagattgtaccagctctgactcagctagctgtggcaaaccctactgcctacttgcaacagttgcttccattcaaccaactggctgtgtcgaactctgctgtgta

SEQ ID NO: 349165 - DNA, 284 bp, Zea mays
tctcggacgcgtggggggtaacaaattttggtctattgctgggcatacaaaggatccatctgaaggcattacagtgaaggaatttgatccgcatacttgtacctggtcaattgtcaagacttatgggaaaccaccggtgtctcgtggaggtcaaacagtgactcttgttggaacgaccctagttttgtttggaggggttaatgctactctgggttccttgaatgccttctactatcctttgtttttgatattattttcttttctatttgtgttattttcttatg

SEQ ID NO: 349166 - DNA, 416 bp, Zea mays
ttctcccacccctccatttttcaagccggcgcaaccactttttcctcccaaggtcttccacgcagcaaggtgcagaggcacctctccatggcgccctccttcctggcttcccttgcgtaggggcagaagcttccatgtatgcctccctccccaagctccagagcgcacaggacagcaacactttcattccccttggatccatggtgctgggaggattttccccattgctggaattcgatgcagccttcccatggcacaggttccacccatggccgacgcccctacccttgttaccttcctccctgtgttcggcacctctccccatagcagcagctcgctggcacccttccttggtccggcatggaggaagctccacattggcgttctttcctctccccatggagcccttcctctgt

SEQ ID NO: 349167 - DNA, 409 bp, Zea mays
cgttgtttgtcccccttacgttctcccctcaagtctatctttaacaacagaacaggcctcccttttcgttttttcttctttctcctctcacttttttcttctttttcatattaatttattcttgtactctctttatcttttttatttttcctcttaaattttaccatatcttgccttatatatatcctttctttttataatgtttactatctttttttatttccccttcacctctctttattacttttcctttttagctttttaatttttttatatttttggggggtgaattctttttattctttctctttaattatttctttttcttattttaattttttctttattaccacctttacatttctaatttctttttcttcatcttccttcttccccatttttatttttt

SEQ ID NO: 349168 - DNA, 240 bp, Zea mays
  unsure (1)..(240): unsure at all n locations
tgttctcaccacgggactgggagagagagagagagatatgaagaattaaaaagcatctngcaccattgcttttccaccgtaccggatgttgcttttcccataaaatgctatcttaaggtttttcaaatctactctttttttttgttttctatttctattataatataattttttttttcataatatttttattttttttttttttcttcatttattttttttttaatttttttatttttt

SEQ ID NO: 349169 - DNA, 304 bp, Zea mays
tctgtcccccctcaacctctgcatcgacgggctcgagagaagagtcggcgggtcgccgccctgctccggcaccagcaaaaccgccaggtgatccccgacaaccagctagagcagctagccgctgcagcagaagggaccttcttatcgccgtgattcgattgggcggtgcggactccatgccgcttaatcctacagaaattgtggagtgcgagcgttccgtcgatctccacgatcgtctggacaccatggttatagcctcagatttcatgcctgtgatggcagggggggatctctgaattttgaa

SEQ ID NO: 349170 - DNA, 112 bp, Zea mays
  unsure (1)..(112): unsure at all n locations
agcagctggctagatccgagcggccagccctttttagtttttttttaaaaaaagaagggaccccccccacctcctnctaccattaaattctttttattttttccaattcctc

SEQ ID NO: 349171 - DNA, 162 bp, Zea mays
gaactacccgaccgtgagcgccgagtacagcgaggctgtggacaaggccaggcgcaagctccgagccctcatcgccgagaagagctgcgccccgctcatgctccgcctcgcgtggcactccgcggggacgttcgacgtgtcgtcgaggaccggtggtccatt

SEQ ID NO: 349172 - DNA, 136 bp, Zea mays
tgatatccagatcagcaaaccggcagtgcttgaagagtttcgtagaacagaagagcctccctatggtcatcgctctcgtcagtgtgcctggctctgtcagctgccaacacctctgcattgcagcattccctgcccc

SEQ ID NO: 349173 - DNA, 278 bp, Zea mays
agcgttcttcaacttctagcttagctctggggggaaagagagagttagagagcgagagagagctctcctcccgaggctccttggttgtcctcaaaccttacttcttttcgaattcaatccccctttattcgaaatctttccctatattttttcttctatatccattatttaaactattttatttaaatttctaatttttatttttttcttatttttcttcttatttcttttatttcttttttttatataaatttataatattcctttctatttcttta

SEQ ID NO: 349174 - DNA, 409 bp, Zea mays
ttcaaaccctagccaatggacgccgccgccgttcacaagcgcaagcgacctgaagaggccgacccaagcgcgggggagctcgacctctccgccgccgacgccgtcgaggtactcgacctccgggccgccaaacgcctccttctggccttcgagcgccgcctccgtgacaacctcgaggcgcgcatgaaataccccgacgaccctgcccgctttgcagactccgagatcgcgctccacgccgagaccgaccgcctccgcctccttgccggcgcgcctgagctcttccccgacctcgtccccatcggcctcgcctcttccctcgccttccttctcacccacgacaatgtcgatctcgcagctgccgccgcatcactcctcggcgacctcaccgactccgaggaccccttcg

SEQ ID NO: 349175 - DNA, 155 bp, Zea mays
tggattgcggacgacctacattgactttgagcacatggctaaaactccataagcaccggaaccacttgttgcaactgctgcatttttgaccattgcaccatacgagatttattttgaaggcctcaccggtacacactttattgatgctttaacac

SEQ ID NO: 349176 - DNA, 344 bp, Zea mays
  unsure (1)..(344): unsure at all n locations
tcggagttaggggacgacgcattgttagcaagatggtccaacatggtcacttcaagcctagttctagatcgcgaagcggccgccctttttttttttttttttttttttttttttttttttttttttgctccngtgctcttttttcttttttgttttttttttttttctgccgggggggacaatccttgttccctattacgctcccagttttttgactaatagttcgatttccacgccctgccaacgggctccatctaattttcctctcgcctgtgctttttttcaaacttattgcccgtccttttattttcttcccttttctcctttttacccaccccaatgtc

SEQ ID NO: 349177 - DNA, 223 bp, Zea mays
  unsure (1)..(223): unsure at all n locations
attctgttctagatcgcgagcagccgcccttagttttttttttatataaggaggggggnnnnaacncaancaaacaatcaccctctgctcttctatttaaccaatctttaaacagaaataccaagacagcccctcatttacctcaaaaaaggcccacataataccaaatctaaatcttggattccctaaaccatcaaaacaccccccctccataccccaaatt

SEQ ID NO: 349178 - DNA, 195 bp, Zea mays
tcttatgagtgactaaaagggactaaaccatgttaattctaccttttggctctgctttattttagttacactaatgaaaataaattacactaatggcatgagaatgctaaggggtattttggggtgtatgttcaaacttttttttcataatttaacttttaatatattttccgtcattgtacattttgttgtatt

SEQ ID NO: 349179 - DNA, 262 bp, Zea mays
  unsure (1)..(262): unsure at all n locations
tggataacccacgccagaaaanncataaagacacctttcaaaaaacacaagagccccccctcccctttntccctcctctattctttttaccactactccctaccacattgatctttaaagccacattattacacacttttttcatgcttaatcacataatatagtatctccctatcaatcataattccaaaaccacttatcccgtctcattcttaccatgccaacttcatatcctttttctctatataccctaatattttta

SEQ ID NO: 349180 - DNA, 304 bp, Zea mays
tttacataacccgcgcgcttacctcctgagggcatcaggacatggcggacacccctacccccaagatggtgctggtccctatcgtgaatgggactgagcccatggacgcggccattaccatcgacgtgctccggtgcgcggcagccgatgtcgccgatgtttccgtcgagccggatgcgacatccgcagctgacttatgaggcatgaagcttaccgcagacgcggtcctcgtggacctggcggaccatgagtcagatctcatccatgtaccgggaatggctgatttttcgacttttggagagag

SEQ ID NO: 349181 - DNA, 155 bp, Zea mays
tcttgaccattagctttatctactccagagcgcagaagaacccgatcgacacgatgagggtgttgctcgttgccctcgctctcctggctctcgctgcgagcgccacctccacgcattcatgcgggggttgctgctgtcatccttcgtcgtcggtt

SEQ ID NO: 349182 - DNA, 192 bp, Zea mays
tcttacgcgtgggcgcgccgctcttttgaagacatccctcctgcttgcggcgagcgctgtcacatgtcgtgtggtgtgttggctctctgatccggatggttcatcgcctttgtcttctcccacggtcattattattcttttttctttcattattaatttgcaatattattttatcgtggtctcttttctgtt

SEQ ID NO: 349183 - DNA, 395 bp, Zea mays
ttaactagcaacatagaaagcacaataggggaccaacaatggcagccaaggtattttgcctccttatgctccttggtatttctgcaagtgctgctacggcgaccattttcccgcaatgctcacaagctcctatagcttcccttcttcccccgtacctctcaccagcggtgtcttcggtatgtgaaaacccaattcttcaaccctacaggatccaacaggcaatcgcagctggcatcttacctttatcacccttgttcctccaacaatcatcatccctattacagcagttacctttggtgcatttattggcacaaaacatcatggcacaacaactacaacaacttgtgctagcaaaccttgcttcctactctcaacaacaacaatttcttccattc

SEQ ID NO: 349184 - DNA, 161 bp, Zea mays
tttctttagaagaaggctaccgcagcccttacgatgttctcagaaaagagtggacgagctcacctctctaccctttccccctcgaacccgtcaacaacactctgtgaacataccatgtgttgacggccgtggccgcttctttctttcaacaatacatttct

SEQ ID NO: 349185 - DNA, 134 bp, Zea mays
tgtctcttccttaccatggatcggaatggggggtgccgaggttcacaaactgtggggagatctgtattatcagacaaacaagatctttgcttctcttttttgtcattgctttagtacatgttcatagctttttc

SEQ ID NO: 349186 - DNA, 189 bp, Zea mays
  unsure (1)..(189): unsure at all n locations
tctttttcttctctaccttaccctcnactccgggctggttcgtattgccaatagggccgacctttcccaccttccagaccaccttcttatagatctcttcctaaaaacccttaatgctgataagcttacaaataaagttctcaagttttttctagcaacccgttgcgaggatattatattgcctaacta

SEQ ID NO: 349187 - DNA, 327 bp, Zea mays
gtcacaggtgattacttgcttcgtggcggtgctcaaaaggtctggaaagccaggaagagtctggcctccccctacaaacacgcgttgcagctattgcaatggacaagctaactggcaccttgtcgtacctgaccacttctatgacaagggacggctggttagactaacggcacagaaggtagacgatgagtcatcctaaaagaacccgtaagcaaaagcagttgcccttgaccatggctgcctatcttgtactgcagttcaagaacaagtttgggagaactcttactgctaatactttcctgaagatgtgttactatatatttgtac

SEQ ID NO: 349188 - DNA, 270 bp, Zea mays
tctaaattatccttcctcccgtgcctacaggggtacacctcgacgatgccaaagccctagcgcagcagcgcgaactacacctctccccgtcctgttcctcgtggcgcggtagccatggcggagccggccatcctcgacccctcccccttcgatctccgccactatccggcgcacctcttcgacccggacatccccctcgccgtcgccgacttcccactcggtgaattcgccggagacgacggctgtgatggcctagacttcgacgtgccc

SEQ ID NO: 349189 - DNA, 171 bp, Zea mays
ttgtctgctcccttcctggccccccatcacctaccgatttccactgaacgagccacggccttttactactccttgtaccacaattatctactcccactattacaaccttacatatatttatcaatggccctttcattctattttttctttactttctatctctcccacttt

SEQ ID NO: 349190 - DNA, 141 bp, Zea mays
tttccattacttttaaccctcccctcctccgggtggggaactcacaagagaacgaaggagacaagggagaaggagatggctaaaaagaaggagaaggcggtgaacgtgtcgggcaagccggggcactcgaacgacgtcaac

SEQ ID NO: 349191 - DNA, 111 bp, Zea mays
tttccttaaagagcttcgccccgctcatggtctgcatcacgtcctattagggcgtgactttctccaacctcataaaccccgacagctttttcgtcacattccatttcatcg

SEQ ID NO: 349192 - DNA, 140 bp, Zea mays
ttttctgtttctagatcgcgagcggccgccctgtttttttttttttgggggggatgcgactaaaccataacaaacattttttgcttacaacaatctgctcatttttttactagcaaatatactcggcgggtcaaaaactt

SEQ ID NO: 349193 - DNA, 102 bp, Zea mays
tctccatcatgtcgctctccacactcaaccagccgggcgtctccggcggcgggagcggaaaatcccttttcccggctggcccggcggcgcagaccgtacatt

SEQ ID NO: 349194 - DNA, 86 bp, Zea mays
ttggtttggggtcctaattttcgccttttttggttggcaaacttcctcttccagggggggaaaacgccttccgatcatgaccccca

SEQ ID NO: 349195 - DNA, 312 bp, Zea mays
tctatccttgtgatgtgatgtctcatggtgcatgtcattttggttgcagattgtgtcattttgggtggtagcagtgctttaattctttattatgagttcattaccagtttggcatgtgaacagatagatcggtcacacgtcattttctgctttacaggtatcactttcttggataattggattggattggcacattgtgttgtgcctttgctgacttgtcctgcactattttcctgttggaattctgttcacggtccccttagtatatagtaccttaaatgggcattcacctggatgccttaagatatgctc

SEQ ID NO: 349196 - DNA, 381 bp, Zea mays
  unsure (1)..(381): unsure at all n locations
tctgaacggtattgcacgggaccaacgatgggggatgatgtcttgctgggattggtgttgatatggcaatggtgcagctgatgtgacgatgcagatgccgatgctgctgacagtgaccatcttgtttgcacaatgatcccttacaagttatgttggttcttatccccccttctcgcagatgcttttgcatcagtgctagttggaacatggtgttgaggggttaattatgacgggcatgggtcctgtttatcatgtggtggtgttttgtgggggggtgtgggtgtgtggtccttgttatatttatttttttaagcaaccattattagaattcatgaactcnattttttttttttatatttttttttatttctttattttttt

SEQ ID NO: 349197 - DNA, 223 bp, Zea mays
tctggaaagggaaggaagcatgttcgggcagcaccacatccacggcgggcaccaccaggccccgtcgtcgaacgagcagacgcttttaagatctttttccccgcccaccaaggcttcttgcttaaccttccttaacatctctcttgtcttgggcccaacaaacccccggacgagtaccaacacttgttccaggacattatgcacaacaccaatgttaaagacc

SEQ ID NO: 349198 - DNA, 89 bp, Zea mays
aagcctcttccttacaacaacggccccggccccccgggggggtctttattgcctgggggcgggtacctccacctggagcagttccagct

SEQ ID NO: 349199 - DNA, 163 bp, Zea mays
tttctgtaaattcgtcctgctcccccgcggatcgcaccatccgggcgcatgtgcggccaattcgacccggttacttggcttctttgattggggaggggagatgtgatttattttttctttttggggtaatactgatttttttttttaatttattctatgataa

SEQ ID NO: 349200 - DNA, 312 bp, Zea mays
ttatttctgacaacagctagtgaggaacctggcagagtgaaacagacaaggatggaggggctgatttttttgaagctagtgtgggtgtggaaaacgtttattattttattggcataagatgctcaggttgcagcatttccgatatttaagagctctatcattgattcattgttgagtcacttcactctattgttttcttgctttcatgggaaactgtttgttccttatagttatgttttataaaccaataaattatttactaaccatttagatgcacgagatctgtggggtttgcatggatatttattaaat

SEQ ID NO: 349201 - DNA, 221 bp, Zea mays
tctccctgtcgtaccagtaaaccgtgcgggggtcccccgctaccggtcgctagccgccgcgctgctgcggctcgcctccctcccccccacgccccgccgccgcctcctctcgctccctccttttaccccgagcttaagctcgcgcgtacctgcctaccaatccgtaggagaggaagaggggacaaggcccggtcggtcggtcggtctgtcgttcggggggc

SEQ ID NO: 349202 - DNA, 206 bp, Zea mays
tctacaagggacaatgcttgtcctagtgaagggacacaacttatctcggggtgacacacacactaagagcgaggcttgattaaccatgagcggcctcattattgaccaggccttcacacaagccccctagcacctgccctagcccatcttcacccaggacaccgtcattcttgttatagacctgtctcctatgttcggcagttgcg

SEQ ID NO: 349203 - DNA, 146 bp, Zea mays
  unsure (1)..(146): unsure at all n locations
ttttccgcccttttttttttttttgntagaatactaacacaaaagtcagcgggcccaaattccatttatcnnctcctaatttataaatccattcctcatcaccattactcatattaaagacttcatacaacaattttttttttatt

SEQ ID NO: 349204 - DNA, 162 bp, Zea mays
tgcgtacacggtctccctcttcctgtcaggggtatagtgagagtgaggcagcgagtgggagacaaggggaaatggggaagggagcgcaagggagcgatgcggcggcggcgggcggcgaggtggaggagaacatttctttttgtctggttgccaagaacaccc

SEQ ID NO: 349205 - DNA, 385 bp, Zea mays
gaccaactagcaacatagaaagcacaatagtgtaccaacaatggcaaccaaaatattttgcttccttatgctccttggtctttctgcaagtgctgctaccgcgaccattttcccgcaatgctcacaagctcctatagctttccttctttccccatacctttcaccagcggtgtcttcagtatgtgaaaacccaattcttcaaccctacaggatccaacaggcaatcgcagcaggcatcttacctttattacccttggtccttcaacaaccgtgaggcctattacagcagttacctttggtgcatttgttggcacaaaacattaaggcacaacaactacaacaacttgtgctagcaaaccttgctggctactctcagcaacagcag

SEQ ID NO: 349206 - DNA, 116 bp, Zea mays
ttcacaaccgcataagaagcctcggttgatggaaagttttaattcgccgaggaaggaccaggaggttgaggaggttgttctttctgtaaacgctgttacctcgaccattttccctt

SEQ ID NO: 349207 - DNA, 194 bp, Zea mays
  unsure (1)..(194): unsure at all n locations
tgncttaggaacctgagcgcggacaccaaggcggggcttcttctgtttcacgccgtgccctttcactactcgctggtgagccttaagtccaacatctttcccataaacactcttgctaccgacggcttcgccaggaacttttattcactgtgcattactcctcttattttttttttttttattatatctttttt

SEQ ID NO: 349208 - DNA, 140 bp, Zea mays
tctttctttttaagcagatccagccataactactagcggtatttctaatagcactggttacagtaacaatggaactgtacccctttttttgtgcctactaaatttatcattgtcgccttatggaacttatattgctcctt

SEQ ID NO: 349209 - DNA, 249 bp, Zea mays
ttttctggtgatcacgaggacaccaccaaggcggcgcaggttcactggttcagcgaccgctttccgcgatgtgccgcgccacggcgatagagggcggcttccttctcccgtccccgtcccggcgcctagacatccgcgctttctaccttcggctttactcctgctccgccacgacgcccgctgagcttacgctggcctaccacccggtcatcggttgcttcttttctttttttttttttttcttcttct

SEQ ID NO: 349210 - DNA, 446 bp, Zea mays
gcgcggcgagagctgacctgcgctgtcttttctttggacgtatcgtgatccttttttttttctttatttttcattttcttataatttctattatcatttccttttttttctatggtttttcttttttttttttcttgtctatatgataactgttttttcttttcttttctctgtttgtatttcttttctttttttttattcttatcttttttttattattatctgttgtttctttttgttttttttttatattttcttgtttttttttttgttgtggttgttttttttttttgtcttttttattttattattttttgatattctttttttttatttttttttatttttctttgtttttttatctttattctttctgtgtttcttaattttttttttttttttgccttttgtctcttttttttttttttattatttttgtttgtttt

SEQ ID NO: 349211 - DNA, 264 bp, Zea mays
tctgactgtctcacgcaaccacctgaggccgggtcacctctaacaccgggcacccactgtcttcacccccgccctagatcaccaccgtactctcaggcgcaagaacgagctcaccaggcaaagtcacggcggcgacctccgtctttcaggtctcgcccttgctggcgcgcgcctctgttcaccacccagcgccgcgtttttctttttcagtccggtcgctggccgaccgccagcggcggttcgggccctgcttttcgcacgccc

SEQ ID NO: 349212 - DNA, 162 bp, Zea mays
tcgctcgcaccgccgcgggacacgaacgcgcgagccacccaaccggcccgaacccgatcgcaccgacgaggtggatcccaggggaaggctcctctttaccgccgccgatggacgtgggcctcggcggcgcgggtagttccggcagaggagggggaggggtcc

SEQ ID NO: 349213 - DNA, 263 bp, Zea mays
tcttttttatctgtttagccaagctgtggcggaccgctgctaggaatggagatggagtccactcctctcttgacaccatacaagatgggcgatttcaacctgtcacacaagagtgtgctaccgccaatatcattacaatcatacctcttaaagctactcgccacacccacctcatccttaattcttccaaggatgctatgttgattcaaaaacttgattaaaccatatttcctatccaggaagatttcatttttgtccatttt

SEQ ID NO: 349214 - DNA, 181 bp, Zea mays
tctttgcttcttatttgcaacaacaacaacgggcattcagccagctacctgctgcctacccccagcaatttcttccattcaaccaactagcagcattgaactctcctgcttatttacagcagcaacaactactaccattcagccagctagctggtgtgagcccttgctaccttcttgacac

SEQ ID NO: 349215 - DNA, 234 bp, Zea mays
  unsure (1)..(234): unsure at all n locations
ttttcttttccagagcattccgtnccncccccggctggatcttgtcgcgaccacgacctgctcttcttcccgccggctccttcttctcgcatggcgacagcctctcgttcctagccccccccagatccagcggcacgcacctacacacgcgcaaggaaccgtagacgcgcccccgcgccttccctctcttccgttcttcgccacccatggacgcggggaatggctgcagcgcgc

SEQ ID NO: 349216 - DNA, 413 bp, Zea mays
  unsure (1)..(413): unsure at all n locations
tctaagcaacatagaaagtggaatccaggagggacaatagagcaacaatggagaccaagatattttccctccttatgctccttgctctttctacatgtgttgctaacgcgacaattttccctcaatgctcacaagctcctatagcttccctttttcccccataccttccatcaattatagcttcagtatgtgaaaacccagctcttcaaccatataggcttcaacaagcaatcgcagcaagcaacatacctttatcgcccttgttgtgtcaacaatcgccagccctatctttggtgcaatcattggtacaaaccatcatggcacaacaactgcagcaactcgngctaactgtgatcaaccaagtagctttggcaaaactttcttcctacttttcggaacaacaatttttttca

SEQ ID NO: 349217 - DNA, 233 bp, Zea mays
  unsure (1)..(233): unsure at all n locations
tctnctgctctccggagtgccattaagttaagaagaagactttttaaatggaagtgggttcctcctatacatcttatcacatttatcacgaaattttccatacgtttatttttctttcccatctttcacgactccatgttaattcttcttcaaccttttcgttaacaatacccccctcgaccttactcttacccaacctcccttctactaaaacttcttttttctctccacct

SEQ ID NO: 349218 - DNA, 165 bp, Zea mays
  unsure (1)..(165): unsure at all n locations
acccctaatttccctgttctacccacccctccgttaaaatctctagcggccccccttttttttgtttttttttaaaaaaacaacagacccccacatttttctcctnaaaaataactccntttttcaaaaacttaatacctatacattttaaatactaatcaacac

SEQ ID NO: 349219 - DNA, 134 bp, Zea mays
ttcctgagttcgctaggttcgtcgacaacagtgtccttaagctcgacgccgggggccaccttaggctttctgtgaaagagctccagccggccgtcgctgacatctgtgccgtcatctttctgccggccagaggg

SEQ ID NO: 349220 - DNA, 97 bp, Zea mays
acccgtcttctttgctccgggctagctagcaccaatggggggtcatctggccgtcgggtgggtcgccttgttgtcctcctctgcctttttggccgtg

SEQ ID NO: 349221 - DNA, 295 bp, Zea mays
  unsure (1)..(295): unsure at all n locations
tctnctgcccttcccgtcccgtcccctcccctacgcgcccttccaatacccgtgggggagcctcactctaaactccnaatctaaaccctcttaattcaattttanaatttctacacctctttccccaaaattttcttaatctatttctttcaacctttctctatttacatctaaaattttccttcaatttttcatcctctattatttctataccttcattttccctttcttttctatttcatctattaactcatcttccttttcctattttttctacaactgcaggcgatttctt

SEQ ID NO: 349222 - DNA, 182 bp, Zea mays
cctccagttcccgccccgaatttcccggttcgacccacccctccgcctaaatcgcaagcggccccccttttttttgtttcttttttaccactgcgggcgccccccaccactctacttctttctctttctttcctcaacctctgcggcatctccacctgccccgccggagcgccattagctct

SEQ ID NO: 349223 - DNA, 343 bp, Zea mays
tctctccccgtgcctccctcgggcctcgctggtggcgctcttcctgtgggggcggcaggctccaacaacccgggagggcgccgtccgcccccgcctccgggagcgatgatgatcgcgcgacgcctgctccgacccaatgcccccgcccaggcaagcagcttattgaagcatgtaactggcaccgcaagtttgcaaggctatgcggatagcttgttggatggtacagtcagacattttggttcaccaccgtctgcccagcctgaaaaaaatgtgttcaagggggcgcgggtgctttctcctcttacagatggctggctaagccatgatttgccccctctgatca

SEQ ID NO: 349224 - DNA, 406 bp, Zea mays
tctttttcagatcaacaggatttctgttggggggttccaaacataagggggggggacacaaatatcacacctcaaaccacatcagcttgcacctgcttgcccaaatttgacgtgacaccggaaaaaaatagaggtgcaatggcaacagaggaaatggaacacaatgacagtgggccagtttttgaccataccccaactcctcatgatgatacactcaaaggtactacaaactctggatctgatccaccacttacagagcaagagtgtatccgttctctgtgggatttaatttgttccaaggacatttaccaaagcagggttgttattgattaccgtgattacagttcaaactgtatggatttttatgaatctttctcggagggtaaatgtctttagttttcttcat

SEQ ID NO: 349225 - DNA, 336 bp, Zea mays
  unsure (1)..(336): unsure at all n locations
tatatttgttcggtgaggacatcatgtggaggtgtgcatcaaatgccataggggggagcttaaanaaaaaggcacaaccctcaaaatgcagcatatccaatgcagattgttctgatgatgaagtttcttcatgtacaagcattataggaaggccttgattgtccaatatgctgggaatccttcaacctcgtggagaatgttccctatgtcttgtggtgtggccacacaatgtgcaaaaactgcattcttgttcttcactagtcaattttcaaatttcgggggcgggggtatccatctctcctttttttattatattcccttttttctaaccttctt

SEQ ID NO: 349226 - DNA, 164 bp, Zea mays
tcttctcccagatttgcagctcgcaccccgttgatccccataattacatcggcggcgccctctcttcccgcggcacccggagcggagcgcaccctccccctcttcaccgcaattcccgaggcggggacgcttcctgccttggcgctcgctccctccctcgtgat

SEQ ID NO: 349227 - DNA, 285 bp, Zea mays
  unsure (1)..(285): unsure at all n locations
agaaagcccgcgcgcaggcaccaacccttaattcctttccccgtttcacccaaactcttggtttccaaccacaatccttcacctcgggcggtctttaataaatcagggccggtcctgctactnactcaccctctttaattcgatctccatcatctataactatcatttcccttctaagaccaaatatctcttttattacaccattactaaagataactaattcccgcctcttctaatataaaacactatacattctatatctccattacaatataactacctctt

SEQ ID NO: 349228 - DNA, 66 bp, Zea mays
gttttggaaattcacaattactggtgcacggagtgcacatattaaatcatggggatctatcaattt

SEQ ID NO: 349229 - DNA, 402 bp, Zea mays
tctttgtgcggaaacgagaagctactggggaggtaccactacatgggattgaagttggttgcaagagtagagtgcgccggttataacttataaagcagagcatgctgtgttgatactgtttttttttccctttttggcttgacctatatgaagaaaaggatcggcgttaaaatggtattgtgaagggagaggattctttgctaaatcttcttcccgcataattttcattttatttatttctacccttattatttattatattttaaaatcatattggggggggggggggggggaggtttttatttaacatttctccattaattaattatttataattcctttctctttattttatacatttttttctattttcttaaatacaactctttcttatttactata

SEQ ID NO: 349230 - DNA, 92 bp, Zea mays
  unsure (1)..(92): unsure at all n locations
ttcttttcattcaatgctaaaaagatcaaaggcggcactttgtcataaagcanagggaaataacttttacagaagtatctttttctattcta

SEQ ID NO: 349231 - DNA, 53 bp, Zea mays
gtctctgccatcaggcccgtcgcgctaccgggagctcttctccgggggggggg

SEQ ID NO: 349232 - DNA, 224 bp, Zea mays
tctttctctcgtttctcccgacccgcctgcgggggcgttccaaccccgggtgggtagcctccttccactcccaataccagcccccgcccctccagcaccaccagcagctcgccttctgaccatgagacggttcggaggagacctgcatggcgacggcacgacgcctcggtccgcggcctctggtcaggccatgatggaacttaaggccaaccggtcgcccgcca

SEQ ID NO: 349233 - DNA, 221 bp, Zea mays
  unsure (1)..(221): unsure at all n locations
tataggggangctggtacccccgcaagtacccgtcccgaatttcccggtccaccccacccttccgctggttttcgttagaaaaggaaatcnattccggcaccttttaaactcttcgtgcctagaaaaatatangccgccnncccctcctcctcattcggtgaaaggtgcgcagttagtgttggtagatctcttgcctcactacactatcaccataatttgt

SEQ ID NO: 349234 - DNA, 398 bp, Zea mays
ggaaagaccggacgcccgcaagtacccatcccgaatttccctgtccacccaacccttcctttttaacccttcctaaccctccaccccctcgggtttctccttcaatccatgcctgcctccctccttccctccctcgctcgcctctggagaaccctcgccatcctgcccaatcgcaccaccaaacccccaccaaccgccctttttttcgcccctctgcgcgtcaacaccgtcacctgctgcgatggcggtgcaggagcgtaggacaatcgatcttgaggaggaatgggcgttcatgcaaaatggcatcaccaagctgaaaaacatcctctaggtcaagcccgagccgaaatcatttcctaggactacattattctctacacgacaatatacaacatttt

SEQ ID NO: 349235 - DNA, 161 bp, Zea mays
tatagggaaagctggacgcctgcggtacggttccgaattccggttcgcccaccccttctttctctttcaaaagcccctcggccagcagggtcgtccccctccccaaaaccaagccagctgcctccgacagcatccaccttttcctcccccaaaccatggac

SEQ ID NO: 349236 - DNA, 410 bp, Zea mays
tcttagaaagcacaatagtgtaccaacaatggcagccaaaatattttggttgcttatgctccttggtctttctgcaagtgctgctaccgcaaccattttcccacaatgctcacaagctcctatagcttcctttcttcccccatacctctcaccagcggtgtcttcagtatgtgaaaacccaattcttcaaccctacaggatccaacaggcaatcgcagcaggcatcttacctttatcacccttgttccttcaacaaccgtcagccctattacagcagttacctttggtgcatttgttggcacaaaacatcaaggcacaacatctacaacaacttgtgcttggaaaccttgctgcctactcttagcaacagcattttgttccattcaaccaactggctgcattgaactctg

SEQ ID NO: 349237 - DNA, 62 bp, Zea mays
aaaaccataagcttaatctactggggggcccataaaaaccgggtggggaccatgagggtgtt

SEQ ID NO: 349238 - DNA, 212 bp, Zea mays
tttctttcccccacggaccctcgccaccgggaagacgcctctcgctcaggaggacgagcattccaccggagccggatgatgatattatgaacgagaagaatccccgtccgctcgactaggacgacattgtgctcctcaagacttattgccttgagccgaacaaaacaagcattaaaaaggtcgttaaagatatcaaagatattttcaattaa

SEQ ID NO: 349239 - DNA, 428 bp, Zea mays
ttttctttacagctgcagcaactcgtgctaccagggatcatccaagtaggtgggggagacctttctccctactctcagcaacaacaatttcttccattcaaccaactgtctacactgaaccctgctgcttatttgcagcaacaacaactactaccattcagccagctagctactgcctactctcagcagcaacaatttcttccatttaaccaattcgccgcactgaacccctctgcttatttccagcagcaaatactactaccatttggccagctagctacaacaagccccgcttccttcttgacacaacaacaattgcttccgttctaccagcagtttgtggctaaccccgcaacccttttacaactgcaacagttgctgtcctttgtccaacttgctttgacaaacccagcagtctttaccaacaa

SEQ ID NO: 349240 - DNA, 183 bp, Zea mays
tgtccgtggcgtcccgactggcggccgtgcttgcggatccggtcggggtgcgggtgcccgtcttaaactccctcctttttgcgcttgccgcctccgtggacccttccaacggccacctcccgttctaccttttccgccgccgcctactccggttcggccgccccaatgccttaattttttccg

SEQ ID NO: 349241 - DNA, 176 bp, Zea mays
tttctctcgccgcccccaccccccgctgccgggggctttttcccgggtgcgacgccacacacctcccctttccactcgccgccggcgatcccgaaccgggagcagcgcacatggcaggccgggacgagaggtggggggccccgttcttccccttacacaccaaccactatacatgc

SEQ ID NO: 349242 - DNA, 360 bp, Zea mays
tttccagttctcaacccggctgtgctggggcgtctccttcctgccctgggggcggctgctgccgccgccagccgctgcaggcacgcttgccctctgctccctgtccatccactcatcattccccgtcatccaccaattcacaacccaaaaccctaaacccatttacctcaacgccaccgccgccgccgcgatgcagtccatggcgcccacctctcccttactcccggtggcaggccccgttccccgccgccgcctccagcgcgtccgcgccgacgcggtctccgactagcccaaactcaacaagtacagcgcgcgcattacggagcccaagtctcatggctcctcgcatgccgtgctcta

SEQ ID NO: 349243 - DNA, 149 bp, Zea mays
  unsure (1)..(149): unsure at all n locations
tcnaatcccagcccggcccgcgatggagaggacaaatctgccgctggcggtggcgctacccctggtgcacggcgagcgtctgtgggcccggccgtggcggtggcttaaagacggccctttcttaatggggggcgaatgcttgttttttt

SEQ ID NO: 349244 - DNA, 395 bp, Zea mays
  unsure (1)..(395): unsure at all n locations
tgttgagcattcagaaacacaccaagcgaggggcactatcaacaacctaacagcaatggctaccaagatattatccctccttgcgcttcttgcgctttttgcgagcgcaacaaatgcgtncattattccacaatgctcacttgctcctagttccattattccacagttcctcccaccagttacttcaatggccttcgaacacccagctgtgcaagcctataggctacaacaagcgattgcggcgagcgtcttacaacaaccaattgcccaattgcaacaacaatccttggcacatctaacaatacaaaccatcgcaacgcaacagcaacaacagttcctaccagcactgagccacctagccatggtgaaccctgtcgcctacttgcaacagcagc

SEQ ID NO: 349245 - DNA, 142 bp, Zea mays
  unsure (1)..(142): unsure at all n locations
tnctggttctgatagactgattattccaacgcgtggccccattaataatgagagaggcacttcctaactttcatttcatatcattgattaaacctaaaaaagttaccttccttcacacctttaccaactatatctttctttt

SEQ ID NO: 349246 - DNA, 206 bp, Zea mays
  unsure (1)..(206): unsure at all n locations
tnctgatccgcgttaccccctctcccttggtgtgcggtcccaccaccaacgcgcgtgccggttatctccgccgccgcccgctttgggaaggcgcgacgaaggcaggcgagaggctccagccggacgaggaggaaagaggagcatcatggccggaggagagatgatcctgtggtactggttctactggttgctgtccttcctatacc

SEQ ID NO: 349247 - DNA, 345 bp, Zea mays
tctctagatttttcctgactcgttgtctgctggcacttcctctgctcttcgcaaggtcaatgtaacctccaaccattagcatttagactaccaggactatcacaatggctattgtccagttcgactgtggcaaggcatcaccactctacaccgtacctacaagcttgtaactgtagccacacaaggtgcaacatcaccctttgaactgacgactgtgccaccaacaccatggctaatagctgctaatgagcgaatgtcaagctcaagacttatcgttagagaggtacaaccatttatatcactctgtgtaattcatacatccccaaatagctacagaattgtaat

SEQ ID NO: 349248 - DNA, 386 bp, Zea mays
tttctatcgcgagcggccgccctttttttttggggttaaccccaaacacatgggggggattattttaaaaagaaccaaatactcctgtccccatccgcttaattatcatgctaacaacaacaacaacatcatccgctggctttcgctgcgcttccacttatagcttctccctgaaccccaggaggaagcacactatcttaacccccatcgatccgtgcagagcgccagcgagaacaacagcaaaattaagattcaaaagcttgagaactactaaagcaactggaacatcaactaaacctactgtaacaacgcagcaaacggacaagcagcaagagatcctgcttgctagccaatgtgcttcgttctcacatgcctaatttctaaaa

SEQ ID NO: 349249 - DNA, 305 bp, Zea mays
tattaatgattgcctccagataataagttggggtgcttcaaattcaggtctgccggcctctacaatagggtttgtccgctggtttgctaaggcaagcaacgtacatagactgcacgtcttggatccttcatgtttatatagtgcgttgctttatgatcaattgaccattcattaccttcgcctgatggcccttattaacaacagtaagagctaactaagaatgtgcgctaagatttttcttgctatctgaagtggtaaatttgttaatcctaatcctttgctgaatgggtatcggggctttgtca

SEQ ID NO: 349250 - DNA, 124 bp, Zea mays
  unsure (1)..(124): unsure at all n locations
tttctgttacacaagacatgcctcgtctattgcaccaacctttctatcgggggcagaattttcagctgnctcacccttatttctaaatatccgtacaacttcccttatcatgtcccttcgtttc

SEQ ID NO: 349251 - DNA, 166 bp, Zea mays
ttctaaactgctacccaatcactcaaagatggggctttctttcaggaaggggacgtgcgtcctactcccagatcctcaccagttccttagtcgacaactagcacccaccaaaaatttcagtatcagactctacatgtcaattaagtattgccccaaaaagcaacac

SEQ ID NO: 349252 - DNA, 110 bp, Zea mays
acccttcctttttcagaccgtactaacctcccccgtacggagtttcatatgctgctgataaggatgtcgccccctctccaactgaactccataaacctcttgccaagaaa

SEQ ID NO: 349253 - DNA, 272 bp, Zea mays
tcgctcacacacacatcgttgtccaaacaatgacttctcttctcacggcgggcgagctcaccaacctaaccaggccagatatttcttaacctagctagctaacagctgactagatagatcgatccatcagcttgcagccattaatattatcagggcagtacagtgccggttcaccgttttccaccttactacatccaatgtcccctccactcttcgccacttcttactacaatctcctcctcacctccatcttctttttttctaatattttt

SEQ ID NO: 349254 - DNA, 208 bp, Zea mays
tcgctctaatcccattccatttcccctgtctgcctctttctcacacccagacgacctccaactacttaacccttcccagctattcctcttctaacttattcttacctgactatacaatgccccccacacaaaaatcctcatacccatattcatatcctaaccccaacaatctactaccttttctcctaaccaattttttaaaattctt

SEQ ID NO: 349255 - DNA, 408 bp, Zea mays
tacaaggctaggcacaagcgaaccaaaccgatggcgtccgacggcagcggcgtggtgacagtgtacggcagcaacggcgcggagctgctggagccgtccaagcagcccaagtcggcgactttctccgtcaaggtggggctgtcgcagatgctccggggcggggtcatcatggacgtgttgacccctgagcatgagcgggttgttgtgtttgatgcttccagaatgctctgtcatgtattacgtagctctgttgcatttagtaaacttaataaggtgggtggggggcggcggatatttccacacttaacatatgcgtgcttttttgatgatataggattttctatcttttatttttatggatcttgtttctaccattttattgcctttgtatctagctctctataaatt

SEQ ID NO: 349256 - DNA, 188 bp, Zea mays
  unsure (1)..(188): unsure at all n locations
tcgtggttcttcagaccattagctttatctgctggagagcgcagaagaacccgatcgacaccatgagggtgttgctcgttgccctcgctctcctggctctcgctgcgagcgccaccttcacgcatacaagcggcggntgtttctttcatccaccgtcgccggttcattttccgtcgtcggtgcatttg

SEQ ID NO: 349257 - DNA, 428 bp, Zea mays
  unsure (1)..(428): unsure at all n locations
tcaacactaatgtagtcctccttagcatggcgagaccaaatatctcaggttaatgcaacccaanaagtatcaggcaacacagaattgataagcacattacgtcgttcagtgaaaagcttcagaaggtctctagtggtggtctgtctagaaactttggnnaacctaanggttttgagcactggcaatataatcctcccagacttgtgactcaccaatacctaatggaaggtcaagcctagcaatcatactacacaactcatttctagcaaaaatagggggcgatttccaatttgttatagaaccattattatttaaaaagcagtcctatacttttaccctaatcatttttatcaatccattttatctacaagtttttctttatattttaatataatttctcaataccaaattataatattctttctata

SEQ ID NO: 349258 - DNA, 177 bp, Zea mays
  unsure (1)..(177): unsure at all n locations
tantggaactgttcctgtttggcgtgtttgaactgttatcatcaagccgtggatggttgatacctttggtcctaattgccttactacttaagtgaaattcttttaaaatcaccatttttcctttcaagtagccctttttttttaccattttttcttcaatatttaaaaatttttctt

SEQ ID NO: 349259 - DNA, 434 bp, Zea mays
tctgtagtatttatgtcgccgccgccgccgcccagccggaggaaacaggaggaagatgccggcttttcaccgacttcggtcacggacccgcgacctgttcgtgcggacgattcttaagaagggttacattccgatcactacgtactttttctcctactagaactgctacttctttgatctttaatgttatctgttccttactttctggttttgttttattttctttactttcatttattttttttctctttattaatttttcttctaatttcctctatttttcttttttgacgggggggtggtggctttttatttttctctaattattttttttttatatatatctttttattattttcttttatattttttttcttttttttttattatcttctttccattttttcttcttattctattataatattcatttt

SEQ ID NO: 349260 - DNA, 196 bp, Zea mays
tgtttctgatcactcgcaatctatcattggggggaggtcttgaatttctggactcggagaacattacatattgcggctcactaaatcttattgacaatgaaaacagtgatgtttaagaatgaatttatcgacatactagaggatacttagggcttgggttacctgtatcaattgtaaaacgtggaagacccattgt

SEQ ID NO: 349261 - DNA, 254 bp, Zea mays
ttttttttattaaaaaaaaaaaaaaaaaaaaaagaaggggaaaaaaaaaaaaaataatatgttaatattaataaaaaaaaataaaaaaaataaaaaaaaaaaaaaaataaaaaaaaaaaataaattaaattataaagtggggggtcttttttaataatcaaaatttttttacctttttttttaaattatttattttttttttggttcactaaatttaaatttattggccttttatttaaaaatattttaatttg

SEQ ID NO: 349262 - DNA, 198 bp, Zea mays
tctttcttagatttagtcacgaatattttcggtagggacttatctatggtgagacttgtatttaaactttaccctacgaataatacagcctacaatgcacaccgtttttctgcaacagacagcgcatccatgccgtccatcggatcagatcgattttttccgcgctagggtttagcatttgatcctaatggcgttcta

SEQ ID NO: 349263 - DNA, 206 bp, Zea mays
ttcgtcgccgtcgccgccgtctgactgcccccctcgcctcccgcggggtcgggtctctggtgctgctgctgctgctgctgctgcgtgcagggcagtgatggcgacgaagaggagcgtgggcaccctcggcgaggcggatctgaaggggaagaaggtgttcgtgcgcaccgaccttaactttccgcttgacgatgcccagaagatca

SEQ ID NO: 349264 - DNA, 316 bp, Zea mays
atatcgcgaacggccgcccttttttggtttggtttttttggcaggaggggtgggaaaattataaaatataaaaaaatttttaaaaattaaaaataaaataaatataaatataaataaaaaaaaaatataataaaataaatatattaaataaaataataaaacatttatatattataaaaaatatattatataataatactatatatataaaataaatatatataataataaaattataatataaaattaaaaaattatcttataaaataaatatatatatataaaaaaatatatatataaataaattttaaatata

SEQ ID NO: 349265 - DNA, 152 bp, Zea mays
tcggcgcgccggcctcatctgacccgtgcgggtccgtgttcgagtgcggcggcgcaaggcccagctcctcactccacagcgccgcgcaatggcggccaagcagcggcagcggcaccagcagctgccactcctgccccttctcgccgtggtcg

SEQ ID NO: 349266 - DNA, 218 bp, Zea mays
ttttcgtccacgcgttcggccacgcgttcggttgggttttccagaaccgctttgggagggacaaccatttccgaaacataggtctatcttattttatgcacaactggtttaaagagacgggagagggatttctatctagcaccggggtggaatttacctgtcgactttgggggggttggggttaagcggaaggcaatttttaattttgggttaaaagg

SEQ ID NO: 349267 - DNA, 286 bp, Zea mays
  unsure (1)..(286): unsure at all n locations
tctgctttttccgtgggggccgcggcngcgggcgtgggttttaaattaaaagaggcgggataatacaacatttattattttttttttattttataataatttttaaattttttttattatattatattataactaattaatttattttttttatttttaaaatttaattatatttatatattatttaaaaatttaattatttttataattttttatattatttatattataaatattttttttattattttatattatattatttatttttatcatttattttaaa

SEQ ID NO: 349268 - DNA, 269 bp, Zea mays
tcagaccattagctttatctactccagagcgcagaagaacccgatcgacaccatgagggtgttgctcgttgccctcgctctcctggctctcgctgcgagcgccaccttcacgcatacaagcggcggctgcggctgccagccaccgtcgtcggttcatttaccgccgccggtgcattttccaccttcggttacttgtcaccttctttgcaattaccaccgtcggttcatcttgtctctgttgtccttttttatctcctttccatttttcc

SEQ ID NO: 349269 - DNA, 348 bp, Zea mays
tttcaatctcaacattgttgtgttgtggggggaggcacatgaaggagcaatggcacatggctaatccatgcatagatctgtctctacaccattgtggtatgccaccatcctcgatctccaccttgttgtgctacgcattgaggcagatgaaagagcatgtgagcattgtggatcatatatagagatgagcctccatgccttcttgttatgttctccattctcaatctccaccttgtttgtatgtcgaggtatattattgtgcattctttctttcgtgggtgtgtggggagatccactcttataccttctatgtttttcactattctttatattctatcttttttcttt

SEQ ID NO: 349270 - DNA, 439 bp, Zea mays
acgtgtttcttactggtcctcggcgtgcccgccctgcgtgccgcggtgtcccgtgcagggcgggacgagacgacaactgactagcaaagcataagccaactgagcacgagcgagacgaccagaccgcgattgctagctagctagttcgggcagctagtggtgtgagaccgctatagcttgcttatccttcattttgcaccattttaatgtacttattacttaaactcattatttatctttctttaaaccaatacactcattcaatattatattcttttttactttattttcatatattgggggggggggggggatatttaaaaattcttttctaatataaatcttatttctattacttataaattttatctttattatattatctataatcctaactattttactaattttttaataatttaaatatttatttattttt

SEQ ID NO: 349271 - DNA, 144 bp, Zea mays
ttctcgtcgtcgagctccctgaggggtggtggcgtgctgctgcaggggggggactgcagtgccaaggacgatggtgtggtgggatgacagcgacgatcaagctcatgcatgttctggtatggatttaatccctaattaattcac

SEQ ID NO: 349272 - DNA, 120 bp, Zea mays
tacgagtcacggcgggcgggcggcggcggcggccgggggttctggctgtacacggggcgccaccatgcctgaccccaccaccaaacttcccttttcactccccctacttgtcctcaagct

SEQ ID NO: 349273 - DNA, 78 bp, Zea mays
tggcagagattagagggagcgccctgcccgagcaaatataaacttttgcgcgagaagaggtaggaagggcataccgtc

SEQ ID NO: 349274 - DNA, 149 bp, Zea mays
tctttctgtttgttcctgagaggccctcggtggtttgcgtttttcttatcagcggccggcttcttcttaacctttccccttcttggatccatgtagctttcttcgaataatttcgcttttttcaccatatagtggctttttaatttttt

SEQ ID NO: 349275 - DNA, 220 bp, Zea mays
tcttttctctcctcacgttgccaatgtttaaacccctggaaagaaaagaaaaaaagagggtcccctctaaaacccttcttccctagacctggctggcacccaacaatggcgaggccgccgcctgcggcgcccgccccggtgaggctccttctgatcttcgaaaacagccgtctccttcgacgtgttcagagggatgaaggtctttcatttttctggtttt

SEQ ID NO: 349276 - DNA, 370 bp, Zea mays
tctgttttttattagaggtagcgcccttcccaagcggatattaacctcattgcgagagtaggtattaaattctttacttttcttcattattatatatatcttcattattctcatttttcatattttgatccatttcattaatttttttttttttctttactttctaaattacttaatttattccttttttaccatttccattaattctacaattttttttttatattattttctttaattattttttatattttttaccctatttttctcatcttctatatactctatttcatattttttattatttttttttatttctttttatttttttatcattattcttctttaattttttctattaatttttttt

SEQ ID NO: 349277 - DNA, 166 bp, Zea mays
gaccattagctttatctactccagagcgcagaagaacccgatcgacaccatgagggtgttgctctttgccctcgctcttctggctctcgctgcgagcgccacctttacgcatacatgcggtggttttggcttttttcttcttttcttcttttctttatattatttt

SEQ ID NO: 349278 - DNA, 133 bp, Zea mays
tctaacaaagaaatacctaccctaaccggcggcgacgatcgtatacctgggcggtgcctctaccgaagacaaggtcacgtactagggcatagcaaccggatatacttttttatagggccacctaaattgaatt

SEQ ID NO: 349279 - DNA, 347 bp, Zea mays
tcgttcgtacccacatacaatgtacaattcagggcgaattctgcgtggccaagggagctgccactttatcatcgttggtctgtgtaccacccgctgctaaggcgactattttctccaaaccgtattagggtccgatccgttccgttctttccccctacgtgagatcagagaggctttcagtctttggaaggccgtatttcaaaccacccgggcgccaacgtggaagcaaagatgggatttaacctttatcacccttgcttcttctacaaatattagccctattaggggagtttcctttattgcatatattggtacaaaacatttaggtacaacaactacaacaattt

SEQ ID NO: 349280 - DNA, 107 bp, Zea mays
tcgatcataccagagcaatttccgtgacccagtgtagcaatactgatctggaaggtgaggaaaaaatgtctctcctggaatggtttgtcaattaatacaagaagttt

SEQ ID NO: 349281 - DNA, 232 bp, Zea mays
tctgtctgttcaggtctgaccttccacccctgaggggctaggctcgcccttgtgggcaggactccacccagccagtgccccagcatgagcctgcagctgatgctaatgaattaaacaaggtggctcccaatggcttagaattaggtgccccggagaattcctctgaggaactcagcaagactgtcaccgtattcgagtgtaacaaatgctctgagattgctagtgtgcctct

SEQ ID NO: 349282 - DNA, 155 bp, Zea mays
tttgaacgttgaggagaaccgccgggcccgtgcgtgagctcctattctgctggcctggtgctctccagtacatcagcggtgtgatcctcttcgaggagaccctgtaccagaagaccaaggatggcaagccttttgttgatgttcttaaggaggga

SEQ ID NO: 349283 - DNA, 230 bp, Zea mays
ggaacaacaaaggaatcctgctactttgcagtcgttgattgaaaaaaacggcgtttaattctggacccagaccaactttacagaggaccaaaatgggactatagtggaaagtgggaggtttatattgtcaccaattatggactatcagatgaaggggaaaactatgtcaggggagcatgcttgtttactggatatttatctgatcccatgacaaggaactgtcctatagg

SEQ ID NO: 349284 - DNA, 251 bp, Zea mays
tttcttggatattcactcgcaagatcgggtggtggatgggaagctatcacaggacatgctacctcatggcattggactcctgctacaatgtattttgcaaaaagtatgaaaaacatgaggggaagcagttttcaattcttttttcatcattatgatgtgtttcattctatatacaacttgtttgtatcattctaaaatttcattttcttttacttttttacaatttaattatctttttttgtatattttta

SEQ ID NO: 349285 - DNA, 144 bp, Zea mays
taaagaagcaagctctcgatcacaatggccgccattccttctctgctgcgggggccactccccattgtcggcgccaccaccccccatgctcgtcctgtttccctccccgtccgtcgccggcgaccccaacctgttccaggacat

SEQ ID NO: 349286 - DNA, 191 bp, Zea mays
tctttgatataggagatctctgatgatgaagatgagggggtttttaaggatgtgggggggattttcatttctcaaattattttatattgttccaatatatttttcttttttcttatatttttcctatttttatattatttaattctttttttttttttctacttattaatttttttaatttttcctatttt

SEQ ID NO: 349287 - DNA, 171 bp, Zea mays
tctcttcagtcctatcctcctgtccgatggctgcaagttcctccccttccagccggagccttctcgccacccggccccttttcttgccgttgaggacgaggaggtcgctttcacccacgttcatcccgacttgtctcatctgtcttcgatctccttctgcgtcctcctccc

SEQ ID NO: 349288 - DNA, 219 bp, Zea mays
tcttatcgtcaaacgaccgcaccaaccaatccggtttgccggcgatccggctcgtctcgtcgcgtctccggcgccggcagacacgggttacgcggtttcgtgatcggtgggcaggatgatgatgctgttcgattgttcgtgtttccgtaccctgttgttttttatttttttgtgtgttttgctctttttttttatatctttttattttttcttattttt

SEQ ID NO: 349289 - DNA, 261 bp, Zea mays
tttactatggacatgtgttgcgctggtcaacgcactacaaataagtaatcgatatattccctacccaaaaaaaaaaaaaaaaaaaaaaaaaaaaaaaaaaaaaaaaaaaaaaatataaaaaaataaaaaaacataaaaaatttttaattcatattataaaatttattattttttaaatctatttacatttaatttgaacttactctatactttattaaaattttttattatttataacaattttaaattataaataatttt

SEQ ID NO: 349290 - DNA, 186 bp, Zea mays
gaaagaaaaggaaaagaagcgcctttgccgaccgcgcgatcaatcaatccggggtccggcggcctgccatggtgaagctggcgacggccagggaggcgcggctgtacgggccggcgctggcggcaaggcggtgggagtacattaacgcgggaacattcgttgttcgcggtgctgtttctggtcctg

SEQ ID NO: 349291 - DNA, 224 bp, Zea mays
tttctttgacgcgtgggtcttgaagttcgggtgggatttgatacagtttggaagcggtctttttcttaacttattggaggacaaccatcccttcttgctcttagtcttattctggctctgtttctttttaaacctgcaccactttacatattttaccaggttgatgctgctcttgatcttttaccacatttaaaatattttttgaatttacatcgctttatttt

SEQ ID NO: 349292 - DNA, 190 bp, Zea mays
ctcatctgcgtacacggtctccctcttcctgtcagtagtagagtgagagtgaggcagcgagtgggagacaaggggaaatggggaagggagcgcaagggagcgatgcggcggcggcgggcggctaggtggaggagaacatgtctgtgctgtatggtatatcatgaacacttttaatgatctatgctctttt

SEQ ID NO: 349293 - DNA, 206 bp, Zea mays
ctcttctgctgctcgccctcggtttctgggcgcgaccatgggaccccgcggcgtcgccctagcgctccttgccgcggcgctgctccaggccctcgcccccgcgtcggcggcggcggttgcggggggcctgttgcggtttccgcttaataagcagcctttctacctcttctatttctccgtctctctcctattttttagagtttttt

SEQ ID NO: 349294 - DNA, 176 bp, Zea mays
tctttactgtacttatgtttgtatccacttactgctgcgctttctcaccgcggggggagtacatccttatcctgatttggcttcacggtaaatgggcatggtcagggctaactttcagaatcagctccaccaggggctctttttaatatgcttgctcaaattttcagagcgcaaaa

SEQ ID NO: 349295 - DNA, 419 bp, Zea mays
tttcttaaccaaacaccatccatgtgcatgtaccgggaacctgacggtaaagattgaatttgtttgataaaaataataataaataataataatttataaattaatttatttatatttattataaaaaatataatattttttgtttttttatatgatttaattttatatacttttgttttttatgtatttgttttattatttttgtatttaaattaaattaatttttagtaatatttaaaaattttttttttgttaatattttttttatttaaatttttaattatattgtttgatttttattttttttatatttatttttttattataatatattttattattattttaattttttaattatttgttatatttattaataattttatataaataatatttattttatatttttttatatt

SEQ ID NO: 349296 - DNA, 127 bp, Zea mays
tctttttattcaaaccggcggtcatcaagtgttcagtccacttcacacgggtggttgttgtcccccccatcttaagtattactacatattctcttacaattacaacattagcttcccgatctctaaa

SEQ ID NO: 349297 - DNA, 359 bp, Zea mays
tcttggacgcgtgggtattgtcatgaatatgcaccttgaggatgataaacgaaaggtgcccccaacaaagcgctcttgtggatgcacggcaatctaaatctaaatctatcaaggatgcttggaagatcttgccatcagctccaccatccctcactttccttccactgctgtcatgtagtctttagcaatcatgccctatgagtgatcctgctaatcatccagtaaaaaaagttaaaatgccattcccttggactcaacttgcctggatcctgcccatgtgtgtgttttgtaccaactgtcatgtacaaggactatcattttaactcttggtgtagttataattactttgattggtttgt

SEQ ID NO: 349298 - DNA, 168 bp, Zea mays
tctttctttccggatcaacaattattactaggcgcggctatacttaaaatcgggccagactaaacagtttaccaacactaaaacacagcgcctgtaatatccaactactactttcctaccaagctttccgaccaggcattttaattctaagcctattccacaatcaaa

SEQ ID NO: 349299 - DNA, 79 bp, Zea mays
cttacagattgtaagtgcatctgggggtgcgtgcattcaaaaagtggggggggggaaaacaaaacacccctaatgacta

SEQ ID NO: 349300 - DNA, 241 bp, Zea mays
  unsure (1)..(241): unsure at all n locations
gtaccgaatccccatttccacccacacctactcagaccaacaagcaacatanaaaggggggtccagtgtcaacaatagagcggcaatggaaaccaanatattttccctccttatgctccttgctctttctacatgtgttgctaacgccaacaatttttcctcaatgctcacaagttcctatagccttcctttttacccccatccttttcttaaatattagtttaattattttaaaaccccc

SEQ ID NO: 349301 - DNA, 103 bp, Zea mays
  unsure (1)..(103): unsure at all n locations
tcttttctatcccaaaatcctaggcttttgggcgtcggggcccgatggagccgggctggccaacctcnatcgcgccgcaaactttgtagcttgagaacaacat

SEQ ID NO: 349302 - DNA, 136 bp, Zea mays
  unsure (1)..(136): unsure at all n locations
aattcccgnnacgacccactctttttttgacttttggaaataggcttgccacccgtttttgctagatgagtcgcgggacaaccttnnnacttcctccctgctgtccgttgaatttgatctggtattttttatatat

SEQ ID NO: 349303 - DNA, 174 bp, Zea mays
atagggaaagcggaaacgcctgacgccaccaggtaccgagattccgcaattccgcacgccacgacccacgcgaacttatcacatgttctaacaagacgagcgcacagtaggggcctacgagtgccctggccccccttgctatcgcgcgccagatccctatctcgccgcgatcca

SEQ ID NO: 349304 - DNA, 219 bp, Zea mays
  unsure (1)..(219): unsure at all n locations
tcttctgttttcgcccccttnncccttccggacgcgccttcctaaaccctgagcgtccaccaatctatatntntncagcccaggctatcggaggagatcttttttcttttttatttttttttttcctccaccttattttttttttatttttattttataaaacattttctttttttttttttttttttatnnttcctcatctccattttttttcttttt

SEQ ID NO: 349305 - DNA, 285 bp, Zea mays
  unsure (1)..(285): unsure at all n locations
tctctgaattttctccaaaaataccaatccggcttccaggttctcgtcgatggctccgtgtgaccnctcaaaacttccttcagtttcgatctaaacccgccgaaaccctaatccccatggctgccgccatgggcaaccccattcttacccttcccgcgccctttcgcgtggggccgccgcccaaggtgcttgtgccacccaaaggcttagctgtacaccgtgcggctgcccgagggtatcacaagggaggagctggacattattaaacttaccccccaatttgtg

SEQ ID NO: 349306 - DNA, 157 bp, Zea mays
  unsure (1)..(157): unsure at all n locations
tgaaatcttcttgnaccccanttgattccgccacacttacacacgcagtaaggctttttacataactacatatatnntttcattttcttatttaacaaccctctataatttcctaatatttttttcattgttcctcacttctttttttattcttttt

SEQ ID NO: 349307 - DNA, 302 bp, Zea mays
cccttttcttaatttgagggggcaccctttaagtttggtttgggttttataaaaaaggagcttggaaaaacaaatacattttttttaatttaaaataaaaacaaaatcttcattccttttttcacaaaaaagactttgcaaaaataaaacttaaacttttattcctttttaatttaactttatccttattaaaaaattaaaaaaggcttacaattttattttaattcaacacaaagacttttccaaagatgaactaacaatcttttttcttctttaaaaaaattttttaaaaagcttttttt

SEQ ID NO: 349308 - DNA, 190 bp, Zea mays
  unsure (1)..(190): unsure at all n locations
tctttttgtcgcgagcggccgcccttttttgttntttttaaaaataaagaatgggtgagaaaaaaaaaaattcaanattaatttcttcttattatattttatttttattttttttattatctttttttctttaatcatttttttttttatatttatcttataataaaaatnttttttttttttttttttt

SEQ ID NO: 349309 - DNA, 312 bp, Zea mays
tctcttgataatgctggatgctattgtcagggagacctatatggtgatcttggcatttattgtcgtgtttctatgttatggaaattttaagagcgctgatgttacctgtagtgctctttaaatttggaacatggaacatggagcatgtgctgattagtagaagggttccaactgatcctgctctctaaatttggaacatggagcatgtgctgagtagtagaaggtttccaactgatcccaatgagtataagttatattaggaaattggagatggtgttggtgccacagtataccgagctctttgtgtcccac

SEQ ID NO: 349310 - DNA, 128 bp, Zea mays
tctatttagcctacctgacacccaccacctggctaccaaaatcaccaacgcaggcattgtcaccaactttgacttccctacctacttccccgagcgcaggccctttcacgaagaccctttacttcatt

SEQ ID NO: 349311 - DNA, 415 bp, Zea mays
  unsure (1)..(415): unsure at all n locations
gaaagcggacgccgcaggaccgnccaaattcccgtcacccaccctctagatttgagcgccacccttttttgggttgtgttaattaatatggtctgaaaaatcaactacatttttttaattaaaattatacaaattctccattcttattcccaacactactaccaatttttttttcacttcttacctaatattacctttatctcataacatcttcttaatcctcacattttatttactcaccacattactttccaaatataacctaacactttttccttttaaactaatttcttagattctcctttttttataacccaaccaaactttcaaattttcttatattattttccctttaatattttcttttcaaatttttttcaacttacaactatacttaattttaatttcctcattt

SEQ ID NO: 349312 - DNA, 170 bp, Zea mays
acccgtcctagttggcccatctaatggtggcaatttgacatggattcctcccaataaggggggtaactcaaataaacttaatccttcgagaaaccaaaggccaactaggtttttccagtccaattctaagtctttccataatgagagctctggaagttttgaaccctgaa

SEQ ID NO: 349313 - DNA, 425 bp, Zea mays
  unsure (1)..(425): unsure at all n locations
tttaccttcagaacagatttgctactatgggccgtgattatttccatagtggggtgggtgataaacaaactttatcaattnctatatctaacctcaaaatatttttttacagtctcaatactaagatgttttcataatttattctttttttatcatcactttgctatnaaagacattgccactatttttttttttttattttcaatgggacacccaaactttttgtcaacacttcattataacaaattgtaattggttctttcaatttattatttctgaggggtggggggtggggggagtttaatttaacttttcttaattatatgccaaaatgttatttttttttttattattttccttactttcttttaatcttttttatttttttaatctaatcttttatttttaacattctttttttattt

SEQ ID NO: 349314 - DNA, 157 bp, Zea mays
  unsure (1)..(157): unsure at all n locations
ttgnactcaccaactccatttcaatgccattgtaaaacaaccaagccgcgtttgctcaaactaacaaccaatcacccttattccctaaatcaagatcgttctcaatttatattattgtcttcggtaccattccttttttttttttccacaacaacaa

SEQ ID NO: 349315 - DNA, 331 bp, Zea mays
  unsure (1)..(331): unsure at all n locations
tacggccagncagagtcaccaccggctgccctgtacaactatgtacggggtggagcaccaccattcatcgaagaggatggttttcttttttcatttttttttctatcctttattatattttctttcttgtgtctatttctttttttttttttttttatatacttttaattttaaaaatatttattcttttctttttcctttgntttatatttattcaatttcttcttttattttttttttttatttttattttcattctttatatttctctttatatcttttatttttttttaaattatattttcttctttttttttatctcttttttttt

SEQ ID NO: 349316 - DNA, 425 bp, Zea mays
tctgttgctaatagtgtaccaacaatggcagctaagatattttgcctacttatgctgggtggtctttctgcaagtgctgctacggcgaccattttcccacaatgctcacaagctcctatagcttcccttcttcccccgtacctttcaccaacggtgtcttcggtatgtgaaaacccaattcttcaaccctacaggatccaacaggcaatcgcagctggcatcttacctttatcacccttgttcctccaacaatcatcagccctattacagcagttacctgtggtgcgtggatggcacaaaacatcatgtcacaacaactacaacaacttgtgctagcaaaccttgctggctactctcagcaacagcagtttcttccattcaaccaacttgctgcattgaaccttgctttttatttgcaacaacac

SEQ ID NO: 349317 - DNA, 216 bp, Zea mays
ggaccaattttccaccaaggttacggggttctataggtttccttttttcccccgaccttttaacaaccggggttttgggatggggaaaccccattttttaacccttccggatcccacagggaatcggaggttggattttacctttattaaccttggttcttccacaattattaggcctattacaggaggtacctttggggcaattattggcaccaa

SEQ ID NO: 349318 - DNA, 105 bp, Zea mays
tctgaccagccaggcccgggcgcgccggcaaggcggctctacagcaactttcaccgcgtactccctcccttcctcgtctcgtcttcgtctccagggttcgcgggg

SEQ ID NO: 349319 - DNA, 161 bp, Zea mays
atccgtcttaaaattaaagggggccgcccgcttaagggtttttgaacggttcttggccttttcggcaaggacccacaaggaggccttcttggccaggttattggcacaagttggaacctaaccgaggaggagaagaaagggcacaaaaaggttaaatggga

SEQ ID NO: 349320 - DNA, 171 bp, Zea mays
agcgttctttataaaatggttcgcttttaagaacctgcccaccgagaaggatggcgattggggccgcgcccgccgaccaaacaattgcgttcgcgaggggccagcctttttattggattttcgcgcttattgggggccacttgccggcggttcacggggttggtgttccct

SEQ ID NO: 349321 - DNA, 85 bp, Zea mays
  unsure (1)..(85): unsure at all n locations
tttccattagagggagcgagccaacanaggcagggggcaattggcggcggaaatggtcttttccggccaggtccggccgtttcct

SEQ ID NO: 349322 - DNA, 109 bp, Zea mays
  unsure (1)..(109): unsure at all n locations
tccnctgcaaagatgggataaaatcttctacacacgtaatttaactaaaggacgtagagttatatcaacaaccccaaaacattttaccccctctactttttatcttttt

SEQ ID NO: 349323 - DNA, 418 bp, Zea mays
gaaggggaagcgggtgcaggaccaggtaccgaattcccggtcggcccactccttcctctccatgagagaaacaaaaattggaagagagaaaggaagaaccccaagccttgggccaccatcaacaaaatacaggggagaacaaagaaacaatccaaccagacaagagccaccacccacaaaatacaaaaattggaggggagaaagagggtttaccccgtgcaagaaaaaagcaagcaggggtcaattttttttttttgcgcgcggtcctttttttttctgggcgcggtctttttttttatttgcgcctttatttttttcattattttactttgggcgcgctggggttggtggtactttttttattttgatctctttttttatattactttattctagttaaaacatttttatatctttt

SEQ ID NO: 349324 - DNA, 96 bp, Zea mays
tttttactaccagtccaccgccaccccatccaatccgattcccacaaccgggtgcgcggctcttctatagctcgacttcagcgactagcttttttt

SEQ ID NO: 349325 - DNA, 225 bp, Zea mays
tgattactactagctacccacccatcgccggacttcgatttcaagggagcggaatcacctgataaggtgatatttgtctttgccgtgctccgtttaggctgtacgagagaaacatttatgtacccagcccacatcccagtcccagcttgtattgagtacttacaagcaatagcggtaccttctgtattaaccggcagcttgcttattttgctgcattttaattcc

SEQ ID NO: 349326 - DNA, 76 bp, Zea mays
  unsure (1)..(76): unsure at all n locations
tgggaagagcaaattccagtacaagcccaggtggatcaatgttcttgggggttantaagattctacctatggtgtt

SEQ ID NO: 349327 - DNA, 144 bp, Zea mays
ttttagaaagcacaatagtgtaccaacaatgggagccaaaatattttgcttcctgatgctccttggtctttctgcaagtgttgctaccgcaaccatttttccacaatgctcacaagcttctatagctttccttctttccccata

SEQ ID NO: 349328 - DNA, 152 bp, Zea mays
  unsure (1)..(152): unsure at all n locations
tgagataaatgctgatccttttaaaaacgggtgggttttaacaatggaggggggtgggctcttgngagcaaaggttctctatttgtggtgaagagaggtttagcacattcaattgttttttttgnccgcncggctttttttttttttttttt

SEQ ID NO: 349329 - DNA, 260 bp, Zea mays
  unsure (1)..(260): unsure at all n locations
tttctttcgcatcgtgtgctcaatcaaatcgcccgcccaaatttaataaggcccgcttggntaacatttaaaaccattacttcttcttcaacttcttgtgtgcaaattgtggcttcacccccttgcatttcggcctttttttttattcttaccgcaccggtaacaacttctaagacttattgcatgcttaataccacttctacatttcccaaaattctcttcttctgtcctctaaagattaagcccaaatttttttcttt

SEQ ID NO: 349330 - DNA, 160 bp, Zea mays
  unsure (1)..(160): unsure at all n locations
actttctttctgaccaactatacaactacctgcgttcgctgaaataaaaaggactcgccctgggctcaaaacccntggattaaataaggaatatgaaggcaatgttaaagccactttttatgatttgggtttaaaacaatttttttttttttacctcacc

SEQ ID NO: 349331 - DNA, 253 bp, Zea mays
  unsure (1)..(253): unsure at all n locations
tttcattttccaaagatagccacgccacctgcgtcggtaccaacacacgtgtgtcagtgactnaccacagnncaccgnctttgcgctacggcgtcatggtcgcacgcccgcagcttcccttttcccttcccagtcgatataagccttgttccaccatggcccccgcccccgtacttgccggcattctgctcgccctcgtcgcaatggcttgcgccgttcacgcacacgcgccagcccacttcccggaggcgtt

SEQ ID NO: 349332 - DNA, 253 bp, Zea mays
  unsure (1)..(253): unsure at all n locations
taaaaaaaggccccaacaagccaacaagagcggcggcaaccatggagacgatggtcggttnttactgccaccggcaacttctcctgtttctcctcgtggccgacgcgtcagccttcctctgcttcgcggcagcgcattaattcttatcttgagagggctacacaatatcttgccgcgttaagatccattgcattagcctgaaaggcttttgtctttcaacaaagacattaaacacaaaagttatacttaattg

SEQ ID NO: 349333 - DNA, 234 bp, Zea mays
ttccatctattcttttccacaaaccgcactggtcaccacctatgccggcctcgcttcgatccccaaatcccgaattgaccagcccaaatcgtcgccgcggcgcatggagtggaccgccccgaaaccccccttatttccttcccttctctgggactggggagaccacccccccacgggctcgggcttcttcagcgaccccccaacgcggggcggggggaaagagccggaggcgaa

SEQ ID NO: 349334 - DNA, 173 bp, Zea mays
  unsure (1)..(173): unsure at all n locations
tctttcttttaatatgcccccnacatatccctgctcgcgaaaataaaaaaagctccgtcctcccaaataaataaaacaaacnatttgcctcaatccaaatccnacctncttattnctatatcccctccgaattccactacccttttcaccaacctacaacaaaaaccaaaacc

SEQ ID NO: 349335 - DNA, 89 bp, Zea mays
acttagctgttctccgcagacgcccaccaaacttgcgcgcttcaccaaaagggaccgttcgtccctacaacctatatatccatggaaag

SEQ ID NO: 349336 - DNA, 139 bp, Zea mays
tttcttcagcactctgctctgctcggcttgccttgtccttttaacttgccatatcgctaccaaaataatcctgtgtcgctttgtagccctcgcggctctcgcctgcctcctccgacctggcgcgtgcggcgagctccac

SEQ ID NO: 349337 - DNA, 69 bp, Zea mays
  unsure (1)..(69): unsure at all n locations
tctttgttgtaaaagcattgcgaccacanacagggctgtcttaaaaaaatttttttgttttcgataaca

SEQ ID NO: 349338 - DNA, 457 bp, Zea mays
  unsure (1)..(457): unsure at all n locations
aaaattaattttnnntaaaaaaaaattttttttttaaaaaaaanaaaaaaaanngggggttgaaaantttacggaaatgaatggaatnaaaaaaaaanaaaaaaaataaaaataanaataaaaaaaaaaanaaaaaaaatatataaattatttgtttaaaaaaaattttttttaaaaaaacgaaaaaaaaaaaaacaaaaacaaaaataaaaaataataaaaaatattatatattaaataaaaaaaaaaaatttaataaattataaaaaaatttataataattaaaataaagtaccttctataaattgtggtataaagaaaaaaaaaattaataaataaaaaattaaaaaaataaaaataatataaaaataaaaaaataaaaaaataaattaataataaataaaataaaataaaataattataataaataataaaaataaaaaaaaaataataataa

SEQ ID NO: 349339 - DNA, 164 bp, Zea mays
  unsure (1)..(164): unsure at all n locations
cattctacccactctttctctcacaaaacaaactaaaaactctgtccctgcaaaaaaacaaaaactctgcttcccaacataaaacaannnaaaacaattnannaccannaccatttctttttaatacataatcttttctcccgccaaacaaatttttttttttt

SEQ ID NO: 349340 - DNA, 336 bp, Zea mays
  unsure (1)..(336): unsure at all n locations
ttagagatccggagcaaccaaaatccgaccggacccaaaaacgggctgcctggatatacttaccaattcctctcgtttctcttttcaataatcaaaatgagccgtcgtcgtaatgccggtggtggtcaaacatatcttgcttatctctttgcaagccgnaaaccccccaaaccagcattgccaccagctgcaagtgcttcacctttttagaaaccatcttcttcaaaaacttattctgccaaacaagtttcttattgagttaccagtcaaaccgattgcttccacaagncttattgacaaaacaatttcaactttcttaccgacccttctttaacc

SEQ ID NO: 349341 - DNA, 201 bp, Zea mays
  unsure (1)..(201): unsure at all n locations
caataattttnaaannncaatnccctacctacctaaccaacccactttcctttataatctccctccccaaatccattttttttctatcatctatcaaaaacaaccaccccttttcatattctcatctctcttattttatcacattacattttcctctatcttactttctttctccaattctctatttctccccttttatct

SEQ ID NO: 349342 - DNA, 268 bp, Zea mays
  unsure (1)..(268): unsure at all n locations
cttcttttttttatctcacaaactcgcaaactcttgtcctgcgacatatatatacccttcctccccaaaccaacnntctncaaaacccccactttttttacgtttagtaaaaaccttcatttcttccctaaaggccaataaccttctttttttataatttttcaccacacactccatttatcatttcttatttttttattaaccctaaatttctaccatttattctttaacattaaatcatttttacttatttttcttttttttctct

SEQ ID NO: 349343 - DNA, 324 bp, Zea mays
ttcgcttcgccaccgccttaaacaaagaatgcatcggcgacaattaaggcggggggtgccttcccaaagagccccttaaagccaccacgcaacaagtttagattcaaagtaagaagatctattgcattaacaaggctattccaaccctttcaaataacctttaaaattcggctctgaatgaggcaaatttttagaaagcttaacttgcttgagaaaaacttgttcgtgtttgtcaaaatacccgctttaactacaaagctatttatctaccaacacccttgaaccaagccatatttccgatccaatgtcaaatttaaaataaat

SEQ ID NO: 349344 - DNA, 60 bp, Zea mays
gttgtttttgagggaaaaggattgcaaacggggcggggaaaaaaaaaggggggggggggg

SEQ ID NO: 349345 - DNA, 309 bp, Zea mays
  unsure (1)..(309): unsure at all n locations
tctttttgcaaacccccgaaacctatacgtgttcgttaaaacaaacgaaatccgctcaccaaaaaaaaanaaagctataattntctttttttcttttcttatttcaagtttgaaacccattatcatgcttttgctttttatattttatatctatctaatattataaacctatttcactgctttaaattacataccttaatcattgtatttatctaacctttaaannaaaatnncctattccccgttgcccttcaatatttttgngcttacttccttctgtggtgcgggcatataaaaaatccataataa

SEQ ID NO: 349346 - DNA, 426 bp, Zea mays
ttagaccaacaagcaacatagaaagtggggtgcaggggcaacaatagagcatgcgtggggaccaagatattttccctccttatgctccttgctctttctacatgtgttgctaacgcgacaattttccctcaatgctcacaagctcctatagcttccctttttcccccataccttccatcaattatagcttcagtatgtgaaaacccagctcttcaaccatataggcttcaacaagcaatcgcagcaagcaacatacctttatcgcccttgttgtgtcaacaatcgccagccctatctttggtgcagtcattggtacaaaccatcagggcacaacagctgcagcaactcgtgctacctgtgatcaaccaagtagctctggcaaacctttctccctactctccgcaacaacaatttcttccattcaac

SEQ ID NO: 349347 - DNA, 255 bp, Zea mays
  unsure (1)..(255): unsure at all n locations
acttcctctactctgctccctcaacatcaactggcgtgtgaaaaataaaacgcgcccgtcctgacaaactacactacccaactccngcgtcctccccaccgacccatccacagctcaagccaacattcatccgtatcccgcgctctctttattcgccgcatcttaacgtcaccgccatgactgcgcgtcctgcgtctcctcccgccgccgccgcacggactcgactgatgctctgccaccgctttccctcctctc

SEQ ID NO: 349348 - DNA, 160 bp, Zea mays
  unsure (1)..(160): unsure at all n locations
tcttcctaatttttgagagtccctctcaaactttgggtgcttacactatacatgtctgctgnggatccgaaaggattctcttatctacctgtctgttcttccatccaatcttaaaaattttggagggggggggaaacaaatttttttttcccactttttt

SEQ ID NO: 349349 - DNA, 159 bp, Zea mays
  unsure (1)..(159): unsure at all n locations
tcttcctttacctctcgaggatgtacaaccttgtccgtaaaaaaaatactactccgctcctgaaactaacacttanntnatatatcccccctacangccaaggcattattatngattaacaaaacgaccgagaattggtttttttttttctttatttta

SEQ ID NO: 349350 - DNA, 289 bp, Zea mays
  unsure (1)..(289): unsure at all n locations
tccttcaaatacccatcccaaattccccaatcgacccacttttttttttaaatctaaatcacnaacnncctctctttttaaaataaaaaattttttgtttcgnaaaaaaaaanaanaaaaannaaaaaaannannaaaaaaacttcttcttttttttcttttatttttttttttttctttttttatttttttttttttttttctccacccttataatattctctttttattttctttttttttcttttcttattttcatttttttttttttttttatttttattttttt

SEQ ID NO: 349351 - DNA, 150 bp, Zea mays
  unsure (1)..(150): unsure at all n locations
ttatcttatttctcaaatccgactccacacggtggggaccatttcccagttgggttgttctatnaaattttgtttggtgtaaataaatggtgcttcatcatctactcaaatttttttctcttttttaatgaaataagttgacttataatc

SEQ ID NO: 349352 - DNA, 309 bp, Zea mays
ctcttcccccctccaccccccccccctctcctctccccctcccccccccttccctcctcccctccttctctcccccccccccctccccctcctccctctctctcccctcctctcccccccttccccccccccttccccccccccctcccccccccccccatccccccctctcaactccctcccccctccctcccttcccccctccccccccccctccttccctctccccccctcctccccccctccttcccccttccctccccccccccctccttcctcccctccctctccctcccccccccccacccc

SEQ ID NO: 349353 - DNA, 161 bp, Zea mays
  unsure (1)..(161): unsure at all n locations
tcttcctttgacaagacaaactgggtcatgcgcggcgacaaaatagaaggcctccgcctgctccccaccaacctcncatacacaaccggctcaaccgccgncaactccccnncnncctttaaagcttctgcttataacctttttttttttttttcttcccc

SEQ ID NO: 349354 - DNA, 106 bp, Zea mays
  unsure (1)..(106): unsure at all n locations
aaaaaaaaaactgaatgttnaaaanaaaaaannnnntttttttttaacaatttttttttaaaaaaaaaaaaaaaacatgaaatcaannttacctgattgtcccgtt

SEQ ID NO: 349355 - DNA, 224 bp, Zea mays
  unsure (1)..(224): unsure at all n locations
tctttctaagcagctttgcaccaaaccatccgtggcgtattattaaaagcttgttttgcgcaacaacacaatctantcagtangatgtatatcagtccctctacagtancaccaatgcttctggggaaatcacaacacactctttcttactctacaacattcatgattatggcaccacagaatgcgcccgtcattggaatcacttttcaacaaccaaaataaca

SEQ ID NO: 349356 - DNA, 173 bp, Zea mays
tacgaggacgaagaggaggcccaggtcggtgtcgcccatgtacgagggcgcgcgcgccttggagggcttcaccttggccttggacggcgccgccgacttggaggacttgggcttcgccgcgggggcgttcatggtggttttcatggcggacaccgacgtaagtttttcctttt

SEQ ID NO: 349357 - DNA, 154 bp, Zea mays
  unsure (1)..(154): unsure at all n locations
ctaaccactttaaacaaacacataaaaaataattttttcttaaaaccacaaaccatatctctactacttattaagaccgcaaacgctacactttcattctanattctccccttctcaatcctccctccccacactccttttccttattttccct

SEQ ID NO: 349358 - DNA, 209 bp, Zea mays
  unsure (1)..(209): unsure at all n locations
tttattgggttgcgacatccattccgtcctgtttcctattcacaaccggcggcgcccnnncaacccacccaatcccgtccctatcgctctccatcgtctctcccatcaacacgcaactttacccgtacccaacttctacatttccacatcgcggcggcccactcacccccccaacgccccaacgactgccgactgcttttccattgcgg

SEQ ID NO: 349359 - DNA, 128 bp, Zea mays
gctaattctacttctacttcggaatcgccgccgctcccggcgcctcggattggcaactaccgcaagaggtcccggcggcaggatccgtggtccagcgtgcgatggcggcttttcctaccgtgcggggc

SEQ ID NO: 349360 - DNA, 314 bp, Zea mays
acggttggcttctcctcccactccggttcgggttcgggttcgtgaggttctccggggttcggtttcaaggctgagcggatcgagatggcggcgtcagatgttgagtaccgctgtttcgtcggcggcctcgcctgggccacggacgaccactccctccacaaacgccttagcacctacggcgaggtcctcgagtccaagatcatcctcgatcgggagacgcagaggtcccgcggcttcggcttcgtcaccttcttcacggaggaggcgatgcggaacgccatcgagggcatgaacggcaaggagctggacggccg

SEQ ID NO: 349361 - DNA, 172 bp, Zea mays
tcgccttcacgcgcgcttcctctcgctccccttggccccgaaccctagccccgccctccccgcgagcggtgcgcggcgggtgccccggtccccgtgccgccaagctcctccttgccggagaccgagtggtgcccggtgccgccggagcagcgccccgtgaagtgtgaacgag

SEQ ID NO: 349362 - DNA, 113 bp, Zea mays
tcgtgcctccattagccacctgcccgattgcggcctctctgcctggcagaagaagcggcatggccgctgtcctactatctaccgtccggaaattcaccttttgcgcaaaattc

SEQ ID NO: 349363 - DNA, 331 bp, Zea mays
  unsure (1)..(331): unsure at all n locations
aggacctaggatgcggggcgtccgagaatgtctggaccggccaagaaagattttgatggagcccttttacttttttcactttctntnaggaacgtggacacggtaggcgaggctattcttaaggtgaagaaggctttttttcgcttcgacttaataattctattcaactgnacccacaatatctcctacttctacccttttattttccttacgtccccacatatatgttttttttttttgtaatgttccaatgtttttcttttctagcctccttggtttcttctaaaatgtgttatatcctcaatatttctatttttaaatccttcttatt

SEQ ID NO: 349364 - DNA, 152 bp, Zea mays
cttcctgtggccccgcccagaggggtcactttaaaccttagttcaactggattttgccttcccttcccttccggccggcttccttcgttcaattgggttccggaaaaccttaccctttaacttggcccggccgcggcattggaccccacggg

SEQ ID NO: 349365 - DNA, 185 bp, Zea mays
cggacgcgtgggtggcgaggcaaaagcattgcgaccacagacagcgcgcgctcaaaggcctttttttttttgagataacaaggaggagaggaggggatggcgctcctgaaaagaacagggaaggcttgaagtactcgtggcagctcgacaagctcaaggctgatcgtgagagaggatttaccctt

SEQ ID NO: 349366 - DNA, 158 bp, Zea mays
ttcgccagtacacaaatttcgcgcacgggttcgggggcgccagctcgatccgcggccgaaaccctaggtggtgacgacggtggtgctccgtggtggtgctggaggacaaggaggagggctggtagcgatgactttccctaggaaggacgcggggttcc

SEQ ID NO: 349367 - DNA, 292 bp, Zea mays
  unsure (1)..(292): unsure at all n locations
gggctggcttctcctccccctcttaccaagtcctcttcgggttagggttacttagggttttgtggaggggcgatggcggcggctgatgtggagtaccgttgcttcgtcggcgggcttgcctgggccaccagcaacgagtcgctggagaatgccttcgcctcctacggcgagatcctcgactccaaggtcatcaccgaccgggagacggggaggtctngcggctttggcttcgttaccttctcctccgagaactccatgctcgacgctatcgagaacatgaacggcaaggagc

SEQ ID NO: 349368 - DNA, 231 bp, Zea mays
tcgttagaactttgatacacacttcgtttccagaattatggacaaccttaggccagcggctaccaagatattatttctaacgtgcgcgtgttgggctttttgcgggcgcaacacaagctgttattcttgcacaacggccacttggtccaagtggcaattttacacagttgctccgaccaattactttaattggctttgaacacccacctgtgcaagtctataaggtacaac

SEQ ID NO: 349369 - DNA, 115 bp, Zea mays
gttctagatcgcgagcggacgccctttgttttcatttcctttagaaatataacgagataaatctaaaccaatatattgattttttgtaggaaacacatgccgctattagggcacc

SEQ ID NO: 349370 - DNA, 61 bp, Zea mays
cggacgcgtggggttctagatcgcgagcggccgcccttatgttttttggggaacccttggg

SEQ ID NO: 349371 - DNA, 261 bp, Zea mays
cgtctcggagacgagatccctcgcactcgcatatcgcagcgctttgcgttcatcacaaccaccgtcgaaacacccagcatgccgcatctgatgtgcgcccaagggcggagaaagaagccggctgcgaatgaagccagcggagggaggagccccgctgtccgcgaagggccccggcggggaaagaagcccaagggccgagaagtcgccttccggcggccaagtcgtccggcaaagaaagcggcgacaagaagggtaagaaga

SEQ ID NO: 349372 - DNA, 153 bp, Zea mays
tagttctagatcgcgagcggccgccctttttatttttttttcgttgaaaacgcaggataaactttattacaccacaagcgtatcaaagaggagaaaatccgcctttggggccatgtgaagtaaaaaaaggagcccatgacgcaagatgaacta

SEQ ID NO: 349373 - DNA, 85 bp, Zea mays
ccctccctaaaaactcatttgagcgcccaaatttctttttctttaaccctttttggcttggggtggtttaacaatataagggccc

SEQ ID NO: 349374 - DNA, 202 bp, Zea mays
cagcgagagaagagagtccactgtccaccccaccccaccagaaaaacgcattccgcagacacgcggcgagggagtaggggaggggacggcgggtgccgaggctcggagacacgaggaagctacgcgtagccgggcgggctcgcgctgtgctgtcgctccatgtcggtcgccggcgagagcggcggggatccggcggtgtttc

SEQ ID NO: 349375 - DNA, 263 bp, Zea mays
  unsure (1)..(263): unsure at all n locations
cgcgagcggacgccctttttttttttatgttattttattagaaaaangtatttattaaaacacggtaagggagtaggggaggggacgggagagccgaggcccgaagaaaaaaagaagctacgcgtagccgattgggctcaaaatgagaagtcaaataatgtttgtcaaagaatagagaggtggtaaaaaaaaatatttttaaaaatagaggggtaaaaatgtatataggacatttttttattggtatatataaaagatgaaaa

SEQ ID NO: 349376 - DNA, 268 bp, Zea mays
  unsure (1)..(268): unsure at all n locations
ccaaggcttccggttctagatcgcgagcggccgccctttttttttttttggggtattttagaagaaaagagggatnnnaaaaatanttttaaaaatttttgattttttgtaaaggggggaaaaaaatattgtaatttgaaaaggaaaattaaattaaaaacttccggtaaaatgaagaaaccaaatttttatgaatttaaaaaataaaataagcacaaggaaacttttttttataaaaaaaattaatttttataaaaaaatttaaaaa

SEQ ID NO: 349377 - DNA, 195 bp, Zea mays
ggccctcggtcggcatgggcgcgcggcggccatgacggctcgaacgcggtagccacggccccgacgtttcccgtcccggcgcgtaaccccgtggtgcggcggtccccatcacaaacggatctgcggacctactttttgagagccagggcgtccatggacctccggactcggaacgtgatggcttgtggggcgggg

SEQ ID NO: 349378 - DNA, 76 bp, Zea mays
tttgcggcggcggcaggagtgaggcaagatgtcttcggtatacgtgcttgagccccccaccaaagggaaggtggtg

SEQ ID NO: 349379 - DNA, 118 bp, Zea mays
tctccaaatcaagaattggtggccaaggacctgcatggggttgagtggcggttccgtcacatctttcgaggtcagccacggagacacctccttcagagtggttggagtggttttgtta

SEQ ID NO: 349380 - DNA, 115 bp, Zea mays
  unsure (1)..(115): unsure at all n locations
gtacgaagccgacgagcagccgacgctgaagcttggtccggggagcttgagaaaaagggcggttactttaagatgcatatcttcctgaagacnntgacgggaaagaccatccccc

SEQ ID NO: 349381 - DNA, 174 bp, Zea mays
ttgtgaatggttgccaccactccctccctgatggtcttatgagggccactggcgctataaacccccgcaatggcggtaaccacatccgcataccaactacggcttcacggactccaaccctatccgtcccgtcacctaccgtgcggtctacgagctttaaaacaccatttttac

SEQ ID NO: 349382 - DNA, 363 bp, Zea mays
tgcaacgactgcacctgaacttcccggaattaccgcactgcgttcaaactaatggtggcactcaaccaattggggcaactgggctaatttggtagggtggcaggctcaattaccactaccatttaaccatctgcctgaaatgtgctacagtcactttattactacacctgaagcccagaaattttttccgtcgacgagcacctgccacctacaggggtatgggaatggaggtcgttggtgcttaaacaacaccagcagacgacaaagaatatgatgataccaacctgttccaagagaaggaaacgcaaagcaactgtgaaaaaacgtggggaggcacctgtattcggtttagaaacaactacc

SEQ ID NO: 349383 - DNA, 271 bp, Zea mays
  unsure (1)..(271): unsure at all n locations
tcgcttccatttaaccaattgggcgcactgaaccccgctgcttagttgcagcggcaaatactactaccatttagccagctagctgcagcaagccgtgcttccttcttgacacagcaacagttgctgcctttctaccagcagtttgcggctaaccccgcaaccctgttacaactacaacaattgttgccctttggccaacttgctttgacaaacccagcagactgctaccaacaacacatnattggtggtgccctcttttagattgcttatt

SEQ ID NO: 349384 - DNA, 363 bp, Zea mays
tagcaacatagaaagcacaatagtgtaccaacaatggcagccaaaatattttgcttccttatgctccttggtctttctgcaagtgctgctaccgcaaccattttcccacaatgctcacaagctcctatagcttcctttcttcccccatacctctcaccagcggtgtcttcagtatgtgaaaacccaattcttcaaccctacaggatccaacaggcaatcgcagcaggcatcttacctttatcacccttgttcctccaacaaccgtcagccctattacagcagttacctttggtgcatttgttggcacaaaacattaaggcacaacaactacaacaacttgtgctaggaaaccttgctgcctac

SEQ ID NO: 349385 - DNA, 164 bp, Zea mays
tcacataatatgtggtggaaacctagggttttattacaacttgggggggatatcaaacctaagttaacaacataatattaatggggaaaaacttttatataaaaaaccctacacccacatttaaactctttttataactcttaaaatatagattggatttttaa

SEQ ID NO: 349386 - DNA, 147 bp, Zea mays
cgaatttccggggtggcccaacccttccaaaaagggaaggatggttttttgatttttggaggaggtggcaaagaaatgccgggaataagttttgaagatttatgacacataccttcctttctttttgggggcttcaaacgatgaaaa

SEQ ID NO: 349387 - DNA, 436 bp, Zea mays
  unsure (1)..(436): unsure at all n locations
aatctgagaggaagggaggaggngggccaccggacaaccacacacgggttgtttaacaaacaaatctaacattaaattttgatatgggaatatacttaaataaatataactgattaacggtaaatacataatttttatttttattttaaaataaattaaaaaagtttttttttatatatttattttgaaattgtataataggggaaaagaaggaatgaggtgtatttttttattttattttttatttgattttaatgttatttaattaatttaataaattaagtttattttttttttttttttctttgtccccccgacaccccacccccccctcatatattttatttttttttaccaccccaaggtttttacttttttttatttttttgttttaaattcttaattaatattatactataatttatattattatatt

SEQ ID NO: 349388 - DNA, 425 bp, Zea mays
  unsure (1)..(425): unsure at all n locations
tcgaccaaatggaactagataagactgtcgatgcctccaaggatttgttggctcaaattatgcaccctctaatactagggcaagtgaacaacttttgcagaaggaatcctgctcgcagattacaagcctttcatgggctggaaacataaatggctttaaagaccgagagaatgtaagattcttgggtggtgggtcgcgacaataagctgggacatttactaacttatgtgcagggnactttaattagtaaggcgtcaattggccgcgttcggcgtcccttgtgcacttgtgctaggataaccattgggagtgaactggcttggctttatacaatgcaatttcccttttttcccccattcaattatttttaatggtctgttgggccttggaccatactgattttggacaagaatagatatttgccc

SEQ ID NO: 349389 - DNA, 168 bp, Zea mays
cgaatttccggggtgaaccaacccttccggccgccgggaactggcttaaattttctttttcaagaagccgggcgttcccgtggacctcaatcctcccttggactggatcgaaacggaaatccacccggacctgcgggggtcctttcctttttcgcattaatgagctcg

SEQ ID NO: 349390 - DNA, 438 bp, Zea mays
  unsure (1)..(438): unsure at all n locations
tcgagaacgaatacgagacaaaaaaagctggcagatactctccccggaactcgccacttcttactaaccttctgacaagacaccgatcacaataaggactncatcgcaaatgttccggtttacgaacttaaatatttaaattaaaaaatattttgttgggcaacacaaccccaaaaggaaaaccccctttttggatgataaacccgattataattgcacaaatgaagaaaaaatancacgcctttcgcaaaatgaaaggtccttttaagttggggaaaaaaggaaggggggtgaagttttaaaagtttaaaaattgggccttgaaataaaagtaggcttaaaaatttttttcccaaaattccaaaatttttggggggaaaacagtatttttggcttaaatttggaccctttcccaaattaaaaaaaaaaaaaggaaga

SEQ ID NO: 349391 - DNA, 347 bp, Zea mays
tcggccccgccggcgccgatttccgaaagtcccgtgggatcccgccggttggggggcgaacttgggggggaaaaacgcttgctttttgggggccgttgcgaacaacaaattgaacggcttccggaagcgcttcttctttttatttttaaacggattggggaacgtaaagggctcgggcggttgttccttggtttccgccggtttcaacaacttgtgccccttttttaattcgttcttgttcgggtttaatggggtttttcctcaaaagcccccttcttcttgttcttttttttcaaacccgttcttttatattagatttcgttagtccctctggggggtttttttaa

SEQ ID NO: 349392 - DNA, 197 bp, Zea mays
gcttctgcttgctctggggggaaggagagagagagagagcgagagagagatctagtagagaggctagtaggtggtcctcgaacgaagatgttggcggtgttcagcgggcaggtggtggaggtgccggcggagctggtggcggcgggcagccggacgccgtcgcccaagacgaaggcgttgcaattggtggggcgctt

SEQ ID NO: 349393 - DNA, 232 bp, Zea mays
ggggactgggtggggggctctggcggggggcgccgatgctgacccccttggccgggataccagcggccttccttttccgaagtaggaaccccttcacggcctaattttttctttaactttcccgacgatgcccaagcctttccggtccccgagccttcttcaagtttggccccaaacgcttggggccggttcccaacaacaaccttccggccgagggcccctttaacttccc

SEQ ID NO: 349394 - DNA, 217 bp, Zea mays
  unsure (1)..(217): unsure at all n locations
tcgcgcaccgagcgccgngctcgttgtcgtgcccgagtccccttcctttcccgtttccccctccctctcttttttcccacgcccgacgcccccaccacttttttgatccaaaaccagatcggcacgacgagcaaagggccccccggagcggcgcggagcaaaggcggggggataccgggcgggggacgactacgactaccttttcaaagggggactg

SEQ ID NO: 349395 - DNA, 137 bp, Zea mays
tcgggacactttaagaagaaaggggcagaagagaggggcaaactttttggggggaccaaaaagttgagcgcggtggcacaaaaaataagcgcgagttttttattttggagggaagggccggacctttggcagaaaat

SEQ ID NO: 349396 - DNA, 197 bp, Zea mays
gcctcggccaccggcgcgggtgccctcctcctccttttgtccgacgatccggagaggactttctctcgcctgctcgacccttccgcccccgccggccggccggtcctttttccggcccactccggtccgatcgaccatggcggttacccgccccaatggcaataccacttgtagctcccttgtggcaaccgttccgg

SEQ ID NO: 349397 - DNA, 114 bp, Zea mays
ttggcggattagttttttttgaaaattcggggatgggggggacgatccaatcggggaagggcccccaaaattttgaaagaccgggaaaccctacaatcgaggtcgaccggtttt

SEQ ID NO: 349398 - DNA, 163 bp, Zea mays
tctttcgggcccaaacaccttattcaagccgattttcaccgccgccggggagaggaccgcattaaaatccccccgatggcgttcccccccattttatatcacaacggggcgcccccccttgggcatattccggggaaagttccggaaccccccccaaggcttc

SEQ ID NO: 349399 - DNA, 383 bp, Zea mays
gcggcaaccatgcggcgcggcggcgggtgccgcatccccaagccctccttggtgcccttcaccgcggacgaggacaccccggctttggaccccagcgtcatccgaaacctcgactccgccttatgccgccgtgactccgacgccaacagcctatgtagcaggcgtcccgcttttaccgtcggggccatcctaaacttctccgaccgcgccacgcaagtcgtcgcgctccgagtcgtaaacacattcctcgcccccgccgtcacgctccgggggcctttgcccgccgcgcgcgacattcaagcggcgctccgccttctggatgaccgaatccacttgccccggaacgacgccacatttgatgatgaccttatccaagaccttcg

SEQ ID NO: 349400 - DNA, 320 bp, Zea mays
tcgcccaacttttttttcaaacgtccgttcaggaaactgtccgggaacgagccggtcgggactgggcggggggcgggcaagagcgatcgggaccgcattggttgggtggttcttcagggcttcgccttccttattataaatggaacggggagaaaaacaaaggaccgggcggcggggggctccactgacattgcctaccatgggttccatgctgggccggggcatgcgggaactgcgcccgctgggggcttttgcgagggtccccagacccaactttggggagagggcaacattttttaaatgtagaagcaacttaacaa

SEQ ID NO: 349401 - DNA, 151 bp, Zea mays
tcggttggattaagggggtaccttaaaaattccgcaaaagccttgggcttctggtttgtaaaagcccaaagggccggaaaggtttggcccgcacccgccaaaaagggggggctcccagcgaaacgcctattttaaaaagaagtgaagcggg

SEQ ID NO: 349402 - DNA, 134 bp, Zea mays
gaggtggagtcctggtcatggggagactctaacattccattaaacatgatgggccaataatttggggggatttttgagggggtgtgaactgtgatgctttccatattaatgacccccgaactgatggggttggg

SEQ ID NO: 349403 - DNA, 130 bp, Zea mays
ccccccccattattttagggatagggggggcgacgccccctccccctttttaaacatttaaaatggggggcgcggccggtttttttttttgggccgcccccggaaatggggggtccaaaggggccatttt

SEQ ID NO: 349404 - DNA, 186 bp, Zea mays
ccattagctttatttactccagagcgcagaagaacccgatcgacaccatgagggtgttgctcgttgccctcgcttttctgggtttcgctgcgagcgccaccttcacgcatacaagcggggggttggggttccaaccacccccgccggtttatttaccgccgccggtgcatttggcaccttcgggtt

SEQ ID NO: 349405 - DNA, 366 bp, Zea mays
ggcttctcctccccctccggttcgggttcgggttcgtgaggttctccggggttcggtttcgtgggtgagcggatcgagatggcggcgtcggatgttgagtaccgctgcttcgtcggcggcctcgcctgggccacggacgaccactccctccacaacgccttcagcacctacggcgaggtcctcgagtccaagatcatcctcgatcgggagacgcagaggtcccgcggcttcggcttcgtcaccttctccacggaggaggcgatgcggaacgccatcgagggcatgaacggcaaggagctggacggccgcaacatcaccgtcaacgaggcccattcccgcggcggccgtggaggcggcggcggcggc

SEQ ID NO: 349406 - DNA, 220 bp, Zea mays
tcgctagatccgcgctggatacgtgggtcctgctccaaaatatgattcggctggtctggcgtgcgtgagtccagctcgtgtcgtgtgtgtctctgtgtgaggtgtccgcgggcgtgtgtatgtttggagtctttcgtcctcgatgacctctttttccctcccctttttacttttttctcttattcacccttttttttctccggtttctcttccccccttt

SEQ ID NO: 349407 - DNA, 239 bp, Zea mays
gtctctcgtttctctcctgtgaccaaagcgccttctttccggactctccccagcatctcgctccatgacaaagcccaccgcgggtagatcacagaacgccatgccgctttacgcgcgcgtgcgcgcagctagttagctagcgaacaaacccagcagaaacacacgccgccgccgacaacaagcgatttataagagcacaagaaggagcaaggtgttgcttaggaaagcgacaatggccg

SEQ ID NO: 349408 - DNA, 194 bp, Zea mays
tctatcgcgagcggccgccctttttttttttttttttttgaaattatgaatcggctgaaaatttatataaattattacaagaagctggcccgctttatatgacaattgacagggtatgggcggcactatcacacaattaaacacctgcgctgcagggcacacacacgaacgaacgaacgaaacctgcggaaaac

SEQ ID NO: 349409 - DNA, 75 bp, Zea mays
cgggaacgccggcaggacccggaccgaaattcccggattcccgcgacgactctcgcgttttggactagatcgcaa

SEQ ID NO: 349410 - DNA, 205 bp, Zea mays
ttcaattcacggactaagcccccgccggaaagcactgaccttccgcgcggcccgccgcaaggaacgcgtgacctccccgccccctgttgcggctgggcgggcggcgcattcaggatctgctagggtttccccgccggcggggtcctggccatggcgagcccgcgctcgggccggcggcgacgagggcgaatctggatgaaagctg

SEQ ID NO: 349411 - DNA, 202 bp, Zea mays
aagggggggcccccgcgcggacccggcccgaaattcccgggggggccacacgagcgcacacactttcggaattcatttttgtcccccttgggaaaaaaaccaacccggtttcttcttcttggaaacccttacccttcttggcgagagaaaaaatggggttcatttggtttggcggaatcgaaaggtggtgggccaggggggg

SEQ ID NO: 349412 - DNA, 204 bp, Zea mays
tcggtcagtcactggccccccattaagccggccggccttttttgggcggtggcgggagcttgctttgacccaacccccattgggaacgggattggccccattggccgcaccttcattggcttgatcccgggcggcggttcctttcccggggatctcggggtttgaacaaccccagccgtttttcccagggtggccccccgttgg

SEQ ID NO: 349413 - DNA, 284 bp, Zea mays
ccccgtaatggatctcgtttcaaatccatccatcctggtttcctccgtcccgcagcatttaaaccccatggccaagatcaagatcgggatcaatgggttcggcaggatcggaaggctggtggccagggtggccctgcagagtgacgatgtcgagctcgtcgccgtgaacgaccccttcatcagcaccgactacatgacctacatgttcaagtacgacactgtgcacggacagtggaagcaccatgaagtcaaggtgaaggactccaaaacccttctctttggtg

SEQ ID NO: 349414 - DNA, 228 bp, Zea mays
ctcaactgttctctcgccgccgttcaagttccgttttgccttgaggtgcacgtggcggtggaagcttcccgggcggtggcggttgttggttcatgtcaatggcgcaggtgtgctgcgactcggccgtagcggcgtgcaccgtgggccgtgccgtaggcgtatgctaggtccatggctcgcgcctttagtccacctctgcccttgttcgcacggtggcatatctcatcc

SEQ ID NO: 349415 - DNA, 263 bp, Zea mays
ttgggtcttaagaccattagctttatctactccagagcgcaaaaaaacccgatcgacaccatgagggtgttgctcgttgccctcgttctcctggctctcgctgcgagcgccacctccacgcatacaagcggcggttgcggctgccagccaccgccgccggttcatctaccgccgccggtgcatctgccacctccggttcacctgccacctccggtgcatctaccaccgccggtccacctggcgacgccggtccacctgccacc

SEQ ID NO: 349416 - DNA, 86 bp, Zea mays
ctgtatgggtccactccattgcgtgctgctgctgtgtgtttccattttgtattttgtgataaattgttcgtagccccctattggcc

SEQ ID NO: 349417 - DNA, 409 bp, Zea mays
tggacgcgtgggaatggcaggagattcctcttctgggaagatcaagagtggaagcaaggtatctaaagttggtggcagaaaagacattgtggaaagcataagtggtgatagagaaggatcgtcatcaaacaacaaggacttcccacagaagaaacggttgatagagaggaactccacaaacgagaagggtacatttgttcctgaaaaaccagtgggtaaacttaagaagcaggttcaacctaatgttgttatggatgagcacattaagtggaacaaggaaagtaaagatactacagatgttgtgtcatttactttcacctcacccttggtcaaaccgtcggcaggactgtccagactggtgggtaagtgggatacaagaagcaaccttgatatggatgcaggatgtgat

SEQ ID NO: 349418 - DNA, 338 bp, Zea mays
tcgattttcagcattcagaaacacaccaagcgaagcgcactagcaacaacctaacaacaatggctaccaagatattagccctccttgcgcttcttgcccttttagtgagcgcaacaaatgcgttcattattccacagtgctcacttgctcctagtgccattattccacagttcctcccaccagttacttcaatgggcttcgaacatccagccgtgcaagcctacaggctacaactagcgcttgcggcgagcgtcttacaacaaccaattgcccaattgcaacaacaatccttggcacatctaaacctacaaaccatcgcaacgcaacagcaacaacag

SEQ ID NO: 349419 - DNA, 221 bp, Zea mays
tctgcgaacctgccgttaccgtacgcccgcagtcgccgcaaaatccggcggcacgaaccggccgtacgccaggctaccaccttcctacgcccgcctgcccgcccggaatcctgcccccgccgggatctggctgcttgcccgccacaatccaaccaccccgccgggaccgttccgggcatgccgaaaccgttgggatccgcccgccctcctaaatccgcccg

SEQ ID NO: 349420 - DNA, 250 bp, Zea mays
aaccggaggagcaggtggacctgtagggggacgacaacggcatggacgacgacaacgccgggtaccgtctccgaggaagccgggacgactcggaggagcccgaggtggatgacgacaatgacgagcgccacggcgaggccgacgacgacgccggtatggagccggagccggccggaagtaaaggcggtgatgacacggtcaaggggcccgacgtcgcacgttggggtcccgaggacgaggaggaaaggag

SEQ ID NO: 349421 - DNA, 347 bp, Zea mays
cctacagttgggctctactggtttggctttgggaaacaaaaaaatggggatgtttgcaaagacgttgtgttctcagctaaacaatcgttcaagcctagctgcatctgcttcggctaaaaacacttcaagacagcatggccagtcacttattgataatgcaattgtgtcaaccagttcaccaccaaatgtattggtgattgcatctttgctttgggctgcacaacagaatggtcaccctgagctcattggaaaaacaccaatagtgaggccatcattagatgttgagagacacattcttctgaaaggagcttttgataaagctgaggaaatagtcttgagaatgaagc

SEQ ID NO: 349422 - DNA, 307 bp, Zea mays
  unsure (1)..(307): unsure at all n locations
ctagatcgcgagcggccgccctttttttgttttttttttttggttggggggtngggaaaccatgcatggatgctgcaaaactgcatagcttaacatgcttatatctgggtgcgtacatgaatacagatagactttccctttaagccactctgcttgcttacaaactagggtaccattaggtgtgtgcatgaaaaggagacagcacagcttattgctttttgcgagagaagtggttgtcgttcggattccttttcccgctgaacattgccagtgccttgccaactggaggtttaagtgacgccttttt

SEQ ID NO: 349423 - DNA, 72 bp, Zea mays
ggcccttctgcctggacgatgagcaggacctgctgcttggggacttcggggacgaggaactggagatcgacc

SEQ ID NO: 349424 - DNA, 106 bp, Zea mays
ttctgttagcgggcgccctttttttttttttttggggcaaacatatacatcgggggggaagccccaaaactctggactttccattaagggtgccaaatacaaaggg

SEQ ID NO: 349425 - DNA, 463 bp, Zea mays
aaacaggcaaacggaacggaacatctcctcggctccttcctcctctggccagctgctgtcgcccctcgcccgccacggcacctcctccacttccagatcttcccgccgtcccaaaaatagtgcccgccaaaaccctaccctccccgcccgtttcctcccctccctcgcggcctccgaccccgcccttccgccgcctgactaataaaccctagcacccacctccgccgctgccatggcgggcccgtccggcgcatcctcctcctcgcgcggcgtcggcggcggcggcgttgaccgtttctacagcccgccccacgtgcgccgccagcagcaggaggagcagctgcagcggctcaagggcctggcccaggggcagcgcacgtcgtccccggcggcggggacgctcacgcccagggccgccaggcagaagacgccaccggctgagacgccccgccccgtcaacgag

SEQ ID NO: 349426 - DNA, 159 bp, Zea mays
ccaacgcgtccgcgcgccgccgccgccggcgaaacagcacatcgctctctcgatctcagccatggcggaggtggagcagccccaggacgcggtgaagctcttcaaccgctggaccttcgacgatgtccaggtgaacgatatctcgctgaacgactacct

SEQ ID NO: 349427 - DNA, 304 bp, Zea mays
gtacgtggtctctccaggtgagcttctgagaaactgattgaccttcgcggtcgcacctgccgcacacggggactgcctctcttcctgcacccgttcggccggtcgcacatcctagcttcaagtgcgacgatgttgttttccccaatgattctcgggggaggcggtgaatagaacatctgaatgtgtcttgactaatgcccgatctttgaattaagtttttttaacttttccgaaggcttttgctgccatttacattttttatacttatagtattttattttggtaatcttcttacctttttttt

SEQ ID NO: 349428 - DNA, 258 bp, Zea mays
ctgcgatcccatatcaattcccgtccccactcgccgtcgacgcaggtcggactccaactccagcgcgccgcgcggtgctgttcgccccgcccatgtgacgcgagttgtgccccgccccccacagtcagcagtccgagaccccaatcctcggggccgggcggggggaaccaggagtgggcaataaaaaaccgaggattccgtcctctgtggcggggatggggcaagaggggatggggttcaccactaaggggtgaggtt

SEQ ID NO: 349429 - DNA, 273 bp, Zea mays
gtgttattggtgaaggatttcttaacgaaatctttacaataatagattgggtacccgttccacctgctcttgtttttttaatatataaaaaaaaggccattcctctttccctttttgacacttttattattcttataaacaaaatcgtccccgccttaaaattataccttattcttggtttttgtttttattcttatttttatccctcttttttttatatatattttttttttattttatatattattaattggtttattcttttcattttat

SEQ ID NO: 349430 - DNA, 339 bp, Zea mays
gttggcttctcctccccctccggttcgggttcgggttcgtgaggttctccggggttcggtttcgtgggtgagcggatcgagatggcggcgtcggatgttgagtaccgctgcttcgtcggcggcctcgcctgggccacggacgaccactccctccacaacgccttcagcacctacggcgaggtcctcgagtccaagatcatcctcgatcgggagacgcagaggtcccgcggcttcggcttcgtcaccttctccacggaggaggcgatgcggaacgccatcgagggcatgaacggcaaggagctggacggccgcaacatcaccgtcaacgaggcccattcc

SEQ ID NO: 349431 - DNA, 142 bp, Zea mays
cctttttcggtttggcttcttcccggcccggcccgagcccagcagagcgcaaccctatccggagcttggatggcggtccccaaacaacatcatcagcaaccccagcaggcggcatcggcagccaccggcgtgtggaaaaccg

SEQ ID NO: 349432 - DNA, 284 bp, Zea mays
  unsure (1)..(284): unsure at all n locations
tcgtgtaacctagcatcagcactaccagagcgctgccgagaaggaggaaggcggtggtacttgtcgcntttgtatatacgatagctcgacagatagcaaggttggggttggatctttgacgtacaaagcaatggtacctgcactgcctgcacgcagcctgtgtatgaaggattgtcccgctaagcttgttgaagaactttggttcacaataggggggcaacatattccttttggtgcatcaccacaggatgtttggactgacttaagtcgtccctgtggtatcc

SEQ ID NO: 349433 - DNA, 54 bp, Zea mays
tttgccgccgctgcagtgtccatagccaccgggggagactgagatggggggggg

SEQ ID NO: 349434 - DNA, 393 bp, Zea mays
tgcagtcattggtacaaaccatcagggcacagcagctgcagcaactcgtgctacctgtgatcaaccaagtagctctggcaaacctttctccctactctcagcaacaacaatttcttccattcaaccaactgtctacattgaaccgtgctgcttatttgcagcaacaactattaccattcagccagctagctactgcctactctcagcaacaacaacttcttccatttaaccaattggccgcactgaaccccgctgcttatttgcagcagcaaatactactaccatttagccagctagctgcagcaagccgtgcttccttcttgacacagcaacagttgctgcctttctaccagcagtttgcggctaaccccgcaacccttttacaactacaac

SEQ ID NO: 349435 - DNA, 110 bp, Zea mays
  unsure (1)..(110): unsure at all n locations
tccaaccagaagagcttgcagttactgagagtgtgtgtgagagagaggatgggtggcancnncagggctgctctgctgctggccctggtggtggtgccctttacccttcc

SEQ ID NO: 349436 - DNA, 151 bp, Zea mays
ttttctaagaattccctcccctagccgccgccgccgctcgtctccctgagaggtgccgggaccgaggatttggccgagttctaggtagagaatcggttttacttgtctcagcccggggtctgctgcgtctggtggtggtgaaggggagaaa

SEQ ID NO: 349437 - DNA, 154 bp, Zea mays
tgtaagaaataccttcggtacctgcaccctggaatagtttcccaacatggggtcgcaaagatccttcttactcacctcactctagcaagacccggaggaccccatccttcgaggggacgttgcctacaacaaggattccagccccctgaagggc

SEQ ID NO: 349438 - DNA, 160 bp, Zea mays
caaagcggcagtgcgtagagaggatcgtcgaacagaacagcatgaagatggtcatcgttctcgtcgtgtgcctggctctgtcagctgccagcgcctctgcaatgcagatgccctgcccctgcgcggggctgcagggcttgtacggcgcttgcgccggcct

SEQ ID NO: 349439 - DNA, 370 bp, Zea mays
tttcgtacaccaagcgaagcgcactagcaacgacctaacaacaatggctaccaagatattagccctccttgcgcttgttgccctttatgagagcgcaacaaatgcgttcattattccacaatgctcacttgctcctagtgccattattccacagttcctcccaccagttacttcaatgggcttcgaacacctagctgtgcaagccaacatgcaacaacaagcgcttgcggcgagcgttttacaacaaccaattgcccaattgcaacaacaatccttgccacatctaacaatacaagccatcacaacgcaacagcaacaacagttcctaccagcactgagccacctagccatggtgaaccctgccgcctac

SEQ ID NO: 349440 - DNA, 382 bp, Zea mays
  unsure (1)..(382): unsure at all n locations
gttttatgaagtacatagctaccaaggcctcacctgattctggccagagtgacttggaagcaaattattggactcatcaaataaatgcctatctgacagcccttcacagagaaaagcatacattagatgtcaggtcttcaaaaacgacttcagtagccatatcatctctgataagctctgtagcatctgttttggtaatgcatccaaaacttggtacttctgcagcagaatctttggccatgcttggcacatcggacccaagattgggtatgccactttttgtagttatcctcttctacagcaagattctatgcagcagcggtaaattttcagcggaaatctnnctcagtttgctagagtcattgccatcacttgctataca

SEQ ID NO: 349441 - DNA, 410 bp, Zea mays
gctttatctactccagagcgcagaagaacccgatcgacaccatgagggtgttgctcgttgccctcgctctcctggctctcgctgcgagcgccacctccacgcatacaagcggcggctgcggctgccagccaccgccgccggttcatctaccgccgccggtgcatctgccacctccggttcacctgccacctccggtgcatctcccaccgccggtccatgtgccgccgccggttcatctgccgccgccaccatgccactaccctactcaaccgccccggcctcagcctcatccccagccacacccatgcccgtgccaacagccgcatccaagcccgtgccagctgcagggaacctgcggcgttggcagcaccccgatcctgggccagtgcgtcgagtttctgaggcatcag

SEQ ID NO: 349442 - DNA, 397 bp, Zea mays
  unsure (1)..(397): unsure at all n locations
gtctaaacctattcgacaccctaagatatcttctgccggagctaggaaggagcgtgctggtgcatcttgtggatccgggcctcggtatgcacatctttccagtagcttatggcctagtaaaatgggccctgaactacnctcaacgtctgcgagtcagaagatctatgggcagtccgggctgtttagcataatctcttcctattccgccatgaacaaccctgtattcaacaatgcctattctgattacaatgtgccccaaaggtcatatcatgggatgaatgcaactgctggactctcatttgttatggcaccattttctgtgtttgctttttgcccaaaaaagaaaggcttttcctagatttattatcgactttatgattggtggagtttatttttt

SEQ ID NO: 349443 - DNA, 420 bp, Zea mays
  unsure (1)..(420): unsure at all n locations
ccccggccggacccggccccgaattcccggtgtggacccacccttcttttttggacttttccaaaacggccaacggcggccttcttaagccggttgccgacaccagtaagccgcccgtaccaggtcccccgccgaccttcctccttcttccttttgccaacaggccactgggccggcccgggccgccctttcgggccctcaaccgacctgtgacctntnacctctgcggctccacttctccctccgaaagaccagcagccagtgcgagtgtgtgtggcatgcccgtcaagtgcggcaagtgcggcaacgcaagccttcttctccagggcgtcgtttgccaacgacaagcaccaccaggtgcttttgtgctaagatagcaatgcctatttcaaaagctccatatgatcatttgcaagcaac

SEQ ID NO: 349444 - DNA, 402 bp, Zea mays
ttgatggtgggaacatttggttaaaacttggcacctcaaggtgttgcaaccaccacaaatggggatagaaaatggtttcaaataggttgggccccattttttttttgaaggggtgggaaaaaacgtgggggaaccaaacttttaaaaagctatatctgggaaaggttaaatgaaaactacaaaatccagcccctcgatcctttgctttgaagattgggtattgcttactatcctcgcagtcacagcagtttttcaccatctaagaggctcaacccatccttatttctctgggatacactaagatactctctggtatctacagaaattgcttctcgtggtaggatgtcaagccactctgctgaatcgaagtcctgcttggagtctttgcgtggcgaacttaat

SEQ ID NO: 349445 - DNA, 408 bp, Zea mays
  unsure (1)..(408): unsure at all n locations
ttgcgcgctctcccgccggacgcgccgttgcccttccccgtccccgcgccgttccacccccaagcccccggccccggtgggaccgtcccggccacgcccccgaacccgacccctccgcaaccgttaacccccgccgngccgccttcctccttttcgacgcggccgccgcacccatgggagatctccgcgcgagcatggctagagtccttccccgacggacggccgcccaccgagcccgaggtcgacgcctacatcgacgtgcaccgccccgagctnccttccctcccccgctcccagctacaccagcgcctcctcgccctccgcggcgaccaggttctggatgcagaccagagcgcattcccgtacaggttccanngtactgatctatggaagcctgtgtaccagtgg

SEQ ID NO: 349446 - DNA, 403 bp, Zea mays
atggattcctacacggatatattattgccactggtcactggtatagtagtatactatgtgtgtgtgttgagcagatcatttctaaagcaagcaggattttatatatccgcttcttgttggcactagctaggatcttcttttgtgtgtaagggaagctgatctgagaatctcagatgaaggttcctgcaccaaacacccagatttgctgcgcgtcaagttaagctggtctgagaatctcagatgaagctggtctgagaaataacgaacaagtttcgaatgatggagcatcccagctgccattaaccattcctgtcgtgaacatggtcgcaattgcgctcaagacatgtcttgggctttaccttctgaagattttgagttaccgatcgtgcttacaagccacatg

SEQ ID NO: 349447 - DNA, 308 bp, Zea mays
  unsure (1)..(308): unsure at all n locations
ttcgtccctccccgactcaccccactgcccagccgcacgcgccgccgtgtgttcgcgctctctcccactgtgtctgtgacgactgggtaggctacagccgccgcccgtcgccaggtgccgatcccttcgccgacgaagagcatccaccaggctccggccaagggcgtgatggcggctgtagggagcttgcanccgggggtggagactctacatgtgcaggattacaaggacgcgcctccagccaaggctgtggcggccgcggtagatagcttgcagccggcgatggaaagcctacatttgcaggaatt

SEQ ID NO: 349448 - DNA, 272 bp, Zea mays
  unsure (1)..(272): unsure at all n locations
cttgcgccaagggaaacccttgtgttggtccagccgcccctcggcccgccggaccaatcccaccccatcccaacgctatccgctgccctcgctgcgcccccctcctcttccacctggtccgccaccttccccaatgcatgacatcccaccctaccccaccggccccgtcgccgttgaggaggaggcgtccccacccccgtccgnanaggcagcagggatctataccgggcatggagctggcgctcgccttcgcgaagccctggcctcgggcg

SEQ ID NO: 349449 - DNA, 370 bp, Zea mays
cacatatctactatactatactctaggaagcaaggacaccaccgccatggcagccaagatgcttgcattgttcgctctcctagctctttgtgcaagcgccactagtgcgacccatattccagggcacttgccaccagtcatgccattgggtaccatgaacccatgcatgcagtactgcatgatgcaacaggggcttgccagcttgatggcgtgtccgtccctgatgctgcagcaactgttggccttaccgcttcagacgatgccagtgatgatgccacagatgatgacgcctaacatgatgtcaccattgatgatgccgagcatgatgtcaccaatggtcttgccgagcatgatgtcgcaaatgatgatg

SEQ ID NO: 349450 - DNA, 161 bp, Zea mays
tcttctgttcccttccacgcgatcgaaaccggggcgcgaattaatcatgcgggggcagccctctccaggcgctccaccccgcgtcgaggacccccttcccgccccccgccttgtcttgttcgcgttcccctttgcccgcgtgtgcttcgtccggctgtttt

SEQ ID NO: 349451 - DNA, 320 bp, Zea mays
taaaaaaaaaaaaaaaaaaaaaaaaaaaaagaaaaaaaaaaaaaaaaaaaaaaaaggggcggccgttcgggaccaacgcgtccggggacgcgtgggaaaaactttatagttcgatgaatgggcagtttgccggggttttggaataattgggactttgtcttctttcgcttctgttggcgaaccattgtcttaatcgatttggggatttcgaagtctccttttattgccaaaagttcgcgaaaactaagtacttactccgtttgaaaatagtattagttttagctctaattttttatgtctaaatttaaatttataatgat

SEQ ID NO: 349452 - DNA, 291 bp, Zea mays
ctcccccgttccgggaaccctagtgggtctatccaagaccacgcgaggccgttaacaaacgcccacccttttttcggccccccatcgcctacccgctgcctccgccgcggttagccatagatggattggtctccccggtgggaccctatagactggaaccaaatcgaggatccgaggccgctgccagcctggctttactacacggtggagtggtgtggaccatgtagggcgatcgcacctttagtatcaaagctttaccgccattatcccaagaatacccgtgtacaaagt

SEQ ID NO: 349453 - DNA, 90 bp, Zea mays
tcgttcttaggcgacaagcacccgccaggtacgcccatcctctggtggactccccccggtcctggtgtgcgaaacccagcacccaaaccc

SEQ ID NO: 349454 - DNA, 415 bp, Zea mays
caacttgcaacatagaaagcacaatagtgtaccaacaatggcagccaaaatattttgcctccttatgctccttggtatttctgcaagtgctgctacggcgaccattttcccgcaatgctcacaagctcctatagcttcccttcttcccccgtacctctcaccagcggtgtcttcggtatgtgaaaacccaattcttcaaccctacaggatccaacaggcaatcgcagctggcatcttacctttatcacccttgttcctccaacaatcatcagccctattacagcagttacctttggtgcatttattggcacaaaacatcagggcacaacaactacaacaacttgtgctagcaaaccttgctgcctactctcagcaacagcagtttcttccattcaaccaactagctgcattgaac

SEQ ID NO: 349455 - DNA, 75 bp, Zea mays
gactcactataggggaaaggctggtacggccgtgcaggtacccgtgctccggatattccgcgggtcgggacccac

SEQ ID NO: 349456 - DNA, 201 bp, Zea mays
  unsure (1)..(201): unsure at all n locations
gagccgcgcgccgccgaacccgccgtctgctccagcctacgggcacatgggagcacgacagccaatcgcaccccgacacggcggcaccggaggaaaccctccttcttggtcgtagcctccgtggcctccctcccctcaccccttccggtgttggattgagggtggagcgganatcctncatgntttgtattgntccctgga

SEQ ID NO: 349457 - DNA, 148 bp, Zea mays
gtccgttcggagaccgaggtcgttgccgttaaggagccgccgttgaaccaggcggggacttaattcaacgaagcttcgaccacccctccggcctcggctcaatgttgttagacttcttccctgacttcgacacctacggtaacgggga

SEQ ID NO: 349458 - DNA, 330 bp, Zea mays
  unsure (1)..(330): unsure at all n locations
tcgcccgtcatcgantctcgtttcaaatccatccatcctcgtttcctccgtcccgcagcatctcaaccccatggccaagatcaagatcgggatcaatgggttcggcaggatcggaaggctggtggccagggtggccctgcagagtgacgatgtcgagctcgtcgccgtgaacgaccccttcatcagcaccgactacatgacctacatgttcaagtacgacactgtccacggacagtggaagcaccatgaagtcaaggtgaaggactccaaaacccttctctttggtgagaaggaggttgctgtgtttggctgcaggaaccctgaggagat

SEQ ID NO: 349459 - DNA, 119 bp, Zea mays
agaccattagttttatttactccagagggcagaaaaacccgttcgacaccatgggggtgttgctcgttgccttcgctttcctggctttcgctgcgagcgccaccttcacgcatacaagc

SEQ ID NO: 349460 - DNA, 272 bp, Zea mays
  unsure (1)..(272): unsure at all n locations
cggcgggtcccgcccgcgcgcccgccttgaagacttcactccaacccagcccgcccggctaaaaccctcccctgttctgacttctgatgttcgtcctnacagccaccaccagcaccaccacgggcaccttactttttcttcgatgccggccactccccttgcctaaaactgtaacacttgccacgcctcctgctttcctccccttctggattcggttccggtttttcggcttcggcttcggcttcggctttggattctccgtcttttcccaa

SEQ ID NO: 349461 - DNA, 109 bp, Zea mays
tttgcgcgcgcgtgctcggtgatccgggaagcgccgcgagatggccgggggcggaggctgcttttcctttcctaagcacgactactttattccttacccctttaaggac

SEQ ID NO: 349462 - DNA, 397 bp, Zea mays
tatttttataataaaggaagaaaaaaacggggggaaattaaacaaaaggggagggagcaataaaaataaaaaaaaaaatcagaattacaatgaccaaaaagaggaaagatcataaagaaaccaaaattaaaaataaaaaaaacaaaataacaaaaaaaaattaaaagaaaagaaaaaagacaacaaaaattaaaaaaaaaaaaattaaaaaaaaaaataaaaaaaataaatatggttaaaaaaaaaaatgatgaaaaataaaaactaaaaaaaataaaaaaaacaaaacaaaaaaaattaaaaaagataaaaaataaaaaataacaataagactaataaaaaaaataaaaaaaacaaaaaaaaaaatacaaaaaataataaaaaaataaatacaaaa

SEQ ID NO: 349463 - DNA, 149 bp, Zea mays
ttggttttagatcgcgagcggccgccctttttttttttttttttttttttttttttttttttttttttttttttttttttttttttttttttttttttttttttttttttttttttttttggttttttttttttttttgtttttttttt

SEQ ID NO: 349464 - DNA, 137 bp, Zea mays
cccagtcgcccacgcagccggcccaagcccaaaaacctttctccatcctctactctcatccccacgatggccgccgccgccaccacgccgcactccctcctcctccagcgcgccgtgatcccggccgcgccgtctag

SEQ ID NO: 349465 - DNA, 325 bp, Zea mays
cttatacatccagccggcacggtatggttcatgatttgccacacagcagcaggcttcttgtttcctgtttagggagcagagaagctctctgccaagctgctaccatggagccagccttccatgcgcagagctcattactccagccaccgatgccgcacgagctctcgttcacggagcggacgacctccgtactcggttgcttgcagccgaactcggcgccctcgctgcaggcgagcaacaagctccctgctccacacccccccccagccatggcgtcctgctgtcctccatggcgcaggagatgccccaacgagctcccttccct

SEQ ID NO: 349466 - DNA, 106 bp, Zea mays
gtagtgctcattttgacggcacgcgggattacacttgctagaaatttcacagatgcagcctcaagcgtctcgccgagccctatccttaacgatgcgtttggggaaa

SEQ ID NO: 349467 - DNA, 130 bp, Zea mays
cacctcctcgcttccactccgctcgtctgacatctcgtcccgtcctttcgtttcgaagcctcgcgagccccgacgatggccaccgccgcggtgtcggtcgacgagaagctcgacaagcttcgcgccgagg

SEQ ID NO: 349468 - DNA, 119 bp, Zea mays
tcggcagcagacacctccgccacctccaccctcgaatcgttccccaccatggcgtctcaagtatcctccgttttcgccgatctcatgcatgccctggtggaccccatcctttgtgtgac

SEQ ID NO: 349469 - DNA, 208 bp, Zea mays
ctcttctaagtacacgatctccctcttcctgtcagtagtaaagtgagagtgaggcaacaagcggcatacaagggataatgaggaaggtagctcccagcagcattacttccacaaagctcgtgcacgtaccttgaaccatggatcagcacctatgagcatggatttccatccacttcaacaaactcttcttcttgttggtaccaatgtt

SEQ ID NO: 349470 - DNA, 443 bp, Zea mays
aacatagaaagcacaatagtgtaccaacaatggcagccaaaatattttgcctccttatgctccttggtatttctgcaagtgctgctacggcgaccattttcccgcaatgctcacaagctcctatagcttcccttcttcccccgtacctctcaccagcggtgtcttcggtatgtgaaaacccaattcttcaaccctacaggatccaacaggcaatcgcagctggcatcttacctttatcacccttgttcctccaacaatcatcagccctattacagcagttacctttggtgcatttattggcacaaaacatcagggcacaacaactacaacaacttgtgctagcaaaccttgctgcctactctcaacaacagcagtttcttccattcaaccaactagctgcattgaactttgcttcttatttgcaacaacaacaactaccattt

SEQ ID NO: 349471 - DNA, 428 bp, Zea mays
  unsure (1)..(428): unsure at all n locations
aattataccgctaaaacaaaatataccacaaacatagactaagatagtatttatctcaattcagcatctaaaaatacaataaacttgataaaaaatataaaagtacctaattagaggcgatttggtccttccccgcctctaataacttcatcaacattagcacgtgaatttgaacctacacattgcaagttatatatttgtntaaaatgagagatacaacatgacaatataactaatgaatgcaaaaatttataagtgagcacaaaaatataccacttgaactttggagagggagctttttcatacgactcttcaattcttgaaaatggtataaaatattatcactttgaatgcttgcaaatatctctctctctctatatagcataccatgctatgattcaaccaatcattttccatcttatttctca

SEQ ID NO: 349472 - DNA, 322 bp, Zea mays
tacgccacaatacagtccgaattccaggtaacccacgcgttcgattcaaaatcgagtcgggtactcgggtcgattttgacggggggggaactttataatctatcaaactttaaaaacaatccactaaaaaagaaattataaaaaccccaaggaaattgatatgtaaaactattaaatttaaacactaattgactaaatttttaaacattcacaaatcaatataattaatttatactattaataaatttttcaaattaaagataatatattaatataattataattaattttaatattttaaaaaatagattaattatttata

SEQ ID NO: 349473 - DNA, 311 bp, Zea mays
tcgaaggaatgcaaagcccgtgacgccacgcccgacacatgttcgacgttgtgcctgtccgccttccgcgagatggcaagccacggggtggcacctgacgttaaagactgcaacagggtgctccgtgtattgcgtgatgcggccaggtgggacgacatgtctgctgtgcatgccgagatgctccagtttgggattgagccaagtatttgcacatacaattctttgctggatttctttttgaaggttggttggtaagtctatattttctttgtcgctgtatgttgttgtattcctctttttttttgtttttt

SEQ ID NO: 349474 - DNA, 84 bp, Zea mays
tctcggatgcgccagcgccgcctggtcaacagatttttgccctgcgctggagcgtccccacgctgtttgtactgaaagcttttt

SEQ ID NO: 349475 - DNA, 112 bp, Zea mays
atcgcgagcggccgcccttttttttttttttttttaacaagaggcaaagattgatcatcaccatttatgaaaaccatccattcaccaaatatctttaataactttttatgca

SEQ ID NO: 349476 - DNA, 330 bp, Zea mays
  unsure (1)..(330): unsure at all n locations
cacagagtttgtacttgctgatggagaggagacgagcagctagcatcagatgcaaggctaaaatgcttgtgttgccaaagaaatacttgtgtagggcttctacatgcaatgttgcatgatggttttgctcttgtaccatgccttatatgcacagctattgcagcagttgtgagctttccttgttaatatctattggatcgttccatagacttggttttgatatctgccgatgctgattgacctctctgtccaattgaaccggaagttgtgcagtntaataaaaaatattaatttattttataaataaatataaatataaaataattaatt

SEQ ID NO: 349477 - DNA, 343 bp, Zea mays
ggcggtgggagatgattactttcgtggactcggctgccatggtacgggagtgacacaatcacacgagcttgcgcggctacttggtggtggcgtacgaatctggacgccttggactcccgccagggccagcagcccaactacatgatttatattaggatgatgaaaacagttctgcttgacgtgaattccactgataccatatatcagattaagtctaagattggtgctttataggggattgacattagccatcaagagcttttttttgttgtaagtcttttgtaaaaggacaacttacttgctgatttcaacttatttactaacttttgtgtctatcctttat

SEQ ID NO: 349478 - DNA, 183 bp, Zea mays
tcggttctccctctccccggctctccgccttgctgttccagtccccgcgcgcgagatcgccgccccgtgtggtccctagatcccgatggccttttgccgccgcaccctgctcaaggttataatcctggtcgatagttgatgttttcatttctttattttttagatttatttacatctgtattt

SEQ ID NO: 349479 - DNA, 171 bp, Zea mays
tcttttttcccccgacggccaccttttccagggggagtactccctggaggccgggcgctccgtcctcttcttttttttctctccttttcttttatttctattattaatcctttaattctcttactttattttttttctttttcactttttattatttctttaatttatatt

SEQ ID NO: 349480 - DNA, 425 bp, Zea mays
tcgttttgctctgggattcgtgtaaatgacgcagagaaggttgtgaagattggaggcattttgctgctctaaggtgagtggctatcgttttatggatctaccttctttttttttcttctttttttttattcttttttttaatttgcttaattttgttgaatcttttaccttacatcccttttgttgtttatatctatatcttttatatttctttatttattattttttcatttttttatttttttttattttttttatttttattttattatttcttttttttttgtttatttttttttttttttttgtattttgtattttgtttttttattcattttttattttttcatatttttttttattaattgttaatttctttatttttttttcttttttattattttttttttattttttataatttt

SEQ ID NO: 349481 - DNA, 146 bp, Zea mays
ggttgccagccggcggttgcttcactcgctcgctgcagccgcgcggcgatgacggccaccgccagctgcttctccagccccgtcgcgtgggcgcggcctttcgccggcccctcaggtgcgagtgcggccttgctcgtggcccggtt

SEQ ID NO: 349482 - DNA, 217 bp, Zea mays
  unsure (1)..(217): unsure at all n locations
cctctttttccttccaccaatggaagctctcacagcccgctcctccgtactctcgccgccggggattgccggagacacctcgccctcccttcccctgcccctccgccgagcctccgccgcgtttcttgggcctcgcaggagcccctccgccctcgccatctccacgcgctggctgcgcgctccgcctngacgcggaggccgcctgctcgcgggggaa

SEQ ID NO: 349483 - DNA, 209 bp, Zea mays
  unsure (1)..(209): unsure at all n locations
gttctagatcgcgagcggccgccctttttttttttttttntgnaagaaacagggccacatttccaaacatctgtcaaacaaacatttttaggggtcctgtaacaacaaaagctccataaccaacttttacggtatgcataatccaacaaaccggtgaatattcaagactcagaatattgtagacacgtatctatggaacagctatttat

SEQ ID NO: 349484 - DNA, 272 bp, Zea mays
tcgttgagaccaactagcaccatagaaagcacaatagtgtaccaacaatggcagccaaaatattttgcttccttatgctccttggtctttctgcaagtgttgctaccgcaaccattttcccacattgcttacaagctcctatagcttcctttcttccctcataccttttaccagcggtgtttttatttgttggaaaacccatattgtttttacctacagtgtctcactaggttttttttaaattggttattttacctttttttcactttttg

SEQ ID NO: 349485 - DNA, 54 bp, Zea mays
gcggatccatcccgggtcccgatccggggcctcttctactagtacggaggctag

SEQ ID NO: 349486 - DNA, 203 bp, Zea mays
atcgccttctccctgttgagatttcagagatggcgccgatcagctgcccggtggagtgagctggtttctttgtttttttattattagggcggattttttttttgtaagtgacttgtttttgtgttgttttattttatttttttgtttattatattttttttttattttttatttttatgattttttttatttttttttaattt

SEQ ID NO: 349487 - DNA, 248 bp, Zea mays
  unsure (1)..(248): unsure at all n locations
gttccccccaaccctcaccgccatggcgaccaccgaggactccgccgccgcggtcaatgcccgactcctgttcgccctccttgagtcccagcagcaggtactctctgactgccacggggcctggtcgagcgccctcgcacactttgcctcgcgcgaggaggacctagcctcccgctccgttgcactcgacgaagccctagccngccgcgacgtttccacttccgagactttggcagcgctcgaggccc

SEQ ID NO: 349488 - DNA, 268 bp, Zea mays
gccaggtcttccggcttttctcctgacgcggcgcccatccgatgcctgacgccgcggtctcctggtccttttccttgtcggtttcgttgctgtctccgccggagtgaacccttcttacggatacttgctctttgtcggtgggtcattatcttcgctggttattatgtttgttgtctttttctggtatttgtgtttcttttgtatttttgggtcttttgttttaattttatttgtttattttgtttattttgttttggttcgggaacat

SEQ ID NO: 349489 - DNA, 207 bp, Zea mays
gtgcactacctaagggagatgcgcatcgcgcacttcgtggtgaaggagccgagggtgatctgaccccactgctcggtcgattcttatgatttgtctaactgccactatctattcttcatcggccaccttacttcttttcctgtgccggtcactttcttaatttaaaactgtttcacttgccacgctttttgttttcctacctttttg

SEQ ID NO: 349490 - DNA, 287 bp, Zea mays
  unsure (1)..(287): unsure at all n locations
gtcggatcgaagatcattgaagttgacggcagtttgagagaggatggtgctcttcttaatggtttccaaacgctgcttggtttcttgatcgtttttgtgttcccccccccccctcctcccgtttgttttgttttgttattttaatttttttattttattttatttatttttttttattatcatatccttttaattttttttatttcaatgttcattctttttgaattagtttaaatttaattttttctttaccctaatttaagattaatatgaaataaaaanaaaat

SEQ ID NO: 349491 - DNA, 501 bp, Zea mays
tgtcaagaccagccaccgtctcggggtgcgccccgtcattgaaatgggcgcgaatctttacaccaaaaacgcccttcattttagctccacaatcggtgtaaatagcaaatttccccttttttttttttttttttttcccccccccccccacgcagaaatatataaaatatatttttatacttttctatataatttatatagtacaaattttatatttattttttttttttattttttcttcccctcttttttttcccgattataatgaaaaaaaaagaccccactttattattctgccccccccttttttttttttttccctcgtttttttttttaaataattttaataaataagaaaaatattaataatatttatagtatattatttacgattcatatttaaaattcatatattatattttatataaaataattattaataaaatttaattaaatataaaataatataattaattattcccccccccacccccccttttt

SEQ ID NO: 349492 - DNA, 116 bp, Zea mays
gtaccagaagagcacggagctgctcatccggaagctcccctcccagggcctcgcacgtgagatcgcccaggacttcaagacggtcctggggttccagttctaggccgtggtggggc

SEQ ID NO: 349493 - DNA, 177 bp, Zea mays
tcgttccaacatacagctaactggcgagccgtggacgctcgtccagctttggtggcctactaacgatggcttctttttctttcaatgtcatcttggtccaaaaattgaaaagcattattgatttcaatttaatgaaaataaattatattaaagaaaaaagaaacttattaggtcctt

SEQ ID NO: 349494 - DNA, 405 bp, Zea mays
cttatttgcaacaacaacaactaccattcagccagctatctgctgcctacccccagcaatttcttccattcaaccaactgacagctttgaactctcctgcttatttacagcagcaacaactactaccattcagccagctagctggtgtgagccctgctaccttcttgacacaaccacaattgttgccgttctaccagcacgctgcgcctaacgctggcaccctcttacaactgcaacaattgctgccattcaaccaacttgctttgacaaacccaacagcattctaccaacaacccatcattggtggtgccctcttttagatttcttatgagttatagttcaataataaagttttttggctgatgtttgaggcttcccagaaataagaaagtacatttctagatt

SEQ ID NO: 349495 - DNA, 178 bp, Zea mays
  unsure (1)..(178): unsure at all n locations
tgggttctagatcgcgagcggccgcccttttttttttttttttttttttttttttnnnttnnnnnnnaaaccgcgaacactatttaattcattcgattattattaaagaaagccccggatacataaatgggaagaccggtgaagggggtatttacaggttctagcctttagctggtcc

SEQ ID NO: 349496 - DNA, 236 bp, Zea mays
  unsure (1)..(236): unsure at all n locations
gcttcttcttccttagcgccttcctcttgtacggagatccacatttcctgtgctgctagattcttctagtgtctttctctagtatctgatcacctgcttgctgtctatcctatattctgtctcaaatcatagtttgtgttggagtgaattgagtgtgagttcgncctcgagattgagtgctgttaacaattggtttcagaggagtcgattctcggttagctccaatgcatcccgtt

SEQ ID NO: 349497 - DNA, 276 bp, Zea mays
tatatctcctaccccccccgcttcgggttcggtttcgagaggttctccggggttcgttttcgaaccggaaccactattgaattcatccgattattattaaaaaaagccccggatacataaatgtgaaaaccgttgaagggtgtatttacagcttttagcctttagctcgtccttgccccaacccaagtttaaataatactcttacaaaaaaaggcttgaaaagctctttatttattttcctcctccatttccatttaacccttttactaactcctt

SEQ ID NO: 349498 - DNA, 169 bp, Zea mays
gtcgcgcgtgtctcctctctcgtcgtatgtcataaacgtgtgcaccggtgccgcgcgcacgcagggaggatgcaccaccatgacaagggcggcggcggcctggcggcggtggcgctcgcgcacgcccttgtgctcgtggtcgccgaggggtgcgccttcaacatttccg

SEQ ID NO: 349499 - DNA, 241 bp, Zea mays
tctttctccataacccgaggcttccaggcctgggagccatctccaccagcgtggtgtcctcctttcctcccttttcccactcctaccctctcagctccgcctccactgtatcttcctccattcatagcctattcttgctcttctttttctagtccataattttacttccaatcttttttcttttttttttatctttttattttttacttctaatattattttattttattcttatttcttt

SEQ ID NO: 349500 - DNA, 209 bp, Zea mays
tcgcccacgcgtccggcgggaccggagcctggccgctcgcgttcggtggaatcgccttcccgtcgacaccgagcgagggaagcgaggccgtttctgatgctccagtccctttcataattcctcggatgccgtactaaattaataaaccatttgcttctacaagggaggtacttgtccaggttacacatttaatgccatcctacaagata

SEQ ID NO: 349501 - DNA, 247 bp, Zea mays
cgtttcaaatccatccatcctcgtttcctccgtcccgcagcatctcaaccccatggccaagatcaagatcgggatcaatgggttcggcaggatcggaaggctggtggccagggtggccctgcagagtgacgatgtcgagctcgtcgccgtgaacgaccccttcatcagcaccgactacatgacctacatgttcaagtacgacactgtgcacggacagtggaagcaccatgaagtcaaggtgaaggac

SEQ ID NO: 349502 - DNA, 154 bp, Zea mays
tcgtccggggatacagttcctcaccgacgcgtgcgttgtgctcttgaccaagcagatcccccacatacttagttagcccttggtcatccatgtattggccgtcgtattctcgaacaacggaggctgtggatattgggtcgctgattggatctgc

SEQ ID NO: 349503 - DNA, 275 bp, Zea mays
  unsure (1)..(275): unsure at all n locations
tcggccagcgggtaccctttcgccgttatgggttttttctaggggtggggtggtgnttttaatatattttttatatttttatttattatcttatattttttttatattatttatttttctttaatttattattattttttttttatatatttatttattttatttttttttataatatttatttttttatatatttataattgtttttttattatttcttttatttaattattcttttttttttttttattttatattttttatttttttagctt

SEQ ID NO: 349504 - DNA, 271 bp, Zea mays
tcgggaaagggaaggaagcatgttcgggcaccaccacggccacggcgggcaccaccaggccccgccgccgcacgagcagacgctgttcaggatcttttgccgtgctgactaggcttactgttttatcgtgcgttacgatcttctgttttcttttttcttattaattttttatttttgtgtctatttttgtttcatttttttttttttttattttatattttattgttttttttattttcttttctatattgtttattttttttacattgtt

SEQ ID NO: 349505 - DNA, 269 bp, Zea mays
gcgaggtggaggagaacatggcggcgtggctggttgccaagaacaccctcaagatcatgcccttaaagctcccgtccgtgggtccattatgattgccgtgtgcgcatgaaggctttgacgtttctagtgatcatgtcgtctttctgatcttggtatcttttggtataggtcttgttgaaggtgatttttttttattctctgtttttaatattgttatttttcgttcttcatttattaggctaagttctacctcatttttgttttttttt

SEQ ID NO: 349506 - DNA, 347 bp, Zea mays
ctcgctcccgcgcacttgcccttgagttttgagaactcgcctccgtgacctagcaattccgccgcattctttgctagccctcggtcatccatgtataggccgccgcatccccgtacaacggaggctggggatattgggtcgctgattggatctgcagagaggcttcttccttcccagtttgtgccaggacgcctggaacaagagccaggtagaggtagggacgaggtcgactggatgccagacgatgtgtccaattctactccatttcacggttgttggacaaatatggggggcggtttcctgaggaggaggaagggggagagtatttatactttttttttttacta

SEQ ID NO: 349507 - DNA, 51 bp, Zea mays
ttgagcgacgtatttaattaattagggggggggttaatgaaagaggggggg

SEQ ID NO: 349508 - DNA, 202 bp, Zea mays
tcgctgggtcttcagaccattagctttatctactccagagcgcagaagaacccgatcgacaccatgagggtgttgctcgttgccctcgctctcctggctctcgctgcgagcgccacctccacgcatacaagcggcggttgcggctgccagccaccgccgccggttcatctaccgccgccggtgcatctgccaccttcggttc

SEQ ID NO: 349509 - DNA, 67 bp, Zea mays
caagttcaagaccgcgagcggccgcccttttttttttttattttgggggggtttggtttttttgggg

SEQ ID NO: 349510 - DNA, 102 bp, Zea mays
caccccttgaacgcgatataagcgttttccattcggagccctaaacctctctttccatactcgcggaagccaccaccaccggcaggggaagcggaaggggag

SEQ ID NO: 349511 - DNA, 290 bp, Zea mays
gtcgccttctccaacgggaaatagccattaccgaaggaggcccgtcagcagggtcggggcaaaaatttcaccgcgcgcgatcaagcgattgatgcccccgcatggcgtccgtgccgttgccctcgccgtccaagccgtcctcttggtcccctgttccggtctggccccgccttttgtgtatttcttttttcggtttgttttgctgctttctggcctcttttttgtcgttttttatttgttttttttttctttcttttttttggtttttgatgtttttttgtttttttttt

SEQ ID NO: 349512 - DNA, 271 bp, Zea mays
tttttcatctgcgtacacggtctccctcttcctgtcagtagtagagtgagagtgaggcacctatctttaacacattgcttaacatgatttagatttctttcttcttccttttttatatttttttatttttacttatttatatattattcacttatctataatctttatctatatttattattactattttttttttatttttttcttattcttttttaatttttctttatttttatctatttctcatttatttctaacttttttttttcat

SEQ ID NO: 349513 - DNA, 188 bp, Zea mays
tcgtcgtcctaccgccttcttttcttgtctcgtcctcctcgcgactatggccgccgccgccgaggtaaaccccagccccaacccgccgccaactacagccttcggcctctccaagaacaagacgcgggaggccgaccgccgccgacgccgtctgagtaaggccaagaagaacaagtccgttactgagg

SEQ ID NO: 349514 - DNA, 173 bp, Zea mays
gcccgacggcgacgccctactgctcgcctcagtgccagtcgttgcggcagcagtgttgccagcagctcaggcaggtggagccgcagcaccggtaccaggcgatcttcggcttggtcctccagtccatcctgcagcagcagccgcaaagcggccaggtcgcggggctgttggcg

SEQ ID NO: 349515 - DNA, 70 bp, Zea mays
tttcgcaggacaggagaagcttgggtctccgatcctccccacccctctgtgggtcttttccccaccgcgt

SEQ ID NO: 349516 - DNA, 498 bp, Zea mays
tcgctcggagcggaagggtacggtccgtcggatgttcttatttggcaccgccggctacttctattataacttctttctctttcctacttctaatttacctttttcttttttctcatttcaatattttttctatttaaatctatttttactttaatttataatttatatattttaatattaataataaataattatttatttaaattttatcatttattaaaataatttattattttataaatttaatttaatttttttttttttatattttactataatataattatttattttatcttataaatataatacttacatattatatattctatatttaatttctatatatataatttaataaataattttcttttcaatatttatataatatattatattcattaatgtcattattattttatatatataatattcaatataaattaatatatatattattattattatataattattaatatatatttatattatata

SEQ ID NO: 349517 - DNA, 158 bp, Zea mays
cggacgcgtgggcgtacacggtctccctcttcctgtcagtagtagagtgagagtgaggcagcgagtgggagacaaggggaaatggggaagggagcgcaagggagcgatgcggcggcggcgtgcggcgaggtggaggaaaacatggcggcgtggctggt

SEQ ID NO: 349518 - DNA, 136 bp, Zea mays
gccaatcgcccttggctatgctactggatggttcatccacttgctttgctggatgaagcacttgatgatgatcttgagaatgatatcatagacttcttagctcgatgtcaggataaagatggtggataaggtggtg

SEQ ID NO: 349519 - DNA, 110 bp, Zea mays
tcgcacaggggtcaggtcagtcgcctacgaaattcaatagcacagcgagagccaaggaagaagaagaagcaagcggagcgccatggcggcgtccaacggctagggccacg

SEQ ID NO: 349520 - DNA, 160 bp, Zea mays
gtcgggagactcgatggggaactgagcggagcgagggcattgccgggagccgttcggctccgccagccggagcgccggccgtgtcttgggctgtccagtttgcttgcgccgcgagcggttagacgcgagaacgcgacagggcttttggatcccctagagg

SEQ ID NO: 349521 - DNA, 213 bp, Zea mays
  unsure (1)..(213): unsure at all n locations
tcttttttttcgttccatttccccatctcccagagccaattcacgagttctggcggggtttcctacaagattctcttatttnataaaattttttataataatttttatatatatatattatttatttataattatacttaatattaatttataatataaatcttaatatattatatatattattattattaacattctatattttttaaataa

SEQ ID NO: 349522 - DNA, 153 bp, Zea mays
tcggcttcgctcccagtatgcctcgcagacgtccaaacagaacccgggcgctaaccagcagctggagatcgagatgaccgctgagaaggctcgccgcctcatcacatctgattgtagaggcggaggtggctattccattttcatggcttttgg

SEQ ID NO: 349523 - DNA, 276 bp, Zea mays
tcgtgtagagggataatattttggtttggggggggttacaaaattcttggggggggggtttaaattattttagtttctttagtgtctttttattttttattatttatttttttttttttatttgttttttttgtttttttattttattttttttttttttttttttatttatgtgtttttatagtatttttttcttttttttgttgtttttattttttttttttaatttttttttttctattttctttttttttttttgtattttatttttttttt

SEQ ID NO: 349524 - DNA, 64 bp, Zea mays
tcggtccaaagccgacgaggataaagaggggcccgactgcgcgggggggggggagaggaatcat

SEQ ID NO: 349525 - DNA, 354 bp, Zea mays
ttcgttcggttgccacggggcttgaagctttggggtatatttatcttcgttggtgttccttcttttttttttttcttcaagctctttttattttatttttattatttttttttttttcttttttttttatttcattatcttttttttttttttttatattttttttttttatttttttttttttttttttttttttctttttttttgtaatttttttttattttattttttttttttatttttttttctttttccttttttttttttttttttttttattttattttttctatttttttttttttttttttttttttttttctttctttatctttttttttatttttttttttt

SEQ ID NO: 349526 - DNA, 312 bp, Zea mays
ttcgttcggttatttccctccgctgagcaggcgcggtgtttaaccgtcgggggggcggtacatcatcttttctataattttttttttttgttcattccttattattcattatatttatcttttaatttttttttattttttttattctttacaaaattattattattatttctattttttttatatatttttaattttttttatatatttttatcttatttcttttttttattattttcttaaatttttttattattatatatattttatttttatatattttgtaattttttttttacctatatatttaat

SEQ ID NO: 349527 - DNA, 94 bp, Zea mays
gtacacgagcgttgccgccgggagagtgctcaacggagtcgcgtactggacgttcagggacttccctgtgcgtgagggtggagcggaccttaac

SEQ ID NO: 349528 - DNA, 176 bp, Zea mays
ttttgtgctaacattttgaccaccaccctatggttctttatgtagacagctgtttctattgttcctggctttctccttggctgttgaagcattacatgcatttatgcaagatgaatcggagcacaagcattatctgattgtttctgctgtcaccaatcttttggttaatttacttt

SEQ ID NO: 349529 - DNA, 468 bp, Zea mays
tgattaatttattggttgccaatgttgaatcaatgattaaagcagaccggaggatcacatcattgaaacaacttcagggtcatatttggaggattggattttataataaagagtttcattgtgtttgttttctttttactattcttattttacttttttaatatttttctttttttttttatatattattattttatttctttttcttcttaattttttcatattatatatttattatttttttcttatctaccttttatttatatttctttttatttttataatgtattttcatcttttatattttttctttttatcttattattctcttttatttaacgtatatttttttatttctttttctattattctttttatacatgctattttatttttcttttatatattatactttcttaatattaattaatttatatttcataatattcttatttttaatttatttat

SEQ ID NO: 349530 - DNA, 131 bp, Zea mays
gcgtccagcccgtacgccgcgcagccaacccagcggacacgatgcaggcccacggcatcgccatccgcgcccgcgggccggtggcggcgacgcaggcccccgcgcgccgacggcaatgccgcgtgtctgcg

SEQ ID NO: 349531 - DNA, 92 bp, Zea mays
tggaccaacccttccgttaggaggttaagggcttgtgcttcctcaggtggtacttgaattgatgggggttcccaaaagttggttgattccaa

SEQ ID NO: 349532 - DNA, 319 bp, Zea mays
caagtgttccgaggcattgaacagacaattcaatatgggggtcactgctactcaagttgaaagacattacaggcattataaagagaattggaagtttgttgctgcagccttaagcaagagtggtaatacttttgacacaacaaggtctatggtactcatatctgaatcagagaaagctaacctaaaggatagggcaaggaggctcctttctaagcctatcaagtttttcaatgagatgcaggagttgtttattgacagcagtgctgatggttttttagcattggatgttccatcctgcatgaatgaatctcatcctgga

SEQ ID NO: 349533 - DNA, 200 bp, Zea mays
ataagacagtgaatggcagttttgttcgaccatccaatgctgggggcgatgtttatcctgtggaatcttacgagagctcacctaaccaagaacttgatgctaactggggtgttctgtataatgacaatgcaactgaacttttgttgcataccctttccattcttgctaatgactgccctggtggattaaacatctgtaac

SEQ ID NO: 349534 - DNA, 334 bp, Zea mays
tcgttcacgctcaggtcgccgtcgcgactggctagccgctacgttatgtacgtcgccccggtacctcccatgagatgagagccgcatccttattcatattcatagtctccgctctcattgcccctgttttttagtttattatctgttactcattccttttcattatttaatatttcttttctttatttttttcatatatatattatttttttatactactttctttttttttttttttaattttatatttattgatgatatcatttttttagtttactttctaatcttttgccccccctttacttctttctttcttactttctttttttcattt

SEQ ID NO: 349535 - DNA, 330 bp, Zea mays
gttcggagcgcacacacacacaaccagatctcccccaaatccacccgtcggcacctccgcttcaagatgcagatctttgtgaaaaccctgaccggcaagactatcaccctcgaggtggagtcgtctgacaccattgacaacgttaaggccaagatccaggacaaggagggcatccccccagaccagcagcggctcattttcgctggcaaacagcttgaggacggtcgcacgcttgctgactacaacattcagaaggagagcaccctccaccttgtgctccgcctcaggggaggcatgcagatcttttgtgaaaacccttgactcgtaaag

SEQ ID NO: 349536 - DNA, 190 bp, Zea mays
  unsure (1)..(190): unsure at all n locations
ccaggtttaggggtcgcaaaggcggccttcaacaagcttggtggccttttaagggacaaagctcttgtgagcgggattactggggggtcttttcctgcaggggtcaaaggttcacggcttaagtttacccaactttttattggggggctttgctggggggagnaaaacccaaaaccaaaaatattttttt

SEQ ID NO: 349537 - DNA, 221 bp, Zea mays
gatcagcaaagcggcagtgcgtagagaggatcgtcgaacagaacagcatgaagatggtcatcgttctcgtcgtgtgcctggctctgtcagctgccagcgcctctgcaatgcagatgccctgcccctgcgcggggctgcagggcttgtacggcgctggcgccggcctgacgacgatgatgggcgccggcgggctgtacccttactcggagtacctgaggcag

SEQ ID NO: 349538 - DNA, 329 bp, Zea mays
tcttttagggttcgggcgcccattcgtctcgggtggggaactagtttttggggggaaggttattttttatatttattttttttttgtaatattattttttttttttttattttgtcttttttttttgtagtatttttgtaatttttcttttttctttttttattttattttttttttctattttttttttatgtttttttttttttttttttttttttttttttgtttattttattattttttattttttttttttttattatttgatttttatattttttatttatttttttatttcttcttttttttttttatatttttattttatt

SEQ ID NO: 349539 - DNA, 108 bp, Zea mays
tcgagccaattccgctggagaggagtacacgcctgattacgcccatccacgtgctcgcctcgccccatcgcggacctttcctcggcggcgttgccatctaatcggcgg

SEQ ID NO: 349540 - DNA, 292 bp, Zea mays
  unsure (1)..(292): unsure at all n locations
tcggccgngctcttccgttgaactaggggggccttnttncggggggggggggtgcggntntncctttcnntttttttttttttttttttttttttttgttttttctcttttttttttttttttttttttgttttttttttcttttttttttttttttttttttttttttttttgtttgtttttttttttcgtatttttttttttggttttttttttttgttttttttttttttgtgtttttcttttttttttttttgtttgttttttgttttctttttctgtttttttcttt

SEQ ID NO: 349541 - DNA, 344 bp, Zea mays
aacgaatcgacaacaccggccgctgccggcgactgccacatgccactggaactctggtgccttggtgccttcgccggcgccgacctagatctggacgcgggcgaccgggcgtgacgaccaccggctgtcggcgcgccgcacgcggttgatcggccagctcccagcttctccaatctctaggctccgacgacaagcacactagattgctaagtgatggaacctttatcggttcattcagttgtggcagcgaaacggaggagcgaaatagacgagactgattcagagagcaactccttcgacaagaatgatgacatgttttgaggatgagaagacagggcttggtg

SEQ ID NO: 349542 - DNA, 100 bp, Zea mays
ttgttcgccactacaactgcagcagcaataaggcctagagctgtccctgaaggtaggaaggcgacccttgctcgatttttggagaaaaggatggaaaggg

SEQ ID NO: 349543 - DNA, 98 bp, Zea mays
ttgggataaccacggcacccgcccgcccgcccgccggtaagcgaaagcgaagcgagcaaacccagccatggagaaggcgatcgatcggcagcgggtcc

SEQ ID NO: 349544 - DNA, 62 bp, Zea mays
cttcccttagccgccgccgccgttggtttccttggggggggccgggcccggggttttgcccg

SEQ ID NO: 349545 - DNA, 119 bp, Zea mays
gcgaatcctctcttcgtccagttattcgggtcacaaaggccgaagcttaaatcacctccggttaggatctcatcagtctaattcctccttgtccttgttcgtttctggcagggctagtc

SEQ ID NO: 349546 - DNA, 179 bp, Zea mays
tcgccagcactgcacccggctacatggcggccgcctccaccctcgcgttcgggcacccaaaaaccctagccgccgccggcgccaagcccctgcccgccgccacctccacgtccgtttcctttccggccacccaccagcccgcgtgcctgttttcctcgcccgcgcccggttttttgttt

SEQ ID NO: 349547 - DNA, 89 bp, Zea mays
  unsure (1)..(89): unsure at all n locations
tcgttcgtgagaagaagangcgcatancnggggggggtgnttntgnngggggggggggttttnatttttnnttattttntttttttttt

SEQ ID NO: 349548 - DNA, 421 bp, Zea mays
tcgtggaaatgatacgcagtgtgttcgaaggagctaatgcactgtcacaggcgtggaatgaagcaccatgaaagttgtggttttttgccattttaatgaactattttttttgtaacctattcttgttcattaaggtttggtgtgttttttttttttactgactcatgaccttcattaataaggtgtttttttttacttattctgtaatatttttaaatttttatctgtttgtaaacatatattcatattcatggttgtcattttcattttttatttatctattctttttggtgggtttcttctttgtattatagttttttttattttttttttcgtttttattcttctatattattattttactttttttcttttttttttctttctgtttttttttttattattattgtttatttaattt

SEQ ID NO: 349549 - DNA, 195 bp, Zea mays
tcgagcagcagcagcagccgccatggaagccggcagcaagaagctccaggcgtgcatcctcacgctgttgctggtgctctccaccgccgtgactcccatcctctcgctgtcagtgccagacgacgaggtaccctgcgactgtaataaacctaaggctcccaagccgtcgtacccgcccatgaccaagccctctcc

SEQ ID NO: 349550 - DNA, 365 bp, Zea mays
tgttcggtgcttggggtcgaggtgtttagggagagtattgttggaaatatcggggtggttagttactgttctttttttaacaggggtgttttattactatttatttatttctttttttattagttttttaaatttttatatattaatttttataatttattttttcattttcttatttttttatataatatttttttttttttttttatatttattttttttatttatatttttttatttgatttttttttttatttttttttaattaaatttattttttttaatattttttttttattttattttttttttatttattttttttttttttatttaatttttaattatagttttaatattttttt

SEQ ID NO: 349551 - DNA, 144 bp, Zea mays
tggttacggctgctcaaaagttcggcgtcatcagagcactcgtcgagcatgcacattttgaaatggcatatgtgcccacttggtcccggatatatccttgatgttactccagagttgtttgatataatgcttcttccatccatt

SEQ ID NO: 349552 - DNA, 111 bp, Zea mays
gttctagatcgcgagcggctgccctttgttttttttttggagggggggaggaaccgaatgaaatgaaagttgctggtacataaagtctcgactggtattacatgaatgcag

SEQ ID NO: 349553 - DNA, 97 bp, Zea mays
tcgcgggacgggagtccgccttaggttgtaggctccgttcgatcataagcggcacaacacccttccgtttgcgtcgctccttcggcctcccctccct

SEQ ID NO: 349554 - DNA, 244 bp, Zea mays
  unsure (1)..(244): unsure at all n locations
actgggtcttcagaccattagcttgaggtactttagagcgcagagggggcctatctattctattagggttgttttcntttttatgtcaaatgtttgtttatattttttatccctctttatatttttttatttttatttttctattttctttttttttttttcatttactgacaattttttttttttttttttttattttttttttttttatattttcattttttactttttatattttttttat

SEQ ID NO: 349555 - DNA, 185 bp, Zea mays
atcagcaaagcggcagtgcgtagagaggatcgtcgaacagaacagcatgaagatggtcatcgttctcgtcgtgtgcctggctctgtcagctgccagcgcctctgcaatgcagatgccctgcccctgcgcggggctgcagggcttgtacggcgctggcgccggcctgacgacgatgatgggcgccg

SEQ ID NO: 349556 - DNA, 115 bp, Zea mays
  unsure (1)..(115): unsure at all n locations
tgcgttcggccgctgccgttcgatttgagagccaccgattaacccatccatccacctggccgccgccggagagtatggttgagcnncggtacacctaggtggaggtatntntttt

SEQ ID NO: 349557 - DNA, 305 bp, Zea mays
cgcttgatctaggtctcgtctagacgaaaagactcatcttctctggtactctggttgcggcagaacggtcggatctcccccaccgatggccgcctcccagtcacccacgctcctccttctcgccgtcgtcctcgccgccgtcgcaccaggcccctccagcgcgcgccacgtcatcaatttcgccccttcccgcgccgtcaaccccgcgtccctcgcttgggaccctacggcgcagcacttcgtcggtgtaggcggcggtgatgccggcctttgcggttccgactcttcttctctctgagtttttt

SEQ ID NO: 349558 - DNA, 254 bp, Zea mays
caccatagaaagcacaatagtgtaccaacaatggcagctaaaatagtgtgggcctccttatgctccttggtctttctgcaagtgctgctacggcgaccattttcccacaatgctcacaagctcctatagcttcccttcttcccccgaacctgtcaccaactggggtcttccgtattgtcaaaaccccatttttctaccctacatattcctagtttctttgctggtatctttcttacctttattatccttttctt

SEQ ID NO: 349559 - DNA, 319 bp, Zea mays
  unsure (1)..(319): unsure at all n locations
ccccgtcaccccactcactccgtaacaacctgcaccaactcctgtgaaagataaagggatcggtatatgggnnnnaactgnncctcaaattncaatgaaaccccatatagttctctaaccacattactttgttccagatgccctattttctcatccttttcaacttcatttgttccatttttacaatttcactacttctcttgttcaactnctaattttcctccactttctttcttttttttttcttcttcatcatctttttttcctctttattatccttgttatcttttccatattatttctttcttttttatttttt

SEQ ID NO: 349560 - DNA, 269 bp, Zea mays
ttctttatttggagctttcagaaccacaccgggcgaagcacattagcaacagcctaacaacaatggctaccaagatattatccctccttgcgcttcttgcgctttttgcgagcgcaacaaatgcgttcatcaccgcacaaggctaaattgctccaaggtccataattacacagttcctcccaccagttacttcaatgggcttcgaacacccagctgcgcaagcctataggctacaacaagcaattgcggcgagcgtcttacaccaacca

SEQ ID NO: 349561 - DNA, 279 bp, Zea mays
  unsure (1)..(279): unsure at all n locations
cccttctgcagcgccctcgaaactcgaaagcgtcctgtagttcaagctccgccggccaatactcaggtactcgctaatctccgccggtcacgtcgcaatggcgccaggcgctccgcgagagtatgccctcgaggggggcgaagcggcgcaggacgaagcgcccgagtcaccgcaggaacgggaagaagcgagtcagagagaagaggatggcggcnttaaggaggccgnnnnctacntggaagctcccacttaccttccggtcgggccatcttccgagct

SEQ ID NO: 349562 - DNA, 125 bp, Zea mays
gcagcttctgcttgctctggggggaaggagagagagagagagcgagagagagatctagtagagaggctagtaggtggtcctcgaacgaagatgttggcggtgttcatcggtcaggtgggggaggt

SEQ ID NO: 349563 - DNA, 137 bp, Zea mays
tgttcggccaccgcgcagccagatggtctcttgctcctcgtgcccgttcgcccccgggacaagcgggtgcaagcccaggacgacgcggaccagcggcgtcgggttcggagtcgaagcaatggcgcggagcgtgttgt

SEQ ID NO: 349564 - DNA, 230 bp, Zea mays
tcggttcctgctctatatctcagctcctccgttctgtcctgtggccccgagctgagctgccaaggatacgtacgtacgtacgtcttgagggaggttgccgatattccttttctttccttttccttttttatcttattctgaggactttatatcattttatctcttattttaattaatttttatttatatttttttatttatctcctcttttttttacttcactattattt

SEQ ID NO: 349565 - DNA, 115 bp, Zea mays
  unsure (1)..(115): unsure at all n locations
ttgggcatgtaaaggtaaatgaaccggggacaagagatacaaagcgagaggggtcaacaagtccgcggnctggtggacaactccatggccgagtcaacatccgacctccaaggct

SEQ ID NO: 349566 - DNA, 218 bp, Zea mays
  unsure (1)..(218): unsure at all n locations
tcctccttatattacttgtnaaactcacacccccccctcctaaccccccggcgccctttttacttttttttttantttatctttttcctcttttcaacccccccccctcctcccccatttccccttcccttcttttacttttttcccctctccccctctcatactttccttccaccctcccctttataaccctccccctactctcccccccccccccc

SEQ ID NO: 349567 - DNA, 225 bp, Zea mays
tgttcggcaccaccagatctggatccaaacggcggctctgtttcgtgcgctggcccgtctccctccgtctcgtcagcttcgtgccgtgcgcccgtgcccgtgcgtgccgttgccaacccgttccagctttgcccgtggccgcggccgctaccattgaaccaacttagcaaaggtcgcgttccacgttgccttggttccccaaccctgatgtttccatcccttctt

SEQ ID NO: 349568 - DNA, 325 bp, Zea mays
  unsure (1)..(325): unsure at all n locations
gttctagatcgcgagcggccgccctttttttttnnnnnnnnnggggggggggttnnttnnttnntttttttttggggtttgtttttttgtttttgtttttgtttttgttttttgtgtttttttgtttttttttttttttttttttttttttttttttttttttttttttttttttttttttttttttttttgtttttttttttttttttttgttttttttttttttttttgtttttttgtttttttttttttttttgttttttttttttgtttttttttttttttgtttttttttttttttttttttgttttttttttttttttt

SEQ ID NO: 349569 - DNA, 175 bp, Zea mays
ttcgccgtctcatcgcaaaacccagcgcctcaaagcgaccccaccgaagcgtcccagcccgaccggaatggcgatggcaccgtgcgcacccgcctccgtctcctccttccccgcccgcccagtgcgggccccttctgctgtccggccgcgcgccgccgtgatccgtgccactgtg

SEQ ID NO: 349570 - DNA, 154 bp, Zea mays
tcgtttttttttttacacacacataaatggggaacgattttatagtggtgggaggtgatttttattcctttctataacctatttcattatataattaagctgattcaactacactaaatacaatggattaatataaataaatttcaatattatt

SEQ ID NO: 349571 - DNA, 211 bp, Zea mays
gcattcctggtggtttctcctcccatcctccgtcctcgatctgagcgggggctgcttccctgcctccctccctccccttgcccagatggccgccttccgtgtcttttaaatcttccgccgcatcaagcttccctcacctgtcggctgtcctgctgctgctgctgccaatggcgaccaagggaggcatcgcgaggggcgttctggtggggtt

SEQ ID NO: 349572 - DNA, 302 bp, Zea mays
tattgagaccaactagcaacatagaaggcacaatagtgtaccaacaatggcagccaaaatattttgcctccttatgctccttggtctttctgcaagtgctgctacggcgaccattttcccgcaatgctcgcaagctcctatagcttcccttcttcccccgtacctctcaccagcggtgtcttcggtatgtgaaaacccaattcttcaaccctacaggatccaacaggcaatcgcagttggcatcttacctttatcacccttgttcctccaacaatcagtagccctattacaacatttacctt

SEQ ID NO: 349573 - DNA, 129 bp, Zea mays
  unsure (1)..(129): unsure at all n locations
tcgcgcgcgcgtacgccnncgncgngctggccttaccgaaccctaaacgggggccaccgccctcccccggaggtttatcagttcgtgtgcaaccttatgctatattcatggcctttttcgctatttttt

SEQ ID NO: 349574 - DNA, 77 bp, Zea mays
tttcggtgatcgtcgccggtgaccacgggagggagtccaaggacagggaggagcaggcttattttaagaagatgtat

SEQ ID NO: 349575 - DNA, 103 bp, Zea mays
  unsure (1)..(103): unsure at all n locations
tacctatacacatctttctcctggggggggtccttttccgggcgggggggcttncttaatacnccacccctataccttcacacctgttcgcctttcgctcttt

SEQ ID NO: 349576 - DNA, 99 bp, Zea mays
cctgaccgccgcggaccgcctcgcaggggctagccacgagacggcacattgtcgaccgtgaccgagcgtcattacggcggcgcccacgccacctacggg

SEQ ID NO: 349577 - DNA, 274 bp, Zea mays
  unsure (1)..(274): unsure at all n locations
tcttctcttctgtaccttgaggccgctaaagcagcgttgttccaagctgggtggggaggttatncatcttctttcctttccactttatctatttgttttatcccattattttcttcttttttccttnntattttttttatttatatttttttttttttaatttattattttatttttttattattttttaaatctccttttattataattctttctttattttataataatattactatattatctttattctatttattttattcttaacttt

SEQ ID NO: 349578 - DNA, 77 bp, Zea mays
ttgccaaggttgacatctttggtgtgggggggggttttttaatgggggggggggtttttttttttttttttttttta

SEQ ID NO: 349579 - DNA, 253 bp, Zea mays
ccagtttgccctcggttgcttgatgcatatgtgtgaccagaccaatctgatatccaaaaacttcttgccataataaatgaggctatcctagaaaaaagacaacaaacctttatcctgcacaacgctctaaacattagacctggtgaacataaatggccaatcaaccattctgtatttatcttgtaacacatcgaaccttactgacaggaaaccacgttgtgtttggtcagagacggcaccaacatcatatgac

SEQ ID NO: 349580 - DNA, 287 bp, Zea mays
gtgaaccgcttgaataagacaaaggtggaacggaaacctgatttaaaggctgaaagagaggctattagtgctgctgaaaaggcagaaagaaaggcacagcttagagacaagaaacgtagggaagagatggagaggcttgagaaagagaagcaggctgatatcaggagctacaagggtctaatggtccaagagaagatgacttccaacaagcaaatcgtttttggcagaatgaccttgcaggtacttgaatgaattctctacagtattatgcggactatttttaattc

SEQ ID NO: 349581 - DNA, 90 bp, Zea mays
tcggtcgaggcaaaagcattgcgaccacagacagcgcgcgcttcaaggccttgtttttttgagataacaaggaggagaggaggagatggc

SEQ ID NO: 349582 - DNA, 141 bp, Zea mays
tcgggatgcgcttgttttttgctggcaagggatagagccttctgctgagaatggtatttagacgaattgtgcgctggttctatctagggtttatttatctcgctgttggtcgttggtctagagctttgcttatttttgatt

SEQ ID NO: 349583 - DNA, 148 bp, Zea mays
tcgcccagacacagagctcgaccccccctggccttccttcgctcgtgcagccgtgaccacccgcatccccgtcagtcatggcagcggcagcaggcggaggcgcggtgctttctcttgcccaaaaggagcaggacatacagatgatgct

SEQ ID NO: 349584 - DNA, 161 bp, Zea mays
acaattttccatgggattgattgaggtccagctttttagctggcaggtcttaaggtttcagagtttttcctttcaattcatcaaggactaggccaacaatacatcgcaatgaagtacatgaagctcgtttcaaaacctgatactttctataccgaagaagc

SEQ ID NO: 349585 - DNA, 91 bp, Zea mays
  unsure (1)..(91): unsure at all n locations
tcgccccttctcgccaaaggggaagccctgcccgtacttccgttgcgggcgctactaagctttgacggttcctntgatctccacctttgaa

SEQ ID NO: 349586 - DNA, 135 bp, Zea mays
tcggcacccaacacccggagtgagcggcggcgagggatcggatcgtcggcggcgatggaggacgaggtgcatagggcagcggtgagcatttaaacttgcttgtttataggtgaattttgggtattgttttttttt

SEQ ID NO: 349587 - DNA, 132 bp, Zea mays
  unsure (1)..(132): unsure at all n locations
aagaattccctcccctagccgcggccgccgttcgtctccctgagaggtgccggtaccgaggatttgtcctatttctatgtagagaattgggttttnttattttaatctaatttatattagtttttaaataat

SEQ ID NO: 349588 - DNA, 379 bp, Zea mays
  unsure (1)..(379): unsure at all n locations
tcggaagccgccgccgctgcagtgtccatagccaccgcaggagactgagatggggggttttntttttttttttttntttttttttttttttttntttttttttttttttttttttttttttttttttttttttttttttttntttttttttttttntttttttttttttttntttttttttttttttttttttttttttttttttttttttttttttnttttttttttttttttttttttttttttttttttttttttttttttttttnttttttttttnttttttttttttttttttttttttttnttttttttttttttttttttttttttttttttttnttttttttttttttttttttttttttttttttttttt

SEQ ID NO: 349589 - DNA, 75 bp, Zea mays
tcggccgatacaaacttggacaaggggaagagagctcgtcaagctttggggggggttttatagttttaccctaat

SEQ ID NO: 349590 - DNA, 198 bp, Zea mays
  unsure (1)..(198): unsure at all n locations
ctagatcgcgagcggccgccctttttggtnttnattatatagtgggtggggtattattttttatttaaatttttattttttaattaataatttttatatttgtattgggtatttgtatttttaattttattttaatatgtattttattttttttttttaattatattttttttttagattttttattttttatttttt

SEQ ID NO: 349591 - DNA, 412 bp, Zea mays
ctgcgtacacggtctccctcttcctgtcagtattatagtgagagtggggcatcttgtggtatacaagggtaattggctaagttatctatacttttctaaatttgtttaattattctttttcaattatattatatttttattaattaattccttattattatttttcttcttttttatctttttttttttttattattatattatttatatttatatttatttatttttattttttttattttttttgtatttttttatatttttatttttttatttttttatatttttataattttatattttttattttttatttttttttatatataattttattttttttttaatttttttttatttatatatttttttattttatttatctttttattttatttttatatttattttt

SEQ ID NO: 349592 - DNA, 336 bp, Zea mays
tcgtatcagtacagcagagcaaagcaaagaggaacaccatttcccttgcctggtgtgccaacccaccaccaccaccaccaccacccacgaaggcagcagcaacccagcaccaccgatccatccatccactcgtcattcctccgccccgccgctcgccttcacccatctccgaccccgctccgccaccaaaccctaggctaccagctcttcccaccccgtgtgctccgctcccctgagggcggttcgcgcgccatttttccgtccgatttcctaaaaccgtactcccggattcgggatcggcccgcaacgggtcctcttcttgcttttagtttttcc

SEQ ID NO: 349593 - DNA, 132 bp, Zea mays
tcgtcgccgactttcgatgagcttgagagggtggggacctctggtgagggggtgggggtgttcctgcttaatttcctctattagttcgagtacagacaataggctaatttattgacattttgagtcttttat

SEQ ID NO: 349594 - DNA, 89 bp, Zea mays
  unsure (1)..(89): unsure at all n locations
tcggcgctctcactagcctngcattccgtccctgcagtgcatgggcaggccggggaggtcttttataggttgtttgttttttttttttt

SEQ ID NO: 349595 - DNA, 92 bp, Zea mays
tctcactcctcgtttctctgactgtatcctctccttcctctcctcaaaaggctgtaaaaaaatttgtttattttctatttacctactactat

SEQ ID NO: 349596 - DNA, 72 bp, Zea mays
  unsure (1)..(72): unsure at all n locations
tcggtcttcctgncagtagtataggggggggtgttttttaagggggggggggtgttttattttttttttttt

SEQ ID NO: 349597 - DNA, 262 bp, Zea mays
tcgtttgagaccaacaagcaacatagaaagtggaatccagtagcaacaatagagcaacaatggcgaccaagatattttccctccttatgctccttgctctttctgcatgtgttgctaacgcgacaattttccctcaatgctcacaagctcctatagcttcccttcttcccccataccttccatcaatgatagcttcagtatgtgaaaacccagcttttcaaccctataggctccaacaagcaatcgcagcatgcaacatacc

SEQ ID NO: 349598 - DNA, 83 bp, Zea mays
tctttctctgacgcgtgggttcattaacggagggggatacaaagtgactatgtgcgggggttgccaattccctaaacagcatt

SEQ ID NO: 349599 - DNA, 338 bp, Zea mays
  unsure (1)..(338): unsure at all n locations
cactccacgaagcggcgaagtcgatgggtttntgctggggggggggggggggttcatttttcntntttctttcttttctttttttttctttttttctttttttacacttgtttgggttattatgttgttttgttattttttttttttttatttttttattttttttcctttttttattttatttttttttttgttttttgtatttttttttgtgtgggtttttgttattttttatttttattttttgtttttttattttttttgtgttttatttcttttttttgtttttttgtttgtttattgttttagttttgttatttttttttttgtttttttta

SEQ ID NO: 349600 - DNA, 184 bp, Zea mays
gtcaaggctcatgttagtgctgggagtgatgagatgcaagcgctacgctgcgattttttccaggggataatccctgtaccattcgatcgacttgaatgccaaaacagtgtactccatcgggaacaaagttgatcctcttgaaactcacttgacccttacaccagtaatataaggatattcaaca

SEQ ID NO: 349601 - DNA, 294 bp, Zea mays
gtttcatataatgcacattagtggaccaacactggcagccaaaatattttgactccttatgctccttgttatttctgcaagtgctgctacggcgaccattttcccgcaatgctcacaagctcctatagcttcccttcttcccccgtacctctaaccaggggggtgttagagatgtgaaaacccaattcttcaaccctacaggatccaacaggcaatcgcagctggcatcttacctttatcacccttgttcctccaacaatcatcagccctattacagcagttacctttggtgca

SEQ ID NO: 349602 - DNA, 338 bp, Zea mays
tcggtcaaatccttgggttagctggaattgatctgtttaccccttgtgatgggggcgatttaagaatttctcataaattttttttacatcattcattttctttttttatatatcctttttaataattgtattatttccttttttttacttctttctactattctttttgttatctttttttttattcttttttttttataatttatactatttatttttttttatttttatttttacattatttttactatagttaaattataatttttatatttttgatatttatttttttattctttttttcttttttattttattataaatattattaaaattta

SEQ ID NO: 349603 - DNA, 253 bp, Zea mays
caccaagcaacatagaaagtggaatccagttgcagcaatagagcaacaatggcgaccaagatattttccctccttatgctccttgctctttctgcatgtgttgctaacgcgacaattttccctcaatgctcacaagctcctatagctttccttcttcccccataccttccatcaatgatagcttcagtatgtgaaaacccagctcttcaaccctttaggctccaacaagcaatcgcagcaagcaacatacctt

SEQ ID NO: 349604 - DNA, 214 bp, Zea mays
  unsure (1)..(214): unsure at all n locations
tcggttctagatcgcgagcggccgccctttgttttttttgggatctggcggggggaatttgttttanggtttttgtttttctatgattttttatagttttttgtaattattttataattttttgtttgtgtgtttgtggttgttttttttattttattgttttttttttttttttttttttttttttttttttttttttttttttttggttttt

SEQ ID NO: 349605 - DNA, 170 bp, Zea mays
gtgaggttctccggggttcggtttcgtgggtgagcggatcgagatggcggcgtcggatgttgagtaccgctgcttcttctgcggccttacctggtccactgacgaccactccctctacaacgccttcagcacctacggctaggtccttatatccaagatcatcctttatc

SEQ ID NO: 349606 - DNA, 317 bp, Zea mays
gaaacaccaaagtttggaggtgtcactgtctactatgacatgtgagatctacagcatttcaccaataaaggtcagaacttcagattactttccactccctcccttcttacatgtattccacattgtaaatattaagtttttacagacgttctttgcttcttgcaccagattttcagcgaagtcgtccagtttgcgcctcttggactgatcgacatgttcaactccggtggtgcaccttgacaatatttcaagcgttgcagattcttcagctacgacagttcatataagatgccgaggcccaggccggttgggggcgt

SEQ ID NO: 349607 - DNA, 342 bp, Zea mays
  unsure (1)..(342): unsure at all n locations
gcgtccgatttttatggaggagaaaaccccgtgtttgcgtggagaaggcaggtcggtcaacgctcgtcggatgttcatagcgatgcacaaatgggaatcgccatcgtccttaccaactccgattgggtttgtttatttaccgagagatgattattgagcccttttatgtgnttcctatttttttatggctttttttgtttccttatgnttgcttctctttatctggttttttatttttgtatagtttcttatttgttcttcattttttttttttgttgggtaggtggggaggtttatttaattgttatttttatatatttgtttttttatatatcttttttt

SEQ ID NO: 349608 - DNA, 59 bp, Zea mays
ttcccggtcgacccactcgttcggttctagatcgcgagcggccgcgctttttttttttt

SEQ ID NO: 349609 - DNA, 120 bp, Zea mays
ttttcttcttaaccccgtttcttcgtgcgcaccgcttcttcaacagggggccccaaaaccctccttaaattttcccttaattcccccaataaaacttgccggccggcaatcttcaaggga

SEQ ID NO: 349610 - DNA, 237 bp, Zea mays
attttgagcatccagaaacacaccaagcgaagcgcactagcaacatcgtaacaacaatggctaccaagatattatccctccttgcgcttcttgcgctttttgcgagcgcaacatatgcgtccattattccacaatgctcacttgctcctagttccattattccacagttcctcccaccagttacttcaatggccttcgaacacccagctgtgcaagcctataggctacaacaagcga

SEQ ID NO: 349611 - DNA, 117 bp, Zea mays
tcgctcattcggcgccgcggcaccccctagtcgtaactcgcgatgggccggagcaaggtgcacgagctgctcggaaagagctagacggatctgcatgcgcattttaaggagctttaa

SEQ ID NO: 349612 - DNA, 305 bp, Zea mays
  unsure (1)..(305): unsure at all n locations
gttctagatcgcgagcggccgccctttttttgtgtnnnnnnnnnnnnngggggggggnnnnnnnnnnnnnnnnnnnnnnngnnnnnntgnngnnnnnnnnngngtgtgggtgnnngttnnttttttttgtttttttttgtttttttttttttttttttttttttttttttttttgttttttttttgtttttttttttttttgtttgtttttttttttttttttttttttttttttttttttttttttttttttttttttttttttttttttttttttttttttnttttttttttttttttttttt

SEQ ID NO: 349613 - DNA, 122 bp, Zea mays
  unsure (1)..(122): unsure at all n locations
cgcgccgntgccgcatctcctctacaggtaagaaggagagaaagagggcgaaatggtgaagcacaacaacgtcatccccaacgggcacttcaagaagcactggcagaactatgtcaagacat

SEQ ID NO: 349614 - DNA, 155 bp, Zea mays
  unsure (1)..(155): unsure at all n locations
ggttaatttgcttgaatgcaggcataaatgctgtttaccggcggggttttcnactgantctcaaatttctttaaacaaaagcttattttacaaaatctttggtgtcccccttaaaagttaatccaaacgctcactttgcttactttgctctttat

SEQ ID NO: 349615 - DNA, 291 bp, Zea mays
tcgcaacatagaaagtggaatccagtagcagcaatagagcaacaatggcgaccaagatattttccctccttatgctccttgctctttctgcatgtgttgctaacgcgacaattttccctcaatgctcacaagctcctatagcttcccttcttcccccataccttccatcaatgatagcttcagtatgtgaaaacccagctcttcaaccctataggctccaacaagcaatcgcagcaagcaacatacctttatcacccttgtttcaacaatcgccagccctatctttggtgc

SEQ ID NO: 349616 - DNA, 280 bp, Zea mays
tcggcccccatttaggctgcccctgcctctgtccaagacgctagcagctcccaaatggcgcctagattttttccagtcatctccatggccgagcagcagctctgctcgcccccctccttctttttcccttgcgcagcagcaagaagcccctgctcgtagccttggcgtccaacttcgctgcgcagcggtgccgatccaaaacagcgtccccggatcccctccgcactgagtgctttaccgtatctgcgcagccccaacattgacgccgttcaccttggtg

SEQ ID NO: 349617 - DNA, 174 bp, Zea mays
gcaacatagaaaggggaatccagtagcaccaatagagcaacaatggcgaccaagatattttccctccttatgctccttgctctttctgcatgtgttgctaacgcgacaattttccctcaatgctcacaagctcctatagcttcccttttttccccataccttccatcaatgata

SEQ ID NO: 349618 - DNA, 381 bp, Zea mays
ggatagcatcgtcatcgcaaaatgcaggctctcctgctccccgcgcgggccgcgccgccgacgccggcgatgcttcggcagcgtgcggtttctgcctccgcgtgtgcgtcgcaggtttgccgccccctattcggatctttcctatgctttattgttttataaagttcgaaagttttttttttattttattttatatttatttcatctttttttcaccgtaataatattattttttttttcttttatacttatatttaacacaatcgtaagaattacctttttttttgttggggtgggggataattacatattttttttatatatttttatttcttattttttattgttactttatatatcatataacttaaagtatatttc

SEQ ID NO: 349619 - DNA, 422 bp, Zea mays
acccgtcctttggagaccacctggcaccttagaaggcgcgttagtgtcccaacattggcggccaaaatattttgcctccttatgctccttggtctttctgcaagtgctgctacggcgaccattttcccgaaatgctcgcaagctcctatagcttcccttcttcccccgtacctctcaccagcggtgtcttcggtatgtgaaaacccattcttcaaccctacaggatccaacaggcaatcacagctggcatcttacctttatcacccttgttcctccaacaatcatcagccctattacatcagttacctttggtgcatttattggcacaaaacatcagggcacaacaactacaacaacttgtgctagcaaaccttgctgcctactctcagcaacagcagtttcttccattcaaccaactagct

SEQ ID NO: 349620 - DNA, 220 bp, Zea mays
gtcgtctccgacccactcagtcgagggccggacccccatcaactcgccgtggcccaccaccgttctactatcaccctacgtggccgcaccccaaccctccaacgccttccgcctcctgctcctactcaccgaggccgtctccgccggtactgccttcgtcctgcttcgcccgcccatcaccgtctggaccgtgattcctgcaccgtgcgtacgatcttca

SEQ ID NO: 349621 - DNA, 380 bp, Zea mays
  unsure (1)..(380): unsure at all n locations
ccggcggctccggcgacggtgagtcgccggcttccatgacaccggccggggtttgtttcnctcagaaccatctccatatgctgctaccgcccctttttctttcacccttccatttgttccttatgtacaccgacttcctattcttcttttatttgccttatctgcttctgtgtgctatcttttttaatcccctttttatttatgttaccattcatctatctttaaattagtcttcttctattattttttttatttatttctaaaataacttcttactttattatcggccttattttcatttttctttctttatatatatatttttattttacctaattttttatatttcttttctactttattaatagatattcttattt

SEQ ID NO: 349622 - DNA, 272 bp, Zea mays
cttggtgccgcctcaccagcttgccaaatctctaaccctaggtgcagcggcggagatggcccccaagcgctcggctccacctccgccgcctccgcccccggctgcctgctccgaggagaccgcctctggttcgggctccgaggaggaggaggaggaggacgactgcccgcctccattcgctgggagaacaactgtccgggctgtcagccttgcggggactatagatgacctggccctccgtgtgccacagcctaattaagcccttgccgaca

SEQ ID NO: 349623 - DNA, 408 bp, Zea mays
ttttagagaaatgcttttgatatagtgtttggttccggagtatggtgggacagctcctaattttttgttgtttggattggttccatgtagtatagagttttccaaaaaaggaaaattatgctcaaatgtcggaccatcccgctctgcaaaatctctcggacggagccgctccctggaatgtagcctttctatccaattggctccggaaccaatcactactgttagttggttggtatccgctgctcttcgtgagaattatgaaaacgttatatgcctgtatttggcatagcctgatgcaatttatttgaattggcaaagtagcgtggcgttgtccgcatctagcgtttattaatacctacttttaagatcaatggatgactaagtgccctagcttttgcagtgccagga

SEQ ID NO: 349624 - DNA, 159 bp, Zea mays
tgtcgagcggccgccctttttttttttatgctgtctagtttttgaacttgcgttgagtcgagaaaacaaaatagaacttgtgtagccgaggggtgaccttttcccttgtgccattcttttccctgtcgtggtgggtggtgggctgtggctgatgcttat

SEQ ID NO: 349625 - DNA, 301 bp, Zea mays
gaccaaagcagaccacattccttcctaccaatcgcctacccaaatcggcggtccacccggaggcggggatggagacgtagcatgcaaaccttgacaagatgcatatcctccatagctaccggatcgtttggtacaccgacgtgacgaacgccatccaggccgacttcccctactgatgactgacgctgaggtggtgaccatccatcgaccctgcctagcaaatctcaccttcacacgtttctgcggcctttgattctgcatcccatagccttccgtagatccgaggacacttaatttgacc

SEQ ID NO: 349626 - DNA, 352 bp, Zea mays
attagctttatctactccagagcgcagaagaacccgatcgacaccatgagggtgttgctcgttgccctcgctctcctggctctcgctgcgagcgccacctccacgcatacaagcggcggctgcggctgccagccaccgccgccggttcatctaccgccgccggtgcatctgccacctccggttcacctgccacctcggtgcatttcccaccgccggtccacctgccgccgccggtccacctgccaccgtcggtccatgtgccgccgacggttcatctgccgccgccaccatgccactaccctactcaaccagcccggcgctagccttatccccagccacacccatgcccgtg

SEQ ID NO: 349627 - DNA, 215 bp, Zea mays
tttggcaacaagctcctttgcggcaaaccactagaagtggaatgcgacagctcggggtcgccgcgcaccggcatgtcgaccatgatgaagatcgccatcgcgctcatcatccttggcgtgctgctctgcgtcgcgggcatcaccacgggcgccctcggcagccggaaaaggaagccgaggcgcgcggcctccttaggcttgcaggctttctcctg

SEQ ID NO: 349628 - DNA, 255 bp, Zea mays
caagtccaagaccgcgagcggccgccctggtttttttattacagggggggggaggcccccggaggccaccattacaacaccttgctcatatacctgtccaccgaccataaggaagacaaaaccgatttccccaacgccaagggttgggagtcccagcccaaggacggcactttctacgagtgtgcacacaaaggatggcagtgaaaccattgaaaggcaacgccatgcactatttcagcctacaacccaactgca

SEQ ID NO: 349629 - DNA, 274 bp, Zea mays
gaaacgtggtgatattcctcttcaaccggggctatgagaaccaggactggtccaaggacatgcgcttcaagacctaagtaacggacgtggagggtagccttgctttggacctgttcaacaagggcagtttgttagacatgaagcactacctagatcagtacgacccttggaaggtggtgccgttcaaccagttttactgcacgagtctttgctgggtaccctgagcgaccacttgttcatgggcttacgatgcatgcgtatggtgaacaacatg

SEQ ID NO: 349630 - DNA, 515 bp, Zea mays
  unsure (1)..(515): unsure at all n locations
caacgcgtctcgctcaatattctaaannagttaaggctagganngaaggctataacnnttcttggcttaccaagacacctattgctcgaggtaaagcattgtgctcatgatnaatatggcacacttgtttgagcgaaggtagaaagaaagcttctcgaggaagggctgcgtgcctgcttttcctgggtatcattgncctgtcaaagatattcggaaagatctgaagaggtctttgcgaaaagattcnntggttcctccagaagctatatagatttgacctcaactgggaccccttaccttctggaagtgaaccgcactgagagaaggtctataatatgatanntcaatggaggaaggaagcttngcgcccttaatttttgcacctatcccaaaggttattgtgattggccttcttcaacttcttgcaccaaataagctttttgggaagttacctgggttgacacctgcagattgggcttggcttccgatcttggcacaagttgatgtcaaaattt

SEQ ID NO: 349631 - DNA, 445 bp, Zea mays
gcccacctagcaccatagaaggcacaatggtgtaccaacaatggcagctaaaatatttggcctccttatgctccttggtctttctgcaagtgctgctacggcgaccattttcccacaatgctcacaagctcctatagcttcccttcttcccccgtacctctcaccaacggtgtcttcggtatgtgaaaacccaattctcaaccctacaggatccaacaggcaatcgcagctggcatcttacctttatcacccttgttcctccaacaatcatcagccctattacagcagttacctttggtgcatttattggcacaaaacatcagggcacaacaactacaacaacttgtgctagcaaaccttgctgcctactctcagcaacagcagtttcttccattcaaccaactagctgcattgaactctgcttcttatttgcaacatcaacaac

SEQ ID NO: 349632 - DNA, 344 bp, Zea mays
  unsure (1)..(344): unsure at all n locations
tcgcgccccgccccgcccctcaggtcccagctctcgctctccagtctccaccggcggttcggtgctcccttccgggattcccctccggcgagcttggtcaacttcgctccaggtttccacgtcgtccatggcgcttgtcgtgatgtgtgggcagccgtgcagcggtaaaacagcagccgccacttgccttgctgtgggctgcactcctnctngcctgacctcactgtccgaatcatcgatgagtcatccctccatctcaggcgcaacgatagctacaaagatatggttggggagaaaaacttgagagggcttcttagatcagaagttgacaggtctgtgtcacg

SEQ ID NO: 349633 - DNA, 279 bp, Zea mays
ttcttttacctgggacatttatcgactctggagggatagtcataaactaaatctccatatgcccaagagctgagctggtaaatataggatcacatgttaacactgatgccatggataccgtcgcgtggtgtgcactgccttgcaaggggaaatcaatggccaccacttgccttgccttattctggaattcttattggctgacgtgactgggcaaatcattgttacaggacccccccattttacgcgcaacaattgctacaaagacttggagcttcaaaa

SEQ ID NO: 349634 - DNA, 367 bp, Zea mays
cttcagaccattagctttatctactccagagcgcagaagaacccgatcgacaccatgagggtgttgctcgttgccctcgctctcctggctctcgctgcgagcgccacctccacgcatacaagcggcggctgcggctgccagccaccgccgccggttcatctaccgccgccggtgcatctgccacctccggttacctgccacctccggtgcatctcccaccgccggtccacctgccgccgccggtccacctgccaccgccggtccatgtgccgccgccggttcatctgccgccgtcaccatgccactaccctactcaaccgtcccggcctcagcctcatccccagccacacccatgcccgtgccaaca

SEQ ID NO: 349635 - DNA, 329 bp, Zea mays
atggtgtatggtttcattccccatgtcagctgagttgggatgcaaattaaacggtttcatattttttgacacctaaaaacaggttcataatttgagggtgtaaattaaactgcactttcaggtgacagggcagatggttttttgtttcaatttagaaaggcgcatggaagcttcaatattatagaagaatttgcttcttactgtttttttattacatattgataacatatgctttcatttgaagcattcacctttgtaaatatttatcattggccatctttggtccttggtactaattctttactttgtcaactaacatactgtcatgc

SEQ ID NO: 349636 - DNA, 401 bp, Zea mays
acgcttcgtttcgtctaaaacaaccttgtttcgaattggggatctttccaaaggtccgtatttcgctcctggttggccccaaaccctctttttatggcagggccgacgaaggaggcgactgataccttcatgagcatcacgggggcggacgaggccgtcaccgtacgcaaactcgaggaacatggtggtgatcttaatcaagcaaaaattcacatttcaatgatggagacagcatattgaacggaatcagtcaaaacgccatgcctgctagtcgtgatgatatgatggacctggatggaccacttgataatacatttcaaagatctttgttgccagagtgttttcgtgccccttttgctctaatggatccaaatttccaggaccaatttgttgacagaatt

SEQ ID NO: 349637 - DNA, 250 bp, Zea mays
gttctagatcgcgagcggccgccctgggttttttttttcctgcccagagcccagaagagagtaataccatactgtccatcgatctacacccagcgcaacagccagattattgaagcaaacacggacataagctgaagacggtaagagggcatgcatgaaacattaattctactcatgatcgaccacgacacacaaaattgatcacccatgcaagctggttctttttattcataaaattccgaggagcggt

SEQ ID NO: 349638 - DNA, 240 bp, Zea mays
tcccacacgtccggttctagatcgcaagcggcctccctatatttttatgaaatttaaaatatttttactaaactttccaagagataaaattttttaaaatattaaaaaaattcaaatcactaataacatatctttatatttatttagaaagtataaaacaaacaaatataaacactaactacttattacctattaaactaataatcaacctttcatagattaacaataaaaccataaaac

SEQ ID NO: 349639 - DNA, 394 bp, Zea mays
  unsure (1)..(394): unsure at all n locations
tcgtcctaacacacgcgaagaaaaggagatagagtacagtttacagacaggcagagagcaaagatgtgtggtggtactatcctctccttctcattctgtccacgttaccattcctttttgtaaacttctccgttttgttttttcatcccggacccggagaaaaccaaanacgaaccacgcgggggttttaacnctttaaggagttgtttctttttttttcttcttcttatttgtaacgaacacgaanngcgcgccgaaaatctacacgctggacccgatactggtgttgtgctattttttttttttttctctcttttttttaacacaacttttttctctttttttatctattaaccaaagtatttttttatgacgatatgtgtaattattcatc

SEQ ID NO: 349640 - DNA, 266 bp, Zea mays
tcggtagctgtcatttatacgagtaagaagaacttcttttcagatttgtaaagaggctacacaccatgagggaactcgatccgtgtgctagatgcttgcatttgcttgcatgaggagagcgaaagagatttggtggagtttcaagctccagcatctgaaaattgctacatatgatttgtcagcgtgcaagaaattagtcttcatggtgatctccgacccaagaaataacggcaggagcaactacaaaagctgctctcgctatccac

SEQ ID NO: 349641 - DNA, 258 bp, Zea mays
  unsure (1)..(258): unsure at all n locations
ctccatggccatggggtcggcatcggctccgtnaccagggccatcgggtgagtgatgcacggcggcggccagcaggcggagcagcaccggcggccggacgacgacacccgcgtcgtggattacctcggcgtcgacgaccagcggacctgcttcagcggtgtgagcccctttgggcctcacataggcccatgggcttagtcctatgtaacctgcctgtgcctgtttcccttcctcatgcaaaagcaaacttactaccct

SEQ ID NO: 349642 - DNA, 134 bp, Zea mays
  unsure (1)..(134): unsure at all n locations
atcaaagcggcagtgcgtanaganaagcttctttcagaacagcatgaggatggtcatccttctcgtcctgtgcctggctctgtcagctgccaacgcctctgcaatgcaaattccctgcccctgcgcggggcttc

SEQ ID NO: 349643 - DNA, 244 bp, Zea mays
agccctgcagggatagcggacgcacacggcgaacccgttaacgacccacgcgttcgccaaagaagccatgattccaccttattttcgcacatacctggatgcacaacaggaaagcatacaaccgaaaaaccaatcacaaaagctgtttcatctaaccgtacaaaggcaacaccgatccagtcctttaagcagggtgtgggagttgatgtgtgtgcaaggtgtcttcaaggttttttttgttacc

SEQ ID NO: 349644 - DNA, 250 bp, Zea mays
ctggatattagcctatccggcaggaaggtaaattagttggagattctaacgacggctgctggcaagttcgtcatagactggaaaacaaaggacggttgtttgaagattatgatacttaagcgagtaaagggttggttgtaagatcaatatgttcatgagcacaccagtggggaggcaaacaacttcacaatggatctttttgcaccgtatgatgtccaaaggtattggcaacacattggaaaagcctttt

SEQ ID NO: 349645 - DNA, 119 bp, Zea mays
tcgctccgtttcggtttcccttccattccgcgtctctcccccgggcttttccgcttctcttccctcgttcgaagaagctcgcagcagccgcctaatccagcggcagttgaggatggctg

SEQ ID NO: 349646 - DNA, 335 bp, Zea mays
cgcaagggcccggatggtccacgcacaggtgtttttccaaaaagcttctcctgtccggaataatctatgatattccgaacagtcgacttagagtagttgtagatgaacttatccacctgacaaatgatcaactgggtaaactagttagtccataaggtttgtgatggtcgtcaaacaccaaaatcgattataggaaatgttgaggccatttccctttcaagaggaaaccgtgattcggttgtagctatccaaaaccaagtcggttccatagatccaataaacatgcaccagattaggatgtggatgatccgcaccacataaggatctcacaataa

SEQ ID NO: 349647 - DNA, 262 bp, Zea mays
tcgcactgcccccgctctgctgcaactccacgtcggcccggccgccctttccacccaccttgatcctccgatccgttggtgcttgaccgatccatggacacccacatcggatccgtgaacggggcggcgtcgaaccagacggttggctgcccggcgtcggcgccggggtgcccgatggcgttcacgccggcgcagcccgcggcgaccctgtcggcgggggagtgtataaaatattttttatttttactgtttttttgttctt

SEQ ID NO: 349648 - DNA, 243 bp, Zea mays
gccgtctgaagtatgagatgaggtcttacaatgagatgggggtgattcagatgaaacaaatgggttaaaaccaccaacaacttaattaccttaaaaaccagattggtaaaaacaaaccaccaattaaaaccagtaaaaaaataattgggtgttgttacccaaaacttcctggggcttttggaaaaaatttttttttgttgggagtaaagcaaatgaaagccccttggggtcctggtaaaaatt

SEQ ID NO: 349649 - DNA, 375 bp, Zea mays
ggcggtcaatccccacaggccacaatggcgtcgctgcggggcctcccctcgctgctttccccgtccaagcccctgctccggcgccggttccctgatccgaggttcgcgttttacttctgatgcagtgtaaactgttctggccttataagatttgctcctttacatactgttgttttttctagcttgtttctcttgtatgtttagtattctctctgttgttctttgtccttttaactctatatttccgcttctatcttttttttctgagtgttcttttctttttacttttttttatttttttttttttatccttttataatactttttccatagtttcttatgtttatttttttttttattaatgttctttctttt

SEQ ID NO: 349650 - DNA, 387 bp, Zea mays
gagaccaactagcaacatagaaagcacaatagtgtaccaacaatggcagccaaaatattttgcctccttatgctccttggtctttctgcaagtgctgctacggcgaccattttcccacaatgctcacaagctcctatagcttcccttcttcccccgtacctctcaccagcggtgtcttcggtatgtgaaaacccaattcttcaaccctataggatccaacaggcaatcgcagctggcatcttacctttatcacccttgttcctccaacaatcatcagccctattacagcagttacctttggtgcatttattggcacaaaacattagggcacaacaactacaacaacttgtgctagcaaaccttgctgcctactttcaacaacaacag

SEQ ID NO: 349651 - DNA, 227 bp, Zea mays
tcgggtagatgcggcagtgatgtcgactacgttgtgagctgccctcccctgctactttgggtgggggtttagatccgctatagttatggcggatctcgccatggaccattaggagttcaatttggtcaaaggcgaaaggagcttgcctcgtagctgcaaagtctttaaagagcattgtttgggagctgaaagacattagggacgagcatcttgtagcatgctacaga

SEQ ID NO: 349652 - DNA, 257 bp, Zea mays
cggaagcttgtgtgaattgtagtttttgtattagattacagtatttaaactgatagtttcctggttccaaagtttttcgccagaaatactggagatgttcttgcctcacataatctgtacattttaccctgttggacctggaaattttcattttgttataaaaaaaaaaaaaatatactgaaatatattaaaatactaaaatataactttattaaataaaaaaataaaatataaaaaaaaaattaaaaataaataag

SEQ ID NO: 349653 - DNA, 237 bp, Zea mays
ggccactgcagcagacggaggacggcgacggtggcggcggggaagagccgaagaggaggacgagggatagaacggcgagggagaagctgtctctcttcacgctcgggatcgttaaccgtagctgacaaccgtgcggaaacaccggattgtgagggccgaggagagaggtgcggcgaggcctctcgaggaggcgggggcgggatggcgactccgggtaagggaggggctgttcggatt

SEQ ID NO: 349654 - DNA, 428 bp, Zea mays
tcgccaacaagcatcatagaaagtggaatccagtagcaacaatagagcaacaatggagaccaagatattttccctccttatgctccttgctctttctacatgtgttgctaacgcgacaattttccctcaatgctcacaagctcctatagcttccctttttcccccataccttccatcaattatagcttcagtatgtgaaaacccagctcttcaaccatataggcttcaacaagcaatcgcagcaagcaacatacctttatcgcccttgttgtgtcaacaatcgccagccctatctttggtgcagtcattggtacaaaccatcagggcacaacagctgcagcaactcgtgctacctgtgatcaaccaagtagctctggcaaacctttcttcctactctccggaacaacaatttcttccattcaaccaac

SEQ ID NO: 349655 - DNA, 85 bp, Zea mays
tcgtctagatcgttagcggccgccctttttttttttttttttggtttttttttaattttttttgaaattatatatttaatatttt

SEQ ID NO: 349656 - DNA, 363 bp, Zea mays
tttgagcattcagaaacacaccaagcgaagcgcactagcaacaacctaacaacaatggctaccaagatattatccctccttgcgcttcttgcgctttttgcgagcgcaacaaatgcgtccattattccacaatgctcacttgctcctagttccattattccacagttcctcccaccagttacttcaatggccttcgaacacccagctgtgcaagcctataggctacaacaagcgattgcggcgagcgtcttacaacaaccaattgcccaattgcaacaacaatccttggcacatctaacaatacaaaccatcgcaacgcaacagcaacaacagttcctaccagcactgagccacctagccatg

SEQ ID NO: 349657 - DNA, 271 bp, Zea mays
ggcgagggcagtcccgccgagcgttagtcacagttgttgcgtgcctaccaggcggctctaactcgatccgtgcagcagacgccgagtcgcggcaaggagtagctaggaactaggaaggaggaggcagggaaaggccaggccatggcgctcgaagctgtggtgttcccgaaggagcacccggggtgtacggcggtcaaggcgcgcccggcgtcactgggctgcggcttccacaccgaggagctcgaggtctagtacaagggcttcttggttt

SEQ ID NO: 349658 - DNA, 344 bp, Zea mays
gtttattcgcaacagtttgcttgggtctgttcgtcctggtggctgattcagtatccttgttgcaggaacgatgacccggcggaacggctgtacgatctacgtgggcaacctccccggcgacatccgcgagagggaagtggatgatcttttttacaaggtgagtggttggttgggtcgattacataatttccctcattaatttttatgggtttttttttttaaatttttatatcctattttttggtcgtttattgtttctcttttttattgtttttctaattttatttgatagattgtggtgatattatttattattttatcatctaaatattattagtatacta

SEQ ID NO: 349659 - DNA, 155 bp, Zea mays
gcgccattggccagctagagccaaccagaagagcttgcagttactgagagtgtgtgtgagagagaggatggttgtcagcggcagggctgctctgctgctggccctggtggtggtggccgtgagcctggccttggtgtttcaggcctactcctttt

SEQ ID NO: 349660 - DNA, 404 bp, Zea mays
  unsure (1)..(404): unsure at all n locations
tcgatcgcgagcggcgccctttttttttttttttttttttttttttttttttttttttttttttttttttttttttttttttttttttttttttttttttttttttttttttttttttttttataaaaatgaaaaaaattcttttttttttatgtgtgttacctcttttctttttttttttttaaaaattttttccttttatattcccttttttttttttttaaacattttctttttttttttttttttaaaaggttttttttttttaagtggttttttttttaccttttttttttattttttaaatttttttttttgtataaattatttcctcttttgtttttttttggtgtttcttttttattttttttattttgctataatatttttttantttttttttt

SEQ ID NO: 349661 - DNA, 117 bp, Zea mays
ggtcgcgctgccgacccggccatggccaccaaggggaagctcggggagctagtgtgggagcaccgggtgcaggcggccgcagcggtggctttcgtggccgtggccgtcgtcttgatt

SEQ ID NO: 349662 - DNA, 399 bp, Zea mays
  unsure (1)..(399): unsure at all n locations
tctttcgccgccaccatatagaaccacttgtgaggaaccgccgccatcacatgcactgcctcaactagtgttaccacctatggttcattgttgtgtctgcttcttgtagcactgttggtctacaaacattcatatttctctcaacatctggcacagcatgccgccttccaaagcacgccgaaagaggtcacttcgtgatatcactgccaccgttgccactgggactgttgccaactcgaaacctggctcatcatcgacnaacgaggggaagcaacaggacaagaaaaaggagggtccacaggaaccggacatcccaccattaccgccggtggtggtgaatatagtcccacgacaaggattaggatgtgaagtagtggaagggctactcgtgcctagtcg

SEQ ID NO: 349663 - DNA, 329 bp, Zea mays
tttacagccgcccgaactccacctccagttgggtacttcttgactcttgaccggatctaatcactccgctccaggtccacctacaaaaacacctccacgccatgtcgaagcccgcgaatcagcaatcgtcgcacatgcatgtctacttatccatcgccaaggagaagccttccatcagattctccatcaacatgcttaagctcatgacggaagcacagatccagcatgttcttccccagtaccactacactcgaaacctgagatactgctctgcacgactcagaaggctatacaagtttatcaagtttttgcatggccgaggtaaatac

SEQ ID NO: 349664 - DNA, 198 bp, Zea mays
tcggccgtccggaggacgccttgtgcggcggcggcggcattaggtggaggtgtggaaccataatccacggaccggtaggcgcccaatcggcatgctcttaagcggctggcgctgctcgcgcttggctgctgctcttcatattcctcattatcttactaattccttatttctatctttatattatatctattaacacta

SEQ ID NO: 349665 - DNA, 348 bp, Zea mays
ctagtcccctgctccattctcagccgccgccaatcccttcccgtgctccgcaaccgctgagtgagaagaagagatggccggcaagggcgatggcccggctatcggcatcgatctcggcacgacgtactcttgcgtcggcgtgtggcagcacgaccgcgtcgagatcattgccaacgaccagggtaaccgcaccacgccctcgtacgtcgccttcaccgactccgagcgcctcatcggagatgcggccaagaaccaggtcgccatgaaccccatcaacaccgtctttgatgccaagcgtctcatcggcaggaggttcagtgatgcgtctgtccagagtgatatcaagct

SEQ ID NO: 349666 - DNA, 233 bp, Zea mays
tcgtgagcggccgctcgcgatctaaaccaaggcgtccgacattgttgtccaaacaggaccagttcttatcacggtggcctatctcgtcgttctaacaaggccacatattccttaacctagctagctaacagttgactagttagatcgatccatcagatggcagtcattattatgatcaggatagtactgtgccagttcttcgtttgactcctgtttacggatacagtcttttt

SEQ ID NO: 349667 - DNA, 202 bp, Zea mays
tcgttgccaacgccctctttcgcaccgttccagggaacggaatcatccaccaccgggcaccggcagtcacagcgcacctcactgaaattggaacagagaacatggcggccgccgcgcccgcgtgccacgtccatatcgaggccctgcagacggcgctgccgactcgcgcgtaggatcctcggtcgtttatttatattttttt

SEQ ID NO: 349668 - DNA, 251 bp, Zea mays
tgggtcttcagaccattagctttatctggtccagagcgcagaagaaccggatcgacaccatgagggtgttgctcgttgccctcgctctcctggctctcgctgcgagcgccacctccacgcatacaagcggcggctgcggctgccagccaccgccgccggttcatttaccgccgccggtgcatttgccaccttcgggtcacctgccaccttcggggcattttccaccgtcggtccacctgccgccgccggtc

SEQ ID NO: 349669 - DNA, 297 bp, Zea mays
cgaatttcccggttcgcccaacccgttcgttggcttttcctccccctctaaccaaggcctcttcgggttagggttacttagggttttgtggaggggcgatggcggcggctgatgtggagtaccgttgcttcgtcggcgggcttgcctgggccaccagcaacgagtcgctggagaatgccttcgcctcctacggcgagatcctcgactccaaggtcatcaccgaccgggagacggggaggtctcgcggttttggcttctttaccttttccttccagaactccatgctcgacgctattc

SEQ ID NO: 349670 - DNA, 441 bp, Zea mays
cagaaacacaccaagcgaagcacattagcaacaacctaacaacaatggctaccaagatattatccctccttgcgcttcttgcgctttttgcgagcgcaacaaatgcgttcattattccacaatgctcacttgctccaagttccattattacacagttcctcccaccagttacttcaatgggcttcgaacacccagctgtgcaagcctataggctacaacaagcaattgcggcgagcgtcttacaacaaccaatttcccagttgcaacaacaatccttggcacatctaacaatacaaaccatcgcaacgcaacagcaacaacaattcctaccagcactgagccacctagccatggtgaaccctgccgcctacttgcaacagcagttgcttgcatcaaacccacttgctctggcaaacgtagttgcaaaccagccacaacaac

SEQ ID NO: 349671 - DNA, 359 bp, Zea mays
  unsure (1)..(359): unsure at all n locations
cggccgccctttttttttttttttttattatataaacccaattttttttttttttttttttataaaaaaggattttttttttatttttatatttattatttattttttttaatttnttaaaaataaagccaatatttaatattaaaaaccacggttttttaaaattgaaaaaataaaaaaattgaaaatatttaattttttaaaccaaatgagttccccagtttaaaatttaaaaatgggcccaaaaaatgttctcaaaaacttgtaaaaaaatttggaaaattaaatcttgaaattataaatttatatttaaataaaaataaaattactttttttataaacttattttttttaaaact

SEQ ID NO: 349672 - DNA, 402 bp, Zea mays
acccttccgttggaagggggaatccagtaccaccattggagcaccattggcgaccaagatattttccctccttatgctccttgctctttctgcatgtgttgctaacgcgacaattttccctcaatgctcacaagctcctatagcttcccttcttcccccataccttccatcaatgatagcttcagtatgtgaaaacccagctcttcaaccctataggctccaacaagcaatcgcagcaagcaacatacctttatcacccttgtttcaacaatcgccagccctatctttggtgcagtcattggtacaaaccatcagggcacagcagctgcagcaactcgtgctacctgtgatcaaccaagtagctctggcaaacctttctccctactctcagcaacaacaatt

SEQ ID NO: 349673 - DNA, 330 bp, Zea mays
ccgtcatcgatctcgtttcaaatccatccatcctcgtttcctccgtcccgcagcatctcaaccccatggccaagatcaagatcgggatcaatgggttcggcaggatcggaaggctggtggccagggtggccctgcagagtgacgatgtcgagctcgtcgccgagaacgaccccttcatcagcaccgcctacatgacctacatgttcaagtacgacactgtgcacggacaggggaagcaccatgaagtcaaggggaaggactccaaaacccttttttttggtgagaaggaggttgctgagtttggctgcaggaaccctgaggagatcccgt

SEQ ID NO: 349674 - DNA, 398 bp, Zea mays
ttcgacaccatgaaggtgctgatcgttgcccttgctctcctggcgctcgctgcgagcgccgcctccagtacaagcggcggctgtggctgccagacaccaccgtttcatctaccgcctccgttctatatgccgcctccgttctatctgccgccgcagcagcagccgcagccatggcaataccccactcaaccaccgcagctaagcccgtgccagcagttcggatcctgcggcgtcggcagcgtcggcagcccgttcctgggccagtgcgtcgagttcctgaggcaccagtgcagcccggcggcgacgccctacggctcgccacagtgccaggcgctgcaacagcagtgctgccaccagatcaggcaggtggagccgctgcaccggtaccaggcgacata

SEQ ID NO: 349675 - DNA, 203 bp, Zea mays
  unsure (1)..(203): unsure at all n locations
gcccgaaatccccgtcccccaacccgtccgtccaaaacgcaaccggccgccctttgttttttttttaatggaaggggggaagaacaaaannnnnnnnaaaaaanaaaactcaaaaccaatgcaaacccattaactttaaacaaaaaagcctaaccccccccttaataaaaaaaaaaagctaattaaaaaaaaacgtggacacc

SEQ ID NO: 349676 - DNA, 387 bp, Zea mays
tcggcgtggtcgaggaggtgggcgccggggtgacgcacctgtccgtgggcgaccgcttggcgctgtagccgggcgttaattgttggcgctgccgcctctttacggattgatgttccaacctgccgttggccttgactttattgctcgtcatgttgttaacaggttcttctttcctctggttgtaatctattcttgcctttattttaaactattcttttaaggttattatttttgtattcatgtctttttctattattttatagttaatttattttggggggctgtatttttttataatttactttttttattataaattttcttatatttcattattttattttttatatttattatctaactatatattattctattcttatttta

SEQ ID NO: 349677 - DNA, 346 bp, Zea mays
tgacgaagcttaccacacttactgcatggatccaccgcgcagttctgtcccgagaggtaaatggttctgcacgccgtgtagtgcatggaggtcggcgaacgggatgcagaggtatgagaagtcgatcctgcagagcgtcaagcgtgttcttgatgccaaagggcccaaggtgcaggcagcagctgctgctccaggaaaataagcagcggcgctgtggatgtgggggtacaaaaagaaatgaaaggattcttgttcctctgaaggtgtatgcattactctgacagactgaatcgagtaatcggaggatgggctgtttatacctggggagaagacctgttggcttttt

SEQ ID NO: 349678 - DNA, 87 bp, Zea mays
actgtttttaatcttaccacacttactgcattgatccactctcgcagagcggtcgggagagtaaaatgattctgcactccttttatt

SEQ ID NO: 349679 - DNA, 429 bp, Zea mays
  unsure (1)..(429): unsure at all n locations
cgaatttccggggtggcccacacgcgtccgttcgtggccgccggttacctcttccgggcgccgggcttccttcctgcagccgttgccgcctccctccaaaacttgtcgtcgtatccctccaacacccgcatctggcgcagacgaccatacacccgctctgatgctttaaatcaatgtgtatggggttccaagcgtctgacctgacaaagaccgccccaagcaacgatgattcttgaagcgattgcagagataaaattgaagtgattttatagtgatttttttgcggagacagctgatttcccattggatatagtgattttatggtgattttttttgcagagggctgatttccttgatgtgcggctaaacgagtnggagaggggggaaccccgttttttaatttttattttggataataaccgggtatcg

SEQ ID NO: 349680 - DNA, 143 bp, Zea mays
cgttggtggtggtggtgtgtgagcagccaggcgtggtgctccctttgtttcctggatggtatgttgctccttgaataataatcgtagtggcgttgcgcccgttgatctcggagccgttctacgacaagaagggggccgccaag

SEQ ID NO: 349681 - DNA, 256 bp, Zea mays
tcgagattagtggccaaattgataggccttaattagaggggagttggtttccaaataagtcatttcctaaattagggtttccaaataagtcatttcctaaattagaagttacctagttggtcgggccagtggcctatttatatggaaccaagaggcagtgaaaggaataagaaatacatcagctttacctcccatctccctacactctctctaaagcctacggctgaggattaccttcccggagaagactgacagc

SEQ ID NO: 349682 - DNA, 339 bp, Zea mays
ggcaatcgcagctggcatcttaccttggtcacccttgttcctccaacaatcatcagccctattacagcagttacctttggtgcatttattggcacaaaacatcagggcacaacaactacaacaacttgtgctagcaaaccttgctgcctactctcagcaacagcagtttcttccattcaaccaactagctgcattgaactctgcttcttatttgcaacaacaacaactaccattcagccagctacctgttgcctacccccagcaatttcttccattcaaccaactggcagcattgaactctcctgcttatttacagcagcaacaactactaccattcag

SEQ ID NO: 349683 - DNA, 435 bp, Zea mays
aggacacgtggggttagatttagatcgtgagcgtgccagcacattagttgtagtatttatatttcatgcttgggcggtgaacacgaagttactttctgacatgagtatagagatgtaccttttcggttttatgaagattatgtcaaagcataaaaacttgaaaatttgatggagctaaggtggtaatttttgagttacaaaattaaagggacatgcttgttacaacaccagatataaagatttaaagagttgcttaatcctaagttataatagggggcggtggtggattttataatcaattcaaaaaaattgttcctattcatactcttaaatagtttatatgttttttggaatctttttaaaaattgtgttattatattttttattagatatatatgaaatatatatattttttttttttttaataatataaat

SEQ ID NO: 349684 - DNA, 110 bp, Zea mays
aagcaacgtcctttcacggagttgctttttttcgttgatgtatggaaaacgagacattgtagaaatcgaagttcgatctagccttttttgcagtataaaaggttagattg

SEQ ID NO: 349685 - DNA, 386 bp, Zea mays
gaccattagctttatctactccagagcgcagaagaacccgatcgacaccatgagggtgttgctcgttgccctcgctctcctggctctcgctgcgagcgccacctccacgcatacaagcggcggctgcggctgccagccaccgccgccggttcatctaccgccgccggtgcatctgccacctccggttcacctgccacctccggtgcatctcccaccgccggtccacctgccgccgccggtccacctgccaccgccggtccatgtgccgccgccggttcatctgccgccgccaccatgccactaccctactcaaccgccccggccttagcctcatccccagccacacccatgcccgtgccaacagccggatccaagcccgtgccagc

SEQ ID NO: 349686 - DNA, 203 bp, Zea mays
gtcccctccccacctcccgttctgtgcctccttggatagggttagagactgagctcccccgcacgcgcgcgagccatggtctccttcacctgttcccaggtcggcgcgacggcagcgggcggagcctcgcccttcctcggctaccggtggcggagcggccccgggggagccaccccgtcgagctccctcttcgttggccggcg

SEQ ID NO: 349687 - DNA, 316 bp, Zea mays
tagaaagtggaatacagtagcaacaatagagcaacaatggcggccaagatattttccatccttatgctccttgctctttctgcatgtgttgctaacgcgaccatttttcctcaatactcacaagctcctatagctgcccttcttcccccataccttccatcaatgaccgcttcagtatgtgaaaacccagcccttcaaccctacaggctccaacaagcaatcgcaacaagcaacttacctttatcacccctgttctttcaacaatcgccagccctatctttggtgcagtcattggtacaaaccatcaaggcacaac

SEQ ID NO: 349688 - DNA, 89 bp, Zea mays
cacagagctcgaccccccctcccttgggttcgttcgtccagccctgaccacccgcatccccgtcagtcatggcagcggcagcaggcgga

SEQ ID NO: 349689 - DNA, 261 bp, Zea mays
cacaggcaccactccccccctgcaggctcctccctctctcggctctggggtcttgcattactctgtcagcccagaggcagagcaagtaagcaaatggttgctatggcggcgccagggcgagtggcgctcctggccgccgcactcctgttcggcgccttcttcccatccgcgttcgccacgtcctcgtaccccgcaaggcttgcgggcaggctcctgtccaccacagagtcggcggtggccaagcagctgtggacgctcaaa

SEQ ID NO: 349690 - DNA, 309 bp, Zea mays
caacatagaaagtggaatccagtagcagcaatagagcaacaatggcgaccaagatattttccctccttatgctccttgctctttctgcatgtgttgctaacgcgacaattttccctcaatgctcacaagctcctatagcttcccttcttcccccataccttccatcaatgatagcttcagtatgtgaaaacccagctcttcaaccctataggctccaacaagcaatcgcagcaagcaacatacctttatcacccttgtttcaacaatcgccagccctatctttggtgcagtcattggtacaaaccatca

SEQ ID NO: 349691 - DNA, 135 bp, Zea mays
gttctagatcgcgagcggccgcccttggggttttttttgaggggaaggggggctattcaaaatactttattttttaaaagaaatgaatatagatagaagggggataaaaaaaagagtggggggtaaatgtataaa

SEQ ID NO: 349692 - DNA, 395 bp, Zea mays
ctcgtaagcttacacagttaggtctcaggaatgtcacaaggagaaaaaaggttgcaggtgaatctctttcaactggagatcggactatagaacaacaagacgactcgcttgatgatctgaaccccatgctaggcgaacagaaccatggctccaaggctaaaagctccaggcccagaaggaaaaaattacacactgcaagtgatgaccatgatgacacaagtcagagaaaatcatctgatgaagacacattacaagtacttaaaagcagatcaaaaagtaagaaagttccattggtggatagttcattgagtggatcacagcatcaagaagctcagcatgacccaaactttgatgatgcgaccataggatccatgattagaagtagaaaaaagaag

SEQ ID NO: 349693 - DNA, 340 bp, Zea mays
  unsure (1)..(340): unsure at all n locations
acccacgcgttcagaagggtctgagagattcccccttcgtgaccaagagcctgagactatagatcatctacttgtagggtgtgtctttgagaggaacttctggtttatgctgcttggacaggtcaacctccaaagttttactcctcaggttggagaagaaaatgtcatgcagtggtggaaaagctgcagtgaccagctgcaacagattgctagaaaaggtttcaactctttaattatcctggggctttggacaatttggaaccacagaaatagatgcgtatttgatggtctttctcctaacttggaaacagccatcanaagagcggatgaagaaagagaa

SEQ ID NO: 349694 - DNA, 328 bp, Zea mays
tcgctgaggagtgaggaaccctaagcggggcactgtgcaggcgacggcggcgcgctaccggcgacggccgacgggggatacggcgacatcgtccccctcgacccctcctccatccccgacgcggcggcgccagcctgcaggtgctggactagagtcgaatgctaggcggatgctagctgctaggtgttgaatgctgatttgttgtggcctgttacgtcttcaccagttcatatattaaacttgaagaaccacgtggttgaagaaaagcccactgaaaatgagtaatacatcatcttcgtcaagtgggatgggatatatgctgatattc

SEQ ID NO: 349695 - DNA, 403 bp, Zea mays
  unsure (1)..(403): unsure at all n locations
aaattccgggttggaccaaggcgtttgattagttttagatcggaagcggccgcccttttttttttttttttaattttttttttttttttttttttttntnttttttttttttttatatgttttttatttttttgtttttttttttggaaaggtaaaaaggattaattttttttaaaaacccgaaggaaatttgggggaataaaaaaattttaaaaaataaggtgttgaaaaaaaaaaaattttttaaaaaaaaaaaaaaaaaaatgattgggggggcaatttttggaaaaaaaggggataaggggagaaaaatggcttaatgttttgtaaaaaaaaaattttttaagtattttaaaactttttggaaattttttgcttaaaaaaaaataaaaaagaatttttt

SEQ ID NO: 349696 - DNA, 343 bp, Zea mays
gttctagatcgcgagcggccgcccttttttttgttttttgttttttttttttgagtacaaaagcgagactatttccatcagatttgagcttctatcatgttcaaccacgataataaacaaagcttgcaatctctagctgtcacataacaataaagattggtgaacgaaaaagaaaaagagagagagcaagagagtggaaactagaacaaccatgtcccccatatcacaaaatgctctgaccttgttgatagccaaagcaagtttgcaattgccaaaccaccaactttgatctgaactttcaggaaattgtagatattttggccttcatatctaagttctccac

SEQ ID NO: 349697 - DNA, 370 bp, Zea mays
agaccattagctttatctactccagagcgcagaagaacccgatcgacaccatgagggtgttgctcgttgccctcgctctcctggctctcgctgcgagcgccacctccacgcatacaagcggcggctgcggctgccagccaccgccgccggttcatctaccgccgccggtgcatctgccacctccggttcacctgccacctccggtgcatctcccaccgccggtccaccatgccactaccctactcaaccgccccggcctcagcctcatccccagccacacccatgcccgtgccaacagccgcatccaagcccgtgccagctgcagggaacctgcggcgttggcagcaccccgatcctgggccagggcgtc

SEQ ID NO: 349698 - DNA, 427 bp, Zea mays
tcgcatttatctaactccaaaaaccatgaagctggtgcttgcggttcttgctttcattgctttagtatcaagtgtttcttgtacacagacaggcggctgcagctgtggtcaacaacaaagccgtgagcagcaacatcatccacaacaacatcatccacaaaaacaacaacatcaaccaccaccacaacatcaccagcagcagcaacaccaacaacaacaagttcacatgcaaccacaaaaacatcagcaacaacaagaagttcatgttcaacaacaacaacaacaaccgcagcaccaacaacaacaacaacaacaaccgcagcaccaacaacaacaacaacaacagcaccaacaacaacatcaatgtgaaggccaacaacaacatcaccaacaatcacaaggccatgtgcaacaacacgaacagagc

SEQ ID NO: 349699 - DNA, 415 bp, Zea mays
cttgttagcaactttcacggatgtagcttccatacgaagacatggcacctcttcaggcagcagttgccgttgttcaaagagatgctggcagaaagatcctgctctaagaccaacctttgcagagattatggttacaccaaactctataaaggaggtggttcggagttctgggcattacaagaggcatttaggtcgatctcactcttcttcgagtttatgcgcgctgcccaggacaacatcacagcgctgatggagttggacgatgtcatcgggctcgactggatctagatgggatggaccctgcttgcgctgaaggagagagagagggcgtacttggcttgcaggggatcgtagtaaggttcatctttttcatgggtcatgttatctggcatgtcagattacacaacttaagtta

SEQ ID NO: 349700 - DNA, 219 bp, Zea mays
tcggcgccgaccaaacagggtcctcgtcacagaacacgcgccccacccgtctcgtcgcgccgatccagcccggcgctcggccccgcggcgtgtgcaatggcccttgacaccgccgacgccgacgcgccgcgcttgcgccttgatgccagcgccgccgtgcacccgttcctttccgacgacggttccacggccgtgggggagactgtggatcagttggtc

SEQ ID NO: 349701 - DNA, 393 bp, Zea mays
attttgagcattcagaaacacaccaagcgaagcacattagcaacaacctaacaacaatggctaccaagatattatccctccttgcgcttcttgcgctttttgcgagcgcaacaaatgcgttcattattccacaatgctcacttgctccaagttccattattacacagttcctcccaccagttacttcaatgggcttcgaacacccagctgtgcaagcctataggctacaacaagcaattgcggcgagcgtcttacaacaaccaatttcccagttgcaacaacaatccttggcacatctaacaatacaaaccatcgcaacgcaacagcaacaacaattcctaccagcactgagccacctagccatggtgaaccctgccgcctacttgcaacagc

SEQ ID NO: 349702 - DNA, 371 bp, Zea mays
agatcagcaaagcggcagtgcgtagagaggatcgtcgaacagaacagcatgaagatggtcatcgttctcgtcgtgtgcctggctctgtcagctgccagcgcctctgcaatgcagatgccctgcccctgcgcggggctgcagggcttgtacggcgctggcgccggcctgacgacgatgatgggcgccggcgggctgtacccctacgcggagtacctgaggcagccgcagtgcagcccgctggcggcggcgccctactacgccgggtgtgggcagacgagcgccatgtaccagccgctccggcaacagtgctgccagcagcagatgaggatgatggacgtgcagtccgtcgcgcatcaactgcagatgatgat

SEQ ID NO: 349703 - DNA, 86 bp, Zea mays
gatagctatgaataaatagttgttatcttattttcgagtgtccaaattaattggaggcgaataaccttatttggtctgctttagtc

SEQ ID NO: 349704 - DNA, 380 bp, Zea mays
  unsure (1)..(380): unsure at all n locations
tcttcctcctttcttgacgacctccgttcccgggaggtgtaggttgatttnttatanttattttatatttttttttttatttttttatatatatttttatatttttttttttattttttttattattttttttttttttttttatttattttttatatttttatattatttttatttatttttattttttatatttttttttttattttattttttataattttttttttttattatttttttattattttttttattttttttttatttttttattttttatttttttatttaattatttatttattttttttatatttaattttttaatttttatatttttttttttttattttatttttatttttatttttttattt

SEQ ID NO: 349705 - DNA, 416 bp, Zea mays
cggagctttaaattcgtcgaaccaatgggcgcggacgacatacagatcgaactggtggaggcatacacccaaccaattttataaggccatcaaacaaggaaaaagatctcctccatggcgacgcgaaggcctggagctgacgctgatctcgggcaaggacctcaaggacgtgaacctgatgtacaggatggaggtctacgccaaggtgttgctctgcggcgaccccccgtttggtcagggtttccaggccgaccgcactggctgacgtaaccctacctggaacgccacgcttcgctttgacctactaactattgacaccggttctctttaattactttttttttctttagggttttttcaaatactgttacttttacattgtaaaaggtacttttttcttaatttatttttttttt

SEQ ID NO: 349706 - DNA, 455 bp, Zea mays
  unsure (1)..(455): unsure at all n locations
caccgcgtctcgcttttggcattcaatacaaattagaccaagagggccacgctttatcacaccgcctatccgcgagtcacatacccagtgcacccccacgagggtgcaagaactctgtaccgaggagaggggaaagaactctgtgaagagaggagctttgaggaagttgaggnagatggcgagccgccgagggcgagaggntgggtgggaccttggcgacggactttctcgcagggtgatgccgagcgtgcgctgcagntggtgcggcgaccaaacctgctccgcgccggtgaccaacctgctgctgctgcacgtcatcaaggagcccgactacgagcagagcgaggccatcctctgggaatccaccggctccccgttgattcctttctcggaattctctgaccctatcatcgcgaagaaatatggagcaaaacccgacatggaaaccttggacc

SEQ ID NO: 349707 - DNA, 422 bp, Zea mays
ctgggagggactgggccaaaccaagaccatcccatacctcttctcccctgccggtggtgtggttcacctcccacttactcactcactcactcgcggacactgccacaaacttccgccccagatctccgtatataacacgccggcggcccgtccgtccgggctcctgactccggatccaccgccgccgcgccgcactctccctctcactccaccgccgaagtactccccgcctgccactgccagcctgtgcctgcacaaaagcaaaaatggcgccttggccgcggcggcccgtgctgacgctggtgctgctcctgctgctcgcgctcctgtgctcccacgtcgcgctctgctcctccgccgaaccggggaaacccaagcccaagcccaaggtctccggcagcccgaaggcgctgcttgcggac

SEQ ID NO: 349708 - DNA, 372 bp, Zea mays
cgcggttgcagcttgcagggttgtccccttccgttctgcattcctcgtcccgtccgcccccgatacggcggccacaccccacacccccacacttttccgacaagggaagggaaccccagatctccgccgccccgccagccgctatgccgactgccgccaaccccgccgccgcgctgcccctcaccctcgacctcgaggacttcaagggagacttctcattcgacgctctgtttgggggactggtggacgagctgctcccggagtaccgcggggaggacgacgccgtgcccgcgccaccttctccgtcgtccgtgctcggggcggccccgcccgtcttccccgctgttgacgagcttcttgggctgttcaagc

SEQ ID NO: 349709 - DNA, 313 bp, Zea mays
tcggttctagatgcgagcggccgccgggttgtttttttttttttttgggtgttgtttttaaaaaattctgcccaaatgggataaacccttaccttaacaagcagtccgcagcctgcattccacagaactaccatttttttggtagaggctccttatgaactgtacaacaaccacagttgccacatagagatacagttgctccctttttatctcccccgcccacccccgttagtccactaccctatttctgagttcattttttttacacacaagttggggtttgaatcgccttaccagtttttaggcccgaaac

SEQ ID NO: 349710 - DNA, 421 bp, Zea mays
gcaaaccttgctgcctactctcagcagcgacagtgtcttccattcaaccgactagctgcattgaactctgcttcttatttgcaacaacaacaactaccattcagccagctatctgctgcctacccccagcaatttcttccattcaaccaactgacagctttgaactctcctgcttatttacagcagcaacaactactaccattcagccagctagctggtgtgagccctgctaccttcttgacacaaccacaattgttgccgttctaccagcacgctgcgcctaacgctggcaccctcttacaactgcaacaattgctgccattcaaccaacttgctttgacaaacccaacagcattctaccaacaacccatcattggtggtgccctcttttagatttcttatgagttatagttcaataata

SEQ ID NO: 349711 - DNA, 396 bp, Zea mays
ttgttctagacgcgagagctcgcccttcgttgagtttttacaatagaagcgccaggagttgttcaacgcattacaatggccagggttccataatttggcgcaggaaaaaggccgggaacagggcttgttctactactaactggcgaagtaggggcgaaacgaagaacttggacctcctcaggctttggacaggttacgcttcgaatgtgacgactttgtacacagatggttcgtgattctcaggatacgcatgctcaacaaggctccaaacaacatgagctcgtgagaatgtgtaatacacacactggtgaacgcacgagaggctcttaataatggttaaaggcaagacaaacttttatgaactatacggactgacccagttttacccctagcctt

SEQ ID NO: 349712 - DNA, 84 bp, Zea mays
tagcagttcttctttgcggtgcggccgaggggaagctaaggctcaggcatgggcttcctttaccagtagagtggcggggaggat

SEQ ID NO: 349713 - DNA, 365 bp, Zea mays
tttttgagcattcagaaacacaccaagcgaggcacattagcaacaacctaacagcaatggctaccaagatattatccctccttgcgcttcttgcgctttttgcgagcgcaacaaatgcgttcattattccacaatgctcacttgctccaagttccattattacacagttcctcccaccagttacttcaatgggcttcgaacacccagctgtgcaagcctataggctacaacaagcaattgcggcgagcgtcttacaacaaccaatttcccagttgcaacaacaatccttggcacatctaacaatacaaaccatcgcaacgcaacagcaacaacaattcctaccagcactgagccacctaaccatg

SEQ ID NO: 349714 - DNA, 263 bp, Zea mays
gcggtggctgtggggcagatcgatggggaggagatattttgcagcggaccctcccccgaccgtgaggccgacgtttgcttcccgtccccctcgttggctttgggcaccgtgaaggcgttatcggtcgacaagcggtgacagggtcctttttcctccccgatctcaagactatcggtggtggtggcgatggggcagatcgggatctattggaaggagatgtttccaaactcacccttcctctaccaccgttccgacttttgctt

SEQ ID NO: 349715 - DNA, 297 bp, Zea mays
gcggcatcggtggacggcggggccttgaggccttgtgctcggcgtgggacgccctcgcgcgcgaaaccgagcaatagtgacaataaaacgccggggctagctgagcctgtttgttcgacctgaataatgaagcagctgtgatatgcatgttgtttcgacacaacgtgtacgcttgcacatcgcttgaactttacgattgcattgtatgcagcaagggtttaaaggctgaatcaataaacggtgtgtaggcgatcactgtttcaaatataaaggggggggggggggggtgattatttt

SEQ ID NO: 349716 - DNA, 381 bp, Zea mays
tcgcggacgcgtgggctgggtcttcagaccattagctttatctactccagagcgcagaagaacccgatcgacaccatgagggtgttgctcgttgccctcgctctcctggctctcgctgcgagcgccacctccacgcatacaagcggcggttgcggctgccagccaccgccgccggttcatctaccgccgccggtgcatctgccacctccggttcacctgccacctccggtgcatctcccaccgccggtccacctgccgccgccggtccacctgccaccgccggtccatgtgccgccgccggttcatctggcgcccccaccatgccactaccctacttaaaccgcccggccttagccttatccccagcccacacccatgccc

SEQ ID NO: 349717 - DNA, 189 bp, Zea mays
tcggttctagatcgcaagcggactctcgacggacacttctactgacaccgggtgccacgcctcgtcggatcgttccgtcgatacctgcggcgaactctggacatgtttgaaaactgccgagcttcgttacccgaaccggtcctagaggtgttagaggaaacccaagcctcaaccctaacctctagcaac

SEQ ID NO: 349718 - DNA, 162 bp, Zea mays
aatgaaatgacgagcaccgttatctcattggtgggctttttctttgccaccggggctatcagagaacatgacagcttcatgtatgtgtactataccataaaatgcagacatgccagtacgaagatttatgcggaattgtaacccttgagctttgtaacattc

SEQ ID NO: 349719 - DNA, 290 bp, Zea mays
cgcccttttttggtgtttttttaaaaaaaaagcggaaggaaaaaaaaataaaaaatataaataaaaaaaaattaaataaaaaaattaaaaaaaataaaaaaaaaaaaaaatatattaaaaataataaaattataatatatataaaataaataaaaaaaaataattatataaaaataataaaattaattattaatatatatataataataaaattaataaaaaaataaataaaataataaataaaaaaataaaaaaataaatataaaataaatagaggagataatataatt

SEQ ID NO: 349720 - DNA, 136 bp, Zea mays
gggatctccctctcattccagaggactccgcgttttttggcccgctgggcgtgcgacgccggcatatagggtttcgccgtctccgccaatggacccaccccccgtgagccccgatcgctgtgggcccagacagggc

SEQ ID NO: 349721 - DNA, 400 bp, Zea mays
aataccatgagctaaatttactccaaagggctgaataacttaaccgacacgatcaggttatatcttttggacctttttatattggttataaatggaaggactatcttaacacatacaaacgatgattgtagataaattccactgacgcccaaaaatataccgcttccgggtcatgttccatgtcctgaacaaatgatatgtgcaaattattacctactttccatttcatgtggctgcctctaccatatttacctgaagtaacaaaattcagccattcttctgttgacagtggctttagttcgctattgtagctacagtaagaaaaataaatgtattttgttgacagacgcattcaaaatctaacacatgactcatgaaaagcagcgatctgatacaaaca

SEQ ID NO: 349722 - DNA, 374 bp, Zea mays
gggtcttcagaccattagctttatctactccagagcgcagaagaacccgatcgacaccatgagggtgttgctcgttgccctcgctctcctggctctcgctgcgagcgccacctccacgcatacaagcggcggttgcggttgccagccaccgccgccggttcatctaccgccgccggtgcatttgccacctccggttcacctgccacctccggtgcatttcccaccgccggtccacctgccgccgccggtccacctgccaccgccggtccatgtgccgccgccggggcatttgccgacgccaccatgccactaccttacttaaccgtcccggccttagtcttatccctagccacacccatgcccgtgccaacagt

SEQ ID NO: 349723 - DNA, 280 bp, Zea mays
atcttttgcaagcacaactgcacaagggaacaggaggaaaaaagagcgagaactcgcagctgacgcgcacacggcaagccccaatcggagccgcggaccggatcagaactaggtctcgaggcgatggcaagcggaggcgagggcgcagggagcggcgaatcccctcccgccgcctcagtggaggcggcagcggtcgaggcgacgctgcacatccggtgcgcgaacggctccaagttcacggtgcagacggacctgggcgccacggtgggcgcgttcaagg

SEQ ID NO: 349724 - DNA, 337 bp, Zea mays
ttcgcataggccgtcgagttcagtcactccgctactgtagtactgtcttaaaccctcgtcgtcgtctttccgccgcccgtcgcttcgttcctcgcttccccccacaggcccacactctcgcgcgcatcacggcggcggcggcgaatcaccgcgtggccctccacctaagtcctagcccaagcgtaagcgatcgctctccccatcagccaccatggcgccacgcccccgcaagcgggcctcgcgccccaagccccgcccgggctcccgacgtggcggcggcggaggggaccaccatcccttttttgagtccgagcccaagcgccgccgtggaggccgt

SEQ ID NO: 349725 - DNA, 404 bp, Zea mays
tcctcttctccctcctaggcttctgctactggccgccgctatgcttcaccccatgcccatgctcgccgcggctccaggcaccctctcgcggcctcatctctgtctcccttcctcctcccaacgtatctcagtctatctatcctctccgctccgtctccgacgctgaccaccagcgctgcagcaggaggcgccaccacctccgcgtgcgacatctggatcttcgagcccacctgaatcgaggagcaccgtccctcctgctccaacggcgtcgcctgtacccgccgtctcccccccccccgcctcgtggatccccgttgcctcccacctcatgcctactataacctcggcaaggccttcgcctactggtccagtggcgttgcctttgactcaccgtcttccccgac

SEQ ID NO: 349726 - DNA, 294 bp, Zea mays
tcggccaccccctagggttagggctcggttgggcatcgttccggcgtcgaccgatgcgcggcgcatggcggcggtgaactgcctctacgtcgcggctgcctctacggcggccagcgccgccgcgctgcagaggtgggcatcctcgctctttgacggcgacactggcgcgggcgaggatggagcctgtttcggagccgtgtctcggacaaagggtaccctcctggctcctgcgttaattgagctggttctctgtataccacctcatttatcttttgttgctacgggggggggggg

SEQ ID NO: 349727 - DNA, 388 bp, Zea mays
tcgtgccattattccacagttcctcccaccaggtacttcaatgggcttcgaacacctagctgtgcaagccaacatgcaacaacaagcgcttgcggcgagcgttttacaacaaccaattgcccaattgcaacaacaatccttgccacatctaacaatacaagccatcacaacgcaacagcaacaacagttcctaccagcactgagccacctagccatggtgaaccctgccgcctacttgcaagagcagctgcttgcatccaacccacttgctctggcgaacgtagttgcaaaccagcaacaacaacagctacaacagtttctgccaacgctcagtcaactagccatggtgaacccttgcggctacgtacaacaacaacaactgctttta

SEQ ID NO: 349728 - DNA, 106 bp, Zea mays
ttcttttcacccagagcagacccggatttcggtggggcggtcaatggggttggggggttgtctaataagttttatcctatccgctttttaagtctttatattattt

SEQ ID NO: 349729 - DNA, 150 bp, Zea mays
gaaatctgacccgggccacactccgcgggtccgccatggcgatccggtccaaggcctggatctcgctgctgctcgcgctgaccgtcgctctctccgcccgggcggaggaggagcccgccgccgcggcggagggctaggccgtgctcaccc

SEQ ID NO: 349730 - DNA, 82 bp, Zea mays
ctagttctagatcgcgaccgccccccctttttttttttttttttgtgtccctttttttttattttttttttttattttttaa

SEQ ID NO: 349731 - DNA, 293 bp, Zea mays
caggacctcacacgcacaggtccgatttcttaccgttaacgagacctaaccacaccaacggagcactggccatggtaatacgtacttaccagtatcaatgcccctgcgaaacatacttcattatgccaccgaagcatacaaaccaggagctgccgctttaccactctgactagtccagagtcctgctgacataggtgggccaacattaagtttgcctttcttgtcgacattattgttttgaccataacaacccacactactgtaacatgcgggcacgaaccttaaacttttgt

SEQ ID NO: 349732 - DNA, 150 bp, Zea mays
tttcaattgattccttagccaataacaaagccgtgagtgttagctttatcgaggggggtagtaagttcacttggatttacttgcttcgttacaaatctgaagtcttcacatttctttaaagaatttcagtgccttttttaatctattttt

SEQ ID NO: 349733 - DNA, 145 bp, Zea mays
tctgttcgccggcgaggacttttattatatcctgcgttttctgaacaccaacgggggtggtaagcataaaatcattttctccattaccttaatcaagggtgtttttcctcctttctctaacatctgttgctatatcctctttttt

SEQ ID NO: 349734 - DNA, 244 bp, Zea mays
tttctcggtccgtccggccccgaccccatcgggcagattttccagggccccggggtgtgaatcaagatcacgtccaaccccaccacacgcgcctaccttaacgagcccgactttatgcaaatgctgcgcgaagtgcaaaggaacccctacagcatcagcatgtacctttccgatccccgcatgatgcaggtatctatccttatgcttaatgtcaagatccatataccttatgcctttttaccat

SEQ ID NO: 349735 - DNA, 140 bp, Zea mays
  unsure (1)..(140): unsure at all n locations
tctttttnggacgcatgtttctttatttcttttcgccactattctaaactgcggccgctctnnnnaaccccacttcctaccatttttctcattctttccctctctttaaaatataatcttctttctcaccatacactatt

SEQ ID NO: 349736 - DNA, 355 bp, Zea mays
tcgcagaaacacaccaagcgaagcacattagcaacaacctaacaacaatggctaccaagatattatccctccttgcgcttcttgcgctttttgcgagcgcaacaaatgcgttcattattccacaatgctcacttgctccaagttccattattacacagttcctcccaccagttacttcaatgggcttcgaacacccagctgtgcaagcctataggctacaacaagcaattgcggcgagcgtcttacaacaaccaatttcccagttgcaacaacaatccttggcacatctaacaatacaaaccatcgcaacgcaacagcaacaacaattcctaccagcactgagccacctagccat

SEQ ID NO: 349737 - DNA, 346 bp, Zea mays
aaatcgcaagcggccgcccttttttttgttttttttaaaaaagaggggggaatataaaaaaaatttaatattatataaataaaatataaaaaaaaattataatattaattttttaaaggaaaaaaaaaaaaaaattttaatatttataaataaaaaaataaataaaattttattaaaattaataaaaattattattaatattaaaaaataatattaataaatataaaataaaaatttattaaaataattaaatataaataaaataaaaatattttaaatatgagatgatataatattaataaataaaaatatattttaataaaaaatatataataatatatttata

SEQ ID NO: 349738 - DNA, 219 bp, Zea mays
ggaccagcaagaccagattaagccgctgggatcaccgcagcaacagctggcggcggcgctgcccggtctggcaggcggtgtttctgcggcgtccggccaaggcgcgccgccggcgcagtcaccgcccaagaagaagaggactttgcctgaccccgacgctgaggtgatcgcgctgtctcccaatacgcttttggctactcaacaggttcttgtgcgagg

SEQ ID NO: 349739 - DNA, 309 bp, Zea mays
tcttttacgccagaggaagagagaaaaccccagggcctcctcacctattccggcttgcctcttcccccttcctagtatagacaatcatcaatctgtgagattggcgagcgaatcacgcatacaactgtaggatggagcggggaatgaatgcctcccctgattgcagttaatccttcccattccagtccgttcctcgtccactggagtccgttgaagtacaggctgcattaggacagggagcaaccgccaccatagctgttcgccatttcttccatcaacaccaacatgagcagtaacaaggaaagggcc

SEQ ID NO: 349740 - DNA, 173 bp, Zea mays
cccaaatttccgggttgacaccacacccttctttttcattaaaagtaacacaactttttaacgtgcgacctaacccttaattgcctgggtttgttcattaccttggtttggttctttgaagccatcttattaaaaccccacccatttttaatcttttgaccaactgttttgaa

SEQ ID NO: 349741 - DNA, 165 bp, Zea mays
tttttattatcttccttccaaccctttatcttatcttgcatcacaccctccaaagtcctctcaaaacattaattcacaatctttctcttctgaaaaccaccctcccctcccccatttctttttcctccctttcttctatcccccttttcctcccctttctttctt

SEQ ID NO: 349742 - DNA, 327 bp, Zea mays
cgcctgacctacccgtacttaattcctggatccacccattcgtgctgctttgctgccgtggcccgtgcgggggagttagttcaggaacccgggcgggacatcccctcttcctccccggccggcgatgtcgtcttcgtcttccgcgctggccaaaggcaagtcggcaatcggatccccaatctcatctgccaaattccaggccactacgaaattattcttctactccttcacaggtcagagtgctaacccgaatcaaatcacaccgcactttatccccaggttctttcggagcttccctgcactcgaaacgcactccatgtcagccat

SEQ ID NO: 349743 - DNA, 401 bp, Zea mays
  unsure (1)..(401): unsure at all n locations
ttttggaacacttctggcaccgncttgctcgtcactattaacaacaacgccgcagataaaaaactttattnttaattccttnttaactctaaaggttagtatttttttttnttttttttaccgggttttattttttttttttttaatnnntatatgtaaaaaattttcaanattttataataatttgcctcttttttttcttcttttaaataaatcttttttttttttcttttacttttatttttttattcttttttttaattttttctgtttagtagtaggcgggtctgggttatctttattttttctatttttttattatctctttttttcttctttatattatatttttatattatttttttttttattttatttttttttttatttatatttctttt

SEQ ID NO: 349744 - DNA, 96 bp, Zea mays
  unsure (1)..(96): unsure at all n locations
tttcttttaaatcgcgagcggccgcccttttttgtttttttttaaaaaaacgtcggccttttaaattatattttttattttaactanttaatcttt

SEQ ID NO: 349745 - DNA, 457 bp, Zea mays
gtaacatagaaagtggaatccagtagcaccagtagagcaacaatggagaccaagatattttccctccttatgctccttgctctttctacatgtgttgctaacgcgacaattttccctcaatgctcacaagctcctatagcttccctttttcccccataccttccatcaattatagcttcagtatgtgaaaacccagctcttcaaccatataggcttcaacaagcaatcgcagcaagcaacatacctttatcgcccttgttgtgtcaacaatcgccagccctatctttggtgcagtcattggtacaaaccatcagggcacaacagctgcagcaactcgtgctacctgtgatcaaccaagtagctctggcaaacctttctccctactctccgcaacaacaatttcttccattcaaccaactgtctacactgaacccttgtgttaattgcagcaacaact

SEQ ID NO: 349746 - DNA, 175 bp, Zea mays
  unsure (1)..(175): unsure at all n locations
gcgccctgtcccgttggccgcgaatggttctcgcgcgagtcctcccgctgcccgccccgtcgtccgcgccccaccgccgtttactcctgccgactcaggcggngccggccccgccgcgtgtgcttaccgtgcgggccgtcgcctgccgtgcagcgaacgccatggcgggcgttgc

SEQ ID NO: 349747 - DNA, 186 bp, Zea mays
cacgcacgaaagagacactccggcctgaggtagagcgttaatccctgaaccccactagtagagattcggctgttggcatcctgtccggcccccgtcacaatgtcccaatcacagccgctgcctgcagaacgcgtaacgccacgccacctttccccagggtccggcgatgtcggcgccctccgacgc

SEQ ID NO: 349748 - DNA, 447 bp, Zea mays
gagaccaactagcaacatagaaagcacaatagtgtaccaacaatggcagccaaaatattttgcttccttatgctccttggtctttctgcaagtgctgctaccgcaaccattttcccacaatgctcacaagctcctatagcttcctttcttcccccatacctctcaccagcggtgtcttcagtatgtgaaaacccaattcttcaaccctacaggatccaacaggcaatcgcagcaggcatcttacctttatcacccttgttcctccaacaaccgtcagccctattacagcagttacctttggtgcatttgttggcacaaaacatcaaggcacaacaactacaacaacttgtgctaggaaaccttgctgcctactctcagcaacagcagtttcttccattcaaccaactggctgcattgaactctgctgcttatttgcaacaacaacta

SEQ ID NO: 349749 - DNA, 260 bp, Zea mays
cttcctctccacttgcaacctgtccctgagaggcccgcggcgtctccgcttggccttaccacccaccaccaccttctcatccagcagctttctcctttgctgcccctcccctttgccgcggtcagggctgtgcagcccccgcgttgcattggggtcccgtgccgatcgccaggccgcgtgatccacccgtgctcgagcaagcgcctcgcgctcctcttcttcatcttcgttgcggccacctttgccttctgggaccgcca

SEQ ID NO: 349750 - DNA, 449 bp, Zea mays
tgttttctatcctgctggatatgtagtcatgacagttaaattatgtacaactatgattacaaacgggaatacaagctaggagttgagaccacaatccttatgaaaagttacactgtaagtatgtcgtcctgcttgcatttcttccatgttccttttctcactgtaagcttagtttttgtgatcagcttccagatagaagagttattaaagtagacactaaacgattccaacctcctgaatctctttttactcctgtaacacttccatttatatttatacataatggtattgtcaacagtacacatagtttccatcagtttgttaatagtgcacctttagattgaatgagcttcttgcagagcaccaaggattaggcattgaaatgtgtggataaaaatattagaggaccacacatcattattatgcaacattgtctatgcacatgaaca

SEQ ID NO: 349751 - DNA, 439 bp, Zea mays
agcgaagctacctagcaacgacttaacaacaatggctaccaagatattagccctccttgcgcttcttgccctttttgtgagcgcaacaaatgcgttcattattccacaatgctcacttgctcctagtgccattataccacagttcctccgaccagttacttcaatgggcttcgaacacctagctgtgcaagcctacaggctacaacaagcgcttgcggcgagcgtcttacaacaaccaattaaccaattgcaacaacaatccttggcacatctaaccatacaaaccatcgcaacacaacagcaacaacagttcctaccagcactgagccaactagatgtggtgaaccctgtcgcctacttgcaacagcaggtgcttgcatccaacccacttgctctggcaaacgtagctgcataccaacaacaacaacaattgcaacag

SEQ ID NO: 349752 - DNA, 223 bp, Zea mays
  unsure (1)..(223): unsure at all n locations
gttgcaagaggtggaggaagacggatcggagccggagtcgtcgccctcgcctgcacctccgcggtcgnggtcgtggtcacgacgatcggggcgcgcggggccggcctctgtggcgagtgcaccgccggcgtgtacgattcacgcccattaccgcgcgttcatgggtcgctacttcaggttctatctgtagatcatggtgcgcatgtttgcagtttgtcttggt

SEQ ID NO: 349753 - DNA, 450 bp, Zea mays
gagaccaactagcaacatagaaagcacaatagtgtaccaacaatggcagctaaaatattttgcctccttatgctccttggtctttctgcaagtgctgctacggcgaccattttcccacaatgctcacaagctcctatagcttcccttcttcccccgtacctctcaccaacggtgtcttcggtatgtgaaaacccaattcttcaaccctacaggatccaacaggcaatcgcagctggcatcttacctttatcacccttgttcctccaacaatcatcagccctattacagcagttacctttggtgcatttattggcacaaaacatcagggcacaacaactacaacaacttgtgctagcaaaccttgctgcctactctcagcaacagcagtttttttccattcaaccactagctgcattgaactctgcttcttatttgcaacaacaacaacta

SEQ ID NO: 349754 - DNA, 201 bp, Zea mays
  unsure (1)..(201): unsure at all n locations
cccacgcgtccgcccacgcgtccgctcgctcgctccgcattgcccgcatcgcctccaatctcagcagaccaggtcgagtttcgcgcggattttcagtgtgggaggggagtggaggtntcacggttgcatcatatgaagcgcgccatggacccgtgcccgtacgtgcgggtgctggtcggcaacctcgcgcttagaatgccg

SEQ ID NO: 349755 - DNA, 462 bp, Zea mays
caacaagcaacatagaaagtggaatccagtagcaacaatagagcaacaatggcgaccaagatattttccctccttatgctccttgctctttctgcatgtgttgctaacgcgacaattttccctcaatgctcacaagctcctatagcttcccttcttcccccataccttccatcaatgatagcttcagtatgtgaaaacccagctcttcaaccctataggctccaacaagcaatcgcagcaagcaacatacctttatcacccttgtttcaacaatcgccagccctatctttggtgcagtcattggtacaaaccatcagggcacagcagctgcagcaactcgtgctacctgtgatcaaccaagtagctctggcaaacctttctccctactctcagcaacaacaatttcttccattcaaccaactgtctacattgaaccgtgctgcttatttgcagcaacaacta

SEQ ID NO: 349756 - DNA, 57 bp, Zea mays
gtgatatacagaacactaaacagagttagacggtgttcatttattctaaggctataa

SEQ ID NO: 349757 - DNA, 115 bp, Zea mays
ggctacgcacagcggaactggaggcagcgcacctttgtccggcgtgtgcagacagtgagaggagagagagagagagagagtgtgtgtgttccaggatgcaaggtggcgtggtcga

SEQ ID NO: 349758 - DNA, 417 bp, Zea mays
tgcacgcacccgaccccctcctgccggcctcgatctcgtctgctcctccgtacccaatccctcgcggagggcgagggtggaagcgagtgacgatggcggtgctggaggcggcgagggagtgggcggactccgtcataccgccggagctcgccgccgcctggtggggagacccactcgccgtgctggcggacaccgtcgagggcctcgtcgcggggctgcttattatcgatctctggccccgatccggaggcggtacgccgatcatgccgctggccacacttgtacggccatcatctttcaaggtggacgcctaccccggcgttttgattgccgtatcgcgccatcatattttttgggaaaaatactggcatgttcgacgggtttgttaagttcatgactgatgaggctcgggctcat

SEQ ID NO: 349759 - DNA, 450 bp, Zea mays
ttagcaacatagaaagcacaatagtgtaccaacaatggcagccaaaatattttgcttccttatgctccttggtctttctgcaagtgctgctaccgcaaccattttcccacaatgctcacaagctcctatagcttcctttcttcccccatacctctcaccagcggtgtcttcagtatgtgaaaacccaattcttcaaccctacaggatccaacaggcaatcgcagcaggcatcttacctttatcacccttgttcctccaacaaccgtcagccctattacagcagttacctttggtgcatttgttggcacaaaacatcaaggcacaacaactacaacaacttgtgctaggaaaccttgctgcctactctcagcaacagcagtttcttccattcaaccaactggctgcattgaactctgctgcttatttgcaacaacaactaccattcagtca

SEQ ID NO: 349760 - DNA, 204 bp, Zea mays
tttagctttatctactccagagcgcagaagaacccgatcgacaccatgaggggtgttgctcgttgccctcgctctcctggctctcgctgcgagcgccaccttcacgcatacaagcggcggatgcggctgacagccaccgccgtcggtttatctaccgccgccggtgcatttgccacctgcggttcacctgccacctccggtgca

SEQ ID NO: 349761 - DNA, 294 bp, Zea mays
gatttggaggggaggggagcgccggttcggattgtgcaggctcgctgctggttcttgcagcggcccgacacagaggggtgtgcgtcccaaccattctcttaaacaaggcccttccttgacagctcgtctctatgtgggtattcttgacgaatgatgtactgattacctgccttcgctcgctttgtgaacaactcaaccgcgatgtcaatctgacggggactaaagatgatctcgcgcttcttgtgttaaattttaaaaaggaatttgatgacacgagggctaaactttttactg

SEQ ID NO: 349762 - DNA, 261 bp, Zea mays
tcctcctcgccaataggatcactacgctcgtgcgcgcccctcctcctcccatggccgccgccgccgtcgcgggagcgcggaggccattgcaccggaccttggcgcacccgccaccgcccgaggaggacgagcatcagcagcagcgcgcgtgccgcagcaggggatcctcgtcctcctgctcggcttcctcgtcatcgacgcccgcccggccccggggcacggggatggtggtgatcgttgttaccattgtcacttcgaaga

SEQ ID NO: 349763 - DNA, 450 bp, Zea mays
  unsure (1)..(450): unsure at all n locations
tctcgcgcacactctccaatgacccaatctccccgagcctgccactgccagcgccagctcctccctggcattccagtcccagctccggatcgcttcacgggccgggaagcagcacccgcgctgcgcgcctgatgcgcgcagccaatgccggcgctcgcgtccaccgccatggcccgagccgccgcgcccatcctcctccacctcctcctccttctgctcctcctcactgaccacggccccggccccgccgccgcggtgcgcttcgactacgcctcgctcaccctcggcagcctgaggctgctgggcgacgcgcacctcaagaacggcaccatccgcctgtcccgggacctgcccgtcccgacctcgggcgccggccgtgcgctctacgccaccgnggtgcccctccgcgggggcttctccacgcagttcgccttcaccgtggccacgctc

SEQ ID NO: 349764 - DNA, 383 bp, Zea mays
ggctggtggccagggtggccctgcagagtgacgatgtcgagctcgtcgccgtgaacgaccccttcatcagcaccgactacatgacctacatgttcaagtacgacactgtgcacggacagtggaagcaccatgaagtcaaggtgaaggactccaaaacccttctctttggtgagaaggaggttgctgtgtttggctgcaggaaccctgaggagatcccgtggggttcggttggtgctgaatatgttgttgagtctactggtgttttcactgaccaggagaaggctgcagctcacttgaagggtggtgccaagaaggttgtcatctttgctcctagcaaggatgcccccatgtttgtcgttggtgtcaacgagaaggagtacaag

SEQ ID NO: 349765 - DNA, 395 bp, Zea mays
gagcagtagcggtggcgatggagggcaaggaagaaggtcggatcttcgtgggcggcctgtcgtggcaaacggacgagcgcaagcttgaggacgcctttggccgcttcggcaaggtcgtcgacgcccagtaccattgctgcttgagccttgaggacagtaaatgattctgccatccggaccaatgctgggtgctggagcagaaaattgatgctagcctcaccagtgtggaccctttcagccagctccatgcgatgcattgcagttttgggaagacaaactgggtaactaggagcccagcttaccagcagctcagacttccactgttgttaccatggaaatgcaagtcgtttggctttaggtttgtgcattggtttaaatgatctggtatgcaaact

SEQ ID NO: 349766 - DNA, 441 bp, Zea mays
gttctagatcgcgagcggccgcccttggttgtttttttttattgggctggcatattatttattatctcgctcccaatgtctcgaccatctgtgggcgaaacctagggatcatccttaagatccggactcactacgaaggcgacctagggatggttagtgtttgtccaaacaggcgccaacaagtttattacatagaaaagccttatggtctacagatcacgcaaaaggttagcgcttcaaccagcattaatcattcttcgccttgataaactttttaataatgcccatcatctcacttccagggaatcgtccaaggcagcccctcgcagtggcaatttcgttgaactcacacacagtgtcaccactgaaagctttaagttgatcaggcttgggatcaaatgattttatattgtcaagcaaaattttttcggttttactgaa

SEQ ID NO: 349767 - DNA, 427 bp, Zea mays
tcgggcttctcctccccctccggttcgggttcgggttcgtgaggttctccggggttcggtttcgtgggtgagcggatcgagatggcggcgtcggatgttgagtaccgctgcttcgtcggcggcctcgcctgggccacggacgaccactccctccacaacgccttcagcacctacggcgaggtcctcgagtccaagatcatcctcgatcgggagacgcagaggtcccgcggcttcggcttcgtcaccttctccacggaggaggcgatgcggaacgccatcgagggcatgaacggcaaggagctggacggccgcaacatcaccgtcaacgaggcccagtcccgcggcggccgtggaggcggcggcggcggcggatacggtggtggccgtggaggcggcggctacggcggtggcggacgccgtgatggcg

SEQ ID NO: 349768 - DNA, 176 bp, Zea mays
gttctagatcgcgagcggccgccctttgttttttgatactaatcggggggccggatacaaacctatacatgagggccaccttgtcggaaaaagaggaccacccactggaaatgctggtatagatggcatacttaacaagctgggcaaagacaaattgcttgtagactttagccaac

SEQ ID NO: 349769 - DNA, 453 bp, Zea mays
attttgagcattcagaaacacaccaagcgaagcgcactagcaacgacctaacaacaatggctaccaagatattagccctccttgcgcttcttgccctttttgtgagcgcaacaaatgcgttcattattccacaatgctcacttgctcctagtgccattattccacagttcctcccaccagttacttcaatgggcttcgaacacctagctgtgcaagccaacatgcaacaacaagcgcttgcggcgagcgtcttacaacaaccaattgcccaattgcaacaacaatccttgccacatctaacaatacaagccatcacaacgcaacagcaacaacagttcctaccagcactgagccacctagccatggtgaaccctgccgcctacttgcaagagcagctgcttgcatccaacccacttgctctggcgaacgtagttgcaaaccagcaacaacaac

SEQ ID NO: 349770 - DNA, 421 bp, Zea mays
tcggactagttttagatcgcgagcggacggcgttttttttttttttttatgggggtggggaaataaaaaaacataaattaataataatttagttagaaaaaaaaaaataattttaaaaaaattaaaaaaaatggtaaaaaaaaaaattgtttaaaaaaaaataaataataattttaaaaaaaaaattatattaaaaaaaatattaaaaaaaaaaaaataataatgtaaaaaaataaaaaaaaataaaaaaaaaaataaattttaataataaaagtgtgatggaaaaagtaaatatatatattaaatatatattatattaaaaaaatatagataaaaatattgataaattttaaataaaaagtatattatatattaattattatttaataatataatatgataaaatattaaattatagtaa

SEQ ID NO: 349771 - DNA, 383 bp, Zea mays
cttcacataagcttaaccgatatgtttgggtattctcatgttctatgtttgattagtaaccagtattacatatattaattgttctgtagtttcggggctatatcatgtttctacttgttctgtttatcaaataaataaataggtgggtggtggctatagtttatgtgctcaccatgattcatacttcaattttgtaatgtttcatcaatatagttgaagcaacatggaggtgaaagactgccatgtaaccgatgaagatatgaaactgatgaaggggaagaagcataaggacatgggtcagggcctcaattttgttagcttatgtgccaggaaccatatcattgatatggagcaagcttgtgtgtcagccaagatggcttaag

SEQ ID NO: 349772 - DNA, 210 bp, Zea mays
gttctagatcgcgagcggccgcccttttttttttttttttttgataggtggaacaaatggaaacatataggggctttacgacgaacgactagaacaagtagagcggagtagagtatttacagatagcaagggattatggtgaatgcaatgcaggtgacattcataataatcatttacatatggtcatttgatgtcataggagattagtta

SEQ ID NO: 349773 - DNA, 342 bp, Zea mays
ggcggcggctgatgtggagtaccgttgcttcgtcggcgggcttgcctgggccaccagcaacgagtcgctggagaatgccttcgcctcctacggcgagatcctcgactccaaggtcatcaccgaccgggagacggggaggtctcgcggcttcggcttcgttaccttctcctccgagaactccatgctcgacgctatcgagaacatgaacggcaaggagctcgacggccgtaacattaccgttaaccaggcccagtcccgtggcggtggcggtggcggcggtggctaccgcggcggtcgcggcaggtggtggttatggtggcggacgccgagacggcggttttg

SEQ ID NO: 349774 - DNA, 69 bp, Zea mays
gaagcgaacctgcagtaccggccgaattccggtgacagcgtcggactgccccgccggcacgtggcgggg

SEQ ID NO: 349775 - DNA, 123 bp, Zea mays
tgtctttcggccgtgtgctggcggtggcggaccaggccccgctcgttcctaccagtgggccgtgcgtgcggccatcaacaccctgattgatcgacccgcgcctcggccggatggaggcgttag

SEQ ID NO: 349776 - DNA, 64 bp, Zea mays
ccgtggtcgctggaatgccctccgaccgacgatggccctgtcggccgtgacgagtgatggccgg

SEQ ID NO: 349777 - DNA, 93 bp, Zea mays
tttttcgtcttgggccactttcttagtcccctgtagccggcgcctaccgcttgggctttcctgcgttcgggaaggtgtttgcatggctggaga

SEQ ID NO: 349778 - DNA, 403 bp, Zea mays
atgtggagcttattcaaaaagttatgtctggggaagagataaagctggaagacctctctgattgtgaaatcaaacgattccgtcaagctctggcctcaggtgagctcagtaagatgattgaaccgtggacaccttggtggaaaaaaccctcagccagatctatttcccttggcctggatggaagtcagcttatcagacaagtaaacgcagaagacactgctgtaccatatccagatccaaatactgaccaagaggctagcatcaacgaaatccctgaagggccagaatctcctctcccggcattgaaacaggtaacaaggacagagccatttcctttgcttgctggccacttggttgacaattctgaacaggtactgtttaaacttcggctctacaacggggt

SEQ ID NO: 349779 - DNA, 235 bp, Zea mays
tcggcaacatagaaagcacaatagtgtaccaacaatggcagctaaaatattttgcctccttatgctccttggtctttctgcaagtgctgctacggcgaccattttcccacaatgctcacaagctcctatagcttcccttcttcccccgtacctctcaccaacggtgtcttcggtatgtgaaaacccaattcttcaaccctacaggatccaacaggcaatcgcagctggcatttta

SEQ ID NO: 349780 - DNA, 96 bp, Zea mays
  unsure (1)..(96): unsure at all n locations
cccttctgcccagcttattcaatccaagcgcctggttggattgggatcccatgggcaagcttggcctncttcttcttcttggcgggggcgggttcg

SEQ ID NO: 349781 - DNA, 443 bp, Zea mays
ggcccccactaacttaaaacctctcgtcacttgtctccttcccccgattcgcctatgatgatttcctctgttctctgccctccggccgccggcgccgccgcccccgtcaccggagcgggcgcgccacctatcatagggtctcgctccagttccctccatcctcctccccccgccgcctcccgtatccacctcccccgcctaccgccgccaccttttccctgttcctccagtacacccaccagccccttccccagccacgcttccttcgcactccaacccttcgacgaggttctctcctccatgtccccgcgggaacagacctcccttctctcgcggcagcgctgctggcgccgcgccagggaccttttaaaccgcctgcgcgcgctccccggatacgcccccaaccccgtccatgacgccgtcctcctgcgccacctagcccg

SEQ ID NO: 349782 - DNA, 267 bp, Zea mays
tcgggcagtgtccctctcgttctcggccatcttcttcctttcctccattccatgaaggagaagaagacatatatatcatagaatgatagtatgacggaggcttgacagccgcacatcacatggatccttctgtttccgtttgccgcctccacccgggcgtcgccgttaccggcttatgccccgtctgcctacgtgaccgcttattcggcctccaccctacctccgccgttgaccttacgccgttgtaagtccttctactacgcgcgc

SEQ ID NO: 349783 - DNA, 362 bp, Zea mays
ggttggcttctcctcccccaccggttcgtgttcaggttctggttcgtgggcgagagggaagagatggcggcgtcggacgttgagtaccgttgcttcgttggcggcctcgcctgggccaccgacgaccactccctcaacaacgccttcagcacctacggcgaggtcctcgagtcgaagatcatcctggatcgggagacgcagaggtcccgcggcttcggcttcgtcaccttctccacggaggacgcgattcgcatcgccatcgagggcatgaacggtaaggagcttgacggccgcaacatcaccgttaacgaggcccaatcccgctgcggccgtggaggcggcggtggcggttactgtggcgg

SEQ ID NO: 349784 - DNA, 268 bp, Zea mays
gtcacacttggttgaccccttgcacgtcctgctggcggcgtctctaaaggccggacgagtctggcctgctgctcctggagcgcttgggagttatggccatggacgacctcccgggcgcctcctgctctacatcttcctccatggcggcggctgcctcctccgacccctcggacggctggcagacggcgtcgtatcccaagcgcaaccgcaagcaggcgcagccgccccgtaccacggggcccgatctggcgctgcagtccaacggcaa

SEQ ID NO: 349785 - DNA, 279 bp, Zea mays
agtggaccgaccatggccaccgccgccgacatccgcgtttccatcggctaccaaacccgcttcgggctccgcctcgccgccgcgctctcctccccacccccatcccccgccagcaactccgccttctccccgctctccctccacgtcgcgctcagcctcctcgccgccggcgcgggtggcgccacgcgcgaccagctcgccgccgccctcggaggcgacgcgcccgccggggccgactgcctagatcgctttcgccgagctggtcgtgcagtttggggt

SEQ ID NO: 349786 - DNA, 392 bp, Zea mays
tcgtatgcatgcgcgacacgagtcggccaggaccgtgagatgatgattgagccagtgatgtggtgccacccacaagatgcagatggtggacgtactgaaggatggtggacttaaccaggggatactcgccgtgcgagtaccctcccccagcaaacactatctaagtgtgaaattaaaggaccgcgagatgatgattgagccagtgatgtggtgccacccacaagatgcagatgggggacgtactgaaggatggtggacttaaccagtggatactcgccgagcgagtaccctcccccagtaaacactatgtaagtgttaaattaaaggcaagccccggttttatgcataacctgttattattgctattttacttcacttaatgattgtaggat

SEQ ID NO: 349787 - DNA, 427 bp, Zea mays
attgagaccaactagcaacatagaaagcacaatagtgtaccaacaacggcagccaaaatattttgcctccttatgctccttggtctttctgcaagagctgctacggcgaccattttcccgaaatgctcgcaagctcctatagcttcccttcttcccccgtacctgtcaccagcggtgtgttcggtatgtgaaaacccaattcttcaaccctacatggatccaacaggcattcacagctggcatcttacctttatcacccttgttcctccaacaatcatcagccctattacatcagttacctttggtgcatttattggctcaaaacatcagggcacaacaactacaacaacttgtgctagcaaaccttgctgcttactctcatcaacagcagtttcttccattcaaccaactatgcttgattgaactc

SEQ ID NO: 349788 - DNA, 128 bp, Zea mays
tcgcgccgttgttgccgacacttcaacgcgtgcctcgcgcccccgcgctgctgatgcgatcagcgacacacgccagatccgagcttctgtaggaccttcagccgtccccgtcccatgggggactgcgt

SEQ ID NO: 349789 - DNA, 192 bp, Zea mays
ctcagaaaaattattcatttgcacaaatatcttggtatggtctaaggtggattttgagtttccttcttatggaaggcatgacacactttttccactacaatgcctttgtagtaagccggctatggcagcagttatccccttttgaggttttcatcatcagttatggggtgttaaactttatgtgggtgaaat

SEQ ID NO: 349790 - DNA, 143 bp, Zea mays
gcagcatctgcatctctcgcccacctccgctccgcctgctgctgctggtggtagggaggcggaaaaggaggcccttgcgcccgcccgccggccggatcaaagccgtagcaaccaccacccatggcggacgtgcactaaccttt

SEQ ID NO: 349791 - DNA, 431 bp, Zea mays
caacaagcaacatagaaagtggaatccagtagcaacaatagagcaacaatggcgaccaagatattttccctccttatgctccttgctctttctgcatgtgttgctaacgcgacaattttccctcaatgctcacaagctcctatagcttcccttcttcccccataccttccatcaatgatagcttcagtatgtgaaaacccagctcttcaaccctataggctccaacaagcaatcgcagcaagcaacatacctttatcacccttgtttcaacaatcgccagccctatctttggtgcagtcattggtacaaaccatcagggcacagcagctgcagcaactcgtgctacctgtgatcaaccaaagagctctggcaaacctttctccctactctcagcaacaacaatttcttccattcaaccaactgtctacatt

SEQ ID NO: 349792 - DNA, 296 bp, Zea mays
tcggtctgcgtgaaactgaggaggaactgaggagactaaaagagaagctggggttgctgactgtggaactgaaaaaaaataaagttgtatggggacctgattggaaggttcgttttgcaaaaatttagcacccaaggatggtcaagggaccaaaaaaggcccagaagaattgaaagggggtctttgatgttgaacaaaggcaagaaaaagtgtggggtgcataaacccgcgtggtggttttaaaaaaggaaagggtcagcggtttagggacttggtttaaagacaaaatacacttt

SEQ ID NO: 349793 - DNA, 279 bp, Zea mays
cccctgtgtctctgtttaattggcgcccggccctgggaattagaaaaatccagaaaagtaattaggaaatgaatttctaatttaaaaataaatactaggacttgtttaattcatattaagtccaaatgagtccatttcagttcctggaattttataatattatggtttatcaaatagggccactgatttgacatgaaagccactttaaaattatttgctaattaatacataaaaccttagaaaattcggaactcctccgttttaaatctgatttgactc

SEQ ID NO: 349794 - DNA, 55 bp, Zea mays
ccattcgtttttcctacccctccggttcgaattcgggttggtgaggttctccggg

SEQ ID NO: 349795 - DNA, 373 bp, Zea mays
  unsure (1)..(373): unsure at all n locations
ttgatcgcgatgcggagnccttttgtttnttttttattttggaatgggtaagtgtttattttatattttttttattaaatttttttttttcatttattatggaatatttgttttatatttggatttaattattttttatttatttttattattaatttatatttttatatatttgtgtggattattattaatttttttttttttgtattatttagtagtatatttatttttttttaatatattatttatattttgtttttttttttttgtttttaatttatttgttttattattaggttattattttctgttagttatattaatattttttttattttaaatatatttttactttttttattataattatttt

SEQ ID NO: 349796 - DNA, 129 bp, Zea mays
tctcgcgtttgtccgctacccctccccgaccagatcgccacgagacgccgcgcgatccgacccaagccgacgcctactacccctctcgccgccggcggccatggcgtacggagaccgcgtcaccacctt

SEQ ID NO: 349797 - DNA, 320 bp, Zea mays
tcgctcggcttctacggcgtaacgtaggaggcggcggttccaggcgaccatgcaataatcgccaccctcacgcgagaaatccccggagggattctttggctgaggttgccctcggattgttccaaaaacgaaaaagttagccctcttcctcaggtccaatttggcagcttttgctacacgatccattaactgctttccgatccgtagttctgagaagtttgccctcttcctcatggccaatttggcattttgtataaacacacacaggcaacttttggtgaactacacgcggtatggagctttatttaaaattccagggg

SEQ ID NO: 349798 - DNA, 94 bp, Zea mays
acccaccatccccgatcgcccttggagatggagatggtcggaagtaggggcggggccatccaaggcctatggtaatacggatgggacttgcttt

SEQ ID NO: 349799 - DNA, 170 bp, Zea mays
  unsure (1)..(170): unsure at all n locations
agggaaagaaggnacgccggcaggnacgggaccggaannaacagggagacccacgcgaccgcgagagacgggcaggggagaggaaaaaaaaagaggaacccnagcanccggagggcgagggnacgggggaagcgaaggcggcggcggaaagacagcgggggacggagaag

SEQ ID NO: 349800 - DNA, 174 bp, Zea mays
ttttacccggtggtttaaaccctagttcccattccatcttcgtttccggtccggcgccgacaatggagttctgggggctcgagggcaaacctggatcccactgtaaggtgtgagccctggacattggcttttatccttgcaccgtttccccagggctggcccttggggggaatt

SEQ ID NO: 349801 - DNA, 362 bp, Zea mays
ttgagcattcagaaacacaccaagcgaagcgcactggcaacaacctaacaacagtgggtgccaagatattatccctccttgcgcttcttgcgctttttgcgagcgcaacaaatgcgtccattattccacaatgctcacttgctcctagttccattattccacagttcctcccaccagttacttcaatggccttcgaacacccagctgtgcaagcctataggctacaacaagcgattgcggcgagcgtcttacaacaaccaattgcccaattgcaacaacaatccttggcacatctaacaatacaaaccatcgcaacgcaacagcaacaacagttcctaccagcactgagccacctagccatg

SEQ ID NO: 349802 - DNA, 179 bp, Zea mays
tctttcttctcctcctcctcctccccagaaagggccgcacttacaccaatcgtggtcggggcccaaactcccgaaatcccggcccgctttcacgaccgatcgccccgagccttggtccttcccggcctctgattctcggccccctttcccgtgcttcctgcgaaaaatactctacctca

SEQ ID NO: 349803 - DNA, 381 bp, Zea mays
aacccttctttttttgaccattaaaaaacacaccaagcgaggggcattaccaacaacctaggacggttggttaccaaaatattacccctccttgccctttttgccctttttgtgagcccaacaaatgcgttcattattccacaatgctaacttgctcctagtgccattattccacagttcctcccaccagttacttcaatgggcttcgaacacctagctgtgcaagccaacatgcaacaacaagcgcttgcggcgagcgtcttacaacaaccaattgcccaattgcaacaacaatccttgccacatctaacaatacaagccatcacaacgcaacagcaacaacagttcctaccagcactgagccacctagccatggtgaac

SEQ ID NO: 349804 - DNA, 95 bp, Zea mays
ttttctagatcgcaaacagcctcccttttgtgatcatttttaacatggggagggcatttttataaatctttctttacacacatttaatatcctaa

SEQ ID NO: 349805 - DNA, 475 bp, Zea mays
ttttcctgtcagtattagagtgagagtgaggcatctagtgggagacaagttgagatttttaaggtatctcaaggtagctattcgtcggctgcggtcgtgtagttgtagtataacattgcggcgtgtttgtttgctattatcacctttaagatcatgctcttcatgctcccttctctttttctttattattttctttttcgctttaatgcagtttttattttttgcatttttttgtactatctattgtttattctcttttctttttttcttgtttattttttctttgttttttttttttttttttttcgtttttttttttttcttgtttactatcttttttattttttcttttattttttttttttttttattatcttatttttttaactttattttatatttttttatttattctatttttatatatttctatttttattttctttatttatatttattatttttttattttttt

SEQ ID NO: 349806 - DNA, 366 bp, Zea mays
  unsure (1)..(366): unsure at all n locations
ttttcttttctagatcgcgagcggccgcccttttttttttttttttttgtttgggggggtttttttttttttttttttttttttttttttttttttttttttttttttattttttttattttattttttttnaaaaaaaatttttaataaaaaaattttttttatatttatttttttaaaaaaaaattatttttatattaaacaactttttttttcttttttatctgatttttttttctaataaaaaattttttttttttttctattattaatcttttgttatagtttataaaaataattatttttttattatttatttatttttattatttaatttttttttttattattttattattattattt

SEQ ID NO: 349807 - DNA, 413 bp, Zea mays
caatattgtaccaataatggcagccaaaatattgggcctcattatgctccggggggggtctgcaagtgctgctacagccagcattttcccgcaatgctcacaagctcctatagcttcccttcttcccccatacctctcaccagcgatgtcttcagtatgtgaaaatccaattcttctaccctacaggatccaacaggcaatcgcagcaggcatcttacctttatcacccttgttcctccaacaatcatcagccctattacagcagttacctttggtgcatttattggcacaaaacatcagggcacaacaactacaacaactcgtgctagcaaaccttgctgcctactctcagcaacagcagttacctttggtgcatttgttggcacaaaacatcagggcacaacaactacaac

SEQ ID NO: 349808 - DNA, 208 bp, Zea mays
tctttcttcttttttttataccattatctttatctactccgagactcataaaaacccgtgctgcaccattaaatatttcctcttttccctttctttcctaactctcacttctactaccatctccactcattcaatcatttatttatttttttattcaccttcttcttttcaactactatcttacttcctttttttttcatccattttt

SEQ ID NO: 349809 - DNA, 299 bp, Zea mays
gcaactaacgcgatcgcgcgccgacaacgacgcgcggtgccggcgcctttgttgcggtgttacaaactccgctgcatcgcctcggtcggtcgtcgtcatatcatgggtgtccggctgccggtggcgtggtccgccgtcctcgtcctcctcgtgcgggcggccgtggctcgtgagtactcggccatctttaactttggggactccctggtggactccggcaacctgttggttgacggtatctcgtactacctggccacggtgctcttgccctacggcatgacccacttcggttaccctac

SEQ ID NO: 349810 - DNA, 208 bp, Zea mays
tcagtagcttctgcttgctctggggggaaggagagagagagagagcgatggggagatctattatatagcttagtttgtggtccttgaacgaagatgttgtcattattcatctgtctcttttttgtggttgtttttttttttctttttttttcttttattcttgttttcctatttttttatttatcttttttttctattatttatttaa

SEQ ID NO: 349811 - DNA, 137 bp, Zea mays
  unsure (1)..(137): unsure at all n locations
ttttctagatcaccagcgtccaccctttttttttttaccctcgcgtgggggggcccaaaaaccctanccccccccgcatccaaacccatgcccgcacacacctccacgtccttcttctttccggcaacccaccaacc

SEQ ID NO: 349812 - DNA, 237 bp, Zea mays
tcttcctaaatcacaacggccgcccttatttgtttggtttttaaaaaaagtatgtttgtttaaattaattttttttattatattattatttatttttttttttccaaaaaccaaaaaaaacaaattttattaaaaaacaaaatctttaaaaaaaaaattttcaaaaacaaaaatctcaatactttaaaacaaatttaccaacaaaatcttaaaactaaattattaaaacataatcca

SEQ ID NO: 349813 - DNA, 169 bp, Zea mays
  unsure (1)..(169): unsure at all n locations
acatcactagcctcacccattctggattgtttaaacaagaagatggggctggtcacttcttttgctctatgaancccaattactagctatcatatataaaattaaaaacttcattatatccagtgccacctccaaaatataacgtctcgatagaacaaaaccttattat

SEQ ID NO: 349814 - DNA, 123 bp, Zea mays
ccttcctttttggtttcgtaactgttaaggaactgagtgtgtctaattaaatggatggggggtgctattcaaaaatttccgaagggggccaatgccgaccgcggggaaggtgatcaagttcaa

SEQ ID NO: 349815 - DNA, 382 bp, Zea mays
ttttctagatcgcgagcggccgccctttttttttgtgtttataatatagggttggttgtgtttaaaacaacaaaaaactttcgttcattatactcattaaacatttacatccacatacctttattcacgataaagttctttaccattaaagcatccatcaacagtttttttaatccacattaggctatctttcttaccatcaatgtaccattatcccttacattaaattttgattaacattcaaatcaatcactctcaataaaaagttacccactccaatcccaagcaaaaaccttattttttttttatttcaataatcacacattctttatactccaattcaaaatctttttatttttaatacacttacatactacaattt

SEQ ID NO: 349816 - DNA, 211 bp, Zea mays
gcgagatcgggggtcgccagctcgcggggcgcggtgattaaggggggggcggggattcttatatcttacttaataagttcttattcttacaactgtcttaatcatggcccttctggccagtgtttctattggaggtttcatataattgtgaattaatttcctttttccagttggttgaacaattaactttatttagatttacgttatctaa

SEQ ID NO: 349817 - DNA, 322 bp, Zea mays
ttgaactctcctgcttatttacaggagcagcaactactaccattcgggcaggtagctggtgtgagccctgctaccttcttgacacaaccacagttgttgccgttctaccagcacgttgcgcctaacgctggcacccttttacaactgcaacaattgctgccattcaaccaacttgctttgacaaacccagcagtgttctaccaacaacccatcattggtggtgccctcttttagatttcttatgagttatagttcaataataaagttttttatctgatgtttgtggcttcccagaaataagaaagtacatttctagattctt

SEQ ID NO: 349818 - DNA, 173 bp, Zea mays
tcgttaggcccagtaaattttttgatgcacgattggtagtattgccggtgccgctggtgctgggagctcatcatcattcgtcggtagcaggaaggaggcggcgtgtaaggggaggcaaatgctggaggcctcacctcagggtcttttcaccagatggacacgccggataggcc

SEQ ID NO: 349819 - DNA, 270 bp, Zea mays
tttgcgggagcccgttctgctccagggaaggttcagctccagctgcaggggcgggtgaacaatgggacgaactactcaactcctccacctgcgcgaacaacatcctggcgaccggcgccgctgcgctgctcgccgtcgtcctcgcgctgcagctgctcgtcagggtcgcaaggaacggactacgacacgcgcccgtcttcgcgctcagctcgcctttgcagcgggccgtcgtggttgtcaactcctgcctgggcctgtcctacctgtgcc

SEQ ID NO: 349820 - DNA, 262 bp, Zea mays
taattttcctcggcggcgtctccatgtcaccggcggctgacctgcggggggggaccgaaggcaatggctagctcttctgtgtcgtcatacatggagctgaaccgccccaacctggaggacttccttccgtccgacttgttcccgcaggaggctcccaggaatctccatctgcgcgatctgtttgacatttttcctgtgctaacctaagcattgtttgccatatactatgatttatttactcgctgttttaattctaattttt

SEQ ID NO: 349821 - DNA, 137 bp, Zea mays
ccttcctttcttaaatcccaacctcccacccttcttttctgtttttaaaaaaaagcccgcccgcttcccctccaaatccaacatctttaaccatattccataccaaaccacattaactcttttccactccttttttt

SEQ ID NO: 349822 - DNA, 181 bp, Zea mays
tcttccttttttacctgaagaagagaatggcctccacggtttctccaccggtggtggggaggtttaccaatatcctatccattgcctagtccggccgttttaaaacatttttattttaccactttggcgttctttataactttaataatcattacctcttctccattatttcattttataa

SEQ ID NO: 349823 - DNA, 142 bp, Zea mays
tcggactcgtgggttccggacgaaatctgacccgggccacactccgctgctcgtccagggcaatccactccaaggcctggatctcgctgctgctcgcgctgaccgtcgctctctccgcccgggcggaggaggagcccgcctc

SEQ ID NO: 349824 - DNA, 294 bp, Zea mays
  unsure (1)..(294): unsure at all n locations
ccttcctttctagatctacttcctacaccgagtcgcgactccatataaagagcgtggggatatcacaatttaccanatccctatcttctttaccaccaacattccatcactataactcttaacttaaacctttatatctccttaaacttacatcaacattatatttatccctaattcttactatttcttataatctaccacttcttacttcatcttacaactctttatattttatctttctttattattaatatttcttatttaaattttctattttattttacatactttttt

SEQ ID NO: 349825 - DNA, 257 bp, Zea mays
ttagatcgcgagcggccgccctttttttttgtttgttttttatttaatgtttgtgtggtttaaaaaaaatcttgatccacaatgattacggggcatatgaaggaaacacaaattttccaattatgtgacaccgggcttgacaactcccaattttccccaacgtgggacgggtggcaggtacaacaaacactttttgaccagcgcgggatctggatttttactccctacttgtgcccacaagtggagcattaagcaac

SEQ ID NO: 349826 - DNA, 291 bp, Zea mays
tcttcctcccacccttcccctccaaatccagcggcggtggcaaagccaagccaaacgatcttactgctccgctccgctttgttgccaatttccgctccaagcgtcgcggtcgtgaagtctcgttgcgatggattctaggcccctctagactgactcccccggcgacccggccaacggcgccgtccttccgttgtccgtgttcttatctttccttactcgtttctttaatatcattattcccttcatctccaatctttatttatctttttctttatctctggtattttgttt

SEQ ID NO: 349827 - DNA, 173 bp, Zea mays
  unsure (1)..(173): unsure at all n locations
ccaacccttcctttttcccttggcttattttaaaaccccaaccgggcgcctttttttttttgggttgggatccaattcccaaacaacatctttaaatttcttccaacccttttttgntccacaccaaaccaaatagaaacctcacaggccaaaacttccccaaaacctacata

SEQ ID NO: 349828 - DNA, 273 bp, Zea mays
  unsure (1)..(273): unsure at all n locations
tgacgtggtcactccaggggagctggtggggaactcattaaccgtcncggccnnacgtggcgcctaccccgacggtcgctctgtgcgcgcgtcggtcaccgggcgccgccgcatcgtgccgcccgcacctggctccttctaccagagatccacggtggaggtggtggggtacaaggcctatggttgcttttccgtatccttatatcttctttttctcccaagtttcataggtaatgtctagattagccttttctcttttcatttttttttcct

SEQ ID NO: 349829 - DNA, 370 bp, Zea mays
tgaagatcctaagaggcatgctaaatctaaggaccctgggtggaagtgtgggggctggccatatgaagggaagaaggatatggttcaatgcatattttgcaaaaaggtggttcctgcaggaatcaagagattcaagcaacacatcgcaggtggttatgcagtcgtcgagaggtgtccagctgcacctgcaatgatcaggaaagaaatgtttgattttttggtgaaaaatgcaagaaaagaactgaacttgcagcaaggaagggaatgggattctgaaagtggaggtggagtgcaagaagtacctgttgtgccaagttcagggacaagagttaaggaaaataaaaggaaggttcaagcatccattggttct

SEQ ID NO: 349830 - DNA, 226 bp, Zea mays
aatgatatccagcacgatcccatacgactgcggcccatattaccacgccccggatggagctgaatcttccaacccacgcggcggtgatgccctaccacaggcatgtgggcacggttcgggagcaacatatccaagcgacgacgggcaacttgcgctccgatcttaacgtccttctcctccatccccaggccattagcgacgactcccgccttcgttccataaggtc

SEQ ID NO: 349831 - DNA, 450 bp, Zea mays
taataatttagaccaactagcaacatagaaagcgagcaatattttaccaacaatgggggccaaaatattttgcctccttatgctccttggtatttctgcaagtgctgctacggcgaccattttcccgcaatgctcacaagctcctatagctttccttctacccccgtacctttcaccagtggtgtcttcggtatgtgaaaacccaattcttcaaccctacaggatccaacaggcaatcgcagctggcatcttacctttatcacccttgttcctccaacaatcatcagccctattacagcagttacctttggtgcatttattggcacaaaacatcagggcacaacaactacaacaactggtgctagcaaaccttgctgcctactttcagcaacagcagttttttccattcaaccaactagctgcattgaactctgcttcttatttgcaaca

SEQ ID NO: 349832 - DNA, 102 bp, Zea mays
atacatatctgcgaacacggacgccctcgggcggccattagaagagagagagccgcgcaacaagcgtgacacaaggggaaacggggaagggagcgcaaggga

SEQ ID NO: 349833 - DNA, 421 bp, Zea mays
ttggttcattagctttatctactccagagcgcagaagaacccgatcgacaccatgagggtgttgctcgttgccctcgctctcctggctctcgctgcgagcgccaccttcacgcatacaagcggcggctgcggctgccagccaccgccgccggttcatctaccgccgccggtgcatctgccacctccggttcacctgccacctccggtgcatcttccaccgccggtccacctgccgccgccggtccacctgccaccgtcggtccatgcgccgccgccggttcatctgccgccggcaccatgccactaccctactcaaccgccccggcctcagcctcatcctcagccacacccatgcccgtgccaacagccgcattcaagcccgtgccagctgcaaggaacctgcggcgttggcagcaccccg

SEQ ID NO: 349834 - DNA, 308 bp, Zea mays
tgttggttacgagacgggagggggagcgagcacaaacctgaataaagaaaggggcgggaaaagcgagggcactgcgcctccgctgcggcctgcggcgcccgcgccagccaacccctcccttctaccagtaccagtatttggttggttatttatatgtatatataaaaccggcgctcactccaccactgaccactctaccgagccgagcgccgggcggcctttggactcgtaccactccgcaggcggaacggaacacgggcgagggcgtcttcaccctcccgagctcgtcgtcaccgtcaccgcaccac

SEQ ID NO: 349835 - DNA, 298 bp, Zea mays
tttttcgtaccaggtggccatggactgcgctgagatggatcagaatcaggaggacatacggttactgatgccggtgcaattttgcatgctgcccgagttctcattggacccggtgcccccatactactcgtactccaacgctggcgcggggatgccgattcttgctatggcagcaagaataggtggcggcgcacgggggatgtaactcaaacggatccgcctgatgggaaagccgatggccagcccccagcccatgagcttctaccagcagatgggcacggggactgcttgagctggc

SEQ ID NO: 349836 - DNA, 260 bp, Zea mays
  unsure (1)..(260): unsure at all n locations
ctgtacgcctgaggaccgggaggaacgggggttttacccatttgttactaacatgcgntttttctgccaaaaggggggaccttccaacttcgagcggctcaagtacggggaagggcttcaccccggaaccttcggcggttattggtgaagagggaaacacccacaggggtttttacaccattgggggaggaccagaacccgggggcccagatctttaacccccccaccaggccttccgccgcngcccccctggattacca

SEQ ID NO: 349837 - DNA, 103 bp, Zea mays
catataggctttaacaagtaattgcagaaagcaacatacctttatcgccttggtgtgtcaaaaattgtcagccctattttggtgcagtcaatggtacaaacca

SEQ ID NO: 349838 - DNA, 331 bp, Zea mays
tcggtaggtgtgaagatgtttgctgggtgaaaacgaaccaaaaaaaatgcggttccaatcttgcggattgcctaaaatccttggtggcgcccttaaaagggccttggttggttggccttaaaaggaactggccggggtaccccggttggccatgtaatccatgcgaattttgccccaattttaataatagctgaggaaccacccgttggttaaccaaagaagcctggggccttgtccaggatcattgacctttttgggcttggaaggggcgggttcgaactttttggaggggatcataacatccgcccggggtggctaacccttggaaaaa

SEQ ID NO: 349839 - DNA, 438 bp, Zea mays
ttttaacaagcaacatagaaaggggaatccagtagcaacaatagagcaacaatggagaccaagatattttccctccttatgctccttgctctttctacaatgtgtgctaacgcgacaattttccctcaatgctcacaagctcctatagcttccctttttcccccataccttccatcaattatagcttcagtatgtgaaaacccagctcttcaaccatataggcttcaacaagcaatcgcagcaagcaacatacctttatcgcccttgttgtgtcaacaatcgccagccctatctttggtgcagtcattggtacaaaccatcagggcacaacagctgcagcaactcgtgctacctgtgatcaaccaagtagctctggcaaacctttctccctactctccgcaacaacaatttcttccattcaaccaactgtctacactg

SEQ ID NO: 349840 - DNA, 231 bp, Zea mays
ttctataatctcttaatccgcaaacaccatcgacttgggcatatcatacatgggacggggcacaaccatccacacctacttcgatcaggatcccttagaccaaatcctactttaacacataattctctcaagcgatacagacttactttgcctcttctctacttgagcatttatatttaaatatcgtttaagttatccacttcttcatctacttacctctctttatactca

SEQ ID NO: 349841 - DNA, 89 bp, Zea mays
  unsure (1)..(89): unsure at all n locations
gtttttaaaccnaacccacccaagcggcaaccgggagccctcccccgacggcgccgggggcacggcggagcggtggcgcgcggaggcaa

SEQ ID NO: 349842 - DNA, 272 bp, Zea mays
ttgatcttttaatctagatcgctagcggccgcgcttctttaatagattcggggggtgtctttttttaacatttaaccattttccaataacaaacaaaaattttcatgaccaaggccaaaacatttttaaaattgttaaacaaagcgataaaattgtaacattaaacctaaacttgctattgcgcttccatcaaatattataaattatctctatagaagaatctactactatagaatcagatcaatcaactcattgagtccatggatccaata

SEQ ID NO: 349843 - DNA, 238 bp, Zea mays
aatgctaaataggataaggagacccacccggggcgactgctctccggacccggaggcgcccatggcgttcgccgccgtcctccgcgcccgcctccttccggtgcccactccgctatccagctcctcgccgccgccattcttcgccccttcggcctacgtccgggtaccgggcctcacagcagcagcagcgcgcaccggacggtaccgacgaccgggcgggcgggctcaccgggcgggc

SEQ ID NO: 349844 - DNA, 378 bp, Zea mays
  unsure (1)..(378): unsure at all n locations
natggttctagatcgcgagcggaacgcctccgggctcactaatcccagagagggggcatggctactcaccgtcactgccttccactccttctcgtggccgccgccctcgcccttgccggcggcatggtcacgcggctctaagcagaggacactgcccgcttctatgcggtttgaacccaatccctggcgtgagcgactcgcacataacaggagctaggcacctgggcgcttgggcatcctaagcaccaaaacctgttcttcgaccggcccccgttccaaacttttcccctaaaagagccccccctttacccccccaaaaacctccgggaaaacttctacctagtccacaacacaaaccgacatttcccctggggcatt

SEQ ID NO: 349845 - DNA, 141 bp, Zea mays
tcgatcattgtccgccggcaagccactcgactggggcccacttccaaattgtgggggcgaaatccagatcctccccaccgaacggctacgcatccgccatgctcgtcgccctcctctgcctcctcgcctgctgcgccggcg

SEQ ID NO: 349846 - DNA, 161 bp, Zea mays
  unsure (1)..(161): unsure at all n locations
ttaatgtaatactctctccctcgccgccggccagcttcgtcttctgccacgcgccagctncgggacaaaccactgaaggggggagaggactcgctcatatcgtcccgtggggggggactcgatcaaggggatgatcttcgcgatatcctgggggcccaagg

SEQ ID NO: 349847 - DNA, 416 bp, Zea mays
tttgtcttcggtatgtgaaaacccaattcttgaaccctacaggatccaacggggaatcgcagctggcatcttacctttatcacccttgttcctccaacaatcatcagccctattacaacagttacctttggtgcatttattggcacaaaacatcagggcacaacaactacaacaacttgtgctagcaaaccttgctgcctactctcagcaacagcagtttcttccattcaaccaactaggttcattgaactctgcttcttatttgcaacaacaacaactaccattcagccagctacctgctgcctacccccagcaatttcttccattcaaccaactagcagcattgaactctcctgcttatttacagcagcaacaactactaccattcagccagctagctggtgtgagccctgcta

SEQ ID NO: 349848 - DNA, 414 bp, Zea mays
catcgatctcgtttcaaatccatccatcctcgtttcctccgtcccgcaggatctcaaccccatggccaagatcaagatcgggatcaatgggttcggcaggatcggaaggctggtggccagggtggccctgcagagtgacgatgtcgagctcgtcgccgtgaacgaccccttcatcagcaccgactacatgacctacatgttcaagtacgacactgtgcacggacagtggaagcaccatgaagtcaaggtgaaggactccaaaacccttctctttggtgagaaggaggttgctgtgtttggctgcaggaaccctgaggagatcccgtggggttcggttggtgctgaatatgttgttgagtctactggtgttttcactgaccaggagaaggctgcagctcacttgaagggtggtgc

SEQ ID NO: 349849 - DNA, 220 bp, Zea mays
ttttgatctcgtttcaaatccatccatcctcggttcctccgtcccgcagcatctgaaccccatggccaagatcaagatcgggatcaatgggttcggcaggatcggaaggctggtggccagggtggccctgcagagtgacgatgtcgagctcgtcgccgtgaacgacccctttattagcaccgactacatgacctacatgttcaagtacgacactgtgcac

SEQ ID NO: 349850 - DNA, 137 bp, Zea mays
  unsure (1)..(137): unsure at all n locations
ccgatcattacccancgccccccacccccgggggggaaaagtaagagaaacaaggggcgccccccaccaaccccccaaccgggggcccccgatcccccccaaccaccccggacccaccccccccggccggaaaaagc

SEQ ID NO: 349851 - DNA, 257 bp, Zea mays
ttgcataacttctccaccagtcgtccagtagtccaccagccagcagctcgccggcgtgcctcgctcctgctctgcactgcactgcactgcactggtcgccgctcgagctacccggctgtagcaactagcaagattcgttgggtccgtgaacgtgcagacgcagcacactagactgtctagacacacattatcagattcgttctgcagtacaataatgggagcctgcaactcgtgcgaggccacggcggtggcggctg

SEQ ID NO: 349852 - DNA, 220 bp, Zea mays
ttggataagtattatggccaatctcaattttggaggcctggaccaggtttctatgagagtgccacctctgtctccagtggcaggcgccagtgtcagcctctcgcgcactggaacccgagcatttggccgggcgggtgcggctgctttttctgaacttaccaatggagagttcaacgaggcttagattaaaaaaatcatgggccatgatcccctaacttag

SEQ ID NO: 349853 - DNA, 52 bp, Zea mays
ttcttatgctttacgtcgcgaccgaacggcgacgctgctcctttatggacgc

SEQ ID NO: 349854 - DNA, 263 bp, Zea mays
  unsure (1)..(263): unsure at all n locations
ctaaaagcaagccgcccgcacgcacgtacccgtccttaattccccgacccacccactcgtgatacctatcttccgcccttttttttggctgggaacaaaacaaaatcgggtggtgccttttacaaccatcatttttcaattatcctataaaatcaaaacatcctgaaatcatatctaatatgtccacatttcacccaccatgtacattnttaactcccaaaaaaaaagcctattccctcataccccgttcaatcctaacaact

SEQ ID NO: 349855 - DNA, 57 bp, Zea mays
tcttctgctcatatggatttactggtgcttttgctgaatgcctatgaggaagggggg

SEQ ID NO: 349856 - DNA, 331 bp, Zea mays
  unsure (1)..(331): unsure at all n locations
tttcctantgttaagcacaanagngnaccaacaatggcagctaaaatatgtagcctgcgtatgctccatgggctttctgcaagtgctgctacggcgaccattttcccacaatgctcacaagctcctatagcttcccttcttcccccgtacctctcaccaacggtgtctttggtatgtgaaaacccaatttttcaaccctacaggatccaacaggcaatcgcagcttgcatcttacccttatcacccttgttcctccaacaatcattagccctattacagcagttaccctttggtgcatttattggcacaaaaacattaggggcacaacaac

SEQ ID NO: 349857 - DNA, 121 bp, Zea mays
gttctagatcgcgagcggccgccctttttttttttttttagaatgaaaaataaaatttcttttgaagggcagggaacagaacaatctgctacagaactaaaatataactaattactgacag

SEQ ID NO: 349858 - DNA, 145 bp, Zea mays
  unsure (1)..(145): unsure at all n locations
tctgatagctctttttcccctncanggcncgcgagccgcattttgcagcggggggtggcgccaaaatcttncccatgctcttctacatggacaaggtggagaacaatgacctgttcaatggcacctacagtgccgtccaccttcc

SEQ ID NO: 349859 - DNA, 210 bp, Zea mays
taaatgtattggaagcagaaaaccaacggagggtcattcttagattgaaggccgtgaccaaaaatctcaccaaaacagtgaggacagctattaaagagatcatgaatatggtcgttatggttatgattcgtattatgaaagaagcaagaaagatagtatcttgataatacactattcatgtgacaacaaacgttaaaagagtacattaat

SEQ ID NO: 349860 - DNA, 55 bp, Zea mays
tttactctctaacaaaacaggaatcctcaacagctgcatccaaaaaatatacttt

SEQ ID NO: 349861 - DNA, 430 bp, Zea mays
tctatatcgcgagcggccgccctttttttttttttttttttttaagaaagggtgggaaacatgacaccgagcaaagcaatcgtcctcagctgtggggcaatttaccgcacaatataatacaaggaaacagattggtaaacctagattgacatgtgtaaacaataaaaattcgaaattaggcattcacattgactccaagcatgtccatggctctgaaacgtcttattggaaatgagctcattggaaggtgatccaggtgaagaggccatcttccaaacagaaggcacgttagaaaaggtagcctcattagttttgtttgaggccatggaaggaattgctcgcaattgcccatgagcatcaaaatgcgcgttctcaatgtctccatcgtctattctaccattccacgctggttgaagatttcaaacatggg

SEQ ID NO: 349862 - DNA, 320 bp, Zea mays
  unsure (1)..(320): unsure at all n locations
taactantttattctagctacagcagtcatggggctcactttttacctaattgagtaatgaattaaatgcatcaatgtcccttgaagttgtcaagagatgccacttatgtccactaactttgaaaatatatttatgggttcctaattaacttgataagtggtgcacttcacatacttaaacttgcaagtccatttctggacatcatccataacatccattcctaatctcttttagttcactttacaaccataattacaagtttggggccacttcttcattatacttctttaattataaaccccccttttaaactatttaa

SEQ ID NO: 349863 - DNA, 316 bp, Zea mays
ctgcgcgcaccgacttcaagcaaacagtctggtaaaagagcagcaacgaaagcgaaaggtttcaggtgcggttgtgccattatgtgacagagaatgccagttttctccctttttccgctcttgctggagtgttgtatcatgtttgaggcgctttctccttttatttccttttcaagtattgtgggtaagcttatgtatacaatcactcattttggtgcatgcgtgcaatcaaactatccagagcatccaatctagatccaacggtttcatttgtttgttgttaatatcataatttgcttttatattttttctttta

SEQ ID NO: 349864 - DNA, 126 bp, Zea mays
aatgcgacccactcatacgtatatccacccgaaccaaaccatccgtgggtgttttctacaaacgagggcgtcgcaacaaaaatacctatatcaataacgccaccaaagattccccaaataccccaa

SEQ ID NO: 349865 - DNA, 274 bp, Zea mays
tattttttgtcagctcctgcattcattctgggcaattcaatatataggtcgtgaaccacaaaaacatcaaagagaccggtacctcgaaagcctcctcttgcatcgatgcctattgaattcggtccgaatatgtgcgcttcgtcctaaaccccataccaccaaacacgctgcccaactctgaggcatccacccaatgactaaatggcgcatttcctgcatctactctccggacgacctctttccttcgatgaggcatctgtaccctttgtcaacc

SEQ ID NO: 349866 - DNA, 376 bp, Zea mays
  unsure (1)..(376): unsure at all n locations
caaggcgaaggagtcaacacctcaagaccttagaagctgtgttgaaggcctacaatacatgcggaagaaccaacctgagaggcgcatgttttctgcatgcaccagattaatttggtatgcgccccacagcgcatcagaacaagcgtcgcggtggctattagcgctgggctcctagcagtggcattaagcgccactagactaatccggtgtgtgctgaggaaggagcgtcngaacatacgttgctcactagagagattctagagaagaaaaaagggctcctgattaatcctgtgatggccatcaaacactcccaagcgctctagcaaccacaagtggtacagggcaggttcaacacgaaacgacaattaagcaaacc

SEQ ID NO: 349867 - DNA, 437 bp, Zea mays
tctctgtgtcttcagaccattagctttatctactccagagcgcagaagaacccgatcgacaccatgagggtgttgctcgttgccctcgctctcctggctctcgctgcgagcgccacctccacgcatacaagcggcggctgcggctgccagccaccgccgccggttcatctaccgccgccggtgcatctgccacctccggttcacctgccacctccggtgcatctcccaccgccggtccacctgccgccgccggtccacctgccaccgccggtccatgtgccgccgccggttcatctgccgccgccaccatgccactaccctactcaaccgccccggcctcagcctcatccccagccacacccatgcccgtgccaacagccgcatccaagcccgtgccagctgcagggaacctgcggcgttggcagcaccccgatcct

SEQ ID NO: 349868 - DNA, 127 bp, Zea mays
taatttaccgcctatcagcggccactcctggtgctcatcgcagacgtgtgtgacggcctcaacaacacgcgaaaccaaccccgtccccattctgacctcaactagccaccatggcttcttcgaagag

SEQ ID NO: 349869 - DNA, 406 bp, Zea mays
tcttccacgcgtccggcgtgccgccggcgccatggccgcgccaccgccgtcgccagaccaaacctactagcagcgcgtcgggggtgcacctgcggccgatctaggagacagggatttcttctcgtcctgtcctgtggattattacgggcctggatttgcttgggagtgagaggagagagcgagtaatagggtgaaggagtcttggggagaagatggctgcggaaatggtgaaggcggcgacgagcgacaagctcaaggagatggactgggcaaagaacatcgaaatctgcgagctcgtggcgcaggatccggggaatgcgaaggatgtgatcaagtctataaagaagtctgtagggagcaagaacaagagcactcaacactttgctgttatgctattggagatgct

SEQ ID NO: 349870 - DNA, 277 bp, Zea mays
ttacctgatcttaccactgggcggacgccggggcgcgcctacaccaggtctgggggggtcccttcaacgagcacacacaaaattcagtgggcaatgttgaatgcatagagcaatttctgcgcaaaaagatggcatcagacgagtttatcagccttgacgcaccttgtgaggctcgtgctaaagaagaagggggagaccaacatgttaaagtttccgttcttagtgcataaagaactgttgcatttactgttttacactatgcctgtgttgatgctat

SEQ ID NO: 349871 - DNA, 238 bp, Zea mays
ttctaatttttcgactagagcgcaagcatcggggccctttttcagggaagggggggggcgcaaaaacattacgaacgacgaggaggtcagaatgcctgtcctctgcctgcgggacgactactacgaggtgtcccgtaagctcaagaccatgaacaagcacaagctctaaaacggcgtcacgtaagagagcacccgttccgccatcaagtaccacagcttgaaggccatgccgttcatc

SEQ ID NO: 349872 - DNA, 358 bp, Zea mays
tacactttctggcggaggcggcccccaagggccaaattttccagcccacacgagctccacactccaattttttccggcgcaaagggttagggtttgctgtcggcgatgtctgatcggcagccgtctgaggaaccggaggagcaggtggacctggagggggacgacgacggcatggacgacgaccacgcctgttaccgtcgccgcggaagccgggacgactcggaggagcccgaggaggatgactacaatgactagcgccactgtgaggcctactactactcctggatggagccctagcctgcctgaagtaatagcttagattacactttctatggacccatattatatcttttatctt

SEQ ID NO: 349873 - DNA, 120 bp, Zea mays
gtagtgcgtagagaggatcgtcgaacagaacagcatgaagatggtcatcgtgctcgtcgtgtgcccggctctgtcagctgccaacgcctctgcaatgcagatgccctgcccctgcgcggg

SEQ ID NO: 349874 - DNA, 359 bp, Zea mays
  unsure (1)..(359): unsure at all n locations
cgatctaagatcaagaaaggccacagcnnccaagagaaaccacacagggccgagggggggggagcaaccgacccacatncgcaagcaaaaccacgcccaaggagccgaaaaagagggaaaggaagggaggacagacgacgacgacgacaacaccacgcggaggaggcaccccacgaacctacggccgaaggagacgaagcggacaggccgcacggcggagccacgcaaggccaggaaccgccagacgaagaccaagagacgaggcacactcggaccgaagaagcgcccgatagacacgagaaccggagggcaaaaggacgaaaagcccgaaacccgggacgaaaaaccggggggggacg

SEQ ID NO: 349875 - DNA, 224 bp, Zea mays
tttctggttctatcccctcagctatggcgacagccgtcacgcccgccttcccggtgcgggactaccttcaccggcggcgggttcggctttacgccaaggcggacccgcattcccagggccgcctattacgcaccgggcgggtacgctatgctccggacgggggcggggctgagggcttgggccctcccgctttcgcgggcggcgaggagcaaaccccccaagag

SEQ ID NO: 349876 - DNA, 263 bp, Zea mays
  unsure (1)..(263): unsure at all n locations
acgatcgccatcgccgacccaagcaaaggggcggaacaacaaggaggggggcgggcaccaaaacccactcnaggaggaagacccgaacccccaagcccaacacacacacccaaagcctggcagcaaacacaacacagacgcgcaacccacctaactgccaaacccccaaaaccacccacccacacccaaaacacgccgtgaagcagcacacaccgaaccagcagacgacaaacacacagctgaaaaaccccaaccacagcgaa

SEQ ID NO: 349877 - DNA, 148 bp, Zea mays
  unsure (1)..(148): unsure at all n locations
acgggactggctccggacccganacactgggatcgaaacgcccagcaggggcggatcccaacaaanccaagctggggnccaccacgcacccccccccacaggngccaacagcgggggnagagccaaacaacagggacccagccaccca

SEQ ID NO: 349878 - DNA, 422 bp, Zea mays
tctattgtacaggcgtcttcgtactcgcctatctccgcgacccaaagcgttcccgcttctcccattcttctctcatttctcaccaccgccgccgctaccccctttcgacaacaccatgagggagtgcatctcgatccacatcggccaggccggtatccaggtcggaaacgcgtgctgggagctgtactgcctcgagcatggcattcaggctgatggtcagatgcccggtgacaagaccattgggggaggtgatgatgctttcaacaccttcttcagtgagactggcgctgggaagcacgtcccccgtgctgtttttgttgaccttgagcccactgtcatcgatgaggtgaggactggcacctatcgccagctcttccatcctgagcagctcatcagtggcaaggaggatgcagccaacaact

SEQ ID NO: 349879 - DNA, 194 bp, Zea mays
tgctgcgctttctgctttccgagcgaccgtgccgggtttcttctatagcagggcgcaggcgcaacaaattccacccgttccttcgggtggccggacggaacgaggaaggaggcaggatggcctccgatggccacccgccggagccggggaagaaggaggatgttggcaccacaggcctctggccttgaacaaac

SEQ ID NO: 349880 - DNA, 222 bp, Zea mays
ttctgtctaccttttccccaactccctctcgggtattttcctccgcaggcgggggcccctcatcattatccccttaccaccgactaatcttccccagctgagttaatccccgactggtccaatgcgtagatattttttctctcctaaacccccacggggttacccctattcaaagtgctcaacgaggggaaactttccaaggtctaagatctattgaaggag

SEQ ID NO: 349881 - DNA, 276 bp, Zea mays
tttattccccccgccccaacttgtcaggactcaagaggctcccctcctcgctcgccgcggaacacgcgcgccgtcgtcgccagcccgggttcatttctccgttccttggtgcggtggtagccgagcgctccggccatggcgttctatcggggcctcaccgcagtctcgagactgcgatcacgcatggcgcaggaggccaccacgctggggggtgtgtggtggctttcgtttcatttctcgtttcttctttcttttattttctagcttgcttcaatt

SEQ ID NO: 349882 - DNA, 394 bp, Zea mays
gcttcttcataacaaaaacctcagtggaactgggcaaaaaatccccgtgcccagccacatcttacagggccacaccataacctgggccagcaaccactactactaccccaggtaggattgcactgttaccctaagctggcgctctgccactactttttgtgagaggcaccacgagttttttttgggtgcaagttgggccggctggctggtaccaatacttggtaacaacacactactagtgtgtttgcttcagtctcaactatgtgtgtatagaatgtatcaagttcatatagtacaagactctttacatatttcaacatgaagcaacaaagacaagaagtctgtttcttccttacacaatttttgggcctaaccagccttggtacttcttttg

SEQ ID NO: 349883 - DNA, 164 bp, Zea mays
tttcttggacgcgagggcggaaatgagagcgggggggacgacaaggaaaaaggggggcgacaaactatctacaacgagcttttagcagcacccgaggagcacccagagttgcacacagaggctcccttgaacccaaaggccaacacggagaaaacgaccccaac

SEQ ID NO: 349884 - DNA, 355 bp, Zea mays
tctatcgatctcgtttcaaatccatccatcctcgtttcctccgtcccgcagcagtctcaaccccatggccaagatcaagatcgggatcaatgggttcggcaggatcggaaggctggtggccagggtggccctgcagagtgacgatgtcgagctcgtcgccgtgaacgaccccttcatcagcaccgactacatgacctacatgttcaagtacgacactgtgcacggacagtggaagcaccatgaagtcaaggtgaaggactccaaaacccttctctttggtgagaaggaggttgctgtgtttggctgcaggaaccctgaggaggacccgtggggtttcggtggtgctgaaattgtt

SEQ ID NO: 349885 - DNA, 413 bp, Zea mays
tcgctagttctagatcgcgagcggccgcgccttttttttttttttttaaaggcggaactatataatgatgcaaatattattggtcataccacacatgataatgaaagttaaaataaatgtaaatatacatatatatatagatatataaagaatatagaaaataaaaaaaatataaaatattttaaaatttttactaaatattaatatattattataatttttgtaataattcctaatgaacaagttttaaatatcctatataattataaaaaaaatatatttacaatttaaaaacatttaatatttaatatattatgcaaaaaataaattaattattttattaacttaaaatataaataaaattaacttatgataaatataatataatattatatttataaatatattataaa

SEQ ID NO: 349886 - DNA, 353 bp, Zea mays
gacggagagagctctcagcttctctcgacctaagtaagctaggtggacaacgcctgcaggctgcggcaccaacgcggccttcgccgcgaccccctccccatctccctcctccctaccatgcgcgagggcgaggcccacgcccacgccctcccgtcgaaaacccagctactcccgtgcctcaaagatgacgagccgcgacaaggtggggtgctcctcgatcccgctgcccctcgaccgtgtccttgccgcgctggtcgccagcacccagcaactcgggagggggtgggaggcggccttccgcgttcgatgcgggaaggcagctggagcggcggtcggtgaggcggaggggaaag

SEQ ID NO: 349887 - DNA, 104 bp, Zea mays
tcattatacctaaccttcaagacctccccggtggtccttttaaaaaaaaagttcgtctttaaaaacattttattctttcttttctttttaatttcttttttctt

SEQ ID NO: 349888 - DNA, 340 bp, Zea mays
ttgatcgcgagcggccgccctttttttttttttttaaagaattgaatgaattagatgtctgatgtacaagatctaatggtacaaatgctacaactatgctgcgattaaaatacacgatgtgacagttttcaaggatgtgaattgaacaaagatacatgagccagaggaaacaatgtaataatcaattgtgaaacatagtatgtaccgattttcctgatcatgtgagcatacaatgaattcgttgtgtcagaaaggtttactgtgctagctgttgactctcttgagttggacttttaactttttactcccttaattggattcattcatcacactaatggtt

SEQ ID NO: 349889 - DNA, 137 bp, Zea mays
tgtttggcgtccgttcggttacggttcttgatccggctagggaccgccggtggcgaaggcaatgcagccggacccgcatggcccgggcagggggaaggcggtctgtgccaatgcgcacccgcggctgtcttcgccgg

SEQ ID NO: 349890 - DNA, 303 bp, Zea mays
tgtctagatcgcgagcggccgcccttttggtggtttttttaaaagggtggggggggtttttttttatttttaatgtcccattttattctggtaacagattcccatgctttctttcggccctctgatagaatcagcatatggtcacagaatagacttgaattacaaacagctggacaaaaaatacaagacgcagaattaacatgggacacaaaaaccaatgtattaaatatccttttctaaaaaccatactgccttaaaaaaaaaagactggcggagcttcgggcgcacaaagaaagctttaac

SEQ ID NO: 349891 - DNA, 286 bp, Zea mays
tcttttgtgggtcttcagaccattagctttatctactccagagcgcagaagaacccgatcgacaccatgagggtgttgctcgttgccctcgctctcctggctctcgctgcgagcgccacctccacgcatacaagcggcggctgcggctgccagccaccgccgccggttcatttaccgccgccggtgcatttgccaccttcggttcacctgccacctccggtgcattttctaccgccggtccacctgccgtcgtctgtccacctgccaccgccggtccatgttgccg

SEQ ID NO: 349892 - DNA, 393 bp, Zea mays
tctctcgtagagagaaggaaaaatatccccaaaccctagctcccgatctcgatggcgaaccctcgcgtcttcttcgacatgaccgtcggcggcgccccggcgggccggatcgtgatggagctgtacgccaacgaggtgcccaagaccgcggagaacttccgcgcgctgtgcacgggcgagaagggcgtgggcaagtccgggaagccgctccactacaagggctccaccttccaccgcgtcatccccgagttcatgtgccagggcggcgacttcacccgcggcaacggcaccggcggcgagtccatctacggcgagaagttccccgacgagaagttcgtgcgcaagcacaccgcccccggtgtgctctccatggccaacgccgggcccaacacc

SEQ ID NO: 349893 - DNA, 396 bp, Zea mays
attatttgttacccattgtactgataccaatggtggggttcattgtgctcgtcaaattgtaactatttccaatggtgaggaaaaattagtatttatgcaaattgaagtgccttgcgtaacttttgaatcaatcttcattgatttcatttccagaattttctgtatcaaaagtttagtaatgtgttgctttgttaaaaacatgctttaatgtggaatgacagatgcgagggagtggcacatcaactgctgagtctggctcaaaagaagttgatgatgctgtctccgtacaagctctcagaagttacacatcacatcctaagttgacccgagttcgtgaagagtgctacaaggttttctactcgtctcactgaatatgtacctgttgtctacaaggct

SEQ ID NO: 349894 - DNA, 395 bp, Zea mays
  unsure (1)..(395): unsure at all n locations
tttatttcctcattagtgtttgggtctaggccaaagtagatgacaacacgtatagctccgggtgcatgttcgtccgaaggcctcggggtctcattcaaatccatatctactggatcaaagaatgttacatctggccgctcttgttctattactgcaattgcatcattaatttccttgccaatcaactcgggccaactggtcttgttctgcgtagccatgatcacgtactgtccttagcttctctctcttttgaaactgttataataccaataagaatcaataattgagcaacgttagtgtaacgaatagaaacataatatgttgntttgtgctaatgctatcatactttcatagtaagcatgtcttaatcgaatgcactacataactaccgggat

SEQ ID NO: 349895 - DNA, 89 bp, Zea mays
ttctttctagatcgcgagcggccgacctttggtggtttttttggaattggggggggttttttttttatatactgatctttttgggttaa

SEQ ID NO: 349896 - DNA, 395 bp, Zea mays
tcttaggttccgctccccaatttcccctcattttcctggggctgctgcgccgcgcttcctctcttctcgccttctccctcttcgtggcgatccgggttccgctgcaacggcccctgtcgactgtcgtcttctcttctccctcacggcgctcgatccctccggattgccgcgtagcgggatcagtgattcagctggttgaacagaaactagtaaagatggcatcagaagggaacaaagatgtgcctaatgaagctttgtcccgggatcttgcatcgttttctgggccaaacgcaagccgtgccgcccagggaattatagtatcctgcatatgaactaccacagaagggtcattcccttcagagcgccccggctctttactgcttacaagatggctc

SEQ ID NO: 349897 - DNA, 365 bp, Zea mays
attagcaacatagaaagcacaatagtgtaccaacaatggcagccaaaatattttgcctccttatgctccttggtatttctgcaagtgctgctacggcgaccatttttccgcaatgctcacaagctcctatagcttcccttcttcccccgtacctctcaccagcggtgtcttcggtatgtgaaaacccaattctttaaccctacaggatccaacaggcaatcgcagctggcatcttacctatatcacccttgttcctccaacaatcatcagccctattacagcagatacctttggtgcatttattggtacaaaacatcagggctcaacaactacaacaacttgtgctagctatccttgctttctac

SEQ ID NO: 349898 - DNA, 123 bp, Zea mays
tacgttactacccgcagaatataaacatatcgggcatcttaggagaagggggggactataataaccctattaacgtctagcgaaccgttagcagcccatcttgagaatcggacgtatttttat

SEQ ID NO: 349899 - DNA, 403 bp, Zea mays
  unsure (1)..(403): unsure at all n locations
tnctgctagttctagatcgcgagcggccgccctttttttttttttttttttttttgttttttttttttttttttttttttttttttttttttttttttttttttttttttttttttttttttttttttaaaatttttttaatttttttttttattttttgtgagcctctattttttttataatatttttttttttttattattttttttatgttttttttaattgttttctccttttttttttttgtgttttttattttcttttgtttttttttttttgttgttttttttattttatatttttttttttgttttttattgtttattatttgttttatttaatttttattatttttttctatcttattttttttttttttttttttcttttttattatattttt

SEQ ID NO: 349900 - DNA, 209 bp, Zea mays
tgttgtaccattcccctccatggtacctccgcgtgacattcagagatgcgcggcagatcctaatccacaatctggcctagcttaccaaacctctatgactttctgccaacaggcattcattgtttaccatcattcctaaaaattttatgcacccttagctaaagctctagctctttttgctacgaaatctgacttcttcttgttatccg

SEQ ID NO: 349901 - DNA, 285 bp, Zea mays
ttctgatacacgccgcgcatcgcaagcgagcgacacataaagagcgcccatggggtgtgcaccaccatctcgcccgccttcaatcccctccatcattcgctccaacagccccgctttctccaccatcagtgcgaaaaattttatgcgcgctttgggaaagcgcgagctcgttttgctttgaagctgcctccgcctttttatccgtccggggctgtgtgggctccgcctccgtgtactccggccgggcgtggtcaccgagggagcagcggcgagaggggggggggg

SEQ ID NO: 349902 - DNA, 117 bp, Zea mays
tctcttttgtgcgtcagaggcagaggcagagaggcagatgcagaggcagtcatggggagcctcctatatcgccgcgtgatccactttgccaacctcctcgtgaaggtcatgctgccc

SEQ ID NO: 349903 - DNA, 341 bp, Zea mays
ctccgtttttttaattattcctccttacaccccggctttttaatatatcaaatatagccattccaaaacctcttctacctcctctaccactacccttatctatttttttattctttttcctctccctccttatctttttctaccattatattattcctctgcatttatttttctcttattcttattttttattctttttttaataataccttttattttatatttttttctttattttttttttttattattttaatttatattcttctttattatcttttttctttactttattatttattatactattctttattttatatttcccttttttttccctt

SEQ ID NO: 349904 - DNA, 368 bp, Zea mays
tcttttttacaagagaagtgctgctttggcttaccaagaaaagaggtgtctcaggtgggtgattcaacagctagctctcgattttggggcaatcaagaggtgaaattgcgaagaacatgagtaccacaactgccaagggaaaaggagcacctcaaaatgcaaatgatgcaccactcgatgttcagcccttaacaatagcgtatccgggggaaccagtggtctgcacaccaagacccatcgtgtcgcatcctgcatataatggtggatggaaggttctccgccacatcaggccaaatggaagatctgatttcggagcggcgaccgacaggccggttcatctagctgtgtgcgctactcgcctgtgctgt

SEQ ID NO: 349905 - DNA, 87 bp, Zea mays
tctcgcctagcccgacttgcgccttcccagcaagagcccactactttccgggatcgccgaaaccaacttcaaaatatcaatctaaaa

SEQ ID NO: 349906 - DNA, 121 bp, Zea mays
tgatctccttccacctttgccgatcgcccgttgccaccggccgggcgatcctggtacttccacttccaccatggcctcctcctcctcttcctcctcctcctcctcctaccttcttcttctt

SEQ ID NO: 349907 - DNA, 131 bp, Zea mays
tttttattcactatgattgcaagacgcacgaggggtttatctccgacaagactggggagccaataaacttatacaatcacaatcctgaggatctatctttatcaatactgttcaaccgaatctattgctag

SEQ ID NO: 349908 - DNA, 355 bp, Zea mays
  unsure (1)..(355): unsure at all n locations
cctgagccctgcagnnggatgcggaccgcacanngcgcgaagnngcattannacgcctctnngcccgttacnnccgaaaatactgttggtgtaccactncggcgatccccggcgccgtgagtgtcnnaccatgattnnncagtcagcgaccgcgttgatgcttngctggctgnnaccctgatgaagtnntcgtgtccgtaccaactnnggcgtaatcaatggggcccttcggggcccccattgtttctcttttgtggaggnnagtccattgnnacgaaagggatganancctgattnnggcccgccttttccgcttcgcttggnnngtgaacaannnctgaaccnnngtgatgtc

SEQ ID NO: 349909 - DNA, 225 bp, Zea mays
  unsure (1)..(225): unsure at all n locations
ctacnttggcttccacttctcgggggtgctcttcttcctgctggtgtgggccaccaaactctaccgcttcagcacctactccttctcggncgagggccttcgcgccagcaccacgaccaccaccaccacgaccaccaccacgacgacgaccaacaccttcacgctctgcttcgccgacgccaacacttcccctttcacccccgataaccgaaccgcgctggatgc

SEQ ID NO: 349910 - DNA, 228 bp, Zea mays
ttgtttgattgagccgaacacaagcaccctgctgcccgaaacctcttctttggccggctttcggtggtatggtgcgatgatgactagggaggctgtgctgttgtccctcctcttctgcctcgccgctgccggcgaggcagtttcactggtgagccagggcgaggcggcggagctgaccgtgtcagtggacccgtctaagggcttccccaggcagcgggtgtggtacgc

SEQ ID NO: 349911 - DNA, 391 bp, Zea mays
ttttctttaccaactagcaacatagaaagcacaatagtgtaccaacaatggcagggggatattttgcttccttatgctccttggtctttctgcaagtgctgctaccgcaaccattttcccacaatgctcacaagctcctatagcttcctttcttcccccatacctctcaccagcggtgtcttcagtatgtgaaaacccaattcttcaaccctacaggatccaacaggcaatcgcagcaggcatcttacctttatcacccttgttcctccaacaaccgtcagccctattacagcagttacctttggtgcatttgttggcacaaaacatcaaggcacaacaactacaacaacttgtgctaggaaaccttgctgcctactctcagcaacagcag

SEQ ID NO: 349912 - DNA, 211 bp, Zea mays
acggcggcaaagaaccaaacacgcaccggggggggaccaaaaagaacggggggggggccaaaaaaacaccaccacccccaccgcacgaacaaaccgagagcggcggcgggaacaaggacagggggggagggaaacgagaaggggggggccgaaacacgcccaaaccagaccaccaaccggaacgaaccaaaccagaaggggaaagaagaag

SEQ ID NO: 349913 - DNA, 324 bp, Zea mays
tttccaccactgctggaccggcatcccaggtggccattgccgcagctgtagatgggtcagattcaaaacatcatccactttctaatgccaatgcattcatacatgctgaccgacttctccttgaacccatcgccccactactacccgtacccaaacgcttgcgcgtggatgccgatgcttcctatggcagtaggtataggtggtgactgcagatgccctgcacctgaacggggctgcactgcttgtactgcgctggccccgccctaaccactaagctggtaccaccagatgggcaccgggactgcttgcgcttgcggcttcgat

SEQ ID NO: 349914 - DNA, 142 bp, Zea mays
tcgtcgatcataggcagcgcagcaatgtctgcgggagtagtactcaacggccaaatgctgcctctaacctcgtcgctacccctgtccctgctgctgctcctccaactaagctgctcctgcacctcgtggggatggagcacga

SEQ ID NO: 349915 - DNA, 227 bp, Zea mays
taagcggcagtgcgtagagaggatcgtcggacagaacagcatgaagatgggcatcgttctcgtcgtgtgcctggctctgtcagctgccagcgcctctgcaatgcagatgccctgcccctgcgcggggctgcagggcttgtacggcgctggcgccggcctgacgacgatgatgggcgccggcggtctgtacccctacgcggagtacctgaggcagccgcagtgcagtc

SEQ ID NO: 349916 - DNA, 212 bp, Zea mays
  unsure (1)..(212): unsure at all n locations
tnctgnagttctagatcgcgagcggccgcccttttttttttttttatttttggttgcttttttattttttttttttttttttttttttttttttttttttttttttttttttttttttttaaattattttacttaaatgaattaattaaagtttaaatattaataaatttaataaaaaaaagaattttattttttttttaaatattaatata

SEQ ID NO: 349917 - DNA, 95 bp, Zea mays
aacacttgtttcaaaaactctatccgcctcgggagtgggggatgattcagaaagagaggagagtgctaaagacaaaccctgatgagatcgaaaag

SEQ ID NO: 349918 - DNA, 140 bp, Zea mays
gtcgcatcccatcccactaccacccatctcgtcgtccgccgattcgagcggggtcttccaacccaggggcagtgatggcgacgaagaggagcgtgggcaccctcggcgaggcggatctgaaggggaagaaggtgttcgtt

SEQ ID NO: 349919 - DNA, 162 bp, Zea mays
  unsure (1)..(162): unsure at all n locations
tgncttcagaccatagcttatctactggagagcgcataagaacccgtcgacaccatgagggtgttgctcgttgccctcgctctcctggctctcgctgcgagcgccacctccacgcatacaagcggcggctgcggctgtcagccacagccgatggataattta

SEQ ID NO: 349920 - DNA, 152 bp, Zea mays
ttctagaccccaagcaccaccgcggcggcggcgaccatggctgtcggaaagagcaagaggatctccaagggaaagaagggcggcaagaaaaagaccgtcgaccctttctctaagaaggattggtatgacatcaaggcaccgtcggtgttcag

SEQ ID NO: 349921 - DNA, 340 bp, Zea mays
tcttatatcttggattctacccaaacaaacctattgcaattctccatatctacaggactcttctacactgcagatcattctaccagaaagaactatagttttaacacaccattcaacaattaaattaatattcagtcactggactacactgacaaggagccatcttggctctcatatccatccacacttatactgttcttccaacaaacactgaaaccacgctggaccatctgggttcactccttatacgcgcaaatcatctgctccatcttacgggagggtgtcttttaacctgcgatcccaaccacaaagacccatgcttgctagccttggaatgaac

SEQ ID NO: 349922 - DNA, 333 bp, Zea mays
tctttatatctctgattatccactgccaaaccgagtgcaacttggcttatctagaggtgtctttttcactgcagaccattcgtagctggaagatctcgattgtgtgaaccaattattacaccaattagaatctgttgttcagtccctgggctacactgagcaatgagccatatccactatcaaatcaatccacactgctagtattcctcggacgaacactcaattcacctgtacaacattgcattcactgctcacagtccacattgatctgctgcaactttcgggaggctgttttttatcatgacctccactgtacagactattacccttgat

SEQ ID NO: 349923 - DNA, 337 bp, Zea mays
tgccaaccgaggcaactctcaaagtttagggtctgaacccagagctggctggagggacgaataagaagccccttgatgcgagccttctacatggctagctcccaccatggatccaccaccgcccccaagaacctacccgtcaactacagcctgccagtaaatgacaccgcgcgctaccgactacacttttactacttacagggccaggacaagtactatcatgtccacacttagctctacggattcaccacattgcgcatgaacattccttcatgccccctttaggtgcactacccacctatactgtcctttcatgcctccataagatttctaccaa

SEQ ID NO: 349924 - DNA, 425 bp, Zea mays
tgcaacatagaaagcacaatagtgtaccaacaatggcagccaaaatattttgcctccttatgctccttggtctttctgcaagtgctgctacggcgaccattttcccacaatgctcacaagctcctatagcttcccttcttcccccgtacctctcaccagcggtgtcttcggtatgtgaaaacccaattcttcaaccctataggatccaacaggcaatcgcagctggcatcttacctttatcacccttgttcctccaacaatcatcagccctattacagcagttacctttggtgcatttattggcacaaaacatcagggcacaacaactacaacaacttgtgctagcaaaccttgctgcctactctcagcaacaacaagttcttccattcaaccaactagctgcattgaactctgcttcttatttg

SEQ ID NO: 349925 - DNA, 441 bp, Zea mays
ggaaagctgacacacatgcagataccattaccgaatttccccgttgccccaaacactttgttacacaccttgatccacttcctacgtgaagcataacctaaggagcacggtgggccctctttgctgaccctgcttaatgatcttaccgacaactagcccaatcacggcccacttgtgccatcggttgtcatggaaatatcaacattcagataggagctatgcccaacatacatgaatgagcgcatatactaccggacctatttttcactcgtacacagccatatagatgcacttgagaagaaatactttgagctgctgaaagtgttagcagctcaagagcaaaggtttcccttaccaagcattccatgcatctacaactgcagaaccgtaagacacaaaagtgccatgcaagaccgattcgacaaatccagaacatgacct

SEQ ID NO: 349926 - DNA, 128 bp, Zea mays
  unsure (1)..(128): unsure at all n locations
acatttgtgacccacgccacactactncgctacggcaggatgatccaatgaaaggggtggatcttcctgcttctccctcttaccgtctctctctcacacctggcgcaaacacagcccacctgcgccat

SEQ ID NO: 349927 - DNA, 241 bp, Zea mays
ttctttttggctcagtggccatgcctccggggacaagctccctgcggtgccgctccaccaccggcggctcctctacccgcgccgcggcagcggtcgcagcgatctccaggcccgccgcaccttcctcctcgtccccgcccgcccgctcgaccccgaggccgcgctccagcccggcgtcgcccttcgcatccggcctcgcgagccgcctcttcggtggccacccggccatcgcccgctccgt

SEQ ID NO: 349928 - DNA, 287 bp, Zea mays
taatcactttgcgtgcagcatcaattgggtcggaaatcgagggtttggtgaagggagatcaccctcagttacatcttacagggacgagatggacaccgccggaggcagagtattgttcgccgaactattcattcttatggtcttaaccatcttacccattctactttggcccccactgtcccataccgacacctcctataaccaccctgtcccgacccttaccctacacgagtatcagtgttctacaccatcaagcgtctggctgactcaccctttactgtgctggg

SEQ ID NO: 349929 - DNA, 120 bp, Zea mays
tgctgctcactcccacggtcccactcctcaggagcgtccatagtttaggtgctcagagagtcctaatggaggtggtaagttactatttcctcaatgttgttcatcaaagactctttcttt

SEQ ID NO: 349930 - DNA, 262 bp, Zea mays
tgtcgtgttcatccgctccctgcgctgcgagcggacccagaagcaggtccgggggatctccatacacgagaagcttaacgggcccttcgactcgcgacgctacctcggcctgatgcgcgcccaccttaggccctagcccttcgaccgcccgctccgcgacgccttccgcgtcctcgacaaggaccgctccgtcaccatcagcgtctccgacctacggctcgtcctcacgtccataggagagaagctcgtggtgcactagttc

SEQ ID NO: 349931 - DNA, 297 bp, Zea mays
ttgtcttattaataacctcactataaaccatcctgtactaggagtaggtccgggggtttttgatgcagctgtaacttacggcacccttctaatggcgacgctactttatcatacagccgcgatcaaaagcccttccctaaaccgccgctcctaagccttggagactgaacgacagtagaacatgacagatgtctatgagcatacaaatctaagctgcatgtaaaactgatgagcaacggcttataaaggaatgcaatgtcagagtttctctatgacaaatataatgactcaatcatt

SEQ ID NO: 349932 - DNA, 352 bp, Zea mays
tcaactagcaacatagaaagcacaatagtgtaccaacaatggcagccaaaatattttgcctccttatgctccttggtctttctgcaagtgctgctacggcgaccattttcccgcaatgctcgcaagctcctatagcttcccttcttcccccgtacctctcaccagcggtgtcttcggtatgtgaaaacccaattcttcaaccctacaggatccaacaggcaatcgcagctggcatcttacctttatcacccttgttcctccaacaatcatcagccctattacaacagttacctttggtgcatttattggcacaaaacatcagggcacaacaactacaacaacttgtgctagc

SEQ ID NO: 349933 - DNA, 216 bp, Zea mays
  unsure (1)..(216): unsure at all n locations
ttttgttggcttctcctccccctccggttcgggttctgattcaagaggttgtggggttttcaatttntttaattatcttatttagatatcttacttctatttttcaaatataatatatatatctatatttattaattattttatttaattttattaatattatataaatatatttagttaaataatattcatatatattattttaatatattataa

SEQ ID NO: 349934 - DNA, 308 bp, Zea mays
gttctagatcgcgagcggccgcccttttttttttttttttttggttgggggggtttttggaatccaatccgatcgaacgcaaccaaacctcgaaatggagcaacttttaaactactacaacaagggagaaaaatagcggggcgggagggaagaacgagcgctacagtgcaagatgtactgaagcgtcacggcgactcttgtcactggccgtggccggtggatcagcgcgcggccagctagttgctcttgtacggcggcgggggcgacgcgtaggacacggggtacacgggcgggagcggcggcggggg

SEQ ID NO: 349935 - DNA, 345 bp, Zea mays
ctcgtctgccttctgcacctccgagggtttctttgggcgggggggggggaatctcacctccaaccatttttattgttcattcccacaaaaacctcaagaaattttggccggtttgactctttcaatgacacccatattacacctgttctacacccttgtaatacatttacaaacgccttattccaccccaactacatatcctcttctgcactgaatagggttttgtttactgccgtctgcttgtttgtcaatacaaggttcatattctttgagcgaactctaacgtaacaagaatatttctcctttgctcgacatttcttccgtttgccttgtgtgcaatttttc

SEQ ID NO: 349936 - DNA, 140 bp, Zea mays
tttttggcggacggcgcgcccgccgcgcgagggggggtgacacacaagaggggcggcgagaaagcaagagtgttccactcgctggagggctgggcggctcggttcatcctacaacaacacaaacccgtgtaggagcaagg

SEQ ID NO: 349937 - DNA, 421 bp, Zea mays
  unsure (1)..(421): unsure at all n locations
actcattttaataaagctcgtacgccttcattacccttctctaattcctagatcgacccactcgctcgttcatttagtctctaaaatcnacagggggatccttttcatacatatacatgtttgtaaatattccatcataacaagtaaacattcttaaatttacgtttttaataactccctttccatcataaacaaaaagaacatcttttattttatatcttttattactcattttcactatactaattttatatttacacatttcctttattaatcatctttttattttctcctatattttatattttatttttaattaacttatttttcatctctataatacctttattattaatcttttatataatttttcttattttttcttttatactaatactatatctttttttattttttttat

SEQ ID NO: 349938 - DNA, 265 bp, Zea mays
tttcgatgatgcatccgctccgccgcatgcgcgtgctcttcctcgtcgggctgtccccgcggccgcgtggtccttggcaccaccccgcttcccgaggccccaaccccgctcgcggccgggagctaatggggtgggagactacgagtacgagacgcgatacttccggcagcggctggaccacttcagttttccaggggtcggggacgaggacgaggcggcggcgttcttccagcagcggtacctggtgggccgaggcattggatgg

SEQ ID NO: 349939 - DNA, 103 bp, Zea mays
ttgtacttctccagcggcggcatctctgggtcggagttcatcccattcaggcaacctgctggtggctctaggccggaggtgagtactgtcctcaaccatgccg

SEQ ID NO: 349940 - DNA, 72 bp, Zea mays
gttggcttctcctccccctccggttcgggttcgggttcgtgaggttctccggggttcggattttttttttag

SEQ ID NO: 349941 - DNA, 111 bp, Zea mays
ctcctccaccaccttccagtcctgtccagtgccgccgccttgccctgccctcccctcccttcccccgattaccctcgcggttgacctcgtcaatcctgtcccgtctccgta

SEQ ID NO: 349942 - DNA, 82 bp, Zea mays
tctacttgttctagatcgcgagcggccgccctttttttttttttttttatgtggggagggacaccattgaagggctttatat

SEQ ID NO: 349943 - DNA, 124 bp, Zea mays
tttttcctcgcgtccgcccacgcgtccgcattcatgcagtccacgcacacccccgtctttgactcactccgcttccagatctaaggcgggccgaggaacgatgaacggaggcgccgtcccacca

SEQ ID NO: 349944 - DNA, 229 bp, Zea mays
  unsure (1)..(229): unsure at all n locations
ttcgtctcttcaactagcaacatagaaagcacaatagtgtaccaacaatggcagccaaaatattttgcttccttatgctccttggtctttctgcaagtgttgctaccgcaaccattttcccacaatgctcacaagtctttatagcttcccttctttccccatacctattaccagcggtgtctncaatgtgtgaaaacctaattgttcaaccctactggatccaacaggc

SEQ ID NO: 349945 - DNA, 127 bp, Zea mays
tgcgttcggggaaccaggaatcttacgcggaaccgcgccgcttccatggcgacggcatccactacgctgctcctctcccttgccttcctcgccttcgcctgggcggcgtcgccgtcgcctgatgcgg

SEQ ID NO: 349946 - DNA, 98 bp, Zea mays
tgtaagcccagcgagtacctgggcagctgggagcccgtagcggagccttgggaggtcttcacgcacgttgaccagatgagcatggcttacgcgagcga

SEQ ID NO: 349947 - DNA, 72 bp, Zea mays
  unsure (1)..(72): unsure at all n locations
acccgacncactataggagaaagctggtaccgcctgcatgtacccggtccttaattcccgtatcgcacccac

SEQ ID NO: 349948 - DNA, 275 bp, Zea mays
gttctagatcgcgagcggccgccctttttttttttttttgcactcacaatggcgttatttccaatttaaatttagacttttgatcagattttattcagaacgagcttgagtgtcacgttatgacgacgtgaccaccttgagctcgaactcctaggcagcgaccagcgacaacccctccacttgagcggcgcctagtgctccgcgcctttgataccctagcgtctcgccagtcgagttgtccatcttaacgcccgtggcatacacgtggatctttc

SEQ ID NO: 349949 - DNA, 442 bp, Zea mays
aatattttgagcattcagaaacacaccaagcgaagcgcactagcaacgacctaacaacaatggctaccaagatattagccctccttgcgcttcttgccctttttgtgagcgcaacaaatgcgttcattattccacaatgctcacttgctcctagtgccattattccacagttcctcccaccagttacttcaatgggcttcgaacacctagctgtgcaagccaacatgcaacaacaagcgcttgcggcgagcgtcttacaacaaccaattgcccaattgcaacaacaatccttgccacatctaacaatacaagccatcacaacgcaacagcaacaacagttcctaccagcactgagccacctagccatggtgaaccctgccgcctacttgcaagagcagctgcttgcatccaacccacttgctctggcgaacgtagttgcaaa

SEQ ID NO: 349950 - DNA, 218 bp, Zea mays
  unsure (1)..(218): unsure at all n locations
ctgggtcttcagaccattagctttatctactccagagcgcagaagaacccgatcgacaccatgagggtgttgctcgttgccctcgctctcctggctctcgctgcgagcgccacctccacgcatacaagcggcggctgcggctgccagccaccggcgccggttcatctaccgccgccggngcatttgccacctgcggttcacctgccaccttcggtgca

SEQ ID NO: 349951 - DNA, 236 bp, Zea mays
gttctagatcgcgagcggccgccctttttttttttttttatgtttgggggcgcgtgcatgctacgggacagacatgtaataatgaatcgaatccaaaaaaaaagagccttgatcaacaaacacaacaccattggcccgacatgaaaactattcgataccaaaatgtggaataaggttccatatccggacctattgacccaccatagacaattaggcagtagcaactgcaaacaagc

SEQ ID NO: 349952 - DNA, 375 bp, Zea mays
tctatcggtgatgttcgataatggtgtcacgattaatgacttatggtgctggggcgaaactgagagccccttgtgaatgtacacgcaaggttatgctgcttggcgcatgctggtaccgaggtctctggtcatgatccattgtggaactacactgatgtgtgatcttccgtggactcctcccttgaaacgatttttgtgttgtttgctgaaacaattaaataacatatgccatcactgttggatcaaaagagtatataactctgatgtattccttaagtaaaatttttaccagttcgtaagttttaaaaaatattaaacctatctgtatttaattgtgtggtatattctcccctttatttatgtatttttttcttt

SEQ ID NO: 349953 - DNA, 381 bp, Zea mays
tcgcggacgcgtgggttcaagtcctcctcctcccctggcttcttcttcttcttgctcctgctgctcctcttctttcttcctcctactcgatccgtctccactacctcgcacgtacggacggtacagcacaccacccctcatcaactgcccccggccccgaacccagagctagatctatatagcctgcagtcctggagcttgcgagcaaaggcatacgtacatacatacgcgttcgccgtgtcgggccgtacgtacgttgtcgtgcgatgggtgcggcgccggcggcgaggaggtgcgcgctgctcttggcgctggtggtgctggtcgcggccgcgggcgagcgcggtggcagtggtgccggcggtgaagcgggggcggagc

SEQ ID NO: 349954 - DNA, 106 bp, Zea mays
tccattccgtgccaccgccgccgcgctgcgtctgcgtctgagtgcgtcggcggcgcgcccaccctaaatgtccccagccagagccagagccagtgaacgcgctttt

SEQ ID NO: 349955 - DNA, 236 bp, Zea mays
tctttctcttttcagcttgctcatgcatccttccgtctatattgtgtaagaaacagtcatgtgcaaagtgttaagcttggtccgcgtctccttggggatgctccaaaaataaatataagtccacctgagacagaaatggtcgatgaagaaggttcatgtgatgtgaccccggctttgaacttgtatgttgaagaaatcaacatgaaattactcttatgtggcgtgccgtgcaccat

SEQ ID NO: 349956 - DNA, 102 bp, Zea mays
tgagcaaacgcaccgggtcgagccagtccaccacccagccatgcctgggaggggcaagtcctcggcgacgattgcccctgcggcggggtccccgaggaagac

SEQ ID NO: 349957 - DNA, 92 bp, Zea mays
tcttctaacgacccggccacactcgtgtcgcaggaccgtgcaaggcctgatccgctgtgtccgctgaccgcgttctcccccggcggggagag

SEQ ID NO: 349958 - DNA, 223 bp, Zea mays
tcggcttgtttgctctagggtttttgccacgccgccgccgctctgccccttggacccgaccgatataccaagatgacggcgcaggctgcggaggagctcgccgcccagatcgagcagcagaagctcgaggagcagaagaccgaggcagaagaggttgtggtggaggaggatgactaggatgataaggttggcaaatatgacagccttgatcttttttttttaa

SEQ ID NO: 349959 - DNA, 292 bp, Zea mays
tttatctaatgaggctcaacagaaaccgttgctcttgaagcaaagtattaagctcttagaaagtttggattcatgttggagtgatgaggtccttgtattctctcactgcgataaatcccgctgtctgttcttgcagcttatttcaaggtatacaacatgatttttatgaggtttttctggacttaatgttttttgtatatataccttttatatccttttactctttattgttacttttttttcttattgcacattttctctttcttacttatgttgtgcttatttctttttt

SEQ ID NO: 349960 - DNA, 382 bp, Zea mays
  unsure (1)..(382): unsure at all n locations
tttttaccattcagccagctatctgctgcctacccccagcaatttcttgcattcaaccaactgacagcattgaactctcctgcttatttacagcagcaacaactactaccattcagccagctagttggtgtgagccctgctaccttcttgacacaaccacagttgttgccgttctaccancacgctgcgcctaacgctggcaccctcttacaactgcaacaattgctgccattcaaccaacttgctttgacaaacccagcagcattctaccaacaacccatcattggtggtgccctcttttagatttcttatgagttataggtcaataataaagttttttgtctgatgtttggggcttcccaagaaaaagaaaggtcttttt

SEQ ID NO: 349961 - DNA, 117 bp, Zea mays
tctttttcacaaaccctagcagccactagggtttgtccgctcccacccgggcggctgcctctctcctccgatgggcaagtcaagcaagaaggcggtcgccgtggctgcggttccagc

SEQ ID NO: 349962 - DNA, 371 bp, Zea mays
ggggagtggacacactcccaacaacagcagaagctggattaacgggaggtctgatttgggtgctgcgaattctacagataatcgatggaaaggagctcctgaatgtctgcagtgcagctaaagattggggagtggacacactcccaacaacagcagaagctggattaacgggaggtctgatttgggtgctgcgaattctacagataatcgatggaaaggagcttctgaatgagaggacgaacaccgagaattggtaccttgagaagaaaccaggctcatggaggctagcttgccagactattgtaggcaacaaagagaactctggcatggtttgtcgccaaccgctgccccagtggaagagatgtccgtgc

SEQ ID NO: 349963 - DNA, 310 bp, Zea mays
aaaaccctagcagccactagggtttctccgatcccacccggcctcctccgtctcttctccgacgggcaagtcaagcaagaaggcggccgccgtggctgcggagccagcggcggtgcccaaggggaagaaacgggaggcggacgaagagatcgcgaaggccgtgagcgccaagaagccgaaggcggcgccaccggcgaaggccgtgccgacgttcaagaaggacgccaagatgctcacgttgcagcctccccacaagaaggctgagagcacaagcagctactttgaagtggactcccagtcctaaaaggag

SEQ ID NO: 349964 - DNA, 301 bp, Zea mays
aaccgactagtatagggagagctgctgcgcgtgcaggtcccgaattgcagtttcgggctacgacccacgcgttctgcatactagaacagtctagattgaaggtggacaaattcctattccaactgggacaaggtcggctcaccggctgagacggggacaattttgccgttcttagcgccgggtggtatcatgcgacagggcttgaatctgctatggatcaccccagtctacaagctgagatcggctgcatgtttgaagtttgatttatacattcaacatcgctttacgttgaaacccattc

SEQ ID NO: 349965 - DNA, 106 bp, Zea mays
tcttttctattgatcggactcactccaccggtgcccagttcttgtatgaatgggagggcggacttcacaggaagcctagagggccaataaggcaaggcatgagctt

SEQ ID NO: 349966 - DNA, 293 bp, Zea mays
atttagcaccaggcaaaccaaacactaggccaacgcaattctctagagcactgcaggctctagttcttcagaggcccgccacaaccacaagccaaggccacagccagtgccctcgtcatggctcccaacctgagcaagaagacgcctgctggcctcctcggcgacaaggtggccccggtggagggactcaagccgccacggtcacccttaacggcaaggacacggcaccgggctcaccaccacgactgctggacacgggacccgacatcaccgtcgtcaccgtgacaagggct

SEQ ID NO: 349967 - DNA, 435 bp, Zea mays
gcacaatagtgtaccaacaatggcagccaaaatattttgcctccttatgctccttggtctttctgcaagtgctgctacggcgaccattttcccgcaatgctcgcaagctcctatagcttcccttcttcccccgtacctctcaccagcggtgtcttcggtatgtgaaaacccaattcttcaaccctacaggatccaacaggcaatcgcagctggcatcttacctttatcacccttgttcctccaacaatcatcagccctattacaacagttacctttggtgcatttattggcacaaaacatcaaggcacaacaactacaacaacttgtgctagcaaaccttgctgcctactctcagcaacagcagtttcttccattcaaccaactaggttcattgaactctgcttcttatttgcaacaacaacaactaccatttag

SEQ ID NO: 349968 - DNA, 118 bp, Zea mays
tatcgcgagcggccagcccttttttatttcaaggaagtgaggtacactgcacggtctattacaccttctgcttatatgaaaaggcactcaaaggtcgccaacttcaaagagactcatt

SEQ ID NO: 349969 - DNA, 276 bp, Zea mays
  unsure (1)..(276): unsure at all n locations
ctcaagaccttgactgcttcagatacaagggcccatggtggattgtgtgtggtcatgaggcattctttagaatgtttgtctcaactggacatgtcttataattcaccatgnattgatctggtttttataggatctttatggaaatgattggcatttatgtcacattttttgaggcccacctagggtgcatgtactttattacaggttgaagttgttattatagtttttttttttccctcgcttggggacgtgtttttatttttattagtggttgtc

SEQ ID NO: 349970 - DNA, 333 bp, Zea mays
  unsure (1)..(333): unsure at all n locations
ttttctttttcccaggcaggcaggtcggcgaggagggcaggaagaccgaagaccgagccgtgcgggggctcttnactgtaacttgacagtaccctatattctcatatcctttttgtctgtctttttttttttttttttntgttattattttgtccattgttattttaccttattctttttttttttattatgtgttttttttttattttatttagtttttgtttttattatcttttttgtttttaagtttttattgtttttttatcattttctcatatctgtttatgtttttttattttgtcttttaaattatatattttcttttattttata

SEQ ID NO: 349971 - DNA, 106 bp, Zea mays
cgatgcagtttattggtgtgcaaatcattcagaatgctttgaagacacctgtacacacaattgcctccaatgctggggtggagggagcagttcttgtatgaaagct

SEQ ID NO: 349972 - DNA, 267 bp, Zea mays
gaggcaggggcgcagttgctgaagccgccacttcacctcgactccatacagaaatggcctattcttgcgcctacacactcccttcactttccttcgtttcctcctccagttcatctccgccgattcaggcgctctggtgtggtggccatggcacagcgttgggcagaaggtgtatgcccccggcgtggcggggtccaaggacaatggcggtctgccgaaaatccacctgaaatacacccacgggagcaaggcttagatttatctgtt

SEQ ID NO: 349973 - DNA, 139 bp, Zea mays
tcgcgccgcgccgctcgcgtcgggatcccgccgccgccctactcggtcgaccatggggacggcgacgatggcgactgcggtgggcgcggccatgctgctctacttcgtgctgagccggctgctgttggtcgaggacgtc

SEQ ID NO: 349974 - DNA, 223 bp, Zea mays
tctcgttggagagggagacagaggagaggaggagcagcgtggcgacgcccagatcgagcgacctgatcgagtccccttgccccaacttactgaatcccaatccgagcccgccaattgggctccccgaccacgccaagttgaagcgagctcgaaggcgtatgttcaagagatgactgatgagggatgctagtgacattgatgaacttgttacgggcgtgctggc

SEQ ID NO: 349975 - DNA, 103 bp, Zea mays
ttggttctatctcttgttcacgcgacgacctgagcagatataaaccatcacgattcgttgtgcaggttataaggttgacgaacacgagcgtgatatcacgcca

SEQ ID NO: 349976 - DNA, 327 bp, Zea mays
tttttcacctcgctgcggtttacctctccctttctctcaccttcctcgcccacctccatcgcctcgtccttaagcaaacgacgcggcgagcgacccgcgaccctaaccctagacagagagagaccagcagctgggccgaccgcacgcacgcgcacccactcagcggcgcaatggcggggcgccccctcacctctcgctcgtcggcggcggccggccgggatgcgtgagatcgcggcgccggatggggaaggatgccggcgaggcgcagcagccgctggacggtgcgtgcggttgctcattctgtggcccatgatgaagcttgttctt

SEQ ID NO: 349977 - DNA, 93 bp, Zea mays
ttggtttggtgtcggtttctactcggcatacctgggtgttgagagggtaggggggggcaccaagcacaacgatatgaggaggatgttgtgagt

SEQ ID NO: 349978 - DNA, 181 bp, Zea mays
ctctgggattcaatgaaacaaatcagccccatttttcattgaatcccagagttcatacaacgacccatcaggtgaaagtaagatggcgcgtgctaacaggtcaggtgagaggagtgatactaaacaaaatggggctgatttgtttcaaaaaaaaaaaaaaaaaaaaaaaataattattaat

SEQ ID NO: 349979 - DNA, 193 bp, Zea mays
tttgctttccggcctcccctacccccctcatgcgccgcaagaagcacttggaccggggtgggggcggcgttggaggtttcactgttctcttcatctgctttacctcgcgttgctccgctgtcttagccatttgcgttgtctgcttgtgcgtgctattttttcttttcgtcctacagtttctttaagtttctta

SEQ ID NO: 349980 - DNA, 131 bp, Zea mays
tcgtatatcgcgagcggccgccctttttttatttgtttcccacgacacaaagggcggaaattgcatacgtttcaaaaaagaatctaattaaagacaatatgggctggataatataaatttgggcttacata

SEQ ID NO: 349981 - DNA, 256 bp, Zea mays
gccgcttcccttgcgttcgcggagagtctgtctgtctgtctagctagctagctagctgcacgagagcgtgaggaggaagggggatccatggcgggggaaaaccaggaaaaggatacggcctgcgcgcaatacaggcacgggccgccatgggtgttcaaaggcagaccatattaccatttttatttgatgaaggctacatcgcttcaaaattaaatatgacttactatcatatgatttaattattaactaaattata

SEQ ID NO: 349982 - DNA, 275 bp, Zea mays
tcgatctgctccaccaccggcacatcgccgccgaccttattcctccgccgctcgaggagtcagccgagccaacggagggagaccatatgggcgcggaggcagcgcatccgcagcaacagcctccctcctccgtccgaccctgcagggaggcggcggcgcccgcggtgctggggctgcagctctcggcgctgatcgaccacgtcgcgcgcgtcgacaggtcctttctcgaccgagacgttggctaccgtgatggctttgcatcaggtgatcattgt

SEQ ID NO: 349983 - DNA, 197 bp, Zea mays
tcgcgcttcgaaacccccgacgcgaaggaagctagggaaccctcgcgagtcgcgttgcctcgcccccgtccccttcagctggcccgccgccgcctcgaatccgccctggctcggagggcctcgcgcccccacggatcggattctcgaggttggtggatttggggctagggtttggggattgactactatcgtggggt

SEQ ID NO: 349984 - DNA, 150 bp, Zea mays
ttgcatcactgggtcttcagaccattagctttatgtactccagagcgcagaagaacgcgatcgacaccatgagggtgttgctcgttgccctcgctctcctggctctcgctgcgagcgccacctccacgcatacaagcggcgtgtgttgtt

SEQ ID NO: 349985 - DNA, 432 bp, Zea mays
tcgtagaaagtggaatccagtagcaacaatagagcaacaatggcgaccaggagattttccctccttatgctccttgctctttctgcatgtgttgctaacgcgacaattttccctcaatgctcacaagctcctatagcttcccttcttcccccataccttccatcaatgatagcttcagtatgtgaaaacccagctcttcaaccctataggctccaacaagcaatcgcagcaagcaacatacctttatcacccttgtttcaacaatcgccagccctatctttggtgcagtcattggtacaaaccatcagggcacagcagctgcagcaactcgtgctacctgtgatcaaccaagtagctctggcaaacctttctccctactctcagcaacaacaatttcttccattcaaccaactgtctacattgaaccgtgct

SEQ ID NO: 349986 - DNA, 433 bp, Zea mays
tcgtttctagcaacatagaaagcacaatagtgtaccaacaatggcagccaaagtattttgcttccttatgctccttggtctttctgcaagtgttgctaccgcaaccattttcccacaatgctcacaagctcctatagcttcccttcttcccccatacctctcaccagcggtgtcttcaatgtgtgaaaacccaattgttcaaccctacaggatccaacaggcaatcgcaacaggcatcttaccattatcacccttgttcctccaacaaccgtcagccctattacagcagttacctttggtccatttggtggcacaaaacatcaggtcacaacatctacaacaacttgtgctagcaaaccttgctgcatactttcagcaacatcagtttcttccattcaaccaactggctgcattgaactttgctgtttatttg

SEQ ID NO: 349987 - DNA, 286 bp, Zea mays
  unsure (1)..(286): unsure at all n locations
tgttttcgcgtggggttccagatattatcagtcgaccagtttattcggcgcaggaggaaatttctagctaactaccaagctaccttntctcgctgctaacgccagcatctcaggtaacaatttaccatccatgcagtggtcattatggtctaaatattacaatctcaccgtgcaactctttatttcccaaccaagcattaagctcattattttgtttatttcaatgtcaagtgagttgtatgttataatttcttttattattattacatttaaatattgaattttt

SEQ ID NO: 349988 - DNA, 475 bp, Zea mays
tcggtcaatcccgagcagtggtgcgaaacctcgagcgctcgcgccggtgacgatagcgaaagaggaagccgcggtagcactggtagcggcagcagtaagggggagatgtcgtcttcgttcagcggtgatgagaccgcccttttcttcggcttctttggcgccattgttgcgctcgttttttcatgcatgggggcgttgtactttactatttattttgttttttttgtttatttttatttttttattttctttatatttctttttatattctatattttgtgtttttgttttttgttaatatattatatctatatattttatatttaattttgattttttttgttttttatatttttctatatttcattagatttttgtatttctttcattcatttatatttgtttttttattagtatataatatgtttatattgtattgtttatatatattatattatatcttatattatcttat

SEQ ID NO: 349989 - DNA, 258 bp, Zea mays
gctacggtggtggtgcatctgccacctgcggttcacctgccacctgcggggcatctcccaccgccggtccacctgccgccgccggtccacctgccaccgccggtccatgtgccgccgccggttcatctgccgtcgccaccatgccactaccctactcaaccgccccggcctcagcctaatccctagccacacccatgcccgtgccaacagccgcattcaagcccgtgccagctgctgggaacctgcggcgttggctag

SEQ ID NO: 349990 - DNA, 229 bp, Zea mays
atgatcgcgagcggccgccctttttttggttgttttttttagagggtgggggggtcttatatttgttatattatttatagaacaaacattttttggaactaaaccatacctgcatttttttcaggcacaaatcctagtgccccagaaatatgtctaaactgggctagtaccatttccaaattaaactatacctactaaaacccgagaatatacaaaccacctctaataa

SEQ ID NO: 349991 - DNA, 186 bp, Zea mays
  unsure (1)..(186): unsure at all n locations
gaaatcccagtcaagggacaaggatggtgaggtgggagatgatgtgttggattaanaactgtaggctgaggaaactgacaacccagagctagctgttaagcctgtttatgtcaaggacgtcttctttaattccctctctagtctaatcttcttacttttagtgtctaattacatgccccgaccttt

SEQ ID NO: 349992 - DNA, 311 bp, Zea mays
tcgggcagcaacaccaccaagaagagcaagctgtcgtggtccaagagcttggtgaggaagtggttcaacatcaggagcaaggcccacgacttccacgccgacgatgtggccgcgattggtaggacagttgcaggagggggcgatgactagtggaggaggggcagcagcttcacccgtagggagccgagcacagtgaagaagagcaagacagagaggtcctcgaggaggagcaatggtcactcgaggcggttaaagattgtccttgatgccttcgaagccacattgacattggactttaggatatttgttgc

SEQ ID NO: 349993 - DNA, 480 bp, Zea mays
tcggtttatcataccagaacctgaacaaagggtgtcatgtgctgatagattgggagctttcctacggagatccaaggtacgcgagagagagagagtatgatatttgctggggcacagggaaaaggactggcccgctatattaaatgggaataaggtgtgtctgcaagctagctagcatcatctgatagttgtatgctagcacttaatttttataattttttagaataattttagtactcttttttaatatatttatatactaattgttttgttaacttttcttattaatttgagttataattatttttttttatatgtaattttatttattttgtaattaagaatatatgtttatttatattatatattataaattaattatatatatttaattgatattacattaaattatttatttatatataaatatttatttattatattatttttattttatattattgtaatatatattttaat

SEQ ID NO: 349994 - DNA, 273 bp, Zea mays
atcgctcttgtccgacccgcgcggccgccggcagcccgtgccctcggagccgggttcctcttatcctctccgggaatggcgttggcgcgaggaccttgttgaattattttccatattactattattattttttttttaacataatatttatctctaatttatatttatattttaatagaattataattatatttttatcttattattatacttaatatattttaattattatatatatataatatacttttaattatttttttttataattat

SEQ ID NO: 349995 - DNA, 229 bp, Zea mays
ttcgttcgttcagatcagcaaagcggcagtgcgtagagaggatcgtcgaacagagcagcatgaagatggtcatcgttctcgtcgtgtgcctggctctgtcagctgccagcgcctttgcaatgcagatgccctgcccctgcgcggtgctgtaggtcttgtacggtgcttatgccgttctgactactatttattaccttttaattttactttcttttattctattaattat

SEQ ID NO: 349996 - DNA, 171 bp, Zea mays
tttgtttctaacgctggcaccctcttacaactgcaacaattgctgccattcagggcagcttgctttgacaaacccaacagcattctaccaacaacccatcattggtggtgccctcttttagattttttatgagttatagttcaataataaagttttttgtttgatgtttgt

SEQ ID NO: 349997 - DNA, 327 bp, Zea mays
ttcttttatttatatacatggtcttaaactgaggggggataatttatgggtaggggaggccatttcttctaaaaaaatatttaagccatcaaatctgccttgttaatatgttaatcatactcgctttaaatatttccttcatttaaacttaactaattttcattattattttttgtatatctattactatgaatatgtttatatcatcataattttttatacattatttttatatcaatttaatttattataattaacttcttttttgttattatattttagttataatatttatatttatctaatataatataaatttatattatt

SEQ ID NO: 349998 - DNA, 176 bp, Zea mays
tttagcacctacggcgaggtcctcgagtccaagatcatcctcgatcgggagacgcagaggtcccgcggcttcggcttcgtcaccttctccacggaggaggcgatgcggaacgccatcgagggcatgaacggctaggagctggacggtcgcaacatcaccgttaacgaggcccattc

SEQ ID NO: 349999 - DNA, 247 bp, Zea mays
tgtttctcgtgggcgatgacgacgacgaggacgtggaggaagtggaacttgaggaggaggaggacgacgagaaggatctcgaggcaatgcgacgggccgaggaggaggagcgccgcgagcaggaggccgagacgaagactcgccgtcgtcggggacggcccaagcgccgtcgtgacccggttagcgaggatgaggagcccgaggagctagagctgcaaacggaggatccccgtgaggaggagatcac

SEQ ID NO: 350000 - DNA, 210 bp, Zea mays
ttcttttaaagaactagtgtattaattaatggtgttttaacacctcgactaggggcatgatttaatgtttccaatcataccttttaaatgccatgcattaactagcattgagcaaatttttaagttcattctcgtaaccctttactcccacttacttatactttattatgtcttaatatcatttattaccttaataattaattctttgtc

SEQ ID NO: 350001 - DNA, 212 bp, Zea mays
attttattctattccactaccacccatctcgtcgtccggcgattcgatccggttgttgcaacccaggggcagtgatggcgacgaataggagcgtgggcaccctactgggggtgggaactaatggtggtgtcaggtgggaaaacgcgccgacctaatgatctggtttatgtattgacaaagaatcagcgagtgcccgcgggtgaggtcattgg

SEQ ID NO: 350002 - DNA, 188 bp, Zea mays
gttctagatcgcgagcggccgcccttttttttttttttttattctgtgggagtctcagactcttgtctcctctatttatggaacagcctttcaaaaaaaaacatcgatctgcgcgcggcagcgcagagttcgatcattttcactctttagtacgcttcgtttattctaaacacacatgactttattta

SEQ ID NO: 350003 - DNA, 61 bp, Zea mays
cccttgtactttttgccccacttcgaaaagggcatgggctagttcatcaagaacgaggagc

SEQ ID NO: 350004 - DNA, 431 bp, Zea mays
tcttcatcatagaaagtggaatccagtagcaacaatagagcaacaatggcgaccaagatattttccctccttatgctccttgctctttctgcatgtgttgctaacgcgacaattttccctcaatgctcacaagctcctatagcttcccttcttcccccataccttccatcaatgatagcttcagtatgtgaaaacccagctcttcaaccctataggctccaacaagcaatcgcagcaagcaacatacctttatcacccttgtttcaacaatcgccagccctatctttggtgcagtcattggtacaaaccatcatggcacaacaactgcaagaacttgtgctacctgtgatcaaccaagtagctttggcaaacctttctccctactttcagcaacaacatttcttttcatttaaccaactggctacattgaa

SEQ ID NO: 350005 - DNA, 420 bp, Zea mays
tctatctagcaacatagaaagcacaatagtgtaccaacaatggcagccaaaatattttgcctccttatgctccttggtctttctgcaagtgctgctacggcgaccattttcccgaaatgctcgcaagctcctatagcttcccttcttcccccgtacctctcaccagcggtgtcttcggtatgtgaaaacccaattcttcaaccctacaggatccaacaggcaatcacagctggcatcttacctttatcacccttgtttctccaacaatcatcagccctattacatcagttacctttggtgcatttattggcacaaaacatcagggcacaacaactacaacaacttgtgctagcaaaccttgctgtctactctcagcaacaagcagttcttccattcaaccaactagctgcattgaactct

SEQ ID NO: 350006 - DNA, 326 bp, Zea mays
cgatctcgtttcaaatccatccatcctcgtttcctccgtcccgcagcatctcaaccccatggccaagatcaagatcgggatcaatgggttcggcaggatcggaaggctggtggccagggtggccctgcagagtgacgatgtcgagctcgtcgccgtgaacgaccccttcatcagcaccgactacatgacctacatgttcaagtacgacactgtgcacggacagtggaagcaccatgaagtcaaggtgaaggactccaaaacccttctctttggtgagaaggaggttgctgtgtttggctgcaagaaccctgaggagatcccgtggg

SEQ ID NO: 350007 - DNA, 351 bp, Zea mays
tctgactcctgcgaattaactagacagttggaagagaccatcaactttgtgaccttcaatgacggatatgctttacatggctacgatactgtctcagagccatcagacccaaacactcttggttctaagactcgtgcatgacgtgcactgcggatgcgatagcaacatgacaagccatgatcgctcatgtccaccctcgataggatgtgaagatcacacgctgatccaatgggtcatctgaggctatccctagcgctccgtcattaaatgattatcaccaggaccataactcaagtaaccatgatgattactgggcctagtgataactcaaatttgaccaatagctgatct

SEQ ID NO: 350008 - DNA, 205 bp, Zea mays
tatatggatgatttaaaatgtattcttcacaacttgggatatcctgcactatggagggccatgtacctctaggcccaagacgggatcgcggagagcgtctccccaaaggacaagctcatcatctatcccatgttcgtgaagatagctgacacgtaatctggcacaggttgcgcctcgtgagccactcgaagttgaactacgctat

SEQ ID NO: 350009 - DNA, 63 bp, Zea mays
ataaggaagcggtacgctgcagtaccggtcggaatcgggtgacagcgtcggttttaaaggaag

SEQ ID NO: 350010 - DNA, 152 bp, Zea mays
ttttctgtggttgacactgacagaggtctgcagagactatcggttattgctgcacggctttccctaaccctatccccactccacaccaccttccattggatcctaacctcctttcttccatgcgtccctgtatctccttttctctacttgtc

SEQ ID NO: 350011 - DNA, 256 bp, Zea mays
  unsure (1)..(256): unsure at all n locations
tgtttacgcgtgggtcgcgagcggccgccctgtggtttttttttttgggggggagggaaagacgatatnnncgttacatatatatttatgatgcgggaaacctataattagatttagattggcgataaatagtgccgagtgagaactctctcaggagtccaaccataaacaattctctttactacatgtgagcaagaaagttacaggtatctatattttaccaccaagaccagttatacctacaaaagcttttcct

SEQ ID NO: 350012 - DNA, 324 bp, Zea mays
tcgttgacttgtatgctgcaaccaaggccaagttgaccgtggtgaatttgaacaagaacagtgccctgcgtctgtatgaacccttcagcactgacccccagttttatgtgtatggttatgaggatctggagctgcagcctggggagaacgccacagtcaccttcgttttcttgccaaagttgttaggctcttcatcagctcatctagttgtgcagacaaattttggcggatttattatacatgcaaagggcatggctgtcagttcaccctatcagatactggcattgacagggttagatgttcttataggtggacagtttgaga

SEQ ID NO: 350013 - DNA, 93 bp, Zea mays
  unsure (1)..(93): unsure at all n locations
ccctgcangtatgcggacgcatagcgcgaaggcannaacgcctctgcccgntacccgaaaaacttgatgaccaccgccgaaccggcgcgagag

SEQ ID NO: 350014 - DNA, 159 bp, Zea mays
tcgcaagaagcagccatctgtgcaacaaggggttgatgagataggcacatggaaccacgagaaaggaaatcccacaaagaggagaaagaacatcggaaaagaagagacgaacaggcacgatagaggaccagaggagaaaacaaaaacaagagagaaaag

SEQ ID NO: 350015 - DNA, 117 bp, Zea mays
tttgtctggtacaacactcgacttcttgtcacaagggatacaaacccattcacggggtcttggatcacttatcacaatgcgatgataatcatagaacaaatcctagattgtagacac

SEQ ID NO: 350016 - DNA, 232 bp, Zea mays
ttttgttcttggaagcctgctgctgctactggtttctagtacctgcccacctgggcttgcatatgttgcttccctgctgctggcctgcgaatccacctgcatttgttgaggcttatcgccgcgtgtactcctgctttgtgggaggattcaggaaatgcttggagtttcattcggtggatgaaatttttaggtgggtatgtgtgtgtaagtttaacttgatctttatttgaaa

SEQ ID NO: 350017 - DNA, 288 bp, Zea mays
caggaaaatttttttatatattttttttaaatatattttattaacagttttttttttttttttttagttttatatttttttatgtgtttgttttttttttttggaattgtgtaatttttttttataaattttattaaagtttttatataattattttttttatattttattttatattttttgttttattattttcttttttgtttaataatttttattattatatttaattatattttttgtttttatattatatatttttaatttatttttttttattattttttt

SEQ ID NO: 350018 - DNA, 66 bp, Zea mays
ttgttttgtttttagcgcaatacactaggactctccgtttggtgtcgggctgtgacacccaacaaa

SEQ ID NO: 350019 - DNA, 67 bp, Zea mays
ttgtttctgttcgagggggagctggacaacctgggtcttattatccagtaggaggggcttccaaact

SEQ ID NO: 350020 - DNA, 186 bp, Zea mays
tttttattagaacccgacccacaagcacgcgcgacgcgagccaaggaagacgagagcgaggtggagagagagagagagaggaaaaccctgacccgaccaggcagccgaagaagacgcaaacggaggaggccacagagacggcacgcgagggagcccaggcaaaaaaaaaaccacgccgaaccaaat

SEQ ID NO: 350021 - DNA, 85 bp, Zea mays
ctcaagagcatgacgggccggctcggcggatgttttagcatggtcaacgcctccaactatcccggcaagttcggcaattatctaa

SEQ ID NO: 350022 - DNA, 216 bp, Zea mays
ttgcgtacgcgtgggtcaaagaggaggagagaaactattattttgcaaggaggagggaagaatattaaaaaattgacaaagacgaagaaatgcaaaattggaaaaaaagaaaaaatgcaaaaaaaagaagagaaaaaaaatataaaatatgaaaataaaaaaaacaaataaaaaaaattaaaaaaattaaaataaattaaaaaaaataaaaaaata

SEQ ID NO: 350023 - DNA, 231 bp, Zea mays
gctgctctccgaccccgagctccgtatgccgcagcatcaggcgaggcccccctcgcgtgtgaccgagatggcgctgccgaatcaggggaccgttgattaccccagcttcaagctcgtcatcgtcggcgatggtggaactggtaaaactacatttgtgaagaggcatctcactggagagtttgtgaagaaatatgaaccaaccattggtgtggaagttcatccgttggattt

SEQ ID NO: 350024 - DNA, 146 bp, Zea mays
acaatagggaaagcaggcacgccagcaggaaccggaccggaaaacccggaacgacccacgcgattttagacacgagggcgcaaaaaacccaaagggccgacacaccacacaaaggggacacaccacaaacaagcacgcggagaaac

SEQ ID NO: 350025 - DNA, 270 bp, Zea mays
  unsure (1)..(270): unsure at all n locations
tagggaaagcnggcacgccagcaggaaccggaccgganaacccgggacgacccactttatttgtagcaacatacaaagagaagcacacgagcaacatcatagcaccaaggggagccaacataaaagcccacctagccctacaagatatacaaaaaagcgcagataccccgacgtccacgacacaatgcccacaacacaacctcacaaaagcgacagccgagggaaaacaaaacacaactaaaacaagccaacaaggcaaaagaggccaaa

SEQ ID NO: 350026 - DNA, 207 bp, Zea mays
atcgttctatacgacaacaacaaaccaaaaagagggaaccaccaaggaggggagggggggcgaacgcagcagggacagacaaagcaaaggggaagaacggcaaaaagagaagcagcagaaagagggagacaacgataggagcagaaaaactgacaaaacgagaacaaaagggaggggagcaaaaagggagccccaagcgtaagacca

SEQ ID NO: 350027 - DNA, 195 bp, Zea mays
ttcttttttgcattacccggcggcggaagcgtaagctcattaacgaagcaagcggccgtcatggtgaagggactcacggtacagtgcgttaggctctacgtacgtgggcaccattcttggatacaagaggtccaagtcgaaccagtacgagaccacgtttctcgagcatatcgagggtgtgaacacctaggaggt

SEQ ID NO: 350028 - DNA, 141 bp, Zea mays
tttaatggttcacaacagctgcagcaacacgtgcgaccttttatcaaccaaggggcggtttcaaacctttcttcctactcttctcaacaacatattttaatcattcaaccaactgtatacacttaacccttctacttattt

SEQ ID NO: 350029 - DNA, 83 bp, Zea mays
tgtgtctgctagttctagatcgcgagcggccgcccgtttatttttatagcggcgcgggggccgttcccaaccccctaaaaacg

SEQ ID NO: 350030 - DNA, 129 bp, Zea mays
tctgtgtgcacggcacggccacagctgactgactcatcctgcgttgtccgataatcatggctagagctccgctgctcctcgcgctgctgtgcgcgtgcgccgccgccgacggctccaacaatgcggcgg

SEQ ID NO: 350031 - DNA, 202 bp, Zea mays
ttttctgtatcttacgacactcaacctctcaggatgaccttttaagaagaccagggaggtcattacctaacctccaagaatccttcagaagcgtcattatgtctcacctttagctaattaaaacaattttttgtgtttacataaacaaatagtctaagtatctatcatacatgctagccttcacaaacacttactttttcca

SEQ ID NO: 350032 - DNA, 145 bp, Zea mays
tggttgttccgcccattcgccctctgccctgggcccattcttcgacgacgggcatgcgccctgcgccctcgccccacccggcgacgacctcgttttctacgtgcgcgggcctcggctagctcctgattggcgctgggtagcgggc

SEQ ID NO: 350033 - DNA, 118 bp, Zea mays
  unsure (1)..(118): unsure at all n locations
ttttnctgctctgttccacgcctccgtcaccgtcgggtcggttcgatcctaccgagggcacacttataagtttgttccattgcatacaacacaggagcattatgatggctttatttta

SEQ ID NO: 350034 - DNA, 113 bp, Zea mays
tgctagcggccgcccttttttttttttttggtgtatttaaaagaagaccgggggcacccttatcctaattcaatggactcttataaacaacacaacggttgttctttataatc

SEQ ID NO: 350035 - DNA, 342 bp, Zea mays
gagcggcgccgcaggaccgaccggaaaccgggcgaccagcgccgacggaagaccgcgcactccagaaagcagaaagagacaaaccaggcgagggagcaagacgggaaaaccccaacgagcggggagaagcgaccggaacgaaagaagagaagaaagaagcaagcgagaggggacaggaggaacgggcacaaaaccaccccaagaaaaaaaaagagagccggaacaccgaagaagcagaccaaaccgcaccgaggaagaagaaaaaaagaagcaaagccgaaaagaaggaagccaaaaaaagaggaaggaaaagaaccaggaggacggcagaaaaacaggaag

SEQ ID NO: 350036 - DNA, 126 bp, Zea mays
tgctttcggccgcccttttttttttttttgggatattttataaaaatacgggggaacccaaaatctaatcccatgaatactatttaaaactcttatctcttttattatttcagtctaaaaatttaa

SEQ ID NO: 350037 - DNA, 364 bp, Zea mays
ctgtttctagatcgcgagcggccgcccttttttttttttttatgtttagaaaaaaattaaaatttttttgtaatttttatttaatatttataattttattagaattttaaatttttttgtattaattaaatttttattttttttttattttttttttatttattattaatttattaatatttttaatattataattttttatttttaaatatttattatttttaattttattttatattttattattttttatttttattttttatattttattatttattttttttatttatttttttatttttttattttttatttttttattttttatttaatatttttatttttttttttttttattttt

SEQ ID NO: 350038 - DNA, 284 bp, Zea mays
tgttttttgccaacttccttcactttttgggcgatgttttgaatgcattcgggtccgtcgccccaagaccaaattaccttccccattaacgtgaaccctaaccccgagccccttgccccctccttttagttgtcatcgccgtccgattttccgggcccccataagctctactcttccacgagtggtacaagcatggtggtcgtgggcttcgcatacttcttcaacagcatatttttcaaggtgcacgatgaaaagctaccagcagatttttactacacggcgga

SEQ ID NO: 350039 - DNA, 123 bp, Zea mays
ttgctttccttttttttttttttaggctttttaaccaaaccgtttgttttattcgtgacgttctacgagaaccggcgcagcgccgtgcgggcaaggacggatgatgtttatttacagtcatgc

SEQ ID NO: 350040 - DNA, 143 bp, Zea mays
tttttctagaccgcgagcgagcggaacgggggattaaagaaagggagaccgggcccccaaactgccccaacagataaaaaaggcccgacaataacacaaaaaaaaaaatccacgaggcgcggacaaaacagaaacagaccaaa

SEQ ID NO: 350041 - DNA, 161 bp, Zea mays
agggatgcgacgcacagcgcgaagcattaacgcctttgcccgttacccgaatatttgtttgaccaccgtcgatccgtctcgggaggtctccatgatacagtgcagggacgctccatcctactggctgtcccttatttatttaattccttacatctagcatt

SEQ ID NO: 350042 - DNA, 267 bp, Zea mays
tgcctcgctaaaatatcacagaccctcaaaaggggggacctttctatagaacctgggtgcctccacttccagtccatgcacaatcattcttcagtctccatagattgctaagaactagcccctatacttagataactaattctatcctatcctcccctttcctcactccgccattaggagcattgtcattttgcatatatgatcatctgctaatataccatcaattcattaaaaaaatacacgcttaaatttattggtattttcaag

SEQ ID NO: 350043 - DNA, 142 bp, Zea mays
gttcaggcaaccaaaaagcaagttgccccgccgcgcacaggaagaagagagcagaggaggatggctcgtacgaagcagaccgcccgcaagtccacgggaggcaaggccccccgcatagcagctcgccaccaaagcggctagg

SEQ ID NO: 350044 - DNA, 341 bp, Zea mays
tctttattccttccccgtcactgcacatcgcgtgcgcggaaacagccagagacacactccaactcacttgaccaatcttggccctgggccccggccgcgtcttcggaaaacctgaacaccatggcagggctcaaaaagctcgccgagtacctcaccactgggagctacatgactatctaccaagctctcaaggatgacttggttagctacacttcctttatagtctgcttccttgtacaagtatattaacgtatcataggtggattaatcacattgatgcgcttgtgaggcttgatcgagattactgtatagggtcaatagagtgaaggttgaatccttaa

SEQ ID NO: 350045 - DNA, 118 bp, Zea mays
tctttctcgcaaggactctcttctgagaagagtgggacggatcgagctcgaccccacagaggtccgttctgacccttctatccggcatagaaaggagacgaacgctctttgttataat

SEQ ID NO: 350046 - DNA, 165 bp, Zea mays
tcgaaagagagggacagagagagagagggagtgccaggccagctgtggggtgtgtgtgtgcctgtgtgggggaactgctggggatggagagcgagatggcggacgcgcccgccgcggcgatccccgccgccgtcgaaccgctcgcggcggtggcggaggaagggg

SEQ ID NO: 350047 - DNA, 118 bp, Zea mays
attttgagcattcagaaacacaccaagcgaagcacattatcaacaacctaacaacaatggctaccaagatattatccctccttgcgcttcttgcgctttttgcgagcgcaacaaatgc

SEQ ID NO: 350048 - DNA, 144 bp, Zea mays
cgagcggggaaagtcggtggaatcaccgtatttgtaggattgacatttgcaagcataacattatttacttaacttgaacccggatttgagcaacaaatttttcttccacaaaaattccaattacaggaatattttgatgaccct

SEQ ID NO: 350049 - DNA, 167 bp, Zea mays
ggcggcggtggcggtggcctgctgggcggctgcggtggcggcgtgggcgtacgcggtgtcccggccccggcccgtgtacctggtggacctgtccgggtacgtggcgggcgcgttgcacgaggcgttccgcgccaagacgatcgcccactttgggcggtgcgggcggt

SEQ ID NO: 350050 - DNA, 149 bp, Zea mays
tcttatcgtcatcctcgctcgctcctcatagccagcgccttctcctcctcctgcttgtttcccaccgctgccgacatggctgcgcaagaggagaaaaccgctgttgcttgtgctgccgccgatgtcgcgacagaggagcctgcgccggc

SEQ ID NO: 350051 - DNA, 395 bp, Zea mays
  unsure (1)..(395): unsure at all n locations
agagatgacccaccacatcccatcccggggactctctcctcctgcgctggggtccctccagtcccagatcccgattcgccgacgcctccggcagatctagccagcagctcccgtctcagaactgccgcggtcgccatggagaagccatgctctctcctggtccacttcgacaagggctcggcatcgatggctaacgagatcaaggcggatctgcaggccatnnatttcccngccaaggtcgacaccttttctccgtctatttcgcttctgcttaacggcttgacgtttcctaannttcttcttaccagtcgtccgcttctggctctcctttctttttccttaattttctctaagcttgctctcgtttatgttgtggtcttagtctgtgggggttt

SEQ ID NO: 350052 - DNA, 114 bp, Zea mays
tttctttatcgtcatcctcgctagcttctaatagccagagcctcttgctcctggggcggctttcccaccgctgtctacattgactgcgcaagaggtgtagacctctgttgctgc

SEQ ID NO: 350053 - DNA, 219 bp, Zea mays
ctcgcagacatctcacatgatggacatgtgcgtcctactccattgtaagaccatgagctgctgccatatgtaccgagtgtgaaagcccgctaaggactcgcatgctgctgagaatcagctgagccaccaactggaaattcgattcggtggatttcgctgcgccgggttgacggagcggatccagtacatggactctcacgttgtgcttgtgggccacct

SEQ ID NO: 350054 - DNA, 117 bp, Zea mays
tcgagcgtgccggcggttcaacctaataccctgccctttctggggttccttccggttcaacttcactcggttcggcttaaacgaacccaacttccttccctaaccgttggctttttc

SEQ ID NO: 350055 - DNA, 137 bp, Zea mays
tcggggctcagtcgtcgctgagggacctcgcgaggggcggggcgggcagggagaagaaggctaagaaaatgcggatggaggacgacgggagggggagggacactgggatggtgagggataggcggggatctggtgga

SEQ ID NO: 350056 - DNA, 114 bp, Zea mays
attaaaaagcctgtgttgtcggaaacaccaaaagagggaggttgggcattttcctcttatttctttttgggatcgggggagtgggccacccgtggttattttagttggccagct

SEQ ID NO: 350057 - DNA, 125 bp, Zea mays
  unsure (1)..(125): unsure at all n locations
tcggttcgacctcatgtacgccaagcgcgcgttcgtgcactggtacgtcggcgagggcatggaggagggggagttctnctaggcacgcgaggacctggccgncctggagaaggactacgaggagg

SEQ ID NO: 350058 - DNA, 125 bp, Zea mays
aagccgtcttttctaaccccaagaccagccagccggccggcgttatttgtcattagattaggcggtttatttacccgacccgttcacaatccaggggctaaaaaatcaaaaaaagcccggcccgg

SEQ ID NO: 350059 - DNA, 136 bp, Zea mays
  unsure (1)..(136): unsure at all n locations
tctcggacgcgtgggcttatctcttctgcctgttctctcacctttcacaaaatctctctgtctcacgcctttcccgcgcgccctttttccacgcacgggcggnttcgtcggcggtcgcgcgcgcccgaccgtgccc

SEQ ID NO: 350060 - DNA, 145 bp, Zea mays
tcttcaccaccataccaggagagagaaaagagagaggcgcctccactcgtgactcgtgagtcgtgagtagtgactcgtctggtctcccctttttcgtccgtctggtcctcccgtccagaggcgttcttttttccttccccttttc

SEQ ID NO: 350061 - DNA, 75 bp, Zea mays
caaacaggaagagaagatggcggctgcggcggccgccagcatggtggtggtgcgggaggtcctgggccttgacgt

SEQ ID NO: 350062 - DNA, 121 bp, Zea mays
tctagatcgcgagcggccgccctttttttttttttttttttttttcaaaaaaatgatcgcattgggcgcataaattatcaacatgaacaaaggtggtccacgggtagagcaactttttggg

SEQ ID NO: 350063 - DNA, 65 bp, Zea mays
aaccgtctgtaaagggggggggccagaaggggcccggcccgtttttcggttccctgctggcccaa

SEQ ID NO: 350064 - DNA, 90 bp, Zea mays
catcgacactagtaaaagtttgtgctgggttgggattttttgtgcatcttgtgatacctcaaggcttcatcatttaaatgtttagccgcg

SEQ ID NO: 350065 - DNA, 107 bp, Zea mays
tcgtttattctagttcttcccaatcaatactggggtttcttggcgggcgggtgctttttcccgaacccccctttggttttcgggtcaaaaggaattgggagggcccc

SEQ ID NO: 350066 - DNA, 132 bp, Zea mays
  unsure (1)..(132): unsure at all n locations
tnctccttttcgacggctgctcggtaacctgggcgcccctagccagctctaagtgagcgccaccagcagcatctgccaccgactcacgcataccgtggaataaattatggtattggtagagtgtcatctatt

SEQ ID NO: 350067 - DNA, 317 bp, Zea mays
  unsure (1)..(317): unsure at all n locations
gttgcncncccgaaccagaacaaccagagagcggancaagaagaagaggcgcggcgccgcaacgggcggcgggagcgncgcancgaggagcggcgagcggagaaagccggcggacaaccccngcagcgagcggaagccgacgggcaacgangggnggagcgccggcccgaggacgcgggcggcggancncgccggccacgagaaggccaacccgcgcggcggcggcggggggcaccnccgcgcgagcccgcgcgacgggcgccagcaagccacggcggcagnggaccccgaagacaccccacgggagaaaggcacaa

SEQ ID NO: 350068 - DNA, 84 bp, Zea mays
agcgttcggtccaggtgtttgtgccgaggaccaaagaggcgctttcctggtacgccccgtacgttcaccgcaatcccgcgggcc

SEQ ID NO: 350069 - DNA, 154 bp, Zea mays
tctttacgcttacgtagaccttctgcattatgcactacaacccgctcgacaacccgagggtcaccctgagggtgctggttgttctggttgttgttctgagtgccaccttcaaggctaccttcaggcattcaagctgtcagtcaccgtggccggc

SEQ ID NO: 350070 - DNA, 80 bp, Zea mays
ggtaaataataatattggcagctttgtagtatcagaaactacatgagccatttgctcattgtccttgtggttggggagta

SEQ ID NO: 350071 - DNA, 243 bp, Zea mays
atataagatcttatgtggttattttttttgttggttgtgttttttgtttattatattttttttttttttaatttttttatttatttttattattttttttttttatttttttttttgttattttattttttttttttttttttatttttttatatttgtatttattttttttttattgttttttttttttttttttaattttttttgattattattaatattattttattttttgagtatttt

SEQ ID NO: 350072 - DNA, 356 bp, Zea mays
tccctgattctagatcgcgagcggccgcccttgggttttttttttgggtggggggggccttcaaaaatatagggtattttagaggcgaccgaaacatatcatatcccccaagttttacacaatcgcgaaattacaaataaatacattatcgcacacacgtatattaaatatcggaaatttgagaatatgacgagcttaccctcgtccgtcgccggttgtgcagaccccacgggtcaggttgaagaatattgtattgatcgaccggtgctagttgttacacggaccttcgtagggactcaccacctccggttcagtttgtggttttagagaatattcattggttttaaatttttacc

SEQ ID NO: 350073 - DNA, 249 bp, Zea mays
ttttcggcaaaactatcaccctcgaggtggagtcttcagacaccatcgacaacgtcaaggccaagatccaggacaaggagggcattcccccagaccagcagcggctcatctttgctggaaagcagcttgaggacgggcgcacgctggccgactacaacatccagaaggagagcacccttcacttggtgctgcgcctcaggggaggcatgcagatcttcgtgaagaccctgactggcaagactatcaccc

SEQ ID NO: 350074 - DNA, 223 bp, Zea mays
  unsure (1)..(223): unsure at all n locations
tgggtgcctcaacggcttctgagaacgacatccgtttccgcattggcagaggtctggtgcatctgcgatgccnnttctttattagatttattaatcatattacatccatacgtacctgcatcagatggcaagtaagttggtcaactaattgattcctctcgtggtcattgtgagatttttatctcgtcatgcttttacgtgcattgtatcttttttatcattc

SEQ ID NO: 350075 - DNA, 52 bp, Zea mays
tctttttccggacccgagcggaggagagcaggaggaggctccaagggcgggg

SEQ ID NO: 350076 - DNA, 64 bp, Zea mays
cagatggtgggaagctgtgcatttcccgaagtcttcttttcgaagggcaaaaaaaaaactaact

SEQ ID NO: 350077 - DNA, 120 bp, Zea mays
tcgcgaaatctgacccgggccacacttcgctgctccgccatggcgatccgctccaaggcctggatctcgctgctgctcgcgctgaccgtcggtctttcgccgggcggaggaagagcccgc

SEQ ID NO: 350078 - DNA, 119 bp, Zea mays
tcgctcgatgttcacggtgtaaacataagcgggccagcattaccaggaggcaggacgccctgtatatcgttgattcttgtgctaaacgtcaatctctccgcacttacattggacccgcc

SEQ ID NO: 350079 - DNA, 245 bp, Zea mays
  unsure (1)..(245): unsure at all n locations
cgaatcagtataagtatagcggaagcggctgcacgtagccgtaccggtatctgcacagtgtccgacccacgcgttcgcgtcttactgagctgagctactgtaataccgagagatcgaacaactgtggtccgtggagcgtcaagagagagagcttttgtgcattctgggggnccgggggcaacgagagagagagagagagccatgtcgtgcggaccaggatatcgcagatgcaggaggagatgata

SEQ ID NO: 350080 - DNA, 180 bp, Zea mays
gaaagctgttacgcctccaggtaccgattcccaattcgacccacgcgccacggcgaatttaactcttaaagaaaaggatgtagatgacatgcaagatacagaatttggggaggcttaaaaagaagttcaacaagaattacccgtctcccattttctgatgaatctaatattggggaaaga

SEQ ID NO: 350081 - DNA, 346 bp, Zea mays
  unsure (1)..(346): unsure at all n locations
gaattttatcaattattacctgtctcccattttctaatatatcttntatagggatttttgtgttattttttcaaatttatatttanagttttttgttgctntgtttctnggtgaataaacagangttttcattttttcttttatttctgtacaataattattgttttttttctcttactacagatattatgttagttttcatttctatcttgtgtgatcatataatacattttcttttattcttttttaatcacatttaattatataagaactntattattacatcttcacacaaaatgattaatttaaatttttttatttattattaattaacactctatttttt

SEQ ID NO: 350082 - DNA, 139 bp, Zea mays
ttttgtccttttcacttgacttggcttgggccaatcattctttaaaccttcttggcgcctttggcctttttttttcctttccaagaaaaacctttcttcttcttttgccaggggccttttggttctcctttccgggctt

SEQ ID NO: 350083 - DNA, 214 bp, Zea mays
tttaacctagctagcctgcacgcactgacactgaccacgaccagcgctcagccttctgctccggaagctagctcaccggccagccaccccaccccgtccacccgacaatggcggccgccgtggccctcctcctgctctccgccctcggcggagcggcggcgcaggtgttccctccgtggaacggcacgttcccgatgggtcccgggttctttgg

SEQ ID NO: 350084 - DNA, 55 bp, Zea mays
ttttagggaaaccaatggcaacaaaggggggggggcattttaaaagggggggggg

SEQ ID NO: 350085 - DNA, 100 bp, Zea mays
tctcgtatagagaaagaaaaatatccccaaagggtagattccgatcttaatggggggcccctaattattatttgtgataagcgtgggccgggcccccggc

SEQ ID NO: 350086 - DNA, 252 bp, Zea mays
agcaaagcggcagtgcgtagagaggatcgtcgaacagaacagcatgaagatggtcatcgttctcgtcgtgtgcctggctctgtcagctgccagcgcctctgcaatgcagatgccctgcccctgcgcggggctgcagggcttgtacggcgctggcgccggcctgacgacgatgatgggcgccggcgggctgtacccctacgcggtgtacctgaggcagtcgcatgtcatcccgcttgcgttggtaccctacta

SEQ ID NO: 350087 - DNA, 130 bp, Zea mays
tgctttttttgaagccgccgccgctgcagtgtccatagccaccgtaagagactgagatgcgtctttctttccatacttagttttacttctctacatttgtttctttcttttttttttttttccttagttc

SEQ ID NO: 350088 - DNA, 75 bp, Zea mays
  unsure (1)..(75): unsure at all n locations
ttctgctggtctagtcaaaagcattncaaccacaaacgagctctctcttaaagggcttgtgttttttatataaca

SEQ ID NO: 350089 - DNA, 441 bp, Zea mays
  unsure (1)..(441): unsure at all n locations
tgcagagctgcagtgagagcaagtgtgaggatcagatgaggcatccgtgaccaatgatcgagtagccatgttgatgtgagattaacgccctctttttcnctctcatagagctcctggtattccttattttttgttttttttaatacttggggnctgtttttctgtnntcnggaatttttttttttttttgctccccggtttttggactnnnngtnnnnccnttntntaaattnttttattttttttnnntattccnttttatttttttggtttttttttttttttttgtttttttntttgttnttgttaatttttttaaattttttttattntantatattttttttgtttttttttatatctctttnntnctttaaatatatttttgttatttatactttttatcttttattttgtatatttcctttcctttttttattt

SEQ ID NO: 350090 - DNA, 401 bp, Zea mays
tctcccagttcgtcatcaagtcgttgcctttattttttttatcccttccctgggtgatcgctattgctattgctacaacaagtggtcagggaattcaggtgcatctgctgtttggtttaggctctctgctggcagttcgtgagggcagcatgagggcgccgctgctgctattggcggccgccacgtggctggccgtcaacgccgtggcgcaccctggcagacctggcggcggcggccgggagcaaccgctttcgaggatcgccgtcgagagcgcggtcctcgccgtcgacgatgcggcgcacgtcagggcgtcccccttggtactggggctcaagggcgagagcagcgatgggtggacctggagttttttcatcccgacccatccagcgacgactggatcg

SEQ ID NO: 350091 - DNA, 286 bp, Zea mays
ttgggttgcctggggataccagagttacccctttgagactcaagaagcccggcgggggcttaatttccagaaaatattattccagggccgattggtccacctcgcgtttcggaaggtggaacacacagtcgccttgtccggttggttaaaagaatgggatccggttaattgttggcattttcccccttgtggggccttttgtccggttatccttaaaattgtggcaattacctcctctttttaaggccttttttcataccttatataaagccaaagtcggaggttc

SEQ ID NO: 350092 - DNA, 145 bp, Zea mays
ctactatagaaagctgtacgcctgcacggtaccgttcccgaatttccctgttaccccacacacttctattttctccatctatacatcactatatcgcacggttattcagacaggaccgtgggtgcttctcaactaccccttttat

SEQ ID NO: 350093 - DNA, 379 bp, Zea mays
  unsure (1)..(379): unsure at all n locations
tgcttcacagaccaaccaaactaaagcagcggtggtcgcgtcgccggcgggtactcgcgtgcgtgccaggaagacgaaccaccagccagcccaggccccaggccaacacgcacgccgtcgctacctggcgaggaaggctgcctgcctgatggtccaggacgaaggctcgtggtcgtcgggcacatcgtacgcgcttcacaacatcttcaccatgccggtgcactccttttccatcgactctaaattcagtcgatccctttggggtttcgtcaggtggggcgttgttcaatttttgcaaacttttttaaatcccttcttatgtnttagattcctttttttttgtatatatttttcatnnngttttccccttatatttttt

SEQ ID NO: 350094 - DNA, 99 bp, Zea mays
tctctcctaattctatatctttttacacttaataaagcgtattttctcacatgcgggtggtccccttacacttcacttcattctcttgttccttttcct

SEQ ID NO: 350095 - DNA, 103 bp, Zea mays
tctaccagaagctcctcctcgccttcgaggacttcctacgccacccggggagcgcgcccaacacagcaccccaccgtcgaagtataagacacggtacgcaccc

SEQ ID NO: 350096 - DNA, 404 bp, Zea mays
agcaacatagaaagtggaatacagtagcaacaatagagcaacaatggcggccaagatattttccatccttatgctccttgctctttctgcatgtgttgctaacgcgaccatttttcctcaatactcacaagctcctatagctgcccttcttcccccataccttccatcaatgaccgcttcagtatgtgaaaacccagcccttcaaccctacaggctccaacaagcaatcgcaacaagcaacttacctttatcacccctgttctttcaacaatcgccagccctatctttggtgcagtcattggtacaaaccatcagggcacaacagctgcagcaactcgtgctaccagtgatcagccaagtagctctggcaaacctttcttcctactctcagcaacaacaatttc

SEQ ID NO: 350097 - DNA, 391 bp, Zea mays
tcagttctcgatccgaagctgtgcctcgtaccattgggatccaatggcgcggacggggaatctgacgactgacattaagcgcgcttcgcggtctgacgcgtaccatactcatttgctctgaatacatcaaggccaataacatctgtacttcttcccacatacgctctaattaacgaccgtatgagtatgtgtaaacacattcctttaaccgtacaggctccatcatgcattctgaacaagcattcttacctttattacccttgttctttcaacaatcggcagccgtaggtgtggggcattcattggatcaaaccattatggctcaacagttgtttattcttgtgctaccagtgatctttcaagaagctttaacaaacctttctgtctactt

SEQ ID NO: 350098 - DNA, 356 bp, Zea mays
  unsure (1)..(356): unsure at all n locations
ttcccttctccacccacacattcttttctacatctgtttcaaaccacctttagcttcttgatccaatgaaagagagcatccatataaaacttccantaaactttttnaatgnttttnnttatttatttattttcactttcnnttncnttttttttttccttaccccntttaccncatattttatctattatttcttccttcttttttnttcctatattatttttttatttttcttatttcaatcattttttactttttttattcaattttttttttcactaatttttattttacctttattactcttttttatattatttctttcctattttatttatatttctttctaacttttt

SEQ ID NO: 350099 - DNA, 345 bp, Zea mays
gatcacactcgtagagagaaggaaaaatatccccaaaccctagctcccgatctcgatggcgaaccctcgcgtcttcttcgacatgaccgtcggcggcgccccggcgggccggatcgtgatggagctgtacgccaacgaggtgcccaagaccgcggagaacttccgcgcgctgtgcacgggcgagaagggcgtgggcaagtccgggaagccgctccactacaagggctccaccttccaccgcgtcatccccgagttcatgtgccagggcggcgacttcacccgcggcaacggcaccggcggcgagtccatctacggcgagaagttccccgacgagaagttcgtgcg

SEQ ID NO: 350100 - DNA, 367 bp, Zea mays
  unsure (1)..(367): unsure at all n locations
gagcatcgtaaccacaatgctcctggcttcccctgtagattctatctatctgcatttagaggcttctcagttctctggcagcataacaacgcggtcaggtagattggagatatagatggtagtggtcaggtagattggagatatagatggtagtgatacaggtcgcaacctatgtgtgacctttttcttactgtacattccagtgtcacagcaagggtgcanncatnatttgcccgtttcagtcttgttctacttactggcctgacattgtgcgatatctgctgttgctaaagcttaatctctgtaaattctactcgcgtgacgtgcccggtcatgagctggtgttttattctgcttgcccgttgtg

SEQ ID NO: 350101 - DNA, 418 bp, Zea mays
aggagtccgggtgaacctaacaaaattgaaccgattccccctccctccggctctaaacatatcgacaattcctcctccctcctcccatcgcttgcccctcgctcccctccctctccgcgccgccccctctcgaatcgaaatccctctccgccatgccgaagggcgccaagaagcgcgccaagctcaagaagcagcagcagcagggccaccccgacgatgccggcaacaccaacgccagcaacggcaactgtaacggctgcgatgacaacaacagcgcctcgagcggccgcgacggcgaccaccacctgcggatcccacccaaagtttctcgtgtggatgcgaacgaggactccatggagagctctgaggagatggtcaccccccgagctgccgcgtcggagccggatgaggaggagac

SEQ ID NO: 350102 - DNA, 343 bp, Zea mays
  unsure (1)..(343): unsure at all n locations
tctnctgctcatgtactggggcaagccgttctagacgactccgcccatcatgtcctgagggcgagggcaggtggnggttttttttcatgttgtgtctcatgtttggtgctttgaacgtttatttttcctacatttcttactttttttttttcttgatttctaattttttcttttgttttttattgcttcatccttatatacttcgtcagtttatatattttctctttcatttcttacctttattttccttaattttttttttgtaataagtttttacataatatcatttctctaattatatttaattatattaaattccatatttatttttttcttaatttat

SEQ ID NO: 350103 - DNA, 328 bp, Zea mays
tctttcgcagaccattagctttatctactccagagcgcataagaacccgatcgacaccatgcgggtgttgctcgttgccctcgctctcctggctctcgctgcgagcgccacctgcacgcatacaagcggcggctgcggctgccatccaccgtcgtcggttcatctaccgacgccggtgcatctgccacctgcggttcacctgccacctacggtgcatgtcccaccgccgatccacctgccgccggcgtttcaccatgcaccagcggtccatgtgccggcgccggctatgtgccgacgccaccatgccactaccctactcaaccgcccc

SEQ ID NO: 350104 - DNA, 153 bp, Zea mays
tcgggtggaagctacaaatataacatcggttgacttgaccaaccaaccaattccatttgtgcttggttgacccttgaagtcaatgtgaagcaacatttaactggttgcttaaggctcaccttattgggataatctggactacatctacactga

SEQ ID NO: 350105 - DNA, 71 bp, Zea mays
gccagtccgggcccggttaaccgtcggccacctggctccggccaaggccccggcacgcttggccacgcggg

SEQ ID NO: 350106 - DNA, 60 bp, Zea mays
gccgaaaccgaccaaactactcgtccaacctccaaagggaggggccaggggatttaattt

SEQ ID NO: 350107 - DNA, 374 bp, Zea mays
tattgagaccaacaagcaacatagaaagtggaatccagtagcaacaatagagcaacaatggcgaccaagatattttccctccttatgctccttgctctttctgcatgtgttgctaacgcgacaattttccctcaatgctcacaagctcctatagcttcccttcttcccccataccttccatcaatgatagcttcagtatgtgaaaacccagctcttcaaccctataggctccaacaagcaatcgcagcaagcaacatacctttatcacccttggttcaacaatcgccagccctatctttggtgcagtcattggtacaaaccatcagggcacaagagctgcagcaactcgtgctacctgtgatcaaccaagtagc

SEQ ID NO: 350108 - DNA, 224 bp, Zea mays
tgctttctcgttctgggccgtctccatcgtcctaagccacctgctcaggctgtgggcgctctattccacgacgaccagcacccagcaaacctcaagaaattggtaatggtaaggtcatacatccccttggctgccacaatggctccccaatggccaaggctgcttctgttggcaaagaaccaccaacgaacgttgctcttatccttggtagggcggtctcgcca

SEQ ID NO: 350109 - DNA, 307 bp, Zea mays
  unsure (1)..(307): unsure at all n locations
gctgccntttatcgcgagcggncgncctttttttgtttttttcaagaatcaacagcggatttaaagatgcagacttgcggagtaaattgtaagccacaaaatatgttcaccaaacaacttataaaaaagagtctaggctcctgccggatnnngagctngttntacataaagaacgacatcatatttctcgagacaagccttaccaggtaatgtttgacacttaacacgnacagtttttgctccattttgtcttggtgtatttcttcattacccttcttttttgtgagaaagaggttgctgtgttttg

SEQ ID NO: 350110 - DNA, 95 bp, Zea mays
cctttggcaatgattgatagacgtgccgatgaccgcattgtccatgggaagtggttcaatctcgagaagcctgttcttggtgatgttgaccaact

SEQ ID NO: 350111 - DNA, 128 bp, Zea mays
ggcccaagccgtccgggccgggcttccaagggggctctccccggccgccatttcccctttaagaaccctccccctttacaatttttggggtcctaccggccccttcttggccggttttttttccgcgg

SEQ ID NO: 350112 - DNA, 353 bp, Zea mays
gttctagatcgcgagcggccgccctttttttttttttttttttttggaaagataagattttttttggggagcaatttatgcaacatgccatcctgcattataattattacaaaagcgacaaacacctccaatcacacgtgaaggtggggccgagggtgagagagaagtcttattagaaggaaggaggaaaatgacgaaattaagaaataatgggacactctgttacgtccactcatcatatatccaacaacgcccgccggccggtcagattacatatttgtccagactcgatgttgttttttttacaccagtgattattatttttgttgcctatttttccattatatttatct

SEQ ID NO: 350113 - DNA, 60 bp, Zea mays
  unsure (1)..(60): unsure at all n locations
cccgaccagcccgacctcatcttctcctcgtcggcttcacccctccaccaccttncatgg

SEQ ID NO: 350114 - DNA, 343 bp, Zea mays
tctatcacacccagcggtcgtataccctgtagcggggtactgctaagaacaaagacgagaaggtccacgccgttccgacgccacaccggaaccgcatcacactacaagccatcttcttccaccgaacgtgcggcctacatagatcgcacccaccggatcgatggtacctccgcgcgcggctccgacctcatcttcctacatcgactggcatctgcagcggcggcgtgttcccggccagccttcgaaagggtaatcaatcgccagacttttgggagcttctgttgggggggaccggggggaagagccaagttactgcagaagctaacatttcggttgtcgagtg

SEQ ID NO: 350115 - DNA, 198 bp, Zea mays
tttatgcgaccctaccacaactgcagccacagttgccattcaaccaactggcgttgacacacccatcatcattataccaacaacccatcattggtggagccctcttttagatttcttatgagttatagttcaataataaagttttttgtctgatgtttgtggcttcccagaaataagaaagtacatttctagattctt

SEQ ID NO: 350116 - DNA, 395 bp, Zea mays
tcgtgcgagctgaaggatggcgagctggactcgaacaggctgctccgttgcatttcttataaggagaacttgaagctctacggcaacgggatgaatacagtgtccacacccatcctcaactaaaatttcgatactaacaatcaagggaatggtgactgccaggacggatattatgtttgcgtcgtggtacctgcagatgatgcacaaacaaacaggccattctatggtccaaatcagcggtcttctaaagaagtattaccaaaatggagagaagtgatggagcaatatcacatggaggcgttgacagtagcaaaataagtcgcaaggatcatcgctcttgctctagatctagatgtggacttgttcgatagacctgaaatgcttggcgagtcaat

SEQ ID NO: 350117 - DNA, 211 bp, Zea mays
  unsure (1)..(211): unsure at all n locations
ttgctttatctactccagagcgcanaagaacccgatcgacaccatgagggtgtggcgggttgccctcgctctcctggctctcgctgcgagcgccaccttcacgcatacaagcggcggctgcggctgccagccaccgccgccggattcatctaccgccgtcggtgcatctgccaccttcggttcacctgccaccttcggtgcatttcccacc

SEQ ID NO: 350118 - DNA, 254 bp, Zea mays
ttctagatcgcgagcggtcgccctttttttttttttttggctgcggtgcagattgtccaggtccagttgaacgcgcgccacacaggacattagactgcagtaagttcggttgtatcggtgtccagcaaatagaaaccgaagccgagccgatcttttcggttcgtaagaaaggaaaaccgacaccgaatcgaaaaaccgaaaaaaccttgattccagttcggctcggttttcggatgaaatgtgcctacccctat

SEQ ID NO: 350119 - DNA, 274 bp, Zea mays
  unsure (1)..(274): unsure at all n locations
ttggcgctacctacccgcaggcgcactacccggccatggtgcgcctgtcccggcgcctctgggactaggcccatgccgacccctggttcaccatgctcacgtccacacgggacctccacctggtcccgcgggactactcggatctcgtcagctccatgaggaacggtggagccacctacatgttcgtcagacatgagtcatggacttggncaagaacggtgctgctgagggatcgcgactagtggacgctcatgcaacacctgctggtctgcca

SEQ ID NO: 350120 - DNA, 257 bp, Zea mays
  unsure (1)..(257): unsure at all n locations
tgtccgtcgccggcgccaagcccctgcccggcgccacctncacgtgcgtctgcttccgggccacccaccagcccgcgtgcctgctctcctcgcccgcgcccgggtctctgcgccgccgggacgtcgccgccatggtctccgcgccgccggccgtcggcaccgccatgccgtcgctcgacttcgacacctccgtcttcaacaaggagaaggtctccctcgccggccacgacgaggacatcgtgcgcggcgggaggaac

SEQ ID NO: 350121 - DNA, 142 bp, Zea mays
  unsure (1)..(142): unsure at all n locations
attgctaaaacacannctgcgatcctcgaaggctccttcgagcatgggggatggggttctactgcggcaagtactcagatgatctcatcaagaatgctgcctacataatacaccccttgcaagggtatcctttctgtcttat

SEQ ID NO: 350122 - DNA, 177 bp, Zea mays
  unsure (1)..(177): unsure at all n locations
ttcgaatgctctaacgcctcgcgacagcgtgctctctcgcgcgatgcgcttgcggggaggcaacacaaaatacaanacaaaacaccttatctatcacacgctcaattcttaaataaatatactcataaaatatattaaatatcaaatattatacaaataaacataaatactaaaata

SEQ ID NO: 350123 - DNA, 458 bp, Zea mays
tggctttatataaagtggaatccagtagcaacaatagagcaacaatggcgacgcaagatattttccctccttatgctccttgctctttctgcatgtgttgctaacgcgacaattttccctcaatgctcacaagctcctatagcttcccttcttcccccataccttccatcaatgatagcttcagtatgtgaaaacccagctcttcaaccctataggcttcaacaagcaatcgcagcaagcaacatacctttatcacccttgtttcaacaatcgccagccctatctttggtgcagtcattggtacaaaccatcagggcacagcagctgcagcaactcgtgctacctgtgatcaaccaagtagctttggcaaacctttctccctactctcagcaacaacaatttcttccattcaaccaactgtctacattgaaccgtgctgcttaattgcagcaacaact

SEQ ID NO: 350124 - DNA, 184 bp, Zea mays
atgactctttttctccctgcaaacccagcaggcgaccacctctcgttgttctgggcggggcaggacaaaaggggagagagaggttaggcgcgttttccgcccgatctgctctgccccgacgcagctgataccacctttttagtctttgtagcaagaatgtttcctgcttttttattaccttaaa

SEQ ID NO: 350125 - DNA, 93 bp, Zea mays
attcgtctgtccttcctacccacctcctgccgggcgagcgtgctcccgcatgccgcgcgggctgactgcgcgacggcggacgacgtgtgtctg

SEQ ID NO: 350126 - DNA, 118 bp, Zea mays
tgtggttctcgcagggtcctgcccaagcccagaacctgatatattcactgtgtgaagccaaatcatatattgttgtgaagattggactccggaatggatccaaatttttttgaggaat

SEQ ID NO: 350127 - DNA, 350 bp, Zea mays
  unsure (1)..(350): unsure at all n locations
ttgatcgtgagcggccgcccttttttttttttgtagggttnattttnaaaaggggggtgggggatctatatttaattttattatatattttttttaattaatggtttaattttattttttatgtttttttttttttttattttttatatttttattttttttttattttcatttgtgtggtttttgttgatttttattttaatttttttttttttttatgtttttatgtattttatttttatttttttttgtttttctttatttttttattttttttttttttttttttttttttgtttaatttttttttttttttattatttttattttttttttattatttttttttt

SEQ ID NO: 350128 - DNA, 363 bp, Zea mays
tttgacttacaagcaacatagaaagtggaatacagtagcaacaatagagcaacaatggcggccaagatattttccatccttatgctccttgctctttctgcatgtgttgctaacgcgaccatttttcctcaatactcacaagctcctatagctgcccttcttcccccataccttccatcaatgaccgcttcagtatgtgaaaacccagcccttcaaccctacaggctccaacaagcaatcgcaacaagcaacttacctttatcacccctgttctttcaacaatcgccagccctatctttggtgcagtcattggtacaaaccatcagggcacaacagctgcagcaactcgtgctaccagtgatc

SEQ ID NO: 350129 - DNA, 101 bp, Zea mays
tgggagagagaagtttgttacaaggattcaactagtgttccgcatcctcaagggcattgtgttccttgtgctcattggtttgcttgtccttttatttgttg

SEQ ID NO: 350130 - DNA, 216 bp, Zea mays
  unsure (1)..(216): unsure at all n locations
tcgtagttctagatcgcgagcggccgccctgtttttttttttatgggggggggggttttttattttttttntttttataaagcttgcgcgcttaagcagtgatgataagagcctatccacgaaatgatgaaattatacatagcttcggaattttgaatatgaacattatccgaaatcaatgccatctaaatataaaattttatattttaacttaaa

SEQ ID NO: 350131 - DNA, 111 bp, Zea mays
tggttttccagaccattagcttaatctactgcagagcgcataagatcccgagcgacagcataagatactttcttaatctacatctttccctccagtccttttctctaccac

SEQ ID NO: 350132 - DNA, 56 bp, Zea mays
  unsure (1)..(56): unsure at all n locations
ttttctttttataaaaangacagaaaagaaacgttataggtcgatgaatgggcagg

SEQ ID NO: 350133 - DNA, 105 bp, Zea mays
  unsure (1)..(105): unsure at all n locations
tnatagcgttgtcgcgccgaggaacgggaagcggggcagggacacaacatggcgggcgacggtatagcccgcgatcgcgagcttgctgcgcgaacagaggaacgc

SEQ ID NO: 350134 - DNA, 119 bp, Zea mays
  unsure (1)..(119): unsure at all n locations
tctaatancaaaccctagccccaccgcgcgaatgggcgaagtgctagagcgggccggcgactccccacacgcacgccgaaagccgccacctcccccggatagcccggaggaccgcacgc

SEQ ID NO: 350135 - DNA, 452 bp, Zea mays
  unsure (1)..(452): unsure at all n locations
gacagcgcctgtagccctgcagggcatgcgcgacgcacnagnnngcgaaggcattannacgcctctnngcccgttacccgataaaactttggtgtgaccaccgnngcgatccggcgccgtgagggtcaactcatgagttcagtcaggcacgcgcgtganttgctgctgngtctgacctcttgatgaggttcgtgtctcgtacatactggctgtannatcatgtgctccttcggggctcaattgtgttcttctgttggagtgagtccatgtacgaaaggatgaatcttgattgccctgccttccgcttcgctgggttgaacaacttgaacctgtgatgttcagcttgactggggacgtaaagaagaacctggcgctctcttgtgtgcatatctttattgaggatgattgttgacactgtgtgtctaagcttttgcacttttcctatttgtttt

SEQ ID NO: 350136 - DNA, 83 bp, Zea mays
ttcggacttccgccgccgcagcgccctcctctcggaggggccgaccgacaagggggaagggcaacaactacaggcacagacaa

SEQ ID NO: 350137 - DNA, 126 bp, Zea mays
tgcgctcgttcaactcgtgctcagctcgtccgtcccttccttcggcaaggtcatactgatcttctgatccagagccgggtgttggcacagatcaggcggccgccatggcggatcagttcgcggatt

SEQ ID NO: 350138 - DNA, 113 bp, Zea mays
  unsure (1)..(113): unsure at all n locations
ttgcgtttgcacaaggcaanaaagccagaagcgacggaggccaacaggaagggagccgcgcaaaacaagcgcgaagaacacgagaaggggaagaaggaccgaatcccaaggaa

SEQ ID NO: 350139 - DNA, 86 bp, Zea mays
ttgcttattctacttctacttcagaatcggcgccggtcccggcgcctcggatggggaactaccgcaggaggtcgcggctgcaggat

SEQ ID NO: 350140 - DNA, 73 bp, Zea mays
atgctttttgtttaagcaaccaccacagaggggccggcaggacggcaacaggggggagggaagaacaccaggg

SEQ ID NO: 350141 - DNA, 217 bp, Zea mays
tgcgttcgagctttatctactccagagcgcagaagaacccgatcgacaccatgagggtgttgctcgttgccctcgctctcctggctctcgctgcgagcgccacctccacgcatacaagcggcggctgcggctgtcagccaccgccgccggttcatctaccgccgtcggtgcatctgttaccttcggttcacctgccacctttgttgcattttccacc

SEQ ID NO: 350142 - DNA, 241 bp, Zea mays
tttcgttttcccaggaccagaacagccgcgtcgaggcggccctcgagaccccgcggccgggacccatcccaccaacactcccacccccaccgccacctgggctcccgtatccgcacccgaagggcagactccgcggcgactctgagccgcagggcgcgaggcggcggccgcggttcctgagcctgcacgggttccccaccaacggcgagatcatgcgcaagcaggtgcttgggaagtggcc

SEQ ID NO: 350143 - DNA, 290 bp, Zea mays
ttttccattcgttcgggtcttcagaccattagctttatctactccagagcgcgagaagaacccgatcgacaccatgagggtgttgctcgttgccctcgctctcctggctctcgctgcgagcgccaccttcacgcatacaagcggcggctgcggctgccagccaccgtcgccggttcatctaccgccgccggtgcatttgccaccttcggttcacctgccaccttcggtgcatcttccaccgccggtccacctgccgccgccgggccacctgccaccgtcggtccatgtgt

SEQ ID NO: 350144 - DNA, 136 bp, Zea mays
  unsure (1)..(136): unsure at all n locations
aaataactttttgcgccnccatancagcccagggggcttataaacccgagcggcagcacgaccatgtttaaagagaacctccatatccacattctagctattagcaccacctacactcatacaatcggcacctata

SEQ ID NO: 350145 - DNA, 378 bp, Zea mays
gggcgcctttgcgttgtagcaacatagaaaggggaatccagtaggaacaatagagcaacaggggagaccaagatattttccctccttatgctccttgctctttctacatgtgttgctaacgcgacaattttccctcaatgctcacaagctcctatagcttccctttttcccccataccttccatcaattatagcttcagtatgtgaaaacccagctcttcaaccatataggcttcaacaagcaatcgcagcaagcaacatacctttatcgcccttggtgtgtcaacaatcgccagccctatctttggtgcagtcattggtacaaaccatcagggcacaaccagctgcagcaactcgtgctacctgtgatcaaccagta

SEQ ID NO: 350146 - DNA, 189 bp, Zea mays
ttcacaattgttcacttgttcttggttttggtcttacagaccgtcaccggcaggcagcagccttggcgggttggtcttgtgtcattggttcctgggtgccatcaatggaggtggggaacaggtacgttgccaccccgcaccacattcagggcgccccgactgaggccgattttgaggtgaaagaagaga

SEQ ID NO: 350147 - DNA, 165 bp, Zea mays
tctgcgtacacggtatccctcttcctgtcagtagtagagtgagagtgaggcagcaaaaccaagacaaggagaaataaggagatggccaacaagaaggagaaggcggtgaacttgtcgggcaagccacggaactcgaactacttcaaccgccccaatgacaagaag

SEQ ID NO: 350148 - DNA, 232 bp, Zea mays
gtcttaggtgctttatgctttaaaatgttgtttcctttggtgtacctaagaaaatacttcttaatcatggtgtgcttagacattttgctttatatgcatgatcttgtcgtttttcaattggtatatgtgttgcaatgatcatcatgtgtgaagtgtgcctacgttgcttttgaaatgttatatatcttgaggcatgcattgtttccactagtcataagttgtattatgtcat

SEQ ID NO: 350149 - DNA, 230 bp, Zea mays
tctttgttcgtccagcaccagctttcctccgcaccccgatccggacagactggcgggaaccctaaccctagcgcgccatggcgggatacacccaggccgcatccagggacgtctctgccaagcctggacactctaacgacgtcaactcggccaatgacaagaagggcgcgggcgtcggctccgttgtgcggtagccggatcctggttacctatctgctgtttatgatgta

SEQ ID NO: 350150 - DNA, 139 bp, Zea mays
tcgctccgctgggccaccagctttgaccgccggcttccttgccctccggtactgctcctcctcaccccactcccccgcaggagcggcggcggcggccgctaggtcccaatctttcttttggtgcgtcagtccatcctgc

SEQ ID NO: 350151 - DNA, 220 bp, Zea mays
ctccgctccggctgcgctctgcctggctttcctgctacctgctctggcgcgagcgtgctaggtacggcggccgatctggcggctcattcttttgtttgtgttcttttccatttgttttttcttttttgttttggttctgcctttcgtttcttttcttttttttttttcttttttttttttttcttttttattttttctttcgttattccttttttatttt

SEQ ID NO: 350152 - DNA, 188 bp, Zea mays
gggggggacccaggccaactccgcgcacggttgccctcttatgatcatggacatcaccacgggcgggggagacttcccttgaaacgtacccggccttattgtcccttttcctacctcctgagtttggcttttctccaaccttccctcgtttggttgtatgcggtactgaaaacgcacacaattttttt

SEQ ID NO: 350153 - DNA, 354 bp, Zea mays
tctttctgaattgaccatgatggacaaagatgatccagaaggtgatctatggaggcccaccactactcgtacgacgctcatgtcctgatagctcttcaccgtcttctattttctcatcaacgattcctatgatactttcatattgttccattctcgtcagtactatattcagccaaaagaataaaataactcagcagacatttatattaacttcagctgaaagaaacacaaatgtgtagttttgcagcattatcaattgtgcttgagaatttgaatcacttattgatgggtacattgttattagagccttactgctaaaggatataaagtcttttccattgggatcgtcaacca

SEQ ID NO: 350154 - DNA, 341 bp, Zea mays
gaaggaagggcgtcattccagggattacctatgcgatagcccccaccattgtcgccctcaccccgctctccatcgaaggacgggcgccattccagggattacctctgcggcagcccccaccattattgccctcatccgctctccgccatcctcacccccacccgcccccgccatcctcctcctacgcgcaagtcttcggtgcccttctcctgcccctgccatccccgcatatttggatccagggttcgctcaggttgcctcacaagggccccaccacgcgcggtcagggagcatggtgggagcttcgctcacgtgcgtggttgctgggagctttgttacca

SEQ ID NO: 350155 - DNA, 104 bp, Zea mays
tctgggatgccgcctggtcccagagctggtttttcaatgtgtgtgcacaagaaaagggctgttctttttggtggtgtggtagatatggaagcgtccaaatttcc

SEQ ID NO: 350156 - DNA, 312 bp, Zea mays
ggacagttatggtgatatgcctgttcacaatcttctgtggagggagtgtgcaaagtcctcatgtgacgtttccgcatggttggcattgattccttttggtctaggtaccacatcattgttgcttccttctgtgtgatgcttgtcctatgtatatgctttatttttgtacttgagcttaatagtctccggtcttcacttggtagttgtagtttatgttttaggtgagaatgcttgttgaagaactctacattgttaaaaatgaccaatttgttgattattagaaccttgatattaagccagaggccttgatgt

SEQ ID NO: 350157 - DNA, 258 bp, Zea mays
gtgggttggcttctcctccccctccggttcgggttcgggttcgtgaggttctccggggttcggtttcgtgggtgagcggatcgagatggcggcgtcggatgttgagtaccgctgcttcgtcggcggcctcgcctgggccacggacgaccactccctccacaacgccttcagcacctacgtcgaggtcctcgagtccatgatcatcctcgatcgggagacgcaaaggttccgctgtttttgcttcgttaacctttttca

SEQ ID NO: 350158 - DNA, 146 bp, Zea mays
gccgcgacgcggtaggggaaagggtaagggtagggcaaaaccaagagcgaagcccaccgagcccgatcccgagttcgatcccgaactatacaaatccgtcaagtccgaaatcgtggcgggggacgcggaggctttggaggattttt

SEQ ID NO: 350159 - DNA, 171 bp, Zea mays
cttacgcgtcgaagtcaaacccttctcagcagccgtcgtggtcaccgttggagcgcgtattcaaaaccaaatcgtagtgatagcatgcgacatgttcatgtagaccgtaggagaaaaaaccatgactttgaacgggcggcgactggcaaaattcttcgtcgtcgtgtgagg

SEQ ID NO: 350160 - DNA, 85 bp, Zea mays
tggacaccgtgacttcatcaagaacatgatcactggtacctcccaggctgactgtgctgtccttatcattgactccaccactggt

SEQ ID NO: 350161 - DNA, 111 bp, Zea mays
  unsure (1)..(111): unsure at all n locations
tgagcttcctccttatgatcctgactggtactacatcagggctgcatccattgcaaggaagatctacctaaggcaaggcatcggtgtgggtggctntcataagatctactg

SEQ ID NO: 350162 - DNA, 294 bp, Zea mays
  unsure (1)..(294): unsure at all n locations
tgggagtgtgccaacacgatccatagtgtctggaaatgcgccagtcaatgaagccttgggatcttcaaaagtcagtgctggcatggaaagccagtcacaacaattgagtgcgcctaagcctttagctgcaacaagcttaagtcanactcaatctgatggcattcaagaagagcctaaaattcatgggaagaaacaactattattcgagagtttgcctgcaaccgatctaaaggttagagcgagcggcatgtgattcgggtatgtacattgttgttccaaaatttatgtgttttg

SEQ ID NO: 350163 - DNA, 388 bp, Zea mays
cagaccattagctttatctactccagagcgcagaagaacccgatcgacaccatgagggtgttgctcgttgccctcgctctcctggctctcgctgcgagcgccacctccacgcatacaagcggcggctgcggctgccagccaccgccgccggttcatctaccgccgccggtgcatctgccacctccggttcacctgccacctccggtgcatctcccaccgccggtccacctgccgccgccggtccacctgccaccgccggtccatgtgccgccgccggttcatctgccgccgccaccatgccactaccctactcaaccgccccggcctcagcctcatccccagccacacccaatcccgtgccaacagccgtattcaagcccgtgccagc

SEQ ID NO: 350164 - DNA, 328 bp, Zea mays
  unsure (1)..(328): unsure at all n locations
tatcgcgagcggccgcccttttttttttttgtttgncgnngngtggggggggttttttttttntttnttttttttgtttttttgtttttttttttttgtttgtttttttgttttttttggttttttttgtttgtttttttttttttttttgttttttttggttttgttttttttnttttttttttttttttttttttttttttttttgttttttttttgttttttttttttttttttttttttttttttttttttttttgttttttttttttttttttttttgtttgttttttttttttggttttttgttttttgttgtgttgttttt

SEQ ID NO: 350165 - DNA, 138 bp, Zea mays
cttccctaaaggtggctggccgacacaaggcgtgaccggagattgacctggagaccattggggattccattgccttgcggggggccttgagggaagaaggccccaattttttccaaattattgccattgcaaatggtt

SEQ ID NO: 350166 - DNA, 309 bp, Zea mays
tctagatcgcgagcggccgccctttttttttttttttggagagagcctctcgctaagcattagcattcactgttaccccagtaaaggtctgtttgtgaacaaatggaagggaggagattcaagagttataatttcttactatttaaaaatatataataagagattttagaccaatcaatctcctaaatgtcggacgaacgagcgcggcggccattggtttcacttgcaggcttgcagctgcttgcttttatcagagctcggtgtgcaagacggcgtcgtccttcccctggttcctcgtcgtcgtcgtcg

SEQ ID NO: 350167 - DNA, 334 bp, Zea mays
caactagcaacatagaaagcacaatagtgtaccaacaatggcagccaaaatattttgcttccttatgctccttggtctttctgcaagtgctgctaccgcaaccattttcccacaatgctcacaagctcctatagcttcctttcttcccccatacctctcaccagcggtgtcttcagtatgtgaaaacccaattcttcaaccctacaggatccaacaggcaatcgcagcaagcatgttacctttatcacccttgttcctccaacaaccgtgagccctattacagcagttacctttggtgcatttgttggcacaaaacatcaaggcacaacaacta

SEQ ID NO: 350168 - DNA, 187 bp, Zea mays
cgcatctggcacgagcagccaagcaaataaaagtagagcggcgagcgacgaccggcctgggccactctttcggccgagcgtagccagcaggtcgtcgtcgtcgtcgtcgtcgtcgtcgcagcacccggccggctagcatggccacgaggaggcagtggtggtggtggtgcctgctggcggcgatttg

SEQ ID NO: 350169 - DNA, 139 bp, Zea mays
tgtccgccttctctctctctctaacccactgccagccacctgtgcgaccggggcgaccactctccaagtaaattttcttccgcccacctgactacgcctcgacctcggcctcggcgccgccttcgttcgcctgacgcgg

SEQ ID NO: 350170 - DNA, 414 bp, Zea mays
  unsure (1)..(414): unsure at all n locations
cgtctctcacataattttacgtggccatgcctgtatttgagcgagttccagaaagaggcatcagatgctctaatatatcatnaagtgttagcaaccattatatggtttnntttgggagtgtctatgnntttagtganntcagccaggaagtaacccatgttatcnagaccctactagtcctttggaacataatatatacggttggataggatnagagatgtcaacctcaattcatgntgtaaatacaatatcnttttccttattgcttatatgcaaatatatgaaacccatcagctggccctgaatggaagctatatcggttattctaccttactgcaaaattgttttaagtggcagtatctaatatacaattgatgggtgcgatctaagtgtcattctttcccattgccggat

SEQ ID NO: 350171 - DNA, 173 bp, Zea mays
ttcttttctgttcctccctcgaccccgttggggcaccttattcgtcgggtgggggcgtccttctcaccctttcacctctacaccaaccgtatacctggacggatccgttcccacctgtttcctgatccgtggaagtcaaaggggatatctaagcttgagcatttgcagccatt

SEQ ID NO: 350172 - DNA, 424 bp, Zea mays
gctgcattgaactctgctgcttatttgcaacaacaattaccattcagccagctagttgctgcctacccccagcaatttcttccattcaaccaactagcagcattgaactctgctgcttatttacagcagcaacaactactaccattcagccagctagctgatgtgagccctgctgccttcttgacacaacaacagttgttgccgttctacctgcacgctatgcctaacgctggcaccctcttacaactgcaacaattgctgccattcaaccaacttgctttgacaaactcaacagtgttctaccaacaacccatcattggtggtgccctcttttagattgcttatgagttataggtcaataatgaagttttttggatgatgtttgtggcgtcccacaaataagaaagtacatttctaggatctt

SEQ ID NO: 350173 - DNA, 124 bp, Zea mays
acgctagttctagatcgcgagcggacgaacttttttttttttttattaattgagggagggtattaataaattaattaataaattaaatagaaaaaaaaataaaaaaaaaagatggataaataat

SEQ ID NO: 350174 - DNA, 140 bp, Zea mays
  unsure (1)..(140): unsure at all n locations
cgttccactcctaaacccagaacccagcccgccgcaaccctagccgccggcgccgcgcgccgncggcattacaccactgccgtcgccacccccatggccgcgccgtcagaggacgcgttgcggttcgcgcttctgtttta

SEQ ID NO: 350175 - DNA, 61 bp, Zea mays
cgactcactataggtgaaagctggtagcgcctgcaggtactcggtctcggaattcctcggg

SEQ ID NO: 350176 - DNA, 322 bp, Zea mays
tttttctaacacggtctccctcttcctgtcagtagtagagtgagagtgaggcagcgagtggaatacaaggggaaatggtgaagggagctttatgggatctatattgccgtttgtttctttatagatttttttaatatattgttattttttttctatttttattctaaattttttatttattttttgatatttaatatattttatttatttctatattttgtttatattattttatttatttatatattatattattattttttttaattgtatttatttagtttttatattttttttttctatctttatcctttttttttat

SEQ ID NO: 350177 - DNA, 352 bp, Zea mays
ctgttctagaataccatccacatccaggccgaccctgagggatgtgactccgaccgtctgcgctcacagttctttgtgatcctttttcacgagggagagagtagagggaagggaaaaggtcacttttttttctgtaggaggaatccaatcgccatttgcgagggcacatagctgctttaccatatccgggcccacgagaacctgtcttttcactctcgcatccgctgcttcctcataaagaccctctacgaatcctagccagcatctggttactctggtcccccactttgagctggatccaagaaccccttatgcggtttattggcgctcgcctgttgacctggatagtttt

SEQ ID NO: 350178 - DNA, 303 bp, Zea mays
accagatgtgctaactcatccaagcttggagggagtaaaagcgtgggtgtgaaatatttgaaatctggtgtatcaagagatgcattaaagcctaatggaaatgctatttttctttttttttatgttttttttttttatattattattattattttgtttttattaaaatatttattaatattacttttatagttatttgttttttttttttttatattttatattatattttatctttattataattttttatatttttattgttatattaatttttaacattaatatttattattaattatt

SEQ ID NO: 350179 - DNA, 377 bp, Zea mays
  unsure (1)..(377): unsure at all n locations
tctgccaaaatatagttggaagttttagctggtacaccattagggtgctgggtgaaccttttttactcttgtgcagtaaagattctttttgtcagccttcttgattttgttagataagcggntcaggtgttttctataattaatttttttattttttttattttctttgtatcttctcttattttttctttttattggttatacttattgtgtctccctttttttcccggggcggatgtattcgttgtattttcttgtaggctattctttttattcttattttttaattggggataaatatattttgtatgtggatttttactattttattaatttttcttttttttcctttgcttctttttattttcttctttttt

SEQ ID NO: 350180 - DNA, 422 bp, Zea mays
cctaatcctaaatcctatcgcgccgcacacccgctcctcggctcctctccgctgctctctgctctctcggtctcggggtacctccgcttggcggctcgccggctccctcctcctggcgcggtgcacggcgaactccgacggctccctgctctctcggtctcggggtccttccttttggcgcggtgcacggcgaactcaggtgctccctcctcccggcgcggcgtacgtcgatctccggtagctccctcctccctgctgctcaaggtatcatataattctggagtcaaacattttatattttggcaggtatcttctataatttcaattgttgggcatgtctgaactgaaaaaacatagacattttccgtgttgtcgattattgcacatttaagggatcaccacatggacagattcttagtctt

SEQ ID NO: 350181 - DNA, 74 bp, Zea mays
tcttttttcgtcgcatcccatcccactaccacccatctcgtcatccgacgatggggggggcttctacctacact

SEQ ID NO: 350182 - DNA, 448 bp, Zea mays
tctctgattcgtgggcggctgtaccactgcggggcaagcccttatgcgtctgatggcttgattatagagaacaattcatattatgtatataattaatataatttataattaaacatttatttataataaatttaatagtttcaaattttttaatttttatattaatattttatatatatttttataaatatttaattttataaattatattataaataataataaaattaatataacttcttaatttattatatatatattaatattattaattttttctttatttaactaaatatttattaatttttattattttatctataaattatattattactaataattaaatattatctataactatattattctttaaattattatactttatatattataatatttttatatattttaatttattatatattttatatatttatattat

SEQ ID NO: 350183 - DNA, 173 bp, Zea mays
caagcaaggaatcccccgatggctcatcgcgttctcctcctcctctctctcgcgtcggccgccgcggttgccgccgccgtcgacgcggaggacccgctgatccggcaggtggttcccggtggagatgacaacgatctggaactgaacgctgagtcccactaactgagcattta

SEQ ID NO: 350184 - DNA, 69 bp, Zea mays
  unsure (1)..(69): unsure at all n locations
tttggtaagnccaagaagggtcagggggaagggccatatatggactgggggggggtgctagaaagtatg

SEQ ID NO: 350185 - DNA, 195 bp, Zea mays
ggaggcgcgtgctctgctccactccacctcccccccccccctgcgccactgacgccgctcgttcgcgcagttttggtcttctggccagcagggcagggggggaacccgcgggagcgaggcgcgcgagcgagcgagcggagggaggaggaggatgatgcacgccaagtccgagtcggacgtgacgagcctggcggc

SEQ ID NO: 350186 - DNA, 93 bp, Zea mays
acatcacctcgaacggcggcgtctgcggcggcatcggttggttatcttttactatattttcaattcaattcaattcactaacccttttattac

SEQ ID NO: 350187 - DNA, 86 bp, Zea mays
gttgtattttagtttagatttagagtacacttatgtatgcattgtttgacaatgtttatttatgatatattgaatggtacttattt

SEQ ID NO: 350188 - DNA, 75 bp, Zea mays
  unsure (1)..(75): unsure at all n locations
ttcgnctggtgttggattctactacccctccggttcgggttcaaattcgagaggttgtgctcccatcaataaaat

SEQ ID NO: 350189 - DNA, 203 bp, Zea mays
attcggttgttcgacacccggggaagaggataaattattatgtgggtggtttaataatttttaattataaaattaaaattaataattatattattttttttttataaattgtataatttttatttttatattatttttattttagagcttatacttacaacaaacttttaattttttgttttttttatattttattattatat

SEQ ID NO: 350190 - DNA, 258 bp, Zea mays
ttgtgtgttaagcacaacccccacccgccacaggcgggtgcgcatgtgagcgggcggcggggccgggagactagacgagggcaggaagtttctgatgcatcagtgcagcccgacggcgacgccctactgctcgccttagtgccagtcgttgcttatataatatattttatatatttattttttgttgttttctataattttttactaaatttgctatatgtgtttgttttctacaattttaatttcttctatttattt

SEQ ID NO: 350191 - DNA, 388 bp, Zea mays
caacaagcaacatagaaagtggaatccagtagcaacaatagagcaacaatggagaccaagatattttccctccttatgctccttgctctttctacatgtgttgctaacgcgacaattttccctcaatgctcacaagctcctatagcttccctttttcccccataccttccatcaattatagcttcagtatgtgaaaacccagctcttcaaccatataggcttcaacaagcaatcgcagcaagcaacatacctttatcgcccttgttgtgtcaacaatcgccagccctatctttggtgcagtcattggtacaaaccatcaaggcacaacagctgcagcaactcgggctacctgtgatcaaccaaagagctctggcaaacctttctccct

SEQ ID NO: 350192 - DNA, 161 bp, Zea mays
  unsure (1)..(161): unsure at all n locations
tctcttgtacgcttgcctcaaaacccctggcgccgtgctaaaaccctaggcctggaattccttcccctgcccgcgcggagcagacgagcctgagcccgtncttctcgtccatggcgacctcaggggcctccgctaacctttgggtactgtttggacttgga

SEQ ID NO: 350193 - DNA, 142 bp, Zea mays
tttggttgatcaatcggaagcgccgccgccgcaaaggatcgggcagacgagacgagacgaggttatctgaggcgcagagctcagggtgaaagaagaatctagtgaaagtggaaggattcttgcacgggcttcttctgaagat

SEQ ID NO: 350194 - DNA, 458 bp, Zea mays
aaccttctttctttgtttctacattaaaacaaacttttaaattccttctcactcaagggggtgggggtgattaaaatataaatttattattataaaatttaaataatatttttactaatataaaatattttttattaaaatatataatattaataattttttttattatttattttatttaatttaattttacttaaaatttatttttaataatatttataactaaattataatatatatattttaaattatattctattaatatatttttatctaaattattttttcaaattttaaaaaatttttattaatattaaaataataaatataattattataattttatttataatattttataaattaaataatatataaaattcttataatttttacataattattaaattttttataattaattactatattttatatttattttatattataataat

SEQ ID NO: 350195 - DNA, 207 bp, Zea mays
tttttgacgcgtgggtcagattccattttgcggcccgaacaaaggtgtgaccggggtgggttaggcgactagattgcactattatttactttagatttttttgattaactttttttcttacggattatttttttcttattattttattttctaatttttatattaaacttttttatttaatttattattttttttaatttttttttt

SEQ ID NO: 350196 - DNA, 230 bp, Zea mays
tcctctacctcgttcgtggcgacgacagggcgaccgccgctgccaccgccggctgtccactgtgggcctggtgctttgcccggccgttcgccggcgacgggcactcaccaccaggtgacaaaggaaaaggaagaggggcagcaaatcggtgcgctgctgttcattaaatgctggggaggaaataaacagatcaagggcctagtgaaatgatttcgttgctagggtgactg

SEQ ID NO: 350197 - DNA, 350 bp, Zea mays
attatttatatatataaaaaaacaaaaaaagtgcttgtttaataaaaaaataaggtttgatttaataaaataataaaatcatataaatattattaatttaaatatattataatttttattaattataataatcttatttatataatctatatattatatattttatttaatattatttatcataataatttacattatatatctaataataaaaatttaaataaatatataataaaataattctattattataacttattaataatatttaatatcattttaataataactatttatttatttaataatatatacaatataaaaatctatatttaacattatatatatta

SEQ ID NO: 350198 - DNA, 367 bp, Zea mays
ttttattaaaaagccaaagaggaagcctctttttgtgaagaacggtgcaattggtgggtgcctcattcaggtgaataactttatatgcatatagatttttttttatttcctatatttatttatttattgtttttttttatacattatttttattattttctttcctttattgctttttttgtctttttatattatttattattttttttttttcttttttttatttatatatttttatttttttttttttttttttattctgttgtttttttttttttttttttttttttttatttttatatttaatttattttttttttttttttttttttctattttttattttttttctttttttttttttttt

SEQ ID NO: 350199 - DNA, 149 bp, Zea mays
tgttgaggagaaccgccgtgccctccgtgagcgcctattctgctgccctggtgcggtccagtacatcaacggtgtgatcctcttcgaggagaccctgtaccagaagaccaaggatggcaagccttttgttgatgtcctcaaggagggag

SEQ ID NO: 350200 - DNA, 256 bp, Zea mays
  unsure (1)..(256): unsure at all n locations
tttgaggggtggnccgatctnngtngggggggggttttttttttttggggggggggtnttttttnnttttttttttttttttttttgtgntttgttttgttgtttttttgttttttttttttttttttttgttgttgtttttttttttttttttttttttttttttttttttttttttttttttgtttttttttttttttttttttttttttttttttttttttttttttgttttttttttttttttgtttttttt

SEQ ID NO: 350201 - DNA, 433 bp, Zea mays
  unsure (1)..(433): unsure at all n locations
ttttctttgaagccgccgccgctgcagtgtccatagccaccgcaggagactgagatggggggttttnnatanacctatattattatttcttatcttatgtcttttttatttattcttttaattatatttatttttatctattactttattttattattttttattttttttttttcttttattttatttatttaaattcttcttatctatttttattttctttttaatttcattatttttttctttttattatttatattttttttttttttttatttatttatttattttttattatattactttatatatatttctttatatatctatttttatcatattcgatttttttatatttttattatatttttctttatttttctatctaattatattttttatttattattaattatttttgtatatatttttt

SEQ ID NO: 350202 - DNA, 421 bp, Zea mays
gcaacatagaaagtggaatccagtagcaacaatagagcaacaatggcgaccaagatattttccctccttatgctccttgctctttctgcatgtgttgctaacgcgacaattttccctcaatgctcacaagctcctatagcttcccttcttcccccataccttccatcaatgatagcttcagtatgtgaaaacccagctcttcaaccctataggctccaacaagcaatcgcagcaagcaacatacctttatcacccttgtttcaacaatcgccagccctatctttggtgcagtcattggtacaaaccatcagggcacagcagctgcagcaactcgtgctacctgtgatcaaccaagtagctctggcaaacctttctccctactctcagcaacaacaatttcttccattcaaccaactgtcta

SEQ ID NO: 350203 - DNA, 312 bp, Zea mays
tgtgttgtggaatccgggaatccaaagcaggcgggcagacaccgtgctgtgcggagcggtccaactaccgggcagaggcagaggcagaggcggagggcggggcgagagagccgtgcggctgtccaactccccttccctatccggtagcagctgctcctatatgacccccgcaccccagcaaaaaccttcccctttttccccttcacagccccgtactactatccccgctaccgatagccgtcgcgctgctcatttggtggcggttcgcctcccttatcccatccgacgccgtctgcttctactttagctttc

SEQ ID NO: 350204 - DNA, 420 bp, Zea mays
ttcagagtccaggctccaggactaccaccactccgtctcgtctcgtcctcacaccccactccaccaccacctctgccttgcaaagctttccaccgatccgccgcctcgtccgcgcgctcgcaggcagcagtgtggactacccgccccatactccatcccctactcgaaggtgagcaaaccaaacccggcccggccgcgcgtctcatcactcccatcgtaattcgtaacctagtagcacggagacacctgttctcggcaccggtgcacgccggatcttctatcgtcggtaagcacacccagatattatccactgcaaaaagacggcttgatccgcaccccggaaacccagggctaggcgaataaaatccttgtttgggcatgtagggttttagcggctgtagcctagtataagccagtagc

SEQ ID NO: 350205 - DNA, 381 bp, Zea mays
ttgcggaggaggaaccagtgagccagcagaggccgggccgtcgccgtcgtggtcctcggccgccgcaacaacctagtcgtcgagccggcagcatgcagagcaggaagcacagtagcaacaaggagcacagcagagggaacagtcagcagtaagggcccaggcgcaggcgcagacggagccgctaacgcagcagtcttcggtggggctcatccggttcgagttgttattaactctgttactggaacacttttttttcttaattgtgtaactataatcttctttctgttatttttactctttaatttattatattattatctttttatttttttaatttttatttttcttatatttctatttataatttataattttttattt

SEQ ID NO: 350206 - DNA, 270 bp, Zea mays
ttggcacgcgacgcaactatcctaagcccgccactctggaagatacaacgctgcacgcctccgaccgatgatatacgatccaatggcaccctcactcctcgccgtcatgtccacgctatccttcctagccagcacaccgaagccgctaggggctgaccacacccgacagcctggactgcgcgtggccgtacttaaaacacgaccctgacaaggagacaccacataacgaccgcatactcacccgtatctagcagatccctgagaaaaccg

SEQ ID NO: 350207 - DNA, 61 bp, Zea mays
tttcttcgtactcctacataaccaaacccgggcccaaaatcttaaagactgcgggggagct

SEQ ID NO: 350208 - DNA, 167 bp, Zea mays
atcgtctagatcgcgagcggccgcccttttggtttttttttttgaaaaaaaaggcaaatccaggtagacatgcagtttagccataacaaacatgttttgcttacaacaatctgctcatttttttcctggcaaatcactcggagtatcaaaaacttaagagctatgta

SEQ ID NO: 350209 - DNA, 119 bp, Zea mays
tcgtcttcccgtctcttcttcttcccccttgcacttcttggccgagcccctggtggtctcggcatcctgctcgatcgaagaatgctggatcaggcatattggaggtagcagcttaatac

SEQ ID NO: 350210 - DNA, 112 bp, Zea mays
  unsure (1)..(112): unsure at all n locations
ttcgttgattctgncgcatnccataccactaccaccgatctcgtcgtccgccgattgtatccggttcttccaacccaggggcagtgatggcgacgaagaggaacgcggtcac

SEQ ID NO: 350211 - DNA, 77 bp, Zea mays
atctttttctatcaattccaatgatgcaattcgcaaggagtgatgtcaatcggggatatttttcacaatactattat

SEQ ID NO: 350212 - DNA, 194 bp, Zea mays
ctataaggaaagctgacagcacatgcaggaagcgttaacgactttgcccgttgcccgaaacattgtgtttatacactctatcccgaaagtaagttcatatatacttaaggggctccgctgcaagtataacctgacaaggatagaatgggttgatattatcggatattacaatgaccattatgggaccgaggttg

SEQ ID NO: 350213 - DNA, 62 bp, Zea mays
tatagggtaagcaagaacgcctgcaggcacccggttccggaaatccactcatcgacccacac

SEQ ID NO: 350214 - DNA, 112 bp, Zea mays
atcgatcattttttgcactgccattcctaggatatactgtgaccgccacgaggtcaagaacctgtacgaggagaggaatgaactttttagagtggttttttagtagtttatt

SEQ ID NO: 350215 - DNA, 119 bp, Zea mays
tttgaatgcactcccgctctgctccggacgatctggcatcctctgcctgccccgctggctccgcgcgtctgctctagtgatttgagacggagatccgccagagatcgaggagagggagg

SEQ ID NO: 350216 - DNA, 340 bp, Zea mays
  unsure (1)..(340): unsure at all n locations
gggggccaaaaagagggggggagagaggaggggggggggggggggggagggagaggggaggggggggggggaggggggggggggggggagnaggggggagggggggggggggggaaggggggagggggggggaggggggggggaggaggggggggggggaggaaggaggggggggggggggggggggggggggaaggccggagggcgaggggagggggggggggggcagcggaaggggcgggcggagggggagggagggagagggggggggggggggggggggggagggggggggggagggagggggggggaggggggcgggggggggaggggggggggg

SEQ ID NO: 350217 - DNA, 121 bp, Zea mays
ttgtttacgcggccgcagaccattagctcgagggactccagagcgcagaagagcgccgagcgacaccatgagggagttgtttgtagacctcgaacaacgagcagaggacgccaagccccac

SEQ ID NO: 350218 - DNA, 289 bp, Zea mays
  unsure (1)..(289): unsure at all n locations
tttgaatggcatatggccaaccncacgctccgggtggtcttctttcccgacgggcagggccttcccaccatcttcacctccctaggactcgagtacgacgacaaagtgctaccctccatcggcaacgaggtgaacaaggacagcaatcataccaactaaatgacctccttagttttttaacttaaccttcttagactattaacgcccgtacttcctctaacttacttataaacattcagaaccctttacaagttatctaaccaataactaatctggttaatcttactta

SEQ ID NO: 350219 - DNA, 156 bp, Zea mays
ttctttcaagagagggagccagcgagcagaggcggcgcaacaagggcggcggggggagcacacaccggccaggagcggacgactacctcgacgctgacccagaccctgctgctgcaccaactccagggcagcgccagcaccaagcggggaaggagc

SEQ ID NO: 350220 - DNA, 51 bp, Zea mays
tctcgttttttacgcgtacatcgatccaagcagacgccgttcttgcggggc

SEQ ID NO: 350221 - DNA, 111 bp, Zea mays
tactgcgtttcttttgaaggtgctataaatccacagagatagcttcctcagtaacaaggggagacggccatacactgagaacataagactgccctaagttctcgcaggctc

SEQ ID NO: 350222 - DNA, 400 bp, Zea mays
  unsure (1)..(400): unsure at all n locations
ttcgttctctgacgagcagcggtcgatgcgcgccgagggccaatgaaacgcgggagcgagccacaggctattgcttcgttgccttcgctctcctggctctcgctgcgagcgccacctccacgcatacaagcggcggctgcggctgccagccaccgccgccggttcatctaccgccgccggtgcatctgccacctccggttcacctgccacctccggtgcatctcccaccgcnggnccacctgccgccgcccggccacctgccaccgccggtccatgtgccgncgccggttcatctgccgccgccaccatgccactaccctactcaaccgccccggcctcagccttatccccagccacacccatgcccgtgccaacagccgcatccaagcccgtgccagct

SEQ ID NO: 350223 - DNA, 369 bp, Zea mays
tttgggtcttcagaccattagctttatctactccagagcgcagaagaacccgatcgacaccatgagggtgttgctcgttgccctcgctctcctggctctcgctgcgagcgccacctccacgcatacaagcggcggctgcggctgccagccaccgccgccggttcatctaccgccgccggtgcatctgccacctccggttcacctgccacctccggtgcatctcccaccgccggtccacctgccgccgccggtccacctgccaccgccggtccatgtgccgccgccggttcatctgccgccgccaccatgccactaccctactcaaccgccccggcctcagcctcatccccagccacacccatgcccgtg

SEQ ID NO: 350224 - DNA, 178 bp, Zea mays
tagcttcctcaccgagggcccgcacaatcacgcgagccttcaacaccacgcgagcgcagatcgccgaagccagtccacagagagggagctcgacgcggcagccgaaggcgtacaccacagtcggatgatcccctggagaagagaacggactgtcctccaggaagctgtgcaaccgact

SEQ ID NO: 350225 - DNA, 162 bp, Zea mays
tctgtaggagcaagctagtctcgccctgatctgatattaacaggacataaggagaatgcaaaatttgcgcttgccatgtttcccacaacactctatctcctatcatgaggaaaggacccttttgttccttatgagtgaacttatttacatttatttcgtttt

SEQ ID NO: 350226 - DNA, 358 bp, Zea mays
ttctactctcctgtacaaaaacaaaggaagggacagaagccatgactaggagacaggaacactgccggggcgacggcgacggtggcggtgttgtttctagtagttgttgacgttccttggcattttgtggttgtatgttttttttttttttttgttatttcttatttttttttttttcttatgtatttttttattatatattcatttgtttgtttttctattagctatttttttcaattttttttttatttattttcttttttatttatttatttttttcattcttttttatatctttttcttttttatttgttttttcttatttcttttttattattttatatatttttttttattt

SEQ ID NO: 350227 - DNA, 134 bp, Zea mays
tctaacgatcattcagagaggtctttgtacaaggagcttgttaaagtggggggagcttccgatgtgattatggaggcttttgtttcaatgtatccatttttctccttttgcatttatctgtttaatattttttt

SEQ ID NO: 350228 - DNA, 413 bp, Zea mays
tctttttcccttgatgatgtttatgcaactgctatcataaactgttatccggggggggcctttattctatttctttaaaatatcattttttcatttatcatgtgtctgattcttatgtttttgttcttaactttatcattttacttattttatttatttactataacttatttttttcttattatttaattaataccttattcaatattattatactatttatatttttctttaatttcttatcctttttacatctttttttccctttactactatttttatattctcttcttatattaactttattattacttaatttcattataaatattattttttatttttcattttatttttttttctatttctaccataatatgtacattattttttattctcttattatatctttt

SEQ ID NO: 350229 - DNA, 131 bp, Zea mays
tcaactatttggcagaagaggcagtcagcagtgaggaagtagaggagcaggaagaagaggaagcagtcaaggaagaatcatgagaagaagaggttggagaactataacatcaaattgtagatggtagtttt

SEQ ID NO: 350230 - DNA, 134 bp, Zea mays
ctcagctgcgctagcctccgtcaacccgggccgcgccgcctcctccgcccgcctcgcgctctcgctgccgtgcggcgcgtgggtcggccgaagcgggctcgttcgccgtgcctccaacttattcgtgacacggt

SEQ ID NO: 350231 - DNA, 57 bp, Zea mays
acaactataggaaacctctacagcctccaggtaccgaatcgcaattccccccacacc

SEQ ID NO: 350232 - DNA, 102 bp, Zea mays
tctttctcttgtattctcaaggaaacctttatccatggctcgaggtatcatgctagggctgcttatcatccccctcgtcgtgagaattgaagggagtgtcat

SEQ ID NO: 350233 - DNA, 52 bp, Zea mays
  unsure (1)..(52): unsure at all n locations
ttctnctgattcccgtcctttcctttctaaggctcgcgaaccccgacaatgg

SEQ ID NO: 350234 - DNA, 227 bp, Zea mays
tcgcgccgcgccggtgattcggcgcacgggcctgccctgcccggccaggggaggcggtacaacagacatacgcggacagccggacccggacgccatgcgaagtgcaaaccccctaaatattccacttgtcttcccccctcgtatgactccacggaaccattgacttcttggccctcgtcactggaggagtgaatggctacctttaattcaacacgtaaagaaagtaa

SEQ ID NO: 350235 - DNA, 267 bp, Zea mays
tctttctatgtgtccctctgcagcaaaaaccagaggccaccataatcacgggcgctggactcacataccgtttactatctccatggttacattcctttccactttaatcatttcatttttattacaacactatctttatcttttttatataattaatttatattatatatttttttttgttatatttattataattattatattttttttataatataatttatttttaatatttattacttatattttttattattttttaattat

SEQ ID NO: 350236 - DNA, 223 bp, Zea mays
tcttttgcgcgtacgcgtacacagccccgatccgaatcgtcctcctcgcgaggctgggcgatcccccactcccctcccctcgcttcaagatgcagatctttgtgaagaccctcaccggcaagactatcaccctcgaggtggagtcttctgacaccattgacaatgtcaaggctaagatccaggacaaggagggcatccctcctgaccagcagcggcttatttt

SEQ ID NO: 350237 - DNA, 66 bp, Zea mays
gactgactataggtgaaagctgctacagcctccaggtacccgatctccaattcccagcctacgacc

SEQ ID NO: 350238 - DNA, 214 bp, Zea mays
tcggttctagatcgcgagcggccgccctttgttttttttttcattttgggggggttttttaatttaatttttttttttttattttaattttgttttgttttttacattgtttttttttttattttttttatttaattttttttttgagtttattttttattttttttttgttttttttttttttttattttttttttttttttatttttttttt

SEQ ID NO: 350239 - DNA, 216 bp, Zea mays
tcgggtcttcagaccattagctttatctactccagagcgcagaagaaccgcggcgacaccatgagggtgttgctcgttgccctcgctctcctggctctcgctgcgagcgccaccttcacgcatacaagcggcggctgcggctgccagccaccgccgccggatcatttaccgccgtcggtgcatctgtcaccttcggttcacctgccacctccgttt

SEQ ID NO: 350240 - DNA, 236 bp, Zea mays
  unsure (1)..(236): unsure at all n locations
tctattcttttctatgatcgcaagcgaaccggccttttttattaaataaaaaaggggggtntgagaattataaaatataaaatattatttaaataatattttatattatatattattttttaatatatattataaatattattattaaattatttacatattttcaataatacatttcttacatttattatttaataattaattcatttttcatatattattataatttataaatt

SEQ ID NO: 350241 - DNA, 219 bp, Zea mays
tcgggagtacataattttgtggcaacattaattgaaggacgtgaccaaaagaggcggccaactgagttcacaatgaaccaagttcttcagccatttgttagtgagaaggtcaatttcacaaaagttagcccgttggaggtgatcttttgaattcaatgacacttgaaaagaccctgtacaatttttttatggtggtctctgaacttgtttaaattattt

SEQ ID NO: 350242 - DNA, 59 bp, Zea mays
ttctttttgtgaatgagtcccagaccaactggggggggctaccctattatccggggggg

SEQ ID NO: 350243 - DNA, 142 bp, Zea mays
ttctgctggcggagcggaaggcgaaagagaagcaggagcattcttttgccgaggggggggtccccacctacagcttgccaccattgttagaggatataaaaattatctctttaaactaattattcctatattttatattctt

SEQ ID NO: 350244 - DNA, 285 bp, Zea mays
tctatctttttccagagcgtggaaaggagaagctactttgaagctaccactggatcgtggcatgtgacttgttgaataattggttgcaggagtagagtgcgccggttataacttataaagcagagcatgccgtgttgatactgagttatttgtaggcttgacctatattaatagatggtttctttgttattattgtttttctagatttatttttattattcctttcttatatttttttttatcacttcttattttcttatattatttatataattctttcatatt

SEQ ID NO: 350245 - DNA, 112 bp, Zea mays
ttgtatagatcttcccagcattgagaacttcattcttgaaggcattccgtgtgatggagtatgatctcaaattacataaaaacatttactgcttttatagtggtactacatc

SEQ ID NO: 350246 - DNA, 61 bp, Zea mays
ctatagggaaagctactactcctgcaggtaccccttccggatattcccgtttcgaacccac

SEQ ID NO: 350247 - DNA, 119 bp, Zea mays
  unsure (1)..(119): unsure at all n locations
cctagacctatgcgatcgtcccgtcatctatcacaantcagagcccagtccatcctgatatggctgcgcgggcgcacacatctcaactcccatgacacaatatcatagatccgcgatca

SEQ ID NO: 350248 - DNA, 246 bp, Zea mays
aagggaaagcgtcagaccgacatgcattaccgcctctgacctgttaaccgaaaaactttttgttctcctgccatccggctcgtgagggcaccatgattcatatagcaccggtggtgctactttcttaccctgattagatcgtgtatcgtacaactattgtaattatggaccctcttagccattgaatttatatgtagtagtttatcttctaatgaattactcattttttctccttctctttctttt

SEQ ID NO: 350249 - DNA, 372 bp, Zea mays
  unsure (1)..(372): unsure at all n locations
tctatcttagttgttgtctgccgtgatttgagccgtgcttacagattgatccgtgggacgaaaaaatcatatttttattatgatcctttaaccattaatatctttcatttttatttttatttatattctatttatatttttttattttttataattcacataanttttatattactttattattttttacttattaatatatctattatttatatttatcttctatatttatttttttctttattttttttttttaatattttatttatattatttttatatctatttttattatatcttatttcttctaattttctaactttaattcttatatagttaattattattaattttataatattatatatttat

SEQ ID NO: 350250 - DNA, 154 bp, Zea mays
tcttgctgtcctgaccggcgacgattgggcggccgtctctgtctccttactcgaggggtccagctcttcttcgtgccatttgccggccgcgagcaccaccagacgggatgagcaacccgggggcaccggtcaccgtcactgagttggtggagct

SEQ ID NO: 350251 - DNA, 97 bp, Zea mays
  unsure (1)..(97): unsure at all n locations
acgttgcnctcattgatcctatcatatctctgggcgagcctgaaatgggtggtacgaatgagcctactatggatcatttatatcatattcctcttaa

SEQ ID NO: 350252 - DNA, 443 bp, Zea mays
ttctatcgttcctgtcactgtcagccatctgacgagggaaaaaaaaaaacagggaacgtatgactgccgctgccgttcgatttgagagccaccgattaacccatccatccaccttgccgccgtctgagagtatggttgagctgtcttacactttttgtttttttttatctatattttatatttctttgcttttatattttacttatttttctttttattttttttctttctttttttcttacttttattttatttcttattaatatttttcttattctcttctttcgtcttttttttttattttttttacttttctcttctcctttctcattattttcttctttaatattttttctttatttttttattttttctatctttcttcttattttctttccttctttttattttttacatcttattctctatcctcttcttttttt

SEQ ID NO: 350253 - DNA, 84 bp, Zea mays
tgagcttatcaaacaagtagcgacagctggacaaagatttgtgagagtgagggggggcttataagagatggctaagatcgccgc

SEQ ID NO: 350254 - DNA, 145 bp, Zea mays
  unsure (1)..(145): unsure at all n locations
tcgctttctattgctgaacaccctatcttaccagagaggatgacgaaacgcgcggtgtgctaattaaaggtctcattgnaaggcctccttctcgctgttttttatacagtatgtgttatcgattcgtatctctttttttaaccaa

SEQ ID NO: 350255 - DNA, 167 bp, Zea mays
tgaccaactagcaacatagaaagcacaataggggaccaacaatggcagggaaagtattttgcttccttatgctccttggtctttctgcaagtgttgctaccgtaaccattttcccacaatgctcacaagctcctatagctttcctttttcccacatacctcttacca

SEQ ID NO: 350256 - DNA, 55 bp, Zea mays
agggaaagctgaacgcctcgcagctaccgttccgcaattcccagttccacccaca

SEQ ID NO: 350257 - DNA, 125 bp, Zea mays
  unsure (1)..(125): unsure at all n locations
ttggcgagcggccgcccttttttttggggggggtttaacanaatgggggggggtttaaatacatatttcttttatcctttttttaatatttatattttttatttatttttttcattttttttttt

SEQ ID NO: 350258 - DNA, 377 bp, Zea mays
tcggaaagtggaatccagtagcaacaatagagcaacaatggagaccaagatatggtccctccttatgctccttgctctttctacatgtgttgctaacgcgacaattttccctcaatgctcacaagctcctatagcttccctttttcccccataccttccatcaattatagcttcagtatgtgaaaacccagctcttcaaccatataggcttcaacaagcaatcgcagcaagcaacatacctttatcgcccttgttgtgtcaacaatcgccagccctatctttggcgcagtcattggtacaaaccattagggcacaacagttgcagcaactcgtgctacctgtgatcaaccaagtagctctgggaaacctttctccct

SEQ ID NO: 350259 - DNA, 61 bp, Zea mays
ttcgttctctgaaattcggtgattccttgcgtgagggaaaaataaaaaaaaagaggatggg

SEQ ID NO: 350260 - DNA, 391 bp, Zea mays
  unsure (1)..(391): unsure at all n locations
tcggagcattcagaaacacaccaagcgaaggacattagcaacaacctaacaacaatggctaccaagatattatccctccttgcgcttcttgcgctttttgcgagcgcaacaaatgcgttcattattccacaatgctcacttgctccaagttccattattacacagntcctcccaccagttacttcaatgggcttcgaacacccagctgtgcaagcctataggctacaacaagcaattgcggcgagcgtcttacaacaaccaatttcccagttgcaacaacaatccttggcacatctaacaatacaaaccattgcaacgcaacagcaacaacaattcctaccagcactgagccacctagccatggtgaaccctgccggctacttgcaacagc

SEQ ID NO: 350261 - DNA, 87 bp, Zea mays
  unsure (1)..(87): unsure at all n locations
nactcatgtattcaagcaaccctacttgtcttgcgaaaattctaagaatatatgagctgtgggtaaactatgaattgcaaggataca

SEQ ID NO: 350262 - DNA, 207 bp, Zea mays
tagggaaagctgagacgcctgcacgtaccgtaccggaattccatttccgacccacccctttcgtatctgttcaatcaaaaacacaccaagcgaagcgacattaacaacaaccggggcagggcgttactaccaatatataatcccttcttgcgctacttacgcttttttccatgtgcaacaaaatcctttcattatttcacaattctt

SEQ ID NO: 350263 - DNA, 120 bp, Zea mays
gaaaagaaaaagaaaaaaaaaggggagggaaaaaaggggaaggggcgggggaaaaaaaaaaaaaaaaaacaaaacgaaagaaaaaaaacaaacaaaaaaaagaaaaaaagaagaagaacg

SEQ ID NO: 350264 - DNA, 246 bp, Zea mays
ttctttcttcccaacctgttctgagccagccggccatggcgattagggctgggcgcgggcccctactccaccttctcgccctcaccttcctcatcctcgccgcctctccctgcctccaagcttgagtggaccatcgcaaacagatatcttactggactgggcaacccaactttgacctgcagaatgtctcatcgggtcgaaaggatgtccctcatctcctgggtagatcaaaggtaataacacaca

SEQ ID NO: 350265 - DNA, 123 bp, Zea mays
tcggccaagttcgtgttcgagtcgtacgtggcgatgaagatgttcggcaacgtgggcaccgccgctacttcaacttcagctttctgggcgagcgggagttctacgagcggcggcgcttttttc

SEQ ID NO: 350266 - DNA, 392 bp, Zea mays
tcgtttttctcgagcactagacagtgcacagtgcagggtccggtgtacactggattgtgccgtgaggcaccattgtgcccagatagagatgattttgaaaatccttttccggattgcacactaaacctaatcccaacttataagcacacaaaagaacacctgttgggacaggtatatgcaccctcacatattctctcatacttttcaaaatattttgccataggctatgtagtttttaggaaaatagtcaaattgtgagaattttcatttgagagttacactaggggtttcatgaatgaattgagtggttcatcacctacataatcaagatttttaagttgctcctttggagccgtttgtcttataaaaccccacatcatttttttcttcta

SEQ ID NO: 350267 - DNA, 54 bp, Zea mays
aaaaaagaaggagaaaaaacaaagggggagaaaaaaaaagaaagagcgacggat

SEQ ID NO: 350268 - DNA, 424 bp, Zea mays
tcgatgtgaaaacccaattcttcaaccctacaggatccaacaggcagggacaggtggcatcttacctttatcacccttgttcctccaacaatcatcagccctattacatcagttacctttggtgcatttattggcacaaaacatcagggcacaacaactacaacaacttgtgctagcaaaccttgctgcctactctcagcaacagcagtttcttccattcaaccaactagctgcattgaactctgcttcttatttgcaacaacaacaactaccattcagccagctacctgctgcctacccccagcaatttcttccattcaaccaactggcagcattgaactctcctgcttatttacagcagcaacaactactaccattcagccagctagctggtgtgagccctgctaccttcttgatacaacca

SEQ ID NO: 350269 - DNA, 274 bp, Zea mays
tttcttctacatgactgatgcaatcacccgagcttcaaagatcatgggccagggcagtgcaaccttgctgaagaagttaggtttttcacactatctatctaatcttctttaaacagatttttagttactttactttttttttcttattattctagagtttttcatttcctttttctttttttttatccttttttttcttacttctctttctttattttattttattttttattctattattatatttttatctaatttctcttatttatatttt

SEQ ID NO: 350270 - DNA, 346 bp, Zea mays
cttagaggtgggttggcttctcctccccctccggttcggtttcgggttcgggaggttttcctgggttcggttttgtgtttttcgttttcttgttgttatcttttcttctttctttcgttgctttgtctcttttttttttttttctttcttttcttcctttcttctttttttttcttctttctttttttatttcatctttttttctttttttcttttttcttcattcttttttttactttctctttttttcttctcttcttcttttctccttctttctttttgtttttctttttttattctcgttttatttccttttacttttctgtttttttatctgtcgtttttt

SEQ ID NO: 350271 - DNA, 75 bp, Zea mays
ttgttttcattggaacctctatgatccaaggaaagggttacttcaacaacgagggcgcaccaaccatcactttac

SEQ ID NO: 350272 - DNA, 89 bp, Zea mays
tgtagatgtttactttcactggtctgaatagcgaactagtcaaatggatgaggcgaggaataccacatttatatgacatctgatgggag

SEQ ID NO: 350273 - DNA, 270 bp, Zea mays
tgcttcctgagtaagtactcaaagcatcctttttcagaaaaggatgcaattaacagatagtgttttttgttgtagaagactaccattgtttcgctgctattcttactgtaaaacaacttgcgtttctcatgtgaatcattaatctttccgtcgagttttactctacttagaccttacctggtgcagagcattattccatcatttgttctgttagtgttccctttattgttttattactccttttttcacttcattcttacttctcttctt

SEQ ID NO: 350274 - DNA, 70 bp, Zea mays
  unsure (1)..(70): unsure at all n locations
tgntttttcgcaagacagatccttgttgtcctacagcattttctggctgccggccaaggccacctggtac

SEQ ID NO: 350275 - DNA, 379 bp, Zea mays
ttcttctagcaacatagaaagcacaatagtgtaccaacaatggcagccaaaatattttgcctccttatgctccttggtctttctgcaagtgctgctacggcgaccattttcccgcaatgctcgcaagctcctatagcttcccttcttcccccgtacctctcaccagcggtgtcttcggtatgtgaaaacccaattcttcaaccctacaggatccaacaggcaatcgcagctggcatcttacctttatcacccttgttccttcaacaatcatcagccctattacaacagttacctttggtgcatttattggcacaaaacatcaaggcacatcaactacaacatcttgtgctagcaaaccttgctgcctactctcagcaac

SEQ ID NO: 350276 - DNA, 367 bp, Zea mays
tttcacgcgtatacatatatatatgtctgagaggccaagcaagtcaaccaagagagagagagagaaaatgcaagcgcgttagcctaaaaatgtccacagatcactgcttacacgccacgtaatatgacgtaacagcgcaagcagcagatctagggcacgcacacgcaagagctccgagaaggacgacaagaagccggctagctaggctgacaggcgatctgtaccttcgatccctgtctgtgacgacgccttcttccagcgaagcgttggtgatatcgcatgcaggaaacgatcacgcacgcacgcacgcagctggctaggctaggctagctagcatgaggcgggagagcaggcatggcgagatctc

SEQ ID NO: 350277 - DNA, 76 bp, Zea mays
ttgttctgtcgccgtgcagctccccctggtaccttcctccaactactctgcggcgttacctttaccgtaccgcgtg

SEQ ID NO: 350278 - DNA, 417 bp, Zea mays
tcttttaattctagcagcactgcacaggatgctgagaagaaaggtaccaacgaaagtggttatgcagagaaaaaggaagatgctcctgctcctcccgagagcatggcctccaagaagaagaaaaagaaggacaagagttcaaaggagggaaaagaaacacatgaagcacttgatgggtcagaggagactgccagtgcatgacctgatgaagattcttctgctgtggatgttaaggatctcttgatgtaatatctcttctttttcattaatattcacttcttctatattgtcttttctctttttttcatctttttttctcttatttttatttcttctattctaatctgtttagtttgattctttctcatattattactcttcatattcttttctcatctcttccctttatttcctttt

SEQ ID NO: 350279 - DNA, 159 bp, Zea mays
tgttttttcagagtggccaaacctgagcgagtttgcggagagtatgcagggtggtgagctccctcaagatgctgcgtttgaagcggtatcccagaattactgtccttccaggatatctggtcgacctcgcttctttcaaaatactattcattagcattt

SEQ ID NO: 350280 - DNA, 286 bp, Zea mays
tggttgccagcccttttttttttttttttttttttttttttttttttttttttttttttttttttttttttttttttttttttttttttttttttttttttttttttcatttttttttttttaaattttttttttttatattggatttttttttttttttttttttttttttttgttattttttggatttttttaatattttggatttggttatgtatttttttattttttaaatattggttatttttttaatttaattttttatggagaagaaaaaatatttttt

SEQ ID NO: 350281 - DNA, 420 bp, Zea mays
tgtttctagatcgcgagcggccgccctttgttttttttttttggtaggacgtacaagccgtgtatgattcatgatagcaagccttcacaaaaaaaggaaacccccaatgtcaaaaggcattgcagaattacagcagtacacaaggctgcctgtgatggcactcttacagttaggctacatgtttctagcgtagcattttgttcagaagctgtacttaatagtaaaactagcaatcaagacgggaaaaaactgctgggaaaattcgttgtgcaatcaagcttcctgtgcaattaaactaccaaaagtcatgaaaaatctaaaaaaaccatagatatagatattttattatctgctctaccaatatatcaaaatttaaattctaacttatcctcgtcaagggaaataaaaaagagaaaaatt

SEQ ID NO: 350282 - DNA, 400 bp, Zea mays
  unsure (1)..(400): unsure at all n locations
tctcgttttttccatgggtcggtcagtgcataggactggtgataactccagtgcacaagaatccgctgaacagggtggcgttgagctgtatgaagaggtgaacaaccgtgggctctgcgctattgcccaggctgagtcgtatgttataaggttctcggaggactcgccatgagaaggttacgctcttagttaccccaggcctgtgttcgaaggttcaatgttttaactcccgtagcaacgcacgagcacatacctatattattgaatccactatagactntctggagctggctcttcagtttggcatgatcatgatgtttgcctgtgcatttccattgatattctgctttgcagctctgaacaatgttactgaaatcagagcagatgcattgaagttgtt

SEQ ID NO: 350283 - DNA, 100 bp, Zea mays
  unsure (1)..(100): unsure at all n locations
ttcttttctgtctgcttccattctgttcaagggagcggcgctcttccgctgccgagggagcatccaatccaatctnctccccctagtcacccatgaccac

SEQ ID NO: 350284 - DNA, 179 bp, Zea mays
tctttttccaatctagaagcgcccctctccctctgggtctctctcttagccgggcaagactcctcaccccaatctaatcgacacctcgcctagatgggccgcatgatcttcaccatcgacaactggaaacgcaatggaaccacatatcaagtcgagaagacagttcaaaaccctcaatg

SEQ ID NO: 350285 - DNA, 129 bp, Zea mays
caaattctttgagaaagaggtccctgttgatgctgtcttccagaaggatgagatgattgacatcattggtgtgaccaaggggaaaggttatgagggtgaggtcattctttgtagtttatatattttttt

SEQ ID NO: 350286 - DNA, 130 bp, Zea mays
  unsure (1)..(130): unsure at all n locations
tcttcnatacttccacacccactgacccacagcccaggccatcatacaacgagaaggaggggtttaccgtagctgctatcaaaacaatggagaaccctgctccgagcatcgtattgtccatcttctcacc

SEQ ID NO: 350287 - DNA, 260 bp, Zea mays
  unsure (1)..(260): unsure at all n locations
ttcccttctctcttcatgtctctcacatctccactcccgtggcctacgcgacccctttcacccaggcgtggagagcatctcactcctcctcnnccgctcgtccctcgcccgccaagcctattgcttgggcaatagccgaccccggctccaagtcaccattcgtgcacaaggatcttcactgacctgcacccttctgtgcgtcgttgcgacaaaccccttgcaacccgtcctactactaccctctcctcgtaccctttctt

SEQ ID NO: 350288 - DNA, 207 bp, Zea mays
tcttctgcacgtcgcccccgccgattcctagttacagccttcttccgacagttagacgtggtcctctaccatccttctacttatacaatacttttatctttttctatttattactttttatttgtaaattatttatcttcatctatttttattttatctttttatttatcataattctaatttatttttattaatttttatttatat

SEQ ID NO: 350289 - DNA, 364 bp, Zea mays
ggccttcccttcatcccgtggcggcggcggcggctcgcctcctcaaggcctccagtgctcggcgtcgacgtgcgaatcagcgaccttcaacacgccgccgcttcgtttctcctgtctcctaattcctgatccgctgagcgctggcctgctctgcgcgcccggtcgtccccgtccttctgcgcagagctttctctacctctgcttctcgccttccccgcaagactgccttggcgtctctgcaaaggtagttgaatggctttaagagcacgggacattatgtttcggcgttttaaaacatttactattagcccggctctggcatctggtgtgatcagacagagtttccagcttcaacattatgcac

SEQ ID NO: 350290 - DNA, 253 bp, Zea mays
tctattgagaccaactagcaacatagaaaggacaatagtgtaccaacagtgggggccaaaatattttgcttccttatgctccttggtctttctgcaagtgttgctaccgcaaccattttcccacaatgctcacaagctcctatagcttcccttctttccccatacctttcaccagcggtgtcttcaatgtgtgaaaacccaattgttcaaccctacaggatccaactggcaatttcatcaggtattttaccat

SEQ ID NO: 350291 - DNA, 96 bp, Zea mays
tgtatcttttatgcactccaccttgccaagggtaatggctccaaaggagacggcggggacgcttcctcatacacacattaagccactccctacact

SEQ ID NO: 350292 - DNA, 434 bp, Zea mays
tctctttctttgcacaccaacacggtctgcgacaatgtgtggaccttcattgtgacagaggcatccttcaatagcgcttatattcaagaaacacttagcttgatgggtttcaatgtcttgtttgcctttttgcttactttttccattacttgtattcattctcactattcgtttattatacattctgtggctcatatgccaaccatttgtaatgtttgttctcttactaatttgcgtattttaattgtctcttcgttctttttcgatattatttttatttattgtttcatttatatcattcatatcttttttttattttattatttactttattcattacttttatatttttatattatttaaattatatatttttctcatttttttccttttattcttttctttattttcatttactgctttatattcacttt

SEQ ID NO: 350293 - DNA, 246 bp, Zea mays
gatcgcgagcggccgcccttttttttttttttttttttttttttaaggaggaggagagaagagagttattgcataatgtcgatcgatctacacccagcgcaacagccagattattgaagcaaacatggacataagttgaagacggtaagagtgcatgcatgaaacattaattctactcatgatcgaccactacacacaacaattgatcacgcatgcaagctgtttttttttattcaaaagattccc

SEQ ID NO: 350294 - DNA, 430 bp, Zea mays
tctcttttctcagcagttaccattcatgttcaacccaatgtccttttctataggggtggggctttctcttcctccctttactcatttctttatttcatttattccttattgccttttttccgtttattttattacttcttctatttctctttctttctttacttttttttattttctttatattttttctttctttctttttctctttatttgtttcttcttattttttcttttttctattttctttctttttctttcatttttttatttattctcctttactcttctattcattttcattttaccttactttctcttttcttataccattctttttcttttttttttcttatttaatccaattctcctttttcatctatttcttctttcttttttatttcttctattctattttctttaattctccttt

SEQ ID NO: 350295 - DNA, 106 bp, Zea mays
ctcatctgcgtacacggtctccctcttcctgtcagtagtagagagagagggagggagcgagtgggagacaaggggaaatggggaagggagcgcaagggagcgatgc

SEQ ID NO: 350296 - DNA, 99 bp, Zea mays
ggtaaagctctacacctgcaagtaccgatcccccatttccactccacaccctctcttttcttcaccactaccattcatacttcaacaccaattgtcctt

SEQ ID NO: 350297 - DNA, 118 bp, Zea mays
  unsure (1)..(118): unsure at all n locations
ttttctctttttctaccccttcctcctctacaccctgggccaccttatcttcggaggcaggcgcnctcttgccctttccccaccccttcataagtacatcttcttcgtcaatgccaac

SEQ ID NO: 350298 - DNA, 307 bp, Zea mays
tcggaacatcccaacccaagtcccgaaccctgcctcaccactcccccgatctccggcactccaaaatgtggcgccgccaccacctcctccggctacttccgcctccggccaccgccgctaccgccgcggccccttcccacttcctgcgctacctctctacctcaagcaccccgaccccggccgcctccctggcctagtccctcgcgtcggcgctcactgcgctctccacgaccccgtcccccggcaccaaccccggacggttaccttctccttcactttttcgacgtgcgggctaccaacgcgcttc

SEQ ID NO: 350299 - DNA, 145 bp, Zea mays
  unsure (1)..(145): unsure at all n locations
tccatancagcagagcggccgcccttttttttgtgtgatttttttgaagacaggggagcctaccatcatttttttcctttactattagttttcctcattcttaccatttcttaaatccttactctcctttcttcaataattctct

SEQ ID NO: 350300 - DNA, 181 bp, Zea mays
tcttcttttccattccggttccggctttcgcggccagcggctgtaatcccgtaatcgctgctccctgttcctggacgccttttccttcgccgtttccttattgttcttgtttgattgattgggtgttcactttatatgtctgtcattttactaatttatatttcgatcttttcatcaattt

SEQ ID NO: 350301 - DNA, 197 bp, Zea mays
  unsure (1)..(197): unsure at all n locations
tttccgcccccccattcccctaccctcttgggcgccgtcccccctgccatcggctcctttctcaagcacttgcaaccacacatcaaaccctagccgnccccccccccatctccacctcccatggtgccattcgttgccgctcggatctccgtcgcgtggtgcaaatcttcaacggttttcggtggagggaggtaggg

SEQ ID NO: 350302 - DNA, 412 bp, Zea mays
  unsure (1)..(412): unsure at all n locations
tgagccctgcanngggatgcggacgcanncagcgcgaaggggcattaaccgcacnntctgcccggttacccccgaaaaactggtggtgactcactncggcganttccggcgcgtgagggtcaactcatgattcaaagtcagcacgcgcgtgatgnctgcnntggctgnnaccctgatgacgtnntcgtgtccccgtaccaactgnnngcgtaatcaatggccnnncttcggggcccaattggtttcttcttgtggagnnggagtccatngnnacgaaagggatgaaccttgattggcccgccttccgcttcgcnttgggtgaacccaactgannaccgtgatgnntcagcctgaccggggacccgaaaggaaagaactggccgctcctgtgtggcagaagcttgaaagagga

SEQ ID NO: 350303 - DNA, 114 bp, Zea mays
  unsure (1)..(114): unsure at all n locations
aaaacaaaaaaanaaaaaaaaanaagggggaaaaaaaaaaaagaaaaagagaaaaaaaaaaaattttgaacaaagaagaaaaaaaaaaaggggggaaaaaaaggaggggggggg

SEQ ID NO: 350304 - DNA, 225 bp, Zea mays
tcggtcccgccttctccgacctcgcctttctccatctagggtttctctctccggttccaccccatcggaccggagcttcgcatggagtcatcgcagtctcggaagcggacgcgccaagcgtatgactgcgccgccgcgctgccaccagagcgagaagtggtagcgaggggtggcgcgtcgcctccatggagggaggatgacccgctacgacacttcttctctgat

SEQ ID NO: 350305 - DNA, 214 bp, Zea mays
  unsure (1)..(214): unsure at all n locations
gacccgggccacactccgctgctccgccatggcgatccgctccaaggcctggatctcgctgctgctcgcgctgaccgtcgctctctccgcccgggcggaggaggagcccgccgccgcggcggagggcgaggccgngctcaccctcgacgacgacagcttcgacgaggccgacgccaagcacccctgcatgggcgaagagcnctacgccccctgg

SEQ ID NO: 350306 - DNA, 391 bp, Zea mays
ttttcaactagcaacatagaaagcacaatagtgtaccaacaatggcagccaaaatattttgcttccttatgctccttggtctttctgcaagtgttgctaccgcaaccattttcccacaatgctcacaagctcctatagcttcccttcttcccccatacctctcaccagcggtgtcttcaatgtgtgaaaacccaattgttcaaccctacaggatccaacaggcaatcgcaacaggcatcttaccattatcacccttgttcctccaacaaccgtcagccctattacagcagttacctttggtccatttggtggcacaaaacatcagggcacaacaactacaacaacttgtgctagcaaaccttgctgcatactctaagcaacatcaattttt

SEQ ID NO: 350307 - DNA, 369 bp, Zea mays
gttctagatcgcgagcggccgccctttttttttttttttgcactaaaaattatattttcattcattcattcaggaaaaaaatcccaactccaaactcgtcacaaattttatcaaggcatagaggaaccatgcgcggcgtccgtgagcaatcatcatagggcgcagcgcgtgtgcttgaacctgagccaccggtccctgaggtcgaactcccagaggtggtcctgctgcaggatgttgccgatgaccgacaccccgggccacgcgccctcctgcacgccgatgcacttcaccccgggcgccgcgtcgacgacgtagctcttggccggcggctgcaggcgcgcggacccggcgaagcgcaccttcagcccg

SEQ ID NO: 350308 - DNA, 149 bp, Zea mays
tcttaatatctcttatgcattaacatttgcagagatgaacatataatgttcacgggcgtttgaagaagatctgaaagattttcctatagatctacagaacgggtcatttgtcatgttacaaactggaatcatgtcttttattaacttta

SEQ ID NO: 350309 - DNA, 232 bp, Zea mays
cacaactattgtaggatggtcacataccatgtgaggaaattgtttaagacggtagattagtatttattacaactgaataatacatatgcatgacacgtgaattttggttccgattttaatggccttattacctctgcgtgcacatgaaggcagcggggatatgtggtggccatgcgcactacctaagggtgcgcattacgatctgatgtgtgtgacactctatgccgatgga

SEQ ID NO: 350310 - DNA, 165 bp, Zea mays
tttctgctcgtgctgtgtctctgtctgtcggtctcgctctcagacgactggggcggcgccgcttggtgctgaggctttcgttggtctcttcggcggcgacgagcacccaccagttctgtagaaatggctgatggtgaggacatccagcctcttgtctgcgacaat

SEQ ID NO: 350311 - DNA, 235 bp, Zea mays
tcgcagatcagcaaagcggcagtgcgtagagaggatcgtcgaacagaacagcatgaagatggtcatcgttctcgtcgtgtgcctggctctgtcagctgccagcgcctctgcaatgcagatgccctgcccctgcgcggggctgcagggcttgtacggcgctggcgccggcctgacgacgatgatgggcgccggcgggctgtacccctacgcggagtacctgaggcagccgcagtgc

SEQ ID NO: 350312 - DNA, 56 bp, Zea mays
  unsure (1)..(56): unsure at all n locations
acatncgtggctaccatctcaaatatgactacacaatatggcgcaactataaaatt

SEQ ID NO: 350313 - DNA, 142 bp, Zea mays
  unsure (1)..(142): unsure at all n locations
ngtcggtcggctgccgcaaactgatataagccggcactccttaaccgtatgcgcgggtcatactaaatcaaataccacaccactctactgacgccctacgagattaatatttttctttaaccatttgtaacgtttatattat

SEQ ID NO: 350314 - DNA, 247 bp, Zea mays
ttgtaactagcaacatagaaagcacaatagtgtaccaacaatggcagccgaggggttttgcctccttatgctccttggtctttctgcaagtgctgctacggcgaccattttcccgaaatgctcgcaagctcctatagcttcccttcttcccccgtacctttcaccagcggtgtcttcggtatgtgaaaacccaattcttcaaccctacaggatccaacaggtaatcacagctggcattttaccttta

SEQ ID NO: 350315 - DNA, 169 bp, Zea mays
ttctagatcgcgagcggccgccctttgtttttttttttaaaaaaaggggggggaactaactattttccatatactactatgagcagttataagaactatgagaccctacacctaggaaccatttttaccaaaacatctcaaactcatcacttctcacctaatcaacttt

SEQ ID NO: 350316 - DNA, 90 bp, Zea mays
  unsure (1)..(90): unsure at all n locations
tctgtttacaagccaccatgccaactctactagcgtgtctcactgcgtagtctggtgtgggggtncccgcaacaaattactagagacgaa

SEQ ID NO: 350317 - DNA, 63 bp, Zea mays
ttttgccgccgccgctgcagtgtccataggcggcgaattaaactgagatgggggggctaataa

SEQ ID NO: 350318 - DNA, 113 bp, Zea mays
tttctgctatctcgattcaaatacatacatgctcggttactacgtcccgcagcgtcgtgaccccataaccaagatcaagatcgggatcaatgggttcggcaggatcatcaagg

SEQ ID NO: 350319 - DNA, 356 bp, Zea mays
ccgtcatcgatctcgtttcaaatccatccatcctcgtttcctccgtcccgcagcatctcaaccccatggccaagatcaagatcgggatcaatgggttcggcaggatcggaaggctggtggccagggtggccctgcagagtgacgatgtcgagctcgtcgccgtgaacgaccccttcatcagcaccgactacatgacctacatgttcaagtacgacactgtgcacggacagtggaagcaccatgaagtcaaggtgaaggactccaaaacccttctctttggtgagaaggaggttgctgtgtttggctgcaggaaccctgaggagatcccggggggttcgggtggtgctgaatatgtt

SEQ ID NO: 350320 - DNA, 410 bp, Zea mays
tcgtagcaacatagaaagcacaatagtgtaccaacaatggcagctaaaatattttgcctccttatgctccttggtctttctgcaagtgctgctacggcgaccattttcccacaatgctcacaagctcctatagcttcccttcttcccccgtacctctcaccaacggtgtcttcggtatgtgaaaacccaattcttcaaccctacaggatccaacaggcaatcgcagctggcatcttacctttatcacccttgttcctccaacaatcatcagccctattacagcagttacctttggtgcatttattggcacaaaacatcagggcacaacaactacaacaacttgtgctagcaaaccttgctgcctactctcagcaacagcagtttcttccattcaaccaactagcttgatt

SEQ ID NO: 350321 - DNA, 136 bp, Zea mays
tcttttctctcactctcgttccatttccccatgtgccagatccaattcgcgagtgctggctcctctgccgccatggcgctctctgtggagaagacctcgtctggacgggagtacaaggtcaaggatctctcgcagg

SEQ ID NO: 350322 - DNA, 134 bp, Zea mays
tgctaaaacccgcatctcctccatcccaccccgcgccgtcaccgccggcgcggcccctcccgtcccgaaccctaaccccactccatcatggcggccggccactacgatcgcgaggacggcctgcctccatcggc

SEQ ID NO: 350323 - DNA, 275 bp, Zea mays
ttctgtaccaactagcaacatagaaagcacagtagtgtaccaacaatggcaggcagaatattttgcctccttatgctccttggtctttctgcaagtgctgctacggcgaccattttcccacaatgctcacaagctcctatagcttcccttcttcccccgtacctctcaccagcggtgtcttcggtatgtgaaatcccaattcttcatccctataggatccaacaggtaacttgtagctggcatcttacctttatcacccttgtttctccaacatt

SEQ ID NO: 350324 - DNA, 210 bp, Zea mays
tctaacaaagagaaagaaagaaaactagaggcgcccgcacgcaaaatccaaacccaaaccctcggcgaggacgccaccgtggcgaccgcggtggatgcagcgggtctggtgcccgccgacctggagcggcgggtgatggcggcggtgaaggcgtcggaggcgcgcggggacccgtcgcttctgtaggtggtggagctattctctatcgtt

SEQ ID NO: 350325 - DNA, 157 bp, Zea mays
tcttttgtaaaagctgagattgatggggcatcaaagaaaaataaaaagggcacgggcggaatcactgatattgacacaataaaagtaaacaactattaaactttcgttttgctacacttcttctccccttatcccttcctctctcatatttattcat

SEQ ID NO: 350326 - DNA, 74 bp, Zea mays
  unsure (1)..(74): unsure at all n locations
aaggagtaaagacggagggagggggtgggaaancaagagcaaagggggggcgttaacaaaggcaagccagtgga

SEQ ID NO: 350327 - DNA, 54 bp, Zea mays
  unsure (1)..(54): unsure at all n locations
tcttgcagcggncgcccaatcgccgtcggcggctcgcccgtggcccgcgggggg

SEQ ID NO: 350328 - DNA, 282 bp, Zea mays
tctaccgaaaccgagagctagtgcttgattcggtcggatatgggcaccgggcgcgttattgggaccgccgtcgtctacctacttccagtcccagctgctcatgtctgcatcggtctaaagccctttgccggcgacgagcactcacaacaccagggtgttacaatgtcttcttcaatggaatctgtataccttactgatacaactgagtcatttacccaagctcaagaggctaaggatgcttcaaagttcattttaatcctttaccgagtaattcaggaccca

SEQ ID NO: 350329 - DNA, 93 bp, Zea mays
tgggtaattcagctcgtgcttcgacaggccttagccctagcgcagctttcgggcggcggcaaacagcctgggagcctaggtgatctatctctt

SEQ ID NO: 350330 - DNA, 56 bp, Zea mays
tcggggtgaagtagatctgcatctgcgagagggggcagcttttttgaagatggggg

SEQ ID NO: 350331 - DNA, 101 bp, Zea mays
  unsure (1)..(101): unsure at all n locations
ttttngtgncttcagaccattagctttatctactccagagcgcataagaaccgggtcgacaccatgagggtgttgntatatacctcttactttctcttctt

SEQ ID NO: 350332 - DNA, 103 bp, Zea mays
  unsure (1)..(103): unsure at all n locations
tgntctcaggagcgnggcctcactctcctcggcgcatcccccctcctcatgggcgcagcgcggacggcggcaatggcgatggcctccacctacgcgccgggcg

SEQ ID NO: 350333 - DNA, 181 bp, Zea mays
  unsure (1)..(181): unsure at all n locations
aaaaaagggaaaaaaggcgcccacgancgagggaaaagggaaccacgggcgggcgacaaaaaaccccccacggacaaaacccgaggccagccaagcggcggagcccgcgcgcccgccnccaggaccaaggccgaagaccacaacaccaccgcgccgaccgacccgacggcagcggagacag

SEQ ID NO: 350334 - DNA, 316 bp, Zea mays
  unsure (1)..(316): unsure at all n locations
aattccacaatttttccacgcgntttttttatcccacaaccaacctggnnaaatcgcccaatttataaacacctatcgtgcttnaaacaaaaaaactacccatattatgatcctgcaacatgcanccttcacttttaactactccttgaagaccttaatttctttttttttttttaaattcatctcataaattcctttttttacaatctttttataatataacctatcatctccccatctttaatagattagtcnattttttaataatcaaatttacctctcttcaccttttttccccattttttttttttttctc

SEQ ID NO: 350335 - DNA, 194 bp, Zea mays
tcgtctagatcgcgagcggacgaccttttttttttttttatatagataggggggggataaataatatattataaaaaatttattaggggaaaaacaaataattgttagttaaaaatgaaaatatatatttttaaaaaaaaagtaataagggtaaaaataaaaaataataaatttttaataatgtatagtatgtt

SEQ ID NO: 350336 - DNA, 402 bp, Zea mays
tcgtcaacatagaaagtggaatccagtagcaacaatagagcaacaatggcgaccaagatattttccctccttatgctccttgctctttctgcatgtgttgctaacgcgacaattttccctcaatgctcacaagctcctatagcttcccttcttcccccataccttccatcaatgatagcttcagtatgtgaaaacccagctcttcaaccctataggctccaacaagcaatcgcagcaagcaacatacctttatcacccttgtttcaacaatcgccagtcctatctttggtgcagtcattggtacaaaccattagggcacatcaatttcagcaactctgtgctcctgtgatcaaaccaatactttggcaaacctttctttctactctcagcaacaacaatttt

SEQ ID NO: 350337 - DNA, 390 bp, Zea mays
tattctagatcgcgagcggccgcccttttttgttttttttttattttgtttgtttttttttttttttttttttttttttttttttttttttttttttttttttttttttttttttttttttttttttttttttttttttttaaaaaaaaaaaaaattttaaaaataaaaccaaacattttttttttaaaagtttcccccggaaaattttttttttttttttaaaaaaaaaatttaaaccccccttttaaaccttggtttaaaaaaaaaaaggccaaaatttttttaaaattcccaaaaaaaaaaaaaaatttttgagaaaagtttttataattttttttttttaccccttttttcaaaaaaggccttccattgaaaaaaaaaaatttcaa

SEQ ID NO: 350338 - DNA, 110 bp, Zea mays
ggggggggggggatttttccccttggtaagacaaccgccgggcggaacctttccggctttcccgggttacccaaaaaattggtttaccacggggtacccggcacgcgagg

SEQ ID NO: 350339 - DNA, 273 bp, Zea mays
  unsure (1)..(273): unsure at all n locations
aaacggcccgcctcaatacctttccgtaattccctttcttcccactttcttttccccgccccacnctcaaaanccacgaangtctttccagaccgtcagcccccccccaacacccctcccntctcacccatctttccccctttccctcctaaacccttctttttccctatacacctcccacctcctttttttttatttcatgcacacaaaacacctcaaccctccttccccttcctccaccaccccctcccctatcattcacttcttcctcta

SEQ ID NO: 350340 - DNA, 399 bp, Zea mays
tttaccttgggcttgatcgagaacagcactggctcttcaacgacaaagaaggatccgtccgtcccatagagcgaggatcactcaccgacacgagtagcaaggagtcttcaccgcaccccaacagagagaagagcggcggctggcggaggatctgacggcaaggaggtagcggccctgcgcttggtggcggcgaggcgctgggcctcttggggttaacgccctgtcgcgcagctaaaacgaacaactctcaccgacgctcttgcttcgtagctcgccaggcccagtgaggcccaacaccacaggagtcaatagcgcagtgaaaatttcctcctgggtcggccgcgcccaccgacgctctccgtctccgtctccggtgatgctgccctcgtcctcacgggt

SEQ ID NO: 350341 - DNA, 223 bp, Zea mays
  unsure (1)..(223): unsure at all n locations
tcgctcctctccggcgctgtctctcctccagcngctccttcatatcctagcctgtgcgcttcaactcaccctccctatcntctcctcccccaccaccactcctaccctcatactctctcttcctcgcttgccnaataattttttttttttctacacaccaaaaaaccacccccccttcctctttttttttacaccttattcctttattttatcttttcttttt

SEQ ID NO: 350342 - DNA, 280 bp, Zea mays
  unsure (1)..(280): unsure at all n locations
ccccccctttcatttcacatacaaccccaatatccatatcaactcaatctattttttggcaacaaactcttttttttttttcaactttnataccaaccacccaactttaacttcccaccacccaacttttactatctcttaatataacatcaaacatcatccacttcttccctcactcacatatttaattatacctcctttttatatactatttccatctttcacctcttcactcatccctttatcacactctccaacttatctctcttttctctcaaac

SEQ ID NO: 350343 - DNA, 57 bp, Zea mays
ctgcagtaccggtccttaattccctttctttccacttctttttttactcagaaggaa

SEQ ID NO: 350344 - DNA, 294 bp, Zea mays
  unsure (1)..(294): unsure at all n locations
tcggctacgtcccacgctcaaaaagcacgaagcgctttcctagccggcgggcagcgctcctcacctctcccncctcacccatcgtccccccgttcccggctaaaccctgcttgagccctagacaccgcccgcctcctttttttttagagcatgcacgccagattcctcagctcgccgtcccctgcctccgccgccccctccccgtacgttcgcttggccttcacggtcgcccgcccgcgcctcgcgtgttgtaagcctcgaggcccctcttccgcgccggcggctggccctctc

SEQ ID NO: 350345 - DNA, 162 bp, Zea mays
  unsure (1)..(162): unsure at all n locations
ttttctacccactcttcttttccaaacctgaccctctcnccgtcgctgtgttcctaaacacaagatgcgcccccaacaaccnncttnctcnccnctaatactacttctctcaataactacatcctcccatatttttcatcactccctccctatctttttttt

SEQ ID NO: 350346 - DNA, 144 bp, Zea mays
  unsure (1)..(144): unsure at all n locations
tgctcatcctctgcctgccccgcttgcgcagcgcgtctgctctagtgaggggagacggagatccgccagagattgaggagagggagggaggctgcctnnccggggagcgtttgctgcgagggatggactgncactttttttttt

SEQ ID NO: 350347 - DNA, 144 bp, Zea mays
cgtgagtcactggcacccgctcctccgccggcggcgatcctataccggtccgccgagaaaccccctccttatcactctccaattccccttcacgactaccaccacccgccccctccctcatgctgctcctgctgcttctctttt

SEQ ID NO: 350348 - DNA, 377 bp, Zea mays
tctccgtagctcccaaatagatcgatccatccggcggtgagcggacacggcagtggaagcccacgcctcgcggggccgccgcaccctggaggagatccggcagaagagagccgccgagaggatgcagcacgccctcccgatcgcggcgtctcacgtcgactctcacgggaaccaaagagccggagctgagcttcttgctcgagttcaagaacttgaaaatgggaacacggaattggtgagggaaaacaaaatgctcttgtccaagattgatgagaagggagttgagaaggatgcccttgtaaaccgtttgaatgatcttgtgagtcaagagtatatttgtataggtgctgagctccaggtttggttcttttattttt

SEQ ID NO: 350349 - DNA, 301 bp, Zea mays
caaattccaaattattccaaaaccacttcaaactgcccattcatttttctttaaaatttcttttctaacatttttattccattagctttttccttttttttttcaattacatacttcaacttctacttctcctatacttctttacctaaatataagcttctttccctcctattattttaacattacttttattgcattccggtcgtttttctctttactatttctaatttttccttcttcttctttcatattcatatctttttttattctttcatcttaattacattcatcttcacttttt

SEQ ID NO: 350350 - DNA, 187 bp, Zea mays
  unsure (1)..(187): unsure at all n locations
ttcgnctcgctcgaggggcgtcccggtgggggtgctagtggtttttcgaactcctgggtggctccttaaatccnncttccncgtcctcntaccccgcaagggtggtgagcgttttcctctccaatgcggcttcggcggnggtttatttttttttttcgctcaaataaaaaaccaacatatctagcct

SEQ ID NO: 350351 - DNA, 130 bp, Zea mays
agccttctttctttgggaaccgggggcaggaaaaaaggagggggaaaaaaaaacaagttggcggaacaattttcccttacattttgatccaaccttgcagggtttaatccaccaaatttcaaccgaaaat

SEQ ID NO: 350352 - DNA, 427 bp, Zea mays
  unsure (1)..(427): unsure at all n locations
cctttcctgaattcccttttcttacccactttttttcatcactctatnctaantctaagtgtaagggttttaaaatttgcttgttagaccacctncccaactctaattccaatgctacaatcctattgttttactgaatgacggtgtctagaccgaaacgctgaaatgtttttttttacttccttcgataacataaattgttcactcttataccccatgcataaaaatatcttgttctttacaataaaataatagaaaaaaattaggtgtatctctatctctattactaatattcaaattcttgatttcctttccttggaaaataaattatttcatgacaagtgcaccgttataaattttactaaatattatctttatccataactcatacactttcttgataaactactttatacatttcattttt

SEQ ID NO: 350353 - DNA, 76 bp, Zea mays
  unsure (1)..(76): unsure at all n locations
ttctttttccacctccagtcgccctacctggccggggttcttctaaggatggtggggtgctacctcnncacnatcg

SEQ ID NO: 350354 - DNA, 395 bp, Zea mays
  unsure (1)..(395): unsure at all n locations
ttcttcatagaaagcacaatantgtaccaagagatggcagccaaaatattttggctccttatgctccttggtctttctgcaagtgctgctacggcgaccattttcccacaatgctcacaagctcctatagcttcccttcttcccccgtacctctcaccagcggtgtcttcggtatgtgaaaacccaattcttcaaccctataggatccaacaggcaatcgcagctggcatcttacctttatcacccttgttcctccaacaatcatcagccctattacagcagttacctttggtgcatttattggcacaaaacatcatggcacaacaactacaacaacttgtgctagcaaacccttgctgcctactttaagcaccaccagttttttcaattcaacc

SEQ ID NO: 350355 - DNA, 142 bp, Zea mays
  unsure (1)..(142): unsure at all n locations
tcgttcatgttatgtagaggaattgttcaagtctgtttatctttcttgtnagaagggcacagcatattccttggttatggatatgtgtgttgggtaactgggcattcacgttttgtatctgtgggagcaaggtccatttttt

SEQ ID NO: 350356 - DNA, 394 bp, Zea mays
tcatttctctattctaagtctaagtgtaaggagtttcttcttttcttggtagaggacctggccaactctaattccaatgctgcaatcctattggtttactgaatgagggtgggtagaccgaaacgctgaagtgttgttatttacttccttcgataacatagattgttcactcttatgccccatgcataaaaatggcttgtgctttagaataaaagaatagaaaaaaagtaggtggatcgggatcgctattacgagtattcgagttcttgttttcctttccttggaaagggaattatttcatgagaagtgcaccggtagaaattggactaaatatgatcttgatccatagctcgtccactttcttgataaacgacttgatgcattgcattttctc

SEQ ID NO: 350357 - DNA, 156 bp, Zea mays
tggaccaacccgtcttttttttcaatttcccaatttccaaaatcgaatgggggagttcttcctcctttgccgccatggcgctctttgtggagaagacctcgtctggacgggagtccaaggtcaaggatctctcgcaggcggacttcggtcgcctcg

SEQ ID NO: 350358 - DNA, 383 bp, Zea mays
  unsure (1)..(383): unsure at all n locations
acccacagnccacacgggacgacctttaaaaaatggggggccgcctccacacacncttnctccctcatgccatccatcctatccgatccgatcctatccgatccaagcgtccatcatgtgggtgacttttattccgcatgtgtgggacaaaaagatcgcgcccattcgctccccggttaccccgtctccatccgctgccatgctgttctctctgacagtgtggctgtcccgtaccgtgcatcctcatcctccctctccccatgtgtgcagcacctctatataccctcccttgacagctcccagtctcatgctccactactgactacacctcttctactgctatatctctcttccccattaccaatctaatttctatttctttt

SEQ ID NO: 350359 - DNA, 300 bp, Zea mays
tctgcggcctcgcctgggccacggacgacgactcccttcacaacgcctgtgaggacctacggcgaggtcctcgagtccaagatcatcctcgatcgggagacgcagaggtcccgcggcttcggcttcgtcaccttctccacggaggaggcgatgcggaacgccatcgagggcatgaacggcaaggagctggacggccgcaacatcaccgtccgcctcccggtccgcgccgccaggatctcgtgcgcggcgttggatgctccactccccttgtcttcaggggggggggggggtgttttttat

SEQ ID NO: 350360 - DNA, 285 bp, Zea mays
  unsure (1)..(285): unsure at all n locations
ttcctttacccatcatgcgccanncnaatcagaccgcttccttattaagttagccggcgcaaatttaccctctcctcntctctctcctctccctgcccatcccccatatccttcacctcccgctcctcgatccccacaccctactcccgcatgccgttaccaacaaaatcgctcgccctttatgaggaggagaagaggaagggctgtattgcttctccgccttctatttcccattcccactacaactaccttatcaatcttctcctcatttaaaacagcggtgtt

SEQ ID NO: 350361 - DNA, 191 bp, Zea mays
actagttctagatcgcgagcggccgccggttttttttttttggtgggtgggtttttttattaaccaaaccgtttgttttattcgtcacgttctccgagaaccggcgcatcgccgtgcgggcatggacggatgattttatttacagccatgcggtatatcttgattggtgttactacggcctttgtcagaag

SEQ ID NO: 350362 - DNA, 238 bp, Zea mays
ctcatctgcgtacacgctctccctgttcgtttctttaataaagttaaagttaggcaacaattggtttacaatccttaattcttaagtttgcaacactaatcttcatttcacatttctaccggtattcacttttttttttttatatttactaaagtataaaaaaactcttaatcattttattatttattatatactatttttctactcttatttctcattatattattttattatctta

SEQ ID NO: 350363 - DNA, 422 bp, Zea mays
  unsure (1)..(422): unsure at all n locations
tgttcggttttaagccggtgctccatgtgtgcctgcccttttcccgtcccgggtacgttttaagctgcnagcgagatctgctttcacagcgtggctgaccagcagatccgtcgttgccggaacccacgctcgccgtctgttattgcatctgtagcctgctcttaaaacacacggacaattggactagctagactcttcgtttccggctaatggggtgctccttcatcatgtgcttgaacgcacttgttctacaccttaagtaagtcatttttactttcttcgtgggggggtggtgttgttgttccttttaaaaactatttatagtttctttattatctttttttttgtttatttcttatgataatattatttatttattttatatctttttttatattaatttatatatttttttttattct

SEQ ID NO: 350364 - DNA, 397 bp, Zea mays
tttgttcgcacacacacacaaccagatctccgcgggtccacccgtcggcacgtccggttcaagatgcagatctttgtgaaaaccctgaccggcaagactatcaccctcgaggtggagtcgtctgacaccattgacaacgttaaggccaagatccaggacaaggagggcatccccccagaccagcagcggctcatcttcgctggcaaacagcttgaggacgggcgcacgcttgctgactacaacatccagaaggagagcaccctccaccttgtgctccgcctcaggggaggcatgcacatctttgtgaaaaccctgaccggcaagactatcaccctcgaggtggagtcctctgacaccattgacaacgtcaaggccaatatccaggacaaggagggca

SEQ ID NO: 350365 - DNA, 418 bp, Zea mays
  unsure (1)..(418): unsure at all n locations
ntttttcgtctagcagcattccacagncctgaatccggcaggccttcaccacccagcggggatggccggctacgacggacgtgctccctccggcctccgcgtggtgatgttccccttcccgttctggagccacattaaccagatgctccagctcgggaagctactacgggcgcggatcctgtgcataaccatgcttcaaaccgacttcaacgcgggcgactaccggagtaacctcgtacttaaccttctggtacatgacacgatacttatcatcttacttcgacattcgaaggtgtttaacaaagcttacatgacgacattatcttgctatccaaggaactacaggaggcagaggatgctgaaaattctatacacatggagagattgaaggatataaatacacagtaccaggagaaac

SEQ ID NO: 350366 - DNA, 188 bp, Zea mays
ttctttaactgtgacattccgcatgtgaaccggggggagtatcaaatgattgatatgtcttaaaattgatttgtgagccttcttacttcaaatggcaacactaaagatgatcttaaactcccaactgatgagactcttgttgcccagattaaggaaaggttcaaaagcgggaaggatcttgttgtgac

SEQ ID NO: 350367 - DNA, 156 bp, Zea mays
gtccaattcccgtgacccactcccacgagccgcgcgcccagagcactccgtgtgcacgagtttacctcaccctttgcgcgcgaagactgtgtgccttcgcgtccctacagaagccaagaggacgcgaggaagcgaagcacacccgcagcgacagca

SEQ ID NO: 350368 - DNA, 131 bp, Zea mays
gttctacatcccgaccaaccccccgtgagtttttttacaaaacagcgagcgccccaccttcccctccttttcttaaattaccacatacaactattaactttaaaaccatcacatccaccctccacaaacct

SEQ ID NO: 350369 - DNA, 228 bp, Zea mays
tcttgttaatggagtaaactgtgcaactggaggatgccatgtctgttataggtgaggcactaactggatcccatggaaatgggctatcaggatctgtttttccaactaccggcttttcaggtgtggtagaaactgaagatggatcactggaggatggtctccgtcttcaattcccctccgcgctttcccatccccattctaaggtttcccttcctccataccaaatcc

SEQ ID NO: 350370 - DNA, 330 bp, Zea mays
ccacacccacagcctgctgcacaacctcctggacagggcgcaactgtcaacaaccctcgctctgctggcattgagaatcgtgctggtaggtggcgcagcatcggtgctcctcatcagcaccatgctgtcagatgctgccaccccgctgcttgcaactacaatgatcctggttgccaccccatagaccggtacccagatccgcttgcgaaagccgacgctaaagacatttatttctacaaaaactagaatactatgatcaattacaaaacctaccaaaacatccctattgagaccactgcccatgatgtgcctgcaccacccaacacattt

SEQ ID NO: 350371 - DNA, 163 bp, Zea mays
gaagcttccataagtttccatggggggttcctctcccggagggcgatccacaggggtcttctaccccgtccggcacttctcgcgctccctctttcgccccgtccaagggagggcttccttcatataatttttaaaatgcctggaaaagtctttggtcaaagtc

SEQ ID NO: 350372 - DNA, 407 bp, Zea mays
ttctattacaacagttacctttggtgcattgattggcacaaaacatcagggcacaacaactacaacaacttgtgctagcaaaccttgctgcctactctcagcaacagcagtttcttccattcaaccaactaggttcattgaactctgcttcttatttgcaacaacaacaactaccattcagccagctacctgctgcctacccccagcaatttcttccattcaaccaactagcagcattgaactctcctgcttatttacagcagcaacaactactaccattcagccagctagctggtgtgagccctgctaccttcttgacacaaccacagttgttgccgttctaccagcacgttgcgcctaacgctggcaccctcttacaactgcaacaattgctgccattcaaccaa

SEQ ID NO: 350373 - DNA, 187 bp, Zea mays
  unsure (1)..(187): unsure at all n locations
tttcttcccacgtttcttttctcactcaacacagcacacccacgtcgagttttatagagagagatgtagagataaaaacctcnncgttccaccaccaccaccacaaccagccgtctcccccgacttcggtccctaaccagttgttcaacatttttttttccgccaacgagaactactacctggccgt

SEQ ID NO: 350374 - DNA, 337 bp, Zea mays
ggttcgtgaggttctccggggttcggtttcgtgggtgagcggatcgagatggcggcgtcggatgttgagtaccgctgcttcgtcggcggcctcgcctgggccacggacgaccactccctccacaacgccttcagcacctacggcgaggtcctcgagtccaagatcatcctcgatcgggagacgcagaggtcccgcggcttcggcttcgtcaccttctccacggaggaggcgatgcggaacgccatcgagggcatgaacggcaaggagctggacggccgcaacatcaccgtcaacgaggcccagtcccgcggcggccgtggaggcggcggcggcggcg

SEQ ID NO: 350375 - DNA, 233 bp, Zea mays
tggctatacggtgcacgggaggcaacacagggggggcttttccaccgagggtgagagagcaaaagaagcacccatctcgactgtctgtcaccaccaccacagccagtccgctcccccggcgtatggccgcaaccacttgtgcaagatcttctgtcgcgccaacaagaactactctctgggctttcgctacgacaccttcgtgctggcccctgtcgaccccaaggactaccacc

SEQ ID NO: 350376 - DNA, 334 bp, Zea mays
  unsure (1)..(334): unsure at all n locations
gtctagatcgcgagcggccgccctttttttttttttttttttttttttttttttttttttttttttttttttttttttttttttttttttttttttttttttttttttttttttttttttttttttttttttttttgaagggannatttttagagggattattatattaaagtgtaaatattgtttaaaaatatgtttattatttttttttttgtgtataatataaaaattttgttataaatttgttttttttttattgagagaatttttttttttttattagtgttaaattaatattattttttttttttttttnntttattattttttattt

SEQ ID NO: 350377 - DNA, 121 bp, Zea mays
gttgtcttcgaagttctttacctaattgcagaacctattcctgatttgggagtgtcaaatctctataatacctattgttatcttttattcaccatctatatacttatttccttttttattt

SEQ ID NO: 350378 - DNA, 422 bp, Zea mays
  unsure (1)..(422): unsure at all n locations
ccctgntctagatcgcgagcggccgcccttttttttttttttttttttttttttgtttttttttttttttttttttttttttttttttttttttttttttttttttttttttttttttttttatttttttttttttttttgttttatgttgaatgttttttttattgtatgttttatataatttttgttctatttttctttaatttatttcttttggttcgtatttagtactggcttttttttttatatttctttaatattattttttttttttgatggtttttctttttattatttattttttttcaatattattttttttttaattatttttattttnttttaaattaattttattttgtaataatattttttattttttttagtttttcttatattttttattattttccttttttttt

SEQ ID NO: 350379 - DNA, 256 bp, Zea mays
tcgctgcagtgcagcggcagctgtgtccaactaccaagtcaaggtgaccgttgggctgggtggcacgagacgcaacaaaacccttgtcagtcgcccgagccccaaggctcgcacccacgccagcggcaccgcacccccacccacctcggcggcgagtccgagccccaggaacgaagggcgatggcggcgatgatgatggccacgtccgagtcaaagtcccccgcccgcgcgctgaggcggctggctggcgccgcgg

SEQ ID NO: 350380 - DNA, 440 bp, Zea mays
tcttctttcgctacatgtacgtacatgtatcatcgcacgcgctacatccgacgttggtgatcgggtgggctccttgttctcgttgtgtcctgttcctgctgcgtatctttctttagcatttgaccttactcttgttgttttgctcgtcttgtatttatttcttttttttcctggttttttgttcgtgttgtgtgtatggtcaggttttcttgtatctttttgtttgtttttttttttttttttttatttttggtatatttttttttttttttttttctcttttttgtcttttttttttttttttttttttttggttttttttttttttttttctttttttgtattttttatattattattttatttttgtatttttttattttttttattttttttttttttattttgtattttttcttttttcttattttatttttttt

SEQ ID NO: 350381 - DNA, 355 bp, Zea mays
agcgcacacacacacaaccagatctcccgcaaatccacccgtcggcacctgcgcttcaagatgcagatctttgtgaaaaccctgaccggcaagactatcaccctcgaggtggagtcgtctgacaccattgacaacgttaaggccaagatccaggacaaggagggcatccccccagaccagcagcggctcatcttcgctggcaaacagcttgaggacgggcgcacgcttgctgactacaacatccagaaggagagcaccctccaccttgtgctccgcctcaggggaggcatgcatatctttgtgaaaaccctgaccggcaagactatcaccctcgaggtggagtcctctgacacca

SEQ ID NO: 350382 - DNA, 353 bp, Zea mays
gaccaaacctccattgtcccatcctcagcgtcttctccccgagcccagcagcgaccctcctcgatcccaaagaccagaaagattttgcctttcctcttatcttctcctcaaattcaattcctcgtaatctcccttattggcatcgattccttcgatcttctccgctaccccctcccgtttcccgctgcttattgagttttggactctgcatgagtctatcaactcgcccttgttaaaggattcattgtccaattgcggtagctcgcgcggcaagattcggtttttgagtcggggcgcgacggtagtggtccagattgctttgcccggctcgactttctggcctgagacctaat

SEQ ID NO: 350383 - DNA, 115 bp, Zea mays
cttcatgcctttttgttttttttgagataacaaggaggagaggaggagattgctgtcacgattcacacttgtttaagtgtctaggctaaatgtttattattagtacttttgtcta

SEQ ID NO: 350384 - DNA, 299 bp, Zea mays
  unsure (1)..(299): unsure at all n locations
tgnctcatcccatcccactaccacccatctcgtcgtccgccgattcgatccggtgtgcttccaacccagggtgagtctccggatccgtcgccgactggtatccgagtgctatcgtaaacgatccagaactttccgtntgactgtccccctcgccttccgcggcgtctgatgaaacttgcgaggtacataaagaggtttcttcaactgtgaatgatcctgatgaaagannnnccncttcacattcaacgaggtgcacctaaaagtttcctggatctactgcatggcaaaattgtcagttc

SEQ ID NO: 350385 - DNA, 378 bp, Zea mays
tagcaacatagaaagcacaatagtgtaccaacaatggcagccaaaatattttgcctccttatgctccttggtctttctgcaagtgctgctacggcgaccattttcccgcaatgctcgcaagctcctatagcttcccttcttcccccgtacctctcaccagcggtgtcttcggtatgtgaaaacccaattcttcaaccctacaggatccaacaggcaatcgcagctggcatcttacctttatcacccttgttcctccaacaatcatcagccctattacaacagttacctttggtgcatttattggcacaaaacatcatggcacaacaactacaacaacttgtgctagcataccttgctgcctactctcagcaacagcag

SEQ ID NO: 350386 - DNA, 94 bp, Zea mays
  unsure (1)..(94): unsure at all n locations
atcttcttctcgtccgtcccgcttctctctctcctgaggcgcagcggtggggtggggtggngtanttagcggttttgcgagctttcaccttctg

SEQ ID NO: 350387 - DNA, 191 bp, Zea mays
cgcgcgcgcccctctcgggtctcggccgcgccgtcgcgctcaccaggtctgcaccatcaccagagtggcggcgctctctcctatcgcggcgagcgacggcggcgatgggaggaggggagatggcggtgtgtctacttgctctggctttcatgcgcatgggtagtttcgtcagtccatcttgctttggttac

SEQ ID NO: 350388 - DNA, 78 bp, Zea mays
  unsure (1)..(78): unsure at all n locations
tttcaagcccgagggccggtcgtctccatggggggtatcctaacgtggggggggtcccttcttttcntcttttttttt

SEQ ID NO: 350389 - DNA, 208 bp, Zea mays
tggatgacagccatggtcgccgcgaagctggttcgggagctcactgggaagatctccaagtgaaacggtcaggattgcaccactcttcttgaagcaaagcgaaagggtgggttttgatgtcccggtggttattgttcatggtttttatatatcgagctccaaatttgtttttattgtttcattattattatgttttatttttttttat

SEQ ID NO: 350390 - DNA, 332 bp, Zea mays
ttcacaagttcacactccacagcacgttcaccactgagtagcagctaccgccatgttgatcgccaccaccaccatgccacgaggtttcgctttcgcggcgccatgccgcagcctccagacgacgacagtcaggtgcaaggctaccggcggcgccgaccgccgcgacgtgctcctcagcctcggcggggcggcggcggccggcctcctcaggtcgtcgtcctcgttgagcagcggcggggcgcccatccaggcgccggacctccggaactgccacccgtccgaccttcccgacacggcggaggacgtcaactgctgcccgagcccggggatcg

SEQ ID NO: 350391 - DNA, 222 bp, Zea mays
cgaggagttgatgattgcgtacaaggaccaccaggtccttgaccccttaattccgcaagcaaaaaagaagatccacccccaccacctcttatattaaatggcctggtgtgtaaatataaatataaccaaattcctttgggtaagctatatatatgggtgggatataataaatgacacgcgctatagtgtgtcgtgtatatagccccaataaaaaaaattata

SEQ ID NO: 350392 - DNA, 192 bp, Zea mays
tttactggtatatcggtcatacctaccgagtgcccttttctaaaatacgtacgagcggacgtgtacgaatcaaaaaagcttgctattcccggcgtagactcagctctgggaggctactatcaactaaccctgtgggaggattctgatactcgcgattcggtcgttatatctcaagtgtctgtacgcgcatct

SEQ ID NO: 350393 - DNA, 143 bp, Zea mays
tctctgcgaaggagatggatcgtctgcccgagtcgtcccggagcatgaggaagtgcgcgtcttttgccttctttctgttctcgtttttttttttttttttacttttcttcttttttttttttttttttattctcctttttttt

SEQ ID NO: 350394 - DNA, 314 bp, Zea mays
tcggatcgcgagcggccgcccttttttttttttttttttttttttggaaggagggggggagaagagagtaatagcataatgtcgatcgatctacacccagcgcaacagccagattattgaagcaaacaaggacataagtagaagacggttagagtgcatgcatgaaacattaattctactcatgatcgaccacgacacactacaatttagcacacgtcccagccgccttttttaatcaacttgactgcacctggtacgtacgacgactacgttctgctgctcctgcatgcatgtatttctttactcacgactgt

SEQ ID NO: 350395 - DNA, 171 bp, Zea mays
cccactctctctctcccccgattcctttcctcgtcctcgtcctcatccgggcaggggagcaaacaagcaagcaagtaaacgggcgaggagctggatagaggccggcgactcgaagcaaccgccgatcggagccgcggctgaggaggaggagcaagctcgagatggtgggtc

SEQ ID NO: 350396 - DNA, 210 bp, Zea mays
  unsure (1)..(210): unsure at all n locations
tctgcgtacacggtctccctcttcctgtcagtagtagagtgagagtgaggcagcgagtgggagacaaggggaaatggggaagggagcgcaagggagcgatgcggnggcagcatgcggctaggtttatgatacaatttatcttatatatttccatgttttctttattatcgtttttctcttgttttctctcttttatttatatgtaatata

SEQ ID NO: 350397 - DNA, 160 bp, Zea mays
gccccattccgtccgcgcgcccgcgctcgcggcctcgctcaatccgccagcgctacccgcctacccccccggtggtagcgggctctacggcagcgctcctctccagttcccctgcgctccgcgtcttcatctgtggccgccgacgcttcgtcggtgtctc

SEQ ID NO: 350398 - DNA, 77 bp, Zea mays
  unsure (1)..(77): unsure at all n locations
tctcctatattcatgtcnacttctccatnnnttggggtctttctctcactcgcatggaacatttgtntttacccacc

SEQ ID NO: 350399 - DNA, 252 bp, Zea mays
agccttctggccgcggccggaattggccgcttgcgaggacaactttgcccggtaaacgcgttccgcttaccttgaccctttttactgggacccccggtttgggaaggaagagccctacagtgggtcaagggcttttcgcactttcgccacctcttctcgcgccttttctctccccgcccctttggggcctctagaggtggggcgcggaaactcgggttggggagagtctcctgcgggagggggcgtcccgcg

SEQ ID NO: 350400 - DNA, 311 bp, Zea mays
tcaactagcaacatagaaagcacaatagtgtaccaacaatggcagctaaaatattttgcctccttatgctccttggtctttctgcaagtgctgctacggcgaccattttcccacaatgctcacaagctcctatagcttcccttcttcccccgtacctctcaccaacggtgtcttcggtatgtgaaaacccaattcttcaaccctacaggatccaacaggcaatcgcaagctggcatcttacctttatcacccttggttcctccaacaatcatcaacccctattacagcaggttccctttggtgcatttatt

SEQ ID NO: 350401 - DNA, 132 bp, Zea mays
attcggtgacggccgttgatgaggagcctgagttcaccacgcttgaatccgcacccatactactgctatctggccacgtaaagtaagtgtactgaccgccgttgtacatagggaagacaggggacaccgtgg

SEQ ID NO: 350402 - DNA, 267 bp, Zea mays
actcgttgacgaccggtgttgcggagccagggttaactacgattgaatgcgcaccgataattctgctgtcgggccatgtaaagttaatgtactgaccactgttgtacaaagggccgtctgggaacaccgtgtctatgccgagctgtacatgctgaaagaacaaccgattgtcgccctctcgtcgatgggcgaacaggtgaacacggatcgcagtttgaccaggaccaaagactgacatggcgcttcgggcggcagctgtaaaagagg

SEQ ID NO: 350403 - DNA, 80 bp, Zea mays
aaaaaaacaaaaaaaaaaaaaaaaaaaaaaaaaaaaaaaaaaaaaaaaaaaaaaaaaaaaaaaaaaaaaaaaaaaaaaag

SEQ ID NO: 350404 - DNA, 150 bp, Zea mays
  unsure (1)..(150): unsure at all n locations
cagggaccggnccggaatatccgggcctactcttcccccccgccgcattaaaatttggggggggttttcatcaaaattagatatctaaaggtctcccttttagaaatacaaaangaaaggaaagaactgaaggatctcttacgacattct

SEQ ID NO: 350405 - DNA, 331 bp, Zea mays
gtggcttcccagaaataagaaagtacatttctagaaaaaaaaaaaaaaaaaaaaaaaaaaaaaaaaaaaaaaaataaaaaaaaaaaaaaaaaaaaaaaaaaaaaaaaaaaaaaaaaaaaaaaaaaaaaaaaaaaaaaaaaaaaaaaaaaaaaaaatataaaaaaaaaaaaaaaaaaaaaaaaaaaaaaaaaaaaaaaaaaaggggggcgccctttttaaaaaaaaaaattttttacccgggaaaacccgggtttaatttttttttattgggcaaaaaaaaaaaaataatttgccccgttttaaaaaaagggaggggggaaaaaaccttggt

SEQ ID NO: 350406 - DNA, 317 bp, Zea mays
tcgatgacaatcgatgatgcggatcgtagagttaacaacgattcaatgagaaccgattatgctgatagctgatcatgaaaagttaagtgacggacaagtgttgtaataagggaactttggggccattgtgtctctgcggaggtgtccaggatgaaagaagatactcgttgtccgcactccggttgatgggtgaacaactcgacacgcgatggcagctctgaccgagaccaaagaagagactggctcttcgtgtggcgtacttaaaagcggagctagatgacacaagggggaggcttggcactggccgacctttacaa

SEQ ID NO: 350407 - DNA, 183 bp, Zea mays
tcgataaaggctaataacatagagccagggtgctatacctagccatccaaagcttatcgacacagaatcaggtgctgcctttctaccaccctgttcaggatttgctcacatcactcttgcttctacaacaatgtttgcctttctggcaactctcttagacacacccatcttgcttctaccaac

SEQ ID NO: 350408 - DNA, 123 bp, Zea mays
attcgacatcctctggcaacttacttaaggtagtgccaacatatcaatggggatcgctcgggatagtggagttgcatcaataggggattggcggatcattctggtaaacagggggcttttggg

SEQ ID NO: 350409 - DNA, 228 bp, Zea mays
cggacgcgtggggccgttctaccagcacgctgcgcctaacgctggcaccctcttacaactgcaacaattgctgccattcaaccaacttgctttgacaaacccagcagcattctaccaacaacccatcattggtggtgccctcttttagatttcttatgagttatagttcaataataaagttttttgtctgatgtttgtggcttcccagaaataagaaagtacatttct

SEQ ID NO: 350410 - DNA, 298 bp, Zea mays
tcgctaaatggtagtagtatttagccagctagctgcagcaagccgtgcttccttcttgacacagcaacagttgctgcctttctaccagcagtttgcggctaaccccgcaaccctcttacaactacaacaattgttgccctttgtccaacttgctttgacaaacccagcagcctcctaccaacaacacatgattggtggtgccctcttttagattgcttattagttgtaattcaataataaagttttttggatgatgtatgtggccaaccagaaataagaagttacattttcagattct

SEQ ID NO: 350411 - DNA, 247 bp, Zea mays
ctcgctgactggtagtaatatggggcggggttgctgtaccaagccatgctaccttattaacacagcaacagttgctgtcattttaccaactggttgagggtaacccagcagcatttttacaactacaacaaattgttgccatcagtccaacttgttttgacaaacccattgttcaactaccaacaatagatgaacattggtgccgccttttagattgcttatcggtcgtaattcaataataaagttt

SEQ ID NO: 350412 - DNA, 251 bp, Zea mays
tcgcagaaaactagcaatgccctgggtaggttcatctcgattccaaccactcctggattccatttgattgacccggccgatccaaatcgaatctaatcagcagttttggagttgctaagggaaaaagaatagggaggggcattgataagtgctaaaaaggtgggagctactggtcacaaaggccagcaggaattactcatgcgagacatagtgattaacagcttgaggcagcaaagatggacaaaataaga

SEQ ID NO: 350413 - DNA, 69 bp, Zea mays
atgcgaaccgataattctgctatagggccatctaaagttaatttactggccactggtttacaactggcc

SEQ ID NO: 350414 - DNA, 307 bp, Zea mays
tcgcttatgtacaacaacaacaactactaccattcagccagctagctgctgtgagccctgctgccttcttgacacagcaacatttgttgccgttctacctgcacactgcgcctaacgttggcaccctcttacaactgcaacaattgctgccattcgaccaacttgctttgacaaacccagcagtgttctaccaacaacccatcattggtggtgccctcttttagattgcttatgagttatagttcaataataaagttttttttgctgatatttgtggcttcccagaaataagaaagtacatttctag

SEQ ID NO: 350415 - DNA, 80 bp, Zea mays
aaaaaaaaaaaaaaaaaaaaaaaaaaaaaaaaaaaaaaaaaaaaaaaaaaaaaaaaaaaaaaaaaaaaaaaaaaaaaaag

SEQ ID NO: 350416 - DNA, 100 bp, Zea mays
tctcctattcttcgaaacaaccagaacacgggggattatcacttttttcaaacaataccaataattctgatgacttacctcacaagttattttccttaat

SEQ ID NO: 350417 - DNA, 287 bp, Zea mays
tcgcaaatattggtattttaatctacctgatcacctcatagatcataatccgcgctcatcttgtccaataaggatgcttcattgtattatggtttattaagatgtctgcatgatactaatggctacaatatagtggtgggtagttgcaatgtaatggtgaaatagctagattaaaataacaatatttatgtatggctaggagcctagaatcacaaatagattatgaaatctttcttgataacaatataacacccatttgtgtgtgacttggtgacacgaggcctaaa

SEQ ID NO: 350418 - DNA, 64 bp, Zea mays
ttctttttcgttttctaccaataatcaacagcgggggtttaatacacttccaacaaaaccgcta

SEQ ID NO: 350419 - DNA, 122 bp, Zea mays
ttcttcttctccgcctcatcttccttcttctcctccacctccggcgggggcggcatcggcgacagcagctcgaccttgcggccagtcttcttctgcacgcgctccaccaccttcatggggtc

SEQ ID NO: 350420 - DNA, 311 bp, Zea mays
aaaacatcagggcacaacaactacaacaacttgtgctagcaaaccttgctgcctactctcagcaacaacagtttcttccattcaaccaactagctgcattgaactctgcttcttatttgcaacaacaacaactaccattcagccagctatctgctgcctacccccagcaatttcttccattcaaccaactgacagctttgaactctcctgcttatttacagcagcaacaactactaccattcagccagctagctggtgtgagccctgctaccttcttgacacaaccacaattgttgccgttctaccagcac

SEQ ID NO: 350421 - DNA, 116 bp, Zea mays
gggcccgtggcggcggggggggttctgacatgccaatcgcaaaaacacaagttccggggcccctgtcttctgtcggtcaactgcgccaacgtctgcaagaccgaagggtatcctgg

SEQ ID NO: 350422 - DNA, 335 bp, Zea mays
agcgcgcagccgagcgtcgcgacgctccacaacgcgggcatcagtacgatgctgcgcacgcgttcgaagcggtcggcgagcaccgacagcggaaacgtcagcagcccgaccagcagcgcgacgacgccgctcaacgaaccgagctgcgtgtccgacagcccccacgcgtgcttgagcagcggaaacacggcgttgagcacctgccgcgacatgtagtccgacagcaatagcccgacggtcagcccgaacacgagccacgcatacgcgggcgcgcgccgctcggtggccgcccgatcctgcagcgacggctcgacatgatgaatcaacatgcgtgt

SEQ ID NO: 350423 - DNA, 205 bp, Zea mays
gagaggaaagccggccgccggacctgcccgtcactacttgctggatcctcttcttgcggtggtcaaccaacaacccatcggggggggtgccctcttttagaccgcccatgagttattgcccaataatgaagctttttggatgatggttgcggcgatccacatataaataagcacttttttagaaagaacattttctagaacttac

SEQ ID NO: 350424 - DNA, 316 bp, Zea mays
tcgcaacaagcaacatagaaagtggaatccagtagcaacaatagagcaacaatggcgaccaagatattttccctccttatgctccttgctctttctgcatgtgttgctaacgcgacaattttccctcaatggtcacaagcttctatagcttcccttctttccccataccttccatcaatgatagcttcagtatggggaaacccaacttttcaaccctataggctccaacaagcaatcgcagcaagcaacatacctttatcacccttggttcaacaatcgccagccctatctttggtgcagtcattggtacaaacca

SEQ ID NO: 350425 - DNA, 247 bp, Zea mays
tctagcgtacccaagatgacacatacaaagcggcgacgtcgtatatcatttatacaacaacgtaaatcaaaataactggcctacttatgcacaacgggcttgactgcataaactgttaacgtgcccatcttaactgaatggtcacacattcctatttcgtccacttaattatctattcattacatcaatgccagctgcagtatgcaacaacccagctcttcaaatgtataagctcacacaagctata

SEQ ID NO: 350426 - DNA, 323 bp, Zea mays
gcattcagaaacacaccaagcgaagcacattagcaacaacctaacaacaatggctaccaagatattatccctccttgcgcttcttgcgctttttgcgagcgcaacaaatgcgttcattattccacaatgctcacttgctccaaggtccattattacacaagtccttccaccaggtacttcaatgggcttcgaacacccagctgtgcaagcctataggctacaacaagcaattgcggcgagcgtcttacaacaaccaatttcccagttgcaacaacaatccttggcacatctaacaatacaaaccatcgcaacgcaacagcaac

SEQ ID NO: 350427 - DNA, 252 bp, Zea mays
gtgttctaccaacaacccatcattggtggtgccctcttttagattgcttatgagttatagttcaataatgaagttttttggatgatgtttgtggcgtcccagaaataagaaagtacatttctagaaaaaaaaaaaaaaaaaaaaaaaataataaaaaaaaaaaataaaaacaaaaacttaaagggaaatcccaacacacaaataaacaaagactataagatacaacaagaaaaaaggggggggcggttttaa

SEQ ID NO: 350428 - DNA, 334 bp, Zea mays
gggtgaagaaacgggggatgtgaggctgtccgttgaggccatcttgggcgcgtctcctgttcgtgtcgtgtacttgttgtccggcggccgtcgggccgccgccgtgcgaatcgctgcattgtactggcaggtacatccggaacgcgtgcgcgcgcgaagccgggccggcgattcggccccccggtttccgcgccggattatgtgtaaattgcgtaaccgtctgtcggatctgaaagggttgcccggcgagcatcggtcatcgcgcgcccgggtcgggagcgacgccagcccggtcaagcggggcgcgcggcgcgatttcatgcctgcccgcacc

SEQ ID NO: 350429 - DNA, 316 bp, Zea mays
aagcaacatagaaagtggaatccagtagcaacaatagagcaacaatggagaccaagatattttccctccttatgctccttgctctttctacatgtgttgctaacgcgacaattttccctcaatgctcacaagctcctatagcttccctttttcccccataccttccatcaattatagcttcagtatgtgaaaacccagctcttcaaccatataggcttcaacaagcaatcgcagcaagcaacatacctttatcgcccttgttgtgtcaacaatcgccagccctatctttggtgcagtcattggtacaaaccatcag

SEQ ID NO: 350430 - DNA, 63 bp, Zea mays
aatgaagttttttggatgatgtttgtggcttcccagaaataagaaagtacatttctagattct

SEQ ID NO: 350431 - DNA, 325 bp, Zea mays
ctctctctcgtggagacgactgggcgaccgccggcgccgacctacgccaggtgcccaagccttagacgggaccatcgccgacgacgagcactcacgagtcagaaatgtcttcagtcgggagcggcagtggcaccagggctgcgaatggtgcagctgccatcagtgctgccgcgacggcagcaggctcggccgacgccagattccacccccaactactacagcaggacaggcaaagtagatgggctggctgcttttcaggcttatcatgtttcggatcgcagaagggcgggaaaagaattgttcctgcagcacgtacttctgatgg

SEQ ID NO: 350432 - DNA, 126 bp, Zea mays
ggtgttgcatttcattcggaaaaccccagcatgggtaatagggaggaggtccgtaccgtagggcaataccaacacctaaaccccctggatggagaataggacccgccctgtaaaggttcttttagc

SEQ ID NO: 350433 - DNA, 89 bp, Zea mays
ctcttttagatttcttatgagttatagttcaataataaagttttttatctgatgtttgtggcttcccagaaataagaaagtacatttct

SEQ ID NO: 350434 - DNA, 315 bp, Zea mays
cggaattgcaattctcggcccacgcttccgctctcttattatttcttgtgagcgactgggcaataataaagcctttcatctcatggttgccactccctagaaataagcatgtacatttctaagcacttaaaagggagaaatgaatttagttcggagggggggtggtatcaaggatgcaaattgaggaacacttatatgcgacgtcctaactgttgtatagtgttgcctacaccagatttcatccccactacttcacaaagtcaggcctggtaaatgggcttcttgctcgttagcttaggacagacctgacatctt

SEQ ID NO: 350435 - DNA, 192 bp, Zea mays
ttttcgtccgtacaataatatagaagagggggaagcgtttacacatactgcctcacaatatatatagatagtaattacacaacataaattagcaccacctctaccatttctcacataaccatttaaattcactcactttcttacatcactgtactgaagataccatggccaaatctaccgcatatttttgta

SEQ ID NO: 350436 - DNA, 77 bp, Zea mays
tttcattttttttttctatctacataccttgccaacggggatttctccttaacatatcacatttcctcttacaaaat

SEQ ID NO: 350437 - DNA, 348 bp, Zea mays
gagcattcagaaacacaccaagcgaagcacattagcaacaacctaacaacaatggctaccaagatattatccctccttgcgcttcttgcgctttttgcgagcgcaacaaatgcgttcattattccacaatgctcacttgctccaagttccattattacacagttcctcccaccagttacttcaatgggcttcgaacacccagctgtgcaagcctataggctacaacaagcaattgcggcgagcgtcttacaacaaccaatttcccagttgcaacaacaatccttggcacatctaacaatacaaaccatcgcaacgcaacagcaacaacaattcctaccagcactgagc

SEQ ID NO: 350438 - DNA, 103 bp, Zea mays
aagccttccgtaattcaataataaagatttttggaaatgtaactttttatttctggttggccacatacatcatccaaaaataaaaagttacatttccagattt

SEQ ID NO: 350439 - DNA, 350 bp, Zea mays
tgcaatgatatataagggggtgaagcgtgtacacgtacggccctatcatatatatcgatagcaagacagatcattaccttgcaccaccacaacacagtgctcacataatcatattcattcactcactctcttacatcactgtactgaagataccatggccaaatacaccgcaatgattgtagccgccctgtccctggaggtggcgatggcaacaactagcacagagcgtggcagggcaggcagcagcatgcgatcccaagccgttggtggtgagcgatccggcgttcatatgactgagcgaaacacggggccacacgctgatgcacacatcagtgcgcaggacgcatgct

SEQ ID NO: 350440 - DNA, 117 bp, Zea mays
gacgcgccctgttgcggctcatttatgcttggtgggtgtggtgtgttttttaattttacttttttttcttttttttgtccttttttttatttcttattttatttttttttttttttt

SEQ ID NO: 350441 - DNA, 336 bp, Zea mays
aaactctactctgcgaacagtgtagtctacagtgcaaaacaatgcatgtgggtaaattttaggtaatttgctggagtcgacctgatcgaccaacctcattgtgctttatgtgggaatgactgcatgccctttcccttgtcttacatatatatatttttttgttagttgagtctgtaatatggtaaatttattttgtctgaaagtatgcctgtaatacatgaccatattacgaaattgtcccgtaggtgaagttttttatatgaccatagatattaccacattggagattataatcctatatttctccgtaattcaacattcacaaaggtatataca

SEQ ID NO: 350442 - DNA, 230 bp, Zea mays
tttatgcttaccgacccacgcatgcgacggggtaggtctgctatagcggtacctaaattcaatacattgggcgacgttaaacaacctcttgactgtgagaaccacagcataacgcatcttaaaccccatgcattacctacctatttcgtcagatggcgtattacccaccaggcccgttcctaactcactatccgacagttgcccaaccttaatgtgcaatggatcgcacc

SEQ ID NO: 350443 - DNA, 346 bp, Zea mays
tcgatatcctctggtatcttagttaaactagtacgagcatatcaatgcggctcgcccggactagtggagtttcaccagaagggatttgatggatccttgtgctacacggtgtgctcttgcaatactctgacgaatttgaactgaacgcccttgccggccatgacatgtgcgacatcaagtgccataatcacaaggaccccaccagaaggcagctacacgaggatcaaagccataatcgcgagcaccatgacccttgcagagagtcatgcaagatgaagtgccgagaccatcacgaccgtgcaaggaaagagatctgccaacagcatagcatgagctatggtctcag

SEQ ID NO: 350444 - DNA, 342 bp, Zea mays
attcggccgcttccgccctcgcctccgctgccttctccacgccgctggcatgtcttccgacgccgtattcggctctgccccaagccccagcttcgccactggggaacaggcgaaggcgggcccgctcccgcactctaccctggagatcgcgggcgcccgacgaagccttctctccggcttggtcagtctgcgaacaccgtaccgcgcatttcccgtactacgcgtacaaccagacacgtctgaaccatcttggctgcgctcacgcgatcgatcccggccgctaagctgcggagctagtgcctgcgcgcccctgacgacggagccgacgcgctcgactgggtc

SEQ ID NO: 350445 - DNA, 299 bp, Zea mays
gacataccaaaggacgtcactgaagagccacgggctctgaccctccttgggccatctctgacgacggcgccgctgatgccttggatgcgtatgaacttcttgcgcgtagccactggaggaggggtcaggcagcagaaccaagtatactgggcgaagaagacgagaaggggccgtgacgacgtggacgaagagcgaatagacacgcacagttttaacaaaaaggcgagcgagaaaacccagctgttccccaaggtaatcctgcttaaaaagaaaacggtttgagaggatggccaagtatc

SEQ ID NO: 350446 - DNA, 353 bp, Zea mays
ataggagcttgtgagcattgaggcttcaacaagcaatcgcagcaagcaacatacctttatcgcccttgttgtgtcaacaatcgccagccctatctttggtgcagtcattggtacaaaccatcagggcacaacagctgcagcaactcgtgctacctgtgatcaaccaagtagctctggcaaacctttctccctactctccgcaacaacaatttcttccattcaaccaactgtctacactgaaccctgctgcttatttgcagcaacaactattaccatttagccagctagctactgcctactctcaacaacaacaacttcttccatttaaccaattggccgcactgaaccccgct

SEQ ID NO: 350447 - DNA, 330 bp, Zea mays
gaaggtagcagggctcacaccagctagctggctgaatggtagtagttgttgctgccttcttgacacaaccacagttgttgccgttctaccagcacgttgcgcctaacgctggcaccctcttacaactgcaacaattgctgccattcaaccaacttgctttgacaaacccagcagtgttctaccaacaacccatcattggtggtgccctcttttagatttcttatgagttatagttcaataataaagttttttatctgatgtttgtggcttcccagaaataagaaagtacatttctagattcttaaaaaaaaaaataaaaaattatttttt

SEQ ID NO: 350448 - DNA, 86 bp, Zea mays
ttttcttcttctacgcctcatcggggctgggggattctatctgccgctgggacccaaccgccatcagcaggtagatcttgtggaca

SEQ ID NO: 350449 - DNA, 357 bp, Zea mays
gaagctggcgcgcatgccggtaccgttaacgaatttccccgccgctctagaaaatgcaagatcacctacgattccatgcgagagtataccattattatagcagcacctataatgattttacttgaccctgatgagcaacggtccgaccaactaaactaatcatggacctaacttaacattgttgctgtacataggagtttatgccgaaggagtaactgattgccggcctgcactggttgggctaacaaacagaacgcgcaatctgaatctgaaatggacacaaagaacgaactggcgctattaatggcagagcttgtagaggagcttgatcacacgaggcctaagcttggcactggc

SEQ ID NO: 350450 - DNA, 54 bp, Zea mays
ttatcatgtgtggtatgaccaataatatatgcatcataataaagttttggtttt

SEQ ID NO: 350451 - DNA, 342 bp, Zea mays
gcaacatagaaagtggaatccagtagcaacaatagagcaacaatggcgaccaagatattttccctccttatgctccttgctctttctgcatgtgttgctaacgcgacaattttccctcaatgctcacaagctcctatagcttcccttcttcccccataccttccatcaatgatagcttcagtatgtgaaaacccagctcttcaaccctataggctccaacaagcaatcgcagcaagcaacatacctttatcacccttgtttcaacaatcgccagccctatctttggtgcagtcattggtacaaaccatcagggcacagcagctgcagcaactcgtgctacct

SEQ ID NO: 350452 - DNA, 135 bp, Zea mays
gcgatcttcaggaggaagggggagttattctctatatccccatcatcatcccttttactgatgtcagagcatactgtacttcttaaacaaaaaccttctataacaattgataataacataactttaactttttac

SEQ ID NO: 350453 - DNA, 350 bp, Zea mays
gaccaactagcaacatagaaagcacaatagtgtaccaacaatggcagccaaaatattttgcctccttatgctccttggtctttctgcaagtgctgctacggcgaccattttcccgaaatgctcgcaagctcctatagcttcccttcttcccccgtacctctcaccagcggtgtcttcggtatgtgaaaacccaattcttcaaccctacaggatccaacaggcaatcacagctggcatcttacctttatcacccttgttcctccaacaatcatcagccctattacatcagttacctttggtgcatttattggcacaaaacatcagggcacaacaactacaacaacttgtgc

SEQ ID NO: 350454 - DNA, 333 bp, Zea mays
tttcgtttttaccaactagcaacatagaagggacagggggtgtaccaacaatggcagccaaaatattttgccttcttatgctccttggtctttctgcaagtgctgctacggcgaccattttcctgaaatgctcgcaagcttctatagcttcccttcttcctccgtacctttcaccagcggagtcttctgtatgtgtaaacccaattcttcaacctttcatgatctaacttgcattcacagtttgcattttacctttatcaccctttgttcctccaacatttcaacagccctatttcatcagttacctttggtgcttttattggcacaaaacat

SEQ ID NO: 350455 - DNA, 148 bp, Zea mays
tcttcgtcgagacgtctgagagcaaggttactcacttgattcaagtaaacactatcgtaagtgtgacctaaactacagtagctgtcacgcgggtgctacgagtcgactgagagggcgatgacttcccagaggtacttgggctccaact

SEQ ID NO: 350456 - DNA, 347 bp, Zea mays
caaatttgctcaaacaatagttaaacttggtatggagtcataacatggtcctggttggtcgagataaaaagtttagatgattataaagaagtatgaatataggtgcttcaaaaatggacacttctcactgtacgtttcatatcattgaactacaacttcacatcttgagctatatttgtaactttttttatgttttttgcctcaaaagtgcaccaagtgttcatctaactgttatagacttaattcatgtaaagatgtccctattttggaccatttactaatttatatgcttcaaatgcctttccaagcgaaataaataaataaatgccaaatgtgctcaaaaatag

SEQ ID NO: 350457 - DNA, 87 bp, Zea mays
tcgttgaccaaaaagagtagaaaggggattttatggtccactgaatcctccaagtcgacgtcgaagaagaggcaacggaaagcggca

SEQ ID NO: 350458 - DNA, 170 bp, Zea mays
tttaaactgtttgctgctttacaggacagggtacaattcttgcttatattacacacaccataatcacatctagttattccattcattaagtccttcttatgtttttttacatatacttttttacatttattatctgcttaatataattattttcttttaatttctttttc

SEQ ID NO: 350459 - DNA, 184 bp, Zea mays
cggacgcgtgggtgttgccctttgtccaacttgctttgacaaacccagcagcctcctaccaacaacacatcattggtggtgccctcttttagattgcttattagttgtaattcaataataaagttttttggatgatgtatgtggccaaccagaaataagaagttacatttccagattctaatgt

SEQ ID NO: 350460 - DNA, 257 bp, Zea mays
aataaaaaaaaaaggataaggtgagttcccatacattcataataaataacccttttttaatgctaacctaaattcaaaaaaaaaaatatgtcgtaggggtgtacattttacaggtttacggactcctttctcctgcattcaaagttttttttttttctatcgcgtaacctaaattactatccttggctttacattttcaacactgtgaatgcaaataccttaccactctcaattgttattgggtcgcaccctatttc

SEQ ID NO: 350461 - DNA, 340 bp, Zea mays
cagaaacacaccaagcgaagcgcactagcaacaacctaacaacaatggctaccaagatattatccctccttgcgcttcttgcgctttttgcgagcgcaacaaatgcgtccattattccacaatgctcacttgctcctagttccattattccacagttcctcccaccagttacttcaatggccttcgaacacccagctgtgcaagcctataggctacaacaagcgattgcggcgagcgtcttacaacaaccaattgcccaattgcaacaacaatccttggcacatctaacaatacaaaccatcgcaacgcaacagcaacaacagttcctaccagcactgag

SEQ ID NO: 350462 - DNA, 256 bp, Zea mays
gttctagctcttcagctggcctgcctgagtcttgctgtgggacggcgtataggcgggttccatcccgtatcgcatcgtggactgttcctgatggtccgtgactgacgttctcgcgagcgctgattctgctcatagggaaagcttccagttcatgacgggtccttctgttctcgatgggggcaattaaaagcagatgcacgacgcccgcgcctattcgccttatcgacatttgttccatgcggacgttttagaggat

SEQ ID NO: 350463 - DNA, 103 bp, Zea mays
attccacgtcataactcttctatcgtgccacctcaatcaaattcacaggtcttctatagtgccacctaaatacagataaatgcccgtcgttgcacaacttaat

SEQ ID NO: 350464 - DNA, 256 bp, Zea mays
  unsure (1)..(256): unsure at all n locations
cgtccgatacctcataagaattctaaaagagggctctttttttttttggcaccctctnacaactgcggcaggtgttgttattcaactaacttgctttgacaaacccagcagcattctaccaacaacccatcattggtggtgccctcttttagatttcttatgagttatagttcaataataaagttttttgtctgtaaaataaaaatattatcttttttatcttatttaatatttaaatataggtcgtccgttttaa

SEQ ID NO: 350465 - DNA, 68 bp, Zea mays
gtaattcaataataaagttttttggatgatgtatgtggccaaccagaaataagaagttacatttccag

SEQ ID NO: 350466 - DNA, 293 bp, Zea mays
cggcagacctggttcggcttactctctcctatttcctgtctatcagcagtcagattctctcgtctgtgctgatggcgtccaactacgtcgacaccggtgcggaggaaggcaggttccacggtcactgccacggccacggtcaccactaccaccacagcacgacgccgaccagcgcggcggcgtaccccaagacgcttcggaggagcttgtcgttcgcccacagacacggcgccgcgcccaagtgcgtgtgcgcgccgggcactcacgcaggctacgtcaagagccgtctccac

SEQ ID NO: 350467 - DNA, 447 bp, Zea mays
acgaccccgcgtccgattatcatgtgtggtatgaccaataatatattcatcataataaagctttggttttaaaaaaaaaacggcaaattttaaaaaattttatacacaccacaaactaatcaaaacttattatcttttttaatctcactttcctcttccttctaaattttcaactttattttttcttatcttatcaatatttttacctctatgtttttttaatctatttcttctttataaaaattcttcattattttttttttctttttccccccttctttatattttccatcttatccctctctctttcttttcctatttatctctttttttttatttttcccttttcatataatatatttatcctccctttttttataactctttttttttttaataaaaccctcttttttctcctttattttataatttttttttataatataa

SEQ ID NO: 350468 - DNA, 310 bp, Zea mays
  unsure (1)..(310): unsure at all n locations
gttctagaccgcaaccggccgcccttttttttttttttttttnnnnnnnnnnnnntnnnggggggggtgtttttttaatttttttttnnccnncncnnccccccccggaaataatggtattgcttcaaccaaaagcattcattctttggcagacaaaatacacttcccaccattttccaaattggctgaaactaaacccacagccccaatcttccaacggtgcatttgaagcggccattacaaaaaactgttcccacccctaattgtatccttatgggcctaaaaaaaggcccaggacccaattctgcct

SEQ ID NO: 350469 - DNA, 440 bp, Zea mays
gtcagcctagcaattagctcatcgactccagattggagaactcgacaccatgaaggtgctgatcgtggcccttgctctcctggcgctcgctgcgagcgccgcctccagtacaagcggcggctgtggctgccagacaccaccgtttcatctaccgcctccgttctatatgccgcctccgttctatctgccgccgcagcagcagccgcagccatggcaataccccactcaaccaccgcagctaagcccgtgccagcagttcggatcctgcggcgtcggcagcgtcggcagcccgttcctgggccagtgcgtcgagttcctgaggcaccagtgcagcccggcggcgacgccctacggctcgccacagtgccaggcgctgcagcagcagtgctgccaccagatcaggcaggtggagccgctgcaccggtaccaggcgacatacg

SEQ ID NO: 350470 - DNA, 150 bp, Zea mays
ttttctcataatttgattgtttctcttatactttattattattgtttcagtttacattttgtttattcttattacttctttctttcttacattttttcttcattttttctatttttgtttattatatttctatctttatttaaatgtatt

SEQ ID NO: 350471 - DNA, 96 bp, Zea mays
ttcgtcatgtggccggtgcttttgtcatttttctaaagtcttttccttatggttttttctataggctttttccgctttattttatattttttcttc

SEQ ID NO: 350472 - DNA, 453 bp, Zea mays
gggcggaccacgcgtccgaacacaccaagcgaagcgcactaccaccaatttaacaccaatggctaccaagatataagccggcgtggcgcttcttgcccttttagtgagcgcaacaaatgcgttcattattccacagtgctcacttgctcctagtgccattattccacagttcctcccaccagttacttcaatgggcttcgaacatccagccgcgcaagcctacaggctacaactagcgcttgcggcgagcgtcttacaacaaccaattgcccaattgcaacaacaatccttggcacatctaaacctacaaaccatcgcaacgcaacagcaacaacagtttctgccatcactgagccacctagccgtggtgaaccctgtcgcctacttgcaacagcagctacttgcattcaacccacttgctcttgcgaacgtagctgcataccaacaacaaca

SEQ ID NO: 350473 - DNA, 78 bp, Zea mays
  unsure (1)..(78): unsure at all n locations
cttactgtacttctgtgcatgnnngacgtcatagctctgtgtgatagtgtcactctaannattcaattcaactggcnn

SEQ ID NO: 350474 - DNA, 52 bp, Zea mays
  unsure (1)..(52): unsure at all n locations
cacgccgnntccggtcgnctgatctccaacctcncnnctcgaccaccccact

SEQ ID NO: 350475 - DNA, 259 bp, Zea mays
atcgggaccagcgcgagcaggcccaacgctgctaacgcggtcccgtcccagactgcggcctggcctctggccctgcgggggcgcggtcgcgggccacggggcctcccgcgcggagggcagatgacctggcgccgcgcggcgcacacggtggggggacttggcgggggcacggacattcacaccggggtcgtcggggacaccgtgagactggcagggcggtgcgtgatgcgactgccgggcaagttgtactgtccttaac

SEQ ID NO: 350476 - DNA, 99 bp, Zea mays
atctaaaagagggcaccaccaatgatgggttatagttcaataatgaagttttttggatgatgtttgtggcttcccagaaataagaaagtacatttctag

SEQ ID NO: 350477 - DNA, 83 bp, Zea mays
cggccgaccacgcgtccgcttatgagttatagttcaataataaatctaaaagagttcaccaccaatgatgggttgttgggggg

SEQ ID NO: 350478 - DNA, 513 bp, Zea mays
gtcgaccacgcgtccgcagaccattagctttatctactccagagcgcataagaacccgatcgacaccatgagggtggtgctcgttgccctcgctctcctggctctcgctgcgagcgccacctccacgcatacaagcggcggctgcggctgccagccaccgtcgtcgttttatttacctgtttctgttcatttgccactttcgtgttatttgccatatcctattcatttttccacctttgtttttttttttcttttgtctttattattttttttatatttcctttattttatatattttttctttatttttttaatacgatttttctatcttttttattttatttgttttaatgtttttttttatttttttttctttttttttattaatctttctttatatatttttatttattatttttaaatttatctttatttattgttttttttaattatttctaaatttttatctatatttttttctacttttttttacttctttattttattttttat

SEQ ID NO: 350479 - DNA, 326 bp, Zea mays
cgtccgatatctcccacttgacatacaatacaacattttcgttttggggcagacacagatagtaaggggcgggtggatttaaacctaccttctagtaaccaacttctacctttacttcaacaacttcctccgttgtatatggacctaataaaaggtcgggaggtccttattccaaaaccataagagacacgccgcctgataaaaaacctactatggtataccttggaatctctttattaaggttaatgattattataattgttaaacctttaccctcgcactagttctaatcttttgaaccactattagcccattgtttgatatgt

SEQ ID NO: 350480 - DNA, 344 bp, Zea mays
aaaaggggccggcccacgcgtccgattgaactctcctgcttatttacagtagctatatctactaccattcagccagctagctggggggagctttgctaccttcttgatacaaccacagctgttgccgttctaccagcacgctgcgcctaacgctggcaccctcttacaactgcaacaattgctgccattcaaccaacttgctttgacaaacccagcagcgttctaccaacaacccatcattggtggtgccctcttttagatttcttatgagttatagttcaataataaagttttttgtctgatgtttgtggctttccagaaataagaaagtacatttctaaaaa

SEQ ID NO: 350481 - DNA, 287 bp, Zea mays
caacaactactaccattcagccagctagctgatgtgagccctgctgccttcttgacacaacaacaggtgttgccgttctacctgcacgctatgcctaacgctggcaccctcttacaactgcaacaattgctgccattcaaccaacttgctttgacaaactcaacagtgttctaccaacaacccatcattggtggtgccctcttttagattgcttatgagttatagttcaataatgaagttttttggatgatgtttgtggcgtcccagaaataagaaagtacatttct

SEQ ID NO: 350482 - DNA, 228 bp, Zea mays
cgctcactagtcggggttgaggccgtcttcgcgcatgccgatagttgtatggacctataatactgccggtacaaccgactgaaaccgcgtcccaacttaatcgctgcacatccttgcgtggtatcaagcgacgtgccttcaacggcgcgaggaaggccccctgtcgcattaccgcgtgggggtcccagggccgtcatgcggcctcgcgtcttgttttcttctttgccg

SEQ ID NO: 350483 - DNA, 57 bp, Zea mays
  unsure (1)..(57): unsure at all n locations
tttacgcttgtcatgcgacgtcatnagctcttgtatagtgtcaccttaaattcaatt

SEQ ID NO: 350484 - DNA, 306 bp, Zea mays
  unsure (1)..(306): unsure at all n locations
gaantcccgggccgacgagcctgcgctgctcgacgcgctcgagcgcggcgcgatcgctttggttttgctcgacgtgttctggaacgaagcgcgcgatcgacgagcgttttctcgcgttgccgaacgtgctgctgcagccgcatcatgcgagcggcacgatcgagacgcgtcaggcgatgggctggctcgtgcgcgacaacctggccgcgcacttcgccggcgagccgctgctcacgccggtcgtttgaggagggtgtcatgcgtatgcgctgcatgtgtgtcgtgattcacgggccgaacgacctg

SEQ ID NO: 350485 - DNA, 201 bp, Zea mays
  unsure (1)..(201): unsure at all n locations
gggggatactncccctccgccgctttgtctccctttaccttcttgcaagatgaaaaccatcctggcgtcgtagacttttgacatcccttagggcctcaccgtcacggtggccgccaagctggtcacggtggaggggccccgcggcatgctcacccttaacttcaagcactctaacctcgactttcagctgcatgaggccgg

SEQ ID NO: 350486 - DNA, 72 bp, Zea mays
gatgaatgatatgacatcacatggatttttttattttttaaaaaaaaaaaaaaaaaaaaagggggtggtttt

SEQ ID NO: 350487 - DNA, 76 bp, Zea mays
tgtttccgttatttaaataaaaaagtattttgggggatgtgtgtggccacccagagatatgaagttacttttccag

SEQ ID NO: 350488 - DNA, 183 bp, Zea mays
agagggaacgccaaagcaccttcatacccctccgcaattccccctatgcccatttcttcttatgtctacacctgctctcaatctgtctgttaacataaacctgctgctgcagacatacttcaactattatgaaatttaatttgaatatatttctcgccattttacaatattccgacttgtata

SEQ ID NO: 350489 - DNA, 154 bp, Zea mays
agatagcggtttttcttttccgatagagggcagttaaatggggtgagtgttatttggagggatggtgttaatcaaataagtgtacatacccctggcatgagatactatctttcgccatctattaagcattattgggaaaggaagagattcatca

SEQ ID NO: 350490 - DNA, 178 bp, Zea mays
cctgccgtaaccgtgcctcatttacaggggcgacccacgctttcgtttttgacttagtaaggtttcttgtgggaagtttgttgccaatcaggggtaagcttttatattctgagttaatggcgcacaactacgttctcaccggggaggtggaaggcgtactcaactgccacagcaacgt

SEQ ID NO: 350491 - DNA, 388 bp, Zea mays
  unsure (1)..(388): unsure at all n locations
taaagggtcaaccaacgctttcaattataatgtgtggtatgaccaatagtatatgcataataataaaggtgtggttttaaaaaaaaaaaaaaaaaaaaaaaaaaaaaaaaaaaaaaaaaaaaaaaaaaaaaaaaaaaaaaaaaaaaaaaaaaaaaaaaaaaaaaaaaaaaaaaaaaaaaaaaaaaaaaatttaaaaaaaaaaaaaaaaaaaaaaatgaaaaaaaaaaaaaaaaatataaaaaataaaaaaacaaaaaaaaaaaacnnnnntggggggggggtttttaataaaaaaaattttaaaatgagttattatacatattttaatatttttaaaagtacaaaaaaaaaaaaaaaaattgggtcgtggaaaaaaaatggagttggg

SEQ ID NO: 350492 - DNA, 214 bp, Zea mays
tcgcacagttgttgccgttctaccagcacgctgcgcctaacgctggcacgggcttacaactgcaacaattgctgccattcaaccaacttgctttgacaaacccagcagcattctaccaacaacccatcattggtggtgccctcttttagatttcttatgagtcatagttcaataataaagttttttgtctgaaaaaaaccacagagctctcact

SEQ ID NO: 350493 - DNA, 180 bp, Zea mays
tcgataactcataagaaatctaaaagtgggggggaagccacaaacatcaggcaaaaaactttattattgaactataactcataagaaatctaaaagatttctttttttgttttcctattattactttcactttggtttatttatttttccgatgatattatttactaacttttttttttt

SEQ ID NO: 350494 - DNA, 89 bp, Zea mays
ggaaccgtccgtattcccgcgtcgccctttctttcgacagttgcttcaaaaatggggaatgtccatttctaaaagggaaaaaaatccac

SEQ ID NO: 350495 - DNA, 312 bp, Zea mays
accgccgaagggagtgccatagcactacctacaagtgacctaccgaggagtcgtataaagagggccttgacctggccggatcccaccgccgagcgctatacggaggcgggtacatcagccgcggcgccagatactacaactgccgacccggcggccaatccaacctctaccaccgtggttgatctcgaatgacccgctgacgcggctgaggcggctccggatccgcccgactgcctaggaaaggactggctggtcaaggtcccatccctttcgccgacaataatttctttcgccttgttcgttcaggcgcta

SEQ ID NO: 350496 - DNA, 290 bp, Zea mays
atactcctccgcaatttcccagatgcaatttttcttttcaaaatccaactcaataaatggggcatgttttataactggtttgtgcgctcaaatagaacaagattaccaaccactagatgaaattcattcttcacatgacaaccttagatctattgacagtactctgcccttacacaaccattacttcattcaacatatattaaaatagcattttatgatataaaagacaatgctcccacccttacaccaagctatctatttagcatatttagcgtaccatgtttacgatt

SEQ ID NO: 350497 - DNA, 253 bp, Zea mays
tcttgttttctttctaaaacatacaactttaagtgaggcaaattagacaaaatgcgaccggcctatcaactattataatattcaagagatataattatggcgaaatcattctactatgctgcaatttaagattcaatcccttaacttcaattgatcttgactcaacctctttactttcataatgctattcagaacgtcaaatcgataacactgatagccgttgctgcttagccattatgtgcattaattttta

SEQ ID NO: 350498 - DNA, 311 bp, Zea mays
agaaggaaagaaaacacacctgccgacaccttccctactttcccgcgtccacccaccttttctctttctctccctccctttttctcttctgttctggttatattaacaaatgcgcgcggtccccacttacttacacattttcatcaataaataatcctatgcatccataattatacatcacgatctgaccctatctttttacttaccatatatatctccataatctactatctttccatctataatgagtaatctaattacacttcttttaccattcttaccaacccattccctaccttcatccaaattta

SEQ ID NO: 350499 - DNA, 477 bp, Zea mays
  unsure (1)..(477): unsure at all n locations
agaanaagagggaacgaaaaagcgggttggtacccctccgcaattcccgcgataggagtttctttttttcagccttccaaggtgctgggagtgcgggcgtgagccactgggcccaggcatctataatttcctggtagtcacactggcaacaaaacaccttagaaccagatatcaaccccctccaagcaatacgtgaattccctttacatgaaacgtcagggctacctgagtatctgtgttgaatgcagtctgaaatgaccctgtggattttactggctggttgccactactgtacaacattcagtgcccacacccacctgttccattaaggttttttgagacatgagagatgcctattccctgctgtgtgacacggatttgtgtagttggaaagaaaagacaacattagggagtaaacattcaagctttttacctgtaggttgaatctgccgccacttggtgtttattaccagctat

SEQ ID NO: 350500 - DNA, 60 bp, Zea mays
agagggaaagcaacgacgccttcatatacctccccaaaattcccgattcaactttctttt

SEQ ID NO: 350501 - DNA, 224 bp, Zea mays
  unsure (1)..(224): unsure at all n locations
aaaaaaaccgcagcctganaccccacctcaattcccccatttacattccctcattcacccaccactaaccatccacaccgtaaaaattaaaaatcattccgtccccaaaaaccccaaacactaaaccttttattaccatacaattctctccatttatcatatcccctcttctatcctcacacaccttctttataacccctttcccccaacacacatctctcttt

SEQ ID NO: 350502 - DNA, 468 bp, Zea mays
  unsure (1)..(468): unsure at all n locations
aaaaaattagaaacaattcgcccccgcnacacctccccaatttccccgattcttattttttttttatccccacccccaaaacaanctgacctgttaattataaacaacgtttgtccgnncaactacaccacatcttttaatttcatttttcactttttttttttctcatttacttttacattcccaaatattatttttttaccactctattttattcattaattattcatttttcattttcttctttattctcaatacccttaacctaattactctttatacctattttacttcattactaacacatttttatttttttttcattatatttcatattctttattcttctatcttattatctttcttttttcactacatatctattatttatttctttatatatatttcttacactctttacctcctattatttttttttttttaatatctcttatttatctttttttt

SEQ ID NO: 350503 - DNA, 382 bp, Zea mays
aagaacaagagggaacgctaaagcacgcctgatacccctccggaatacccccgatctcaacttctcttttcgaacctcgcatctggtatgcgggtcctccatattgacaatggggggggctcatccggacgctgaccacaactacacctcaaggctgttcatcggcttcagtgcctgcaccacgttgctgcctgatgtgcacctgctggcactcatgaacaccacctgcgtgctcctcaacatcaaggctgacagcaacatgcacaagctcaacgtcggcaacgaggccacccacgatcatatgcacaaccacatccagctgttctgcgacttctgcaccgacacacccaccctggtttgactagacattagctagctgcta

SEQ ID NO: 350504 - DNA, 132 bp, Zea mays
atgaaccgtttttttttcacctgcacgctctcacatctgggatgagtatcattaactacggcgagaacaaacgagctaaacctgaccagacctatttgatcacacatttcgaaaaccactccactaacccct

SEQ ID NO: 350505 - DNA, 98 bp, Zea mays
tttatgagtaatagttcaataataaatctaagagagagccacaaacatgagacaaaaaactttattattgaactataactcataagaaatctaaaaga

SEQ ID NO: 350506 - DNA, 358 bp, Zea mays
atcaagccgcttgttagacctggtacaggttaagaatgggatcagtggagagcctgccattccttcagctaaggtcaggcccctggggcgctcccccttctgttgatagcatgtgggagtgagaaaacaaagtcattgagcataaggaatgagtgcatctgtgcccatatttaaggtgtgaccttggagaagctactctgtgggcatgacagcaaaggagaaaatcatgcggcatcttaaggtctgacatgctttattatgcatagtacttggggtttgttttgatttgttacgtttcgttactgaggtggagacttgcgctctgttgcctaggctggagtgaagtgctgcgatctta

SEQ ID NO: 350507 - DNA, 156 bp, Zea mays
atggccattcatcgcttctgactgcacctgctctcaatgcgtgctctaaccatgagcctccgcctgcagagctcctacaacagctatggaggtggttctgacaaactgtccttctaatctctttgtctccagttgtctcatagatccgcctaaaaa

SEQ ID NO: 350508 - DNA, 340 bp, Zea mays
cgggcggaacctagcctcaattacagcgtccacccatgctttcttttttttctcatttaaactaaactcggactgtgctatttttcccaggggcaggtactaaacatctagaaaatctaagctcacctgtagttcagcaacttctacctttactctaacaacttcctccatgcatattgacctaataaaatggcaaaaggacttcattccaaaaccaaaatatacactcctcctgataaaatcctactatctaatttctcgtaatttaatatttaagactaaagatcatcaaattgattaaacctttattcttgcacaattactaatctattaatcattt

SEQ ID NO: 350509 - DNA, 117 bp, Zea mays
taggaaaagctatgacccctgccggaacctttcctcaattacagcgtccacccacgcgttctgttatagttcaataataaagttttttgtctgaaaaaaaaaaaaaagggggggtac

SEQ ID NO: 350510 - DNA, 87 bp, Zea mays
  unsure (1)..(87): unsure at all n locations
gactcaactatangtggaaaggctggtaccgctctgcacggtacccgtgtcctggaattacccgggtacgacgaggctcactatgtc

SEQ ID NO: 350511 - DNA, 124 bp, Zea mays
tcgatctaaaagagggcaccaccaatgatgggttatagttcaataatgaagttttttggatgatgtttgtggcttcccagaaataagaaagtacatttctagaaaaaaaaaaaaaaaaaaaaca

SEQ ID NO: 350512 - DNA, 322 bp, Zea mays
agaaggaacaaaaaagcaccttcagacacctccccaaaacccccgattcaaactttttgttttatcaaacccatttactcactttcacgggcacatattatatccgttcggtcatctaaattacacatcttctatacatactactccaaaccttcattgctacacacaaaacaatatcttcatcagtactaatcttatcctttctcatatcactcctattatatctatccacctaaaaattcatgaacaccatccttactttcacctctttacatccctatctcatcaccttctacactatatacctcaccttttcacccat

SEQ ID NO: 350513 - DNA, 322 bp, Zea mays
aaaacaagagggaacgctgaagcgccttcatgcaccgccccaaaattcccgagcccacccatacttaccgggacgcgtgtgctgcaaatgggagaccacccacgcgcgctcggtatgtacacacaattcgtagatccacccgcccacctaataccctcgcctgctcctgcgctctaatacctgcaacccatctgtaatcctgacctccagccccaggatgcactgcctgccaacgctttcctgctggcactaccgcactggctggcaagatcaagttttgcttggtggacagcacgctagtgttagccagtcctactcgtcc

SEQ ID NO: 350514 - DNA, 228 bp, Zea mays
cggatccgccctttctttttatatacttctgataactatccgggctgggcattataaagattaggggggcaaaccaaaaaaccatactaaatatacctatctgatcctatatcatacctaatcccctcaattccttcacccttatcacccacataaactttcattttacgatatcaaaaaactcaccctatattataatttctccaccaactagaatatatcatataa

SEQ ID NO: 350515 - DNA, 318 bp, Zea mays
  unsure (1)..(318): unsure at all n locations
aaaanaagagggaacgcaaaagcgccttcatacacctccccaaaattcccgatccgaccttttcgtttttgtttaacataaatatcaggccataggcaattttcacacagcgatgcgtaaatgatacataaaccttatataaaaataacaccattcacaattcataattctataacaaacaattcaactgcattgcatgcaattgaacgaaacattaattgcacccaattatcaaacttcaactcattgtgctaactctcaatcatacgtctacattcctgcttctaaatcacaaaacaactaattttagacctcaaa

SEQ ID NO: 350516 - DNA, 401 bp, Zea mays
aaatagaaagctgtgcccctgccggaccggcccattacagcgcccccaccgtcgatattcacaatggcataactcgacaatccgattgggcagaggcagtataaaagctgagaatctaagcccacctgagcaacaactgaccttacttaacaacttactcatgatatggacctaaaaaagtcagaggcttatccaaaaccaaaagaacgccgctgtaaaatctctagcgattctggaatctttactaagactaacgacgtaaatcgatgaaaccttaccctgccaagactaagctatgaacgactttagctcattgctagaatgcaatccgacactttctgggatcatggggaccattacacagctcttcctgagttccccagcaaggctgatgcacgaac

SEQ ID NO: 350517 - DNA, 187 bp, Zea mays
  unsure (1)..(187): unsure at all n locations
agaaaagcnaggaccccggcgcggtaccgttcctccattaccgcgtccacccacgctttctttttttttcgcatactcaaaaccacgtgctggggctattcaaaacaaggtcggatacatctattaccactatcaaaaccacttcacgacacatatatttaaaacaaccccatatacaaatcatttt

SEQ ID NO: 350518 - DNA, 284 bp, Zea mays
cggatgtcatttttctctttaaaagcgacccttcagaatctgggtggtttaaatataagaacggctcgggtaacactacacctatttttcctgtaaatgggaaacccctccccataattgctttcttaaagatttctggttatagggcttctatatcccatcatatcaagttcaaaatatcccatctattttgtctttataattatttcctttatttatttcttgtcttcataatctttaacccttcatcttttctcaattctatattgtatatacttatttta

SEQ ID NO: 350519 - DNA, 262 bp, Zea mays
tcggtagttacatttggagcagtaattgggacaaaacatgaaggcacaagggctacaacaacaaagctagaaagaacgtgctacttagaacaaaatcgtcgagatgtggggcagaaataaggaacacgcaacacgggctgaaactgtggtattagaaacagtatgcataacaactgtgatgacttgtgtattgagaaaaactctcatcagcagtgtgtgctacccgaatgttcacaacaatgggatgaattagctatgacaa

SEQ ID NO: 350520 - DNA, 464 bp, Zea mays
aagctgtgccgcctgccggaacctggcctcatttacagcgtcgacaagcctgtgctggtcgacccgctcgaacgcggaccggtggacgcgctcgcccttgacgggtcctgcacccaacaccgcatgcaacagcgccgtgtaccgttgccgaagcgcctggtgcaacaccatcactatcgatcggaactatcacgcactgtgacgcgatggactcgatcgcgcgccaaaacgcgccctgcacctgcggcatccagatcgtgctgacgcagaagcgcatgtgaaggcactgggtcggtacaccttataggcagtagcggtacgcgccgcgacggacgggtcggattgaccgcgacgcgatcgccgacacttaacgacgtcacgtgcgcgtcgatcgcccgaaccgtgccgtcaacctcttggacgagcaccatttgctgctcgaggcggatcgcgccgaaaccgtc

SEQ ID NO: 350521 - DNA, 205 bp, Zea mays
gaaggaacaaaaaagcacccggggacccctccgcaatttccccgattcgcacaacattttttgtttctaccccagctcaggagcaatggttccggacatatcacacaggcgcctgggtacttctataacaccacctaaattaaacctactacactacaaccttacaaacacctcctagcccacattctctcttcccccaacagaa

SEQ ID NO: 350522 - DNA, 224 bp, Zea mays
agagggaacgcgacagcgccttcatacacctccccaaaattcccgctcccaccttttttttctaacggatactcaatcaaattgtgattgttatacaactaacattgcccggcaacaaaaacacttcatcatgtctctttgttataatgaataagaaatatttcaagtgacaccttatcatttccactatttttcacacacacttaaactctctctgtaactca

SEQ ID NO: 350523 - DNA, 148 bp, Zea mays
aaaagccgtgaccgccggccggaaccgggccgcaattacagcggccacccacgcgttcggatgaatgatatgacatcacatggatggttagaaaaaaaaaaaaagggggaagaaaccaaaaaaaaaaaaaaaaaaaaaaaacaaaccc

SEQ ID NO: 350524 - DNA, 247 bp, Zea mays
  unsure (1)..(247): unsure at all n locations
agaaggaacaaaaaagcaccctgatacccctccgcaattcccccgattacacttttcttttttagccggccacataaaaccccgggctggattaaataaaaaaccggacgggtcaaancctgnacatcatccttactctccttaaacacccttacacattcactccctaacctccaaatcagtgctccataatcccatccaactttaatctccataaaccacaccatctctacctacaattctatac

SEQ ID NO: 350525 - DNA, 368 bp, Zea mays
  unsure (1)..(368): unsure at all n locations
aaagaangaacaaaaccgcacgctgatacccgtcctcaattcccccgatcccacttttttatttctcacctcacaacccaaccactgtcacgcttacaatacaaatacttccccgcccactnaatacccacacccttattcacttccatctacaacacagccttctctccgactctgcttctcaaactacttctgtatcctcaccactaccaacactcatactactttctacaccttctacacttccatcactaacttcatctcccttattcaccaatactatcccattactctcttttcttccaaactataattcttcctcacccataatcccctactttctcactcttaccttcaactattccttt

SEQ ID NO: 350526 - DNA, 283 bp, Zea mays
tttcttttgagccctgctaccttcttgacacagccgcagttgttgccgttctaccagcacgttgcgcctaacgctggcaccgctcttacaactgcaacaattgctgccattcaaccaacttgctttgacatacccagcagtgttctaccaacaacccatcatcggtggtgcccttttttagattttttatgagttatagttcaataataaagttttttatccgatgtttgtggcttcccagaaataagaaagttcatttctagatttaaaataaaaaaattaa

SEQ ID NO: 350527 - DNA, 292 bp, Zea mays
  unsure (1)..(292): unsure at all n locations
ctcctttcccgcttccacccttttcttctttttcaaacattatcnccttcttacagcaacttctttaacttccattattacctcttnctttctctattcctaccaccttattacatcatcccaccatttttctttccatcttctatattttattattcttcttactctaataataaaattctcatactttttttttcatcttttcatttacaaattattatatatctatattttaatttcatttcctatttataaattcttcattttttatatttttttttcctttccttat

SEQ ID NO: 350528 - DNA, 258 bp, Zea mays
  unsure (1)..(258): unsure at all n locations
accccnccgcaattccccctatctctcatctttatcttcatcaacatataatctacatcagacaggtttcctaatataccgagaaagacttctcttcatcttccattcttacttctcatttttattaataactcataatttacccctattcatagtcttatattccaatacataataccctcacaccttattttcctacttattttataacaccctattatcatcttacatatttcatctacctgtccatttaatttt

SEQ ID NO: 350529 - DNA, 334 bp, Zea mays
tcttcttttcaagtggtggtgaagatggatatggaaggctgcatcattttgagtgtgactactttagcatcaaaatgtagataaagaacagacaaatcagaggctgtttgattaccaaccggctcagactcttggttcagatgttagatgcagctggcagggcatagcacatagagagcacagctagaccctaaagctgtagccgtggttgatcgaacatgctgctatggataagcagcttatctacatgctgaagctatagtggcacacttgaaaatgaagcagccttacatactgatctgcacctccacttgaaaagccggacgcgtgggtc

SEQ ID NO: 350530 - DNA, 194 bp, Zea mays
  unsure (1)..(194): unsure at all n locations
tagggaaagcttcacgcctgcaagtacctgnccgcctttcccttgtccacccattctttcttcctcaagccaaaaccctatcaggaagacctcttaaacaaaggaggagacccctnctcttccacttcatactactattacatctaaattcacattatctattcttattaacctccacaaccttttattttttt

SEQ ID NO: 350531 - DNA, 323 bp, Zea mays
  unsure (1)..(323): unsure at all n locations
agggaaagcttgcaggccggcaggtaccgnncctcctttccctcttccaccctttcttttttagagattgaanaangaaagcagaaagaattttttaatatgaagacagaacnatanccttctcatacttaaacatatataggatcattcctataccaccttgatgatagacagttggcaatttctcttttttattttcctttaattatccaaatccgtttctgatttccctattattaattccacaaatttaatcatcacccttcttttattaaaactttttaaacgccctacatcttttcatttttctccacctactctca

SEQ ID NO: 350532 - DNA, 389 bp, Zea mays
tttcttagagagagaggccaggaaggagggtgagagcacgggggcttgttcgaagatcgatgcctgagcatatgcggtgacgaacgccgtgacctgggcttcacaggtcacgctccttgaatataaaccggtgttttccatattgaaaacctagaccagtgttaccctacacagtgcttgccaaatgggcgaaaggcatgcaattacacacgaacaaccacactataagcgcatgatacatcaacgaccatgtccgacaacgacagttaggagcgtttcagttcagagaggacagagagagacagtgcattatcattgccagggacctacgaggcggtcacctttttggtcgacttggcggcggcggtcttcttgggtgacttcttttc

SEQ ID NO: 350533 - DNA, 440 bp, Zea mays
ccttcaggtaccgcccctcatttccagagtccaccctctcttctttttaactgttaattcatcaaaggatgggtttcttataacctaaagaggccctcccctctttcgacatacatactttcccttcatattataaccaatacatcaacataatctttctattcaatctaaactcttattctttccttactaatctccattagaattactgttattatttgctttacattatcaatatcacctactttttcattttcacccaccattaacaagattacactctgtaattctagaatactttacttaacaaagttagaatgttttttctcttttaaacatatccactccaatctttatattatataccatttcttttttttcttaatatatactattcacaaaatataaataatattcattattcttccatttattaaatt

SEQ ID NO: 350534 - DNA, 383 bp, Zea mays
agaggctaattccctttatgagacggacaaggcaacccaagaggtgatcaatgcaattgctgaagcacagacttagcagtctgggctcgctgtgaataagatctgcattggacccaacatgccaactatcaagctagatagatctgtaggcctacctgagctcagatgcccggggagaactgtcatgaagctagcatggcaatacagtctgagtgagccaccaccaccgacagatgcagacagctcatagaggatgtgtgtcgactacttaaaccgtgaactgggagcacgataatgttcattcgcccgcgtagcatgaacactatgtagcatgtggttaactttggcgtattgtttatggaagacacctataaaaacacatg

SEQ ID NO: 350535 - DNA, 239 bp, Zea mays
tctttctctagatccatcatgcatccttaggcaggaattcgacgctgtacaaggagtctagtcagaccgaaagtgactgcacgtgccgatatcttacaccagctgtaccagaaactccaaaccctaccccatgtgtactgacatgtagcaatagcgagcttcgccaggccgactgatatcgaactggaccgctccattgcgtgaatccgacatgctgcgcatctatttaaaaaaaagaa

SEQ ID NO: 350536 - DNA, 426 bp, Zea mays
gaaagcagcaccccggcctcacctcccctccacccccgcatccaccctctcctcctttttttaaacccaaaactaaaaaaaaagaatccttcaaaaaaaaaaaaaagaccccaacccctcccaaaaaaaaacacaataacaaacacccacactaaaacacatacaacaataagtccccccccccccacataccccaaatttccccccccctccatccaccccattaccctctctatatccccccctaatccaaatcccctcaccctccattcacccccttctctcctaaaaaacccccccctccccccaccttatcacccccccatcccatccccctcttcccaactcctcatttccccctaaaaaaccccccccattcctccttcctaacatttcctcccccctattcccacttaaacccccccc

SEQ ID NO: 350537 - DNA, 83 bp, Zea mays
agccttccgtgctttccaagaattaaaaaagtacatttttttttttaaaaaaaaaaaaaaaaaaaaaaaaaagggggatattt

SEQ ID NO: 350538 - DNA, 78 bp, Zea mays
gaaaaacgggccgacccacgcgtacagtaattcaggaaaccgaaaacgaaccttatattcccaacaacaacagacaaa

SEQ ID NO: 350539 - DNA, 188 bp, Zea mays
  unsure (1)..(188): unsure at all n locations
aaaaaaaaaaaaaaaaaaaatntttnngctnntttagtttttaaattaaccaaacaaaaacccgcaccgcttttttaaaaaatatttctcacccccccaaaaatagggcccgccgtttaataggatccaaccaacctaccccctgaattcaactttaaaatccttaaatatttaaacccaataacaat

SEQ ID NO: 350540 - DNA, 455 bp, Zea mays
  unsure (1)..(455): unsure at all n locations
ccgggncggcccaacccgtccggcaaaccgcactagcaacaacctaacaacatttgctaccaagatattatccctccttgcgctggttgcgctttttgcgagcgcaacaaatgcgtccattattccacaatgctcacttgctcctagttccattattccacagttcctcccaccagttacttcaatggccttcgaacacccagctgtgcaagcctataggctacaacaagcgattgcggcgagcgtcttacaacaaccaattgcccaattgcaacaacaatccttggcacatctaacaatacaaaccatcgcaacgcaacagcaacaacagttcctaccagcactgagccacctagccatggtgaaccctgtcgcctacttgcaacagcagctgcttgcatccaacccacttgctctagcaaacgtagttgcaaaccagcaacaacaaccacttg

SEQ ID NO: 350541 - DNA, 184 bp, Zea mays
ggaaaaccggccgacccacgcgtcgacaatctacaacaggtcaaccaatattgtttggcaacacacaaccaggggggatgttttctcaacatgctactcaaaagcgttgcaatctgacagacacaataccacataatgtcggttgaccactcatactccaaataatccatgcacacaatgacat

SEQ ID NO: 350542 - DNA, 438 bp, Zea mays
tagcaacatagaaagcacaatagtgtaccaacaatggcagccaaaatattttgcctccttatgctccttggtctttctgcaagtgctgctacggcgaccattttcccgcaatgctcgcaagctcctatagcttcccttcttcccccgtacctctcaccagcggtgtcttcggtatgtgaaaacccaattcttcaaccctacaggatccaacaggcaatcgcagctggcatcttacctttatcacccttgttcctccaacaatcatcagccctattacaacagttacctttggtgcatttattggcacaaaacatcagggcacaacaactacaacaacttgtgctagcaaaccttgctgcctactctcagcaacagcagtttcttccattcaaccaactaggttcattgaactctgcttcttatttgcaacaacaacaa

SEQ ID NO: 350543 - DNA, 125 bp, Zea mays
tagatttcttatgagttatagttcaattaataagttttttgtctgatgtttgtggctgagggaatatttaaaaaaatattttcaaaaaaaaaaaaaaaaaaaaaaaaaaaaaattaaaaaaatag

SEQ ID NO: 350544 - DNA, 250 bp, Zea mays
gggccccaacgcgcgcgccatggagcgttcctaggttgggctgcaggtggcgaggaacgggaaggacttttcgttctatctccacctcaattaactacttacatttggtaaatttatattaaattaattatttacttaataaattaactaaatatcttaataacataattaattaattcatttattaaaaaatattaacatattttctatattctaatttatataactatatattcactttatttatatt

SEQ ID NO: 350545 - DNA, 393 bp, Zea mays
  unsure (1)..(393): unsure at all n locations
naaaaaaaaaaaaaaaaaataaaaaaaaaattttattttataaaaaaaaaaaaaaaaaaaaaagagagagaataaaaaaaaaataaaaaaaaaaaaaaaaaaaaaaaaaaaaaaaaaaaaaaaaaaaaaaaaaaaaaaaaaaaaaaaaaaatattttaaaaaaaaaaaaaaaaaaatggggggggccctttttgggggaccaatttttttcccctgttttttgggagtatttttttttttttttggggccctaaaataaaaatctggggcggtttttttaaactttgggggtgggaaaccccttgttttccccatttttatgtttgtgtaaaaaatttcttttttttcggggttgggtatttataaaagggcccccctcctttttttttttaa

SEQ ID NO: 350546 - DNA, 86 bp, Zea mays
  unsure (1)..(86): unsure at all n locations
ccaccggggaggatcttcgacgccnnctaggcgatggaggaggacgattcatccggcggtgctagcatggacatcgtctccacagc

SEQ ID NO: 350547 - DNA, 157 bp, Zea mays
acgagcccagactgccaactgcgaccgatagtaatctctatccggaccccgtccgggttggttggtgtttgaactacttttttcgcctccgcaaaagcttcttccctaccgaaagatacctattgttcggtgccaccaactagccaatattgggagg

SEQ ID NO: 350548 - DNA, 323 bp, Zea mays
gaaaaacgggccgggccacgcgtacggatctagatcgcgagcggccgcccttttaatattttttgcctcgaaatgtgatcacgtgggagttttttagaagatttattcaacctcgcacactcaaatctccgaattcattttacacacgttttgaatgcaatttaacaaggacattccccttgcttttccaaactcacactcactcaaatttcttcatcgttcttgtctttaaatgggtctttattcatgtagtcgcctacctttacttattctggccttacaattgccctatgacctttgatgtcactcaaattagctaatgc

SEQ ID NO: 350549 - DNA, 262 bp, Zea mays
ttttcttcctccaaaccacgtgctagcctttgtggggtttaagctaaacttaattaactggccgtccgctcacaccaacacgactgcgaaaaccacgtccttgccgaccgtaattctctagatggacatgctgctgtcggccgctcccgcaataccgaacaagctcgtgcccaccgcccttcgcaacagctgctcaatctgcatacccttttacacgggccctgtactggggctttaagcgctctagtttcattggctcttt

SEQ ID NO: 350550 - DNA, 51 bp, Zea mays
aaaaaaaaaaaaaaaaaaaaaaaaaaaaaaaatttttaaaaaaaaaaaaag

SEQ ID NO: 350551 - DNA, 114 bp, Zea mays
tggacgtcccttgttgctttgtattaatatttttgattgttttttttacattcttattggtggggttgttacttccttttttctttattttttattttttttacttattttttt

SEQ ID NO: 350552 - DNA, 88 bp, Zea mays
aaaaaaaaaaaaaaaaaaaaaaaaaaaattaataatttaaaaaaaaaaaaaaaaaaaaaaggggggaatatttaaaagggtcgttcct

SEQ ID NO: 350553 - DNA, 304 bp, Zea mays
aaaagatataaaaaaaaaaaaataaaaaaataaaaaaaaaaaaaaaaaaaaaaaaaaaaaaaaaaaataataaaaaaaaaaaataaaaaaaaaaataaaaagaaaaaaaaaaaaaaaaaaaaaaaaaaaaaaaaaaaaaaaaaaagaaaaaaaaaaaaagaaagaaagaatgaaaaaaaaaaaaataaaaaaaaaaaaattaaaaaaaaaaaaaaaaaaagaaagaaggaggaaagaaaaaaaaaaaaaaaaaataaaaataaataataaaaaataaaaaaaaaaaaaaagaaaaataagaatt

SEQ ID NO: 350554 - DNA, 169 bp, Zea mays
tcgaacaattgctgccattcaaccaacttgctttgacaaacccaacagcattctaccaacaacccatcattggtggtgccctcttttagatttcttatgagttatagttcaataataaagttttttgtctgatgtttgtggcttcccagaaataagaaagtacatttct

SEQ ID NO: 350555 - DNA, 92 bp, Zea mays
cacgcgtccaatcgatcaccacatacaacaccacccttttttttctacgccacacccaatcatttgaattgatgaacttactgtcattcatt

SEQ ID NO: 350556 - DNA, 446 bp, Zea mays
gaccaactagcaacatagaaagcacaatattgtaccaataatggcagccaaaatattttgcctcattatgctccttggtctttctgcaagtgctgctacggcgagcattttcccgcaatgctcacaagctcctatagcttcccttcttcccccatacctctcaccagcgatgtcttcagtatgtgaaaatccaattcttctaccctacaggatccaacaggcaatcgcagcaggcatcttacctttatcacccttgttcctccaacaatcatcagccctattacagcagttacctttggtgcatttattggcacaaaacatcagggcacaacaactacaacaactcgtgctagcaaaccttgctgcctactctcagcaacagcagttacctttggtgcatttgttggcacaaaacatcagggcacaacaactacaacaactcgtgc

SEQ ID NO: 350557 - DNA, 263 bp, Zea mays
  unsure (1)..(263): unsure at all n locations
cgagcagatggggctggcaaaancatttttttttgccgccaacacaacgaaccgggatagaccgttcttttttctctaacaacacacccacttcctcctaacccctacaccacctttaacctacggatggaagaaaataaagaaatcccgttggatcacttctttttcatcgaccatattcatactcgagccaaacttattatgcgttccacactagaactagaaccctctctactgctttactactctacgccccattcctc

SEQ ID NO: 350558 - DNA, 325 bp, Zea mays
attcagaaacacaccaagcgaagcgcactatctacgacctaacaacaatggctaccaagatattagccctccttgcgcttcttgccctttttgtgagcgcaacaaatgcgttcattattccacaatgctcacttgctcctagtgccattattccacagttcctcccaccagttacttcaatgggcttcgaacacctagctgtgcaagccaacatgcaacaacaagcgcttgcggcgagcgtcttacaacaaccaattgcccaattgcaacaacaattcttgccacatctaacaatacaagccattacaacgcaacagcaacaaca

SEQ ID NO: 350559 - DNA, 70 bp, Zea mays
  unsure (1)..(70): unsure at all n locations
cgcccacgcgtncgatctgttctatnggatcgtaccgntgcatcttttattaataaggaggcaagcactt

SEQ ID NO: 350560 - DNA, 433 bp, Zea mays
caacaagcaacatagaaagtggaatacagtatcaacaatagagcaacaatggcggccaagatattttccatccttatgctccttgctctttctgcatgtgttgctaacgcgaccatttttcctcaatactcacaagctcctatagctgcccttcttcccccataccttccatcaatgaccgcttcagtatgtgaaaacccagcccttcaaccctacaggctccaacaagcaatcgcaacaagcaacttacctttatcacccctgttctttcaacaatcgccagccctatctttggtgcagtcattggtacaaaccatcagggcacaacagctgcagcaactcgtgctaccagtgatcagccaagtagctctggcaaacctttctccctactctcagcaacaacaatttcttccattcaaccaactgtctacac

SEQ ID NO: 350561 - DNA, 270 bp, Zea mays
gacccatcgtcctcgtactcttgttgtttgttgcttcccatattttagaaagtacatttctagattcttggggaaaaattttaaaaatttaaaaaaaaataaatgaaaaataaaatataaattaataaaaaaaataaataaaaaaaaaataccctaaaaaaataataaataaaaataaaaaaaaataaaaaaaatatatataatgtgctctcttctttttaattataaattttattattactttccattcaatttaatattttttatttt

SEQ ID NO: 350562 - DNA, 238 bp, Zea mays
ccttcctttagatcgcaagcggccaccctttttattttttttttaaatgaccagaatgaacaattgagaggaaattaaaaaagtatttttccaaaaaaaaaaaaataaaaatataataaaaattattaaaataaataatataaaaaaaaataatataaaaaaaaaataattaataaaaaaaaaaaaaaataatatttttaaaaaaaataaatggtcggtcctataaaaatatccaaaa

SEQ ID NO: 350563 - DNA, 315 bp, Zea mays
tgaactctcctgcttatttacagcagcttcttctactaccattcagccagctagctggggtgagccctgctaccttcttgacacaaccacagttgttgccgttctaccagcacgctgcgcctaacgctggcaccctcttacaactgcaacaattgctgccattcaaccaacttgctttgacaaacctagcagtgttctaccaacaacccatcattggtggtgccctcttttagatttcttatgagttatagttcaataataaagttttttgtctgatgtttgtggcttcccagaaataagaaagtacatttctag

SEQ ID NO: 350564 - DNA, 397 bp, Zea mays
gttgcaaataagaacaactaccattcagccttctatctgctgcctacccccagcaatgtcttccattcaaccaactgacagcattgaactctcctgcttatttacagcagcaacaactactaccattcagccagctagctggtgtgagccctgctaccttcttgacacaaccacagttgttgccgttctacctgcacgctgcgcctaacgctggcaccctcttacaactgcaacaattgctgccattcaaccaacttgctttgacaaacccagcagcattctaccaacaacccatcattggtggtgccctcttttagatttattatgagttatagttcaataataaagttttttgtctgatgtttgtggcttcccagaaataagaaagtacatttct

SEQ ID NO: 350565 - DNA, 64 bp, Zea mays
  unsure (1)..(64): unsure at all n locations
tttttctgtacgcgtgtcatgcgtacgtcatagtcgggtggatagtgttcacctaatattcaan

SEQ ID NO: 350566 - DNA, 313 bp, Zea mays
attgagaccaacaagcaacatagaaagtggaatccagtagcaacaatagagcaacaatggagaccaagatattttccctccttatgctccttgctctttctacatgtgttgctaacgcgacaattttccctcaatgctcacaagctcctatagcttccctttttcccccataccttccatcaattatagcttcagtatgtgaaaacccagctcttcaaccatataggcttcaacaagcaatcgcagcaagcaacatacctttatcgcccttgttgtgtcaacaatcgccagccctatctttggtgcagtcatt

SEQ ID NO: 350567 - DNA, 176 bp, Zea mays
gcggccgcccttttttttttttttctttatttttttttctttttttttttttttttttttttttttttttggggggaatttctttttttttgaactatacctcataaaaaatttaaaagagggccccccctattttgggtttttgttaaaacactttttgttttttaaaaacaagt

SEQ ID NO: 350568 - DNA, 441 bp, Zea mays
  unsure (1)..(441): unsure at all n locations
gcgtccnnaccaactagcaacatataaagcacaatagtttatccaacaatggcagccaaaatattttggggggttatgctccttggtctttctgcaagtgctgctaccgcaaccattttcccacaatgctcacaagctcctatagcttcctttcttcccccatacctctcaccagcggtgtcttcagtatgtgaaaacccaattcttcaaccctacaggatccaacaggcaatcgcagcaggcatcttacctttatcacccttgttcctccaacaaccgtcagccctattacagcagttacctttggtgcatgtgttggcacaaaacatctaggcacaacaactacaacaacttgtgctaggaaaccttgctgcctactctcagcaacagcagtttctttcattcaaccaactggcttgattgaaccttgctggttatttg

SEQ ID NO: 350569 - DNA, 411 bp, Zea mays
cgcccctgtctctccccgccgccaccctgtctctctggcgccgtagagcacggcgctggcccgtgggttccctcccccggccggacctcggaagtatgtctcgggccatcgaatcgacaatgaggcaatctcggcagtttgtgaatctgatcatgaccaatctttacaacggcgccaagtccctgcacttcgtggacctgaagcggcagccactatttaagacaccactgccacctacggcatctacagacggagacagatttgaaacacaagacgctttctctcagacacagccaactgaatccttggtgttggagagacttcgcctttcccgttcgagctttcaattcgaaactttcacttgacaagatcgcagctggtacattaactgcttaccgatttccgatcgcg

SEQ ID NO: 350570 - DNA, 347 bp, Zea mays
ccacgcgtccgaaaaaaaaaaaaaaaaaaaatgaaaaaaaattttttataaaaaaaaaaaaaaaaaaaaaaaaaagaggaaatatttaaaattatataaaaaaacaaaataaaaatctttttcataaaaaaaaaaaaaaaaaaaaaaaaaataaaatataattaaaaaaaataaaaaaataatataaaaaataataaaaaaaaaaatagggggggcccttttttaggttaccaatttttcttcccctttcttggtaataatattttttttttttggtgccccaaattatattttctcccccctcttttaaacacctttttttttgaaaaacctggggctcccccaat

SEQ ID NO: 350571 - DNA, 93 bp, Zea mays
  unsure (1)..(93): unsure at all n locations
tggaaaacccgaccgacgcgtccgnaaaaaaaaatataataaataaaataaaaaattttatttataaaaaaaaaaaaaataaattgggggggg

SEQ ID NO: 350572 - DNA, 220 bp, Zea mays
  unsure (1)..(220): unsure at all n locations
ccgtcccgcgcgtncgttcttacaactgcaacatttgctgccatttttttttcttgctttgacaaacccagcagcgtgctggctacatcccatcattggtggtgccctcttttagatttcttatgagttatagttcaataataaagatttttgtctgatgtttgtggcttcccagaaataataaagtacatttctaataaaaatattagttaatataata

SEQ ID NO: 350573 - DNA, 239 bp, Zea mays
  unsure (1)..(239): unsure at all n locations
agggccgaccggngcgcgcgagaacagcgcgaggccgcatgccccgattttttttcccgcggcgatcgggccgctaatacgcgagctttttaagatcctcgccgacacccccagcgaaaaccccgccatgatcaagttctcccgcaagaaccccaggcccacctgcaacggcccgtatccctacacccccttcattttaagcgccgacacggaagaaccacccgaacatctttgtcctt

SEQ ID NO: 350574 - DNA, 264 bp, Zea mays
tctgggacccaggggcccgagccgcccacgcgactttttagctcttttatggtgaaaaaggagtttatcataaggttcttataaagtcatcattgtgagtggatacattatctattctcataccttcatcacttagcaatataaaatcccgtatgaagatcacttatttctttcctttaagccaaggttgagatttgcccgtccaatttgcatttacatacctgggttacccttactcagttttcgctttaaaaaagacttgtg

SEQ ID NO: 350575 - DNA, 147 bp, Zea mays
gctggagcatgcgacgtcatggctgtactatagtgtcagctgaatcaaattcaatattacatatgatgacaaactcgataattgtgaaaactatacccgcttgtgtactctataaataatcaatactattggccgatattcatctgg

SEQ ID NO: 350576 - DNA, 132 bp, Zea mays
cacctacacgcttaactagacttgcatctggatccgctcattaacgcgcagacctgacggggaaggaaggatcttgagcgcttctgtttccagccggcctaagcctgttcagagttgctttgtaccaaactt

SEQ ID NO: 350577 - DNA, 357 bp, Zea mays
caacaagcaacatagaaagtggaatacagtagcaacaatagagcaacaatggcggccaagatattttccatccttatgctccttgctctttctgcatgtgttgctaacgcgaccatttttcctcaatactcacaagctcctatagctgcccttcttcccccataccttccatcaatgaccgcttcagtatgtgaaaacccagcccttcaaccctacaggctccaacaagcaatcgcaacaagcaacttacctttatcacccctgttctttcaacaatcgccagccctatctttggtgcagtcattggtacaaaccatcaaggcacaacagctgcagcaactcgtgctaccagtgatc

SEQ ID NO: 350578 - DNA, 315 bp, Zea mays
tgaactctcctgcttatttacagcagcaacaactactaccattcagccagctagctggtgtgagccctgctaccttcttgacacaaccacagttgttgccgttctaccagcacgctgcgcctaacgctggcaccctcttacaactgcaacaattgctgccattcaaccaacttgctttgacaaacctagcagtgttctaccaacaacccatcattggtggtgccctcttttagatttcttatgagttatagttcaataataaagttttttgtctgatgtttgtggcttcccagaaataagaaagtacatttctag

SEQ ID NO: 350579 - DNA, 384 bp, Zea mays
gttgcaaataagaacaactaccattcagccagctatctgctgcctacccccagcaatttcttccattcaaccaactgacagcattgaactctcctgcttatttacagcagcaacaactactaccattcagccagctagctggtgtgagccctgctaccttcttgacacaaccacagttgttgccgttctacctgcacgctgcgcctaacgctggcaccctcttacaactgcaacaattgctgccattcaaccaacttgctttgacaaacccagcagcattctaccaacaacccatcattggtggtgccctcttttagatttattatgagttatagttcaataataaagttttttgtctgatgtttgtggcttcccagaaataag

SEQ ID NO: 350580 - DNA, 65 bp, Zea mays
gtatatccctttttaaccagtgggcatactaaatgataagtgggacacgctctgtcttggcaaaa

SEQ ID NO: 350581 - DNA, 379 bp, Zea mays
tcgaacacaccaagcgaagctcactagcaacgacctaacaacaatggctaccaagatattagccctccttgcgcttcttgccctttttgtgagcgcaacaaatgcgttcattattccacaatgctcacttgctcctagtgccattattccacagttcctcccaccagttacttcaatgggcttcgaacacctagctgtgcaagcctacatgctacaacaagcgcttgcggcgagcgtcttacaacaaccaattgaccaattgcaacaacaatccttggcacatctaaccatacaaaccatcgcaacgcaacagcaacaacagttcctaccagcactgagccaactagctgtggtgaaccctatcgcctacttgcaatag

SEQ ID NO: 350582 - DNA, 202 bp, Zea mays
ttttgttgaaaaaagcttaaggggatacaagcaaactatacgcaagcaatgctatatcattcctaataaaataatgttaccataaaaaaaaatcaatgatcggggggttcacatctggagggactagggttacgaccgctttcacctcaacttaatagcttttgtatagtagtcaccttattttaatttattgtcatagcta

SEQ ID NO: 350583 - DNA, 383 bp, Zea mays
attgagaccaacaagcaacatagaaagtggaatccagtagcaacaatagagcaacaatggagaccaagatattttccctccttatgctccttgctctttctacatgtgttgctaacgcgacaattttccctcaatgctcacaagctcctatagcttccctttttcccccataccttccatcaattatagcttcagtatgtgaaaacccagctcttcaaccatataggcttcaacaagcaatcgcagcaagcaacatacctttatcgcccttgttgtgtcaacaatcgccagccctatctttggtgcagtcattggtacaaaccatcagggcacaacagctgcagcaactcgtgctacctgtgatcaaccaagtagctctggca

SEQ ID NO: 350584 - DNA, 388 bp, Zea mays
tcggaccaacttgcaacatagaaagcacaatagtgtaccaacaatggcagccaaaatattttgcttccttatgctccttggtctttctgcaagtgctgctaccgcaaccattttcccacaatgctcacaagctcctatagctttctttcttcccccatacctctcaccagcggtgtcttcagtatgtgaaaacccaattcttcaaccctacaggatccaacaggcaatcgcagcaggcatcttacctttatcacccttgttccttcaacaaccgtcagccctattacagcagttacctttggtgcatttgttggcacaaaacatcaaggcacaacaactacaacaacttgtgctaggaaaccttgctgactactctcagcaacagcag

SEQ ID NO: 350585 - DNA, 404 bp, Zea mays
tcgtaaaaaaaaaaaaaaaaaaaggaaaaaaaaaaaaataaaaaaaaaaaaaaaaaaaaaaaaaaaaaaaaaaaaaaaaaaaaataaaaaaaaaaaaaaaattaaaaatttttgaataaaaaaaaataaaaaataaaataaattaaaactggttaaaataaaatgtaaaaaatttttaaaaaaaaataaaataaaaaaagggggggggctttttaaagaaaaaaatttttcttacctttttttgtaaaaaaatttttttttttttggggacaaaaaaataaattacgggcgcgggtttttaaaaactgggtttttggaaaaacggggggttcccaaatttaatttttttagaaaaaaatctttttttgcaagttgggtataaaaaaaaaagccccccccctttt

SEQ ID NO: 350586 - DNA, 276 bp, Zea mays
tcgcggaccaccacgcggatgggctcttgcgacccttttccgacccccttgctttcttcctccgccaccctggcgcgttcttcttctccctttgcgtttccatggctcgcgacgccaccgccacattcttgccagcgctcctgttctggcttgttgaccttcttccgctcctcgttttacttctttttgacgtccacgtactctctctcttgtactggatttacatgttcgccacggactgtttcaggcagtccttgcttagcatgaattattaat

SEQ ID NO: 350587 - DNA, 251 bp, Zea mays
gaaaaagaaatgaccgggacagatacaagaacgaccggggggggaaaaaccgagcaccacgaaagtaaaggagcccgcaaagaggcagagtgtcaccagcaggggacaggaggaggaggcgaagcgcaacacgcagtcccgaccacagaggaaggagaggggggaacaacacgagccctgtacggagccgaacacccccgggcaggaaaagggcaaccagcgatggggcacggacagataccaggagccaa

SEQ ID NO: 350588 - DNA, 232 bp, Zea mays
tcggtcgcagcctttatattgttcagttcttagaaggtccaaaaaggcacgcagcgctctatatatatctcagctatacgtacgcgaccattgcgaacgcttatgttgcgtaagaatgtaggcaagaatagatggacgtgcggggtagcacaacacgcctaaactgagaaaacaggtccctaacataacccaatggaagatcaacacgtttgaccctggcttgaacgagggc

SEQ ID NO: 350589 - DNA, 373 bp, Zea mays
ttgtaggggagttttctagcacattcaagatggggcgctcgggactgcgagacaagctctacgctatagggacaattaaaggctacaaaatgtccaagtggaaacaacgcgagagactgtgaaatctttagatcgacggggttgacaccaatgttggacacatcgtggtacgatgagttgcgcatagagaacatatacacggttaagacgaatagcagaacgactcggtacaggtgcatctgaagtaagggcactctgtagcacggtaacttagaccgtggatcgtcgaagttcaagtctaaactaccgcctgagtacatggggcgcatagggagagtgcttatgtacttcagcaggatttaaaggtaagttt

SEQ ID NO: 350590 - DNA, 219 bp, Zea mays
ggcgcgctcgagaacagcgcgaggccgcaggccgcgatcagcaggccggcggcgatcgggccgcgaatgccgaagcgcatcacgatccgcgccgacagcccgagcgagaacgcggccatgatcaggttcgccggcaggaacgcgaggccgacctgcagcggcccgtagccgagcacgcgctgcatgtagagcgcggacaggaagaaccacgcgaacatc

SEQ ID NO: 350591 - DNA, 399 bp, Zea mays
  unsure (1)..(399): unsure at all n locations
gggccgacccacgcgnacgaacgaaccccgccgagtacatacaaccacattttttttaacaaaaaggacagaacaaagggggggggttgaaactaacttttgaactatccccacggcactaacagacatttactctaacaactttaaactctccatatacatgaggataaagacggtagtagcatcactttcacttacactatcacaaaaacccttatcattcgcacccatgatttaatccgaaacttattgtgaaatgaagtttcgttcttatatagtccatcacactgatttattcaattcacgtcttacatttatcttccgttgcttgccaattaataatactccagatgtattcgttcattaaaaaaaaaaaaaaaaattgctgccgttttatat

SEQ ID NO: 350592 - DNA, 440 bp, Zea mays
aaaaaaaaaaaaaaaaaaaaaaaaaaaaaatttaatttaaaaaaaaaaaaaaaaaaaaaaaaaaaggggaaaaataaaaaaaaatttaaaaaaaaaaaaaaaaaaaaggaaaaaaaaaaaaaaaaaaaaaaaaaaaaaaaaaaaaaaaaaaaaaaaggggggggcctttttaggggtccaaatttttcatcccggggattggaaggtaaaacttttttttttggggaacaaaaattaattcactgggccggggtttaaaaacggggggctgggaaaaaccgtgggtttacaaaattaaatggcttggaaaaaattccctttttaaaaggtggggaaaataaaaaaagggccggacccattttctttttaaaaaatttgcccaccttaattggaaattggacccccccttttaccggcattttaaaccgggggggggtggg

SEQ ID NO: 350593 - DNA, 221 bp, Zea mays
aaaaaaaaaaaaaaaaaaaaaaaaaaatttataataaaaaaaaaaaaaaaaaaaaaaaagggggggatatattaaaaaaaattttaaaaaaaaaaaaaaaaaaaaattaaaaaaaaaaaaaaaaagggggcgcccctttaagggttccaatttttcctccccgtccttttcacctaatatttttttttatgggtcccccaaattaaatttcccgtcccgct

SEQ ID NO: 350594 - DNA, 454 bp, Zea mays
attgagaccaactagcaacatagaaagcacaatagtgtaccaacaatggcagccaaaatattttgcctccttatgctccttggtctttctgcaagtgctgctacggcgaccattttcccgcaatgctcgcaagctcctatagcttcccttcttcccccgtacctctcaccagcggtgtcttcggtatgtgaaaacccaattcttcaaccctacaggatccaacaggcaatcgcagctggcatcttacctttatcacccttgttcctccaacaatcatcagccctattacaacagttacctttggtgcatttattggcacaaaacatcagggcacaacaactacaacaacttgtgctagcaaaccttgctgcctactctcagcaacagcagtttcttccattcaaccaactaggttcattgaactctgcttcttatttgcaacaacaacaactac

SEQ ID NO: 350595 - DNA, 448 bp, Zea mays
agaccaactagcaacatagaaagcacttttgtttaccaacaatggcagccaaaatatggggcgcttcttatgctccttggtctttctgcaagtgctgctacggcgaccattttcccgcaatgctcgcaagctcctatagcttcccttcttcccccgtacctctcaccagcggtgtcttcggtatgtgaaaacccaattcttcaaccctacaggatccaacaggcaatcgcagctggcatcttacctttatcacccttgttcctccaacaatcatcagccctattacaacagttaccttgggtgcatttattggcacaaaacatcagggcacaacaactacaacaacttgtgctagcaaaccttgctgcctactctcagcaacagcagtttttttcattcaaccaactaggttcattgaactctgcttcttatttgcaacaacaacaac

SEQ ID NO: 350596 - DNA, 439 bp, Zea mays
  unsure (1)..(439): unsure at all n locations
cccgtccgaaaaaaagtggaaaataanannaaaaaaanntcgtagaggaggttctgattgggggcagttgggctgagacccgagccggcgcccnnttccggcgctcgactaagctctgggaccccctaccttccgctncggcgggcgatgtgggcaatnctcgcagtgcttcnngccggcgtcccgccctccanngtctcccgnncttcgtcaatggcccctcgaggggggccttcctnncgaagcangnngagcttggaccggccnnntccgcgagccctattcnngcctcccttcgcangcngcangnntcgcggaccccggcggcccgcttcttagagtggatccannagcttaccgtacccgcgttgcattgcgacngnntcatagctnnncttctattagtggtcgacgctgaaattcaaaattcaactggcnc

SEQ ID NO: 350597 - DNA, 224 bp, Zea mays
tctctctctattgtgatattgtcgcccccccttttgccgcattaatagcgcctcgtgtgtgggttttccacaccgtgttaccgtcacatttgccaacccctcataacccccgctcctttccgttatttttcccttccttttctcccccactttcgccccgtttcccccacaaactactaaatataggggcctttcctttattggatccctaattaattgcttta

SEQ ID NO: 350598 - DNA, 228 bp, Zea mays
  unsure (1)..(228): unsure at all n locations
gcgnncgaaaaaaaaataaaaaaaaaaaaaaaaatttttttttaaaaaaaaaaaaaaaaaaaaaaagggggcgggtttttaaaaaaaaatttaaacaaaacaaaaaaaaaaggggcggccgtttaaaagaacccaacctaacgtacccgtccatgcaacaaaaaaactttttaatagggccaccaaaatacaatccacggcccgccttttaacaacaacattacggga

SEQ ID NO: 350599 - DNA, 288 bp, Zea mays
atcctctcccaccttactcaagctagtgcgatgcatagcaatggggttcgcccggaagagtggagttgcagcagtagggttttggtggctcctcccgctcgccggcgtgctggtgcctttggcggcagcatattgcctgcacgccgctgcttttctcccctttttcttcatctagggctcgctttttatcatcctcgccttgattgttgcattgtctttatacttttccttacctgatttctaacattcttactcggtttttcttgtttcttgatttgccttatcttt

SEQ ID NO: 350600 - DNA, 71 bp, Zea mays
aaaaaacaacaaaaaaaaaaaaaactttttataaaaacaaaaaaaaaaaagggcgtggtttttaatttttt

SEQ ID NO: 350601 - DNA, 56 bp, Zea mays
tttttcgcgtgcatgcgacgacatagcggttgtatatgtttcacctaaatttaatt

SEQ ID NO: 350602 - DNA, 456 bp, Zea mays
aaaaaaaaaaaaaaaaaaaaaaaaaaaaaattttttttttttaaaaaaaaaaaaaaaaaaaagggggggtaaattaaaaaagttttttagaaaaaaaaaaatgggggcaaaaataaaagaaattaaaattaaaattctttttttttaaataaaaaaaaaataggggggggcgttttaaaggttcccaattttctccccggttttttccccgttattttttttttttttggggcccaaaaaaaatttacctgggggggggtttaaacattttgggggggggaaaaacctgggggacccccaattaattgcttttccaaaaaatccttttttcccctgggggggaaaaagaaaaaggcccctcccgttctttttttccaaaagggggggaccttttttgggaaaagggcccccccccttttcggggcttaatagccggggggtttttgggttcccccc

SEQ ID NO: 350603 - DNA, 151 bp, Zea mays
aaaaaaaaaaaaaaaaaaaaaaaaaaaaaaaaaaaaaaaaaaaaaaaaaaaaataaaaaaaaaaatgaatataaaaataaaaaaaaaaaaaaaaaaaaaaaaaaaagaaaaaaaaaaaaaaaaaaaaaaataaaaaaaaaaagataataat

SEQ ID NO: 350604 - DNA, 317 bp, Zea mays
  unsure (1)..(317): unsure at all n locations
gaaaaangggccgaccgcnacaagacagcacccacgccagaggatccacgctttttttcccaaccaatcgacgccacaccgggcggtgtatttcaaacactttttctccccccctacgacactaactaccactccggccaccaaaatgcgctcccctcaccacctactcacagagacacactcctccatccagaaagttacagcccggatactctccatcaagaaagacagcgcccccaattcagaactccctgagctcgtcacttaaatatttttgcacctcgacacgctacaccaagtgaacaaatagatactta

SEQ ID NO: 350605 - DNA, 460 bp, Zea mays
  unsure (1)..(460): unsure at all n locations
gacccacgcgnncgcaactagcaacatagaaagcacaatagtgtttcttttatggcagccaaaatattttgcttccttatgctccttggtctttctttaagtgttgctaccgcaaccattttcccacaatgctcacaagctcctatagcttcccttcttcccccatacctctcaccagcggtgtcttcaatgtgtgaaaacccaattgttcaaccctacaggatccaacaggcaatcgcaacaggcatcttaccattatcacccttgttcctccaacaaccggcagccctattacagcagttacctttggtccatttggtggcacaaaacatcagggcacaacaactacaacaacttgtgctagcaaaccttgctgcatactctcagcaacatcagtttcttccattcaaccaactggctgcattgaactctgctgcttatttgcaacaacaattaccat

SEQ ID NO: 350606 - DNA, 442 bp, Zea mays
atttattggcacaaaacatcagggcacaacaactacaacaacttgtgctagcaaaccttgctgcctactctcagcaacagcagtttcttccattcaaccaactagctgcattgaactctgcttcttatttgcaacaacaacaactaccattcagccagctacctgctgcctacccccagcaatttcttccattcaaccaactggcagcattgaactctcctgcttatttacagcagcaacaactactaccattcagccagctagctggtgtgagccctgctaccttcttgatacaaccacagttgttgccgttctaccagcacgctgcgcctaacgctggcaccctcttacaactgcaacaattgctgccattcaaccaacttgctttgacaaacccagcagcgttctaccaacaacccatcattggtggtgccctctttta

SEQ ID NO: 350607 - DNA, 122 bp, Zea mays
  unsure (1)..(122): unsure at all n locations
cgctggcaccctctaacaactgcaacaattgttgttctncaaccaactcgctttgacaaacccggcagcatttctaccaacaacccatcattggtggngccctcttttagatttcttatgag

SEQ ID NO: 350608 - DNA, 74 bp, Zea mays
  unsure (1)..(74): unsure at all n locations
acgttttgttcgtgcacgcgacgacatagctctggggtgttgttttctaaattcatttcaccggccgnccncca

SEQ ID NO: 350609 - DNA, 213 bp, Zea mays
aaaacggccgcggccacaaacgcgacgtctaaaaacaattttttactccgcatcgacacaagcgtgcgtttttacctaatttaaccaccaccgcgattacaacgcaactggaaaacccgcgttaccaacttaatccctgcacacatccccttcccacctgctaaacgaaaggcccgaccacgccctcaacaatgccacctaatgcaatggacc

SEQ ID NO: 350610 - DNA, 341 bp, Zea mays
ttcccccgtacctctcaccagcggtgtcttcggtatgtgaaaacccaattcttcaaccctacaggatccaacaggcaatcgcagctggcatcttacctttatcacccttgttcctccaacaatcatcagccctattacagcagttacctttggtgcatttattggcacaaaacatcagggcacaacaactacaacaacttgtgctagcaaaccttgctgcctactctcaacaacagcagtttcttccattcaaccaactagctgcattgaactctcgttcttatttgcaacaacaacaactaccattcagccagctacctgttgcctacccctaagaaatt

SEQ ID NO: 350611 - DNA, 87 bp, Zea mays
aaaaaaaaaaaaaaaaaaaaaaatttgttttaaaaaaaaaaaaaaaaaagcgccggttttttctaaatatttttccccccaccccac

SEQ ID NO: 350612 - DNA, 247 bp, Zea mays
ttcgttcgctcctccttcccgcacgtcagacgtcggcacacacaatctagcgcgttcgtacgtcccaaaccaaaccatgtccgtgagagcttttttcctgacgaccgctacgctgctcctgttcgtctccgtttcacgtgcggggcatccgctcgccggcttggtggtgcccgatctggtacgtctttgacccgcacattctgtagctcggtggttggtcggtgacagagcacgtcatgctgtccat

SEQ ID NO: 350613 - DNA, 170 bp, Zea mays
ttatgcttttcgttctactcagagattgtggagcgcaatgctatcttaattggactatgacatgaatagttgatccaaggtctctgctgaagtagattattcaaggtaagaggtttctttccatgctgtcaatatacacaatggatcttattcttgatgtgtagccaatt

SEQ ID NO: 350614 - DNA, 411 bp, Zea mays
aaaaaaaaaaaaaaaaaaaaaaaaaaaaaaaaaaaaaaaaaaaaaaaaaaaaaaaaaaaaaaaaaaaaaaaaaaaaaaaaaaaaaaaaaaaaaaaaaaaaaaaaaaaaaaaaaaaaaaaaaaaaaaaaaaaaaaaaaaaaaaaaaaaaaaaaaaaaggggggggcctttttaggggtccaaatttttttttcctgtggttgcaagtatatattttttttatttgggcacaaaaataattttaatgggccggttttttaaaagggttggctgggaaaaacctgttgtttcccaaattaattgttttggaaaaaaatccctttttaacagtggggaaatattataaatgggccggtcccattcgcttttcaaaaaattttcccaccttttttggttattggcccccccctttt

SEQ ID NO: 350615 - DNA, 63 bp, Zea mays
ttcttttttatcagatcgaatttcttttcagagcacctgccacctgaagatttttttgggatt

SEQ ID NO: 350616 - DNA, 69 bp, Zea mays
aataccgactcactattagggaaaggctggtaccgcctgcaggttacctggtccggtaatttcccgggt

SEQ ID NO: 350617 - DNA, 61 bp, Zea mays
tcgattaaaaaaaaaaaaaaaaaaaaataaaaataaaataaaaataataaatattaattat

SEQ ID NO: 350618 - DNA, 393 bp, Zea mays
tcgattgagaccaactagcaacatagaaagcacaatagtgtaccaacaatggcagccaaaatattttgcctccttatgctccttggtctttctgcaagtgctgctacggcgaccattttcccgcaatgctcgcaagctcctatagcttcccttcttcccccgtacctctcaccagcggtgtcttcggtatgtgaaaacccaattcttcaaccctacaggatccaacaggcaatcgcagctggcatcttacctttatcacccttgttcctccaacaatcatcagccctattacaacagttacctttggtgcatttattggcacaaaacattaaggcacaacaactacaacaacttgtgctagcaaaccttgctgcctactctcagcaacagcag

SEQ ID NO: 350619 - DNA, 240 bp, Zea mays
aaaaaaaggaaaataaaaaaaaaatcgtagagagttcgattggcagttgctgagcccgagcgcgccctccggcgccgacaagccgggaccccacctccgccggcggcgatgggcaactcgcaggcttcgccggcgtccgcctccagctcccgcttcgtcatggcctcgagggccttcccgaagcaggagctggacggcctccgcgagctattcgcctccctcgcagcgcagtcgcggacc

SEQ ID NO: 350620 - DNA, 62 bp, Zea mays
gattcattttagggaaagctgccccgcctgcatgtaccggttccggatattccctgggttga

SEQ ID NO: 350621 - DNA, 326 bp, Zea mays
caaccaattgcccaattgcaacaacaatccttggcacatctaaacctacaaaccatcgcaacgcaacagcaacaacagtttctgccatcactgagccacctagccgtggtgaaccctgtcgcctacttgcaacagcagctacttgcatccaacccacttgctctggcgaacgtagctgcataccagcaacaacaacgtctgcaacagtttatgccagcgctcagtcaactagccatggtgaaccctgttgcctacctacaacagctacaattgctttcatctagcccgctcgctgtgggcaatgcacctacttacctacaacaaca

SEQ ID NO: 350622 - DNA, 254 bp, Zea mays
tatatataataaaaaaaaaaaaaaaaaaaaaagggggaatttataaaaaaaaaaaaaaaaaaaaataaaaaaaaaataaaaagtggtttaattatttataaatgggggtcttgtttatagtgttataatgttttaagtacttttatattaatgtttaatatttgggggggggcgtttttgggggcccctgtctttcgcccggctttgccactctttttattttttttttgtgggcccttaaaatattttcgggg

SEQ ID NO: 350623 - DNA, 52 bp, Zea mays
caacgagcaacacaaaaagcacaacagggccccaacaaaggcagccaaaaga

SEQ ID NO: 350624 - DNA, 282 bp, Zea mays
aaagaaaaaaagcacacaaaatccagaaacaaaaaacaacaaacaaacccaacacaaaaacaaaaaaaaaaaaaaaaaaaaaaaaaaaaaaaaaaaaaaaaaaaaaaaaaaaaaaaaacaaaaaaaaaaaaaaaaacaaaaaaaaaaaaaaaaaaaaaaaaaaaaaaacaaaaaaaaaaaaaaacaaaaaaaaaaaaaaaacaaaaaaaaaaaaaaaacaaaaaaaaaaaaaacaaacaaaaacaaaaaaaaaaaaaaaagaaaaaaaaataaaaaaaacaa

SEQ ID NO: 350625 - DNA, 363 bp, Zea mays
atttattggcacaaaacatcagggcacaacaactacaacaacttgtgctagcaaaccttgctgcctactctcagcaacagcagtttcttccattcaaccaactagctgcattgaactctgcttcttatttgcaacaacaacaactaccattcagccagctacctgctgcctacccccagcaatttcttccattcaaccaactggcagcattgaactctcctgcttatttacagcagcaacaactactaccattcagccagctagctggtgtgagccctgctacctttttgatacaaccacagttgttgtcgttctaccagcacgctgcgcctaacgctggcacccttttacaactgcaacaat

SEQ ID NO: 350626 - DNA, 132 bp, Zea mays
ttcggtctagacccatccggcctggttgaggttaaggaggagactagactggtggtggacggtattgcagacgagtggtgaggacgcgcacgctatttcttgtctcactatcatagccgtggtgagcgatct

SEQ ID NO: 350627 - DNA, 101 bp, Zea mays
ctctaataccgactcactatatgggaaaggctggtatcgacctgcagtgtacccgtgtccgtgatattcctcgggtacgaccgtgtctcatctatgtcggc

SEQ ID NO: 350628 - DNA, 70 bp, Zea mays
aaaaaaaaaaaatataaaaaaaaaaaaaaatttttattaaaaaaaaaaaaaaaaaaaaaaaggggagggt

SEQ ID NO: 350629 - DNA, 446 bp, Zea mays
aagcaacatagaaagtggaatccatttgcatcaatagagcaacaatggcgaccaagataggttccctccttatgctccttgctctttctgcatgtgttgctaacgcgacaattttccctcaatgctcacaagctcctatagcttcccttcttcccccataccttccatcaatgatagcttcagtatgtgaaaacccagctcttcaaccctataggctccaacaagcaatcgcagcaagcaacatacctttatcacccttgtttcaacaatcgccagccctatcttttgtgcagtcattggtacaaaccatcatggcacagcagctgcagcaactcgtgctacctgtgatcaaccaagtagctctggcaaacctttctccctactcttagcaacaacaatttctttcattcaaccaactgtctacattgaaccgtgctggttatttg

SEQ ID NO: 350630 - DNA, 181 bp, Zea mays
  unsure (1)..(181): unsure at all n locations
ttcaacccaccccccgccggnaaacaacggagcgacagccaaaacccaggaacaacccaacaaaatcacccagcagcacatccacactacgacaggcggcgtaaaacacaaaaggcccacacccaacgcccgccgcaacaaagccgcacccacaaagacgaatggcacgccccccaccgcg

SEQ ID NO: 350631 - DNA, 116 bp, Zea mays
aacacatcattggtggtgccctcttttagattgcttattagttgtaattcaataataaagttttttggatgatgtatgtggccaaccagaaataagaagttacatttccagattct

SEQ ID NO: 350632 - DNA, 229 bp, Zea mays
cgacccacgcttgctcggacgcgtgggtaggcgacctttttctgtgacctgtccatccaatccaacgcgggctgggagcagcagtctctcgtaagctaggatcactattccgccaccgtgccaagtagtcgtcctgtcactggcgaccattctgcaccgagccgtgtacgacgacgcccagttgaccgccgtgccgaccgtggatgcgcccaggctgttttgcgtgagc

SEQ ID NO: 350633 - DNA, 313 bp, Zea mays
aaaacccggctcgacccactcatccggtttttttttgaaaggctgatccaataatttaggagacaagattctgcgactgaggagtggttataaatatataaaaaactcaacccaatgtccataaaaattaaaaaaaatttaacttataaaaatattaatatacttaaattaaaaataaaattgtcttcacttttttataaattcaaaattttacttacaccttgattgtccactataataatttttttttatttgtgtaacttaaattaaattaatttgccacattgtttacaactttattactagcaaaaac

SEQ ID NO: 350634 - DNA, 92 bp, Zea mays
ctcactagtcgtcggccgctctagtcgatccttttttttttacgcgtgcatgctacattatagggtggctttattgtcacttaaatccaatt

SEQ ID NO: 350635 - DNA, 209 bp, Zea mays
  unsure (1)..(209): unsure at all n locations
gctgaccatcccttngcgtgggtatacaaggccgaccgatcgccttcaacagtggcagctgagcaatggaccccctgacggcattacgcggggtgtgggtacccgggccgtcactgcggcctacgccgtctttgttttcttcttttgccgtcgcggtttccgaagttaatggggtcctttaggtcgttaggttacgactgaccaaaact

SEQ ID NO: 350636 - DNA, 119 bp, Zea mays
atgcaacatcacagggcgggtatatttccacttaaattcaattcactgccctacaataaacaactactttacaggtaaaaccctggctatacccaacttaattgcatttcatcacattc

SEQ ID NO: 350637 - DNA, 429 bp, Zea mays
  unsure (1)..(429): unsure at all n locations
tgcaaattcccccttagttgcctcctccgtcttcgctccctccgcagcgtcagatcggccgtcgctcgccgagccctagcgccgccgatcgcagcccgtaccagtcttgcagatcggggtcgcgccgcggcggcaagaacgatggccgaggaggccaagtacctggagacggcgcgggccgtccgttccgngtggctcatgaagagccccccggtcgtcttccgcgcctggcatgtcttcttcgtctccgtctattactcctacgccgattactctaatcccgttgttatcaaggtttgttttttcattgtcctgctccgtctataagaactttcttgagagcgctctggtgagccctacgcttcaatttatgatggtgttggtacaaactaacattgggaatacacctaagtgctactctttgaatat

SEQ ID NO: 350638 - DNA, 229 bp, Zea mays
cgtcgacccactcggctttgtctattggcctgaaatattcagaggtgattgctgggtgctggtttcatgtctgctactttgtgctgtaaattcggccacattgaaacttgcagcgaggtctgatcgtgcggatattcctgtgcctgggctgtgttgtgaacttattttacaactgatagtatttacatctggttgactatcagaaaacacactttcatggggtacctca

SEQ ID NO: 350639 - DNA, 135 bp, Zea mays
ctcaacagtgttctaccaacaacccatcattggtggtgccctcttttagattgcttatgagttatagttcaataatgaagttttttggatgatgtttgtggcgtcccagaaataagaaagtacatttctagattc

SEQ ID NO: 350640 - DNA, 233 bp, Zea mays
aaaccgggccgcccaccttcacctaacagtctccacaccttttttttattctccccattttaaaacggccgccgggtttacttgcattcataatccccccaacacaaccactgtatctctctaatcatcacaacttttctctatttgaattctttaacttttattaacacatcttactttctataatacttaattttcttttatcatttctatcttacctacatcactcttat

SEQ ID NO: 350641 - DNA, 297 bp, Zea mays
gcagcactgggactagtcagacgttttttgtttacgtagacccataagattatggggtggggtttttcattttcttcatcggccttcaattgaggcaaagctcggtcctagcgtctaagatgcctgcgtgatgatacatggattcaaaagaattgtttgcttatctggcccactttccgcactcctttgtgcctttactcgtgtaatatactaatatgtcaggcccgtttaaacaacatttataaactacctttgaaggtcatgtagttttcaaaaaaaaaaaaaaacgtctgacgt

SEQ ID NO: 350642 - DNA, 61 bp, Zea mays
aaaaaaaaaataataaatataaatttattttaaaaaaaaaaaaataaaaaaagggggaagg

SEQ ID NO: 350643 - DNA, 421 bp, Zea mays
aagcaacatacaaagcacaatagtgtaccatcaatgtcagccaaaatattctgcttccttgggctccttggtctttctgcaagtgttgctaccgcaaccattttcccacaatgctcacaagctcctatagcttcccttcttcccccatacctctcaccagcggtgtcttcaatgtgtgaaaacccaattgttcaaccctacaggatccaacaggcaatcgcaacaggcatcttaccattatcactcttgttcctccaacaaccgtcagccctattacagcaggtacctttggtccattttgtggcacaaaacattatggcacaacaactacaacaacttgtgctagcaaaccttgttgtatactctcaacaacatcagtttctttcattcaaccaactggctgcattgaactctgctgctt

SEQ ID NO: 350644 - DNA, 318 bp, Zea mays
  unsure (1)..(318): unsure at all n locations
gcgnncggctccngctcgtctccttctacaccgcgcatttctttgtgcttccggaaccctagcgccgggtctgtgtttacagaaacttaattcactaatcccctatcgaagctgtatgaccaccttaagctcgcgcggtactacactctctagggcctctacaacacctccttcttcttcttcgacggcgccattgtccatatcaacaagcatctaactacttcggacgatgctcttattcgtacgaaatgaatgaactgcatgaaagcaatttttgaagaagtggtaattgtgaaacagctggatgctcaattaaag

SEQ ID NO: 350645 - DNA, 149 bp, Zea mays
actaacaaacctccaggcggcaaccgttagacgcatgccattcttcggctattggaacctcttatgtgatcatttgttgagaattattgatccgttacttgtaagaataaacatgtttctagtatctttgatggtgatcttcattataa

SEQ ID NO: 350646 - DNA, 457 bp, Zea mays
caccaggcaacatagaaggtggaatacagtagcaacaatagagcaacaatggcggccaagatattttccatccttatgctccttgctctttctgcatgtgttgctaacgcgaccatttttcctcaatactcacaagctcctatagctgcccttcttcccccataccttccatcaatgaccgtttcagtatgtgaaaacccagcccttcaaccctacaggctccaacaagcaatcgcaacaagcaacttacctttatcacccctgttctttcaacaatcgccagccctatctttggtgcagtcattggtacaaaccatcagggcacaacagctgcagcaactcgtgctaccagtgatcagccaagtagctctggcaaacctttctccctactctcagcaacaacaatttcttccattcaaccaactgtctacactgaaccctgctgcttatttgcagc

SEQ ID NO: 350647 - DNA, 52 bp, Zea mays
tttttcttcgcgtgcatgcgacgctgggtgtgtatgtgtacctaaatcaatt

SEQ ID NO: 350648 - DNA, 338 bp, Zea mays
cttcagtatgtgaaaacccagctcttcaaccctataggctccaacaagcaatcgcagcaagcaacatacctttatcacccttgtttcaacaatcgccagccctatctttggtgcagtcattggtacaaaccatcagggcacagcagctgcagcaactcgtgctacctgtgatcaaccaagtagctctggcaaacctttctccctactctcagcaacaacaatttcttccattcaaccaactgtctacattgaaccgtgctgcttatttgcagcaacaactattaccattcaaccagctagctactgcctactcttagcaacaacaactttcttcattt

SEQ ID NO: 350649 - DNA, 361 bp, Zea mays
gaccacgcgtccgcaactagcaacatagaaagcacaatagtgttccaacaatggcagccaaaatattttgcttccttatgctccttggtctttctgcaagtgctgctaccgcaaccattttcccacaatgctcacaagctcctatagcttcctttcttcccccatacctctcaccagcggtgtcttcagtatgtgaaaacccaattcttcaaccctacaggatccaacaggcaatcgcagcaggcatcttacctttatcacccttgttcctccaacaaccgtcagccctattacagcagttacctttggtgcatttgttggcacataacatcaaggcacaacaactacaaacaacttgtgc

SEQ ID NO: 350650 - DNA, 301 bp, Zea mays
tggtaggaaaccgtccgaccagcgccggaccagacccgccggctggtgtttctggaggagactgctgagaggacgggatgcaacagaggagaggaccgcacccatgtagtcaccgcaagcctggagcactgaactgaaggaacttagtcgacctttcaagccccattggggaagcaccagtgatgtgtgagcttgtccgtaaacccacgaaaagtactggatgagggaatgccgtcaatgtaaatgactatttaaggctatgccacagggcttggcagcgacagtatggaaacacctatgg

SEQ ID NO: 350651 - DNA, 56 bp, Zea mays
attcgtcttaatatcttctttatactgtcacctaaattcaatatactggccactta

SEQ ID NO: 350652 - DNA, 179 bp, Zea mays
tatcgagaataataaattttcttattttaccaccccgaccgtccccgcgagtcgggctatttttctttccgttacccacctttatctcattctatgctctagctaggcaagctagctttgcatggattcacccgctgttgcatcgacgctgttccaggaccactcttgccgtcgctctt

SEQ ID NO: 350653 - DNA, 383 bp, Zea mays
tataaggaaaaaagatgattggaaactgttttttttattttaaaaaaaaaaaaaaaaaaagggagaaagttttataataattataaaaaaaaaaaaaaaccaaataaaaaaaaaaattaataaaaaataaaaaaataataaaaaaaaatatttaaaaaaaaaaaaaaattttaaaaaaaaaaaaggggggggcggttttgggggtccaaattttatttccgggggtttggggtttttttttttttttttgggggcccctattttatattcgggggggggttttttaaaagtgtgtgtggggaaaaaccgggggtttcccaattttattggttttgagaaaattccctttttggcgggtgggtttattatgaaaggggccccac

SEQ ID NO: 350654 - DNA, 316 bp, Zea mays
  unsure (1)..(316): unsure at all n locations
aattnccgggtccggacccatcgccgtccgctagtgcgttgcggcgataattatgttacccccatgtttgggtacctanntctatgtacctannttattatatgccgaaaatctattatgttgtnncctggctnnngaattgaaccctcaaatagaggtttggtttggagaatataaattgnntcccaagattgggattgggcttgtnntaaaagctcaatatnttngttattgaaagtnngttattgggctttaaaaaaaattaaaataaaaaataaataaaaaaaaataaaatataaaataaaaaattataagg

SEQ ID NO: 350655 - DNA, 313 bp, Zea mays
tgacttttttacgcctgcaatgcgatcaacatagggcatgtatagtgacacataaatgcaacaaactggccgaaggtcaacaacgaatagactggaaaaaccactacgctaccaaacttaatcaacttgctgaagatacacatttggacagccggcgtttttacaaagagggccaagcgcatcgcccttgaagaaagggacgcagctgaatggcaaatgggacgcgccctagcactgtgcattaaacacagagggtgtagagactactcacagggtgacagatacacttgccagtgtcgtagcaagcgatggt

SEQ ID NO: 350656 - DNA, 141 bp, Zea mays
cgacccacgcttccgctaggcatcaacccatcatttaatttcctttttttagaatacacctgacaaggggtcggggatttttccctcatacctccacctcatccctacaaagaattaacatattcgtttactcataacctc

SEQ ID NO: 350657 - DNA, 75 bp, Zea mays
aaaaaaaaaaaaaacaaaaataatttataatttaaaaaaataaaaaacaaaaaaaggggcattttatattaaatt

SEQ ID NO: 350658 - DNA, 73 bp, Zea mays
attagttgtcattcaataatgaagttttttggctgatgtatgtggcctcctagaaataagaagttatatttcc

SEQ ID NO: 350659 - DNA, 363 bp, Zea mays
ccaatcttacacactcctgcattctacgaaattcttcttttattgcgacaccaccaaccaacggactggtcgtctttttactacttccatcctcaaaaaaccctgacgctactcaactctatctactcccagcacatacttccatcgacacattgagcaatatcgaactctgccgctcatatacaccatccacacatacgaccattcagcctggcaaatgatacgcgccctgttgcctcccatacacaacaacagtttgtggtcgttacacccacacgctacgcctaactcttcaactccctaacaaccgctacaattgctgtctttcaaccaactttcttcatacaaactcaacattttctc

SEQ ID NO: 350660 - DNA, 405 bp, Zea mays
atagaaagcacaatagtgtaccaacaatggcagccaaaatattttgcctccttatgctccttggtctttctgcaagtgctgctacggcgaccattttcccgaaatgctcgcaagctcctatagcttcccttcttcccccgtacctctcaccagcggtgtcttcggtatgtgaaaacccaattcttcaaccctacaggatccaacaggcaatcacagctggcatcttacctttatcacccttgttcctccaacaatcatcagccctattacatcagttacctttggtgcatttattggcacaaaacatcagggcacaacaactacaacaacttgtgctagcaaaccttgctgcctactctcagcaaacagcagttcttccattcaaccaactagctgcattgaact

SEQ ID NO: 350661 - DNA, 446 bp, Zea mays
  unsure (1)..(446): unsure at all n locations
cacgcgtncgatagaaagcacaatagtgtaccaacaatggctttcaaaatattttgcctccttatgctcctgggtcttgttgcaagtgctgctaccgcgaccattttcccgaaatgctcgcaagctcctatagcttcccttcttcccccgtacctctcaccagcggtgtcttcggtatgtgaaaacccaattcttcaaccctacaggatccaacaggcaatcacagctggcatcttacctttatcacccttgatcctccaacaatcatcagccctattacatcagttacctttggtgcatttattggcacaaaacatcagggcacaacaactacaacaacttgtgctagcaaaccttgctgcctactctcagcaacagcagtttcttccattcaaccaactagctggattgaactctggttctatttgcaacaacaacaactacca

SEQ ID NO: 350662 - DNA, 61 bp, Zea mays
tcctcatgcacttatttataggtcctaaataatatgccgcgtacaacttgactggaaaacc

SEQ ID NO: 350663 - DNA, 324 bp, Zea mays
gggggccgacccacgcgtcctttaaaaaaataataaaaaaaaaatatatttttttaaaaaaaaaaaaaaaataaagagaaaaggtgaattttaaatttaaaattaaaaaaaaaagggccggcccttctatatgattccaagtttactttcccatgctttcaacttataaacttttttatattgtcacctaatttcaaatcactgtccgtaattttacaactcctttactgaaaaaaccctttcgtatccaatcttatatatctataatatctatccctcttttaaccttttgttttatattttaaaataccttactaaacttct

SEQ ID NO: 350664 - DNA, 284 bp, Zea mays
  unsure (1)..(284): unsure at all n locations
tcggggttttccaaccacagccaacacaggcgcagcgttcatttttagaggagaagcgagcgcccgaaccaaangggggccgnccccgcccgcacaccatggctacgccgaggtggtggccgtccctgctgccggcatggctgagccccagcccgctatggacacacaccgccaacccgggcctcgacgcggtcgccatattgtacaggcgcccgccgctgacgatgccgtcaacccgacaccgccgtcgcaacagcggcgccaccgacaggctcacgcggaga

SEQ ID NO: 350665 - DNA, 334 bp, Zea mays
  unsure (1)..(334): unsure at all n locations
tcgactacatgcacaagacggacaccacggggggccgttggattgtccgcacgccggctcanaaanacgcgaggggcngacgaacgcttaactgctcgtctacacgccatagaagcctcgaatgagttgttggtcgcatgaaaccctgaaccaactaggaccaacgaatgggaaagcagagtatgtaagtcgacaggcaaccatcagggacatccaccataatgaggaggttgaacacgctgcgcctacatgcacctgaactcgcactacatagggacggtgcgtggaggttaatgtccatagaagacagggaattcaaaaaaaaaaaacaaaa

SEQ ID NO: 350666 - DNA, 73 bp, Zea mays
attagatggcattcaataatgaagtggtttggcttttgtatgtggccccctacaaataataagttatatttcc

SEQ ID NO: 350667 - DNA, 160 bp, Zea mays
acttttctttttgggaggagcgacaaaagggacaggtgtttaccaccacgccgcccctcacttgactaaaaaccctccatagcccctcatctcatctatgctctactaagcagataactttgcatggactacccaacctttttctacttctcctggacca

SEQ ID NO: 350668 - DNA, 264 bp, Zea mays
tcttattatggaaaaaagataattgaaaactgattgtttattattaaaaaaaaaaaacaaaaaaaaaaaaaaaaaaaaaaaaaaaaaataaaaaaaaaaatcccataaaaaaaaaaaataaaaaaaaaaacataaaacacaaaaataaaatcttttaaaaaaaaataaaaaaggttttaataaaaaaaaaggggccccccttttttaaaaaacaaaaatttatttacccccctacttacaaataaaatacattttttatagtgg

SEQ ID NO: 350669 - DNA, 123 bp, Zea mays
ccgcagaccgaccgaataccggtcgaccacacttttattttcatcatacaacaacaacaaagggggcgggttttttttttatgctcgagaccgaaccctaccacacatatagcaactcgccca

SEQ ID NO: 350670 - DNA, 149 bp, Zea mays
atgcgcacaacatacctcatgtatagtgacacctaaatgcaacaaactggccgaaggtctacaactaatagactggaaaaaccactacactacccaacttaatcaaattgctgaacatacaaatttcaacagccggcgtttttacacag

SEQ ID NO: 350671 - DNA, 326 bp, Zea mays
tttctttttcatccgcagcagacgacccaaggggacggtttcttgcatgcaacaacacacctctcaaataatgccaacaacacggaaaacaccccacgcagcgaaccaacaaggagactggcaaacacctgattcaccgaactgaatcccgttgggggacaggcgcataccgccaccgggactgatcccaaacaggcccacaccgagcgacgcggccaacaccggcacaggctgaacaggcaatggaacgcaccctggaccctctcaaaaatcccagcgtacggacacgtgacacccacaccaaccgctacacatggcggcaccct

SEQ ID NO: 350672 - DNA, 165 bp, Zea mays
  unsure (1)..(165): unsure at all n locations
gcccgcaggnaccagaacccgaattccacgccaccacccacgcttttctgccgagcgagacgacctcacaagggggggtttttttttggacgacgacaaggtccaaaatatccaaaaaacactggaaaatgaggactcatggcactacaacataacactttcaat

SEQ ID NO: 350673 - DNA, 291 bp, Zea mays
ttttttttcgttgcaaaacacaaaaggtgggcgtttcttttgattgcatatcacagacactataaggaagccctcataccggcataagatcctaaaatatcaatatattggggatgattaattaacatacatacatcacaaattattttttattcaaatcaatcattaagtgcggcctctcaacaaatccatgtgtacatttgcaaacatactaccatatacctcttcttattaaccaacccttatttaatttaacaaaaaagaacgtacgaatatttttcttctccttat

SEQ ID NO: 350674 - DNA, 76 bp, Zea mays
tcgattagttgtcattcaataatgaagttttttggctgatgtatgtggcctcctagaaataagaagttatatttcc

SEQ ID NO: 350675 - DNA, 76 bp, Zea mays
  unsure (1)..(76): unsure at all n locations
tcgataagtcgacatncaataaggggggggggtggtttttgtatgcggccgcccataaataagaaggtatatttcc

SEQ ID NO: 350676 - DNA, 293 bp, Zea mays
tcgctttaacaactactaccattcagccagctagctgttgtttgccctgctaccttcttgacacaaccacagttgttgccgttctaccagcacgttgcgcctaacgctggcaccctcttacaactgcaacaattgctgccattcaaccaacttgctttgacaaacccagcagtgttctaccaacaacccatcattggtggtgccctcttttagatttcttatgagttatagttcaataataaagttttttatctgatgtttgtggcttcccagaaataagaaagtacatttct

SEQ ID NO: 350677 - DNA, 420 bp, Zea mays
atagaaagcacaatagtgtaccaacaatggcagccaaaatattttgcctccttatgctccttggtctttctgcaagtgctgctacggcgaccattttcccgaaatgctcgcaagctcctatagcttcccttcttcccccgtacctctcaccagcggtgtcttcggtatgtgaaaacccaattcttcaaccctacaggatccaacaggcaatcacagctggcatcttacctttatcacccttgttcctccaacaatcatcagccctattacatcagttacctttggtgcatttattggcacaaaacatcagggcacaacaactacaacaacttgtgctagcaaaccttgctgcctactctcagcaacagcagtttcttccattcaaccaactagctgcattgaactctgcttcttatttgc

SEQ ID NO: 350678 - DNA, 118 bp, Zea mays
tcgattttaaaggacaaaagagtgacacaacaggggacagtgcaaaatatttaagcgcaaacaaatgctcacaaaaaaagagcagcaagatgcagcaacggaaaccataaattcgaaa

SEQ ID NO: 350679 - DNA, 74 bp, Zea mays
aaaaataggaagatctcccgcagaccggccggaatcccgggcgacctagctttcgcataccaacacacacgggc

SEQ ID NO: 350680 - DNA, 334 bp, Zea mays
ccgaaccggaaggcccggaacgacccactcgttctaaaaaaaaaaaaaaaaaaaaacccaaagtttttttttaaaaaaaaccccccccccaaaaaaaaaaaaaaaaaaaaaaacaaaaaaaaaaaaaaaggcccgcccccccaaaaaaacccaagccaacaaacccggccatcccaccacaaacaccccccaaaacaccaccaaaaaacaaccccccaccccaccaaaacaacaacgaaacggcaaaaacaccacccctccccaacaaagccccacccaaaacacccccttacccccctcccaaaaaaccaaaaaggcccacacccaacccccc

SEQ ID NO: 350681 - DNA, 179 bp, Zea mays
  unsure (1)..(179): unsure at all n locations
ttttgtacaacggtggcaacgccaccnacgngaaagccgcgcgcgaaatttttntgcaagngggcgaccgcgcgaacgacgcggngcgcgngaacggcgcggagctgcgctgcaagggcgncggcgaaggcggcaaccncggctgcacgcagntcggccgcatcgagttcgcgcagcgc

SEQ ID NO: 350682 - DNA, 200 bp, Zea mays
ggccggcccacgcttccgtgctgttcgccactttctcttctttctctcctatcccctcccgctaccacactagcagctggttttcttctaattatgggcatggccatttccaacagtttttccttattcttttcaattattttctttttattttactctttactttaattttttttattttattttctaatatttatatt

SEQ ID NO: 350683 - DNA, 54 bp, Zea mays
  unsure (1)..(54): unsure at all n locations
tttctttttcatgcaacgncatanctctggggtggggtcacctaaattcaaggg

SEQ ID NO: 350684 - DNA, 75 bp, Zea mays
ttttctcacattgtttcggtggctggtgggcagtgtcttttttttcttttttttttttatcttttacattttttt

SEQ ID NO: 350685 - DNA, 223 bp, Zea mays
aaaaataaaattaacagaaattagatccaaatctctatgttcgcccgatctaaagaacccaacgttacgttcgcttacatacgagggtataccaatcctatatcgccaccaaaatcaaaaacactggccgtcatttaacaacacttttacttggaaaacccttgcttaacccaactaaaatccatggcaatacatccccctttctccagctttctaattacaa

SEQ ID NO: 350686 - DNA, 235 bp, Zea mays
ctacggagcacgtactaaaccgggggaaggccacttccactgcgggtgggaacaactaccttgatgacatcccacccgaccaaccacgactatttcctcgccgttactattcccaaacaagtctccaccggttcgtttgccaacaccgtccgtttccgtgctatgcaccgcctgctcaataggaaaagtcttccttacaacaaaatactgatcctattccatgtacctcattcag

SEQ ID NO: 350687 - DNA, 115 bp, Zea mays
gggtcgacgggctcactagttcggcggcccgtttagggtgttccatgcttactttacttgtgcatgcagacgtacatagctcttgggtaagtttcactctaaattcaatgtgacg

SEQ ID NO: 350688 - DNA, 218 bp, Zea mays
  unsure (1)..(218): unsure at all n locations
atgcccattctcgagattcaacttttatttttttttccatgcgacttcacatttttccggtggggtatcttaaaaccaatgaagggccccnatttttacaccgtctttactagtaaatccatccttttccaaaacttaatacaatttcaatacatccccatttcatcttttatatcattatccaatagccatgttcctatcgcccatccaaacacttg

SEQ ID NO: 350689 - DNA, 357 bp, Zea mays
ggggccgacccacgcttccgatgactcttggctcctgccttcgccttctttttcaagcaacaacaaccacgtcgacagggggggttttttaactctgtgacgggcactaacaacggtttaaactcatccacgtaacataaaccttcctcaaaacctgtgcatagcttaacaccgcacctctaaaattttacactatccacctcacaattaaaatcccagtcataaagcgagaaaatcattataattccagccatatacatcaaacacaaactaaaaactaaatggcgtccaaagggtaacattttccaatccaaacaattacttcgcattccacaacattccaaatctaactcaccc

SEQ ID NO: 350690 - DNA, 328 bp, Zea mays
  unsure (1)..(328): unsure at all n locations
gacccacgcgtncgnccacgcgnccgaaaaaaaaatccaattaaatttaaacaaacaaacaaaaaaaaaaaagggaaggaaaaaaaaaaaaaaaggggggggccgccccaaaggacccacaccaccgaacccgggcaacccacgacatacaccaaacaatagggcccccaaaacacaacccactgcccccagcttaccaactaccgaacaggaaaacccctgccgccccccaaaaaaatcgcccagccaaaaagcccattggcacaagccgccgaaaaaccaaaaaggcccacaccaatccccctcccaacaaattacaacccctaaa

SEQ ID NO: 350691 - DNA, 60 bp, Zea mays
cccttccgctttcttgcgaactgatacctctggtgtgggcgcccttaaatccaatgaacg

SEQ ID NO: 350692 - DNA, 423 bp, Zea mays
ttggcggcagcggcggcggggtagcatttgtgtctactagggcttttgcaatggcggcttcggggttcgtcgtcttcaatgcgttccggctctctcccataccagtatccttttaacttaagctgtacaagggctacatttaccttttgttctgtctacttctctattatactcctctattaatgttttttatttactaatttcagataattgttatttttattatatattttttcattatttttttttatttataatatttcattctatttattaatatatcttatattaatataaattttctaattttattattttatatttttaatttatctttcataatatttatttatttattattttttatattttatattattatataatttttctattataatcttattttttaattctatttta

SEQ ID NO: 350693 - DNA, 329 bp, Zea mays
taaaaaatattcctaaaccatacatcctgactttttttttatatcccacgtgtccaccttctagatgggctcctttatttccaatgtatggcccatctttttacaacctcactcctactaaaaccctgtgatttcctaaataaatcgctatcctaaaatatcctttttatccatcattccaatcttcctaatagtcctactcctatctcccttcccaacaacttcgcattcttaatctcaaatggtacgctccctttaactcatctttaaccacaccttctattttgtttactcttattttatccttcccactttttcattccataccc

SEQ ID NO: 350694 - DNA, 135 bp, Zea mays
ttcccgggccgaccagctcactatttgactccctttctattatatccaaccttatttttttctttcattctacgtcaaatcttttggggagtttcacctaaattcaaggcactgtccatcttcttacaacattta

SEQ ID NO: 350695 - DNA, 98 bp, Zea mays
aattccgggccgggagctcactagttttaacacgtatatagtatccatcttatttctcttgcagctacacataactctggggagttttcccaaaggaa

SEQ ID NO: 350696 - DNA, 416 bp, Zea mays
tcgttggatttctttctttaggatctaaaataactctacggagtccagagttacagaccataggctttcatgtagccataagaaatggaggagccaaccacgttgcttcgtcttaattgacaatatgtccacacagtctccagatctgtaggctacaagtacattccggacagtctaggctctttattatggtaaaaacgaaatacgatctaccttcccaatcagttgaaccgatccgatgcgcgcgaaataatggcccaccaccggcgctttatcaggaggagctgtgacggacctaacaaggccacccggcgacactggttcatgaggagcaccctgtatttcctgttttttaattcgtttaccccaaaactgcagtggtttctgcggcaagtttaaaaaatccaagtttactt

SEQ ID NO: 350697 - DNA, 107 bp, Zea mays
aattccggttcgaccagctcactagtcgtcgaccgttttatagtatccatgcttactctcgcgtgcttgcaacgggataccgggcgggtagtgtctccaaagtggag

SEQ ID NO: 350698 - DNA, 116 bp, Zea mays
gatttgccaacaaacaaaacactagttttctttttccttcgaagccctgccctgggggtgcggctttttctcaacctggggcattcaatccttcatctcccccaactcaattaact

SEQ ID NO: 350699 - DNA, 277 bp, Zea mays
aataaccgggccgacccacccttccttccactcttcctcctacccttccatcctattttttctattaaaaaaaaaataaattaaggggggatattttataaaaaaaagtaaggaaaatatattatcaaattaaaaaaaaatttactaaaaattaaaaaatataaatattatataattcctctctttttaaaattttaatttttattatctttatatatacctaactatttttcttttattcttaacccaaattataaattttaatccttttttttaa

SEQ ID NO: 350700 - DNA, 54 bp, Zea mays
ttctctcgtgcgggcgacgtcagaggtattgtgtggtttcacctaaattcaagt

SEQ ID NO: 350701 - DNA, 70 bp, Zea mays
atggctgtttacgttgtcgcttcatctttgtttatgctttacatttaaaaaaaaaaaaaaagaggggctt

SEQ ID NO: 350702 - DNA, 71 bp, Zea mays
taccactctaacttaatcaacatcaaatcttcatcttattcaaacccaaaacttcaagggggggaactttt

SEQ ID NO: 350703 - DNA, 362 bp, Zea mays
tttggtgcatgtcatgtggtacataaccatcaggggcacatgcagcgtgcagcaacctcgtgcttacctgtgatcaaccaagtagcttctggcaatacctttttccctactctcagcaacaacaatttcttccattcaaccaactgtctacattgaaccgtgctgcttatttgcagcaacaactattaccattcagccagctagctactgcctactctcagcaacaacaacttcttccatttaaccaattggccgcactgaaccccgctgcttatttgcagcagcaaatactactaccatttagccagctagctgcagcaagccgtgcttccttcttgacacagcaacagttgctgcctttt

SEQ ID NO: 350704 - DNA, 400 bp, Zea mays
ttcgtttgaagcttaccaaaccaggtttttcttttttcgtccccattatcatttagaagtattgcttatgtttactaggggggcgtcaaccattcccttttcgtaagcataacctattcgctggactttttcttatctcttttgaagaaggactcctacctgctttactatgccagttattccaccatatttgttaggtgtataactagttatcacttcggatcactttatcttattatatctgtctcctaccatgattttttcaattaatatgtttatcttccactgttatttctttttgtaggtttgggttatatctatttctctattttttttatttatcttatacttgagtcttttttattaattaatggattttctaactacatcttatattatt

SEQ ID NO: 350705 - DNA, 422 bp, Zea mays
atgcgacgtcatagcggggggatagtttaacctaaagggaggggacttccttctttttacaactttttgtctgtattatatcctggctttacctatattaattttcttttgtatttattttcttttttctttttgttttatataatttgttttttttttaatatatttttattttttttcttatttcatttttttttttttactctccttttttttttcatatatatttttatcttttattattattaatttttttattttttattattatggtgttgttttttaatattttttaaatttttttttatttttcatatctaattctcctcttttcttttttttctttattttattttttattattcattttttatatatattattttattatcatatttatttacttattatttatttttatt

SEQ ID NO: 350706 - DNA, 98 bp, Zea mays
gacactcacgtccactccttttacctttttttcttcttctcccctttaccctattacgacgggttcctttctaaatagtgctgggccttcaacaacca

SEQ ID NO: 350707 - DNA, 227 bp, Zea mays
cctaaaagcccctacccattggcctttccaaccattttccccacctctaatttgcctattggacccccccctttttaccgccccttttaaaccccgcccgttttttgtttgtttcccccccattgtttccccttttccatttctaaagctccctttctcccccttttcttatcctttttttttcttttctttttttcccacatttttttccgtttttcccccgttta

SEQ ID NO: 350708 - DNA, 351 bp, Zea mays
aaatttttatattaaattatatacttataaattaataacaataaaataataaaataaaaaaaacaaaatatataataatataataaaataaatatgtaatataataaataaaataaataaaaaataataatataataaaataattaataaataaatatataataataaaaataaataaatataaaataataaataaataaattttaaatataaaaaattaattataaattaaaataaataatattaaaaataaacaaaatatttatcattaaataataataatataaatacaattaataattatataaattaaaaatataattattaatataaaataaatatataataatt

SEQ ID NO: 350709 - DNA, 450 bp, Zea mays
  unsure (1)..(450): unsure at all n locations
naaaaaaaaaaaaaaaaaaaaaaaaaaaaaaataaaaaaaaanaaaaaaaaaaaaaaaaaaaaaaaaaaaaaaaaaaaaaaaaaaaaaaaaaaaaaaaaaaaggggggggccgttttaaagaaccaaagtttacttcccctgcattccaagttaaaattttttttatggggcccccaaaataaaattaatggcccgtgttttaaaaacgtgggaacgggaaaaacccggggttacccaaattaaatgccttggaaaaaaatccccttttcccaagttgggttaaaacaaaaaggcccccaaccattcccctttcaaaaaatttgccaaccctaaatggaaatgggacccccccctttaccggccattaaaccccgggggttttggtttttccccccaatttaccctttaaatttgcaagccccttaacccccgttcttttgtttttttcc

SEQ ID NO: 350710 - DNA, 197 bp, Zea mays
tttctctttcatgcaacgtcatattttttttatagggttacctaaattcaattaattggccgtgtgttttacaactttcttactttttaaacctttgtttttccctaatttattgccttttatgacatactcttttttcatagttgcgtattatctataaaggtctttacttatttctatttcaaatattttttcat

SEQ ID NO: 350711 - DNA, 158 bp, Zea mays
tgttctcttagttttacctgtttcatttttctgttcctcatttcccgcttctttcattctcttttgtttcccttatttttattcgttatttctttctttttcttgttaagtttttttattttctgttccttgttttgtctttttctttattgtataat

SEQ ID NO: 350712 - DNA, 203 bp, Zea mays
  unsure (1)..(203): unsure at all n locations
gaannnggggccgacccacgcttccggcccttctccggccaccacttcaaatttttttatcttcacctcgtcaaggataagttcgaggggttcttcacattttgtcgcggcgcttccaaccaccacctccactatggtcaccacaaaagctactgttttcttttgttcaagaccattgtcgattatgacatttacaccttcac

SEQ ID NO: 350713 - DNA, 234 bp, Zea mays
tccactcttccgtaataaaaaaaaaatttttataattaaaaaaaacaaaaaaaaaaaggggggggtatattaataaaaaaaggggcggcctctctatattttccaatttactctttcctgttctttcaactcattttctcttttatagttacaccttatattaatttactggccaacatttaacaactttcgaacagaaaaaaccagggcgaaaccaaactttatatctctttt

SEQ ID NO: 350714 - DNA, 336 bp, Zea mays
  unsure (1)..(336): unsure at all n locations
ttacaatacaacctaaattcaattcacacacctacattttacaacttctanactaaaaaaactattcntaacccaacttaaccacctcgcaaaacataactctttaaccagattgcttaataaccaaaaaaaaaacaccaatcacactatcccaacactttctcatcctcaaattccaatactactctccctgtaccatcacattaaacgctcattaaaatatcaatacacccaccttaacacctacactttccatctccctatcgcccaattattatcctttcttcccttactttcttcccacattcaccaactttacccatcaaactctaaatt

SEQ ID NO: 350715 - DNA, 420 bp, Zea mays
  unsure (1)..(420): unsure at all n locations
tcgtaacaagcaacatagaaagtggaatcgaccggcttcaatagagcaacaatggagaccaagatattttccctccttatgctccttgctctttctacatgtgttgctaacgcgacaattttccctcaatgctcacaagctcctatagcttccctttttcccccataccttccatcaattatagcttcagtatgtgaaaacccagctcttcaaccatataggcttcaacaagcaatcgcagcaagcaacatacctttatcgcccttgttgtgtcaacaatcgccagccctatctttggtgcagtcattggtacaaaccatcagggcacaacagctgcagcaactcgtgctacctgtgatcaaccaagtagctctggcaaacctttctccctactctccgcaacaacaatttcttncattc

SEQ ID NO: 350716 - DNA, 166 bp, Zea mays
atattattctattatttttttttttttttattatctttcattttttttttttttttcttatttttattttctattatttttatttttttttttttatttttttatttctttatttacttattatttttatttttttttttttcttttcttttttatttattttttt

SEQ ID NO: 350717 - DNA, 280 bp, Zea mays
  unsure (1)..(280): unsure at all n locations
tatattatcacttaaattcaattcacttaccacctttttacaacttcttcacttttaaaaccctttctttacttatcttaatctccttacaaaacaaccccctttctccatctnacttaatatctaacaatcccacacctatctccctttccaacatttcctcaacctaaatttctaatcttactctccctctaacanctcattaagcccgcccgatgtcttaattactcacatccttacctttacactttccatcaccctaacaccctttcctttcact

SEQ ID NO: 350718 - DNA, 95 bp, Zea mays
aactcattcgttgcaggccaatatacaagatccaccgtccggtacaccatgcatgcgaggtggtacctcttctatagacacacctaacttcaatt

SEQ ID NO: 350719 - DNA, 356 bp, Zea mays
cattatcccccctccccccccccctccaccccccccccttacccctttcttcttcccccccccccacaccccccccccccttccccttccccccccccccctctccacccccccccccccctcctcccccccccccctcctccctccccccccctcccccccccccatccctcctcccatctcccccctcccccccccccccccctcctctcatctccaccctaccccccccctcccccctcactccccctcctccccccctcccaccccccccttaccccccccccaccccccctcctccctccccttcccctccccccccccctcccctccccaccccccctccctcttccccc

SEQ ID NO: 350720 - DNA, 258 bp, Zea mays
attattatataatatttttttttatattatttttttttatttatttttatattttttttattattatttttttcttttattaattttattattattttttattttttttttttttatttttttttttttcctttattatttcatctttattttttatttttttatatattattttacttattattctttatttctttacattattttttattttatttttttttttattttttttttttctaattttttatttttttt

SEQ ID NO: 350721 - DNA, 63 bp, Zea mays
  unsure (1)..(63): unsure at all n locations
tagggaaagcgcgcgcctgcaggaaccantccnnaattcccgtttctacnagcttattantcn

SEQ ID NO: 350722 - DNA, 96 bp, Zea mays
  unsure (1)..(96): unsure at all n locations
tagctcattattttgcggccgctctaaaaaatccacgggccgcttcatttaatatgcggggggggagctataatatantntcacctaaattcaatt

SEQ ID NO: 350723 - DNA, 388 bp, Zea mays
ttaaaacccagctcttcaaccctatcggctgcgacaagcaatcgcagcgggcaacatacctttatcacccttgtttcaacaatcgccagccctatctttggtgcagtcattggtacaaaccatcagggcacagcagctgcagcaactcgtgctacctgtgatcaaccaagtagctctggcaaacctttctccctactctcagcaacaacaatttcttccattcaaccaactgtctacattgaaccgtgctgcttatttgcagcaacaactattaccattcagccagctagctactgcctactctcagcaacaacaacttcttccatttaaccaattggccgcactgaaccccgcttcttatttgcagcagcaaatactactaccattt

SEQ ID NO: 350724 - DNA, 167 bp, Zea mays
  unsure (1)..(167): unsure at all n locations
aaaaaaaatttttttnttttttttttttaaaaaaaaaaaaaaaaaaataaaaaaaaaagggaaaaaaaaaaaaaataaaaataaaaaaaaaaaaataaaaacgattcaaaaaaaaaaaaaaaaaaaaaaaaaaaataaaaaaaaaaaaaaaaaaaagaaggggagag

SEQ ID NO: 350725 - DNA, 319 bp, Zea mays
  unsure (1)..(319): unsure at all n locations
aaaaanaaaaaaaaaanatcccggcctttttttatattcgcccctttaataatttttttttttttnnttttntttttttttttttttttctttttctttttttttctcacatttatttttttttttaattttaaaaaaaattctttttttttttttcatttttattttttcttttttttttttttttttttttttttctttttttctttttccttttttttttttttattattttcccccttccctccttttttttttttctttttatttatttatttttttacatttttttctttttcatttttttctttttttcttt

SEQ ID NO: 350726 - DNA, 81 bp, Zea mays
  unsure (1)..(81): unsure at all n locations
aaaaaaaaaaaaaaaaaaggggccgcgaaaaaaaaaaaaaggggggggaaaaaaaaaaattttntttttnnnttcttcatt

SEQ ID NO: 350727 - DNA, 434 bp, Zea mays
  unsure (1)..(434): unsure at all n locations
tctaaaaaaaaaaaaaaaaaaaaaaaaaccgcacggttttaaaaaaaaaaaaagacagaaaaaaaaaaaaaaaaaaaaaaaaaaaaaaaaaaaaaaaaaaaaaaaagggccccccccttttaaaaaaccaaacttaacttccccttccttccaacgtaaaaattttttaaaaggccccccaaaatcaaattaactcccccccttttaaaaacctcgaacctgaaaaaaccctgcctttaccaaactaaaaccctttcaaaaaaatccccttttccccacttgcctaaaaaccaaaaaaccccccaccaatcccccttccaaacaattccccaccctaaatgccaaatggaacccccccttaacccccccataaaaccccccggtttttgtgttacccccaanttaacccttaaattttcaaacccccaaacccc

SEQ ID NO: 350728 - DNA, 60 bp, Zea mays
  unsure (1)..(60): unsure at all n locations
cgctgcggttctttttcatgcggcgccataactattatatagtntcacctaaattcaatt

SEQ ID NO: 350729 - DNA, 426 bp, Zea mays
  unsure (1)..(426): unsure at all n locations
aaaaaaaaatattttattaaatttaattaaatnaataattttatttaatttttttttattttttaaaaaataatcttatttttttttttaanaatttaataaaaaaaaaaaattttttttttattttcaataaaaataaatnaattaaaaaaaaaaatatttattttatattttttttatatttatcaaaaatacaaanaaaaaaaataacaaaaataagaaaaggaaatatttaaataatatttaatattatatatattataaatttttaatttatatataatataattaatatatataataaatactattattattatatatatatattattaatattttaataaattttaattattaataatattatatttattttataattatctttatatatatataattaatattatataaaatatatat

SEQ ID NO: 350730 - DNA, 236 bp, Zea mays
aaaaaaaaaaaaaataaatatcaaaaaaaaaaaaaaaaaaaaaaaaaaaaaaaaaaaaaaataaaaaaaaaaaaaaaaaaaaaaaaaaaaaaaaaaaaagagaagaaaagacaacaaaaatataaaaataaaaaaaaaaaaaaacaaaaaaaacaaaaaacaatacaaaaaaaaaaaaaataaacaaaaacaaaaaaaaaaaacaaataaaatcaacaaacaaaaacaataacaac

SEQ ID NO: 350731 - DNA, 243 bp, Zea mays
cctctatactatttttttttttttttttttttcataaataaaaatcccttttttttttttttcttttcttatttttattttcttctttttatcttcttattattatctttattttcttttttctttttcttttttatttctatttttaaatttatattctctccttccctctttttatttttatttttactttattattctttttcttatttattctcttttctttttcattattattattaa

SEQ ID NO: 350732 - DNA, 106 bp, Zea mays
  unsure (1)..(106): unsure at all n locations
ccacgcgtncgccggaacacccccacaacccatgaccagaacattcctttccaggcggccctcgagaccccgggccgggacccatccaaccaccacccccacccaa

SEQ ID NO: 350733 - DNA, 295 bp, Zea mays
gaaaaaaataaaaaaaaaaaaaaaaaaaaaaaaaaaaataaaaaaataaaaaaaataataaaaaaaaaatataaaaaaaaaaaataaaaggtaaataaaaaaaaaaaaaaaaataaaaaataaataaaaaaaaaaaaaaaaaaaaaataaataaaagaaaaataaataaaaaaattaaaaaaaataaaaaaaaaaaaaaaaaaaaaaaaataaaaaaataaaaaaataaaaaaaaaaaaaaaaaataaaaaaaaaataaaagaaaaattaaaaataaaaaataaataaaattaaa

SEQ ID NO: 350734 - DNA, 414 bp, Zea mays
  unsure (1)..(414): unsure at all n locations
cccacgcgtccgtnggaattaaaaacaacggcttttttttccttttgtctctgctttntaagcnaattctgcacgggggttttctttctctctacgactcccatcctaaaatatcaccaaattggacctttgaaactagtatttgatccattggtcttctgtggcaaggtatcctctgactcctttttttgtcatcgattcggtttgtatgaaatatatgtcaaggatttctaatcttcttattatcgaatcttaggatgcctatgcgtggtaaatcttctaaaccaagataaccattgtatatattgtattatcgaattagagcgtttaatgtttatgcggttcttagaacgaaacaacttgaattttaggaagggtccgttgatcgaaaatgccttcgacccgctgcctctg

SEQ ID NO: 350735 - DNA, 339 bp, Zea mays
  unsure (1)..(339): unsure at all n locations
tctcatccccaaccttaaacacctcttgtaaaccccccccaccnnannccaagggggggcgtgctaaaaaccaaatcaccccacccaaacaagacnaaaanncnccaaangggaaacccaaggccccaagcccgccccaagaacccgaaacacgccaacgacgagcaacaaacacaccnnccccgccaagctaacctgcacgagacaaaccacctcccacacctgtccctaaacaaacgcaagcccggaagccatcgacaccaccgccaccgcccattcagaacaacaaactaaaggctccaaggcctaaaccaacggacctcccagacagatcacacc

SEQ ID NO: 350736 - DNA, 316 bp, Zea mays
aaggggggggatatatcaataaattgttcgactccaaaataaccaaaaaaggctgaatccaaatttttgaagtccctgttaataacttttttggcagccaacaaaagctaaaaaagtgattactaattgagtaattgtagaatagacacctattcagatgtagttttagttttggtcgtcggtggtgagcctgtcattttgcaatgttatgtactgctagattcattattgtgtcgatttgaggtaataccttttgggctgtggaaaaaaaaaaaaaaagggcggcgttagagatcaagttactacctgcatgcac

SEQ ID NO: 350737 - DNA, 68 bp, Zea mays
  unsure (1)..(68): unsure at all n locations
aacccgcacangcgacgncagggggggagtttaggaaaacctaaatgcaacacacagaccgncgganc

SEQ ID NO: 350738 - DNA, 360 bp, Zea mays
cgccccaccgaacatatcgggaacgggtccctcacaaagcgacaccagaagctcaaccaagagcggcggcaaacgaggctccaataccatacaaccacaggtgggcgccctgagcctggagcacaccaagaagggacaccgcaaagacaagcccgacacccacatttggtgctgcccaccaacaccatggtgaccgcggagcatgcccctaacaccgtgcaaataatgctcgacaacaagggccaaacgccccacgacccaaaataatatataagcgagacgaccctgccttgtccatgccccagaccttcaaaaaaatatatataccggggctgaagtaatcgattgttctcttcaaat

SEQ ID NO: 350739 - DNA, 258 bp, Zea mays
tctctctgattccgtatcaaacatctctttgttctgttcggtgtctttgaatcaaaaagttcgaaacttgaataagtaatcaaattccggagctttctgtatataatcagcccaagacaattgatttacatacatattttctttgttgaaattgattggtgagatgattaggtgcaaaaagaaataggcttttaagctttttaccttgtctgaaactgaaactcttctgtctgaagcaaagtgaattgaataaacaaa

SEQ ID NO: 350740 - DNA, 135 bp, Zea mays
aaacgccaacacgcaacgccagaactctgctatagtgccacctaaatgcaatcaacaggccagggactaacaacgacttgactctaaaaacccagcctacacccaactgaatctccccgcagcacaccccccttt

SEQ ID NO: 350741 - DNA, 165 bp, Zea mays
ccccaaaccaaccgaggggggcatttttctaaacaaaccgcagcaatcaacaacaaccggcaaagcaaaacccatgaagcacacaaaaaccgaactccaagccaaaaaaacagcatcctccaccaaccgtggtggaggaaaggcaacgaaagacgctcgaaccgg

SEQ ID NO: 350742 - DNA, 338 bp, Zea mays
ttaccgcaaccattttccaacaatgctcacaagctcctatagcttccctttttcccccatacctctcaccagcggtgtcttcaatgtgtgaaaacccaattgttcaaccctacaggatccaacaggcaatcgcaacaggcatcttaccattatcacccttgttcctccaacaaccgtcagccctattacagcagttacctttggtccatttggtggcacaaaacatcagggcacaacaactacaacaacttgtgctagcaaaccttgctgcatactctcagcaacatcagtttcttccattcaaccaactggctgcattgaactctgctgcttatttg

SEQ ID NO: 350743 - DNA, 476 bp, Zea mays
  unsure (1)..(476): unsure at all n locations
tttgtttcacgcgntccgaactagcaacataaaaaggctcattggggtctttattttggcagccaaaatattttgcctccggaggctccttggtatttctgcaagtgctgctacggcgaccattttcccgcaatgctcacaagctcctatagcttcccttcttcccccgtacctctcaccagcggtgtcttcggtatgtgaaaacccaattcttcaaccctacaggatccaacaggcaatcgcagctggcatcttacctttatcaccctngttcctccaacaatcatcagccctattacagcagttacctttggtgcatttattggcacaaaacatnagggcacaacaactacaacaacttgtgctagcaaaccttgctgcctactctcagcaacagcagtttcttccattcaaccaactagctgcattgaactctgcttcttatttgcaacaacaacaactaccattcagccagc

SEQ ID NO: 350744 - DNA, 118 bp, Zea mays
  unsure (1)..(118): unsure at all n locations
gaaaaataaaaaaaatttaattttcctgagtaaataccaaacaaaaaaaaaaaaaaaaaaaagaatttttttaaaaaaaaggggcggcccacacaaanccccccnnnngnnnccggga

SEQ ID NO: 350745 - DNA, 105 bp, Zea mays
catcattggcggtgccctcttttagattgcttattagttgccatccaataatgaactttttgggctgatgtatgtggcctcctagaaataaaaagttatatttcc

SEQ ID NO: 350746 - DNA, 298 bp, Zea mays
atggatcccttgactagctacctaccttgcttttttactaatttaccgtcaatcaggggggtattgtaacccataaccaggggtgccagttttagcatttacctgattgaaccttcgaaatggaaaggaatactatattaggaaaaaagatgcttggtacaataattactaaaaaacacaaaaaacaattagattaataaaaaaccaataaaaacttgagaagctcaaagcatgaaaaaaaatgtaggcatgattgggggccgggcctttttagaggaccaatttttcttacccttaa

SEQ ID NO: 350747 - DNA, 329 bp, Zea mays
acccacgcttacaaatctgttccctcctgacttatccaaaccctttcttccctttggtccccgatatagctaaagtgtgctttataaaccggcacgaggtccataacacctctagaaccttaacccacagttatgccatgtattatttactctacctgtcctttggggtctctatctccattttttgcccgaacctgtacatcccacaatgtattctttctatccttcctgtataacgattaacctaatttgttttgcaaaacatttcccccttttggtgctgaatactgctaaattgcctaactattaacctataattcttattaatt

SEQ ID NO: 350748 - DNA, 130 bp, Zea mays
  unsure (1)..(130): unsure at all n locations
catcattggcggtgccctcttttaaattgcttattatttgccattcaataataaantttttggcctgttttatatttcctccgagagaaaaaaanttatattttccaaaaacaaaaaaaaaagggcggcc

SEQ ID NO: 350749 - DNA, 249 bp, Zea mays
ttcttttttccccttcatatcttttttttacggcggctttatatataaattcacgggccgccttttttctcctttttctcttttaaaaccctttctctacccaacttaatcacctcccataacatccccttatctccatctttttttttttctataaatcccaaaccaatctccctttccaactatttctcatcctttatttcaaatttttccctccctttttcttcccattaaatttcttattttttt

SEQ ID NO: 350750 - DNA, 303 bp, Zea mays
  unsure (1)..(303): unsure at all n locations
ccgggccggcccacacttccaccaaggactccctgtccctctncttcttttttttctccccccccccacccacnacccggcgttttttataactatctggcccgccccacccctcctcctcctccttccctctatccaaaccccccttcccctttccattcccatcacccaattccacactccccttttttttttttaaccctttcacttataacccatcctccctatctcttcacttaccctccccctaattccatctttaactccccctttatcatccccttaaacccctcctttttttcc

SEQ ID NO: 350751 - DNA, 105 bp, Zea mays
ccacccggcgaaggcctatcaaaaatctcaaacttactatctcatgccagcaacgttatatggggggcattttttacacaaaggggaggtcattctcctaagttt

SEQ ID NO: 350752 - DNA, 301 bp, Zea mays
cgaggagggtctggaaccttcactgctattttaacgtacacataagtgggcggatggttcgattcattctaccaaatgaccctttcaaaaaaaggtgcataattgtcctttgcagaaaaagaatggggaaacctaggcttgttctcatatcaccactttaatcttatttaaccatcctttatgttttgttccagttataaacgtttaaataatataatgttgtttatataggtggaattttcctataaaaaaaagaatcttttttaaaaaaaaatattattaaaaaaattaaaaagggcgg

SEQ ID NO: 350753 - DNA, 92 bp, Zea mays
aactcattcgtccacgcgtcctataaaaaataaaaatcttatttacacatacatacaaaaaaaataagggtagtataataaaaaaataaagg

SEQ ID NO: 350754 - DNA, 161 bp, Zea mays
cccaccctttccccctttcctcctaacccatttacaatccaattccagacccctagcccggggggacctttacatctaagcgggagttactacttacacctactgaacctactccaacctatctttcccttaaaacaagctgacatctacccaaattatca

SEQ ID NO: 350755 - DNA, 59 bp, Zea mays
  unsure (1)..(59): unsure at all n locations
tctggcgggcttttaaattctacggggtagctctattattgngtcacctaaattcaatt

SEQ ID NO: 350756 - DNA, 74 bp, Zea mays
  unsure (1)..(74): unsure at all n locations
ggaaaaccgggccgaccaactcactactccctggnccgcctataacaaccaattttttttacccaaccccaccc

SEQ ID NO: 350757 - DNA, 319 bp, Zea mays
  unsure (1)..(319): unsure at all n locations
ccggnncgagaaaaccgggccgaccagctcattagtttgcaacacgcatataggttccaactttatttccccgtgcatgctagataataactggtgggtagtgtcacacaatgtaaaggcactgcccaacattttacaacactgctactgggaaaacacaggggttaccaaacttattcgagttactgaaataaatgtttcacagcaggccaatatctaatatgaccccacctgagcgcccttgccaaaagtaaaccatcctgaatggctaataaaacaccccctcttgctctaacttaagcgcatctaatgtggtgtt

SEQ ID NO: 350758 - DNA, 209 bp, Zea mays
  unsure (1)..(209): unsure at all n locations
gaatnnngggccgacccatcttccgtaaaaaatatccccaaaccctatctcccgatttttttttcaaaccctctcttctttttcaagatgacttttttataaaccccgacgggccaaatctttttnnatctttaccccacacaattttcccaaaaccgcctaaaacttcctctctctttgcactaactataaatttttttcaattcctt

SEQ ID NO: 350759 - DNA, 323 bp, Zea mays
  unsure (1)..(323): unsure at all n locations
ttcacactaactcttgtgtgccttcatccactncaattattttccaacggcttaataactaccaaagagcgtttaatttaaatacgcgcccgttcccaaaaccatacccantcatatttataaaactttacaaactagttctacttcttttcattttaaccaacctttaactttttttcctcacccttatcaattaaacaatctaattcattccctaatataataaaactttaaccacttccatctcactaatttcctaaatttaaataacaatttcaatctatatctcaattttctaacctatttctcattccatttaatcc

SEQ ID NO: 350760 - DNA, 334 bp, Zea mays
  unsure (1)..(334): unsure at all n locations
cggaanacccggccgacccacgcgtacagaaaggcttcttccataacttccncancatttttattaacgtcaaccccatctacttcaaagtcacgcttttttctactttaggctagtcacacttnacttacncctcactccccaatccttatccaaattaaagaacttcttcttctattaattacattatattgtaatttgtcttctaatacgtcgttaccattattttaatatttcataataaccctcttttattttttataataatatatatcttttaactaaaaatatatatttacttgtccttccctcctataaattattccaatttttt

SEQ ID NO: 350761 - DNA, 442 bp, Zea mays
caactggcaacatagaaagcacaatagtgttccaacaatggcagccaaaatatttggcgtcgttatgctccttggtcggggggcaagagctgctacggcgaccattttcccgaaatgctcgcaagctcctatagcttcccttcttcccccgtacctctaaccagcggtgtcttcggtatgtgaaaacccaattcttcaaccctacaggatccaacaggcaatcacagctggcattttacctttatcacccttgttcctccaacaatcatcagccctattacatcagttacctttggtgcatttattggcacaaaacatcagggcacaacaactacaacaacttgtgctagcaaaccttgctgcctactctcagcaacagcagttgcttccattcaaccaactagctgcattgaactctgctttttatttgcaacaacaacaa

SEQ ID NO: 350762 - DNA, 302 bp, Zea mays
  unsure (1)..(302): unsure at all n locations
ccatcacncccacgcnncccgcccaaaacttccaactttttcttccccaaacatacaaacantataaccagccaattttttaacacaaatcgcaagccactaaacctnccctttacaactaaaataactataaaaaccctatctatacccaacattttccccctccaaaacattcccattttacccaccttcacaaaaacaaaataacccctcaccaatcccccccccaaacaatttcccttcctttatttaaaatattactcccctcttaaccccccaattatccccactttaattctctt

SEQ ID NO: 350763 - DNA, 173 bp, Zea mays
caaaaaaccaaaaacgcaccgtcctgtattctttttcactaagttctagttcttttgggcttggttaaaaatataaacagggaggtttcaaaaaaaaaaaaaaaaaaaaaaaaacagataaaaacaaaaaaatggcccaacttaataaaaaaaaaaaggggcgccccttttaa

SEQ ID NO: 350764 - DNA, 221 bp, Zea mays
cgccctcttttagatttcttatgagttatagttcaataataaagttttttatctaatgttggtcgcttcccataaataagaagcggcattcctaaaaaaaaaaaaaaaaaaaaaaaaaaaaaaaaaaattttaaaaaaaaaaatataaaaggccggcctctaaaaaaaattacaacttaacttacactttcatccaacgttataaatttttttttagtatt

SEQ ID NO: 350765 - DNA, 411 bp, Zea mays
  unsure (1)..(411): unsure at all n locations
ttccactctaccgcgcgctcggaaaactcctctttcttctaaggaggtgaaccaaggacgaggtatgtgtctcctgataaggggggggtctttccncctnttcctacaattcttttgtcttgctccaggcggctatgcattcattgtagttcgtcctcgcggatcctccttcatttctttctgttcccacccaaaattaaaatccttttgtaaattagagacgcgaatccttgtccctaagccccaaaacctcctatttctttcgccaattttttccgcctaactctttccttccttccaccggtcggccttgactgatccttctcacttgttttttcttagtttcgaattttccttttgcttacaaattcctatataacactaattcctgttctttccacttttaatttt

SEQ ID NO: 350766 - DNA, 66 bp, Zea mays
  unsure (1)..(66): unsure at all n locations
atcttactcttccatccaacttcatanctctccgatggtttttcctatatttaatgcacgtcccnc

SEQ ID NO: 350767 - DNA, 296 bp, Zea mays
tccgtttctttctttaacatccaatctttttttttccgcaccagcatcttaacacggcctggattacccccaaactgaccgggtcattccatttttaaatattctacttatccaaccaaccccaccaattcaaccaattccattttcctttacctactttttcactttattaacaccctttagacaattttttcccttattaaatttccacttaccatatccaaaattttccttgtttattttatttctcccatatatttccatttcttttttaattttttttctttatttttttt

SEQ ID NO: 350768 - DNA, 386 bp, Zea mays
attgtactaaatctgtagcgcaccccttaattttttttcttttggaacaggaactactgtgagggcgattaacacatcatgggtagggactgtattcataacaataaaagaggggaaatataatatatgtttccacaactcccacggctaacatgtatgacctacatactaggtggatatggaccgaaaagattaggcctgatcaacattccatgcttctttacttatgcagccacactccaacatttgtctgacatggagatgccttatctatagtcctaaaaaacaaatactacttttatacatcaggggtaataaatcctacatttcctgcctattcttgattgacttaactttataggtttttgcctattttaccatcaaaa

SEQ ID NO: 350769 - DNA, 429 bp, Zea mays
cccacgcgtccgcaactagcaacatagaaagcacaatagggtaccaacattggcagccaaaatattttgcctccgtaggctccttggtctttctggaggggctgctacagcaaccattttcccgaaatgctcgcaagctcctatagcttcccttcttcccccgtacctctcaccagcggtgtctttggtatgtgaaaacccaattcttcaaccctacaggatccaacaggcaatcacagctggcatcttacctttatcacccttgttcctccaacaatcatcagccctattacatcagttacctttggtgcatttattggcacaaaacatcagggcacaacaactacaacaacttgtgctagcaaaccttgctgcctactctcagcaacagcagttttttccattcaaccaactagctgcattgaactc

SEQ ID NO: 350770 - DNA, 163 bp, Zea mays
  unsure (1)..(163): unsure at all n locations
gaacaagtagttgcacacccccttntcctttattaatccccgcctcctaataaccacatgaaaccgattctttctcattcgggggggctcattttatcacccctccaagattttggtctccaactgcctatttcatagtttgaagtgtatcacactattcttt

SEQ ID NO: 350771 - DNA, 73 bp, Zea mays
cttttcttccccttccatgcgacctcatatcgcgggggttttttcacctaatgggagggcacctaccaacctc

SEQ ID NO: 350772 - DNA, 218 bp, Zea mays
  unsure (1)..(218): unsure at all n locations
gaanccggggccgacccactcttccggcccttcttcggccgccacttctgcttttttttatcatcacgtcgccaagtataagtgcgaggttttcttcacggtttggcgcgccttctccaaccactaccaccaccattttcaccacggttgccactgcttctttttcctcaagaccagtgtcgaataggacatttacaccttcaccggctaggtccact

SEQ ID NO: 350773 - DNA, 91 bp, Zea mays
  unsure (1)..(91): unsure at all n locations
gaattncngggcgcggcccaggcgttccgtgttttggaaacacaaagcgctgaacaaaaaggtgtatatattaccatagtcgagtgatgta

SEQ ID NO: 350774 - DNA, 108 bp, Zea mays
tcgcatcattggcggtgccctcttttagattgcttattagttgtcattcaataatgaagttttttggctgatgtatgtggcctcctagaaataagaagttatatttcc

SEQ ID NO: 350775 - DNA, 329 bp, Zea mays
ttacctactctttctcgctgcgagacaacacacccgttaacggtgctttataatgccggctcgcctcgaacaaactgctgcatctatatcccactctattctttttaattacgataaattgtactgagcctacttgaccgctcccccttgacttcctttctctccaccatcctttcttattattttacgaactctttctcacacacgctatctcttttaactacttacatctatacttgttctgaacaattatcttaccttcactatcaaccttgacattatcattttcatagaaatgaaacttacattgcgactttttttgcccctat

SEQ ID NO: 350776 - DNA, 52 bp, Zea mays
tgctttctcccacagccaaaaaaaaccatcgaagggttcttactcatgcatg

SEQ ID NO: 350777 - DNA, 309 bp, Zea mays
  unsure (1)..(309): unsure at all n locations
ctacgcttacgtgatcgactgatctgntatgggactgttgacttgggcggacgaccagacgctaggtctgtgcaaggcgccgcctcatactatagcacatggagacactggtccgaatgaaccgacaaaaccggcggcggcgtgtgccagttcgaacctgacacacggccacaactgatttcgtgcaagtctacaggcagcacagtcagtcaagcgtagttcacccgtgctcactcgatgcagactgccaatgccagcaggtccggtaccaactcgtcgtcacccgacatcgtcgtcggctcggcttga

SEQ ID NO: 350778 - DNA, 408 bp, Zea mays
  unsure (1)..(408): unsure at all n locations
tcggcgcgagggaaaacgacctattttaaccggcgatctacaagtcacaactaaaggaaggtgtcggaccaattggggggctaacgttaacaattacttttacttgattaaggattaggaggttaagcttggcttggaacttggcttaagatttttgagggggtgcgcattttcgaaacaaaaacaggaacctttatttgttaaggccctataggggaatgtgtgtgcccaaaaaattgttttgtgtttttattttcacatatcttaactatttccgatttatttatcttgtgtgcaacaagcactattctcctcttaaaaaaaaaaaaaaagaaagataaaaaaanataataattaatttaattttttttttattttnntttttttgtgtttttgtggtgttttttt

SEQ ID NO: 350779 - DNA, 275 bp, Zea mays
aattcccgaatttccctttcgacttacttttttaaacaaaaagaaaaaaacgcgtggtggtattatttccactggggctgcgcacaacaacaactatctaccatcgcatagcacacatggactggtaacaccgctatgccgtggccattgccaaagctaccgcccatgtgcccagtgccaggaaccatcaccttttcttggtcccgccaggtcttcactaggctgactttaggaacgcttggtaaaccatatctgctcaatcaatggcaaatggg

SEQ ID NO: 350780 - DNA, 108 bp, Zea mays
tcgcatcattggcggtgccctcttttagattgctgattagttgtcattcaataatgaagttttttggctgatgtatgtggcctcctagaaataagaagttatatttcc

SEQ ID NO: 350781 - DNA, 173 bp, Zea mays
ttgcgggtcgcccgacacattgggtgacacatggatgtccggctcgagcggctactatgattcaaccaactgactttgtgctactgtgttaccctcctacgacagcgaccacacaaactgaatacacatggaccggctaacccattggttgtttgcggaggacagcatgaaca

SEQ ID NO: 350782 - DNA, 233 bp, Zea mays
ttttctttcaacaaaaacaaaaaaaaaatcgccaggcttaataacacatggcgccgcggccacaaatataacatattatccacaaaacccaaatcacaccgccaacgcgcacaactgcaaaactagtattttccaactaccattcccactttaatattttacacacacaatttctttttttttttctccccactatgttactaaacccagctcacattatttttttttttttt

SEQ ID NO: 350783 - DNA, 120 bp, Zea mays
ttttctttcttcaaaggccaatataaaatatggagggttaattactcataacttgtgggctataaatatttcatattatccacaaaatgtatttcattttactaactttctcaacttcta

SEQ ID NO: 350784 - DNA, 389 bp, Zea mays
ttttcatttttcacccgccactctaaaagagcgcaggggtaaataacaatgcgtgccgggttatatcctctctataatctcacctaaatttcaatacactctccgaccctttacaactttaccaactaggaaaacccttaccttacccaacttaataacccggacaaacatacctctttcaccatctttcttaatatacaaaaatccctaaccaaacactcttcccaacaatatcacaacctgaattgcaaactgtactccccttttacccgcacattaaacacaatctattgttttattttacactctaattcatactaatacaaatttccaatacacctaacacctctctactataactttttttcataatatctaactccacattt

SEQ ID NO: 350785 - DNA, 513 bp, Zea mays
  unsure (1)..(513): unsure at all n locations
aaaaaaaaaagggaagggagaaaaaananaaaaatnaaggaatagaaaaaaaatttttttttaaaaaaaaaaaaaaaaaaagggaagggaaaaaaaaaaagggggggggntataaaaaaaattaaaaaaaaatataaataaaaaaataattatttaaaaaaaaaaaaataaaaaataaaaaaaatataaataattaaaaaaaaatttaaaaaaaaaaaaaaattttaaaaaaataatatattttttaaataaataaaataaaattaattttataaggaattaaaaaagagaaaagaaatgaataaaaaaattaaaataaaattaatattaagaataataaaaaaaaaaaaaataaaatgtattataaaatatataaataaaatatagaaaaaataaataatttattaaaaaattttaaaataataaacaaactaaaaaaaaactttgagaataaaaaaacaatagattgattaactattaaaaaaacaagcaatttttatttataattaaaaa

SEQ ID NO: 350786 - DNA, 100 bp, Zea mays
tcttctatacactcacctaaatataattcactccccttccttttacaacatcctcacttataaaaccctatccttacccaacttaatcacctcccaacac

SEQ ID NO: 350787 - DNA, 336 bp, Zea mays
atgacaaaccctgaccgaagggagcgggtttcgaatgattcatgggggaatgcgagaaggtctataaaatgcgattataccattaacctgtccgttgaccacaatttccaccactgaatagacagggattgtatattgatcaacacgttccctgtatcatcgcctatcgagacttgccgaaacatggcacgacgccctgcgtgcgggttcacgttcacaccactgagacatatatcgcggatcgtaccctgcctacagcacgcctattatcaaccgacccgcattgtgactcgctcctcgcgactgacactcgatctaggcacgtaaacgcccgtc

SEQ ID NO: 350788 - DNA, 404 bp, Zea mays
tcgcaactagcaacatagaaagcacaatagtgtaccaacaatggcagccaaaatattttgcctccttatgctccttggtctttctgcaagtgctgctacggcgaccattttcccgaaatgctcgcaagctcctatagcttcccttcttcccccgtacctctcaccagcggtgtcttcggtatgtgaaaacccaattcttcaaccctacaggatccaacaggcaatcacagctggcatcttacctttatcacccttgttcctccaacaatcatcagccctattacatcagttacctttggtgcatttattggcacaaaacatcagggcacaacaactacaacaacttgtgctagcaaaccttgctgcctactctcagcaacagcagtttcttccattcaaccaac

SEQ ID NO: 350789 - DNA, 198 bp, Zea mays
tttctctttcgacgccagcacctctaaaagggccaaggtgtactaccaatgcatgcgacgatataaacctcctaatgtctcaactaaatttaatacactctccgacgcttaacaactttccgactatgaaaaccacttctatacccaacttaattaccttgcaacacataccacttgtgtcatctgtctttataaaca

SEQ ID NO: 350790 - DNA, 354 bp, Zea mays
tttcgatgcctggatttgggtaatatgtgaggaggtgcaacgttctctgtgggtgtagatacaagtgtggtttttcacaggttcggatacaagaaaagagccgaattagtgtatgaatggagataactactttttttacttggtttctaacctgaatatggatttgtcgttgtattcttttgaatctagattattcttcgtttacagaattcctaccttaaagagttaatttttttatcttaaggtaggtgttttcacaatccgggcaaaataaacgtaagggttgtctatagaaaatagaatttaaatggtataagggatcaacctcctttaattgtttgataagattaattt

SEQ ID NO: 350791 - DNA, 52 bp, Zea mays
aattccctaaccttaattgcgaattggactcgccctgtaccggcgcattaaa

SEQ ID NO: 350792 - DNA, 282 bp, Zea mays
tcttaaacaaacaatcaaaaaaaatccaggggtacattcaaatgcatgcgcgggtcataaatataatataataaacacctaaattcaattcaactaaacaaaaatatacaaacataaaaactaaaaaaaaccataaaaagggcccaacttaataaaccttcaaaacaatccccccttcgccagctttcttaatatttttatatgccctcaccaaactccatttccaacacctgctcaaaacaaatggctaattggaaaaccccctggagccccaaactaaac

SEQ ID NO: 350793 - DNA, 179 bp, Zea mays
tcgcgccctcttttagatttcttatgagtgataggtcaataataaagttttgtatctgatgtttgtggcttcccagaaataagaaagtacatttctaaaaaaaaaaaaaaaaaaaataaaaaaaaaaaaaaaaaaaaaaaaaaaaaaaaaaaagggcggcctttttttttgttctctgt

SEQ ID NO: 350794 - DNA, 407 bp, Zea mays
tcggctcacttgctccaagttccattattacacagttcctcccaccagttacttcaatgggcttcgaacacccagctgtgcaagcctataggctacaacaagcaattgcggcgagcgtcttacaacaaccaatttcccagttgcaacaacaatccttggcacatctaacaatacaaaccatcgcaacgcaacagcaacaacaattcctaccagcactgagccacctagccatggtgaaccctgccgcctacttgcaacagcagttgcttgcatcaaacccacttgctctggcaaacgtagttgcaaaccagccacaacaacagctgcaacagtttctgccagcgctcagtcaactagccatggtgaaccctgccgcctacctacaacagcaacaactgctttcatct

SEQ ID NO: 350795 - DNA, 70 bp, Zea mays
  unsure (1)..(70): unsure at all n locations
cgtacccgcgtgcattgcgacgtcnnatagctcttctattagtgtnncacctaaattcgaattcaactgg

SEQ ID NO: 350796 - DNA, 129 bp, Zea mays
tcgtccgctacgatctctaacctgggctggtgttatatacaaaggggcggggcaacaccaacttgaggaccccccaactcgccagctgcagccatggtgaaatattcgactgagccaaccaaccccacc

SEQ ID NO: 350797 - DNA, 401 bp, Zea mays
ttgcaacatagaaagcacaatagtgtgccaacaatggcagccaaaatattttgcttccttatgctccttggtctttctgcaagtgttgctaccgcaaccattttcccacaatgctcacaagctcctatagcttcccttcttcccccatacctctcaccagcggtgtcttcaatgtgtgaaaacccaattgttcaaccctacaggatccaacaggcaatcgcaacaggcatcttaccattatcacccttgttcctccaacaaccgtcagccctattacagcagttacccttggtccatttggtggcacaaaacatcagggcacaacaactacaacaacttgtgctagcaaaccttgctgcatactctcagcaacatcagtttcttccattcaaccaactggc

SEQ ID NO: 350798 - DNA, 141 bp, Zea mays
atgctcattcttctacacacgatctaaaagatccagcgtgacctactcatgcatgcggggctataaaccttctatagcgccaccacaattcaattcactttccaacgcaatacaacattgctactgcgaacacacctgcac

SEQ ID NO: 350799 - DNA, 405 bp, Zea mays
caactagcaacatagaaagcacaatagtgtgccaacaatggcagccaaaatattttgcctccttatgctccttggtctttctgcaagtgctgctacggcgaccattttcccgaaatgctcgcaagctcctatagcttcccttcttcccccgtacctctcaccagcggtgtcttcggtatgtgaaaacccaattcttcaaccctacaggatccaacaggcaatcacagctggcatcttacctttatcacccttgttcctccaacaatcatcagccctattacatcagttacctttggtgcatttattggcacaaaacatcatggcacaacaactacaacaacttgtgctagcaaaccttgctgcctactctcagcaacagcagtttcttccattcaaccaactagc

SEQ ID NO: 350800 - DNA, 364 bp, Zea mays
tcggcaacatagaaagcacaatagtgtacggacaatggcagccaaaatatgttgcctccttatgctccttggtctttctgcaagtgctgctacggcgaccattttcccgcaatgctcgcaagctcctatagcttcccttcttcccccgtacctctcaccagcggtgtcttcggtatgtgaaaacccaattcttcaaccctacaggatccaacaggcaatcgcagctggcatcttacctttatcacccttgttcctccaacaatcatcagccctattacaacagttacctttggtgcatttattggcacaaaacatcagggcacaacaactacaacaacttgtgctagcaaaccttgctgcctac

SEQ ID NO: 350801 - DNA, 124 bp, Zea mays
  unsure (1)..(124): unsure at all n locations
aaaaaaaaaggggggggggggggnaaaaaaaaaaaaaaaaaaaaagaagaaaaaaaaaagtttttatttaaaagaaaaaaaaaaaaaaaaaggggggatgaaggaaaaaaaaaagggggggggg

SEQ ID NO: 350802 - DNA, 152 bp, Zea mays
cctaatcgtaccctccctttatcttctcattaatctcttcctttcttctcttttacactcaacttaacctctacactttccatctccctaccaccctctcctttcactttcttcccttcctttctctcccctttttcactctttccccttca

SEQ ID NO: 350803 - DNA, 63 bp, Zea mays
  unsure (1)..(63): unsure at all n locations
cgtgcatgcgacggtcatnagcttcttctattagtgtcacgctttaaattcaattcaactgnn

SEQ ID NO: 350804 - DNA, 240 bp, Zea mays
tcgatcctctccctcgccatcatcgtctacgtctccgacgctccccctcggtcccctccccaccttccgttctctcccttcttggatagggttagagactgagctaccccgcacgctgcgcgagccatggtcttctttacctgttcccaggtcggcgcgaccgcagcgggcggagcctcgcccttcctcggctaccggaggcggagcggcccctggggagccaccccgtcgagcttcctt

SEQ ID NO: 350805 - DNA, 229 bp, Zea mays
ggtaccccttgaaggaccgggtcggaatttccgggttggaccaacccttccgataggtttagagggtaaggggtttttttaaaaaaactaactttactttggtttggatattatttgtttacttttttttttcgttttctatagccaattcatgggggttttctttttaatgtttggaattacaaaattgttgttttatttaatattttttttttttctaacttttttt

SEQ ID NO: 350806 - DNA, 139 bp, Zea mays
atggtatatcgagcgtgtctagtttataacccgaaccccaacattggcctgatgctgatggcatgtagcccatagctccgcagttggattaaccggaggcggcggcaactactgtgaaaactacatcgaatgctagctt

SEQ ID NO: 350807 - DNA, 294 bp, Zea mays
ctactatactatactctaggaagcaaggacaccaccgccatggcagccaagatgcttgcattgttcgctctcctagctctttgtgcaagcgccactagtgcgacccatattccagggcacttgccaccagtcatgccattgggtaccatgaacccatgcatgcagtactgcatgatgcaacaggggcttgccagcttgatggcgtgtccgtccctgatgctgcagcaactgttggccttaccgcttcagacgatgccagtgatgatgccacagatgatgacgcctaacatgatg

SEQ ID NO: 350808 - DNA, 325 bp, Zea mays
attcagaaacacaccaagcgaagcgcactagcaacaacctaacaacaatggctaccaagatattagccctccttgcgcttcttgcccttttagtgagcgcaacaaatgcgttcattattccacagtgctcacttgctcctagtgccattattccacagttccttccaccagttacttcaatgggcttcgaacattcagccgtgcaagcctacaggctacaactagcgcttgcggcgagcgtcttacaacaaccaattgcccaattgcaacaacaatccttggcacatctaaacctacaaaccatcgcaacgcaacagcaacaaca

SEQ ID NO: 350809 - DNA, 284 bp, Zea mays
cggacgcgtgggcgaaccttcttgtgcatcttcacgccgtggaaaattcagaaccgcaaatctccgaccgagcagctgaaaagcgtcgagctgacgcgcttggtgccttgcctgctcgccgcatggcagatcctggaggtgagctgcaggagctccggcaaggttcggcggctcgcggaggtgacgacggtccgctacgcgctgtacgccatgaaccgcaagctcggccccggggccccgccggcgctgcacgttgagggctgaagggacggttaggagcccgt

SEQ ID NO: 350810 - DNA, 350 bp, Zea mays
cacaaaacatcaaggcacaacaactacaacaacttgtgctaggaaaccttgctgcctactctcagcaacagcagtttcttccattcaaccaactggctgcattgaactctgctgcttatttgcaacaacaactaccattcagtcagctagctgctgcctacccccagcaatttcttccattcaaccaactggcagcattgaactctgctgcttatttacaacagcaacagctaccaccattcagccagctagctgatgtgagccctgttgccttcttgacacaacaacagttgttgccgttctacctgcacgctgcgcctaacgcttgcaccctcttacaactgcaacaa

SEQ ID NO: 350811 - DNA, 179 bp, Zea mays
tcgggtcccacttggaacctaggaagggccattgtggacccaccattgccggccaaatattttggcctcctaagcttcttggtctttctgcaaggggttgttacgggagcctttttccgaaatggttggaaggttctataaccttccttatttccccgtaacttttaacaagggggttt

SEQ ID NO: 350812 - DNA, 228 bp, Zea mays
  unsure (1)..(228): unsure at all n locations
cagaaccacaccaagcgaagcacattagcaacaacctaacaacaatggctaccaagatattatccctccttgcgcttcttgcgcttttggggagcgcaacaaatgcgttcattattccacaatgctcacttgctccaagttccattattacacagttcctnccaccagttacttcaatgggcttcgaacacccagctgtgcaagcctataggctacaacaagcaattg

SEQ ID NO: 350813 - DNA, 78 bp, Zea mays
agaatgccacgaaatagctgttgtatagtggcaggtaaacaaagttgactggacgccggtttacaacaagccaactga

SEQ ID NO: 350814 - DNA, 266 bp, Zea mays
gtcagcctagcaattagctcatcgactccagattggagaactcgacaccatgaaggtgctgatcgttgcccttgctctcctggcgctcgctgcgagcgccgcctccagtacaagcggcggctgtggctgccagacaccaccgtttcatctaccgcctccgttctatatgccgcctccgttctatctgccgccgcagcagcagccgcagccatggcaataccccactcaaccaccgcagctaagcccgtgccagcagttcggatcct

SEQ ID NO: 350815 - DNA, 95 bp, Zea mays
gtgaggcttactaatgacctctttcactatgcgagcatatatgactactgggaggccatgcattgttgacccatgtgttgaggcgacagcgactg

SEQ ID NO: 350816 - DNA, 242 bp, Zea mays
gttaaacctcctggacgcctgactgcctatgatagcgcatatccttccgggtagactaatcctagctgaccaatgggcttgagtgagttcagctgcacctatgcaactctcattctaagctacgactgattccttatcatcagcgacaagatcgccaccttcctgaagtctgtcatcatcacatttgagtactacttgccggctctaattcgtaggttcatctagaatctatagccctttag

SEQ ID NO: 350817 - DNA, 309 bp, Zea mays
gtcttcaaaccattagctctatctactccagagcgcataagaacccgatcgacaccatgagggtgttgctcgttgccctcgctctcctggctctcgctgcgagcgccaccttcacgcatacaagcggcggctgcggctgtcagccaccgtcgccggttcatctaccgacgccggtgcatctgccaccttcggttcacctgccacctccggtgcatctcccaccgacggaccacctgccgccgccggtccacctgtcaccgtcgggccatgtgccgtcgccggttcatatgacgtcgtcaccatgccact

SEQ ID NO: 350818 - DNA, 216 bp, Zea mays
gcattcagaaacacaccaagcgaagcgcactagcaacaacctaacaacaatggctaccaagatattagccctccttgcgcttcttgcccttttagtgagcgcaacaaatgcgttcattattccacagtgctcacttgctcctagtgccattattccacagttcctcccaccagttacttcaatgggcttcgaacatccagccgtgcaagcctacag

SEQ ID NO: 350819 - DNA, 187 bp, Zea mays
accacgcgtccgcagcaaagcggcagtgcgtagagaggatcgtcgcacagaacagcatgaagatggtcatcgttctcgtcgtgtgcctggctctgtcagctgccagcgcctctgcaatgcagatgccctgcccctgcgcggggctgcagggcttgtacggcgcttgcgcccgcctgacgacgatgat

SEQ ID NO: 350820 - DNA, 91 bp, Zea mays
gaccaacttgcaccattgaagggccaatttggtcccaacaatggcagccaaaaaattttgcctccttatgctccttgggattttgggaagg

SEQ ID NO: 350821 - DNA, 110 bp, Zea mays
gcttattagttgtaattcaataataaagttttttggatgatgtatgtaacttcttatttctggttggccacatacatcatccaaaaataagaagttacatttccagattc

SEQ ID NO: 350822 - DNA, 71 bp, Zea mays
gagttatagttcaataataaagttttttatctgatgtttgtggcttcccagaaataagaaagtacatttct

SEQ ID NO: 350823 - DNA, 351 bp, Zea mays
  unsure (1)..(351): unsure at all n locations
attcagaaacacaccaagcgaagcgcactagcaacaacctaacaacaatggctaccaagatattagccctccttgcgcttcttgcccttttagtgagcgcaacaaatgcgttcattattccacagtgctcacttgctcctagtgccattattccacagttcctcccaccagttacttcaatgggcttcgaacatccagccgtgcaagcctacaggctacaactagcgcttgcggcgagcgtcttacaacaaccaattgcccaattgcaacaacaatccttggcacatctaaacctacanaccatcgcaacgcaacagcaacaacagtttctgccatcactgagccacctag

SEQ ID NO: 350824 - DNA, 352 bp, Zea mays
caactagcaacatagaaagcacaatagtgtaccaacaatggcagccaaaatattttgcttccttatgctccttggtctttctgcaagtgttgctaccgcaaccattttcccacaatgctcacaagctcctatagcttcccttcttcccccatacctctcaccagcggtgtcttcaatgtgtgaaaacccaattgttcaaccctacaggatccaacaggcaatcgcaacaggcatcttaccattatcacccttgttcctccaacaaccgtcagccctattacagcagttacctttggtccatttggtggcacaaaacatcagggcacaacaactacaacaacttgtgctagca

SEQ ID NO: 350825 - DNA, 332 bp, Zea mays
  unsure (1)..(332): unsure at all n locations
caactagcaacatagaaagcacaatagtgtaccaacaatggcagccaaaatattttgcttccttatgctccttggtctttctgcaagtgctgctaccgcaaccattttcccacaatgctcacaagctcctatagcttcctttcttcccccatacctctcaccagcggtgtcttcagtatgtgaaaacccaattcttcaaccctacaggatccaacaggcaatcgcagcaagcatcttacctttatcacccttgttccttcaacaaccgtcagccctattacagcagntacctttggtgcatttgttggcacaaaacatcagggcacaacaac

SEQ ID NO: 350826 - DNA, 299 bp, Zea mays
cagaccattagctttatctactccagagcgcagaagaacccgatcgacaccatgagggtgttgctcgttgccctcgctttcctggctttcgttgcgagcgccacctccacgcatacaagcggcggttgcggttgccagccaccgccgccggttcatctaccgccgccggtgcatttgccacctccggttcacctgccacctccggtgcatctcccaccgccggtccacctgccgccgccggtccacctgccaccgccggtccatgtgccgccgccggttcatctgccgccgccaccatg

SEQ ID NO: 350827 - DNA, 348 bp, Zea mays
  unsure (1)..(348): unsure at all n locations
gcaacatagaaagcacaatagtgtaccaacaatggcagctaaaatattttgcctgcttatgctccttggtctttctgcaagtgctgctacggcgaccatttttccacaatgctcacaagctgctatagcttcccttcttcccccgtacctctcaccaacggtgtcttcggtatgtgaaaacccaattcttcaaccctacaggatccaacaggcaatcgcagctggcatcttacctttatcacccttgttcctccaacaatcatcagccctattacagcagttacctttggtgcatttattggcacanaacatcagggcacaacaactacaacaacttgtgctagcaaa

SEQ ID NO: 350828 - DNA, 340 bp, Zea mays
atagaaagcacaatagtgtaccaacaatggcagccaaaatattttgcctccttatgctccttggtctttctgcaagtgctgctacggcgaccattttcccgaaatgctcgcaagctcctatagcttcccttcttcccccgtacctctcaccagcggtgtcttcggtatgtgaaaacccaattcttcaaccctacaggatccaacaggcaatcacagctggcatcttacctttatcacccttgttcctccaacaatcatcagccctattacatcagttacctttggtgcatttattggcacaaaacatcagggcacaacaactacaacaacttgtgctagc

SEQ ID NO: 350829 - DNA, 94 bp, Zea mays
gcagttttaactactttagcggtggctcaaatctaaaaaattgtcatgaattcctaaggcagcagggcagccctttgggaatgccttttttcca

SEQ ID NO: 350830 - DNA, 349 bp, Zea mays
ccaacaggcaacatagaaggtggaatacagtagcaacaatagagcaacaatggcggccaagatattttccatccttatgctccttgctctttctgcatgtgttgctaacgcgaccatttttcctcaatactcacaagctcctatagctgcccttcttcccccataccttccatcaatgaccgcttcagtatgtgaaaacccagcccttcaaccctacaggctccaacaagcaatcgcaacaagcaacttacctttatcacccctgttctttcaacaatcgccagccctatctttggtgcagtcattggtacaaaccatcagggcacaacagctgcagcaactcgtgcta

SEQ ID NO: 350831 - DNA, 341 bp, Zea mays
ggaaaggtggttcccctggcgggtccgggcccggatttccggggtggaccaacccttccgatttttaatggaaggcggccgttctttttaaacaaacctaccttacgcacgcatgcatccaaataaatattttttggtgtgagctaactaaatttaattgactggcggtttacaaccaacggactggctaaacaatgcctgtacccacctaaattaattggctggaaatacatctttcttcagctggctgaataaataacaggaaggcacggaccgaccttcctaacaaatagttagcctgaatgaataatgaatggcaccctctatggacccattaatta

SEQ ID NO: 350832 - DNA, 316 bp, Zea mays
  unsure (1)..(316): unsure at all n locations
tccacatcgcaggagctcaaggccaccaccagccacatcaagcagttctcgcaggacctcaccaagggcttcacgtgcacccagagtcgcgccaatctcgcggcgggggagccaccgnccaccgcaccctcggcaccgacaccgccctcgaggcccacacccagcgccgccgctgcgcgtagctcgaccgcaccaagtccgatgcgcaaacctgttgttttctaggcggcggngatggcatgctcgagacggcgtatggcgtgccaactacgaggaaacctaggctacgacaatgatcgttgtccacgaacgcgag

SEQ ID NO: 350833 - DNA, 262 bp, Zea mays
  unsure (1)..(262): unsure at all n locations
ccttgctttcctggcgctcgctgcgagcgccgcctncagtacaagcggcggctgtggctgccagacaccaccgtttcatctaccgcctccgttctatatgccgcctccgttctatctgccgccgcagcagcagccgcagccatggcaataccccactcaaccaccgcagctaagcccgtgccagcaagtcggatcctgcggcgtcggcagcgtcggcagcccgttcctgggccagtgcgtcgagttcctgaggcaccagtgc

SEQ ID NO: 350834 - DNA, 249 bp, Zea mays
  unsure (1)..(249): unsure at all n locations
gcttccgcttgtagtgggagtgggagtggccgagtgggagaagggaagagatgagcagcagtgaggctagcacgcaagaccatggcgtgccggcgctcgaggcgcaggatagcacggatgaccatggcgtgcccgcgctcgaggcgcccacgcccgaggctacggacaaggtactggccgccatggcgcgactggcgcgacgtcngaagctggagctaaagcggctggggcgcactgcacccgttgggg

SEQ ID NO: 350835 - DNA, 320 bp, Zea mays
actagctgcattgaactctgcttcttatttgcaacaacaacaactaccattcagccagctacctgctgcctacccccagcaatttcttccattcaaccaactggcagcattgaactctcctgcttatttacagcagcaacaactactaccattcagccagctagctggtgtgagccctgctaccttcttgatacaaccacagttgttgccgttctaccagcacgctgcgcctaacgctggcaccctcttacaactgcaacaattgctgccattcaaccaacttgctttgacaaacccagcagcgttctaccaacaaccca

SEQ ID NO: 350836 - DNA, 336 bp, Zea mays
tggcaccataaaaggcccattggtgtcccaacattggcagccaaaatatttggcttccttatgctcctgggcctttctgcaagggctgttaccgaaaccattttcccacaatgctcacaagctcctatagcttcctttcttcccccatacctttaaccagcggtgtcttcagtatgtgaaaacccaattcttcaaccctacaggatccaacaggcaatcgcagcaggcatcttaccttaatcacccttgttcctccaacaaccgtcagccctattacagcagttacctttggtgcatttgttggcacaaaacatcaaggcacaacaactacaacaa

SEQ ID NO: 350837 - DNA, 335 bp, Zea mays
attttcagcattcagaaacacaccaagcgaagcgcactagcaacaacctaacaacaatggctaccaagatattagccctccttgcgcttcttgcccttttagtgagcgcaacaaatgcgttcattattccacagtgctcacttgctcctagtgccattattccacagttcctcccaccagttacttcaatgggcttcgaacatccagccgtgcaagcctacaggctacaactagcgcttgcggcgagcgtcttacaacaaccaattgcccaaatgcaacaacaatccttggcacatctaaacctacaaaccatcgcaacgcaacagcaacaacag

SEQ ID NO: 350838 - DNA, 136 bp, Zea mays
ccgaatccgacgctccatcgagtgtgtgcggtggcggcgggaggagacgaaagagaaatatgcaggcggtggcacgggcggcgcgtgggctcgcggctgcggcggtggcacgggcggcgcgtgggctcgcggctgc

SEQ ID NO: 350839 - DNA, 180 bp, Zea mays
cggacgatacatcatgatagaacggacattagtgtaccaacacagccagcaaaatattcagcttctaatgctcaacgactcatgaagcagggtcgataccgaaactactttactagactgctgaactaatcgaactgacactattgatcgaggatacctttcacctaccttttcaagaac

SEQ ID NO: 350840 - DNA, 338 bp, Zea mays
caactagcaacatagaaagcacaatagtgtaccaacaatggcagccaaaatattttgcttccttatgctccttggtctttctgcaagtgctgctaccgcaaccattttcccacaatgctcacaagctcctatagcttcctttctttccccatacctctcaccagcggtgtcttcagtatgtgaaaacccaattcttcaaccctacaggatccaacaggcaatcgcagcaggcatcttacctttattacccttgtttctccaacaaccggtagccctattacagcagttacctttggtgcatttgtggcacaaaacatcaaggcacaacaactacaaca

SEQ ID NO: 350841 - DNA, 206 bp, Zea mays
gcacataaaagcccatagtgtccaacatgcagccaaaaatttgcttcttagctcttggcttttgcagtgtgtaccgaccatttccacatgtacagctctatgttccttttcccataccttacaggggtttaatgggaaaccaatgtaacctcagaccaacagaatgaacagatttacattataccttgtctcaaaccgtagcctat

SEQ ID NO: 350842 - DNA, 327 bp, Zea mays
ttttgagcattcagaaacacaccaagcgaagcgcactagcaacaacctaacaacaatggctaccaagatattatccctccttgcgcttcttgcgctttttgcgagcgcaacaaatgcgtccattattccacaatgctcacttgctcctagttccattattccacagttcctcccaccagttacttcaatggccttcgaacacccagctgtgcaagcctataggctacaacaagcgattgcggcgagcgtcttacaacaaccaattgcccaattgcaacaacaatccttggcacatctaacaatacaaaccatcgcaacgcaacagca

SEQ ID NO: 350843 - DNA, 62 bp, Zea mays
ccctgccttccacctcattacttttttattgtggcaccttaaatcaaatcaattgcccgcgg

SEQ ID NO: 350844 - DNA, 240 bp, Zea mays
tggaccaacccttccgaacaataacattcatcaactcaagagggaaaacgagcccgctatccacttggtggccgtccctggccgcacaccatggttacgccttggtgttggacgccactttacccatacaagtggcgtttgcgggttatagttactggcggcgaacgatttaccggcgccggtgcatatgtcacctagggttcacctgctaccttctgtgcatttcccaccgccgttcca

SEQ ID NO: 350845 - DNA, 323 bp, Zea mays
ccaccggcgacggcgaggccgaccgcactggccctcttcgtgcggatctctttcgcgtgctcgcaggcgcgtcctgggacacgggagaagagaccttggtgagtggcagcggcaggccatggaggcgctgctggtgacactgcttctactcctactatcctttaccctcgccgcatcacaatggtgcgtgtgcaggcaggacgcggcgcaggccgcgctgcataagaccatcgactacgcgtgctgttccagtgctgactgcaactccattcatgtgagcggcgcgtgctacaacctcaacaacgacccggcgcactgtttct

SEQ ID NO: 350846 - DNA, 327 bp, Zea mays
aagcacaatagtgtaccaacaatggcagctaaaatattttgcctccttatgctccttggtctttctgcaagtgctgctacggcgaccattttcccacaatgctcacaagctcctatagcttccctttttcccccgtacctttaaccaacggtgtcttcggtatgtgaaaacccaattcttcaaccctacaggatccaacaggcaatcgcagctggcatcttacctttatcacccttgttcctccaacaatcatcagccctattacagcagttacctttggtgcatttattggcacaaaacataagggcacaacaactacaacaactt

SEQ ID NO: 350847 - DNA, 329 bp, Zea mays
atctaaacctacaaaccatcgcaacgcaacagcaacaacagtttctgccatcactgagccacctagccgtggtgaaccctgtcgcctacttgcaacagcagctacttgcatccaacccacttgctctggcgaacgtagctgcataccagcaacaacaacgtctgcaacagtttatgccagcgctcagtcaactagccatggtgaaccctgtcgcctacctacaacagcaacaattgctttcatctagcccgctcgctgtgggcaatgcacctacgtacctacaacaacagttgctgcaacagattgtaccagctctgactcagctagct

SEQ ID NO: 350848 - DNA, 81 bp, Zea mays
cctttcctctctgtgcggttaaagaacaagagcggggggtttataggattcaagcatacttacacttacttgcaacgtttt

SEQ ID NO: 350849 - DNA, 339 bp, Zea mays
  unsure (1)..(339): unsure at all n locations
caacaagctactcaaagtgcggtggcaatcttgacagcagcacaatacctaccatcaatgtgcggcttgtaccactcatactaccaaaataatccatgcagcagcaatgacattagtggtgtttgcaattgaagaattgtgtctacctagccgttatactcctataacggtgttaagcaataaagtaccatacattnaaaaaaaaaaaaaaataaaaaaaaaaataataaaaaaaaaaaaaaaaaaaattaaaaataaatttttaaaataattttttataataataaattataaaaaaattataaaaataaataataaataaaaagggggggccttttt

SEQ ID NO: 350850 - DNA, 334 bp, Zea mays
cagcattcagaaacacaccaagcgaagcgcactagcaacaacctaacaacaatggctaccaagatattagccctccttgcgcttcttgcccttttagtgagcgcaacaaatgcgttcattattccacagtgctcacttgctcctagtgccattattccacagttcctcccaccagttacttcaatgggcttcgaacatccagccgtgcaagcctacaggctacaactagcgcttgcggcgagcgtcttacaacaaccaattgcccaattgcaacaacaatccttggcacatctaaacctacaaaccatcgcaacgcaacagcaacaacagttct

SEQ ID NO: 350851 - DNA, 334 bp, Zea mays
cacaaaacatcagggcacaacaactacaacaacttgtgctagcaaaccttgctgcctactctcagcaacagcagtttcttccattcaaccaactagctgcattgaactctgcttcttatttgcaacaacaacaactaccattcagccagctacctgttgcctacccccagcaatttcttccattcaaccaactggcagcattgaactctcctgcttatttacagcagcaacaactactaccattcagccagctagctggtgtgagccctgctaccttcttgacacaaccacagttgttgccgttctaccagcacgctgcgcctaacgctggcac

SEQ ID NO: 350852 - DNA, 330 bp, Zea mays
gaccaacaagcaacatagaaagtggaatccagtagcaacaatagagcaacaatggcgaccaagatattttccctccttatgctccttgctctttctgcatgtgttgctaacgcgacaattttccctcaatgctcacaagctcctatagcttcccttcttcccccataccttccatcaatgatagcttcagtatgtgaaaacccagctcttcaaccctataggctccaacaagcaatcgcagcaagcaacatacctttatcacccttgtttcaacaatcgccagccctatctttggtgcagtcattggtacaaaccatcagggcacagcag

SEQ ID NO: 350853 - DNA, 329 bp, Zea mays
caaaaacacaccaagcgaagcgcactagcaacaaactaacaacaatggctaccaagagattatcccttcttgcgctacttgcgctttttgcgagcgcaacaaatgcgtgcattattccacaatgctcacttgctcctaggtccattattccacagatgctgccaccagttacttcaatggccttcgaacacccagctgtgcaagcctataggctacaacaagcgattgcggctagcgtattacaacaaccaattgcccaattgcaacaacaatccttggcacatctaacaatacaaaccatcgcaacgcaacagcaacaacagttccta

SEQ ID NO: 350854 - DNA, 80 bp, Zea mays
attttggggaaggtgggtccgccggcgggtccgggcccgaatttccgggttggaccaacccttccggttttagatcggaa

SEQ ID NO: 350855 - DNA, 326 bp, Zea mays
attgagaccaactagcaacatagaaagcacaatagtgtaccaacaatggcagccaaaatattttgcctccttatgctccttggtctttctgcaagtgctgctacggcgaccattttcccgaaatgctcgcaagctcctatagcttcccttcttcccccgtacctctcaccagcggtgtcttcggtatgtgaaaacccaattcttcaaccctacaggatccaacaggcaatcacagctggcatcttacctttatcacccttgttcctccaacaatcatcagccctattacatcagttacctttggtgcatttattggcacaaaacat

SEQ ID NO: 350856 - DNA, 150 bp, Zea mays
ctgtagtatagccgctggctagctagctagttgagtcatttagcggcgatgattgagtaataatgtgtcacgcatcaccatgggtggcagtgtcagtgtgagcaatgacctgaatgaacaattgaaatgaaaagaaaaaagtattgttcc

SEQ ID NO: 350857 - DNA, 305 bp, Zea mays
  unsure (1)..(305): unsure at all n locations
cattagctttatctactccagagcgcagaagaacccgatcgacaccatgagggtgttgctcgttgccctcgctctcctggctctcgctgcgagcgccaccttcacgcatacaagcggcggctgcggctgccagccaccgccgccggttcatctaccgccgccggtgcatctgccaccttcggttcacctgccaccttcggtgcatcttccaccggcggtccacctggcgncgncggttcacctggcaccggcggtccatgtgccgccgccggttcatctgccggcggcaccatgccactacccta

SEQ ID NO: 350858 - DNA, 327 bp, Zea mays
agctaagcccgtgccagcagttcggatcctgcggcgtcggcagcgtcggcagcccgttcctgggccagtgcgtcgagttcctgaggcaccagtgcagcccggcggcgacgccctacggctcgccacagtgccaggcgctgcagcagcagtgctgccaccagatcaggcaggtggagccgctgcaccggtaccaggcgacatacggtgtggtcctgcagtccttcctgcagcagcagccgcagggcgagctcgcggcgctgatggcggcccaggtagcgcagcagctgacggcgatgtgcggcctgcagctgcagcagccaggtccct

SEQ ID NO: 350859 - DNA, 315 bp, Zea mays
  unsure (1)..(315): unsure at all n locations
caacccgtcccgccgcaacaatggaaccttttgtggggataggggcttgctcacncnngtgttttggcttagggatgagtcngnntggaatannagcttttaaacttctcnntcgctgnnctgtgggtngnnaagtgaccctggannattcgganannatttgtgaacctaaatccaaatactcccttncgtggatttttgtnnatgatattgttatttgttctgaccagtnnttgcgtctccaatcttttcaactgttggtatttctggtatggtattgtttttgggttcaaaaaattaaataatttattaaat

SEQ ID NO: 350860 - DNA, 317 bp, Zea mays
tgaaatgaaaagaaaaaagtattgttccaataaaaaaaaaaaaaaaaaaaaaaaaaaaaaaaaaaaaaaaaaaaaaaaaaaaaaaaaaaaaaaaaaaaaaaaaaaaaaaaaaaaaaaaaaaaaaaaaaatttaaaaaaaaaaaaaaaaagggcgccccttttaaaaatacaaaatttaatttccctgcttttcaacgtaaaaattttttatatagtgccccaaaataaaaataatttccccttctttaaaaaaatcaaaattggaaaaaccttttctttccaaaatttaataacttttaaaaaaattccctttttgc

SEQ ID NO: 350861 - DNA, 328 bp, Zea mays
caagcaacatagaaagtggaatacagtagcaacaatagagcaacaatggcggccaagatattttccatccttatgctccttgctctttctgcatgtgttgctaacgcgaccatttttcctcaatactcacaagctcctatagctgcccttcttcccccataccttccatcaatgaccgcttcagtatgtgaaaacccagcccttcaaccctacaggctccaacaagcaatcgcaacaagcaacttacctttatcacccctgttctttcaacaatcgccagccctatctttggtgcagtcattggtacaaaccatcagggcacaacagc

SEQ ID NO: 350862 - DNA, 329 bp, Zea mays
atcagtaccatcaatcatgattcatcttagtagtataggcaccaaatcaaatctgcaacatcaattatctaactccaaaaaccatgaagctggtgcttgtggttcttgctttcattgctttagtatcaagtgtttcttgtacacagacaggcggctgcagctgtggtcaacaacaaagccatgagcagcaacatcatccacaacaacatcatccacaaaaacaacaacattaaccaccaccacaacatcaccagcagcagcaacaccaacaacaacaagttcacatgcaaccacaaaaacatcagcaacaacaagaagttcatgttcaa

SEQ ID NO: 350863 - DNA, 159 bp, Zea mays
  unsure (1)..(159): unsure at all n locations
cggacgcgtgggtggcggaggtgttctccgtgcgcagcanttgccgccgtagaaagatattattccacctttcgaccaatttccttcccctaatcctctaatgttccccatatactcattttttatttacatcattttctacctttttttttttacctt

SEQ ID NO: 350864 - DNA, 260 bp, Zea mays
gtaaaatctggtaactcggaatttccgaaaacagatttgattcaattcatcaaggattttttaccaacacttgggagaggtgcttaccctttttttaggacacttcgaccggaggattagacaaggtccgatcggggtgctggggtttaagaggtaccgggtggaatagcttgaaaaatttaccatatacaacggccggaccctttagaagggccttttaggggaatggtcaagatattatggaccaggaaaggatttta

SEQ ID NO: 350865 - DNA, 336 bp, Zea mays
tagcaacatagaaagcacaatagtgtaccaacaatggcagccaaaatattttgcctccttatgctccttggtatttctgcaagtgctgctacggcgaccattttcccgcaatgctcacaagctcctatagcttcccttcttcccccgtacctctcaccagcggtgtcttcggtatgtgaaaacccaattcttcaaccctacaggatccaacaggcaatcgcagctggcatcttacctttatcacccttgttcctccaacaatcatcagccctattacagcagttacctttggtgcatttattggcacaaaacatcagggcacaacaactacaacaa

SEQ ID NO: 350866 - DNA, 327 bp, Zea mays
attttgagcattcagaaacacaccaagcgaagcgcactagcaacgacctaacaacaatggctaccaagatattagccctccttgcgcttcttgccctttttgtgagcgcaacaaatgcgttcattattccacaatgctcacttgctcctagtgccattattccacagttcctcccaccagttacttcaatgggcttcgaacacctagctgtgcaagccaacatgcaacaacaagcgcttgcggcgagcgtcttacaacaaccaattgcccaattgcaacaacaatccttgccacatctaacaatacaagccatcacaacgcaacagc

SEQ ID NO: 350867 - DNA, 334 bp, Zea mays
cttccttatcgtctcttcctttcaccccctcgaccccgatcgaatcgctcgaacaattccctgtgcatcgatcgatctaggcttgcgcgaggatccaattccatccggctctcctttgagctcgtgatcctcggagttggaggagttcttcgcgagtctctttttgccccgatttctttttggcttatttgtgcgagctttctcaggagcagaagggaagaggcagtttgcaattccgatgcacccaggcctcaagattcaactctgaggccttatccgaggcatccgcatcgatctccgcaagaggatgggtaacgtgggaagcaacggtgga

SEQ ID NO: 350868 - DNA, 336 bp, Zea mays
attaaaaaacacaccaagcgaagggcactagcaacaacctaacaacaatggctaccaagatattagccctccttgcgcttcttgcccttttagtgagcgcaacaaatgcgttcattattccacagtgctcacttgctcctagtgccattattccacagttcctcccaccagttacttcaatgggcttcgaacatccagccgtgcaagcctacaggctacaactagcgcttgcggcgagcgtcttacaacaaccaattgcccaattgcaacaacaatccttggcacatctaaacctacaaaccatcgcaacgcaacagcaacaacagtttttgccat

SEQ ID NO: 350869 - DNA, 337 bp, Zea mays
atttagaccaactagcaacatagaaagcacaatagtgtaccaacaatggcagccaaaatattttgcctccttatgctccttggtatttctgcaagtgctgctacggcgaccattttcccgcaatgctcacaagctcctatagcttcccttcttcccccgtacctctcaccagcggtgtcttcggtatgtgaaaacccaattcttcaaccctacaggatccaacaggcaatcgcagctggcatcttacctttatcacccttgttcctccaacaatcatcagccctattacagcagttacctttggtgcatttattggcacaaaacatcagggcacaac

SEQ ID NO: 350870 - DNA, 331 bp, Zea mays
cccacgcgtccgaaacaacgaagccatgagcaggaccatcatccacaacaacatcatccacaaaaacaccaacatgaaccaccaccacaacattaccaggagcagcaacaccaacaacaacaggttcacatgcaaccacaaaaacatgagcaacaacaagaagttcatgttcaacaacaacaacaacaaccgtagcaccaacaacaacaacaacaacagcaccaacaacaacatcaatgtgaaggccaacaacaacatcaccaacaatgacaaggccatgtgcaccatcacgaacagagccatgagcaacaccaaggacagagccatgagc

SEQ ID NO: 350871 - DNA, 326 bp, Zea mays
ccaacaatcatcagccctattacaacagttacctttggtgcatttattggcacaaaacatcagggcacaacaactacaacaacttgtgctagcaaaccttgctgcctactctcagcaacagcagtttcttccattcaaccaactaggttcattgaactctgcttcttatttgcaacaacaacagctacaacagtttctgccaacgctcagtcaactagccatggtgaaccctgccgcctacgtacaacaacaacaactgctttcatctagcccgctcgctgtgggcaatgcacctacatacctgcaacaacaattgttgcaacaga

SEQ ID NO: 350872 - DNA, 263 bp, Zea mays
gaggtagatcctgcgtgtttgcaagatccggtcattctttacgggcccgttaccgccaccgcctaactccaggatccggctgcctaaacctaattcaatctgcgtggcggtacaaagcgcccaccaaaaatacccccgggttcaaccgcttgaacccctatgtgcgaattccagaaccctcagctgggtgggtagccaacagggcacaacgactctgactatgggagagaggcacactcactatggttagaggtactgcccct

SEQ ID NO: 350873 - DNA, 330 bp, Zea mays
ttcaacaagcaatcgcagcaggcggcatacctttatcgcccttgttgtgtcaacaatcgccagccctatctttggtgcagtcattggtacaaaccatcagggcacaacagctgcagcaactcgtgctacctgtgatcaaccaagtagctctggcaaacctttctccctactctccgcaacaacaatttcttccattcaaccaactgtctacactgaaccctgctgcttatttgcagcaacaactattaccatttagccagctagctactgcctactctcaacaacaacaacttcttccatttaaccaattggccgcactgaaccccgctg

SEQ ID NO: 350874 - DNA, 341 bp, Zea mays
atagaaagcacaatagtgtaccaacaatggcagccaaaatattttgcttccttatgctccttggtctttctgcaagtgttgctaccgcaaccattttcccacaatgctcacaagctcctatagcttcccttcttcccccatacctctaaccagcggtgtcttcaatgtgtgaaaacccaattgttcaaccttacaggatccaacaggcaatcgcaacaggcatcttaccattatcacccttgttcctccaacaaccgtcagccctattacagcagttacctttggtccatttggtggcacaaaacataagggcacaacaactacaacaacttgtgctagca

SEQ ID NO: 350875 - DNA, 336 bp, Zea mays
atgaaaagaaaaaagtattgttccaaattaaatttaaaaaaaaaaaaaaaaaaaaaaaaaaaaaaaaaaaaccaaattaaatttgaaaaaaccaaaaaaaaaaaaaaaaaaaattaaaaaaaaaaaaaaaaaaaaaaaaaaaaaaaaaaaaaaaaaaaaaccccaaaaaaaaaaaaaaaaaaaaaaaaaaaaaaaaaaaaatgggggggccccttttaaaggatcaaattttttcacccctttttttccaggaaaaattttttttttagggccccaaaaaaaaaataaactgccccttttttaaaaacctcggacttgaaaaaccccccccttccc

SEQ ID NO: 350876 - DNA, 191 bp, Zea mays
  unsure (1)..(191): unsure at all n locations
cccacccgtccgaaaaaaaagaagtgtttatttataaattttaataatttatnttttaaaaaaaaataaattatatataaaaataaaataatttaaaaaaaaaaagggccgccccttcttgaggttccaagctttcttccccttgcttgcgacgtcttagctttttttttgtgtcccctaatttcatttcc

SEQ ID NO: 350877 - DNA, 184 bp, Zea mays
tcggccaaaccttcggaccaacttggggcattaaaaggcccattgtgttccaacaatggccgcccaaacattttggcttcctatgctccttggactttctgcaagggctggttccggaaacctttttccggaatgcttggaagcttctatagcttaccttgtttccccggacctattacccacg

SEQ ID NO: 350878 - DNA, 303 bp, Zea mays
tgctggagcgctcgctcaggtggtcgagcattgaagcttattgttcgttctaaccataacgatgcatgtagtgttggagagtcttgactcacttgagaatgcacacaggtgccaggtattgtactcccgaaccatgaggatgcatgaagttgatagtacagcattacattctgcgatttacagactgggactgagtgaagaggcacataaatgtcgtccttaacgacaaggcggcagaccgagtggtaatgtaactccagaactgatcgcgcattaaattcggtggttgcagtgactgctccc

SEQ ID NO: 350879 - DNA, 307 bp, Zea mays
ctactccagagcgcagaagaacccgatcgacaccatgagggtgttgctcgttgccctcgctctcctggctctcgctgcgagcgccaccttcacgcatacaagcggcggctgcggctgccagccaccgccgccggttcatctaccgccgccggtgcatctgccacctccggttcacctgccacctccggtgcatatcccaccgccggtccacctgtcgccgtcggtaacacctggcaccgacggtccatgtgccggcgcccgttcatttgccgtcgacaccatgccactaccgtactcaaccgccccg

SEQ ID NO: 350880 - DNA, 325 bp, Zea mays
attttgagcattcagaaacacaccaagcgaagctacctagcaacgacttaacaacaatggctaccaagatattagccctccttgcgcttcttgccctttttgtgagcgcaacaaatgcgttcattattccacaatgctcacttgctcctagtgccattataccacagttcctccgaccagttacttcaatgggcttcgaacacctagctgtgcaagcctacaggctacaacaagcgcttgcggcgagcgtcttacaacaaccaattaaccaattgcaacaacaatccttggcacatctaaccatacaaaccatcgcaacacaaca

SEQ ID NO: 350881 - DNA, 187 bp, Zea mays
ttttgagtattcagaaacacaccaagcgaagcgcactatcaactacctaacaacaatggttaccaagatattagctcctccttgagctttaacgccctatattgggagcgcaacaaatgcgttcattattacacaatgcatacttgcttccatagccattattttacagttctttccattaaatact

SEQ ID NO: 350882 - DNA, 55 bp, Zea mays
gtcagccccgctcttaaccaatctactccagtctggtgacctacaccccatgaac

SEQ ID NO: 350883 - DNA, 457 bp, Zea mays
ctccgcaacaacaatttcttccattcaaccaactgtctacactgaaccctgctgcttatttgcagcaacaactattaccatttagccagctagctactgcctactctcaacaacaacaacttcttccatttaaccaattggccgcactgaaccccgctgcttatttgcagcagcaaatactactaccatttagccagctagctacagcaagccgtgcttccttcttgacacaacaacagttgctgccgttctaccagcagtttgcggctaaccccgcaaccctcttacaactacaacaattgttgccctttgtccaacttgctttgacaaacccagcagccttctaccaacaacacatcattggtggtgccctcttttagattgcttattagatgtaattcaataataaagttttttggatgatgtatgtggccaaccagaaataaatagttacatt

SEQ ID NO: 350884 - DNA, 459 bp, Zea mays
tagaaagtggaatccagtagcaacaatagagcaacaatggcgaccaagatattttccctccttatgctccttgctctttctgcatgtgttgctaacgcgacaattttccctcaatgctcacaagctcctatagcttcccttcttcccccataccttccatcaatgatagcttcagtatgtgaaaacccagctcttcaaccctatatgctccaacaagcaatcgcagcaagcaacatacctttatcacccttgtttcaacaatcgccagccctatctttggtgcagtcattggtacaaaccatcagggcacagcagctgcagcaactcgtgctacctgtgatcaaccaagtagctctggcaaacctttctccctactctcagcaacaacaatttcttccattcaaccaactgtctacattgaaccgtgctgcttatttgcagcaacaactattaccattc

SEQ ID NO: 350885 - DNA, 454 bp, Zea mays
cagaaacacaccaagcgaagcacattagcaacaacctaacaacaatggctaccaagatattatccctccttgcgcttcttgcgctttttgcgagcgcaacaaatgcgttcattattccacaatgctcacttgctccaagttccattattacacagttcctcccaccagttacttcaatgggcttcgaacacccagctgtgcaagcctataggctacaacaagcaattgcggcgagcgtcttacaacaaccaatttcccagttgcaacaacaatccttggcacatctaacaatacaaaccatcgcaacgcaacagcaacaacaattcctaccagcactgagccacctagccatggtgaaccctgccgcctacttgcaacagcagttgcttgcatcaaacccacttgctctggcaaacgtagttgcaaaccagccacaacaacagctgcaacagtt

SEQ ID NO: 350886 - DNA, 447 bp, Zea mays
aaagcggcagtgcgtagagaggatcgtcgaacagaacagcatgaagatggtcatcgttctcgtcgtgtgcctggctctgtcagctgccagcgcctctgcaatgcagatgccctgcccctgcgcggggctgcagggcttgtacggcgctggcgccggcctgacgacgatgatgggcgccggcgggctgtacccctacgcggagtacctgaggcagccgcagtgcagcccgctggcggcggcgccctactacgccgggtgtgggcagacgagcgccatgtaccagccgctccggcaacagtgctgccagcagcagatgaggatgatggacgtgcagtccgtcgcgcagcagctgcagatgatgatgcagcttgagcgtgccgctgccgccagcagcagcctgtacgagccagctctgatgcagcagcagcagcagctgctggcagccca

SEQ ID NO: 350887 - DNA, 414 bp, Zea mays
caacaagcaacatagaaagtggaatccagtagcaacaatagagcaacaatggcgaccaagatattttccctccttatgctccttgctctttctgcatgtgttgctaacgcgacaattttccctcaatgctcacaagctcctatagcttcccttcttcccccataccttccatcaatgatagcttcagtatgtgaaaacccagctcttcaaccctataggctccaacaagcaatcgcagcaagcaacatacctttatcacccttgtttcaacaatcgccagccctatctttggtgcagtcattggtacaaaccatcagggcacagcagctgcagcaactcgtgctacctgtgatcaaccaagtagctctggcaaacctttcttcctactcttagcaacaacaatttttttcattc

SEQ ID NO: 350888 - DNA, 446 bp, Zea mays
cggacgcgtgggagaaagcacaatagtgtaccaacaatggcagccaaaatattttgcttccttatgctccttggtctttctgcaagtgttgctaccgcaaccattttcccacaatgctcacaagctcctatagcttcccttcttcccccatacctctcaccagcggtgtcttcaatgtgtgaaaacccaattgttcaaccctacaggatccaacaggcaatcgcaacaggcatcttaccattatcacccttgttcctccaacaaccgtcagccctattacagcagttacctttggtccatttggtggcacaaaacatcagggcacaacaactacaacaacttgtgctagcaaaccttgctgcatactctcagcaacatcagtttcttccattcaaccaactggctgcattgaactctgctgcttatttgcaacaacaatttccatt

SEQ ID NO: 350889 - DNA, 442 bp, Zea mays
gcaacatagaaagcacaatagtgtaccaacaatggcagccaaaatattttgcttccttatgctccttggtctttctgcaagtgttgctaccgcaaccattttcccacaatgctcacaagctcctatagcttcccttcttcccccatacctctcaccagcggtgtcttcaatgtgtgaaaacccaattgttcaaccctacaggatccaacaggcaatcgcaacaggcatcttaccattatcacccttgttcctccaacaaccgtcagccctattacagcagttacctttggtccatttggtggcacaaaacatcagggcacaacaactacaacaacttgtgctagcaaaccttgctgcatactctcagcaacatcagtttcttccattcaaccaactggctgcattgaactctgctgcttatttgcaacaacaattaccattc

SEQ ID NO: 350890 - DNA, 439 bp, Zea mays
ctcccgtctccgtcgtctcgtctccgctcctcacctcgccagccatgggcaagatcaagatcggaatcaacggtttcggaaggatcggcaggctcgtggccagggtcgccctgcagagcgaggatgtcgagctcgtcgccgtcaacgaccccttcatcaccacggattacatgacctacatgttcaagtacgacaccgtgcacggccaatggaagcacagcgacatcaccctcaaggactccaagacgcttctcttcggcgagaagccggtcaccgtctttggcatcaggaaccccgaggagatcccgtggggtgaggctggtgctgagtatgtcgtggagtccaccggtgtcttcactgacaaggacaaggctgctgcacatctgaagggtggtgccaagaaggttgttatctctgccccaagcaaagatgcacccat

SEQ ID NO: 350891 - DNA, 452 bp, Zea mays
gaccattagctttatctactccagagcgcagaagaacccgatcgacaccatgagggtgttgctcgttgccctcgctctcctggctctcgctgcgagcgccacctccacgcatacaagcggcggctgcggctgccagccaccgccgccggttcatctaccgccgccggtgcatctgccacctccggttcacctgccacctccggtgcatctcccaccgccggtccacctgccgccgccggtccacctgccaccgccggtccatgtgccgccgccggttcatctgccgccgtcaccatgccactaccctactcaaccgccccggcctcagcctcatccccagccacacccatgcccgtgccaacagccgcatccaagcccgtgccagctgcagggaacctgcggcgttggcagcaccccgatcctgggccagtgcgtcgagttcctgaggcatc

SEQ ID NO: 350892 - DNA, 466 bp, Zea mays
gagaccaacaagcaacatagaaagtggaatccagtagcaacaatagagcaacaatggagaccaagatattttccctccttatgctccttgctctttctacatgtgttgctaacgcgacaattttccctcaatgctcacaagctcctatagcttccctttttcccccataccttccatcaattatagcttcagtatgtgaaaacccagctcttcaaccatataggcttcaacaagcaatcgcagcaagcaacatacctttatcgcccttgttgtgtcaacaatcgccagccctatctttggtgcagtcattggtacaaaccatcagggcacaacagctgcagcaactcgtgctacctgtgatcaaccaagtagctctggcaaacctttctccctactctccgcaacaacaatttcttccattcaaccaactgtctacactgaaccctgctgcttatttgcagcaaca

SEQ ID NO: 350893 - DNA, 452 bp, Zea mays
gaccattagctttatctactccagagcgcagaagaacccgatcgacaccatgagggtgttgctcgttgccctcgctctcctggctctcgctgcgagcgccacctccacgcatacaagcggcggctgcggctgccagccaccgccgccggttcatctaccgccgccggtgcatctgccacctccggttcacctgccacctccggtgcatctcccaccgccggtccacctgccgccgccggtccacctgccaccgccggtccatgtgccgccgccggttcatctgccgccgccaccatgccactaccctactcaaccgccccggcctcagcctcatccccagccacacccatgcccgtgccaacagccgcatccaagcccgtgccagctgcagggaacctgcggcgttggcagcaccccgatcctgggccagtgcgtcgagttcctgaagcatc

SEQ ID NO: 350894 - DNA, 452 bp, Zea mays
gccatatacagcaagcgagccatggtcacggtctatgactacgtgaccttgtatgccgccgcctagcccttccacgacgacacttaacttcatttcgacggctcggcccccgcagccgtcgacaggtgaaaaccttgccggacgcctactcaccctccccgttgggcatgccccactccaacggtgacctacacgacaaccctttcgccgcatttgctgtctccaacagtgggcccatccttacggcgaccaccaagatgggctcgagaggagggattactgctccgcgagtggcgcctacaaacagctattcaccttgaggaaaaagagaagaaggagaacgatgctgtgagccaaatcatcgctgatgctgaagagtttaacaaagcttttggtgagaagagaaagctcaatgctgatacaagcaagggccaaaaccgtgacagggagaa

SEQ ID NO: 350895 - DNA, 444 bp, Zea mays
cttcagaccattagctttatctactccagagcgcagaagaacccgatcgacaccatgagggtgttgctcgttgccctcgctctcctggctctcgctgcgagcgccacctccacgcatacaagcggcggctgcggctgccagccaccgccgccggttcatctaccgccgccggtgcatctgccacctccggttcacctgccacctccggtgcatctcccaccgccggtccacctgccgccgccggtccacctgccaccgccggtccatgtgccgccgccggttcatctgccgccgccaccatgccactaccctactcaaccgccccggcctcagcctcatccccagccacacccatgcccgtgccaacagccgcatccaagcccgtgccagctgcagggaacctgcggcgttggcagcaccccgatcctgggccagtgcgtcgag

SEQ ID NO: 350896 - DNA, 422 bp, Zea mays
taccaagcgaagcgcactatcaacaacctaacaacattggctaccaagatattatccctccttgcgctttttgcccttttagtgagcgcaacaaatgcgttcattattccacagtgctcacttgctcctagtgccattattccacagttccttccaccagttactttaatgggcttcgaacatccagccgtgcaagcctacaggctacaactagcgcttgcggcgagcgtcttacaacaaccaattgcccaattgcaacaacaatccttggcacatctatacctacaaaccatcgcaacgcaacagcaacaacagtttctgtcatcactgagccacctagccgtggtgaaccctgtcggctacttgcaacatcagatacttgcattcaacccacttgctctggcgaacgtagcttcatacca

SEQ ID NO: 350897 - DNA, 379 bp, Zea mays
gtcttaaaaccatagcgttcatttactacagagcgcactaaaacacgcgcgcctccatgagggtgttgctcgtatagcgcgatctactggctattgattggagcgccacctacacccatacaagcggggaatgcgggtggcagccaacgtcaacggtttatctacagacgccggtgcatccagctgctgcgatatacaagagacctgcaccgcatgtcctatcgaacagtcacgcagcgccgaatggtcgaacgtgacagcgccctgtacatggggcattcaagcgctgagtgtgcggcggcaacacgcaactagactactaaacctgccagggctctagctcatgctcagttacatctatgcccttgccaacaggcga

SEQ ID NO: 350898 - DNA, 395 bp, Zea mays
acatgttcgatgttttgcgcagcagctccgatgtctccgcgcggctcgctgttttgtgttgcgcagtgagcagcacgccgtgatgcccgtcggtggtttgctgtttttgcgcagccccgtcgtcgtcgttgttcacccccggtgaggccacgtaaatccttgttcgattccgcatcggtattaatttcctatgattaattgtgtgtgtgtgctgatttgttgtgtttggtggaggagagaaaccccgtgttttgcgaggagaaggcaagccgcttaacgctcgtcgatggcgaagctatgcacaaattggaatcaccgtcgttcttgcaaacgccgtttgtgtttgtttatggaccgagaggtgacgaccgtgcaagtgatgttgtgccacccac

SEQ ID NO: 350899 - DNA, 441 bp, Zea mays
gcatcatagaaagcacaatagtgtaccaacaatggcagccaaaatattttgcctccttatgctccttggtctttctgcaagtgctgctacggcgaccattttcccgcaatgctcgcaagctcctatagcttcccttcttcccccgtacctctcaccagcggtgtcttcggtatgtgaaaacccaattcttcaaccctacaggatccaacaggcaatcgcagctggcatcttacctttatcacccttgttcctccaacaatcatcagccctattacaacagttacctttggtgcatttattggcacaaaacatcagggcacaacaactacaacaacttgtgctagcaaaccttgctgcctactctcagcaacagcagtttcttccattcaaccaactaggttcattgaactctgcttcttatttgcaacaacaacaactacc

SEQ ID NO: 350900 - DNA, 211 bp, Zea mays
ccctgctaccttcttgacacaaccacagttgttgccgttctaccagcacgctgcgcctaacgctggcaccctcttacaactgcaacaattgctgccattcaaccaacttgctttgacaaacctagcagtgttctaccaacaacccatcattggtggtgccctcttttagatttcttatgagttatagttcaataataaagttttttgtctg

SEQ ID NO: 350901 - DNA, 119 bp, Zea mays
agaccattagctttatctactccagagcgcagtagaacccgatcgacaccatgagggtgttgctcgttgccctcgttctcctggctctcgctgctagcgccacctccacgcatacaagc

SEQ ID NO: 350902 - DNA, 214 bp, Zea mays
agaccattagctttatctactccagagggcttttataacccgatcgacaccatgagggtgttgctcgttgccctcgctctcctggctctcgctgcgagcgccacctccacgcatacatgcggcggctgcggctgccatccaccgccgtcgggttatctaccgccgtcggtgcattttgccaccttcggttctcctgccacctctggtgcttttt

SEQ ID NO: 350903 - DNA, 426 bp, Zea mays
ggcttctcctccccctccggttcgggttcgggttcgtgaggttctccggggttcggtttcgtgggtgagcggatcgagatggcggcgtcggatgttgagtaccgctgcttcgtcggcggcctcgcctgggccacggacgaccactccctccacaacgccttcagcacctacggcgaggtcctcgagtccaagatcatcctcgatcgggagacgcagaggtcccgcggcttcggcttcgtcaccttctccacggaggaggcgatgcggaacgccatcgagggcatgaacggcaaggagctggacggccgcaacatcaccgtcaacgaggcccagtcccgcggcggccgtggaggcggcggcggcggcgggtacggtggtggccgtggaggcggcggctactgcggtggcgggcgccgtgatggctgc

SEQ ID NO: 350904 - DNA, 62 bp, Zea mays
taaggaaagcgccacgccggccgtaccggtccggcatggccgacccgacccacccatccgga

SEQ ID NO: 350905 - DNA, 463 bp, Zea mays
agcattcagaaacacaccaagcgaagcgcactagcaacaacctaacaacaatggctaccaagatattagccctccttgcgcttcttgcccttttagtgagcgcaacaaatgcgttcattattccacagtgctcacttgctcctagtgccattattccacagttcctcccaccagttacttcaatgggcttcgaacatccagccgtgcaagcctacaggctacaactagcgcttgcggcgagcgtcttacaacaaccaattgcccaattgcaacaacaatccttggcacatctaaacctacaaaccatcgcaacgcaacagcaacaacagtttctgccatcactgagccacctagccgtggtgaaccctgtcgcctacttgcaacagcagctacttgcatccaacccacttgctctggcgaacgtagctgcataccagcaacaacaacgtctgcaacagtttat

SEQ ID NO: 350906 - DNA, 456 bp, Zea mays
attttcagcattcagaaacacaccaagcgaagcgcactagcaacaacctaacaacaatggctaccaagatattagccctccttgcgcttcttgcccttttagtgagcgcaacaaatgcgttcattattccacagtgctcacttgctcctagtgccattattccacagttcctcccaccagttacttcaatgggcttcgaacatccagccgtgcaagcctacaggctacaactagcgcttgcggcgagcgtcttacaacaaccaattgcccaattgcaacaacaatccttggcacatctaaacctacaaaccatcgcaacgcaacagcaacaacagtttctgccatcactgagccacctagccgtggtgaaccctgtcgcctacttgcaacagcagctacttgcatccaacccacttgctctggcgaacgtagctgcataccagcaacaacaacgtc

SEQ ID NO: 350907 - DNA, 333 bp, Zea mays
agaccattagctttatctactccagagcgcagaagaacccgatcgacaccatgagggtgttgctcgttgccctcgctctcctggctctcgctgcgagcgccacctccacgcatacaagcggcggctgcggctgccagccaccgccgccggttcatctaccgccgccggtgcatctgccacctccggttcacctgccacctccggtgcatcttccaccgccggtccacctgtcgtcgtcggtcacctgccagcgtcggtccatgtgccgactgcggttcatttgccgccgtcaccatgccactaccctactaaaccgccccggcttagtcttat

SEQ ID NO: 350908 - DNA, 181 bp, Zea mays
gacggagacacctagtggtccacgaagagaggaaacgctaacgaccgaccatgtggtaggtcccacgcaccgtgcggctggacctactttccacccagtgggcgtacttcgatgacgctgctgcgggcgaatccccgacgttaccagagccatacgggggcgcacacacaccggctgatgt

SEQ ID NO: 350909 - DNA, 450 bp, Zea mays
gaaacacaccaagcgaagcgcactagcaacaacctaacaacaatggctaccaagatattatccctccttgcgcttcttgcgctttttgcgagcgcaacaaatgcgtccattattccacaatgctcacttgctcctagttccattattccacagttcctcccaccagttacttcaatggccttcgaacacccagctgtgcaagcctataggctacaacaagcgattgcggcgagcgtcttacaacaaccaattgcccaattgcaacaacaatccttggcacatctaacaatacaaaccatcgcaacgcaacagcaacaacagttcctaccagcactgagccacctagccatggtgaaccctgtcgcctacttgcaacagcagctgcttgcatccaacccacttgctctagcaaacgtagttgcaaaccagcaacaacaacaactgcaacag

SEQ ID NO: 350910 - DNA, 110 bp, Zea mays
gatctatctacttcagagggcaaatatacccgcatcgacaccatgagggtgtagctcgtctgactatgctctcctggctctcgtgtgcgtgcgcgcacctgcacagcata

SEQ ID NO: 350911 - DNA, 450 bp, Zea mays
gaccaactagcaacatagaaagcacaatagtgtaccaacaatggcagccaaaatattttgcctccttatgctccttggtctttctgcaagtgctgctacggcgaccattttcccgcaatgctcgcaagctcctatagcttcccttcttcccccgtacctctcaccagcggtgtcttcggtatgtgaaaacccaattcttcaaccctacaggatccaacaggcaatcgcagctggcattttacctttatcacccttgttcctccaacaatcatcagccctattacaacagttacctttggtgcatttattggcacaaaacatcagggcacaacaactacaacaacttgtgctagcaaaccttgctgcctactctcagcaacagcagtttcttccattcaaccaactaggttcattgaactctgcttcttatttgcaacaacaacaactacc

SEQ ID NO: 350912 - DNA, 253 bp, Zea mays
caacatcttagcacgcaatgggagccaatattttatggctccattgaattcttgctcactgagcaagcgctgacacctcgactactattacacaatggtcacaacaatacctatttgcgtcgacagacatgggattttaatacgctagtatacaatcctacatggcacaagaggccatccttgccagcattttaccagcattaacatgaaacgtgccacaaccatgtgctgtattgtaacaaccatgcttagt

SEQ ID NO: 350913 - DNA, 457 bp, Zea mays
cagaaacacaccaagcgaagcacattagcaacaacctaacaacaatggctaccaagatattatccctccttgcgcttcttgcgctttttgcgagcgcaacaaatgcgttcattattccacaatgctcacttgctccaagttccattattacacagttcctcccaccagttacttcaatgggcttcgaacacccagctgtgcaagcctataggctacaacaagcaattgcggcgagcgtcttacaacaaccaatttcccagttgcaacaacaatccttggcacatctaacaatacaaaccatcgcaacgcaacagcaacaacaattcctaccagcactgagccacctagccatggtgaaccctgccgcctacttgcaacagcagttgcttgcatcaaacccacttgctctggcaaacgtagttgcaaaccagccacaacaacagctgcaacagttttt

SEQ ID NO: 350914 - DNA, 442 bp, Zea mays
ggacgtcagcctagcaattagctcatcgactccagattggagaactcgacaccatgaaggtgctgatcgttgcccttgctctcctggcgctcgctgcgagcgccgcctccagtacaagcggcggctgtggctgccagacaccaccgtttcatctaccgcctccgttctatatgccgcctccgttctatctgccgccgcagcagcagccgcagccatggcaataccccactcaaccaccgcagctaagcccgtgccagcagttcggatcctgcggcgtcggcagcgtcggcagcccgttcctgggccagtgcgtcgagttcctgaggcaccagtgcagcccggcggcgacgccctacggctcgccacagtgccaggcgctgcagcagcagtgctgtcaccagatcaggcaggtggagccgctgcaccggttccaggcgacata

SEQ ID NO: 350915 - DNA, 452 bp, Zea mays
attttgagcattcagaaacacaccaagcgaagctacctagcaacgacttaacaacaatggctaccaagatattagccctccttgcgcttcttgccctttttgtgagcgcaacaaatgcgttcattattccacaatgctcacttgctcctagtgccattataccacagttcctccgaccagttacttcaatgggcttcgaacacctagctgtgcaagcctacaggctacaacaagcgcttgcggcgagcgtcttacaacaaccaattaaccaattgcaacaacaatccttggcacatctaaccatacaaaccatcgcatcacaacagcaacaacagttcctaccagcactgagccaactagatgtggtgaaccctgtcgcctacttgcaacagcaggtgcttgcatccaacccacttgctctggcaaacgtatcttgataccaacaacaacaa

SEQ ID NO: 350916 - DNA, 247 bp, Zea mays
gtcgtagacattcatgcctctaccgagagggaggcacatccagaggcggtggctgcgagcccatctgtggcttatacagtcgccaacaggacatttactgctgctggggagacagccactgctgatgatcatggctgccggccacaacaggaacatcatggcggggaacgctcactgcctcagcctgaatagtaccaggctggggcttacaatccgccctaagaagcagttgtgcatgaggaacagc

SEQ ID NO: 350917 - DNA, 465 bp, Zea mays
  unsure (1)..(465): unsure at all n locations
gcggcggctgtggctgccagacaccaccgtttcatctaccgcctccgttctatatgccgcctccgttctatctgccgccgcagcagcagccgcagccatggcaataccccactcaaccaccgcagctaagcccgtgccagcagttcggatcctgcggcgtcggcagcgtcggcagcccgttcctgggccagtgcgtcgagttcctgaggcaccagtgcagcccggcggcgacgccctacggctcgccacagtgccaggcgctgcagcagcagtgctgccaccagatcaggcaggtggagccgctgcaccggtaccaggcgacatacggtgtggtcctgcagtccttcctgcagcagcagccgcagggcgagctcgcggcgctgatggcggcccaggtagcgcatcagctgacggcgatgtgcggnctgcagctgcagcagccaggttcctgcccttgcaacgcac

SEQ ID NO: 350918 - DNA, 382 bp, Zea mays
agcatgcaatgtcatatctttattatagtggcatctaaattaaagtgagttaacgcgacattacaaccctcaatagctgacaaaactcctatagttacccatcttaatcgatacctttataaatgatgttgcagttggaaatacaatatgcaacctatatgcccctcaagaaatttgagcatgcaacaatacctaaatgaactcgtctatcaatcggcatcaatatctttggttcagtcattgacacacaccatgacggctcaacatgtgcaggaactagtgctagctgtgatcaaccaattagctttgtcaaaccttatcttcctactctcatgaacaacaagtttttaaattcaagctactgtttacattgaacactact

SEQ ID NO: 350919 - DNA, 390 bp, Zea mays
gaccaacaagcaacatagaaagtggaatccagtagcaacaatagagcaacaatggcgaccaagatattttccctccttatgctccttgctctttctgcatgtgttgctaacgcgacaattttccctcaatgctcacaagctcctatagcttcccttcttcccccataccttccatcaatgatagcttcagtatgtgaaaacccagctcttcaaccctataggctccaacaagcaatcgcagcaagcaacatacctttatcacccttgtttcaacaatcgccagccctatctttggtgcagtcattggtacaaaccatcaaggcacagcagctgcagcaactcgtgctacctgtgatcaaccaaagtagctctgcaaacctttctccctac

SEQ ID NO: 350920 - DNA, 416 bp, Zea mays
catcaatcatcattcatcttagtagtataggcaccaaatcaaatctgcaacatcaattatctaactccaaaaaccatgaagctggtgcttgtggttcttgctttcattgctttagtatcaagtgtttcttgtacacagacaggcggctgcagctgtggtcaacaacaaagccatgagcagcaacatcatccacaacaacatcatccacaaaaacaacaacatcaaccatattattgagaccaacaagcaacatagaaagtggaatccagtagcaacaatagagcaacaatggcgaccaagatattttccctccttatgctccttgctctttctgcatgtgttgctaacgcgacaattttccctcaatgctcacaagctcctatagcttcccttctttccccataccttccatcaat

SEQ ID NO: 350921 - DNA, 413 bp, Zea mays
tagcaacatagaaagcacaatagtgtaccaacaatggcagccaaaatattttgcttccttatgctccttggtctttctgcaagtgttgctaccgcaaccattttcccacaatgctcacaagctcctatagcttcccttcttcccccatacctctcaccagcggtgtcttcaatgtgtgaaaacccaattgttcaaccctacaggatccaacaggcaatcgcaacaggcatcttaccattatcacccttgttcctccaacaaccgtcagccctattacagcagttacctttggtccatttggtggcacaaaacatcagggcacaacaactacaacaacttgtgctagcaaaccttgctgcatactctcagcaacatcagtttcttccattcaaccaactggctgcattgaactc

SEQ ID NO: 350922 - DNA, 131 bp, Zea mays
aaaaaaaaaaaaaaaaaaaaaaaaaaaaaaaaaaaaaaaaaaaaaaaaaaaaaaaaaaaaaaaaaaaaaaaaaaaaaaaaaaaaaaaaaaaaaaaaaaaaaaaaaaaaaaaaaaaaaaaaaaaaaaaaagg

SEQ ID NO: 350923 - DNA, 104 bp, Zea mays
cgatgattgagtaataatgtgtcacgcatcaccatgggtggcagtgtcagtgtgagcaatgacctgaatgaacaattgaaatgaaaagaaaaaagtattgttcc

SEQ ID NO: 350924 - DNA, 258 bp, Zea mays
cagccagctatctgctgccttcttgacacaaccacagttgttgccgttctaccagcacgctgcgcctaacgctggcaccctcttacaactgcaacaattgctgccattcaaccaacttgctttgacaaacccagcagcattctaccaacaacccatcattggtggtgccctcttttagatttcttatgagttatagttcaataataaagttttttgtctgatgtttgtggcttcccagaaataagaaagtacatttct

SEQ ID NO: 350925 - DNA, 397 bp, Zea mays
ttccgcttctcccgcaaccgcgtcggcgatggcatccgcggcggcggcgaccggcgacggcgagaaggcgcacgcgcacctagggcagcctctcctcgtgccgccgcagccccctcaacaaccctactacgcctacccggccgtctcctacgtgcagcccgccccaccgccgccgccggccccgacgctcgtcttcgtgccgtccccctgctccccgatgctcgtgcgcctccgccgcctgcgcccgcgccgcgcgtcctgcctccgtcgattctgcgcgcgcgcgctcccgctcctcctgttactcgcgctcctcgcggggctcgccttcctcctatacccgtccgtcccggacgcccgcgtcgccgacctccgtgtcgacagttttcgcgcgcag

SEQ ID NO: 350926 - DNA, 410 bp, Zea mays
agaccaacaagcaacatagaaagtggaatccagtagcaacaatagagcaacaatggcgaccaagatattttccctccttatgctccttgctctttctgcatgtgttgctaacgcgacaattttccctcaatgctcacaagctcctatagcttcccttcttcccccataccttccatcaatgatagcttcagtatgtgaaaacccagctcttcaaccctataggctccaacaagcaatcgcagcaagcaacatacctttatcacccttgtttcaacaatcgccagccctatctttggtgcagtcattggtacaaaccatcagggcacagcagctgcagcaactcgtgctacctgtgatcaaccaagtagctctggcaaacctttctccctactctcagcaacaacaatttc

SEQ ID NO: 350927 - DNA, 353 bp, Zea mays
tagcaacatagaaagcacaatagtgtaccaacaatggcagccaaaatattttgcctccttatgctccttggtctttctgcaagtgctgctacggcgaccattttcccgaaatgctcgcaagctcctatagcttcccttcttcccccgtacctctcaccagcggtgtcttcggtatgtgaaaacccaattcttcaaccctacaggatccaacaggcaatcacagctggcatcttacctttatcacccttgttcctccaacaatcatcagccctattacattagttacctttggtgcatttattggcacaaaacatcagggcacaacaactacaacaacttgtgctagcaaacct

SEQ ID NO: 350928 - DNA, 120 bp, Zea mays
cggacgcgtggggcggcgatgattgagtaataatgtgtcacgcatcaccatgggtggcagtgtcagtgtgagcaatgacctgaatgaacaattgaaatgaaaagaaaaaagtattgttcc

SEQ ID NO: 350929 - DNA, 418 bp, Zea mays
aggcaatcgcagcaggcatcttacctttatcacccttgttcctccaacaaccgtcagccctattacagcagttacctttggtgcatttgttggcacaaaacatcaaggcacaacaactacaacaacttgtgctaggaaaccttgctgcctactctcagcaacagcagtttcttccattcaaccaactggctgcattgaactctgctgcttatttgcaacaacaactaccattcagtcagctagctgctgcctacccccagcaatttcttccattcaaccaactggcagcattgaactctgctgcttatttacaacagcaacagctaccaccattcagccagctagctgatgtgagccctgttgccttcttgacacaacaacagttgttgccgttctacctgcacgctgcgcctaacgc

SEQ ID NO: 350930 - DNA, 423 bp, Zea mays
caagcaacatagaaagtggaatacagtagcaacaatagagcaacaatggcggccaagatattttccatccttatgctccttgctctttctgcatgtgttgctaacgcgaccatttttcctcaatactcacaagctcctatagctgcccttcttcccccataccttccatcaatgaccgcttcagtatgtgaaaacccagcccttcaaccctacaggctccaacaagcaatcgcaacaagcaacttacctttatcacccctgttctttcaacaatcgccagccctatctttggtgcagtcattggtacaaaccatcagggcacaacagctgcagcaactcgtgctaccagtgatcagccaagtagctctggcaaacctttctccctactctcagcaacaacaatttcttccattcaaccaactg

SEQ ID NO: 350931 - DNA, 403 bp, Zea mays
ggtccatttggtggcacaaaacatcagggcacaacaactacaacaacttgtgctagcaaaccttgctgcatactctcagcaacatcagtttcttccattcaaccaactggctgcattgaactctgctgcttatttgcaacaacaattaccattcagccagctagttgctgcctacccccagcaatttcttccattcaaccaactagcagcattgaactctgctgcttatttacagcagcaacaactactaccattcagccagctagctgatgtgagccctgctgccttcttgacacaacaacagttgttgccgttctacctgcacgctatgcctaacgctggcaccctcttacaactgcaacaattgctgccattcaaccaacttgctttgacaaactcaaca

SEQ ID NO: 350932 - DNA, 336 bp, Zea mays
cagcacagccacagcccacagcccgagaggagaagcgagcgcgcgatccagttggtggccgcccccgcccgcacaccatggctacgccgtggtggtggccgtcgctgctgccggcgtggctgagctccagcgcgctatggttcctcgtcgccaacgcggtcgtcgccgcggtcgccatcttgttcaggcgcccgtcgttgtcgctgtcgttttcccgtcgtcgccttcgctgcagtggttccaccttctcgctcacgcggagagtctcgtctgcgcttctgctgctccttctatccttctccattttttgtcgtcccctccttctgctttatcact

SEQ ID NO: 350933 - DNA, 421 bp, Zea mays
cggacgcgtgggcggacgcgtgggcggacgcgtgggtgcgcttcttgcccttttagtgagcgcaacaaatgcgttcattattccacagtgctcacttgctcctagtgccattattccacagttcctcccaccagttacttcaatgggcttcgaacatccagccgtgcaagcctacaggctacaactagcgcttgcggcgagcgtcttacaacaaccaattgcccaattgcaacaacaatccttggcacatctaaacctacaaaccatcgcaacgcaacagcaacaacagtttctgccatcactgagccacctagccgtggtgaaccctgtcgcctacttgcaacagcagctacttgcatccaacccacttgctctggcgaacgtagctgcataccagcaacaacaacgtctgcaacagttt

SEQ ID NO: 350934 - DNA, 411 bp, Zea mays
attgagaccaactagcaacatagaaagcacaatattgtaccaataatggcagccaaaatattttgcctcattatgctccttggtctttctgcaagtgctgctacggcgagcattttcccgcaatgctcacaagctcctatagcttcccttcttcccccatacctctcaccagcgatgtcttcagtatgtgaaaatccaattcttctaccctacaggatccaacaggcaatcgcagcaggcatcttacctttatcacccttgttcctccaacaatcatcagccctattacagcagttacctttggtgcatttattggcacaaaacatcagggcacaacaactacaacaactcgtgctagcaaaccttgctgcctactctcagcaacagcagttacctttggtgcatttgttg

SEQ ID NO: 350935 - DNA, 390 bp, Zea mays
agaccaactagcaacatagaaagcacaatagtgtaccaacaatggcagccaaaatattttgcctccttatgctccttggtatttctgcaagtgctgctacggcgaccattttcccgcaatgctcacaagctcctatagcttcccttcttcccccgtacctctcaccagcggtgtcttcggtatgtgaaaacccaattcttcaaccctacaggatccaacaggcaatcgcagctggcatcttacctttatcacccttgttcctccaacaatcatcagccctattacagcagttacctttggtgcatttattggcacaaaacatcagggcacaacaactacaacaacttgtgctagcaaaccttgctgcctactctcagcaacagcagtttc

SEQ ID NO: 350936 - DNA, 274 bp, Zea mays
cattcagccagctagctggtgtgagccctgctaccttcttgacacaaccacaattgttgccgttctaccagcacgctgcgcctaacgctggcaccctcttacaactgcaacaattgctgccattcaaccaacttgctttgacaaacccaacagcattctaccaacaacccatcattggtggtgccctcttttagatttcttatgagttatagttcaataataaagttttttgtctgatgtttgtggcttcccagaaataagaaagtacatttct

SEQ ID NO: 350937 - DNA, 357 bp, Zea mays
ctagcaacatagaaagcacaatagtgtaccaacaatggcagccaaaatattttgcttccttatgctccttggtctttctgcaagtgttgctaccgcaaccatttttccacaatgctcacaagctcctatagcttcccttctttccccatacctctcaccagcggtgtcttcaatgtgtgaaaacccaattgttcaaccctacaggatccaacaggcattcgcaacaggcatcttaccattatcacccttgttactgcaacaacccgtagccctattacagcagttacctttggtccatttggtggcacaaaacatgatggtacaacatctactacaacttgtgctagcaaaccttgc

SEQ ID NO: 350938 - DNA, 420 bp, Zea mays
agcaaagcggcagtgcgtagagaggatcgtcgaacagaacagcatgaagatggtcatcgttctcgtcgtgtgcctggctctgtcagctgccagcgcctctgcaatgcagatgccctgcccctgcgcggggctgcagggcttgtacggcgctggcgccggcctgacgacgatgatgggcgccggcgggctgtacccctacgcggagtacctgaggcagccgcagtgcagcccgctggcggcggcgccctactacgccgggtgtgggcagacgagcgccatgtaccagccgctccggcaacagtgctgccagcagcagatgaggatgatggacgtgcagtccgtcgcgcagcagctgcagatgatgatgcagcttgagcgtgccgctgccgccagcagcagcctgtacgagccagctctgat

SEQ ID NO: 350939 - DNA, 402 bp, Zea mays
agcaacatagaaagcacaatagtgtaccaacaatggcagccaaaatattttgcctccttatgctccttggtctttctgcaagtgctgctacggcgaccattttcccgaaatgctcgcaagctcctatagcttcccttcttcccccgtacctctcaccagcggtgtcttcggtatgtgaaaacccaattcttcaaccctacaggatccaacaggcaatcacagctggcatcttacctttatcacccttgttcctccaacaatcattagccctattacatcagttacctttggtgcatttattggcacataacatcatggcacaacaactacaacaacttgtgctagcaaaccttgctgtctacctcttataaacagcagtttttttccattcaaccaactagc

SEQ ID NO: 350940 - DNA, 419 bp, Zea mays
ggtcttcagaccattagctttatctactccagagcgcagaagaacccgatcgacaccatgagggtgttgctcgttgccctcgctctcctggctctcgctgcgagcgccacctccacgcatacaagcggcggctgcggctgccagccaccgccgccggttcatctaccgccgccggtgcatctgccacctccggttcacctgccacctccggtgcatctcccaccgccggtccacctgccgccgccggtccacctgccaccgccggtccatgtgccgccgccggttcatctgccgccgtcaccatgccactaccctactcaaccgccccggcctcagcctcatccccagccacacccatgcccgtgccaacagccgcattcaagcccgtgccagctgcagggaacctgcggcgttggcag

SEQ ID NO: 350941 - DNA, 422 bp, Zea mays
ggcaatcgcagctggcatcttacctttatcacccttgttcctccaacaatcatcagccctattacaacagttacctttggtgcatttattggcacaaaacatcagggcacaacaactacaacaacttgtgctagcaaaccttgctgcctactctcagcaacagcagtttcttccattcaaccaactaggttcattgaactctgcttcttatttgcaacaacaacaactaccattcagccagctacctgctgcctacccccagcaatttcttccattcaaccaactagcagcattgaactctcctgcttatttacagcagcaacaactactaccattcagccagctagctggtgtgagccctgctaccttcttgacacaaccacagttgttgccgttctaccagcacgttgcgcctaacgctg

SEQ ID NO: 350942 - DNA, 86 bp, Zea mays
atttgatgtaattcaataataaagttttggggatgatgtatgtggacaaccagaaataaaaagttacatttccagattctaatgtt

SEQ ID NO: 350943 - DNA, 422 bp, Zea mays
aaaatatccccaaaccctagctcccgatctcgatggcgaaccctcgcgtcttcttcgacatgaccgtcggcggcgccccggcgggccggatcgtgatggagctgtacgccaacgaggtgcccaagaccgcggagaacttccgcgcgctgtgcacgggcgagaagggcgtgggcaagtccgggaagccgctccactacaagggctccaccttccaccgcgtcatccccgagttcatgtgccagggcggcgacttcacccgcggcaacggcaccggcggcgagtccatctacggcgagaagttccccgacgagaagttcgtgcgcaagcacaccgcccccggtgtgctctccatggccaacgccgggcccaacaccaacggctcccagttcttcatttgcaccgtcgcgaccccttggctcgac

SEQ ID NO: 350944 - DNA, 86 bp, Zea mays
aaaaaaaaaaaaaaaaaaaaaaaaaaaaaaaaaaaaaaaaaaaaaaaaaaaaaaaaaaaaaaaaaaaaaaaaaaaaaaaaaaaaag

SEQ ID NO: 350945 - DNA, 414 bp, Zea mays
ccctcttacaactacaacaattgttgccctttgtccaacttgctttgacaaacccagcagcctcctaccaacaacacatcattggtggtgccctcttttagattgcttattagttgtaattcaataataaagttttctggttggccacatacatcatccaaaaacggacgcgtgggcggacgcgtgggcggacgcgtgggcggacgcgtgggttgagaccaacaagcaacatagaaagtggaatacagtagcaacaatagagcaacaatggcggccaagatattttccatccttatgctccttgctctttctgcatgtgttgctaacgcgaccatttttcctcaatactcacaagctcctatagctgcccttcttcccccataccttccatcaatgaccgcttcagtatgtgaa

SEQ ID NO: 350946 - DNA, 402 bp, Zea mays
cccacgcgtccgtgagcattcagaaacacaccaagcgaagcgcactagcaacgacctaacaacaatggctaccaagatattagccctccttgcgcttcttgccctttttgtgagcgcaacaaatgcgttcattattccacaatgctcacttgctcctagtgccattattccacagttcctcccaccagttacttcaatgggcttcgaacacctagctgtgcaagccaacatgcaacaacaagcgcttgcggcgagcgtcttacaacaaccaattgcccaattgcaacaacaatccttgccacatctaacaatacaagccatcacaacgcaacagcaacaacagttcctaccagcactgagccacctagccatggtgaaccctgccgcctacttgcaagagca

SEQ ID NO: 350947 - DNA, 143 bp, Zea mays
tcgatcctgagcagtgccatgtggaggagccaggcctgcttctgcaccccgtactatgtttgtgcgacctgtacatttcgctcgtagtagagcggttgcgcctgcgctctaatccggaacaaaatactattcatatttgctcc

SEQ ID NO: 350948 - DNA, 402 bp, Zea mays
tttcagcattcagaaacacaccaagcgaagcgcactagcaacaacctaacaacaatggctaccaagatattagccctccttgcgcttcttgcccttttagtgagcgcaacaaatgcgttcattattccacagtgctcacttgctcctagtgccattattccacagttcctcccaccagttacttcaatgggcttcgaacatccagccgtgcaagcctacaggctacaactagcgcttgcggcgagcgtcttacaacaaccaattgcccaattgcaacaacaatccttggcacatctaaacctacaaaccatcgcaacgcaacagcaacaacagtttctgccatcactgagccacctagccgtggtgaaccctgtcgcctacttgcaacagcagctacttgca

SEQ ID NO: 350949 - DNA, 399 bp, Zea mays
gagaccaactagcaacatagaaagcacaatagtgtaccaacaatggcagccaaaatattttgcctccttatgctccttggtctttctgcaagtgctgctacggcgaccattttcccacaatgctcacaagctcctatagcttcccttcttcccccgtacctctcaccagcggtgtcttcggtatgtgaaaacccaattcttcaaccctataggatccaacaggcaatcgcagctggcatcttacctttatcacccttgtttctccaacaatcatcagccctattacagcagttacctttggtgcatttattggcacataacatcagggcacaacaactacaacaacttgtgctagcaaaccttgctgcctactctcagcaacaacagtttctttccatt

SEQ ID NO: 350950 - DNA, 423 bp, Zea mays
tagcaacatagaaagcacaatagtgtaccaacaatggcagccaaaatattttgcttccttatgctccttggtctttctgcaagtgctgctaccgcaaccattttcccacaatgctcacaagctcctatagcttcctttcttcccccatacctctcaccagcggtgtcttcagtatgtgaaaacccaattcttcaaccctacaggatccaacaggcaatcgcagcaggcatcttacctttatcacccttgttcctccaacaaccgtcagccctattacagcagttacctttggtgcatttgttggcacaaaacatcaaggcacaacaactacaacaacttgtgctaggaaaccttgctgcctactctcagcaacagcagtttcttccattcaaccaactggctgcattgaactctgctgcttat

SEQ ID NO: 350951 - DNA, 404 bp, Zea mays
cttcagaccattagctttatctactccagagcgcagaagaacccgatcgacaccatgagggtgttgctcgttgccctcgctctcctggctctcgctgcgagcgccacctccacgcatacaagcggcggctgcggctgccagccaccgccgccggttcatctaccgccgccggtgcatctgccacctccggttcacctgccacctccggtgcatcttccaccgccggtccacctgccgtcgccggtccacctgccaccgccggtccatgtgccgccgccggttcatctgccgccgccaccatgccactaccctactcaaccgccccggcctcagtctcatccccagccacacccatgcccgtgccaacagccgtattcaagcccgtgccagctgcagggaacctg

SEQ ID NO: 350952 - DNA, 429 bp, Zea mays
cagaaacacaccaagcgaagcgcactagcaacaacctaacaacaatggctaccaagatattagccctccttgcgcttcttgcccttttagtgagcgcaacaaatgcgttcattattccacagtgctcacttgctcctagtgccattattccacagttcctcccaccagttacttcaatgggcttcgaacatccagccgtgcaagcctacaggctacaactagcgcttgcggcgagcgtcttacaacaaccaattgcccaattgcaacaacaatccttggcacatctaaacctacaaaccatcgcaacgcaacagcaacaacagtttctgccatcactgagccaccctagccgggtgaaccctgtcgtctacttgcaacagcagctacttgcattcaacccacttgctctggcgaacgtagctgtatacc

SEQ ID NO: 350953 - DNA, 435 bp, Zea mays
aacaagcaacatagaaagtggaatacagtagcaacaatagagcaacaatggcggccaagatattttccatccttatgctccttgctctttctgcatgtgttgctaacgcgaccatttttcctcaatactcacaagctcctatagctgcccttcttcccccataccttccatcaatgaccgcttcagtatgtgaaaacccagcccttcaaccctacaggctccaacaagcaatcgcaacaagcaacttacctttatcacccctgttctttcaacaatcgccagccctatctttggggcagtcattggtacaaaccatcagggcacaacagctgcagcaactcgtgctaccagtgatcagccaagtagctctggcaaacctttttccctactctcagcaacaacaatttctttcattcaaccaactgtttacacttg

SEQ ID NO: 350954 - DNA, 55 bp, Zea mays
atgcgacgttatatcttttctatagtgttatctatatttaaatcactggccgttc

SEQ ID NO: 350955 - DNA, 91 bp, Zea mays
ctggacgtcagcctagcaattagctcatcgactccagattggagaactcgacaccatgaaggtgctgatcgttgcccttgcatttcctggc

SEQ ID NO: 350956 - DNA, 419 bp, Zea mays
gcacaaaacatcagggcacaacaactacaacaacttgtgctagcaaaccttgctgcatactctcagcaacatcagtttcttccattcaaccaactggctgcattgaactctgctgcttatttgcaacaacaattaccattcagccagctagttgctgcctacccccagcaatttcttccattcaaccaactagcagcattgaactctgctgcttatttacagcagcaacaactactaccattcagccagctagctgatgtgagccctgctgccttcttgacacaacaacagttgttgccgttctacctgtacgctatgcctaacgctggcacccctttacaactgcaacaattgctgccattcaaccaaactgctttgaccaactcaacagtgttttaccaacaaaccatcttttgtgg

SEQ ID NO: 350957 - DNA, 305 bp, Zea mays
gaccaacaagcaacatagaaagtggaatccagtatcaacaatagagcaacaatggagaccaagatattttccctccttatgctccttgctctttctacatgtgttgcttactcgacaattctccctaaatgctcacatgtttcttattgcttccttttttcccctcttcctattattatttactagtcttcttttttgttatcctctctcttttcttcatatcttctttattcttctttttttactctgtttttatttcttttactattctttttgttttataatttttctaattctcttttcct

SEQ ID NO: 350958 - DNA, 126 bp, Zea mays
gaaagaagaaaagagagaagcccggaaagcgaagaaagagctcaaaggcctgtataaatcagaaacgcagaaggctcagaaagttgctgctgtcactggaccttcttccattcgactaatgtgatg

SEQ ID NO: 350959 - DNA, 428 bp, Zea mays
caaatgcgttcattattccacaatgctcacttgctcctagtgccattattccacagttcctcccaccagttacttcaatgggcttcgaacacctagctgtgcaagccaacatgcaacaacaagcgcttgcggcgagcgtcttacaacaaccaattgcccaattgcaacaacaatccttgccacatctaacaatacaagccatcacaacgcaacagcaacaacagttcctaccagcactgagccacctagccatggtgaaccctgccgcctacttgcaagagcagctgcttgcatccaacccacttgctctggcgaacgtagttgcaaaccagctacaacaacagctacaacagtttctgccaacgctcagtcaactagccatggtgaaccctgccgcctaccgacaacaacaacaactggtttcattt

SEQ ID NO: 350960 - DNA, 142 bp, Zea mays
atgctacttcatatcttttctatagtttcacttaatattatttacttgtctgttttttttttttattcttattattttttattgtttattttattatgtattttatttttattttcattattattactttatttagtttttt

SEQ ID NO: 350961 - DNA, 81 bp, Zea mays
aaaaaaaaaaaaagaagggggaggaggaaaaaaaaaaaaaggaaaaaaagaaagaataaaaaaaaaaaaaaaaggaggaag

SEQ ID NO: 350962 - DNA, 275 bp, Zea mays
gaccaactagcaacatagaaagcacaatagtgtaccaacaatggcagccaaaatattttgcttccttatgctccttggtctttctgcaagtgctgctaccgcaaccattttcccacaatgctcacaagctcctatagcttcctttcttcccccatacctctcaccagcggtgtcttcagtatgtgaaaacccaattcttcaaccctacaggatccaacaggcaatctcagcaggcatcttacctttatcacccttgttccttcaacaaccgttag

SEQ ID NO: 350963 - DNA, 185 bp, Zea mays
tattattgagaccaactagcaacatagaaagcacaatagtgtaccaacaatggcagccaaaatattttgcctccttatgctccttggtctttctgcaagagctgatacggcgaccatttttccgcaatgctcgcatgctcctatagtttatcttctttctccgtacctatctccagctgtttttt

SEQ ID NO: 350964 - DNA, 140 bp, Zea mays
cagaaacacaccaagcgaagcgcactagcatcaacctaacaacaatggctaccaagatattagccctccttgcgcttcttgcccttttagtgagcgcaacatacgcgctcattatttcacagcgctcaccttgtctctag

SEQ ID NO: 350965 - DNA, 93 bp, Zea mays
taacattgtaaaggattacgcatgagtctggatatcatttacaaccaagaccgctgcccaattaccatcgtgatgttgtcaataccattcata

SEQ ID NO: 350966 - DNA, 64 bp, Zea mays
aacaagtaacatataaagtgttatcctgtagcaactaaattagcaacatatcctaccaaaatat

SEQ ID NO: 350967 - DNA, 189 bp, Zea mays
cagaccattagctttatctactccagagcgcagaagaacccgatcgacaccatgagggtgttgctcgttgccctcgctctcctggctctcgctgcgagcgccacctccacgcatacaagcggcggctgcggctgccagccaccgccgccggttcatctaccgccgtcggtgcatctgccaccttcggtt

SEQ ID NO: 350968 - DNA, 68 bp, Zea mays
gcatgcctgtgcacttctccatcaccaccactgggttttcagaccattagctttatctactccagagc

SEQ ID NO: 350969 - DNA, 296 bp, Zea mays
aaagaatacgagtaaataagatatatataaacagagagggggagaacaaaataacaaataaagccaataataaaaaaaaaaaataacaaaaaaaagaaaaaaaaaaaaaataaaaaaaaaaaaagaagaaagagaaaaaaaaaaaaatgaaaaaaggaaaaaaagaaaacaagatgaaaaaaaaaagaaaaaaaaaaaagagaaggagtaaaaaaaaaaagaaaaaaaaaaaataaaaaaagaaagacgaaaaagaaaaaaaaaataaaaaaaagaaagacgaatagaggaagagg

SEQ ID NO: 350970 - DNA, 87 bp, Zea mays
  unsure (1)..(87): unsure at all n locations
atgcgacgaaatagaatatctatagggncacctaaattcaaatcactggccgccgtttacaacttcgtgaccgtgattaccctgaca

SEQ ID NO: 350971 - DNA, 71 bp, Zea mays
tcgtatcagtgcagcccgacggcgactccctactgctcgtcttagtgcctgatgttgttgccttagtgcta

SEQ ID NO: 350972 - DNA, 117 bp, Zea mays
ggtcttcagaccattagctttatctactccagagcgcagaagaacccgatcgacaccatgagggtgttgctttttgtcctcgctctcctggctctcgctgcgagcgccacctccacg

SEQ ID NO: 350973 - DNA, 125 bp, Zea mays
cgcagcacagccatggggaagcagctctgcgacatgcaccgctcgcgccgccgcgcccgtattgttgtcgtcgctctcctctcccgcttgctgtcgccccgtcttctcactttgttaaattattt

SEQ ID NO: 350974 - DNA, 56 bp, Zea mays
gtatacaagctgtaaatctcgcctagctcgttgacggagaccaaggagaagagcat

SEQ ID NO: 350975 - DNA, 63 bp, Zea mays
tgttcatgccattttttatttatttttagtgtttcttttctatttttctgttgtttttttttt

SEQ ID NO: 350976 - DNA, 94 bp, Zea mays
tcgcacaccaagcgaagcgcactatcatcaagctaacaacaatggctaccaagattttagcccttccttgcgcttcatgcctttttagagagcg

SEQ ID NO: 350977 - DNA, 87 bp, Zea mays
tcggaaaattcaagaaacagcgaggaatctcatggacgagcacagcaaagataccatagtcttagttactgagaaggattatgaccg

SEQ ID NO: 350978 - DNA, 187 bp, Zea mays
caacaagcaacatagaaagtggaatacaggagcaacaatagagcaacaatggcggccaagatattttccatccttatgctccttgctctttctgcatgtggtgctaacgcgaccatttttcctcaatactcacaagctcctaatggtggccttttttccccatacctttcattaatgaccggtttag

SEQ ID NO: 350979 - DNA, 374 bp, Zea mays
ttttgagcattcagaaacacaccaagcgaagcgcactagcaacgacctaacaacaatggctaccaagatattagccctccttgcgcttcttgccctttttgtgagcgcaacaaatgcgttcattattccacaatgctcacttgctcctagtgccattattccacagtttctcccaccagtttcttcagatgggctaagaacaactaggtgcgcacggcaacatgcatcaacaagctgttgaggcgagcgggttacaacaaccaattgcccaattgcaacaacaatccttgccacatctaacaatacaagccatcacaacgcaacagcaacaacagttcctaccagcactgagccacccaaccatggggaaccct

SEQ ID NO: 350980 - DNA, 397 bp, Zea mays
gaccaacaagcaacatagaaagtggaatgcagtagcaacaatagagcaacaatggcggccaagatattttccatccttatgctccttgctctttctgcatgtgttgctaacgcgaccatttttcctcaatactcacaagctcctatagctgcccttcttcccccataccttccatcaatgaccgcttcagtatgtgaaaacccagcccttcaaccctacaggctccaacaagcaatcgcaacaagcaacttacctttatcacccctgttctttcaacaatcgccagccctatctttggtgcagtcattggtacaaaccatcagggcacaacagctgcagcaactcgtgctaccagtgatcagccaagtagctctggcaaacctttctccctactctc

SEQ ID NO: 350981 - DNA, 583 bp, Zea mays
  unsure (1)..(583): unsure at all n locations
ctatagagagaaagctaggtaccagcctgcagagtaccagagtccgagaattccccgggtcagaccccacagcgtcccgcatattaagcttcatcagacttccatgattagagagagactcagacatccatagaagagtagctagatcagttagccccttagctttctcctaggcagctcagctagcagaggcagccagcctcccagtaccaagcaggcaggctagtaggctagccatgacatccatccagtttcattctacccgcnnctccagttctatatagccagcctttccagttcttatctagcccgccagcatgcatgcatgcccgcatgccataggcatatacccccatctcataccaccagcatgctatatgcccgtagccagcaagttcaggaatcctagcgagcgtcaggcaaggcagtcgagcaagcccagttcctagggcccagtgcagtcgaagttcctagagagcaccaagtagcagcnccggctggcgactgcccctactggatctgccacatgtgccaaggcgcttgcagcagcatgtgctgccacccatatcatggcaggtggagc

SEQ ID NO: 350982 - DNA, 254 bp, Zea mays
cctagcaattagctcatcgactccagattggagaactcgacaccatgaaggtgctgatcgttgcccttgctctcctggcgctcgctgcgagcgccgcctccagtacaagcggcggctgtggctgccagacaccaccgtttcatctaccgcctccgttctatatgccgtctccgttctatctgccgccgcagcagcagccgcagccatggcaataccccactcaaccaccgcagcttagcccgtgccagcagttc

SEQ ID NO: 350983 - DNA, 101 bp, Zea mays
tcaaagcggcagtgcgtagagaggatcggggatcataacagcatgaagatggtcatcgtcctcgtatagtgcctgtcctctgtcatatgtcaactccttta

SEQ ID NO: 350984 - DNA, 401 bp, Zea mays
caacaagcaacatagaaagtggaatccagtagcaacaatagagcaacaatggcgaccaagatattttccctccttatgctccttgctctttctgcatgtgttgctaacgcgacaattttccctcaatgctcacaagctcctatagcttcccttcttcccccataccttccatcaatgatagcttcagtatgtgaaaacccagctcttcaaccctataggctccaacaagcaatcgcagcaagcaacatacctttatcacccttgtttcaacaatcgccagccctatctttggtgcagtcattggtacaaaccatcagggcacagcagctgcagcaactcgtgctacctgtgatcaaccaagtagctctggcaaacctttctccctactctcagcaacaaca

SEQ ID NO: 350985 - DNA, 112 bp, Zea mays
tctgcgcggcagctgataggcgagcccagagtagcagcatgcatgctgaccggcagatagtagcggccctagcagctagcaagcatgccaagagtccctagccccttagcaa

SEQ ID NO: 350986 - DNA, 363 bp, Zea mays
tcagaccattagctttatctactccagagcgcagaagaacccgatcgacaccatgagggtgttgctcgttgccctcgctctcctggctctcgctgcgagcgccacctccacgcatacaagcggcggctgcggctgccagccaccgccgccggttcatctaccgccgccggtgcatctgccacctccggttcacctgccacctccggtgcatctcccaccgccggtccacctgccgccgccggtccacctgccaccgccggtccatgtgccggcgtcggttcatctgccgccgtcaccattccacttcccttctcaaccggcccgggcttagtctcatccccagccacacccatgcccgtgcca

SEQ ID NO: 350987 - DNA, 160 bp, Zea mays
aagcaagggaatcacatcgccatggcagccaagatgtttgcattgtttgcgctcctagctctttgtgcaaccgccactagcgctacccatatcccagggcacttgccaccactactgatgccattggctaccatgaacccatggacgcacctctgcctgt

SEQ ID NO: 350988 - DNA, 192 bp, Zea mays
tgccgttctaccagcacgctgcgcctaacgctggcaccctcttacaactgcaacaattgctgccattcaaccaacttgctttgacaaacccagcagcgttctaccaacaacccatcattggtggtgccctcttttagatttcttatgagtcatagttcaattataaagtcttttgtctgatgctcgatgctt

SEQ ID NO: 350989 - DNA, 410 bp, Zea mays
agaaacacaccaagcgaagcacattagcaacaacctaacaacaatggctaccaagatattatccctccttgcgcttcttgcgctttttgcgagcgcaacaaatgcgttcattattccacaatgctcacttgctccaagttccattattacacagttcctcccaccagttacttcaatgggcttcgaacacccagctgtgcaagcctataggctacaacaagcaattgcggcgagcgtcttacaacaaccaatttcccagttgcaacaacaatccttggcacatctaacaatacaaaccatcgcaacgcaacagcaacaacaattcctaccagcactgagccacctagccatggtgaaccctgccgcctacttgcaacagcagttgcttgcatcaaacccacttgctctgg

SEQ ID NO: 350990 - DNA, 277 bp, Zea mays
aaaaaaaaaaaaaaaaaaaaaaaaaaaaaaaaaaaaataaaaaaaaaaaaataaaaaaaaaataaaataaataaaaaaaaaaaataaaataaaaaaaaaaaaataaaaaaataaaaaaaaaaaaaaaaaaatataatttaataaaataaattaaaaaaataataaaataatatatttgggggggcccttttttaaatacctcattttttctacctttcttttaatcattatttttcttttttttgcacccctattttttattctttggctccttttt

SEQ ID NO: 350991 - DNA, 179 bp, Zea mays
aagcaagggaatcacatcgccatggcagccaagatgtttgcattgtttgcgctcctagctctttgtgcaaccgtcactagtgctacccatatcccagggcacttgtcaccactactgatgccattggctaccatgaacccatggatgcagtactgcatgaagcaacagggggccgccat

SEQ ID NO: 350992 - DNA, 398 bp, Zea mays
ctagcaacatagaaagcacaatagtgtaccaacaatggcagctaaaatattttgcctccttatgctccttggtctttctgcaagtgctgctacggcgaccattttcccacaatgctcacaagctcctatagcttcccttcttcccccgtacctctcaccaacggtgtcttcggtatgtgaaaacccaattcttcaaccctacaggatccaacaggcaatcgcagctggcatcttacctttatcacccttgttcctccaacaatcatcagccctattacagcagttacctttggtgcatttattggcacaaaacatcagggcacaacaactacaacaacttgggctagcaaaccttgctgcctactctcaacaacagcagtttcttccattcaaccaac

SEQ ID NO: 350993 - DNA, 187 bp, Zea mays
agaactcagtatagagcgatctagaaagtagaactgtgcatgtcaatttcccatcatgaacaatctcaaagtctggtaccctgattatgtcattaatatgatggtagtgatgtcgcccaaaagatagtgaatgcgatcatactagttgcccttgacttctgtctcaagtgcacccatacctagaagg

SEQ ID NO: 350994 - DNA, 195 bp, Zea mays
tccacgcgtccgggggaccgaactggggctgggggagctgaattggggccatggaaccattgttaacactgacactggcacctacctggttgagttcgaacatcttttctgaattattgcgctttaatgacttaactaggtatgttgccagtggcttattctacagcacataatttttttagtgggggacaccct

SEQ ID NO: 350995 - DNA, 135 bp, Zea mays
gttctagaataggaggggccagttgtgtggatctctgtgttctaacttattaatactccttagctctttggatttttcgcttcttttttactttaattattttattattcgttattagatcttattttttaattt

SEQ ID NO: 350996 - DNA, 386 bp, Zea mays
cggacgcgtgggctgggtcttcagaccattagctttatctactccagagcgcagaagaacccgatcgacaccatgagggtgttgctcgttgccctcgctctcctggctctcgctgcgagcgccacctccacgcatacaagcggcggctgcggctgccagccaccgccgccggttcatctaccgccgccggtgcatctgccacctccggttcacctgccacctccggtgcatctcccaccgccggtccacctgccgtcgccggtccacctgccaccgtcggtccatgtgccgccgccggttcatctgccgtcgtcaccatgccactaccctactcaaccgccccggcctcagcctcatccccagccacacccatgcccgtgccaaca

SEQ ID NO: 350997 - DNA, 341 bp, Zea mays
tactactaccatttggccagctagctacaacaagccccgcttccttcttgacacaacaacaattgcttccgttctaccagcagtttgtggctaaccccgcaacccttttacaactgcaacagttgctgccctttgtccaacttgctttgacaaacccagcagccttctaccaacaacacatcattggcggtgccctcttttagattgcttattagttgtcattcaataatgaagttttttggctgatgtatgtggcctcctagaaataagaagttatatttccaaaaaaaaaaaattaaaaaaataaaattaaaaaaaaaaaaaatattaaaaaaaataag

SEQ ID NO: 350998 - DNA, 186 bp, Zea mays
cgcctttgcccgcacacacggctcccattccatttccgctgcctgcctctgacgcgcacccacaccacctcgcctccctcaggcctccgcagatcgggctctgcttgcgttgcgttgagtgtgtatgtagcggtcccgccactctactaatttctagtagaccctgtttggtttttttccgattcc

SEQ ID NO: 350999 - DNA, 387 bp, Zea mays
gcaacatagaaagcacaatagtgtaccaacaatggcagccaaaatattttgcctccttatgctccttggtctttctgcaagtgctgctacggcgaccattttcccgcaatgctcgcaagctcctatagcttcccttcttcccccgtacctctcaccagcggtgtcttcggtatgtgaaaacccaattcttcaaccctacaggatccaacaggcaatcgcagctggcatcttacctttatcacccttgttcctccaacaatcatcagccctattacaacagttacctttggtgcatttattggcacaaaacatcagggcacaacaactacaacaacttgtgctagcaaaccttgctgcctactctcagaacagcagttctttcattca

SEQ ID NO: 351000 - DNA, 403 bp, Zea mays
caacaagcaacatagaaagtggaatacagtagcaacaatagagcaacaatggcggccaatatattttgcatccttatgctccttgctctttctgcatgtgctgctaacgcgaccatttttcctcaatactcacaagctactatagctgcccttcttcccccataccttccatcaatgaccgcttcagtatgtgaaaacccagcccttcaaccctacaggctccaacaagcaatcgcaacaagcaacttacctttatcacccctgttctttcaacaatcgccagccctatctttggtgcagtcattggtacaaaccatcagggcacaacaactgcagcaactcgagctaccagtgatcagccaagtagctctggcaaacctttctccctactcttagcaacaac

SEQ ID NO: 351001 - DNA, 396 bp, Zea mays
cctaccagcactgagccacctagccatggtgaaccctgccgcctacttgcaacagcagttgcttgcatcaaacccacttgctctggcaaacgtagttgcaaaccagccacaacaacagctgcaacagtttctgccagcgctcagtcaactagccatggtgaaccctgccgcctacctacaacagcaacaactgctttcatctagcccgctcgctgtggccaatgcacctacatacctgcaacaacaattgttgcaacagattgtaccagctctgactcagctagttgtggcaaaccctgctgcctacttgcaacagctgcttccattcaaccaactgactatgtcgaactctgctgcgtacctacaacagcgacaacagttacttaatccactagc

SEQ ID NO: 351002 - DNA, 67 bp, Zea mays
tcgcatgacaacatatgaagtgccttacagtggtgacccctgtcgactactggcggctactatattt

SEQ ID NO: 351003 - DNA, 249 bp, Zea mays
  unsure (1)..(249): unsure at all n locations
gcggccgccctttttttttttttttttttanccacctatgtggtgtttcgacaggggaattaatggcgtctccttttattatcttccccctctcttttttttcttattcttatttttttaccttattctattaatttttttcatcgccagctccgtgaccttctgcttgcctttgtggttcattcctcactacccgcttccgtgcttccttttgttcttatatcatgctctcctttcttcttttctccc

SEQ ID NO: 351004 - DNA, 320 bp, Zea mays
gggtcttcagaccattagctttatctactccagagcgcagaagaacccgatcgacaccatgagggtgttgctcgttgccctcgctctcctggctctcgctgcgagcgccacctccacgcatacaagcggcggctgcggctgccagccaccgccgccggttcatctaccgccgccggtgcatctgccacctccggttcacctgccaccttcggtgcatctcccaccgccggtccacctgccgtcgccggtccacctgtcaccgtcggtccatgtgccgtcgtcgtgtcatctgccgccgtcaccatgccactaccctactc

SEQ ID NO: 351005 - DNA, 396 bp, Zea mays
attttgagcattcagaaacacaccaagcgaagcgcactagcaacgacctaacaacaatggctaccaagatattagccctccttgcgcttcttgccctttttgtgagcgcaacaaatgcgttcattattccacaatgctcacttgctcctagtgccattattccacagttcctcccaccagttacttcaatgggcttcgaacacctagctgtgcaagccaacatgcaacaacaagcgcttgcggcgagcgtcttacaacaaccaattgcccaattgcaacaacaatccttgccacatctaacaatacaagccatcacaacgcaacagcaacaacagttcctaccagcactgagccacctagccatggtgaaccctgccgcctacttgcaagagcagc

SEQ ID NO: 351006 - DNA, 194 bp, Zea mays
tcggcagtagatacatcaccgccgacgtgctgcatgcggcctgccaggcgctcgccctcgacgacatacatctgttatacttgaaccgaaaagcaattcactgaccccccttttacaacgtcttgactgagataaccctgtcgttacccaacctaatcttctttcagcatcatccccctttctccaactgatct

SEQ ID NO: 351007 - DNA, 362 bp, Zea mays
cagaaacacaccaagcgaagcgcactagcaacaacctaacaacaatggctaccaagatattatccctccttgcgcttcttgcgctttttgcgagcgcaacaaatgcgtccattattccacaatgctcacttgctcctagttccattattccacagttcctcccaccagttacttcaatggccttcgaacacccagctgtgcaagcctataggctacaacaagcgattgcggcgagcgtcttacaacaaccaattgcccaattgcaacaacaatccttggcacatttaacaatacaaaccatcgctacgcaacagcaacaacagtttctaccagcactgagccacctagccatggtgaaccct

SEQ ID NO: 351008 - DNA, 292 bp, Zea mays
gatgtagtcacctacacaatatccatgccaaactatgttgttggaggtattcgtagaaatctggagcagacacagtacagctcatccagttcaagtggatacagtccatgtgcccgttctaaagtactacagcaacagataatatttggagggcagaatgaccagcacgaggacacacattatgactctgatgaagcagaaagcaaactctctcttctagaacctgaggactcagttaatgaagataattttgcggctgtgctttcacaatttaacgatgcccacatcatag

SEQ ID NO: 351009 - DNA, 372 bp, Zea mays
gcaacatagaaagcacaatagtgtaccaacaatggcagccaaaatattttgcctccttatgctccttggtctttctgcaagtgctgctacggcgaccattttcccgaaatgctcgcaagctcctatagcttcccttcttcccccgtacctctcaccagcggagtcttcggtatgtgaaaacccaattcttcaaccctacaggatccaacaggcaatcacagctggcatcttacctttatcacccttgttcctccaacaatcatcagccctattacatcagttacctttggtgcatttattggcacaaaacatcagggcacaacaactacaacaacttgtgctagcaaaccttgctgcctactctcagcaaca

SEQ ID NO: 351010 - DNA, 369 bp, Zea mays
gagcattcagaaacacaccaagcgaagcacattagcaacaacctaacaacaatggctaccaagatattatccctccttgcgcttcttgcgctttttgcgagcgcaacaaatgcgttcattattccacaatgctcacttgctccaagttccattattacacagtttctcccaccagttacttcaatgggcttcgaacacccagctgtgcaagcctataggctacaacatgcaattgcggcgagcgtcttacaacaaccaattttccagttgcaacaacaatccttggcacatctaacaatacaaaccatcgcaacgcatcagcatcaacaatttctaccagttctgagccatcttgccatggtgaaccct

SEQ ID NO: 351011 - DNA, 275 bp, Zea mays
gaccattagctttatctactccagagcgcagaagaacccgatcgacaccatgagggtgttgctcgttgccctcgctctcctggctctcgctgcgagcgccacctccacgcatacaagcggcggctgcggctgccagccaccgccgccggttcatctaccgccgccggtgcatctgccaccttcggttcacctgccacctccggtgcatcttccaccgccggtccacctgccgcctccggtccacctgccaccgtcggttcatgttcccgcgccgg

SEQ ID NO: 351012 - DNA, 323 bp, Zea mays
gagaccaactagcaacatagaaagcacaatagtgtaccaacaatggcagccaaaatattttgcttccttatgctccttggtctttctgcaagtgctgctaccgcaaccattttcccacaatgctcacaagctcctatagcttcctttcttcccccatacctctcaccagcggagtcttcagtatgtgaaaacccaattcttcaaccctacaggatccaacaggcaatcgcagcaggcatcttacctttatcacccttgatccttcaacaaccgtcagccctattacagcagtcacctttggtgcattcgttggctcataacat

SEQ ID NO: 351013 - DNA, 156 bp, Zea mays
ctcatctgcatacacggtctccctcttcctgtcagtactagagtgcgagcgcggcagcgagtcggacacaaggtgaaatggggacacctttcttcaattcacttgccttcgttttacaacatttctgactcttaaaaccttgctatttcccttctt

SEQ ID NO: 351014 - DNA, 62 bp, Zea mays
atgccacgtcacatgtattgtatagtgtcacctaacttcaatccactggccgtagatctaca

SEQ ID NO: 351015 - DNA, 60 bp, Zea mays
ctccaaggccagcgacgttcgccggcggcgcggtcgaagagatggccgcagcggctcacg

SEQ ID NO: 351016 - DNA, 406 bp, Zea mays
aacatccttctatcagtaccatcaatcatcattcatcttagtagtataggcaccaaatcaaatctgcaacatcaattatctaactccaaaaaccatgaagctggtgcttgtggttcttgctttcattgctttagtatcaagtgtttcttgtacacagacaggcggctgcagctgtggtcaacaacaaagccatgagcagcaacatcatccacaacaacatcatccacaaaaacaacaacatcaaccaccaccacaacatcaccagcagcagcaacaccaacaacaacaagttcacatgcaaccacaaaaacatcagcaacaacaagaagttcatgttcaacaacaacaacaacaaccgcagcaccaacaacaacaacaacaacagcaccaacaacaacatcaatgt

SEQ ID NO: 351017 - DNA, 66 bp, Zea mays
ttatatccagcacattccatgaaatcgcgggaagtatggacaccgaggcgcagctctagttccact

SEQ ID NO: 351018 - DNA, 200 bp, Zea mays
  unsure (1)..(200): unsure at all n locations
tcgggccaagtcgcggggctgttggcggggcaaattaggcagcaactttccgcggatttgtggctttcaaaaaccatttattgccctacctgtttgcgggtgnnnggaatgagaactatggctgagatagcgtggtagnnnatgtgagtatttacgggatgatggtataatggtacgcataccatggggaggcattgtat

SEQ ID NO: 351019 - DNA, 294 bp, Zea mays
gcaacagctaccaccattcagccagctagctgatgtgagccctgttgccttcttgacacaacaacagttgttgccgttctacctgcacgctgcgcctaacgctggcaccctcttacaactgcaacaattgctgccattcaaccaacttgctttgacaaacccaacagcgttctaccaacaacccatcattggtggtgccctcttttagattgcttatgagttatagttcaataatgaagttttttggatgatgtttgtggcttcccagaaatatgaaagttcattttttaaatt

SEQ ID NO: 351020 - DNA, 397 bp, Zea mays
ctgttgctgagagtaggcagcagcagtttgttccattcaaccaactagctgcattgaactctgcttattatttgcaacaacaacaactaccattcagccagctacctgctgcctacccccagcaatttgttgcattgaaccaactggcagcattgaactctcctgcttatttacagcagcaacaactactaccattcagacagctagctggtgtgagccctgctaccttcttgatacaaccacaggtgttgccgttctaccagcacgctgcgcctaacgctggcaccctgttacaactgcaacaattgctgccattcaaccaacttgctttgacaaacccaggagcgttctaccaacaacccatcattggtggtgccctcttttagatttcttatga

SEQ ID NO: 351021 - DNA, 297 bp, Zea mays
ctcgcttcccttcccttcccccacccccggccctttcctccccgccttatttcttgcccacgagctggacgagccagctgctgcgtttcgttcatccgagcggcgcgtgcgccgtgctcgtttcctcttcctccacacgagacgcggacgcctcgctgagaacgggaggggctgctttgttgctgtagataccgggcgagggcggcgtgatctcggtttcgacgccgcgggcgggacgcgatggctttgtgaccttcttgttcttttcttgacgcccccccccgaccgagttcaggc

SEQ ID NO: 351022 - DNA, 199 bp, Zea mays
gcgatcaataaggaatatagaaagtgtgggagtcaagcaacaatggagaacaactattcaccaaaacatatactctcttgataatcttaatgctttgtacacgtgttgcgatcacgctactgttcactaagatgctacaggactcctatatcttccattttttccacatatattttataaaatatatgtcaagcgtgtg

SEQ ID NO: 351023 - DNA, 346 bp, Zea mays
cggacgcgtgggcagcattcagaaacacaccaagcgaagcgcactagcaacaacctaacaacaatggctaccaagatattagccctccttgcgcttcttgcccttttagtgagcgcaacaaatgcgttcattattccacagtgctcacttgctcctagtgccattattccacagttcctcccaccagttacttcaatgggcttcgaacatccagccgtgcaagcctacaggctacaactagcgcttgcggcgagcgtcttacaacaaccaattgcccaattgcaacaacaatccttggcacatctaaacctacaaaccatcgcaacgcaacagcaacaacagtttc

SEQ ID NO: 351024 - DNA, 412 bp, Zea mays
agcattcagaaacacaccaagcgaagcgcactagcaacaacctaacaacaatggctaccaagatattagccctccttgcgcttcttgcccttttagtgagcgcaacaaatgcgttcattattccacagtgctcacttgctcctagtgccattattccacagttcctcccaccagttacttcaatgggcttcgaacatccagccgtgcaagcctacaggctacaactagcgcttgcggcgagcgtcttacaacaaccaattgcccaattgcaacaacaatccttggcacatgtaaacctacaaaccatcgcaacgcaacagcaacaacagtttctggcatcacttgaccacctagccgtggtgaaccctgtcgcctacttgcaacagcaggttcttgcattcaacccatttgc

SEQ ID NO: 351025 - DNA, 390 bp, Zea mays
attttgagcattcagaaacacaccaagcgaagctacctagcaacgacttaacaacaatggctaccaagatattagccctccttgcgcttcttgccctttttgtgagcgcaacaaatgcgttcattattccacaatgctcacttgctcctagtgccattataccacagtttctccgaccagttacttcaatgggcttcgaacacctagctgtgcaagcctacaggctacaacaagcgcttgcggcgagcgtcttacaacaaccaattaaccaattgcaacaacaatccttggcacatctaaccatacaaaccatcgcaacacaacagcaacaacagtttctaccagcactgagccaactagatgtggtgaaccctgtcgcctactttgaac

SEQ ID NO: 351026 - DNA, 345 bp, Zea mays
ctagcaacatagaaagcacaatagtgtaccaacaatggcagccaaaatattttgcttccttatgctccttggtctttctgcaagtgctgctaccgcaaccattttcccacaatgctcacaagctcctatagcttcctttcttcccccatacctctcaccagcggtgtcttcagtatgtgaaaacccaattcttcaaccctacaggatccaacaggcaatcgcagcaggcatcttacctttatcacccttgttcctccaacaaccgtcagccctattacagcagttacctttggtgcatttgttggcacaaaacatcaaggcacaacaactacaacaacttgtgct

SEQ ID NO: 351027 - DNA, 420 bp, Zea mays
gaaagcacaatagtgtaccaacaatggcagctaaaatattttgcctccttatgctccttggtctttctgcaagtgctgctacggcgaccattttcccacaatgctcacaagctcctatagcttcccttcttcccccgtacctctcaccaacggtgtcttcggtatgtgaaaacccaattcttcaaccctacaggatccaacaggcaatcgcagctggcatcttacctttatcacccttgttcctgcaacaatcatcagccctattacagcaggtacctttggtgcatttattggcacaaaacatcagggcacaacaactacaacaacttgtgctagcaaaccttgctgtctactcttagcaacagcagtttcttccattcaaccaactagctgcattgaactcttgttcttatttgcaac

SEQ ID NO: 351028 - DNA, 171 bp, Zea mays
cggacgcgtgggcgacgaggacgaccgacgacgcacgcagagatccggcgtactgcaaattttgaaaactgaactgttagatggcatcagcagagctttcccgtgaggaaaatgtgtacatggcgaagctcgccgagcaggcggagaggtacgaggagatggttgagttca

SEQ ID NO: 351029 - DNA, 387 bp, Zea mays
caactagcaacatagaaagcacaatagtgtaccaacaatggcagccaaaatattttgcttccttatgctccttggtctttctgcaagtgttgctaccgcaaccattttcccacaatgctcacaagctcctatagcttcccttcttaccccatacctctcaccagcggtgtcttcaatgtgtgaaaacccaattgttcaaccctacaggatccaacaggcaatcgcaacaggcatcttaccattatcacccttgttccttcaacaaccgtcagccctattacagcagttacctttggtccatttggtggcacaaaacattaaggcacaacaactacaacaacttgggctagcaaaccttgctgcatactctcagcaacatcagtttct

SEQ ID NO: 351030 - DNA, 419 bp, Zea mays
caactagcaacatagaaagcacaatagtgtaccaacaatggcagccaaaatattttgcctccttatgctccttggtctttctgcaagtgctgctacggcgaccattttcccgaaatgctcgcaagctcctatagcttcccttcttcccccgtacctctcaccagcggtgtcttcggtatgtgaaaacccaattcttcaaccctacaggatccaacaggcaatcacagctggcatcttacctttatcacccttgtttctccaacaatcatcagccctattacatcagttacctttggtgcatttattggcacaaaacatcagggcacaacaactacaacaacttgtgctagcaaaccttgctggctactctcagcaacagcaagtttttccattcaaccaactagctgcattgaactctg

SEQ ID NO: 351031 - DNA, 118 bp, Zea mays
agaccattagctttatctactccagagcgcagaagaacccgatcgacaccatgagggtgttgctcgttgccctctctctcctggctctcgctgagagcgccacctccacgcatacaag

SEQ ID NO: 351032 - DNA, 346 bp, Zea mays
caacaagcaacatagaaagtggaatccagtagcaacaatagagcaacaatggagaccaagatattttccctccttatgctccttgctctttctacatgtgttgctaacgcgacaattttccctcaatgctcacaagctcctatagcttccctttttcccccataccttccatcaattatagcttcagtatgtgaaaacccagctcttcaaccatataggcttcaacaagcaatcgcagcaagcaacatacctttatcgcccttgtgtgtcaacaatcgccagccctatctttggggcagtcattggtacaaaccatcaaggcacaacagctgcagcaactcgtgct

SEQ ID NO: 351033 - DNA, 391 bp, Zea mays
ccaacaagcaacatagaaagtggaatccagtagcaacaatagagcaacaatggcgaccaagatattttccctccttatgctccttgctctttctgcatgtgttgctaacgcgacaattttccctcaatgctcacaagctcctatagcttcccttcttcccccataccttccatcaatgatagcttcagtatgtgaaaacccagctcttcaaccctataggctccaacaagcaatcgcagcaagcaacatacctttatcacccttgtttcaacaatcgccagccctatctttggtgcagtcattggtacaaaccatcatggcacagcagctgcagcaaactcgtgctacctgtgatcaaccaagtagctctgggaaacctttctccctactc

SEQ ID NO: 351034 - DNA, 67 bp, Zea mays
cgaggctactaccatactgaaccgtacagttgtcagcctcataccgagccatacttatgcttgtgtc

SEQ ID NO: 351035 - DNA, 407 bp, Zea mays
aattagctcatcgactccagattggagaactcgacaccatgaaggtgctgatcgttgcccttgctctcctggcgctcgctgcgagcgccgactccagtacaagcggcggctgtggctgccagacaccaccgtttcatctaccgcctccgttctatatgccgcctccgttctatctgccgccgcagcagcagccgcagccatggcaataccccactcaaccaccgcagctaagcccgtgccagcagttcggatcctgcggcgtcggcagcgtcggcagcccgttcctgggccagtgcgtcgagttcctgaggcaccagtgcagcccggcggcgacgccctacggctcgccacagtgccaggcgctgcagcagcagtgctgccaccagatcaggcaggtggagccgctg

SEQ ID NO: 351036 - DNA, 411 bp, Zea mays
gcaacatagaaagcacaatagtgtaccaacaatggcagccaaaatattttgcctccttatgctccttggtctttctgcaagtgctgctacggcgaccattttcccacaatgctcacaagctcctatagcttcccttcttcccccgtacctctcaccagcggtgtcttcggtatgtgaaaacccaattcttcaaccctataggatccaacaggcaatcgcagctggcatcttacctttatcacccttgttcctccaacaatcatcagccctattacagcagttacctttggtgcatttattggcacaaaacatcagggcacaacaactacaacaacttgtgctagcaaaccttgctgcctactctcagcaacaacagtttcttccattcaaccaactagctgcattgaactc

SEQ ID NO: 351037 - DNA, 312 bp, Zea mays
attttcagcattcagaaacacaccaagcgaagcgcactagcaacaacctaacaacaatggctaccaagatattagccctccttgcgcttcttgcccttttagtgagcgcaacaaatgcgttcattattccacagtgctcacttgctcctagtgccattattccacagttcctcccaccagttacttcaatgggcttcgaacatccagccgtgcaagcctacaggctacaactagcgcttgcggcgagcgtcttacaacaaccaattgcccaattgcaacaacaatccttggcacatctaaacctacaaacca

SEQ ID NO: 351038 - DNA, 370 bp, Zea mays
ctgggtcttcagaccattagctttatctactccagagcgcagaagaacccgatcgacaccatgagggtgttgctcgttgccctcgctctcctggctctcgctgcgagcgccacctgcacgcatacaagcggcggctgcggctgccagccaccgccggcggttcatctaccgccgccggtgcatgtgccacctccggttcacctgccacctccggggcatgtcccaccgccggtccacctgccgacgccggtccacctgccaccgccggtccatgtgccgtcgccgggtcatctgccgccgtcaccatgccactaccctacttaaccgccccgggcttagccttatccccagccacacccatgcccgtgcc

SEQ ID NO: 351039 - DNA, 378 bp, Zea mays
gagcattcagaaacacaccaagcgaagcgcactagcaacaacctaacaacaatggctaccaagatattatccctccttgcgcttcttgcgctttttgcgagcgcaacaaatgcgtccattattccacaatgctcacttgctcctagttccattattccacagttcctcccaccagttacttcaatggccttcgaacacccagctgtgcaagcctataggctacaacaagcgattgcggcgagcgtcttacaacaaccaattgcccaattgcaacaacaatccttggcacatgtaacaatacaaaccatcgcaacgcaacagcaacaacagtttctaccagcactgagccacctagccatggtgaaccctgtcgcctac

SEQ ID NO: 351040 - DNA, 199 bp, Zea mays
  unsure (1)..(199): unsure at all n locations
cgatcgaaatcgaaccgcctccctgcgtgctcccctgatcaagaaattctcacgccgcgcgaacgcacgcctgaggcggttggatcctctggtggggttccttggtctcgatttgctgngtgtggatgggggcgccccatcaacgttggactcccgaggaagaggccgctctctatgttggtttcgacaaacactggcc

SEQ ID NO: 351041 - DNA, 159 bp, Zea mays
cagaccattagctttatctactccagagcgcagaagaacccgatcgactccatgagggtggtgctcgttgccctcgctctcctggctctcgctgcgagcgccatcttcacgcatacaagcggtggctgctgttgttcatcacctctccttgttcatctt

SEQ ID NO: 351042 - DNA, 277 bp, Zea mays
gcaagagcaagcaagagaggacgacatggcggcgccacggagcctggcggaccgcgctctcgctgctcgtcttcgccaccctcgcgctcctcgacgccgacaccgtcgcctgcctctacccggtgctggagctcgccgagcccaccatgatggccgtgctgccgcccgtcgtcggcgccgtcgcgggctacttattcatggagttccccaacaaccggcacggtgtcgggtaccagcccacgcccgacaccttggacttgcagtacaaatactagcc

SEQ ID NO: 351043 - DNA, 414 bp, Zea mays
caacaagcaacatagaaagtggaatacagtagcaacaatagagcaacaatggcggccaagatattttccatccttatgctccttgctctttctgcatgtgttgctaacgcgaccatttttcctcaatactcacaagctcctatagctgcccttcttcccccataccttccatcaatgaccgcttcagtatgtgaaaacccagcccttcaaccctacaggctccaacaagcaatcgcaacaagcaacttacctttatcacccctgttctttcaacaatcgccagccctatctttggtgcagtcattggtacaaaccatcagggcacaacagctgcagcaactcgtgctaccagtgatcagccaagtagctctggcaaacctttctccctactctcagcaacaacaatttcttcca

SEQ ID NO: 351044 - DNA, 269 bp, Zea mays
attttgagcattcagaaacacaccaagcgaagcacattagcaacaacctaacaacaatggctaccaagatattatccctccttgcgcttcttgcgctttttgcgagcgcaacaaatgcgttcattattccacaatgctcacttgctccaagttccattattacacagtttcctcccaccagttacttcaatgggcttcgaacacccagctgggcaaggctatatgccacatcaagcaattgaggtgatgcgcctacaatcaccaatttt

SEQ ID NO: 351045 - DNA, 281 bp, Zea mays
aaacacatgcatgcgaatttatttctattctataacttaacctacattctaatctctagtcggacgcttacaacctactgtttaaaaacaggccatactgaattaaattaatacgcttggaaaaaagatctcatcatgactggtgtcgtaggatcgaacatacacacatcgaattcatattagaaacaatttcgcatactggatggcgaatgtgacacaccctttgccgaaacattaaatccagctttagtagaggttaatctaaaaactattatcttttt

SEQ ID NO: 351046 - DNA, 403 bp, Zea mays
attttcaacattcagaaacacaccaagcgaagcgcactagcaacaacctaacaacaatggctaccaagatattagccctccttgcgcttcttgcccttttagcgagcgcaacaaatgcgttcattattccacagtgctcacttgctcctagtgccattattgcacagattctcccaccagttacttcaatgggcttcgaacatgcagccgtgcaagcctacaggctacaactagcgcttgcggagagcgtattacaacaaccaattgcccaattgcaacaacaatccttgggacatgtaaacctacaaaccatcgcaacgcaacagcaacaacagtttctgccatcactgagccacctagccgggtgaaccctgtcgcctacttgcaacagcagctacttgca

SEQ ID NO: 351047 - DNA, 145 bp, Zea mays
acgaagagagaagcccataaactgtgtttgacgtactggctaatattccccgtgtggaactaatatacctttcattccttcaaacctgcaccaaactattatagccttaactacaccaactttttccttcacttttcttgacgcc

SEQ ID NO: 351048 - DNA, 382 bp, Zea mays
cagaaacacaccaagcgaagcgcactagcaacgacctaacaacaatggctaccaagatattagccctccttgcgcttcttgccctttttgtgagcgcaacaaatgcgttcattattccacaatgctcacttgctcctagtgccattattccacagttcctcccaccagttacttcaatgggcttcgaacacctagctgtgcaagccaacatgcaacaacaagcgcttgcggcgagcgtcttacaacaaccaattgcccaattgcaacaacaatccttgccacatgtaacaatacaagccatcacaacgcaacagcaacaacagttcctaccagcactgagccacctagccatggtgaaccctgccgcctacttgcaagagca

SEQ ID NO: 351049 - DNA, 148 bp, Zea mays
gtgtcctttcaggagcacgaacacactgtagaacgcagtgtggatcaggaagcataaacttcactgtacatgtttgatgcttgtaatattaactcatataataatcatattcttgtcagatttttatcttataactaataatattaac

SEQ ID NO: 351050 - DNA, 405 bp, Zea mays
  unsure (1)..(405): unsure at all n locations
cgaccattttcccgcaatgctcgcaagttcttatagcttcccttcttcccccgtacctctcaccagcggtgtcttctgtatgtgaaaacccaatttttcaaccctacaggatccaacaggcaatcgcagctggcatcttacctttatcacccttgttcctccaacaatcatcagccctattacaacagttacctttggtgcatttattggcacaaaacattagggcacaacaactacaacaacttgtgctagcaaaccttgctgcctactctcagcaacagcagtttctttcattcaaccaactaggntcattgaactctgctttttatttgaacaacaacaactaccattcagccagctacctgctgtctacccccagcaatttcttccattcaaccaactagc

SEQ ID NO: 351051 - DNA, 408 bp, Zea mays
gagaccaacaagcaacatagaaagtggaatccagtagcaacaatagagcaacaatggcgaccaagatattttccctccttatgctccttgctctttctgcatgtgttgctaacgcgacaattttccctcaatgctcacaagctcctatagcttcccttcttcccccataccttccatcaatgatagcttcagtatgtgaaaacccagctcttcaaccctataggctccaacaagcaatcgcagcaagcaacatacctttatcacccttgtttcaacaatcgccagccctatctttggggcagtcattggtacaaaccattagggcacagcagctgcagcaacttgtgctacctgtgatcaaccaagtagctctggcaaaccttttttcctactcttaggaacaacaat

SEQ ID NO: 351052 - DNA, 188 bp, Zea mays
accgtgtccatcaggaaacatatatagtataacagcggactgatagtgggatctgagcaatagagcttaggtatgcgagcgagccgtaaggaaatgtaatcgtcggcaaggcagcttgtattgaatagtggaggtggaaacaagaatgccttcaaagcacttattgctacaaaatacagtgggatcaa

SEQ ID NO: 351053 - DNA, 168 bp, Zea mays
ctcaacatatgagaaccacactccttgaatcgaagtgagtacaacttaacaacatgtgctaccaagatatacttcctccatgctctttttgtccttttagctagctcatcacattctaacatgatttcatagtgcttactagctcctagtgccattatttcacagttc

SEQ ID NO: 351054 - DNA, 394 bp, Zea mays
  unsure (1)..(394): unsure at all n locations
attttgagcattcagaaacacaccaagcgaagcacattagcaacaacctaacaacaatggctaccaagatattatccctccttgcgcttcttgcgctttttgcgagcgcaacaaatgcgttcattattccacaatgctcacttgctccaagttccattattacacagttcctcccaccagttacttcaatgggcttcgaacacccagctgtgcaagcctataggctacaacaagcaattgcggcgagcgtcttacaacaaccaattttccagttgcaacaacaatccttggcacatctaacaatacaaaccatcgcaacgcaacagcaacaacaattcctaccagcactgagccacctagccatggtgaaccctgccgnctacttgcaacagca

SEQ ID NO: 351055 - DNA, 249 bp, Zea mays
gaacaattgaaatgaaaagaaaaaagtattgttcattcaggtcattgcttacactttcactttttctttatattttattcttttactattatttctctaatctatttgtcttttaatttcttttcttgcttttttttctttatttcttattcttatttactttctttttcatttttttcttttttcttttttattttctttttcctttcttttttccttcttcttttatcttcttttcttttttccttt

SEQ ID NO: 351056 - DNA, 358 bp, Zea mays
tgcatttattggcacaaaacatcagggcgcaacaactacaacaacttgtgctagcaaaccttgctgcctactctcagcaacagcagtttcttccattcaaccaactagctgcattgaactctgcttcttatttgcaacaacaacaactaccattcagccagctatctgctgcctacccccagcaatttcttccattcaaccaactgacagcattgaactctcctgcttatttacagcagcaacaactactaccattcagccagctagctggtgtgagccctgctacctttttgacacaaccaacagtggtgccgttctaacagcacgctgcgcctaaacgttggaccctcttacaact

SEQ ID NO: 351057 - DNA, 413 bp, Zea mays
accttccatcaattatagcttcagtatgtgaaaacccagctcttcaaccatataggcttcaacaagcaatcgcagcaagcaacatacctttatcgcccttgttgtgtcaacaatcgccagccctatctttggtgcagtcattggtacaaaccatcagggcacaacagctgcagcaactcgtgctacctgtgatcaaccaagtagctctggcaaacctttctccctactcttcgcaacaacaatttcttccattcaaccaactgtctacactgaaccctgctgcttatttgcagcaacaactattaccatttagccagctagctactgcctactcttaacaacaacaacttctttcatttaaccaaatggccgcactgaacctcgctgcttatttgcagcagcaaatactacta

SEQ ID NO: 351058 - DNA, 379 bp, Zea mays
cagaaacacaccaagcgaagcgcactagcaacgacctaacaacaatggctaccaagatattagccctccttgcgcttcttgccctttttgtgagcgcaacaaatgcgttcattattccacaatgctcacttgctcctagtgccattattccacagttcctcccaccagttactttaatgggcttcgaacacctagctgtgcaagccaacatgcaacaacaagcgcttgcggcgagcgtcttacaacaaccaattgcccaattgcaacaacaatacttgccacatctaacaatacaagccatcacaacgcaacagcaacaacatgttctaccagcactgagtcacctagccatggtgaaccctgccgtctactttgcaag

SEQ ID NO: 351059 - DNA, 72 bp, Zea mays
atgcgacttcatagctcttatatagttgttcctatattcaattcactggtcgttgctttacaactggcagca

SEQ ID NO: 351060 - DNA, 226 bp, Zea mays
gcgcagaagaacccgatcgacaccatgagggtgttgctcgttgccctcgctctcctggctctcgctgcaagcgccaccttcactcatacaagcggttgctgctgttgtccaccacctacttctgttcatcttcctactcctttctatctccttccctcccttttaccttcacacattatttatcttttatccatctactatactttataatcctcccttttcatac

SEQ ID NO: 351061 - DNA, 408 bp, Zea mays
agcattcagaaacacaccaagcgaagcacattagcaacaacctaacaacaatggctaccaagatattatccctccttgcgcttcttgcgctttttgcgagcgcaacaaatgcgttcattattccacaatgctcacttgctccaagttccattattacacagttcctcccaccagttacttcaatgggcttcgaacacccagctgtgcaagcctataggctacaacaagcaattgcggcgagcgtcttacaacaaccaattttccagttgcaacaacaatccttggcacatctaacaatacaaaccatcgtaacgcaacagcaacaacaatttctaccagcactgagccacctagccatggtgaaccctgccggctacttgcaacagcagttgcttgcatcaaacccac

SEQ ID NO: 351062 - DNA, 175 bp, Zea mays
tgccctttgtccaacttgctttgacaaacccagcagccttctaccaacaacacatcattggtggtgccctcttttagattgcttattagtcgtatttcaataataaagtctattggatgttgtatgtgtgccaaccagaattttatgtatgtacattcatcatatttttatgttt

SEQ ID NO: 351063 - DNA, 379 bp, Zea mays
  unsure (1)..(379): unsure at all n locations
aactagcaacatagaaagcacaatagtgtaccaacaatggcagccaaaatattttgcctccttatgctccttggtctttctgcaagtgctgctacggcgaccattttcccgcaatgctcgcaagctcctatagcttcccttcttcccccgtacctctcaccagcggtgtcttcggtatgtgaaaacccaattcttcaaccctacaggatccaacaggcaatcgcagctggcatcttacctttatcacccttgttcctccaacaatcatcagccctattacaacagttacctttggtgcatttattggcacaaaacatcagggcacaacaactacaacaacttgtgctagcaaaccttgctgnctactctcagcaacagc

SEQ ID NO: 351064 - DNA, 340 bp, Zea mays
  unsure (1)..(340): unsure at all n locations
gaccaacaagcaacatagaaagtggaatccagtagcaacaatagagcaacaatggcgaccaagatattttccctccttatgctccttgctctttctgcatgtgttgctaacgcgacaattttccctcaatgctcacaagctcctatagcttcccttcttcccccataccttccatcaatgatagcttcagtatgtgaaaacccagctcttcaaccctataggctccaacaagcaatcgcagcaagcaacatacctttatcacccttgtttcaacaatcgccagccctaattttggtgcagtcattggtacaaaccattanggcacagcagctgcagcaac

SEQ ID NO: 351065 - DNA, 396 bp, Zea mays
cggacgcgtgggctagcaacatagaaagcacaatagtgtaccaacaatggcagccaaaatattttgcttccttatgctccttggtctttctgcaagtgttgctaccgcaaccatttttccacaatgctcacaagctcctatagcttcccttcttcccccatacctctcaccagcggtgtcttcaatgtgtgaaaacccaattgttcaaccctacaggatccaacaggcaattgcaacatgcatcttaccattatcaccccttgtttcttcaacaaccgtcagccctattacagcagttacctttgtgtcatttggtggcacaaaacaatagggtacaacaactaccacaacttgtgctagtaaaccttgttgtatactctcacgaacatcagtttt

SEQ ID NO: 351066 - DNA, 407 bp, Zea mays
aaaatattttgcctccttatgctccttggtctttctgcaagtgctgctacggcgaccattttcccgcaatgctcgcaagctcctatagcttcccttcttcccccgtacctctcaccagcggtgtcttcggtatgtgaaaacccaattcttcaaccctacaggatccaacaggcaatcgcagctggcatcttacctttatcacccttgttcctccaacaatcatcagccctattacaacagttacctttggtgcatttattggcacaaaacattagggcacaacaactacaacaacttgtgctagcaaaccttgctgcctactctcagcaacagcagttttctccattcaaccaactaggttcattgaactctgcttcttatttgcaacaacaacaactaccattcag

SEQ ID NO: 351067 - DNA, 153 bp, Zea mays
attgagaccaactagcaacatagaaagcacaatagtgtaccaacaatggcagccaaaatattttgcttccttatgctccttggtctttctgcaagtgttgttaccgcaactatttttcccacaaggctcacaagctcctatagctttcctttt

SEQ ID NO: 351068 - DNA, 90 bp, Zea mays
tctattatgtgctgtcttctaatcgatggagggctcgctagatcagtgatgtaggttaccatattgattcaaatatgtgtatctattatc

SEQ ID NO: 351069 - DNA, 137 bp, Zea mays
aaactcaacagtgttctaccaacaacccatcattggtggtgccctcttttagattgcttatgagttatagttcaataatgaagttttttggatgatgtttgtggcgtcccagaaataagaaagtacatttctagatt

SEQ ID NO: 351070 - DNA, 386 bp, Zea mays
gaccattagctttatctactccagagcgcagaagaacccgatcgacaccatgagggtgttgctcgttgccctcgctctcctggctctcgctgcgagcgccacctccacgcatacaagcggcggctgcggctgccagccaccgccgccggttcatctaccgccgccggtgcatctgccacctccggttcacctgccacctccggtgcatctcccaccgccggtccacctgccgccgccggtccacctgccaccgccggtccatgtgccgccgccggttcatctgccgccgccaccatgccactaccctactcaaccgccccggcctcagcctcatccccagccacacccatgcccgtgccaacagccgcattcaagcccgtgccagc

SEQ ID NO: 351071 - DNA, 338 bp, Zea mays
tattattgagaccaacaagcaacatagaaagtggaatccagtagcaacaatagagcaacaatggagaccaagatattttccctccttatgctccttgctctttctacatgcgttgctaacgcgacaattttccctcaatgctcacaagctcctatagcttccctttttcccccataccttccatcaattatagcttcagtatgtgaaaacccagctcttcaaccatataggcttcaacaagcaatcgcagcaagcaacatacctttatcgcccttgttgtgtcaacaatcggcagccctatctttgggcaggcattggacacaccatcagggcacaac

SEQ ID NO: 351072 - DNA, 172 bp, Zea mays
atagccgctggctagctagctagttgagtcatttagcggcgatgattgagtaataatgtgtcacgcatcaccatgggtggcagtgtcagtgtgagcaatgacctgaatgaacaattgaaatgaaaagaaaaaagtattgttccaaattaaaaaattataatttaaataaaaa

SEQ ID NO: 351073 - DNA, 406 bp, Zea mays
ttcagaaacacaccaagcgaagcacattagcaacaacctaacaacaatggctaccaagatattatccctccttgcgcttcttgcgctttttgcgagcgcaacaaatgcgttcattattccacaatgctcacttgctccaagttccattattacacagttcctcccaccagttacttcaatgggcttcgaacacccagctgtgcaagcctataggctacaacaagcaattgcggcgagcgtcttacaacaaccaatttcccagttgcaacaacaatccttggcacatctaacaatacaaaccattgcaacgcaacagcaacaacaattcctaccagcactgagccacctagccatggtgaaccctgccgcctacttgcaacagcagttgcttgcatcaaacccactt

SEQ ID NO: 351074 - DNA, 398 bp, Zea mays
atcttacctttatcacccttgttcctccaacaatcatcagccctattacagcagttacctttggtgcatttattggcacaaaacatcagggcacaacaactacaacaacttgtgctagcaaaccttgctgcctactctcagcaacagcagtttcttccattcaaccaactagctgcattgaactctgcttcttatttgcaacaacaacaactaccattcagccagctacctgttgcctacccccagcaatttcttccattcaaccaactggcagcattgaactctcctgcttatttacagcagcaacaactactaccattcagccagctagctggtgtgagccctgctaccttcttgacacaaccacagttgttgccggtctaccagcacgctgcgcc

SEQ ID NO: 351075 - DNA, 352 bp, Zea mays
aaaaaaaaggaaaaggaaaaaaaacaaaaagaaataaaaacaaaaaaaaaaaaaagaggaagaaaaaaaaaaaaaaaaaaagaaagaaaaaaaaaaaaaaaaaaaaaaaaaaaaaaaaaaaaaaaaaaaaacaaaaaaaaaaaccaaaaaaaaaaaaaaaaaacaaaaaaagaaaaaaaaaaaagaaaaaaaaaaaaaaaaaaaaaaaaaaaaaaaaaaaaaaaaaaaaaaaaaaaagaaaaagaaaaaaaaaaaaaaaaaaaaacaaaaaaaaaaaaaaaaaaaaaaagagaaaaaaaaaaaaaaaaaaaaaaaaaaaaaaaaaaaaaaaaaaagaaaaaaaaaaaaagaa

SEQ ID NO: 351076 - DNA, 409 bp, Zea mays
attgagaccaacaagcaacatagaaagtggaatccagtagcaacaatagagcaacaatggcgaccaagatattttccctccttatgctccttgctctttctgcatgtgttgctaacgcgacaattttccctcaatgctcacaagctcctatagcttcccttcttcccccataccttccatcaatgatagcttcagtatgtgaaaacccagctcttcaaccctataggctccaacaagcaatcgcagcaagcaacatacctttatcacccttgtttcaacaatcgccagccctatctttggtgcagtcattggtacaaaccatcaaggcacagcagctgcagcaactcgtgctacctgtgatcaaccaaggagctctggcaaaccttttttcctactctcagcaacaaca

SEQ ID NO: 351077 - DNA, 165 bp, Zea mays
atccgacctactcatgatacctctagaacggctggcgtgtagccaacttgggcaagtaatgggattgttaaagggggaactgaacgcttgatgggaaaacggcaggtggcttccatattcaggccacttgtatatgtacttctgataagaaaaatgggagttcgt

SEQ ID NO: 351078 - DNA, 63 bp, Zea mays
tctttcatttgcagctttctaacgtccggttcttttagtttcttttctttctttcttgctacg

SEQ ID NO: 351079 - DNA, 335 bp, Zea mays
gcaacatagaaagcacaatagtgtaccaacaatggcagccaaaatattttgcttccttatgctccttggtctttctgcaagtgctgctaccgcaaccattttcccacaatgctcacaagctcctatagcttcctttcttcccccatacctctcaccagcggtgtcttcagtatgtgaaaacccaatttttcaaccctacaggatccaacaggcaatcgcagcaggcatcttacctttatcacccttgttccttcaacaaccgtcagccctattacagcagttacctttggtgcatttgttggcacaaaacatcaaggtacaacaactacaacaac

SEQ ID NO: 351080 - DNA, 367 bp, Zea mays
aactagcaacatagaaagcacaatagtgtaccaacaatggcagccaaaatattttgcctccttatgctccttggtctttctgcaagtgctgctacggcgaccattttcccgaaatgctcgcaagctcctatagcttcccttcttcccccgtacctctcaccagcggtgtcttcggtatgtgaaaacccaattcttcaaccctacaggatccaacaggcaatcacagctggcatcttaccttttatcaccctttgtcctccaacaatcatcagccctattacattagttacctttggtgcatttattggcacaaaacattatggcacaacaactacaacaacttgggctagcaaaccttgcttgctac

SEQ ID NO: 351081 - DNA, 367 bp, Zea mays
caactagcaacatagaaagcacaatagtgtaccaacaatggcagccaaaatattttgcctccttatgctccttggtctttctgcaagtgctgctacggcgaccattttcccgaaatgctcgcaagctcctatagcttcccttcttcccccgtacctctcaccagcggtgtcttcggtatgtgaaaacccaattcttcaaccctacaggatccaacaggcaatcacagctggcatcttacctttatcacccttgttcctccaacaatcatcagccctattacatcagttacctttggtgcatttattggcacaaaacatcagggcacaacaactacaacaacttgtgctagcaaaccttgctgcctac

SEQ ID NO: 351082 - DNA, 121 bp, Zea mays
gtactagatagatagaatgcgctactgtgggcccaagggggcccacccgcatgtgcgacaacatacgctgcattgtactgtctcctaagtctgatcgcgagaccatctagtgacaacgata

SEQ ID NO: 351083 - DNA, 88 bp, Zea mays
tcgcaaaaacaggggccaaaaaggataaaaaaaaagtggggaaaagaacgccgggaatgggcaagcagcagcaggcgccaccggcgcg

SEQ ID NO: 351084 - DNA, 296 bp, Zea mays
catgcaacatagaaagtggaatccagtagcaacagtagagcaacaatggcgaccaagatattttccctccttatgctccttgctctttctgcatgtgttgctaacgcgacaattttccctcaatgctcacaagctcctatagcttcccttcttcccccataccttccatcaatgatagcttcagtatgtgaaaacccagctctacaaccctataggctccaacaagcaatcgcagcaagcaacatacctttatcacccttgattcaacaatcgccagccctatctttggggcagtc

SEQ ID NO: 351085 - DNA, 170 bp, Zea mays
ggaccagcaagcagccgccgcagtcggtccccaggcgcctctatatacggcacttcgacttcgatacattggcgacatcacacattacacacacttgggaactccatttcgaatctctttgtaattaacccattctttgtttctccgtctagcatgcttttactcttatt

SEQ ID NO: 351086 - DNA, 68 bp, Zea mays
aaaatataaaaaaaaaaaaaaaaaaaaaaagaagggagaataataaaaaaagatgaataatataataa

SEQ ID NO: 351087 - DNA, 390 bp, Zea mays
gaccaactagcaacatagaaagcacaatagtgtaccaacaatggcagccaaaatattttgcctccttatgctccttggtctttctgcaagtgctgctacggcgaccattttcccgaaatgctcgcaagctcctatagcttcccttcttcccccgtacctctcaccagcggtgtcttcggtatgtgaaaacccaattcttcaaccctacaggatccaacaggcaatcacagctggcatattacctttatcacccttgttcctccaacaatcatcagccctattacatcagttacctttggtgcatttattggcacataacatcagggcatcacaactacaacatcttgtgctagcaaaccttgctgtctactcttagcaacagtagtttct

SEQ ID NO: 351088 - DNA, 424 bp, Zea mays
gcgcaacaaatgcgttcattattccacaatgctcacttgctccaagttccattattacacagttcctcccaccagttacttcaatgggcttcgaacacccagctgtgcaagcctataggctacaacaaggcagttgcggcgagcgtcttacaacaaccaatttcccagttgcaacaacaatccttggcacatctaacaatacaaaccatcgcaacgcaacagcaacaacaattcctaccagcactgagccacctagccatggtgaaccctgccgcctacttgcaacagcagttgcttgcatcaaacccacttgctctggcaaacgtagttgcaaaccaaccacaacaacagttgcaacagtatctgccagcgcttagtcaactagtcatggtgaaccctggcgcctacctacaacaggatcaac

SEQ ID NO: 351089 - DNA, 177 bp, Zea mays
ccaatccagatcagcaaagcggcagtgcgtagagaggatcgtcgaacagaacagcatgaagatggtcatcgttctcgtcgtgtgcctggctctgtcagctgccagcgcctctgcaatgcagatgccctgcccctgcgcggggctgcagggcttgtacggcgctggcgccggcctgac

SEQ ID NO: 351090 - DNA, 199 bp, Zea mays
tcgagaccattagctttatctactccagagcgcagaagaacccgatcgacaccatgagggtgttgctcgttgtcctctctcttctgtctttcgttgctagtgctactttttctcatacattttgcttttttatctgtctgttcatatttttatttattcttcttgttttttttttttttatattttatttattgttttt

SEQ ID NO: 351091 - DNA, 199 bp, Zea mays
acaatgcagatgagtaaagcacaagtccggagagaggatcgcagcacagtacagtctgaagatgctaatagttttcgccttcttgctctctttgccctctcacagtgcctattaaatgcatataccatttcacagtgctgatttgttccactatgccattatttcacatttactaccacttatttcttcaatggtcttc

SEQ ID NO: 351092 - DNA, 226 bp, Zea mays
aaaaaaacaaaaaaaaaaaggagaaaaaaaaaaaaaaaaaaaaaaaaaaaaaaaaaaaaaaaaaaaaaaaaaaaaaaaaaaaaaaaaaaaaaacaaaaaaaaaaaaaaaaaaaaaaaaaaaaaaaaaaaaaaaaaaaaaaaaaaaaaaaaaaaaaaaaaaaaaaaaaaaagaaaaaaaaaaaaaaaaaaaaaaaaaaaaaaaaaaaaaaaaaaaaaaaaaaaaaaa

SEQ ID NO: 351093 - DNA, 64 bp, Zea mays
tcgtatcaacgcaaattgcaccaagaaatccatcgagaggccgttgacagggtaattaatgtct

SEQ ID NO: 351094 - DNA, 340 bp, Zea mays
tcggttctagatcgcgatcgtccgttctatggggatccatgtcttactttcgcttgtattgttttttcttatttcttttatatttttacattttttttattatctctttattttttttttcttttatatgcttatttttgttttctctttttttatttttttttttctttttttttttttttttttattattcatttttttttttattttttttaatctttcttttttttcatttttttttttttctttttttttttttttttctcttttcttttttttcttattttctatttttttatatttttatttttttttttttcattttttatttttttttttt

SEQ ID NO: 351095 - DNA, 119 bp, Zea mays
cagaccattagctttatctactccagagcgcagaagaacccgatcgacaccatgagggtgttgcttggtgccctcgcttttctggcttttgcttcgagcgccaactttacgcatacaag

SEQ ID NO: 351096 - DNA, 239 bp, Zea mays
cttgcttgtgctagtgtaatgtagtgtagtggtggccagtggcacaacctaataagcgcatgaactaattgcttgcgtgtgtagttaagtaccgatcggtaattttatattgcgagtaaataaatggacctgtagtggtggagtaaataaataaaaaaaaaaaaaaataaaataaataaaaaaaaatatatataaataactttatttaatataaaaaaattaaaatattaattatattt

SEQ ID NO: 351097 - DNA, 418 bp, Zea mays
ctggacgtcagcctagcaattagctcatcgactccagattggagaactcgacaccatgaaggtgctgatcgttgcccttgctctcctggcgctcgctgcgagcgccgcctccagtacaagcggcggctgtggctgccagacaccaccgtttcatctaccgcctccgttctatatgccgcctccgttctatctgccgccgcagcagcagccgcagccatggcaataccccactcaaccaccgcagctaagcccgtgccagcagttcggatcctgcggcgtcggcagcgtcggcagcccgttcctgggccagtgcgtcgagttcctgaggcaccagtgcagcccggcggcgacgccctacggctcgccacagtgccaggcgctgcaacagcagtgctgccaccagatcaggcaggtggag

SEQ ID NO: 351098 - DNA, 75 bp, Zea mays
tgaaaagataagacaggcttatattgagaaagaggatagcaagatgtttaaacagaaacattgtatgataatgct

SEQ ID NO: 351099 - DNA, 111 bp, Zea mays
tctctatcttattaactttatctactccagtgtcttcattttcttaatttattattaattttttatttttttaattttttttttttcatattttttttattttttttttat

SEQ ID NO: 351100 - DNA, 403 bp, Zea mays
ctcagcaacaacaatttcttccattcaaccaactagctgcattgaactctgcttcttatttgcaacaacaacaactaccattcagccagctatctgctgcctacccccagcaatttcttccattcaaccaactgacagctttgaactctcctgcttatttacagcagcaacaactactaccattcagccagctagctggtgtgagccctgctaccttcttgacacaaccacaattgttgccgttctaccagcacgctgcgcctaacgctggcacccttttacaactgtaacaattgctgccattcatccaacttgctttgacaaacccaacagtattcttacaacaacccattattggtggtgccctcttttagattttttatgagttttagttcaatataaa

SEQ ID NO: 351101 - DNA, 155 bp, Zea mays
gtcgtaggtctctggccgtccatctgccggactctatgcgtgcggcatgcgcattgctaagctgcctctacgtgtagcggcagaccgagacgcgcgcatgtcgggggttatacgacattatcccagcataaaatctcctggccattgaagacaat

SEQ ID NO: 351102 - DNA, 128 bp, Zea mays
ctcagcctcatccccagccacacccatgcccgtgccaacagccgtatccaagcccgtgccagctgtagggaacctgcggcgttggcagcactctgatcctgggccagagcgtccagtatctgaggcat

SEQ ID NO: 351103 - DNA, 57 bp, Zea mays
tagcaacatacatagtgtagtacagtagcaacattttacaccaatggtagacaagat

SEQ ID NO: 351104 - DNA, 393 bp, Zea mays
attttgagcattcagaaacacaccaagcgaagctacctagcaacgacttaacaacaatggctaccaagatattagccctccttgcgcttcttgccctttttgtgagcgcaacaaatgcgttcattattccacaatgctcacttgctcctagtgccattataccacagttcctccgaccagttacttcaatgggcttcgaacacctagctgtgcaagcctacaggctacaacaagcgcttgcggcgagcgtcttacaacaaccaattaaccaattgcaacaacaatccttggcacatctaaccatacaaaccatcgcaacacaacagcaacaacagtttctaccagcactgagccaactagatgtggtgaaccctgtcgcctacttgcaacagc

SEQ ID NO: 351105 - DNA, 327 bp, Zea mays
aaaaaaaaacaaagaaaatcaataaagaaaacaaaaataaaaaaaaaaacaaaaaaatacaacaaaaaacaaaaaaaaaaaaaaaaaagaacaaaaaaaaaaaaaaaaaaaaaaaaaaaaaaaaaaaaaaaaaataagaaaaaaaaaataaaaaagaatataaaaaaaaaaaaaaaaaaaagaaaaaaaagaaaaaaataaaaatataaaaaaaaaaaacattacaaacaataaaaaaccaaaaaaaaataaaaaaagaaaaaaaaaaataaacaaaacaaaataatcaaaaaaaataaaaaaaacagaaaaaaaataaaaaaaaaa

SEQ ID NO: 351106 - DNA, 274 bp, Zea mays
tccgcctaacctttcgattgctcgccgcccgccgttcgctgctgcccgtcgttcgtcttggactttttatggctagtgtttcttttgtccttttttgcttttttttattttattttttgtttttttttatttttatttttatttttatttttttttttttttttttatttttattttttttttttttttttttttttttttattttttttttttttttttttttttttttttatttttctttttttttttttttttatttttcttttttatttt

SEQ ID NO: 351107 - DNA, 67 bp, Zea mays
atgcgacgttttatctcttctatagtgtcatctaaattcatttcactgtccgtcgttttacaactgt

SEQ ID NO: 351108 - DNA, 404 bp, Zea mays
aagcaacatagaaagtggaatccagtagcaacaatagagcaacaatggagaccaagatattttccctccttatgctccttgctctttctacatgtgttgctaacgcgacaattttccctcaatgctcacaagctcctatagcttccctttttcccccataccttccatcaattatagcttcagtatgtgaaaacccagctcttcaaccatataggcttcaacaagcaatcgcagcaagcaacatacctttatcgcccttgttgtgtcaacaatcgccagccctatctttggtgcagtcattggtacaaaccatcagggcacaacagctgcagcaactcgtgctacctgtgatcaaccaagtagctctggcaaacctttcttcctactcttcgtaacaacaattt

SEQ ID NO: 351109 - DNA, 81 bp, Zea mays
aaaaaaaaagaaacaaaaaaacgaccaacaaaaaaaaaataaaaaaaaaaacaccaacgacacaaaaaaccacaacaaaaa

SEQ ID NO: 351110 - DNA, 67 bp, Zea mays
tttgtacacaactagccacagatgcagcaaagggcacaaaacacaagggcacaccaactactacaac

SEQ ID NO: 351111 - DNA, 300 bp, Zea mays
gaccaacaagcaacatagaaagtggaatccagttgcaacaatagagcaacaatggcgaccaagatattttccctccttatgctccttgctctttctgcatgtgttgctaacgcgacaattttcccttaatgctcacatgctcctatagcttaccttcttcccccataccttccatcaatgatagcttcagtatgtgaaaacccagctctttaaccctataggctccaacatgcaatcgcattatgcaacatacctttattacccttgtttcaacaatttccagccctatctttgttgcag

SEQ ID NO: 351112 - DNA, 336 bp, Zea mays
tcgttcgacccctcatcccctccctgacatggccgacaacgcgaaggccgtggcggctcatgcgaggccggagtcgttgcaggaggaggtggaggactgttaagatttcttttgttattctttttttttttttttttatttactatttttattaaattttacttattttttatctttttttattacattttttttatcttttttttttattttttattcttttagttttttatctaatttattttatttttttattcttattatttatactaacttatctttttaattcttattatatttttttatcttctacattatttttataatctatttttc

SEQ ID NO: 351113 - DNA, 225 bp, Zea mays
attagctttatctactccagagcgcagaagaacccgatcgacaccatgagggtgttgctcgttgccctcgctctcctggctctcgctgcgagcgccacctccacgcatacaagcggcggctgtggctgccagccaccgccgccggttcatctaccgccgtcggtgcatctgccaccttcggttcacctgccacctccggtgcatctcccaccgccggttcatctg

SEQ ID NO: 351114 - DNA, 122 bp, Zea mays
gcccagcatgttgaggaggccgagaagatgggacttgactacatggatgttgaggctctcaagaaaatgaacaagaacaagaagcttgttaagaggtttgtcaagaattactatgctttttt

SEQ ID NO: 351115 - DNA, 129 bp, Zea mays
tcgattttgagcattcagaaacacaccaagcgaagcgcactagcaacatcctaacaacattggttaccaagatattatcccttcttgcgcttctagcgctttttgagagcgcatcaaatgcgtccatta

SEQ ID NO: 351116 - DNA, 58 bp, Zea mays
atgcgacgtcatatctcttttatagtgtcacctaatttcaatttactgtccgtttttt

SEQ ID NO: 351117 - DNA, 234 bp, Zea mays
tcggagcccaggcagccatggtcctactcctccgtcccgtccgggtccgggtccggccttgcgcagttcgtccgtctttatgagcaagggagcatgcaccgatccccattccgacccttctcccagtcctgtgcggttggggcgacacactttcatgtgcgaccaatgaactcaccatgtttcaggtatcggtggattgaatattttctacgttacacttctttctatctttcc

SEQ ID NO: 351118 - DNA, 317 bp, Zea mays
cgttagactaggttaggctaggctagggtgtcaaccagctcgcggtaatggtggccttcaggttccattagtaccaggtggggggactcccccttccaaaccccggttttattcccccatatttttatccacttattctttttctcccccaaatattaagttctttacctataataaattattattattaacttttttttatggatttttaaaaaattatgtttttaaatttttatattttttaatctaatttttattctaatttcatcattatttttttatattatttatctctcctattatttattacttttaat

SEQ ID NO: 351119 - DNA, 85 bp, Zea mays
ttacgcgccctgtaacgtccatttaagtctgcggatgtgttgtctatttttatttattttttctttacttcttattttccttttt

SEQ ID NO: 351120 - DNA, 65 bp, Zea mays
tgtgactacttcttctttgttatctcaatttttttgcaaattatctaaatttctcatcctttcat

SEQ ID NO: 351121 - DNA, 65 bp, Zea mays
aattctagatcgctcacgacctacataaaggagcgaaagtaaagcacgctggctattaacagaat

SEQ ID NO: 351122 - DNA, 151 bp, Zea mays
caacgcgctctgttatggcacattaagtgcgtagggcgtgtggttctccaaagattcgagctttaactactacaacaacttttgcttcctacaatcaattttgttgttttaagtatccttgctgcttatcttcatcaccatctattttttt

SEQ ID NO: 351123 - DNA, 81 bp, Zea mays
cctaccgatcgtcaagtctctatgtgaggcatgcggctagcacgccgtttacatcaagtaatatctttttggagcctggtt

SEQ ID NO: 351124 - DNA, 294 bp, Zea mays
agatctagatcgcgcgcgacctacatagaggagcgatgctaaagctcgctggctagtaacagcatatctcttctatagcagttactaaatagaattattgaacctgtgctttcatctgcaacaacagcaaataccatgcagtcacctaacttatgcctatcgcaagaaattccttttattcaagctactggaataattaaaatgtcctgattatttacagttccaaccagtagtacaatttaaatggctaatgggacgcggccttgataccttctttaaacaaccacagttggt

SEQ ID NO: 351125 - DNA, 408 bp, Zea mays
gaccaactagcaacatagaaagcacaatagtgtaccaacaatggcagccaaaatattttgcttccttatgctccttggtctttctgcaagtgttgctaccgcaaccattttcccacaatgctcacaagctcctatagcttcccttcttcccccatacctctcaccagcggtgtcttcaatgtgtgaaaacccaattgttcaaccctacaggatccaacaggcaatcgcaacaggcatcttaccattatcacccttgttcctccaacaaccgtcagccctattacagcagttacctttggtccatttggtggcacaaaacatcagggcacaacaactacaacaacttgtgctagcaaaccttgctgcatactctcagcaacatcagtttctttcattcaaccaactggc

SEQ ID NO: 351126 - DNA, 425 bp, Zea mays
cggacgcgtgggattgagaccaactagcaacatagaaagcacaatagtgtaccaacaatggcagccaaaatattttgcctccttatgctccttggtctttctgcaagtgctgctacggcgaccattttcccgaaatgctcgcaagctcctatagcttcccttcttcccccgtacctctcaccagcggtgtcttcggtatgtgaaaacccaattcttcaaccctacaggatccaacaggcaatcacagctggcatcttacctttatcacccttgttcctccaacaatcatcagccctattacatcagttacctttggtgcatttattggcacaaaacatcagggcacaacaactacaacaacttgtgctagcaaaccttgctgcctactctcagcaacagcagtttcttccattcaaccaactagc

SEQ ID NO: 351127 - DNA, 416 bp, Zea mays
attgagaccaacaagcaacatagaaagtggaatacaggagcaacaatagagcaacaatggcggccaagatattttccatccttatgctccttgctctttctgcatgtgttgctaacgcgaccatttttcctcaatactcacaagctcctatagctgcccttcttcccccataccttccatcaatgaccgcttcagtatgtgaaaacccagcccttcaaccctacaggctccaacaagcaatcgcaacaagcaacttacctttatcacccctgttctttcaacaatcgccagccctatctttggtgcagtcattggtacaaaccatcagggcacaacagctgcagcaactcgtgctaccagtgatcagccaagtagctttggcaaacctttctccctactctcagaacaacaatttc

SEQ ID NO: 351128 - DNA, 326 bp, Zea mays
tgcctatccacttctccatcaccacctcgggctatcaagaccattcactttatttactttacttctcctaataaccctatcgacaccatctaggtacgcttatcattttcctacatctcctacatctagctataagctccttctttaccccttccctcggaggatgctggtgtcaaccaccgacaacacctaatctacaaccgtacaagcatcaaccacctacgggtaacctgcaacttaccttaaatatcccaccgccattaacaactgcctatgcctatttcacctaacaccctcggttcattttcctgcctcatttcatttat

SEQ ID NO: 351129 - DNA, 420 bp, Zea mays
tgagaccaacaagcaacatagaaggtggagggccagtagcaacaatagagcaacaatggagaccaagatattttccctccttatgctccttgctctttctacatgtgttgctaacgcgacaattttccctcaatgctcacaagctcctatagcttccctttttcccccataccttccatcaattatagcttcagtatgtgaaaacccagctctttaaccatataggcttcaacaagcaatcgcagcaagcaacatacctttatcgcccttgttgtgttaacaatcgccagccctatctttggtgcagtcattggtacaaaccatcagggcacaacagctgcagcaactcgtgctacctgtgatcaaccaagtagctctggcaaaccttttctccctactctacggaacaacaattttttt

SEQ ID NO: 351130 - DNA, 394 bp, Zea mays
aacaagcaacatagaaagtgggatccaggggcaacaatagagcaacaatggagaccaagatattttccctccttatgctccttgctctttctacatgtgttgctaacgcgacaattttccctcaatgctcacaagctcctatagcttccctttttcccccataccttccatcaattatagcttcagtatgtgaaaacccagctcttcaaccatataggcttcaacaagcaatcgcagcaagcaacatacctttatcgcccttgttgtgtcaacaatcgccagccctatctttggtgcagtcattggtacaaaccatcagggcacaacagctgcagcaactcgtgctacctgtgatcaaccaagtagctctggcaaacctttcttcctactctcc

SEQ ID NO: 351131 - DNA, 428 bp, Zea mays
gcaacatagaaagcacaatagtgtaccagcaatggcaggcaaaatattttgcctccttatgctccttggtatttctgcaagtgctgctacggcgaccattttcccgcaatgctcacaagctcctatagcttcccttcttcccccgtacctatcaccagcggtgtcttcggtatgtgaaaacccaattcttcaaccctacaggatccaacaggcaatcgcagctggcatcttacctttatcacccttgttcctccaacaatcatcagccctattacagcagttacctttggtgcatttattggcacaaaacatcatggcacaacaactacaacaacttgtgctagcaaaccttgctgcctactctcagcaacagcagtttctttcattcaaccaactagctgcattgaactctgctttttatttgcaac

SEQ ID NO: 351132 - DNA, 435 bp, Zea mays
attattgagaccaacaagcaacatataaagtggaatgcagtagcaacaatagagcaacaatggcgaccaagatattttccctccttatgctccttgctctttctgcatgtgttgctaacgcgacaattttccctcaatgctcacaagctcctatagcttcccttcttcccccataccttccatcaatgatagcttcagtatgtgaaaacccagctcttcaaccctataggctccaacaagcaatcgcagcaagcaacatacctttatcacccttgtttcaacaatcgccagccctatctttggtgcagtcattggtacaaaccatcagggcacagcagctgcagcaactcgtgctacctgtgatcaaccaagtagctctggcaaacctttctccctactcttagcaacaacaatttcttccattcaaccaactgt

SEQ ID NO: 351133 - DNA, 368 bp, Zea mays
cccccggccccaacctatctagatcgagcggggtggccatcgacagcggcagcacctctcgtcgcttcacttatgtgtacgagcagcacccatatagctctgctagaaacacacatgcagcggccgttaagactgtctccaacaacgctttctttgatcctcaccaaaatggaggaagaggtgcggcaactagccctactgcatgaggaacaagaaaggacacgtacatgacaacggacctaatttatcatggcaatagcaggaatggtgacgaggaaacgatgattgattgaaggacagggggactgcaaaggcatttgtctgctttcaattatcttatatcacacgcacacactcatatatacatt

SEQ ID NO: 351134 - DNA, 309 bp, Zea mays
agaccattagctttatctactgcagagcgcgagaagaacccgatcgacaccatgagggtgttgctcgttgccctcgctctcctggctctcgctgcgagcgccacctccacgcatacaagcggtggctgcggctgccagccaccgccgtcggttcatttaccgtcgccggtgcatttgtcacctccggttcacctgccaccttcggtgcatctcccaccggcggtccacctgtcgtcgtcgtttcacctgccatcgtcggtccatgtgccgtcgccggttcatttggcgtcggcaccatgccactaccct

SEQ ID NO: 351135 - DNA, 401 bp, Zea mays
tattttcagcattcagaaacacaccaagcgaagcgcactagcaacaacctaacaacaatggctaccaagatattagccctccttgcgcttcttgcccttttagtgagcgcaacaaatgcgttcattattccacaatgctcacttgctcctagtgccattattccacagttcctcccaccagttacttcaatgggcttcgaacatccagccgtgcaagcctacaggctacaactagcgcttgcggcgagcgtcttacaacaaccaattgcccaattgcaacaacaatccttggcacatctaaacctacaaaccatcgcaacgcaacagcaacaacagtttctgccatcactgagccacctagccgtggtgaaccctgtcgcctacttgcaacagcagctact

SEQ ID NO: 351136 - DNA, 402 bp, Zea mays
tagcaacatagaaagcacaatagtgtaccaacaatggcagctaaaatattttgcctccttatgctccttggtctttctgcaagtgctgctacggcgaccattttcccacaatgctcacaagctcctatagcttcccttcttcccccgtacctctcaccaacggtgtcttcggtatgtgaaaacccaattcttcaaccctacaggatccaacaggcaatcgcagctggcatcttacctttatcacccttggtcctccaacaatcatcagccctattacagcaggtacctttggtgcatttattggcacaaaacatcagggcacaacaactacaacaacttgtgctagcaaaccttgctgcctactctcaacaacagcagtttcttccattcaaccaactagct

SEQ ID NO: 351137 - DNA, 422 bp, Zea mays
caactagcaacatagaaagctcaatagtgtgccaacagtggcagccaaaatattttgctttcttatgctccttggtctttctgcaagtgctgctaccgcaaccattttcccacaatgctcacaagctcctatagcttcctttcttcccccatacctttcaccagcggtgtctttagtatgtgaaaacccaattcttcaaccctacaggatccaacaggcaatcgcagtaggcatcttacctttatcacccttgttcctccaacaaccgtcagtcctattacagcagttacctttggtgcatttgttggtacaaaacatcaaggcacaacatctacaacaacttgtgccaggaaaccttgctgtctacttttaagaacaagcagtttttccatttaaccaactggcttgattgaactttggtg

SEQ ID NO: 351138 - DNA, 419 bp, Zea mays
tcgcaaaaacatcagcaacaacaagaagttgaggttcaacaacaacatcatcaattttatctccaacaacatcaacaacatcagcaccaacaacaacatcaatgtgaaggccaacaacaacatcaccaacaatcacaaggccatgtgcaacaacacgaacagagccatgagcaacaccaaggacagagccatgagcaacaacatcaacaacaattccagggtcatgacaagcagcaacaaccacaacagcctcagcaatatcagcagggccaggaaaaatcacaacagcaacaatgtcattgccaggagcagcaacagactacaaggtgcagctataactactatagcagtagctaaaactaataaattgtcatgaattcctaaggcagcagtgcatgcctttggtaatgccttttttc

SEQ ID NO: 351139 - DNA, 123 bp, Zea mays
tcgagaccattagctttatctactccagagcggagaagagggggatcgacaccatgagggtgttgttcgatgccctcgctctcctggctctcgctgtgagcgccacctccacgcatacaagcg

SEQ ID NO: 351140 - DNA, 93 bp, Zea mays
cacacataatcatgcgtggtatgaccaataatatatgcatcataataaagggttgggtttaaagaaatgaaaatataaaaatattaattaaat

SEQ ID NO: 351141 - DNA, 192 bp, Zea mays
cttcagaccattagctttatctactccagagcgcaaaagaacccgatcgacaccatgagtgtgttgctcgttgccctcgctctcctggctctcgctgtgagcgccaccttcacgcatacaagcggcggctgcggctgccaaccaccgccgtcggttcatctaccgtcgccggtgcatctgtcaccttcgttt

SEQ ID NO: 351142 - DNA, 422 bp, Zea mays
tcgcaactagcaacatagaaagcacaatagtgtaccaacaatggcagctaaaatattttgcctccttatgctccttggtctttctgcaagtgctgctacggcgaccattttcccacaatgctcacaagctcctatagcttcccttcttcccccgtacctctcaccaacggtgtcttcggtatgtgaaaacccaattcttcaaccctacaggatccaacaggcaatcgcagctggcatcttacctttatcacccttgttcctccaacaacaacaactactctcagcaacagcagtttcttccattcaaccaactagctgcattgaactctgctttttatttgcaacaacaacaactaccattcagccagctatctgctgcctacccccagcaatttctttcattcaaccaactgacaacattg

SEQ ID NO: 351143 - DNA, 385 bp, Zea mays
ggcacaacaactacaacaactcgtgctagcaaaccttgctgcctactctcagcaacaacagtttctgccattcaaccaactagctgcattgaactctgctgcttatttgcagcaacaacaactactaccattcagccagctagctgctgcctacccccggcaatttcttccattcaaccaactggcagcattgaactctcatgcttatgtacaacaacaacaactactaccattcagccagctagctgctgtgagccctgctgccttcttgacacagcaacatttgttgccgttctacctgcacactgcgcctaacgttggcaccctttacaactgcaacaattgctgtcattcgaccaacttgctttgacaaacccagcagtgt

SEQ ID NO: 351144 - DNA, 406 bp, Zea mays
tccagatcagcaaagcggcagtgcgtagagaggatcggcgaacagaacagcatgaagatggtcatcgttctcgtcgtgtgcctggctctgtcagctgccagcgcctctgcaatgcagatgccctgcccctgcgcggggctgcagggcttgtacggcgctggcgccggcctgacgacgatgatgggcgccggcgggctgtacccctacgcggagtacctgaggcagccgcagtgcagcccgctggcggcggcgccctactacgccgggtgtgggcagacgagcgccatgtaccagccgctccggcaacagtgctgccagcagcagatgaggatgatggacgtgcagtccgtcgcgcagcagctgcagatgatgattcagcttgagcgtgccgctgacgccagcaaca

SEQ ID NO: 351145 - DNA, 402 bp, Zea mays
cagtgatcagccaagtagctctggcaaagctttctccctactctcagcaacaacaatttcttccattcaaccaactgtctacactgaaccctgctgcttatttgcagcaacaacaactactaccattcagccagctagctactgcctactctcagcagcaacaatttcttccatttaaccaattcgccgcactgaacccctctgcttatttccagcagcaaatactactaccatttggccagctagctacaacaagccccgcttccttcttgacacaacaacaattgcttccgttctaccagcagtttgtggctaaccccgcaacccttttacaactgcaacagttgctgccctttgtccaacttgctttgacaaacccagcaggcttctaccaacaacaca

SEQ ID NO: 351146 - DNA, 181 bp, Zea mays
tcggacgactcaaggaggtttgcaagccgccaggcaatgaggctaatcttcgcaccaatgccattggtagccaatttagtccacggtttgtggccaaaattttggttggaaagaacgtcttttttaatcttcttaacaagttgactgttgatatttgacccttgaaattcctttgatttgg

SEQ ID NO: 351147 - DNA, 318 bp, Zea mays
gcaaagcggcagtgcgtagagaggatcggcgaacagaacagcatgaagatggtcatcgttctcgtcgtgtgcctggctctgtcagctgccagcgcctctgcaatgcagatgccctgcccctgcgcggggctgcagggcttgtacggcgctggcgccggcctgacgacgatgatgggcgccggcgggctgtacccctacgcggagtacctgaggcagccgcagtgcagcccgctggcggcggcgccctactacgccgggtgtgggcagacgagcgccatgtaccagccgctccggcaacagtgctgccagcagcagatg

SEQ ID NO: 351148 - DNA, 197 bp, Zea mays
ttattaatctagagcagcccatctacatggtccagggttactttctattgcttgcgatcctatatcttttttctaccgtcacttaaactaactttatttgacggcacttttcatcactactgctgtcataaccttccatttacccaacttttcagtactgtattacataccatatgtttcccttttcgttatttcga

SEQ ID NO: 351149 - DNA, 404 bp, Zea mays
gtttttccatatgaaaataatttagacagggagtgggaagtcatggagtccccgccaataactgagttgaactcactgccaaaatcaaagggtcggtccaagaatttcagtgaagatgaagatatcttattggtttcagcatatctcaatataagtaaagatgctattgttggaagagatcaaaaagagggtaggttttgggaaataattgagaattactttcatgacaacaagacattttagacagatcgcaacgcatcatcgttgtagcatcgatgggcttttattcataaagaggttatgtgtatttcaagcataccatgatgccatataaagaaagaatgtaagtgggaagacaagtgtcgacaagctgcctgtagcgatagcaactttttatgatctgc

SEQ ID NO: 351150 - DNA, 397 bp, Zea mays
attttcagcattcagaaacacaccaagcgaagcgcgactagcaacaacctaacaacaatggctaccaagatattagccctccttgcgcttcttgcccttttagtgagcgcaacaaatgcgttcattattccacagtgctcacttgctcctagtgccattattccacagttcctcccaccagttacttcaatgggcttcgaacatccagccgtgcaagcctacaggctacaactagcgcttgcggcgagcgttttacaacaaccaattgcccaattgcaacaacaattcttggcacatgttaacctacaaaccattgcaacgcaacaagaacaacagtttctgccattactgagccacctagccgtggtgaaccctgtcgtctacttggcacagcagc

SEQ ID NO: 351151 - DNA, 428 bp, Zea mays
tgagcattcagaaacacaccaagcgaagcacattagcaacaacctaacaacaatggctaccaagatattatccctccttgcgcttcttgcgctttttgcgagcgcaacaaatgcgttcattattccacaatgctcacttgctccaagttccattattacacagttcctcccaccagttacttcaatgggcttcgaacacccagctgtgcaagcctataggctacaacaagcaattgcggcgagcgtcttacaacaaccaatttcccagttgcaacaacaatccttggcacatctaacaatacaaaccatcgcaacgcaacagcaacaacaatttctaccagcactgagccacctagccatggtgaaccctgccggctacttgcaacagcagttgcttgcatcaaacccacttgctctggcaaacgtag

SEQ ID NO: 351152 - DNA, 420 bp, Zea mays
gagaccaacagcacatagaggtggagtgcagtagcaacaatagagcaacaatggcgaccaagatattttccctccttatgctccttgctctttctgcatgtgttgctaacgcgacaattttccctcaatgctcacaagctcctatagcttcccttctttccccataccttccatcaatgatagcttcagtatgtgaaaacccaactcttcaaccctataggctccaacaagcaatcgcagcaagcaacatacctttatcacccttgtttcaacaatcgtcagccctatctttggtgcaggcattggtacaaaccatcagggcacagcagctgcagcaacttcgtgctacctgtgatcaaccaagtagctctggcaaaccttttttcctactcttaggaacaaacaattttttcatttaac

SEQ ID NO: 351153 - DNA, 73 bp, Zea mays
tgggtacaatcaattgcattctattatatatattttctatagtgtcacctaaatttaattcaatggtctttta

SEQ ID NO: 351154 - DNA, 342 bp, Zea mays
caactagcaacatagaaagcacaatagtggaccaacaatggcagccaaaatattttgcctccttatgctccttggtatttctgcaagtgctgctacggcgaccattttcccgaaatgctcgcaagctcctatagcttcccttcttcccccgtacctctcaccagcggtgtcttcggtatgggaaaacccaattcttgcaccctacaggatgcaagaggcgatcacatctggcgtcttacctttatgacccttgttcctccaacaatcatcagccctattacatcagttacctttggtgcatttattggcacaaaacatcaaggcacaacaactacaacaact

SEQ ID NO: 351155 - DNA, 173 bp, Zea mays
agaccattagctttatctactccagagcgcagaagaacccgatcgacaccatgagggtgttgctcgttgccctcgctctcctggctctcgctgcgagcgccacctccacgcatacaagcggcgggtgctgctgccagccaccgtcgtcggttcatcttccgcctccggtgcat

SEQ ID NO: 351156 - DNA, 56 bp, Zea mays
ttatctttgtttacttatttatttttatatttttcttcatctttcctttctatcta

SEQ ID NO: 351157 - DNA, 59 bp, Zea mays
gttatagataacgtgcaacctcctgtggggatatactcttcctaactcttttacgctat

SEQ ID NO: 351158 - DNA, 318 bp, Zea mays
ggttgactcattcttggttgaagaggaactgaatagtgactacctatatggtgacggttcttccaggagtgctgattctaggaagcattttccaaataaagttgcttccacccaaaaggcatctgttggacctatccataagctacctcaaggactgataggtcccgctattggaatcggacggattccaccaaaaaatctttttcaacagactgtccccagtttcgttgacgtaagaaaagaaaatacaaagccttcacctggactcagtagagcgactgcaagagttcagcaaaagtcttttgctcgtagcaagag

SEQ ID NO: 351159 - DNA, 197 bp, Zea mays
cccgtcgcatcccatcccactaccacccatctcgtcgtccgccgattcgatccggttcttccaacccaggggcagtgatggcgacgaagaggagcgtgggcaccctcggcgaggcggatctgaaggggaagaaggtgttcgtgcgcgccgacctcaacgttccgctcgacgatgcccagaatatcaccgaggacacc

SEQ ID NO: 351160 - DNA, 424 bp, Zea mays
tgagcattcagaaacacaccaagcgaagcgcactagcaacgacctaacaacaatggctaccaagatattagccctccttgcgcttcttgccctttttgtgagcgcaacaaatgcgttcattattccacaatgctcacttgctcctagtgccattattccacagttcctcccaccagttacttcaatgggcttcgaacacctagctgtgcaagccaacatgcaacaacaagcgcttgcggcgagcgtcttacaacaaccaattgcccaattgcaacaacaatccttgccacatctaacaatacaagccatcacaacgcaacagcaacaacagttcctaccagcactgagccacctagccatggtgaaccctgccgcctacttgcaagagcagctgcttgcattcaacccactttgtttggcgaac

SEQ ID NO: 351161 - DNA, 330 bp, Zea mays
attgagaccaacaagcaacatagaaagtggaatccagcagcaacaatagagcaacaatggcgaccaagatattttccctccttatgctccttgctctttctccatgtgttgctaacgcgacaattttccctcaatgctcacaagctcctatagcttcccttcttcccccataccttccatcaatgatagcttcagtatgtgaaaacccagctcttcaaccctataggctccaacaagcaatcgcagcaagcaacatacctttatcacccttgtttcaacaatcgccagccctatctttggggcagtcaatggtacaaaccatcagggcac

SEQ ID NO: 351162 - DNA, 95 bp, Zea mays
cactcttagtttaccagtaaaatttgtcatttcatttttgtactatttttttgttttttttaattattttctttgcacttctttctttttcctct

SEQ ID NO: 351163 - DNA, 164 bp, Zea mays
aacaagcaacatagaaagtggaatccagtagcaacaatagagcaacaatggcgaccaagatattttccctccttatgctccttgctctttctgcatgtgttgctaacgcgacaattttccctcaatgctcacaagctcctatagcttccttttttcccccatac

SEQ ID NO: 351164 - DNA, 321 bp, Zea mays
gcacaacaactacaacaacttgtgctaggaaaccttgctgcctactctcagcaacagcagtttcttccattcaaccaactggctgcattgaactctgctgcttatttgcaacaacaactaccattcagtcagctagctgctgcctacccccagcaatttcttccattcaaccaactggcagcattgaactctgctgcttatttacaacagcaacagctaccaccattcagccagctagctgatgtgagccctgttgccttcttgacacaacaacatgtgttgccggtctacctgcccgctgcgccttacgctggcacccct

SEQ ID NO: 351165 - DNA, 401 bp, Zea mays
tagcaacatagaaagcacaatagtgtaccaacaatggcagccaaaatattttgcttccttatgctccttggtctttctgcaagtgttgctaccgcaaccattttcccacaatgctcacaagctcctatagcttcccttcttcccccatacctctcaccagcggtgtcttcaatgtgtgaaaacccaattgttcaaccctacaggatccaacaggcaatcgcaacaggcatcttaccattatcacccttgttcctccaacaaccgtcagccctattacagcagttacctttggtccatatggtggcacaaaacatttgggcacatcaactactacaacttgtgctagcacaccttgctgcatactctcagcaacattcagttcttccattcaaccaactggc

SEQ ID NO: 351166 - DNA, 346 bp, Zea mays
agcaacatagaaagcacaatagtgtaccaacaatggcagccaaaatattttgcttccttatgctccttggtctttctgcaagtgttgctaccgcaaccattttcccacaatgctcacaagctcctatagcttcccttcttcccccatacctctcaccagcggtgtcttcaatgtgtgaaaacccaattgttcaaccctacaggatccaacaggcaatcgcaacaggcatcttaccattatcacccttgttcctccaacaaccgtcagccctattacagcagttacctttggtccatttggtggcacaaaacatcagggcacaacaactacaacaacttgtgctagc

SEQ ID NO: 351167 - DNA, 59 bp, Zea mays
agcatgcaactttattattgtgctatagagacacataaaactaatcgactggtcgcagc

SEQ ID NO: 351168 - DNA, 71 bp, Zea mays
tcgcacagccaacaccacccggctaggggacgcgacagctgtcaggaggaaggaatatctactgccagtca

SEQ ID NO: 351169 - DNA, 68 bp, Zea mays
ggcatactggggattctatactcagtgctgataactgcagcgattactgatgcaatcaagtgatggtg

SEQ ID NO: 351170 - DNA, 125 bp, Zea mays
attgagaccaactagcaacatagaaggcacaatagtgtaccaacattggcatgctaaaatatttagtcttcttatgcttcttggtctttatgcttgatttgtttcggtgatctatttttcttaca

SEQ ID NO: 351171 - DNA, 95 bp, Zea mays
acccaactatttacccttcttatggtgctagctaattctgattctcttgctcacgctacacatcgtcttaatgtttatatgcttttatagatttc

SEQ ID NO: 351172 - DNA, 183 bp, Zea mays
tcggtgagaaataagatagggttccaatgccctttttccaccggccaccacttgtcaagcgaaagcggtgagtgatggattgtagtgttttaaatttcctgtccctattccttatatgattgtcattttttatttttaatataattctattatatatttttattcttaatttttcctttttca

SEQ ID NO: 351173 - DNA, 315 bp, Zea mays
aatattttgagcattcagaaacacaccaagcgaagcacattagcaacaacctaacaacaatggctaccaagatattatccctccttgcgcttcttgcgctttttgcgagcgcaacaaatgcgttcattattccacaatgctcacttgctccaagttccattattacacagttcctcccaccagttacttcaatgggcttcgaacacccagctgtgcaagcctataggctacaacaagcaattgcggcgagcgtcttacaacaaccaatttcccagttgcaacaacaattctttggacatctaacaatacaaacca

SEQ ID NO: 351174 - DNA, 299 bp, Zea mays
attttgagcattcagaaacacaccaagcgaagcgcactagcaacgacctaacaacaatggctaccaagatattagccctccttgcgcttcttgccctttttgtgagcgcaacaaatgcgttcattattccacaatgctcacttgctcctagtgtcattatttctcagattctcccaccagtaacttcaatgggcttagaacacctagctgagcaagccaacatgcatcaacaagtgcttgcggcgagcgtcttacaacaaccaattgcccaattgcaacaacaattcttgccacatcta

SEQ ID NO: 351175 - DNA, 137 bp, Zea mays
gcgcagcaatggcggcggcaatagtactctccggccaggtgcggccgcttccctcgtcgctgcccctgtccctgctgctgctcctcctcctgtgctgctccggcacctcgtggggatggagcacgttccggagagga

SEQ ID NO: 351176 - DNA, 308 bp, Zea mays
tagaaacacacacctagcgaagcgcactagcaacgacctaacaacaatggctaccaagatattagcccttcttgcgcttcttgccctttttgtgagcgcaacaaatgcgttcattatttcacaatgctcacttgcttctagtgccattattccacaattcctcccaccagttacttcaatgggcttcgaacacccagctgtgcatgcctacaggttacatcaagcgcattacaacaaccaattgcccaattacagtaacaatccttggcacatctaacattacaaaccattgcaacgcaacagcaaca

SEQ ID NO: 351177 - DNA, 184 bp, Zea mays
gtcttcagaccattagctttatctactccagagcgcagaagaacccgatcgacaccatgagggtgttgctcgttgccctcgctctcctggctctcgctgcgagcgccacctccacgcatacaagcggcggttgcggctgccagccaccgtcgtcggttcatttaccgtcgccggtgcttctgcc

SEQ ID NO: 351178 - DNA, 307 bp, Zea mays
gattggcttcgaaactggtgagcaactgcggcactcagaaacaatggagaccaaaatattttccctccttatgctccttgctctttctgcatgtgttgctaacgcgacaattttccctcaatgctcacaagctcctatagcttcccttcttcccccataccttccatcaatgatagcttcagtatgtgaaaacccatctcttcaaccctataggcttcaacaagcaatctcagcaagcaacatacctttatcacccttgtttcaacattcctctgccctatctttggtgcagtcattggtacaaacc

SEQ ID NO: 351179 - DNA, 239 bp, Zea mays
aagcacaatagtgtaccaacaatggcagccaaaatattttgcttccttatgctccttggtctttctgcaagtgttgctaccgcaaccattttcccacaatgctcacaagctcctatagcttcccttcttcccccatacctctcaccagcggtgtcttcaatgtgtgaaaacccaattgttcaaccctactagtatcatcttgctattttttcatgcatcttaccattatcacccttttt

SEQ ID NO: 351180 - DNA, 73 bp, Zea mays
tgtacatgaaaaaggagctggaggtggagaagttttttacgcatagtgttctgtttttcgtatattaatttgc

SEQ ID NO: 351181 - DNA, 353 bp, Zea mays
atttagaccaactagcaacatagaaagcacaatagtgtaccaacaatggcagccaaaatattttgcctccttatgctccttggtatttctgcaagtgctgctacggcgaccattttcccgcaatgctcacaagctcctatagcttcccttcttcccccgtacctctcaccagcggtgtcttcggtatgtgaaaacccaattcttcaaccctacaggatccaacaggcaatcgcagctggcatcttacctttatcacccttgttcctccaacaatcatcagccctatttcagcagttaaccttggtgcatttattggcacaaatcatcagggcacatcaacttacaacaacttt

SEQ ID NO: 351182 - DNA, 237 bp, Zea mays
atgcgacgtcatactttttatagggtacctaattaaattctgtctcggtacacgtgtttgtaaactcttgtccactatgctgaaatcctttcttttttattatattttttttttttttttttttttttttttttccttttttttttttttttcttttttttttttttcttttttttttttttttttttttttttttttttttttttttttattttttttttatttatttcttttttt

SEQ ID NO: 351183 - DNA, 89 bp, Zea mays
ttttccccactgaagaaactatgtgctgtagtatagccgttggctagctagctagttgagtcatttagcggcgatgtttgagtaataat

SEQ ID NO: 351184 - DNA, 351 bp, Zea mays
gcattcagaaacacaccaagcgaagcgcactagcaacaacctaacaacaatggctaccaagatattagccctccttgcgcttcttgcccttttagtgagcgcaacaaatgcgttcattattccacagtgctcacttgctcctagtgccattattccacagttcctcccaccagttacttcaatgggcttcgaacatccagccgtgcaagcctacaggctacaactagcgcttgcggcgagcgtcttacaacaaccaattgcccaattgcaacaacaatccttggcacatctaaacctacaaaccattgcaacgcaacagcaacaacagtttctgtcatcactgagccacct

SEQ ID NO: 351185 - DNA, 301 bp, Zea mays
aaacacaccaagcgaagcgcactagcaacaacctaacaacaatggctaccaagatattagccctccttgcgcttcttgcccttttagtgagcgcaacaaatgcgttcattattccacagtgctcacttgctcctagtgccattattccacagtttcttccaccagttacttcaatgggcttcgaacatccagccgtgcaagcctacaggctacaactagcgcttgcggcgagcgtctttcttcaaccaattgtccaattgtaacatcaattcttggtacatcttaacttacaaaccatttt

SEQ ID NO: 351186 - DNA, 66 bp, Zea mays
aaaaaaaaaaaaaaaaaaaaaaaaaaaaaaaaaaaaaaaaaaaaaaaaaaaaaaaaaaaaaaaaag

SEQ ID NO: 351187 - DNA, 410 bp, Zea mays
attttgagcattcagaaacacaccaagcgaagcacattagcaacaacctaacaacaatggctaccaagatattatccctccttgcgcttcttgcgctttttgcgagcgcaacaaatgcgttcattattccacaatgctcacttgctccaagttccattattacacagttcctcccaccagttacttcaatgggcttcgaacacccagctgtgcaagcctataggctacaacaagcaattgcggcgagcgtcttacaacaaccaatttcccaagtgcaacaacaatccttggcacatctaacaatacaaaccatcgcaacgcaacagcaacaacaattcctaccagcactgagccacctagccatggtgaaccctgccggctacttgcaacagcagatgcttgcatcaaac

SEQ ID NO: 351188 - DNA, 172 bp, Zea mays
tctatacgactcactatatgggaaagctggtacgtcctgcaggttacctggtccggtaaatttccgggatcgtcccacgacgtatcgttaacttattaatgctacaatatttctaatctactaatggaatctaaaattttttcgctttcttatttaatttggtctttttgca

SEQ ID NO: 351189 - DNA, 402 bp, Zea mays
ctttggtccatttggtggcacaaaacatcagggcacaacaactacaacaacttgtgctagcaaaccttgctgcatactctcagcaacatcagtttcttccattcaaccaactggctgcattgaactctgctgcttatttgcaacaacaattaccattcagccagctagttgctgcctacccccagcaatttcttccattcaaccaactagcagcattgaactctgctgcttatttacagcagcaacaactactaccattcagccagctagctgatgtgagccctgctgccttcttgacacaacaacagttgttgccgatctacctgcacgctatgtctaacgctggcacccttttacaactgcaacaattgctggcattcaaccaacttgctttgaccaact

SEQ ID NO: 351190 - DNA, 212 bp, Zea mays
gttgcaaacaaacatgatgccgatggagataccaaagaggaagatgatgcatctgatgatgaagatggtacagtttaagatgactccaacagtgttagcgatgatctatactattactttgattgtgaatttgattcttattttattgtttttttttatcttttcttttattgctgtttctttgagatttattattttattattgctttttt

SEQ ID NO: 351191 - DNA, 401 bp, Zea mays
cgcagctggcatcttacctttatcacccttgttcctccaacaatcatcagccctattacaacagttacctttggtgcatttattggcacaaaacatcagggcacaacaactacaacaacttgtgctagcaaaccttgctgcctactctcagcaacagcagtttcttccattcaaccaactaggttcattgaactctgcttcttatttgcaacaacaacaactaccattcagccagctacctgctgcctacccccagcaatttctttcattcaaccaactagcaagattgaactctcctgcttatttacagcagcaacaactactaccattcagtcagcttgctggtgtgagccctgatactttttgacacaaccacagttggtgccgttctaccagcacgt

SEQ ID NO: 351192 - DNA, 358 bp, Zea mays
attttcagcattcagaaacacaccaagcgaagcgcactagcaacaacctaacaacaatggctaccaagatattagccctccttgcgcttcttgcccttttagtgagcgcaacaaatgcgttcattattccacagtgctcacttgctcctagtgccattattccacagtttctcccaccagttacttcaatgggcttcgaacattcagccgtgcaagcctacaggctacaactagcgcttgcggcgagcgtcttacaacaaccaattgcccaattgcaacaacaatccttggcacatctaaacctacaaaccatcgcaacgcaacagcaacaacaggttctgccatcactgaaccacct

SEQ ID NO: 351193 - DNA, 327 bp, Zea mays
  unsure (1)..(327): unsure at all n locations
tcggttgatgatnannattttttatgtgaggacgtntggtannattgatgtgaccacgggattggaaagtgatgacgatgacaaaaaatntgcaacagggaaggcagaagatgcgaagtagtagcctatggttttacgattcgacatagggccacaatgatagcgaactttagaattccaagatggtattgtatattagttgatcgcatgtcatcaattcatttgttatctcccagaaaaggggttaattataaaataataattaaactaataagtattgtgagtaattgatatatacttttaatattttttataatatatatattg

SEQ ID NO: 351194 - DNA, 353 bp, Zea mays
  unsure (1)..(353): unsure at all n locations
gccttgttccaacccnnccnttttacattgtacttaaccctatctnggctgtgccgggccctctccttccctatcctcacccccatggacccnnnntccaagaagcgcatgcccgacgagaacggtgccgtcaccgcctctcccgccggtggtgctgccacgctgggcctcacccgctacgacgtcatccgccttctcgagccgctctcccgggaccagcttgcggacatagcggccgccgccgcgctcgtatcctccccagcgctcgacgccgtgcgcgcagccgtcgaccgtgacccggccctccgcaagctcttcgctcgggggctttgcttgggagaccacatccgact

SEQ ID NO: 351195 - DNA, 278 bp, Zea mays
  unsure (1)..(278): unsure at all n locations
ccgccganccggtcgaccacctcgtacattgaagtgatatgtgctgagggggagccatcggaggatgggctggcgaatgaaagctttaaataacccngctgcttcgggtgcgcttggttatcgacctgatgacgaatcgcccggccatttgagctgttacatgccaaccggtgtcaggttcagagataggtccttgtgaacacccagactgggcataggactctatcgcagttgcggaaggtcgcatggacagacttcggtcaaagtgacatgatgaa

SEQ ID NO: 351196 - DNA, 411 bp, Zea mays
  unsure (1)..(411): unsure at all n locations
gtgaaaacccanttctttaacggtacaggatccaacagncaatcgcaggaggcatcttacctttatcacccttgttcctccaacagccgtnagccctattacagcagttacctttggtgcatttgttggcacaaaacatcaaggcacaacaactacaacaacttgtgctaggaaaccttgctgcctactctcagcaacagcagtttcttccattcaaccaactggctgcattgaactctgctgcttatttgcaacaacaactaccattcagtcagctagctgctgcctacccccagcaatttctttcattcaaccaactggcagcattgaactctgctgcttatttacaacagcaacagctaccaccattcagccagctagctgatgtgagccctgttgccttcttgacac

SEQ ID NO: 351197 - DNA, 440 bp, Zea mays
  unsure (1)..(440): unsure at all n locations
tctattgagactntcttgtatcatatatatgctcantagngnccaacattggcagccaaaatattttgcctccttatgctccttggtcnnnctgcaagtgctgctacggcgaccattttcccgcaatgctcgcaagctcctatagcttcccttcttcccccgtacctctcaccagcggtgtcttcggtatgtgaaaacccaattcttcaaccctacaggatccaacaggcaatcgcagctggcatcttacctttatcacccttgttcctccaacaatcatcagccctattacaacagttacctttggtgcatttattggcacaaaacatcatggcacaacaactacaacaacttgtgctagcaaaccttgctgcctactctcagcaacagcagtttcttccattcaaccaactaggttcattgaactctgcttcttattt

SEQ ID NO: 351198 - DNA, 440 bp, Zea mays
  unsure (1)..(440): unsure at all n locations
attttgagcattcanaaacacaccaagcgaagctgcctancancgacttaacaacaatggctaccaagatattagccctccttgcgcttcttgccctttttgtgagcgcaacaaatgcgttcattattccacaatgctcacttgctcctagtgccattataccacagttcctccgaccagttacttcaatgggcttcgaacacctagctgtgcaagcctacaggctacaacaagcgcttgcggcgagcgtcttacaacaaccaattaaccaattgcaacaacaatccttggcacatctaaccatacaaaccatcgcaacacaacagcaacaacagttcctaccagcactgagccaactagatgtggtgaaccctgtcgcctacttgcaacagcaggtgcttgcatccaacccacttgctctggcaaacgtagctgcatac

SEQ ID NO: 351199 - DNA, 432 bp, Zea mays
  unsure (1)..(432): unsure at all n locations
tcgcagaaacacaccatgtgaagtgcagtagcatctacctgncaacaatggttgccaagatattagccctccttgcgcttcttgaaaannnagagagcgcaacaaatgcgttcattattccacagtgctcacttgctcctagtgccattattccacagttcctcccaccagttacttcaatgggcttcgaacatccagccgtgcaagcctacaggctacaactagcgcttgcggcgagcgtcttacaacaaccaattgcccaattgcaacaacaatccttggcacatctaaacctacaaaccatcgcaacgcaacagcaacaacagtttctgccatcactgagccacctagccgtggtgaaccctgtcgcctacttgcaacagcagctacttgcatccaacccacttgctctggcgaacgtagctgcatacc

SEQ ID NO: 351200 - DNA, 394 bp, Zea mays
  unsure (1)..(394): unsure at all n locations
tcgcaaccaagtagctctggcaaacttttctgccgactgtcagcaacnacaagggtgggccattcaaccaactgtctacattgaaccgtgctgcnnatnngcagcaacaactattaccattcagccagctagctactgcctactctcagcaacaacaacttcttccatttaaccaattggccgcactgaaccccgctgcttatttgcagcagcaaatactactaccatttagccagctagctgcagcaagccgtgcttccttcttgacacagcaacagttgctgcctttctaccagcagtttgcggctaaccccgcaacccttttacaactacaacaattgttgccctttgtccaacttgctttgacaaacccaagagcctcctaccaacaaca

SEQ ID NO: 351201 - DNA, 422 bp, Zea mays
  unsure (1)..(422): unsure at all n locations
cagaccattagctntatctactccagagcgcagaggaacccgatcgacaccatgagggtgttgctcgttgccctcgctctcctggctctcgctgcaagcgccacctccacgcatacaagcggcggctgcggctgccagccaccgccgccggttcatctaccgccgccggtgcatctgccacctccggttcacctgccacctccggtgcatctcccaccgccggtccacctgccgccgccggtccacctgccaccgccggtccatgtgccggcgccggttcatctgccgccgccaccatgccactaccctactcaaccgccccggcctcagcctcatccccagccacacccatgcccgtgccaacagccgcatccaagcccgtgccagcttcagggaacctgcggcgttggcagcaccccgat

SEQ ID NO: 351202 - DNA, 294 bp, Zea mays
  unsure (1)..(294): unsure at all n locations
tctcatcaatcannattcatattagtagtatagncactaanncaaatggggagcatcaattatctaactccaaaaaccatgaagctgtngcttgtggttcttgctttcattgctttagtatcaaacgtttcttgtacacacacaagcggctgcatctgtggtcaacaacatagccattagcagcaacatcatccacaacaacatcatccacaaaaacaacatcatcaaccaaccccacaacatcaccagcatcatcaacaccaacaacaacaaggttaaaatccacccccaaaa

SEQ ID NO: 351203 - DNA, 212 bp, Zea mays
  unsure (1)..(212): unsure at all n locations
tctaaaaaaaaaaaaaatnnnnaaaaaaaagagaaaagaanncaanagnngaaagaaatggaaaaaaaaaaaaaaaaaaaaaaaaaaaaaaaattttttttggggcggccgttctaaagaacccaagttaacatacccttccatccaacttaatacctttttaatagtgtcaccaaaattaaattcactgcccgccatttaaaaacgctcta

SEQ ID NO: 351204 - DNA, 440 bp, Zea mays
  unsure (1)..(440): unsure at all n locations
tcgaccaactagcaacatataaagcacaatggtgtaccaacaatggcagacaaaatattttgcctccttatgctccttggtctttctgcangtgctgctacggcgaccattttcccgaaatgctcgcaagctcctatagcttcccttcttcccccgtacctctcaccagcggtgtcttcggtatgtgaaaacccaattcttcaaccctacaggatccaacaggcaatcacagctggcatcttacctttatcacccttgttcctccaacaatcatcagccctattacatcagttacctttggtgcatttattggcacaaaacatcagggcacaacaactacaacaacttgtgctagcaaaccttgctgcctactctcagcaacagcagtttcttccattcaaccaactagctgcattgaactctgcttcttatttgcaaca

SEQ ID NO: 351205 - DNA, 391 bp, Zea mays
ctagcaacatagaaagcacaatattgtgccaacaatggcagccaaaatgtgttgcttccttatgctccttggtctttctgcaagtgttgctaccgcaaccattttcccacaatgctcacaagctcctatagcttcccttcttcccccatacctctcaccagcggtgtcttcaatgtgtgaaaacccaattgttcaaccctacaggatccaacaggcaatcgcaacaggcatcttaccattatcacccttgttcctccaacaaccgtcagccctattacagcagttacctttggtccatttggtggcacaaaacatcagggcacaacaactacaacaacttgtgctagcaaaccttgctgcatactctcagcaacatcagtttctttcattc

SEQ ID NO: 351206 - DNA, 434 bp, Zea mays
  unsure (1)..(434): unsure at all n locations
tcgattttgagcattcanaaacacaccgagggaagcgcactagcagcaacctggcaacaatggctaccaagatattatccctccttgcgcttcttgcgctttttgcgagcgcaacaaatgcgtccattattccacaatgctcacttgctcctagttccattattccacagttcctcccaccagttacttcaatggccttcgaacacccagctgtgcaagcctataggctacaacaagcgattgcggcgagcgtcttacaacaaccaattgcccaattgcaacaacaatccttggcacatctaacaatacaaaccatcgcaacgcaacagcaacaacagttcctaccagcactgagccacctagccatggtgaaccctgtcgcctacttgcaacagcagctgcttgcatccaacccacttgctctagcaaacgta

SEQ ID NO: 351207 - DNA, 348 bp, Zea mays
ttgcccacgcgtccggccgcactgaaccccgctgcttatttgcagcagcaaatactactaccatttagccagctagctgcagcaagccgtgcttccttcttgacacagcaacagttgctgcctttctaccagcagtttgcggctaaccccgcaaccctcttacaactacaacaattgttgccctttgtccaacttgctttgacaaacccagcagcctcctaccaacaacacatcattggtggtgccctcttttagattgcttattagttgtaattcaataataaagttttttggatgatgtatgtggccaaccagaaataagaagttacatttccagattctaatgtg

SEQ ID NO: 351208 - DNA, 381 bp, Zea mays
tcgcaactagcaacatagaaagcacaatagtgtaccaacaatggcagccaaagtattttgcttccttatgctccttggtctttctgcaagtgttgctaccgcaaccattttcccacaatgctcacaagctcctatagcttcccttcttcccccatacctctcaccagcggtgtcttcaatgtgtgaaaacccaattgttcaaccctacaggatccaacaggcaatcgcaacaggcatcttaccattatcacccttgttcctccaacaaccgtcagccctattacagcagttacctttggtctatttggtggcacaaaacatcagggcacaacaactacaacaacttgtgctagcaaaccttgctgcatactctcagcaaca

SEQ ID NO: 351209 - DNA, 333 bp, Zea mays
  unsure (1)..(333): unsure at all n locations
ctctcactgactgactactgtaataccagagggcgaacaacttggggcggcgggtgaagaagagagttatgtgcattcgtgggccgggggcancagacagagatagagagccatatcaacggaccagcagccgcagctctaagacgagatgaacgactctgcctgcagcggagctaggctgactccagaggttcgtttccaaccaaccgacttctagatatgcactttatacctcaccaacaaggtgctgaacacgcgcttaacctggaccgacatcaccgaggccgacctaaacaagattgcgccatggaacctccctagcaatgccaaaat

SEQ ID NO: 351210 - DNA, 439 bp, Zea mays
  unsure (1)..(439): unsure at all n locations
tcgaaagcacaatantgtaccaacaatggcaggcaaaatattttgcctggttatgctccttggtctttctgcaagtgctgctacggcgaccattttcccgaaatgctcgcaagctcctatagcttcccttcttcccccgtacctctcaccagcggtgtcttcggtatgtgaaaacccaattcttcaaccctacaggatccaacaggcaatcacagctggcatcttacctttatcacccttgttcctccaacaatcatcagccctattacatcagttacctttggtgcatttattggcacaaaacatcagggcacaacaactacaacaacttgtgctagcaaaccttgctgcctactctcagcaacagcagtttcttccattcaaccaactagctgcattgaactctgcttcttatttgcaacaacaacaactaccattc

SEQ ID NO: 351211 - DNA, 433 bp, Zea mays
  unsure (1)..(433): unsure at all n locations
caacaagcaacatagaaagtgggatccagtntcaacaatagagcaacaatggcgaccaagatattttccctccttatgctccttgctctttctgcatgtgttgctaacgcgacaattttccctcaatgctcacaagctcctatagcttcccttcttcccccataccttccatcaatgatagcttcagtatgtgaaaacccagctcttcaaccctataggctccaacaagcaatcgcagcaagcaacatacctttatcacccttgtttcaacaactattaccattcagccagctagctactgcctactctcagcaacaacaacttcttccatttaaccaattggccgcactgaaccccgctgcttatttgcagcagcaaatactactaccatttagccagctagctgcagcaagccgtgcttccttcttgacac

SEQ ID NO: 351212 - DNA, 431 bp, Zea mays
caactagcaacatataaagcacagtagtgtaccaacaatggcagccaaaatattttgcctccttatgctccttggtatttctgcaagtgctgctacggcgaccattttcccgcaatgctcacaagctcctatagcttcccttcttcccccgtacctctcaccagcggtgtcttcggtatgtgaaaacccaattcttcaaccctacaggatccaacaggcaatcgcagctggcatcttacctttatcacccttgttcctccaacaatcatcagccctattacagcagttacctttggtgcatttattggcacaaaacatcagggcacaacaactacaacaacttgtgctagcaaaccttgctgcctactctcagcaacagcagtttcttccattcaaccaactagctgcattgaactctgcttcttatttgc

SEQ ID NO: 351213 - DNA, 82 bp, Zea mays
  unsure (1)..(82): unsure at all n locations
cggcccggtccggaccgcccgggtcggacccancgcgatctgctgtactagttgatacaccctgagcgcatgcgttgggggg

SEQ ID NO: 351214 - DNA, 436 bp, Zea mays
atcagcaaagcggcagtgcgtagagaggagcgtggtacagaacagcatggagatggtcatcgttctcgtcgtgtgcctggctctgtcagctgccagcgcctctgcaatgcagatgccctgcccctgcgcggggctgcagggcttgtacggcgctggcgccggcctgacgacgatgatgggcgccggcgggctgtacccctacgcggagtacctgaggcagccgcagtgcagcccgctggcggcggcgccctactacgccgggtgtgggcagacgagcgccatgtaccagccgctccggcaacagtgctgccagcagcagatgaggatgatggacgtgcagtccgtcgcgcagcaactgcagatgatgatgcagcttgagcgtgccgctgccgccagcagcagcctgtacgagccagctctgatgcagcagcagcag

SEQ ID NO: 351215 - DNA, 435 bp, Zea mays
  unsure (1)..(435): unsure at all n locations
tcgcccacgcgtacgccattaagctggtgcttgtggatcttgctgtggggggtgtagtatcaagtgtttcttgtacacagacaggcggttgcanctgtggtcaacaacaaagccatgagcagcaacatcatccacaacaacatcatccacaaaaacaacaacatcaaccaccaccacaacatcaccagcagcagcaacaccaacaacaacaagttcacatgcaaccacaaaaacatcagcaacaacaagaagttcatgttcaacaacaacaacaacaaccgcagcaccaacaacaacaacaacaacagcaccaacaacaacatcaatgtgaaggccaacaacaacatcaccaacaatcacaaggccatgtgcaacaacacgaacagagccatgagcaacaccaaggacagagccatgagcaacaacatcaacaac

SEQ ID NO: 351216 - DNA, 445 bp, Zea mays
ttttagcaacatagaaagcacaatagtgtaccaacgatggcagccaaaatattttgcctccttatgctccttggtctttctgcaagtgctgctacggcgaccattttcccgaaatgctcgcaagctcctatagcttcccttcttcccccgtacctctcaccagcggtgtcttcggtatgtgaaaacccaattcttcaaccctacaggatccaacaggcaatcacagctggcatcttacctttatcacccttgttcctccaacaatcatcagccctattacatcagttacctttggtgcatttattggcacaaaacatcagggcacaacaactacaacaacttgtgctagcaaaccttgctgcctactctcagcaacagcagtttcttccattcaaccaactagctgcattgaactctgcttcttatttgcaacaacaacaactac

SEQ ID NO: 351217 - DNA, 361 bp, Zea mays
tcgattttgagcattcataaacacacgaagggaagcgcactagcaacaacctaacaacaatggctaccaagatattatccctccttgcgcttcttgcgctttttgcgagcgcaacaaatgcgtccattattccacaatgctcacttgctcctagttccattattccacagttcctcccaccagttacttcaatggccttcgaacacccagctgtgcaagcctataggctacaacaagcgattgcggcgagcgtcttacaacaaccaattgcccaattgcaacaacaatccttggcacatctaacaatacaaaccatcgcaacgcaacagcaacaacagttcctaccagcactgagccacct

SEQ ID NO: 351218 - DNA, 461 bp, Zea mays
  unsure (1)..(461): unsure at all n locations
cgtttcgatttaaagcacaaatagtgtaccaacaatggcagggcaaaatatgtttgcctggcttatgcgtccttggtctttnctgcaagtgcttgcttacggcgtaccattttcccacaantgctcacaagtctcctatagcttccctttcttcccccgtacctctcaccagcggtgtcttcggtatgtgaaaacccaattcttcaaccctataggatccaacaggcaatcgcagctggcatcttacctttatcacccttgttcctccaacaatcatcagccctattacagcagttacctttggtgcatttattggcacaaaacatcagggcacaacaactacaacaacttgtgctagcaaaccttgctgcctactctcagcaacaacagtttcttccattcaaccaactagctgcattgaactctgcttcttatttgcaacaacaacaactaccattcag

SEQ ID NO: 351219 - DNA, 436 bp, Zea mays
  unsure (1)..(436): unsure at all n locations
tcgccaacaagcaacatanaaagtggaatcgagtagcaacaatagagcagcaggggcgaccaagatattttccctccttatgctccttgctctttctgcatgtgttgctaacgcgacaattttccctcaatgctcacaagctcctatagcttcccttcttcccccataccttccatcaatgatagcttcagtatgtgaaaacccagctcttcaaccctataggctccaacaagcaatcgcagcaagcaacatacctttatcacccttgtttcaacaatcgccagccctatctttggtgcagtcattggtacaaaccatcagggcacagcagctgcagcaactcgtgctacctgtgatcaaccaagtagctctggcaaacctttctccctactctcagcaacaacaatttcttccattcaaccaactgtctacattg

SEQ ID NO: 351220 - DNA, 380 bp, Zea mays
gttgagaaatatcaaatatgaacgaatgaatgacaagtcggacccagtggattgacagcctctgacaccgaaaaagccacagatcggatcgcggcgagcagcggccacctccggattcgggcgctcggcgtagccgcgcagtggtgtgtctgcctccctccttgtatcctcctcgaattcgagcgacggcgacggcgggaagggagatggaggcggttagaggcgatgggaggtggtgcgtggtgactggcggccgcgtgttcaccgcgaggcatctggtgaccatgctgctccactccgacgagtgacggttgcgcatggcctacctgagccccggcatcatgctctaacgcgactaactatagggtatcctgggtgct

SEQ ID NO: 351221 - DNA, 434 bp, Zea mays
  unsure (1)..(434): unsure at all n locations
gcaacatagaaagtggaatccagtagcagcaatagagcaacaatggagaccaagatattttccctccttatgctccttgctctttctacatgtgttgctaacgcgacaattttccctcaatgctcacaagctcctatagcttccctttttcccccataccttccatcaattatagcttcagtatgtgaaaacccagctcttcaaccatataggcttcaacaagcaatcgcagcaagcaacatacctttatcgcccttgttgtgtcaacaatcgccagccctatctttggtgcagtcattggtacaaaccatcagggcacaacagctgcagcaactcgtgctacctgtgatcaaccaagtagctctggcaaacctttctccctactctccgcaacaacaatntcttccattcaaccaactgtctacactgaaccc

SEQ ID NO: 351222 - DNA, 146 bp, Zea mays
gaaacaccaagcgcaggtcgataggttactttgaccggggcgattactgaaccatctcggggacgactggaacactaactacgcccacatcctaagtgccctgcgaacgacatcggcctcttccctggcgacgaacacccaccagc

SEQ ID NO: 351223 - DNA, 271 bp, Zea mays
acgctgaaggaggacattgctgacatgcaatacatttatcacacactctgaaagggggggtggtgatgaaaataaggcattaaaaaatattgataaaaagatgcgagaatacacatttgtcaatgaaaataacaatttgcttttgacacatcattctataagaaagatgctacataagcatacaattactctctgtatagaatagacactttgatgaaataatgtaattctatgtcatcatatatatcctactctttctaaattaatatct

SEQ ID NO: 351224 - DNA, 361 bp, Zea mays
gcgcggagtactattatctatctgcaggtcgcgtcggggcttgaccggactgcgctgcacccatagctagcaacgtccagcgcagcgcagggtgggtggggatcccggcgttcgtggtactgtcacgggcgggattcgcatggatccgaggtgccagggcgggagctgctcggacggacgtcctgaacaaatggagccggatccgatccaagttgcagccgaggaccgcgtgaatcgatcggtgtcgacactggcagcccacgggtttccatttcggcatttccacgtcctgataaaatgcggtgcacctacacacggctctcctcgcacggtcgcaccgtgcgtgcatagacgcggcgct

SEQ ID NO: 351225 - DNA, 285 bp, Zea mays
ctgactcgtccggatacgcgtggactgacgcgtgggcaatgactccacgcaggcgcggggtagctgcggcggatcatcagagactatggtccgactgaacaccttgctcttcagctgggcatcagcgaacgaggaacacactgactggctgtgctaccagctttcatatgctgctctgaacgcttgaatgagtgacaaccttgccagctatgttgcttgctagaccatgctgaagaccaacctggccatggtgttgggcgtgaccacaaggaaggtcgatagacc

SEQ ID NO: 351226 - DNA, 430 bp, Zea mays
cccacgcgtccgggaattattggagcttgtttttctgaagcaaaaacttgccaacaatcagttgaaataagaagaaagcttgcatcattgattttaaagtcaagagaggatagaattgggttgctaaaaatggaggaggaaattttacaagacattgaatgtttaggtaaaaaattacagatgcaagaactactcttcagtcacaacaactatattttcataaggttgttacttggtgttgctatatttttcatcctttcaaaattcatatgaacctttgttgtgcaggaataatttttaattcgtctttacaatacttttcacgctaataacaacattatccttttccatcacacaagaaggaatatcaatggtcttctaggaaggtagagtttaccacctttttgtacacaaaaattgacttaaaatg

SEQ ID NO: 351227 - DNA, 308 bp, Zea mays
cgacgccagagagagtggcgactggcgacgcggtccggtccccccaattcccaacgggcggcggcgcgacaccccgatccggatcccatcgcctgaccggagcctcgattcgggcggcggtgacgacgattcgaccgcgtcggtaaccaggcagagaggcaaggaggggatgagcttccaggacctggaggcgggccacgtacgaggggcgccgaccggaggtggtcggaggagcggccggagcgacctcgcctgcgcctgagtgggtgccggcccgtgcaaggccgcggtgctcggcatggtccaga

SEQ ID NO: 351228 - DNA, 317 bp, Zea mays
caactacgctgtgcttgcaataaaaaaaaactacgctgtgcttatcgcctctggcggcggcgagttcgctcacgtcccggcgacccctcgccggtggccacgggccgtgacactccggcatgccgcgcgccccacgccggcagtccgacgaggcgcgccgtggcgcctacaagccgcgcgtcgacttcagccgctcgcgccgccgccgcgaggacggcctcctcgccctccgccggcttaaccgcgacacgggactcttcaagcgccgtcgcgacgagcccgttcccgtcgtccctgcctacgatctgacttctaca

SEQ ID NO: 351229 - DNA, 419 bp, Zea mays
cctgcaccatcctctccatggatgtcacgcggcgtctctcgcctgcccgatgccgatctagatgcgcctatcgagttgatgcttcactgcgacatccgatttcgggtgcccttgtagccccggtgtcctctgtctctagcgtagatggaactctgaccttgcttactgccgttgtagctcctgtagtccctgtgtttagcgcgaaagggttgtgggtgttagtcacagctctgattaggtgaacggaaagcttcgccggacacacatcttcggcgtggcagcaggttgctcgtgttgtgttaggtagtacctgacccattctcgtggtgggttagaagcattgcgtattcgcgtgtaatgaacaaagaatatctgttctctcttctcaaggtatgaagcattgcgtattgcgtgggaca

SEQ ID NO: 351230 - DNA, 270 bp, Zea mays
cgtttcctggtggggaaggcaaggagaaggataaggctgcttgcgtactgctccgataacccgatggaaaacaaagacaccggggtataggcactcgctctatactatccagcttttaacgcagttataatagcgagggcataccatgagtggacggcatcaaattcttctgctagcggaccgtctagaggaaacgacattacgaacgcctgcctactaccttatagatgctttataaggggacctaaactcaaccaactgcgcgaggcc

SEQ ID NO: 351231 - DNA, 158 bp, Zea mays
gctgcaaggcggacaggcggtggtgttgtatagctcggagtattcttttgctaccttttgtaaaaaaaaagagttagggtaaaagggatttgtgcttaagtatttggctattagccaagttataagagtgaggctatacaatagtggtatcttattta

SEQ ID NO: 351232 - DNA, 334 bp, Zea mays
gctgcttcctattggcttgggcaaacatgtccattttccaaggatttttcttctgcccggaagtggcgtctttgctgctacacaacttatgcgtctaccacatcaatccccaggggcacagatgggagcagctccaatgtcgtcagatgtgtcggtgccatctgttgctgatctaacgtaaaaattttattactagatatttgaaagcaatgatgtaaaggcttggacatcaatgtaaaggaagaacacctgttctgttttcttctcattttctattgatgtaggaactcactaccattgacaaattccatttatgcattgacaacttttgtac

SEQ ID NO: 351233 - DNA, 434 bp, Zea mays
ttcagtttgttgccgtctctctctcctcttgacgcaactcctctcctatcttctctctctccatcgctccctcctccgcgccgcgttggcaccgaaccctcctgtcatggcaaggccgccgaaggaggcgattgataccttcatcagcatcacgggggcggacgaggccgtcgccgtacgcaaactcgagcggatggagttggggttttggtgtgatgcgacgagatgtcatcgggatcaggtgcaccagatttgcatgccagccttattaacccacatggctttttgaatcgtggagtcattagcaattgctggaattggtgtgcagttacggaatggattttggaacatggtggtgatcttaatcaagcaataaattcacatttcaatgatggagacagcatattgaacggaatcagtcaaaacgccatgcc

SEQ ID NO: 351234 - DNA, 430 bp, Zea mays
cggacgcgtgggcggacgcgtggggcctgcatcatgtccaagcacttcaagtctgataagccaaggtgatccaatatttctttcccttcgcctctcttcagactccaactagaccttcaattcatggattccgtcacagtggcaggaggcatagcggtctggatggcgagcgtgaggcatctgccgaggtgtaaaagcatgtctgtagcaaggatatatctgttctgcaagacctcctgattttagtaagtaccgaggtagtatgttgcaggatataacatggtcctgtgctgttgtagcccgagtttaggtgctgtctatgcagtatgatgtgcaggagcatatcctccagcacatggctaacccgatcacatctaagtcacatgtagcgtaactgtaatcctattcatactatatgaagaatgtcagt

SEQ ID NO: 351235 - DNA, 346 bp, Zea mays
gggtcgaccgacgcatgcggaatgacggacagtggcgcttacatggagcaccgtctggccggcgtggacagggtgcagagcacgggcctgaacgcggacacgctggacgctgacgaaaaatggatgccgccacatcgacggcctagtctgcgtgaagtagcagttctacaccggcaagggcatgggcggtgttaactggaatttgttactaaacgccagggcggaccaaaaggaaacggcactgtttgtactactgatagacagtttggtccgacgcatttacgtaggagtcaggcggcccattcttttggaggggtagggaagcggtaagaggctacattggact

SEQ ID NO: 351236 - DNA, 141 bp, Zea mays
ctttactcaaccacgggggagcggtgaaatcatataaacaatggtaaaggctttttcttttcttggtaacaccaatggtgtcaagggccccatttttttcacccaaggggggaggggccctaccccttgccccgggagtgt

SEQ ID NO: 351237 - DNA, 369 bp, Zea mays
tccgcttttttttttttttttttttttttttttttttttttttttttttttttttttttttaaacattgataatgatataatatagatgggtcatgacagatagatccggcagagccaaccatgaccatgactgccttacaactgattaaaacggaaagatactggggctgctcacttgcattttttactaccacgccacgacagaccaaaacgaaacgaccctgttagtactactgatagatagtttgctccgacgacttcacgcaagagtcagccgagcgatacctttggaggggtagggaagcggcgagaggcaacatgggactccgccggatccgacgcgacgggggcgccgcgcctaacgcctt

SEQ ID NO: 351238 - DNA, 439 bp, Zea mays
cccacgcgtccgtcctactcctatcatccagaaaatctgagcggtattgatggcgcccaaggcggagaagaagccggcggcgaagaaggtggcggaggaggagccctcggagaaggcggctccggcggagaaggcccccgcggggaagaagcccaaggcggagaagcggctacctgcgggcaagtccgccggcaaggagggcggcgacaagaagggtaggaagaaggcgaagaagagcgtggagacctacaagatctacatcttcaaggtcctgaagcaggtgcaccccgacatcggcatctcctccaaggccatgtccatcatgaactccttcatcaacgacatcttcgagaagctcgccgcggaggccgccaagctcgcccggtacaacaagaagcccaccatcacctgccgcgagatccagacctccgtccgcctc

SEQ ID NO: 351239 - DNA, 430 bp, Zea mays
cccacgcgtccgaccgcccccagcttccctaccgccctcgttccggagcctagggtttgggaagtcgaaggcctcggcgcttcgcttgccagcgcaatgccggatacgggagcgagaggccgcggcgatgagccggagcctgtgacgccgcagcagcaggcgcaggagacccaggcggtggacgatcggcgcctgctgcgctcgcagtacctcgccgtaaagggccttatcagcgacgagaaggatgaaatggcgagcgcggactctgataagttctgctccattatcaacagagtggagagcctgcaccagcttgttcagaggcccagggagcaaatagctgacgcagaaaccctgctggaccttactgctagtttggtagcatcagtaaggtcccaatcagttctgggaatcacaccttctgatttta

SEQ ID NO: 351240 - DNA, 363 bp, Zea mays
  unsure (1)..(363): unsure at all n locations
gttggcttctcctccccctccggttcgggttcgggttcgtgaggttctccggggttcggtttcgtgggtgagcggatcgagatggcggcgtcggatgttgagtaccgctgcttcgtcggcggcctcgcctgggccacggacgaccactccctccacaacgccttcagcacctacggcgaggtcctcgagtccaagatcatcctcgatcgggagacgcagaggtcccgcggcttcggcttcgtcaccttctccacggaggaggcgatgcggaacgccatcgagggcatgaacggcaaggagctggacggccgcaacatcaccgtcaacgaggcccantcccgcggcggccgtggaggcggcggc

SEQ ID NO: 351241 - DNA, 51 bp, Zea mays
cttacacttcctctcaccaactattcaacttccttttgctctctacttaca

SEQ ID NO: 351242 - DNA, 208 bp, Zea mays
ttctcctctctgcttgctccaattccaagcaccaaccaattaaggggggggggaaccaaaggaatcccattttttccccccttggttgaattaaatctttgtcagcccgccttgaacttcccccgtaaaaaaccaagttaaccttgcaaccccttatcccgccccaagccgatcgggatccattggtggggaagcccccgaacccaag

SEQ ID NO: 351243 - DNA, 189 bp, Zea mays
gctgccacagagacatcacagagcggtcctccttgtgagtctgagctgaagaggaggaggaggaggaggagaagcagcacctcacctcgtaggagggagagcgaacatgcgccgtgtacgcgctgttgctcgtccccgtcgtgtgcgcgctgacagcgccatgtggccttttaggtattgacgggcttc

SEQ ID NO: 351244 - DNA, 378 bp, Zea mays
cgagaagacaaagatcggcatcaacggctttgggcggattggcaggttggggctggggattgcaactagcatagacaatattgaagttgtggctgtgaatgacgctaggggtgatgctaagtacatggcctatgtgaggagggcgggcgatgtttaaacacccggtgagacgggggaggggctgggctggaccggaagcggatcaacgacacgctggataagcatctcgagaaggcggtcgcgtcgccgtccacgtatagggggtcggcgggcggcggtgaatatcaccacgaatcttttggggtctttacaacgactgataaagcataagcacactttaagggagggggtaagaaagtggtggtatctgcaccatta

SEQ ID NO: 351245 - DNA, 391 bp, Zea mays
cggacgcgtggggctgtctcgcctctccctagggtcctcgcggcgacgactgggcgagcgcctcctgcgatacctcactccctccaagagcacatctccagcggcgcgcgccgacgaccataggcacatctattacgatgacgtgggctcaccacatccaaagaaagctgccaactcgacgcaaggtgttcaagaaaaataaaccatgcactcttcatcggaggttcaaggcaatatatgaaaataatcttgaggaccttcactagaggggtgagagttctccttgatacaggggaataaagatccaaataagtctgtgacattgaacagaggcagaactccaacggctacgaagcttgtggatctctgcatcccctgggatgttgacact

SEQ ID NO: 351246 - DNA, 149 bp, Zea mays
cggacgcgtgggcgcgtcctccttccactcgtccccggcggcgtccccgccgcgggcgctgctccgggcgtcaagggactcctcctcgtcctccctcttctcctccgccaaggccgcctcctactccgtcgttgtccccggccccggcg

SEQ ID NO: 351247 - DNA, 275 bp, Zea mays
cccacgcgttcggggaaaaaggcacttccccgtgaccccgtttcgtgcaggtgtgctaccttcctctcgtcccagcagccgcaagccaaaaccctagcaagcaaaccaccggagcagcggcgctcgcgcgggcggagccatggcggacgacgattacaacgaaatcgacatgggctatgaggatgagcctccagaacctgagattgaggaaggggccggagaagagcttgagaacaacgaatatgcccctgttgatgtcataggtggagagggtg

SEQ ID NO: 351248 - DNA, 276 bp, Zea mays
cgcgaattttcgggccttatttcaccttgcccggtggtgccaggcccttgggggtggcgggtgaacctctgctctcggcaataatccaaaaaacaaaaacttggtctttttcctatgcgagagattccatggtgagggagctcacttcttataacaatcttagcctcgagcattaattgtttctccccccgagaaagctaacccacacccccaatgatgctttctatacaaggacaggcagctcgctttttccagcaaaaacaccttaagtttttt

SEQ ID NO: 351249 - DNA, 310 bp, Zea mays
cccacgcgtccgctcaggagagtggggtaattcatgaagaagttcctaagcctactgtgtgaagctcccagagaaaatggtactcccatcgaactcgaaagcagggacacaaacattactggaatcaacaatgaggttaaaatgtggtattatcagactttacataactgctatgtttggatatgtccaaaaaaaaaataaggttctattgcttaagactcttctttctgctttaatagctatattttacctttagctatgcttaataatataaatttcaatttgttttggggggggcggttataaggat

SEQ ID NO: 351250 - DNA, 391 bp, Zea mays
acgaatggccttacacgtactggccacctgacaaccaagatcatcatggatagtagcaacagggacctggtaaatagtggcgatgatgtgaatgctgaaggaacactaaccgcaaccactttcactggaatggtttttgtctgcttgaatatgcagcgttgctttcttggagaatgtacacctacaatagtggggaaagaacagagaaaaaaaacatatctctgtaaatctccctcaataaagaaatgaggataaaactagttaacagtgtgagctctccaagacagaagagacaaaatggccaacgaaaagagaagggggaaagaccgatgggaggaaaggtactgtgtgtgctgacattgaagggatcatgtgtggacccgtagatgta

SEQ ID NO: 351251 - DNA, 209 bp, Zea mays
attagtaggataatggcaattctcctagtaatgaacccaaagatagggctgagatcatcaaaaagaatgttctttcaccatttttctttcatgaggagggcgttcaatgctacaggggttctatattttttttatcagaccaggatgtttcttctgtgggtgagtttatccaagctgcaactcttgttatccaaccagctctttacttt

SEQ ID NO: 351252 - DNA, 358 bp, Zea mays
tgtgcatcggatgggttctcccaagtgttctagttgcaggtcctaatcatagccgaggtggaggccaaattcctattgtaattgccattaactaatccaattagtaggttcaattactggagggcacgaatcgtttttgttgcagagcagtcgtagtactagtagctttctggtggtgctccgtctctgcctgatctgaggcagcgtttacctttctgttggtcttgcaaagttcagttccctggatggcgacgatcactgacgatcttgtgatgaacttcaaatggtaatggaatctgcagttaataatcgacatctatatgaccttcctgtgatcgtaaaaaaaataaaataaaaa

SEQ ID NO: 351253 - DNA, 333 bp, Zea mays
tcctattgtacaaaattacactcactggcacacttctacatacctggagcgtgtccatagttctgctctgagtcacaaacaatgtgctacgtcccatccctttcttttaacaacatatccggattcttgtacattcgtcccggatagtatttcatctttatcccgtcctccgttcgacaacaagcctttcctctatcctaggccaaacgtatcattttagaagacttactctcaataggcttatccttgcctattctattgcatcacacctctttttatctgggattcacaaaactttccatcccgtttccttttttgggtaccgtctttatt

SEQ ID NO: 351254 - DNA, 393 bp, Zea mays
aaaatatccccaaaccctagctcccgatctcgatggcgaaccctcgcgtcttcttcgacatgaccgtcggcggcgccccggcgggccggatcgtgatggagctgtacgccaacgaggtgcccaagaccgcggagaacttccgcgcgctgtgcacgggcgagaagggcgtgggcaagtccgggaagccgctccactacaagggctccaccttccaccgcgtcatccccgagttcatgtgccagggcggcgacttcacccgcggcaacggcaccggcggcgagtccatctacggcgagaagttccccgacgagaagttcgtgcgcaagcacaccgcccccggtgtgctctccatggccaacgccgggcccaacaccaacggctcccagttcttca

SEQ ID NO: 351255 - DNA, 131 bp, Zea mays
aacccatgtttcctaggaggagaacgtcacccttggacccactgtccgtgaaggagagtatgtctttggtgtccctcacatctttgcatccttcaatgacaccttcattcatatcactgatttgtctggga

SEQ ID NO: 351256 - DNA, 354 bp, Zea mays
gtgacgcatgggtagggctgtaagggagaacgcggttactttttaaggatcatggacacgtagctccccggtgatcccgtgcggccaaacatgtaagggcgcaatacattatgtcccgccaaaataggctaggaggtggaagagctcacgtccattctggaggctcggaatgagaaacgcgtttcatcacagaaagggcatgtcataccttaagaccacttggtcagcaaagaaaaggagctcatcaaggtgcataccaaggggttggtaggcttctcaatgccgcgcgccaggcacagaaatttctctaagaattgcacccatcatggactaaagatgccacagttattgcat

SEQ ID NO: 351257 - DNA, 359 bp, Zea mays
gtagacatgactaggatgcaattgtttggttccttagtctattatgtacactggctccattcatgcattccccctctcaccgccttcctgaacgtgtttcttataatataaagtgataaagttgaaggtggccacactaagtacgataaaaagaagaaaatgccagaggatggtaatcaacatgttggtgctggcaggtctgatagtgcaaggcacaagttagatttggatttgcatttatcagaaagtaaaacatgttccatcagagctgagctaaggagtaatttgtagtgtcttggcaagattcatggtttaaacaaccaactgaatatgcgcaagaggatcaagagagaataaga

SEQ ID NO: 351258 - DNA, 317 bp, Zea mays
  unsure (1)..(317): unsure at all n locations
cccacgcgtncgcatggaagttaagcggcataaaaacaagatgaccaagacttcagcataatgttgtgactaaggtcaaggcgactatggtcatggatgtaccagacgtcgtggaaaaggagctcatggtggcacatcatggaagaatgtggcacatggctcagatggtggtagttgttgaaactattcatcttcaacacactatcgaaaggtcgagcttttgaatcacccaacaagaatacctaggcatagtgattatcgacagttgaaccaaattatttttttgtctttactagtatccaagtttacctttttat

SEQ ID NO: 351259 - DNA, 392 bp, Zea mays
  unsure (1)..(392): unsure at all n locations
gagagagtgagaggggagagagagggctagggttttgtgccccccacgcctgacgcatggaatccgagccgggtcggggttgctgcgaatcgccggcggtgcttgatgattcaagcctgtgtggtaggtgccgtgcttgctcgtcctaagcgattttagggtggtcgtccttgtcgctgtgagctggttgggggctgtgtggatttggttttctggacgcgggaattcaaaggctgtgattccattgcaatggcatctgaaactgatgagaaagctaagatggagagtttgacatctgctgcagcctttgtggagggtggcattcangatgcatgcaacatttgccttgaggccttctgtgagagtgacccttctgcagatcaaccaaaatg

SEQ ID NO: 351260 - DNA, 347 bp, Zea mays
agggcgcgtggggcgggatataatttgaaacagaactgaaattgctattacggtaatgtaagggcgctgaatatgtgacaagtcattttgtgcactactgggtaatattggtcgttggaatggtatctatgctttgatctgaacatgaccaggttttctcatgatgttagtgggcgtaggatatttatagctaatgaatggacaagaatattgggatgacaggaaatggatgcttctgtacgtgaagagcgcttcgtatggatagagggctattagtaagcgtgctatgagagggatgcaaagattgtgaatgcatgagtaagagatgtcgaacgctaggattatac

SEQ ID NO: 351261 - DNA, 164 bp, Zea mays
  unsure (1)..(164): unsure at all n locations
cccacgcgtacgcctacgcgtgnggagagagttatctatctagccactatagactaaataatgaacaggtggtctgctgagaaagacgccaactcaaaagcttccggaacaactatacaatatatactagggccagaatgggacggggccacagtataaatgac

SEQ ID NO: 351262 - DNA, 305 bp, Zea mays
atcaatttctatagttgatgacaagggagcgctccatgatgtttactcactgagggacatcatggctgtggcgaacaatgatgtttatgctcgcatcgaccttgaacaagtgcctgggcaaaatgctttggatgtgcaatcccaggggcatggtcgacgacggtgttatacttgtttacagacaaataccttgctggaagtttaaaaggaatggcttattcaaggagtccgacggctcgttgttattgaacaaagcaccatatttgtggaaggaatgatctaattgggggacatattaacatttc

SEQ ID NO: 351263 - DNA, 225 bp, Zea mays
  unsure (1)..(225): unsure at all n locations
cccttgaaacctgnnatgtagatcgttggtggtcggcacactcccattcaatctatattcgatcacggttaagaaattcactaactgcgtcgcattggaggtttctcgctcagaatgtcgtgggattggaaaaaggagggagcctacactcggagaagatcagtgcaagaacacactggtggacatctggctgtcaaatgggttatttcttggacacttctgagc

SEQ ID NO: 351264 - DNA, 401 bp, Zea mays
tacgcccgcaggtaccccggtcccgcgaattcccggggtcggacccaacgcgtctcggtgacaggagcagcacacagctacgatcgtagcgagcggagttcgagcactattagtatataggttgcaggtgcgattcgagaggctattcgctatgtggttgcggagtgtgctgtgtgaaatttgaggactgcacgacgacgatggcacactgatgaatccggtgagacggcgaccagctttggcatgggctggattctgattattcgctacgtaaggcataacggtgcctctggtgtcgatcttggcctcagtatcagagctgtattctatgcatagaggacgtacacggacatagaaaagggggagacggggaaggagaccatggatttcttcccccagat

SEQ ID NO: 351265 - DNA, 333 bp, Zea mays
caactgacaactggcttggctgtttccgtccaaaaactcgaacctccgtggctgggtgcgcccggcaatctcgaaatcaacgagatcggcgaccaacacggagatctcgaaccccgggaaagatccaacacaaccgaggtggagggggtctcgaggcagcggcgttgaattgacgatgtgtgacatttgggaggaattccggccggggctttgcatatccgggggaaaccgtcgtccgcccccaaccttccttcccccgaatctcgccggcgggggtgacaaaaatggcggtggtgtcaaaggtgccggtggccagaaggagggggccataat

SEQ ID NO: 351266 - DNA, 361 bp, Zea mays
gtgggttggcttctcctccccctccggttcgggttcgggttcgtgaggttctccggggttcggtttcgtgggtgagcggatcgagatggcggcgtcggatgttgagtaccgctgcttcgtcggcggcctcgcctgggccacggacgaccactccctccacaacgccttcagcacctacggcgaggtcctcgagtccaagatcatcctcgatcgggagacgcagaggtcccgcggcttcggcttcgtcaccttctccacggaggaggcgatgcggaacgccatcgagggcatgaacggcaaggagctggacggccgcaacatcaccgtcaacgaggcccagtcccgcggcggccgtggaggc

SEQ ID NO: 351267 - DNA, 364 bp, Zea mays
cggacgcgtgggcagaggtgggctggcttctcctccccctcttaccaagtcctcttcgggttagggttacttagggttttgtggaggggcgatggcggcggctgatgtggagtaccgttgcttcgtcggcgggcttgcctgggccaccagcaacgagtcgctggagaatgccttcgcctcctacggcgagatcctcgactccaaggtcatcaccgaccgggagacggggaggtctcgcggcttcggcttcgttaccttctcctccgagaactccatgctcgacgctatcgagaacatgaacggcaaggagctcgacggccgtaacatcaccgttaaccaggcccagtcccgtggcggtggcggt

SEQ ID NO: 351268 - DNA, 388 bp, Zea mays
gcagccccagctgtttccacgatgcgttcccctcccccctcaactcacttacgtgtgggccctcccagctctgcttgtcttccagccccttgcccgcatgcacgaatcggatgacgacgacgacgccatgagaaagctgaagcgccgaccgccacttcgtgtctgctgctctgctcctcgactcccggctcctgcgccgtagagaagtcgaccgtccgtcaccctccccactcgcgcgtatttccctctcgtctttcccattgttgctcgccatcaatggcaggtgtcggccatcgcctgctcgtctccctcgcccgacgctataaaaccatcgtcgccacgaccgtcttctcccagccatcatcagctacgtaccgtcctgcaacag

SEQ ID NO: 351269 - DNA, 394 bp, Zea mays
cccacgcgtccgcccacgcgtccgcgtattcgtactcgcctacctccgcggctcaaacctttcccccttctaccaattcccgccgccgctccatcccgtaacgcgacaccatgagggagtgcatttcgatccacataggccaggccggtatacaggtcggaaacgcgtgctgggagctgtactgccttgagcatggcattcaggctgacggtcagatgcccggtgacaagaccattgggggaggtgatgatgctttcaacaccttcttcagtgagactggtgctgggaagcacgtgccccgtgctgtttttgatgaccttgaacccactgtcatcgatgaggtgagaactggcacctaccgacagctcttccaccctgagcagctcatgagtgg

SEQ ID NO: 351270 - DNA, 331 bp, Zea mays
gcattggtatttgtccgaagagctagcctacaaacatattgcgagggaaaggttatccacaaacagtctgggaaccacttgatcaggcgtctaggggactaaatggatatttgttatgagtacagaagaaactttacgctggcaagaaacagagaggcgtgttccagcactccacttttggcaggagggcactatagctgtgggagattactgcaaaagggatgatcaagtctctgggcgtcagcggcactacaaacctacgcaaaaacctccaacttatgaacttctcaagagaacggtgacctaaagaatcgagtcggtctctaccaaa

SEQ ID NO: 351271 - DNA, 386 bp, Zea mays
cccacgcgtccggccgcaccagccctaaacccttccacctccagccgccataactgtaatcccttccaccatcagctgcccctccgttcgagccgtcgacgccctaatcctatcaccttctggccgcccaaatccctttcggctcctgccgccctctgtttgaggcgcaggccatggagtcgtcggtcttcgagtgccaggccatggagttgtcggtcttcgagtgctaggccatggcggcacagaccatggagtcacaggctatgatggcgcaggtcttagtctttaggccatggagtcgcaatcaggcgttcaagatgctctgagacttgagtcaggtttttccaacatgcatgatggattcagtacaccaaaaaaatgaatat

SEQ ID NO: 351272 - DNA, 386 bp, Zea mays
  unsure (1)..(386): unsure at all n locations
caaaggcccaaacccagccggtcagtcccccaccccccagcagccatggagttcggcttccgcgcaggaaaccgcacgcagcgccgcccttcccccgatcgacgcgtcacagcacagcaagccggacccttccacggcgaccacccgcagccctcgccgttgcagtgggaggatgcggcccggcgcgagcggatcaaacgcgaggtggagcgccggctcatcgaggaggaggtccgcctggagctcgcccttgagcgcgcccgcctgcacggtggttttggccccgccccgttcctcgggaccgacggattcgtcgagccggtgcagtcaccacctncacctccaggccggttcttcagggccgacggtccatcgatgacgccggc

SEQ ID NO: 351273 - DNA, 386 bp, Zea mays
cggacgcgtgggtcacccctctaacaccacgccgccgccgtttgctgctcggcgcctctgctcacaacccgtacgccaacgtctccaatctcgtatactttcgtgctcagcatcatggacggcttccccaagagcgtcggcggtggcggacctaacattacggcgggatcccaccccggaagccggagccacgcggcggcaggaggaggcaatgagatcttttggcaggttctgcggtggtctagattataattacggctatggccccagcagcggaagcagcatatcaaggtcggattggcgataccgaccttactgaacgtgttttagtttttacctctagggaaggaaactgaggagatggagaaaagaattacctgtctaag

SEQ ID NO: 351274 - DNA, 288 bp, Zea mays
cgctggagacattcaattttttgatgttagaaggtcagcagaaccctacctgggtattgagggacacaggggttcactttcaacatttgcggtttaccggcatgccccaattgttggttgtggcttagccccaaccataattaaaaagtgtagtgtttgaagagagacgcatacacaaaaattcgctcccagccattttttatgggccaaagaatagactgtgaaccggcttcttttttacctatacaaaacacatatatcttcttgtggtggtgatgaagatttttt

SEQ ID NO: 351275 - DNA, 373 bp, Zea mays
  unsure (1)..(373): unsure at all n locations
gttgaattgtcctcaaaatacgtgtccacttaggtttcgggagggtatctggngtgatgatggtggggcaaaccgatcatgatggagaagccatataatgcttacccatgatgttgcaatagacacagctgcaccacttgcgaatgattcatctacagctggttatatagataccatgaatctttacagagcttattgatcaatgagatcttgacgcaggttctgcggtggtctagattataattactgctatggccgcagcaatggaagcagcaaatcaaggtatgatcggcaatacccaccttactgaacgtgttatagtttttacctctaggaaagaaactgaagagatggagaaaagaattacctgtct

SEQ ID NO: 351276 - DNA, 311 bp, Zea mays
  unsure (1)..(311): unsure at all n locations
cggtgccgtgctcgaggacgtcgacggcggcggcggcggcatcgagcggcacggcgtcgtggaggtatncatnatcaaattctaccattctctatgaccatcaatctctattaaggaccatgacaaaatacacagataatattcatgcggaaggacttctccctgttttacacggacgggtacagtcgcatttcgcccttgtatttgaacatactcatgcgctcccttagaaataactttacataatcacagctttactacatcgttctacatgagaagctcaccgtaccactttactttccgtgctttct

SEQ ID NO: 351277 - DNA, 385 bp, Zea mays
agacgatcaagattgcaccatactatctcttagttgtctcctataattaaaaaactgagccaattctctaggttgtacatgccctaaggacatcattactaaatgaatatttcttagggaccttattggttatttcttctttagctacagttagacaaaagcagtttctagggagctaattaaaacaatcaagagacgagctcttcgtgaaaagcatgttctacacgactctctatacttatatattatgtattgactgtatttagaatttatacgatcaagattgtatcatactatctcttagttgtctcttgtaattaaaaaaaaactgagccaattctctaggttgtacatactctaaggacatcattactaaatgaatatt

SEQ ID NO: 351278 - DNA, 383 bp, Zea mays
cccacgcgtgcggcgaccccgggcaagtttcccacgggcggggcgacgaatcgagggctccgaccgcgacgaatcgagggcctcccaccgccaccgcgatgaaccgagtggagcacgtcgtctccacaccaccatccagctcagatccatcatctgcgcaccacgccatcaaccagcttggatccatcatccagctctgctccgacgtccagctctgctcgcgagcaggacatcaccgctcgtcgtccaccatccctggcttgctgtcctccgcgcgtcatctccatccctggcttgaggtattcaacgatgttctccctcttctcgtaccatacatactagctagggttttgaataattccgatcggcgatctggtggcggc

SEQ ID NO: 351279 - DNA, 258 bp, Zea mays
gtcttcgccgcggtgccgtcgaagcctggcgctgagtttcctaatgccgcccgctggtacgagaccgtctctgcggctgtagcctcaagattccctggtaaggctgttggtgtaaatctgcctgcgggatcagctcctgcggcagctgctcctgcggatgaggctgaggatgatgatgaccttgatctttttggtgatgaaactgaggaggacaagaaggcagctgatgagcgtgccgccgctgccaaggcctcttct

SEQ ID NO: 351280 - DNA, 308 bp, Zea mays
tgggacgccggcggtaccggtcgggtagacccacgcggacgatgtctgcggaaccgtgcccgtagcgctagccgacgccgacgtcaacaatggagagcctactggtcgctaggacccaccgaccgattctaccttttaggacctggtatagtcacatgcgtcgctgacgtttgcacctgcacatacactcttaccccaatcccctctacctctcaccccccatcgcctcccacctctcacctatacctcgccgacacctgaccgcggtactcgcctgcgtattgggctgtgaagcgagctctaagccg

SEQ ID NO: 351281 - DNA, 353 bp, Zea mays
gcgcacgtcctatgttctctatccacgcggatgactcgctcggtgcgcctccgatcccttccatgccggttccgggctccggctagccactcgcccggtgcgcccgcgctcaccgctccctccccctacgggctcccaagaaaagggcagatgctatctcaggcttgctgaatttgatatgaagcgccaaatgaggtatagactgatacagaagtacttcaatgcgatatatgcaaatcaagtgaggactacattgcctatttcaagcatgtctgacaatgagtggagaaagttggtggagaagttgtctgccccaaatcacaaggaaagttgtgtgaagaacaaacttaatc

SEQ ID NO: 351282 - DNA, 304 bp, Zea mays
aacatataaagattttatagccgaaaaaaagcgactgattgtcaaccaccatctactagttagaaggagcaagagggctgctcccgctcacaagcgctatcttatgcagctatatgacgtcagggctcacgtaccgagatacagccatctagatcttctggtccgatgtatatggatatgagggcgtgaatgttgagactcagattgacaccaatgacaattctgctgcggctcaagtctactatgctgaaggtgtcaccccattgatgacggtgacagtcgctgacaaggaagatgtaccggg

SEQ ID NO: 351283 - DNA, 372 bp, Zea mays
  unsure (1)..(372): unsure at all n locations
ccacgcttactattgctagccggcggttgcgactttaaactgtagatcgggctctagaactattttggctcaactttttacactcttcccactctttcctggcgaacgggaaactgacacagctttacaaaatctccactgcccttgggaccccccattgcactattttttcaaagggaatgaaccctgcctcgaccatccacctttaagttttttaagaatcctccaaaaacacatcgtatcttatttatcccggcggatttgatctaatctgaccactctagctatgccgncgcgcgatgccacaacgatgggagtgatcggagcatctactagctgcaactgcaatgcaagcctgcaaccgcgtggatt

SEQ ID NO: 351284 - DNA, 303 bp, Zea mays
tttgggctgagctttttacactgtccacaattttttctggcggacgtgaagctgaccagttttacaatacatgcactgagctcgggacccctgatggctctatatgggcagagggaatgcacctggctcgttcatgccgctttaagttttttcagaatcctacaagaaacttaccaccaccggctgaagggagtgcgattctttccactctccccatttcgacaactgtgctactgggatccttgaaggaggccaactgctgagcaagcattacaacatgctttgtttaatgtgtgccattgg

SEQ ID NO: 351285 - DNA, 267 bp, Zea mays
cacgccgccgacgccgacgctgtttccgggcggcggctacgactacgggcagtccaaggagcttcgggaggcggcggatctcaagcggcggcacttccacgcgctcggggccgacctgagcctctacaagccgttggccgacgccggggccgcggagaagcccctgcggcgtttcttctacgagtggccgcgggagagaggcgacactaggccgtcgtgggcgggggcggaggacccaacccagttttccatttccatccccccggt

SEQ ID NO: 351286 - DNA, 383 bp, Zea mays
accaggcgtcctgcatgcatcaggagggggatgaatactgagaacgcacgcccgtgacatatcagtggatgtgagttacagagatatggctcgtaattcctgggcaccggcatgtggtgttgtgactgtcctgccactctagtgtttttggctggcaaacaccgctatgtgctactgctttgcttgcgaggatctatcacctgccaacattatcgatctcgacgagcttacaccgggggctgtatttcgactatccattgagaggataataagcccattttatgaatggtatgcggatcttgatatgtgagctggatttgtgctgtgcgaccattttctgaagacatgttattttatacatgcctgtcttgatgttatgaagc

SEQ ID NO: 351287 - DNA, 212 bp, Zea mays
tggtagcccattctcccaccacacttagttaggggtagattcggaggcatggggcggaatcaaaatccatggtgttgtacgccaatctcgacgcgctccggacgtcagcggacgacgtgcggatcgtcacgtgggacggccagaccataggcgcacacttctacgttctttcctcggcgtccccactactgtagaggtatgatccacaaggc

SEQ ID NO: 351288 - DNA, 81 bp, Zea mays
tcgggacttccgttgtctcttagaactttataccccagcgcggcgtgccgcagaagcaaaacagccggaggggctcttgga

SEQ ID NO: 351289 - DNA, 248 bp, Zea mays
attcaaaagtttgagcggatgtgcacgcttatatgtaaatggaattacagattgccacaacattgattggtcttatttcataatcatgaggcggacgtggtctacccaagaagaagaggctgttggtgcgtccgcacgtcgctaacattggcctccgcgtcacaacgggcacggcgaaccgttatcccgttcctgcgcgccagaacggacgacgtatacagtatagcaggggcgtgctgttgcaccac

SEQ ID NO: 351290 - DNA, 404 bp, Zea mays
gtacccagcgcgtaccgcacgcctgcgtatgacttaagctacatcatgagcaacatgctgcagtatggataagctttatcgatggaggaggaatgagatacctcactacataatctcaagaatgaggacaataagagtgatcggcttgagaaaaataaaaggaaagagaaagatcaacacaaagagaagaaaaaggataaagaggcaaggaaggagaaaagggaacataacgccaaacagcgtcaggaatcacctgacaacaggtaccgcttcccattaatagtcttaacttgaagcactcggtccctcctttagtcccaccagttgatgatggaaaatctgttgtgcctgatgagaacctgaagaagcgaaagaaccatgaaacgaatggttacttacgaaac

SEQ ID NO: 351291 - DNA, 96 bp, Zea mays
acattatggtctttatgaaagagtgcacctcggttgatgttccttttgccggtgctggaactatgcgatttgctgtaattttgcttctttgtcctc

SEQ ID NO: 351292 - DNA, 400 bp, Zea mays
cccacgcgtccgcggacgcgtgggttgggatctctatctttgtcaacattggctctacgggattgacaatattcatgattgtcaagctcagacactgttggctcgacatcgagttccttgacaccacactgctgctagtgtacattatgtgtgctctctcattaatgtccaaggtaattaagcaaatactcctataacacacacacttagagctattggataaattaagccatatgtatctatggatctagctagcagtatgtaactgcggaacgatgatgaagaggcggccacgttgcatgcatgcttcggagcttggatggtgcatgcaagcatgtatatatgtgggtttagtgctggcggtatgttcttaccaagaccgccatcatgggcggacttt

SEQ ID NO: 351293 - DNA, 382 bp, Zea mays
cccacgcgtccgcggacgcgtgggcgccgcggagccgcaccaaatctcaccccgcatcctttagggttagggttctgcccgcacctgtgaattccgttgcgaaatctctcatctcctgagtcgagaatcgcagtttcccgctcggctcgtttggggaaatcggttattttcgtccggccgcgtgggctctctgaagtgtttgggctgtcggctatttgccccgagttttcaggtttgaaaaatcgtcgtaatttgttcatcacgcggctgccgaactttaagtggtggtggaagtttcgtgcctcggcgtggcccccgtgctccgattcctgatcacctgcccgccccgcacgctatgagcgccaggcgcgcgggctggggc

SEQ ID NO: 351294 - DNA, 420 bp, Zea mays
  unsure (1)..(420): unsure at all n locations
cggaannccagggtccgagcccacgccgtacggcgtgcctgttgtacccggctttttagaccgcaactatccattcgcttgcgaaactatcgcattgggtggttcgtcatggcgcgccatgcgtcacccgtggcaaatactttaacacccaagggtcttataaatggtgagtattgcagtgcgcgtgggggagatttgtcatctcatgccttcagacgcctgcagcgaacatactaccaaacacannaccagggtgctcttctctttttgatgaagatccttcnttattgcaatantgtggagaatccctcaatctttcttggtcagcgaacctcgtgacatnnntcttcagggagggttcttcgctcttttgtgatcaatcccgtgccttcttggaaaaaaggaggaaaccacaatcat

SEQ ID NO: 351295 - DNA, 243 bp, Zea mays
tcgatttacgacaacccaaacaaacaacccccctacacacacacacaggggcccggtcccggtgggcgtttctattctatgcttttggccgcccatcaacgaacgagtcgcaaccggatccctacttacccgagggcgcttggccgtctcttaaacccgaaggagcgcgcgcgtttgacattggggagctcgcggggggttttttttccccgccgcccgccgtgctgtaagtggtttttttct

SEQ ID NO: 351296 - DNA, 314 bp, Zea mays
tatgattcctcagcttattctgttatacagtcaagggcagcatcatgtacccgcaggcttttttcttcagctgattctttcacaccaataaataaatactgcgttaccaatctgcttgtatccataaacagaatttttaagattgaaaaaaacaataatacttatgaaattgaaagtgcatttcagaccttttgtctaattttttcaacaagtcaaagagcacatttctttcttacatcatcaaatgttcccatacattttttctactcatcctttgaccgctaaggggagggtaaacacctccctcctttaca

SEQ ID NO: 351297 - DNA, 386 bp, Zea mays
  unsure (1)..(386): unsure at all n locations
gtctgcaccaaggccagggttcgagcaatgtctgcgtggataatggttcaggagctgtggaattggaggatgccnataaggtccctaatatcaaagctgattggccagtccgcgtcattcagaggcaggaggggtatcaagctggtttcaaaggatggggtggttggggtgaccggcgtgatcgtgagctatgtttgagttttgcatacatgtaccatgttaaagatccatcgtcatcgtaactaggcacacggttttttggcataagtagagcccctggtgtaatattgtttggcatgtgccctttgatccatacacggtttgtgctataaatagctactgtagttgcccatcggcaaagtttttctagagtggttagagttttt

SEQ ID NO: 351298 - DNA, 221 bp, Zea mays
  unsure (1)..(221): unsure at all n locations
ggcaggcgcaggcgtgaccaggcataagcttccgcatccgtantcccagtggggcacccggggtcgctgacctgccacctcatcgtcgaggcgaggaccagacataccacaccgtacccgttaccagcgcggcgcacgaaccggccaattttattcggctgtcgtctcgtgctacggaattaagccagctaagtttttggggacccgggacaaaaatattc

SEQ ID NO: 351299 - DNA, 188 bp, Zea mays
cgttaacacgtcatgttaatatcaatcagtttccctacacaaaaaagaaccggaaaaaaaaaattctataaaaccccaaaaggtcttcaccataaattactcccctttttccatcccattcacgcgcctgtttaagtatcctataatatcacttcaatgccattcacttgtctaatttttacaacggc

SEQ ID NO: 351300 - DNA, 83 bp, Zea mays
cccacgcgtacgggttggcttctcctacccatacggttcgggttcaggttggggagggtctccagggttcggtttcgtgggtg

SEQ ID NO: 351301 - DNA, 290 bp, Zea mays
acgcggacgcctggggaaaggcgagagagagagataaaatatatatgggggagggggaaagagagaggagtggaaaacccccaaaaggttcccttttagggaccttaaactcagcgactgcaaaggaggattaagggaatggccggaatcgaaccaatcagccagaattggaacccgttctttttccgaaaaaaggacccaccctccccctccaaaaagaataaaaaggccgtaaccccccgcccgcctcccgttccgagatttattccattaaaaaatgcaagggtggg

SEQ ID NO: 351302 - DNA, 191 bp, Zea mays
gctacaccacctcaacttctttcactacacaacacctatcgacctcattctgcttccgcattataggtacgctggccatcttcacccgtctcaaatcgtagtatttagctggtgcaggcacataacaaaatatgatatccgtgtggcttcgccgcccggaccccagtcccctaccttcttacctcacgcaa

SEQ ID NO: 351303 - DNA, 290 bp, Zea mays
cggacgcgtgggtagcagttttgtaacttgagagctctagagtggttactaagatgtaagatcaaaggaacataattaccgtgtgaagaagttcctttgcaaaaaaaaaaaaaaaaaaaaaaataaaaaaaaaaaaaaaaattataaaaaaacaaaaaaaaaaaacaaaaaaaaaaaaaataaaaaaaaaaaaaaaggaaaatatgatttaaaaaaaaaaaataaaagggcctccttttgggggggtctatttatgggtccccctttttcgaacgtaaaatttttcttat

SEQ ID NO: 351304 - DNA, 359 bp, Zea mays
ctggaccacacccgcctcaacatcaacacgtattgagctgttgaccttaaggggggggagggagagtcctttactgtagcgcactacaccctcttagaccttaatcaaactgcgaactatctggacattaatgggctaccgaacctgcgccgccatatcatatatacgggatatataggggatctttagaggaggtctgctaaaacaacatgaggaacgactagatcatacttctcaagctagtttaacgacaaaccattgcctgctgctacataaagcaaagggcagggaagtttatcttctatatacaagaaactgattgagactagatgactgtacttcatgagtattgggctaaa

SEQ ID NO: 351305 - DNA, 348 bp, Zea mays
  unsure (1)..(348): unsure at all n locations
nacaggcattactatactanacattaatattatttccacctaatgtaacaatccggtagggtaataccaggtgggcattcttccttcaattctcttacttttttctatattaaaatataactcatttataactttacccctgtccccactgacatcactctcataaagggcttaatgatgtggaatgatgctctatacttctcttcttcataccatttacttgctcttggcagatggccatcattaaactaatcctctctgggtggttttgcttttttctgtttttgtcaagaccagctttaattatcctctatgtagattacccctttaccctttaatcaaaccttt

SEQ ID NO: 351306 - DNA, 277 bp, Zea mays
cgctcggattcctgctcgctttctcctcccacaattccatcgcccgccgcgcctattccattcctttttcccttgctcgcccacccgcccaagaggactctccttcgcgcttctaccccagatcgtacttcgagcttcatagccagccgtacccgagagaggatgagaggatcctacctgcctggtaccctcgctcgggagccggccagaatcacgcccagccaccgtacccctccctggacatgtgcgtggacgggcttgactaccacccaacaag

SEQ ID NO: 351307 - DNA, 414 bp, Zea mays
cccactcttccggcaacataaagacatgcctttggttgattaaaaagagcagattcacctttctttttttaaaaaaaaaaaacacaatacaacaactaacacatacatactctttacttacttataccaatgctttgttgaaaaacaaacaataacaagacccccccctttaaaaattccaatttttcttccccctttcttcaaagtaataattcttttttaaccccccctaaattcaattcactcccccttcttaaacaactcctgacctgaaaaacccccttccttccccaatttataccccttccaaaaaattccctttttaccccatgcctataattacccaaaaacccccccccttttccccttcttccaacattttcccccccctctatttcctatttttcccccccc

SEQ ID NO: 351308 - DNA, 66 bp, Zea mays
gtcttatcagcatctgggactgggagtcgacgccacgattctcatctgcggggggagtttctattt

SEQ ID NO: 351309 - DNA, 461 bp, Zea mays
  unsure (1)..(461): unsure at all n locations
tcgcaccactctacagtagtagcaagagggatagagcaaggccttcttttttctttnttgggggtttattttatttttggtttttatttttttttttgttttttaattgtttttctctttattttttattttattataattttaattgagtactatataatttattaatattttttttttttaaaaattattttgtttttaaatttgttttaatttattttttttatattatatttatttaatttgttatattaattaattattattttttttattataatttttttattaatttttttatattttatattttattttataaaatatttattattttttttaatttatataatatttttattaaatttattattttatatttaaattaattattttatataatatttaattattatatatttatattattttttaataaaattttaatttaatttttattt

SEQ ID NO: 351310 - DNA, 404 bp, Zea mays
tccgtccgattcggtcgcccacgcgtcgtaaattttttatttcaacagtaatggtggaagattcaactgggggggatccataacttttgcatctgttgacaacacccttaaaaatggcacttgaatttgctgatattagtctgtgtggatgtattcctaccacacaatcttgttgatattgtttattccgtgtgcctaaactacaggtgccggtctactactactatccttttctgctctttagatccaccagctcttcaatgatctagatggaatatcagtagaccccagggttttgaggctgttatgcgtgtaagtgcagtcaggtctcaagttaagactattatggcaatttctgaagcgtgttccaccgattgatcttcagcgattgatttgacaaactg

SEQ ID NO: 351311 - DNA, 291 bp, Zea mays
aaacaaactgtccggaagccaaataccagcaatagagagcattgcgcttcgactgagggagacatacataacacatgggaggtagtagatatgacaccaatggccacagaccaaggtgtgcaacggatggttcgaaggcaacttaattaccaccaacgcgactgtctgcacatctgtcgccttaagcttactggccgagatcctatccaatcgacctcgccggcgtgacaagcttgtgactgggctggactttcctaggcacactatctttaaccgtgcctacaagaaaac

SEQ ID NO: 351312 - DNA, 443 bp, Zea mays
gttctataacatgatttggatgtgcttcctcaacatgatatgaaagagattgctgaatgtatatatgtggaagccatacctattcttctgcaaaatcatacaagcaacttgttggtaactttctaactcatttagtttcagttggatgtgggcatccaaatggcaaccaaagcacatatgttttttgattgttgcttaatgatcgactcaaaaccaaaatgttcttaggagaaaattatgcaactagagtcatacacatgtgaaaatattgtattctccaaatagaggaaacaatggtgcacctatttgtaaaatgtaattttgctaaagcatgttgggattcaattaggctctttcctccatgaacaagttgcccacaaagagcaatcaatagacttaggatacaactagaagtgtcatgtgacatgaagggtgtggagtat

SEQ ID NO: 351313 - DNA, 440 bp, Zea mays
cccacgcgtccgcccacgcgtccggttagtaccatgccaactgaatgtaagatagaagtaagctatggtgccagattgaaaggcaccccctcctcagtcctccgaggatttgagatagctatcttcaaatgtccctaaattggaggataatcagacttgtaaggtctatcaccatcatgatagcaaccctgtttatgggaagaggtcatcattcgatatctttaagcgaagcagccaggtgtgtgtacaagtgtagaggagatcctcattacgctatgaatccttaaggcttaacaataaatattacataaaataagaggactaatttttgtagagggcctctttgactagattgcttattattcttaatgcattgtccaaatgaattttagattcaattgttgtgtatcccttgtcgaaacaaccaaaaataacatatg

SEQ ID NO: 351314 - DNA, 289 bp, Zea mays
tcggcgggtggtcaggggtggacccaacccgaaccccggcttcaacaacaagtattaaaggcgggcggctaacccaggcaaaattccctggtccggccgagggattcaccttcaaaggagcgttggtcttcacatcgacttttttgggacacttaaaccgatctggaaggcgggctgttgtgtctattaaccgagagccaagcattgaggcggagcaaacacgtagccgcacgactgacacaagcgcaggggcaacatttcagagggctggagctccgcggtggagcct

SEQ ID NO: 351315 - DNA, 280 bp, Zea mays
  unsure (1)..(280): unsure at all n locations
cggaaacccgggggcgcgagcgccganncgcaagcngaganncnncgccgcccgagcaaaacagcaccggcggggggaccagagggaagcaggnacgaaggcgagagccacacaaccagagaccagagagccacgcgaagaagcccgccgggccacccggcgagggggagcaacaaagaagcaaagaacncgagcgcgagcggcgacccgacagcgaaaaggaaagaggccggaaagacaggagcacagcgcacagaagaaaagccggagagncaaaaag

SEQ ID NO: 351316 - DNA, 301 bp, Zea mays
ggggtcatgggccacaacacgccaccaccggtcataccagcaccaggagcttatgcaggggagggagcttatgcaggggagggagcttatgcaggagaggatccaaccccgttacacgacttcgtcgaccagttattggcttctggaggtagtggacacaactccaacgaccccaatgtgtgattaagttagctttgtgtcgcactgtgttgtaatgaactattttgtggactttatgtttgtatggactatttgcggactttatatttgtatggactcaagttttaggttgtgaactcaa

SEQ ID NO: 351317 - DNA, 286 bp, Zea mays
cttgtgagtagcatgatctcacagggtggcacagacagctttattactctctctccggttgagaaccaagatggagatctggttacaaacaatcagtggctgacatttcatacactgtttccaaggatagcatggtcctcgctagacctctttgagcagagggacgtcattaaagagctcacactgcgaactaagcgcaacagatcactaatagcatggataggtgagagaccgtattcaatctttcagatgattgctgtagcgtgcaaaccatgagctagaaaac

SEQ ID NO: 351318 - DNA, 407 bp, Zea mays
cccacgcgtgcgagctcgcgtctgcgagggctcttacaaggggctccgcaagccctgtgggtgaatgagaatagtggtgtccaaacaactaatggacacctgattgtactactccttgtaggagcccggctaggtgatggagttgctgttgcggattgacgagggtgagcgcctctccacggcctgtcccaagtgcgtgtccaatctacgaggacagatgaccatcgcactgggagtaacaatacagtatatatgctcaatatataatgacttatactgagggcgatggatgaattacaggaatagggccagcctcgagtgagacaggaatgaatgacgggctaccgcactctttacataatcttaccacagctaaggtgagaccagagctctgtgagctgtgcact

SEQ ID NO: 351319 - DNA, 361 bp, Zea mays
gtgtttaaatcgatgacggtgagacagacagtcaccctgtaccaagaggacatgaaggttcgaatgcggttgcgcgccatcaaagaccacatcagtcaggaccggtacgagcgaccacaagagcgcgaccttatgatactgaccttcaatcctgaatagacgtacagacactcacacgacgcccacatattggacaacatgatcgagggctggtgactacaccgcgaaaacaccggcagtgtgctgacctggatgttcatggtcctcgacgaccacaccgagtttctaaaggaccgaaccgagggcgtcaaggcatgctaacccgacttgatcaccaaggccaacagttatgttcatggcg

SEQ ID NO: 351320 - DNA, 425 bp, Zea mays
cccacgcgtccggtcaccggcaatctcagcttcaacaccacggcgccgccaacggatgcgcagccaaacggcgagtccccgcggcctcgtcctacgcctggcgcacctgctggtgctgggggtaaaaatagtgcaggggggatccctgggagtgggaagaaggcctcatcagctgtgttgctgggcacaaccattccagtggcggtgagcgtggtcgccctggtctccgtgggcgccgtgttcttgtgcaagagaagagcgtcggtgccgccgcaggcagcctccgtggtggtgcatccccgtaatagctctgatccggacaacctggccaagatcgtggtggccaccaacgacggcagcagcagcggcacgtcccatagccacgggagcagcagcagccaggctggcgacgtgcacatggtcga

SEQ ID NO: 351321 - DNA, 359 bp, Zea mays
agacgaatgagtgcactgtgcaggcagtgcctgacctatcacatacagcctgaagaatggccttcgacccttgctgcttcagcggcaccgcaccagctgtgggcttgggggggtcaccgccaagcggtgccggcgcgagacaggctggaggggcaggtggagcttgagactggcgctttcttcggcatgcgacgctacttctggctcaacctgccgcgcgccggctgccgcgtttgcgccaacgtccgccgcgccgatcgcgtccagtcgctctgcgactagaacaactcttgcgatgcctgcagagccccccgcgcggtggatatgacggtcgacatcgccatccgtgggttgtgcct

SEQ ID NO: 351322 - DNA, 236 bp, Zea mays
aaaaaaaaaaaaaaaaaaaaaaaaaaaaaaaaaaaaaaaaaaaaaaaaaaaaaaaaaaaaggggcttccaaaaaaaaagagaaccacgcttacatacacaaacatacaaaaaacatgcctcttttttgtggtaacctaattctacttccctggccgtcaatttacaacctcttccctgggaaaaccctgtcctgacctatcttattttttttgcacaacatccccttttctccccc

SEQ ID NO: 351323 - DNA, 267 bp, Zea mays
aaaaaaagttgtcgcgttgtaaaatttaattttaaaaatttcaaatggaacaatatctgtgattcgatttgtagattcgtgagcacgctcgtcgtagcggagcacgaaggcgggttcgtcaagccgtcgtcgctgaaaaaaaccatgtttttgggtttccaaaggaaaaatcaaaaaaaagggaggcatgttgttgtttaaatgaaaagtagggaaaaattttttaaaagggggttttttcaaaaactaatggttaaaaaagggaaa

SEQ ID NO: 351324 - DNA, 151 bp, Zea mays
caaatcaacccttagtggtccgaaaggtggtccggtggcctggcccccacgcccagcatggtgcccggtgcggccttggtcagcgcgaggcgcatcctcttctcttctcttgcgttgttgcccgttcacttgtctttcgtttcttgttttt

SEQ ID NO: 351325 - DNA, 376 bp, Zea mays
cggacgcgtgggcggcggcgcgccctcctgcaggaaaaaaaaatagaagacgatgctgccccgcttgccaatccgcctcgcgccgccgctcgccggcgtccttcgcggcatctgcgctaccgcgctgccgcaatccaagcccccacctcaacccctctccccgtccgacctggacgcgatctccgcgctcctcccgcgtctcctctacgcgggccacgtccccgccgccggccgccttctctccgcggcgctcctcctcccgggctcccaggacggccttcccctcaattccctcgccgcgtaccttgcctcgcttccgaccctctccgctgccttcgcgctcctcaccgcgctgcgccatcacccggcccggccc

SEQ ID NO: 351326 - DNA, 96 bp, Zea mays
tttcccgtgaggaaaatgtgtacatggcgaaacttgccgagcaggcggagaggtacgaggagatggttgagttcatggagaaggtagccaagactg

SEQ ID NO: 351327 - DNA, 454 bp, Zea mays
cccacgcgtccgcgcatgcacccaggaactgccacacgcatgcaggaaatcgaccatggcacacatgcagcaaacggctagggaggccttgccgaggatgcacggacgggttgccggagggccggagggggctagtggcgcatagaggcgggctggccgcacctggccctggttccaagctacaagagcggaggacactacgagctgcccatacctgaactaggaaacgacgacgttgtcagcgccagattgctcggtgtcgaagtccccctggcaacgaacaggccgtgcccgcagaacccttcgcgtagatcctccactatctctctcccatgctggttgcaggcgtagcagcgactcccgaggttcggtgaagcacccaggtcggcaccgagacgaggacatgggcccacagcggcggccgtcagctttcttccccgcggcgatgtagatc

SEQ ID NO: 351328 - DNA, 387 bp, Zea mays
cccacgcgtccgcccacgcgtccgcccacgcgtccgttctcctccccctccggttcgggttcgggttcgtgaggttctccggggttcggtttcgtgggtgagcggatcgagatggcggcgtcggatgttgagtaccgctgcttcgtcggcggcctcgcctgggccacggacgaccactccctccacaacgccttcagcacctacggcgaggtcctcgagtccaagatcatcctcgatcgggagacgcagaggtcccgcggcttcggcttcgtcaccttctccacggaggaggcgatgcggaacgccatcgagggcatgaacggcaaggagctggacggccgcaacatcaccgtcaacgaggcccaatcccgcggcggccgtggaggc

SEQ ID NO: 351329 - DNA, 239 bp, Zea mays
cagcaaaaaacaaaggatcaaatcaacggaccacccaaacgaacggggttcaatccagaggggggaatccaacaggggcttcagcacctaaaggacccgaagcataaaggccctaccattattggggggggcgccccgccaaatttaaattttcaggcaaggaaggggctgcacatgaaaccaaccgagggcggcctcatcccaactttgaaataggagggctggggggcctccatttt

SEQ ID NO: 351330 - DNA, 281 bp, Zea mays
cacatgcgttcggcccccgtgaatacacatgcagtccaactgcctagcgggcgagagtgtgcacatgagcacgagcagtgttgctctcgctcaccaacgtgtggatgaacatcgaccacacattatatgttgcacgtacgtgcattcgttgccgcatcgtgcgctaatatgacgcctggctcggaactacctcgatgttaattaattatacttacttaacaaacagcacaatagcgtagcacacctattgcaaatcaatggtggatattatccatatttaa

SEQ ID NO: 351331 - DNA, 319 bp, Zea mays
ctgacgcatgagctcacggcggaccattttatcgactaccagatcgacgggtccaagggggtcttcaatatcttctgcaacgacctaaactagttcttcacgaccaacttgctgtacactgtcatgcacttgcttttgaaaaagtatacagaggctcagctcgacgacaaaatcaacgaggtagatgctgatgtaaacgacatcattgatgtgcgagataacattaatcttatggctacgaagaataaggtcaccgtctctgacgaatagctcatggatgccttccgtatgtttaacaactaccaatacggattcattt

SEQ ID NO: 351332 - DNA, 429 bp, Zea mays
caaaaataggaggccggaggcgggcgaggaacgtgaataaaatatcattcggagaaacaagagaggccggggaatcgcgtcggaattccggcgaatcggcgggatccggccgggatctgcgcgccggatgaggggtcggcaccatgaaatggtccacattactcagtaaggtcgtcttcgccggcggccagcagcagcagccgccacctccgccgtcgccgccgccggagtctccgttccacggccagcaggtggtccaggacctctccaccccgaggctcagctccgcctccaccggcggtgacgagggcggcttcgacgcggcggccgggagctcgccctctgccgctgcgtcctctgccagggggagaaatgaattggagtcgaactttaggagattatgggaagaatttcgctcttccagctctg

SEQ ID NO: 351333 - DNA, 298 bp, Zea mays
gaggaatcataaaagcatatggaggaactatgtataggctacaaagatgcatatgaagcatggtatagcaaaagccaagtgttctgatgattttgtttttttaattgggttttctgttattggttcagcatgctcatatattgccccagcaacaagtcgatgaagaatgccttactcttctacggcgagatcctaatatacatagtcatttggggccgcgggtctaggggatccaagcttactttcctgtgcttgcgacgtcttagtttttttattgcgtcacctaaatcaaattcat

SEQ ID NO: 351334 - DNA, 398 bp, Zea mays
cccacgcgtccggttgatttaggctgtttccctgtgcttctagtagcaagagtttttattcatagtattcctgtatggccaaactcaatgcaacaaactgaataaattacaagtgatgctgtttcgtcttgcatagattttgtatgttctgaaatgcatgggtactgaattacccccacagatatctctgttttggtctatgatgttatgttctcttgaaccagggttgtcgaaatggcagatcttgtccatactctcatgattctggctcattggtctctgcacctgtcacatctggaatatgctctcaagaaagcaaaagcacctcattgtgcgatacaaggttgcttcctgctgatggagattggcatattcttgtcgtgaatgacaaaaccctg

SEQ ID NO: 351335 - DNA, 444 bp, Zea mays
cccacgcgtccgtgggcaatctctaacccaaaatattgcatcagatattattgaaatgggatgcatggggaaagaaaatagcacgtaccaaatcctttcttgaaccttcaacaacaaatccactcctctgcattcaatctattgctaatctttcagtcatcacactggttggacagtgtgttggtgtgtgtgcatcatgttccttctcacgaaggtcctgtttagtggtagtgcctgcatgttccactggatgattttcttgttttatcgagcatgacgcacttgatccttgcttgcatttctcatcaggtgctgggtgaatagatccctgtcgttctctatagacacgcgttctttcctatgtgcagtttatgtgcacatattatggctagcgcaagtgaagcctattatcaaattgccaaagtggttgcagagcggttacat

SEQ ID NO: 351336 - DNA, 376 bp, Zea mays
tgtatatccatgctactctaatctttctgcctatatgacagcatttttcatttccatcaactgctcttgtctgattaggctccatttgttgtctctttattgatttttggttgcaaaatagacagccttggatattatactgataagagtgtagaggtcacaattgtttcaagtttcaaccatagttgtacatgtcagaatcatctgttaattttgttcttgaatcttgacacgcttagaaaaattcaaggcatgcataaagcaaaacatctttgtgagtttgatcgttccattaacattcactaacaagtcatatttatatttaaatctttttccttgaagccagtccaactttcaacttcttggaatcattttt

SEQ ID NO: 351337 - DNA, 372 bp, Zea mays
gttgatgcgttttgcatttacctataccgttgctaatgggggagtatatagcctatggaaaaaaaaaaaaaagaaaaaaaaaaaaaaaaaaaaaaaaaaagggaaataataaaaaaaaaaaggacaggggggggccaaggtagagaaagcatttttaaaacagcgtggaaggggacgtagacaatgtgatatggggtcaactaaatgaaatttaatggcggtagatttacaaggaggtgactgaaaaaaaccgggggagcctaaaagaaatgggaggggattaaaagcaactttggccaggtggcataataaaaaaaaggccctcacaggccgaccatcaaaaaagttatataaactgaaggagggaatggg

SEQ ID NO: 351338 - DNA, 362 bp, Zea mays
ctcactcgtgcgggacgccgacgtcgaacatgccgaaggagcgcccagagtgagattggtcaagcaggtaattgaagctctatgagcacggggctaagttcttaaggctaacacctattccgaaaattgagaccgccttgaaacgcataccattgttctattgctgggctcatgttgagcaactgacaataccatagattcgctctacttatgccctgtttactgcaacacgcctcttatattcgatcacgagcgcaatgaatgctatgctgacctctgcactcattctgttacctcgtgtcttgagtggcttaaggaagaacgagccgctgcgtttcttactatgcgcacgcctcaagcag

SEQ ID NO: 351339 - DNA, 440 bp, Zea mays
attaggaatagcaccctgagtactagaatgtactcagctagactgacccgtccaaaactaggaaataagaaagtaaaagactccaacgattatgcaaagctatatcaggagttggctctttactttataagggtaacgagagttaatgaaattgttagcaacttaaagggttaccaagttcattataccatttttagcagatcagtatttgtacctattccgctgcagaactagatttgcatctgattctctaagtactcatcttcagttttactataagcctagttgtagctgtaatgaagaatcaagttaaggaagattgttcataattatcacatcaagattaacccatcccctgaccatagttgggagcaacatcatttcttattcctatcatcaagcttatagaaagtgtagttattaatatgatgagataactc

SEQ ID NO: 351340 - DNA, 372 bp, Zea mays
cggacgcgtgggcggacgcgtgggcttctcctccccctcttaccaagtcctcttcgggttagggttacttagggttttgtggaggggcgatggcggcggctgatgtggagtaccgttgcttcgtcggcgggcttgcctgggccaccagcaacgagtcgctggagaatgccttcgccttctacggcgagatcctcgactccaaggtcatcaccgaccgggagacggggaggtctcgcggcttcggcttcgttaccttctcctccgagaactccatgctcgacgctattgagaacatgaacggcaaggagctcgacgggcgttacatcaccgtttaccaggcccagttccgtggcggtggcggtggcggtggtt

SEQ ID NO: 351341 - DNA, 326 bp, Zea mays
gcgcaggctgaagaaccagtacagggcaatctctgctgcggccctggggcaagtgggcggccgggatcagagacccctgcaagggcgtccacttctggctcgccacatacaggacggttcattttggacgccgacggccggaggcacacggtcgcggtactcgtgagatgaaagccaacctaagtgctcgacacgatgctgcggcccaaagtgctcaaaatccaccttttgaatctactacatctgatatcaccatcgcatacaggctagctcctccaccttcaccacctaatttccgtgctgacgaggttgtcggtaacatggac

SEQ ID NO: 351342 - DNA, 416 bp, Zea mays
cggacgcgtggggcgtcatgaaggccgccgacgcgctcggcttccccgcctgcgtcaggtcctgcctcgactacctggaggccgtcccgtgggccggggaggaggaggagcgccgcgtcgtgtcctcggtccgccgtctacagtgcacggacggcgccggagtcagcccgctgctgaggagggtcgcctcctccgactccggctgtctgagaccgcccgccgacacgttcgcgcacataacggagatggtgctggcgagcaccgacgagcggggccggcgcgagacgaaagccctggtcttgagcctcctgaaagacagcactcgcggccacgtctgcggcggcggcggcgccgacggatcaccaccaacaccgggcatcttctcttacgagacgctgtacagctcgtgccggggc

SEQ ID NO: 351343 - DNA, 328 bp, Zea mays
atactgagcactatgctgtgaaacgaaacaagggagagacatgcatattactaacagggacttcagcgataacaccatacatggtgcagaaacaacaggcacgagactgacacacgcacctataacaataagaaacacatcaagaagagtctgggctgtctcaagaggagccttagtaactctaatatgcaactactacccaaaggtgcgatgctttcaacacatgaggagctaaaagaagtgactaataaccactgttatctaataactggacgtacttgatgtaaagcttacagaggaacactccaggaccatacagaggacgcgg

SEQ ID NO: 351344 - DNA, 302 bp, Zea mays
atagatccttaatgtatctgttagtcgtttcgtttgataccaaatttataggagggcggttaaatttggtagtttgctgggtattccgtcgcgagaactcaaatctctctctctctctctctctctctctgtatatattgaatattatgagtcatgtgctttcaataactaaagaaagttcaggtcagacagtgtcatccagtcgagccagaccaggtccgggcgtttataaaagaagacccggagtgctagagttcagtttttgacaccccacccctattcacgagccacagcgccaccaa

SEQ ID NO: 351345 - DNA, 128 bp, Zea mays
cccacgcgtccgtttcgcgtttagaacctctaaaatttcccccactcgccagtcgcagcagcacctgtagccatggacgccagcggagccggtagcaaggggaagaagggtgcggccgggcgcaaggc

SEQ ID NO: 351346 - DNA, 372 bp, Zea mays
gtaaggcatactgaaccgctgttttcgtacgcaagctcgacttgagtattgtaaggagggcggtgttcatgtctgatccagttcaaatgaagtggcaggaaccattccagagatgaatggaggcgatcatcatattacctcgaagctcttttcatgtttagtgaaggtctatgacatgtctgatcgtcaaatgaagctaaatgattctatttcaagccctgttgttgaggaaaaggataatctcaccaaaggcatgaccctatatccttcggtcctgctgaaaggacgctggtttattggctagcaaatgtcttttctatcacacaagcaccctaaaacatattcctaaaagcaaatggattttgaattata

SEQ ID NO: 351347 - DNA, 154 bp, Zea mays
  unsure (1)..(154): unsure at all n locations
cccagcgtncgngaaagggattgtcaggaggacttggaagcagtcattacatgaagactttatgtcgacaattccttaaggtagcaagccaacactgttggaccatacacacttggacctcctttgcgcgtctgacgctgtaacaaactatgtt

SEQ ID NO: 351348 - DNA, 108 bp, Zea mays
ccaaaatattttactgagaacacatccaaacaaaaaacagtgctggtgtcctttttgcatgcatgccttttgggactggacatgggaccaggttggtgactatgatct

SEQ ID NO: 351349 - DNA, 113 bp, Zea mays
cttttgtttttatcttcggagatcttttattagcgctatgacaactggacaagtgggggtttgtttgtgctgcagatgctggtgttctaggatgcatttgattaatagacctg

SEQ ID NO: 351350 - DNA, 70 bp, Zea mays
  unsure (1)..(70): unsure at all n locations
gcaaacactgcatcagaccctaacagctgtcgctgctaaaccagccttcactggagagngttcacatact

SEQ ID NO: 351351 - DNA, 64 bp, Zea mays
cgaaggggctattgtattactattattatatgttcgtcgatttgattgctataaattgagtgat

SEQ ID NO: 351352 - DNA, 51 bp, Zea mays
aacacaacatcaactcctcttaccgttattatcacaccacttctcacaccc

SEQ ID NO: 351353 - DNA, 177 bp, Zea mays
taccgtccgattcccgtcgcccacgcgtcgcccaccgtcgcccaccgtcgcggaccgtggggtctaggttaggctagggtgcgaccagctagcggaaatgggccttcagtccatcagtaccaggtgggggcgcgcgctgcaccccgcatacaccagactaccgatgaagcttgccac

SEQ ID NO: 351354 - DNA, 463 bp, Zea mays
cttccattcacttcttagcggcagcgttcaacgagagcaacgaagtattcaagccgaaaacaatgtattttgtgcggaataacttttcattaccttatctttcagttcacttgttttttattttaattttttttttatttatttattttttcttttttttatattactttttatataaatttttttctttttattttttttattatttttctttttatttcttttttttttatttttttatacttttttattttttttatttatttttttttttatattatttgttattggtgtgtgtttttctattctttttatattttttctttatttttttatttttttatttagtttatttattttttcctttatatttttttttttatctttttatcttattctcttttttttttttttttttatatattattatattttttttattattattttttattcttttttt

SEQ ID NO: 351355 - DNA, 259 bp, Zea mays
ccctacccctagcccacactctctcttctatctttttccctctcacgcacaacgcgcgtgtctcctctgttcagggcgcacactgtttcaagcattgatcctatcttcaagctccaattgcggtccaactcctttcctgctccatgtgcgcatttacctgttcttcctgttcatggcgccacactcccttctcttcacctttacctactgcccttcttcttcactgctttcatttcatacaatcctttattcttattta

SEQ ID NO: 351356 - DNA, 285 bp, Zea mays
ggccaaatcaaatgatgcataatttttaataatgtagagcaagttaggaacatgtgcgcgtgtacagatacgatgggcaaaatcaataatcgaaattcggagatccgtagaacccatcgaatatcacatagataagaacgtttcacataaagaactgcatatagaggggaaaaagcagtgcaaattgcaaaaaatgcaagatatggattctactgcactaaatactattggtggagggctggaggctacaaaggttgagaggatatctattaaagattacaacat

SEQ ID NO: 351357 - DNA, 354 bp, Zea mays
ctcgtcggagcaactaggactagcgcggccaggccgccataggccaccgcggtgatgaagtgcagcactctcgctaccttacgagctagtcgggcacgtgcagttgcagcgaaaatgggcgaggtccgcgtgctaaggcagggggtgtctgcatggagctccggcgaggttgcgccgaacggtgatgagttcacgaaccgatagaggccggtgatgagttcgctcgggctccggcgacctgcaatggggaggtcggaaatgtggtcttccggcgctcgagcaggagtggtgggaccgtggtatcagatattcgagaaaatggtacattggctcaaaaatatcttggataggaac

SEQ ID NO: 351358 - DNA, 290 bp, Zea mays
gaagaactgaatggagctcctagtggtgatgctacggctgatggcagtgtcgggagagatgtctaaaccatgcacctgtacttgaagatgccttttaagtctgggagtgtgggtttctactaccaaagtacaagggttggtgcatgcagagtttatctgtagctacatttagtaggctggggggggagtattaccgttgcaaggtgcaacccatgggtggaggttaggtaacaggacacttcatattggtgggtgggtgggtcaattctgggaggttgggcgtattactt

SEQ ID NO: 351359 - DNA, 359 bp, Zea mays
  unsure (1)..(359): unsure at all n locations
ccttgaaagatccgccacgccatcgtcctcaatccgacggggacgagcgcacgtcccgcgggctcatcctctcgcgtgcggccgtgccatcatcgcctttctgttcgtgttcggggcttcgggccgcccgtcgctatcgcccgccgcccggaccggggaacaccacgctccacgcacacagaagccgtacaggaaaatccggatttccggcttctgcatcgcgtgtgcgccacgacggcgtgcgggtgcggcggcggtaggcaagccggccgtgggcggatcggatgcgtgctgcactggtgttgttgttgnncgcgcggcgccgccggttgtcgacgtggggggcagggggcgacttg

SEQ ID NO: 351360 - DNA, 281 bp, Zea mays
tatgaacccctattgcatgaaaaaaattccgggatctagcttgttactgacaaggctggttttttacctacactaacttgaaagtaaagcatgcacggatccacgttctagatttttatgtgattccactatcacaattagcgttcttaagggcacccgcaaccgtgagatagtgtttggtcccagagctaggtgagatggagcgagctgactctatgtcaggagtagctctatccataagattttagggagctggataagacataattttcctttttaaa

SEQ ID NO: 351361 - DNA, 100 bp, Zea mays
cacgcgtccgtttttcttgctgaacattcatttcccgccagactaccctttcaagggtgggaaatgtatcttttaagaccaaggtcttccatccaaacat

SEQ ID NO: 351362 - DNA, 57 bp, Zea mays
gtttgcttaattcgattcatatgagccagcatttactgtctcataattatcccacca

SEQ ID NO: 351363 - DNA, 327 bp, Zea mays
ttttttttttggggggttttttttttttttttttttttttttttttttttttttttttttttttttttttttttttttttttggaaaaaaaacattcttttttttttcaacccttttttttgtgccctcccccaacccagttttttaaaaaaaaaagcgtttttgggggcccccccctaaaaataaaaaataatattttttttccaggggaataaagggggtgggggtcccccttccaaacccgggggggggtttatttttttgtcccaaatttatattcccccccgtaatagggggaaaacgggcccccccctggttttgtttgcc

SEQ ID NO: 351364 - DNA, 293 bp, Zea mays
cactcgtagagagaaggaaaaatatccccaaaccctagctcccgatctcgatggcgagaccctcgcgtcttcttcgacatgaccgtcggcggcgccccggcgggccggatcgtgatggagctgtacgccaacgaggtgcccaagaccgcggagaacttccgcgcgctgtgcacgggcgagaagggcgtgggcaagtccgggaagccgctccactacaagggctccaccttccaccgcgtcatccccgagttcatgtgccagggcggcgacttcacccgcggcaacggcaccgg

SEQ ID NO: 351365 - DNA, 93 bp, Zea mays
ctcgagttctcctcaaccaaattcaaagtcacagcggcgaaactctcggcgatgtctggccgcggcaagggcgggaagggtctgggcaagggc

SEQ ID NO: 351366 - DNA, 230 bp, Zea mays
cggactcgtgggcggacgcttgggcgtactcgtggggcgcgattagttgctcggggtggaagtaaagtgtatagaaatgatactggtcacccatttactatacctataggatgatatggcatttgtctatctgtgttgcgcttcactatatttgattgtatcagtagttccttttgtgttttttgttccactatagttcaccttgatgttagttcaaatatatttttaac

SEQ ID NO: 351367 - DNA, 272 bp, Zea mays
cctaagggtgcggccacgcgtgcgattgcagtccgacattcaagatcagttgtggggagccggcaatggcgacgaatctaaccgaactagccaccatgcgtggagtccgtacgcaagatacgctaacaagaccctgagtcacgggactgataagtacctccttcgtatgacccgtcaattccacacgaacacgaaagtgctgatagaggagtggcttctgccatatgagcgactgcatatcaaggatggcaggtataccacacatatgatgc

SEQ ID NO: 351368 - DNA, 301 bp, Zea mays
caaaaaggtcaaggctaagtcattccagctaggagacctgatatggaagaccatcttgccagttgccactgaggagcagagaccgaaaaatttaggaaatggccaccaaactggaaaggtccttacaagatcacgcagatacatgttgcaaacattacaaggtgatgacttgcccaaggcactgaacatgtgtttcctgaagcaatatcatcctagtatgtggtaagatgctaaaaactgatatggtcacactaagttgattctagcctacgccaatttgtcgtctctgtgcacgcacgga

SEQ ID NO: 351369 - DNA, 351 bp, Zea mays
cgaatccctcgcatcgcattcgcagcctttgctgcatcacaccaccgcgaaaccccagcagccgcatcgatggcgcccaaggcggagaagaagccggctgcgaagaagccagcggaggaggagcccgctgccgcgaaggccccggcggggaagaagcccaaggccgagaagcgcctcccggcggccaagtcgtccggcaaagaaggcggcgacaagaagggtaagaagaaggcgaagaagtcggtggagacctacaagatctacatcttcaaggtgctgaagcaggtccaccccgacatcggcatctcttccaaggccatgtccatcatgaactccttcatcaacgacatc

SEQ ID NO: 351370 - DNA, 306 bp, Zea mays
gcagaacgacttcaggaggaattcaaggcgttggcttcacatgtatatcttgcttgcagggcaaacgaacaacagcttgtgcatgcaagaaaagaggctgcggagctgcatctgcataagagccagatagaagagttacttcagaaggcccaaggagatctcggatcagtgcaggatcagcacctggtgaaggtccagcagctaataaccctagaggatttcaagtcaaaggagatagacagtgctactgaaggagctcaaatgcatgagtgatgagtgccataaccaaaaaagatgtggtgaggc

SEQ ID NO: 351371 - DNA, 306 bp, Zea mays
gcatgtatggtttgtggcacttctgtaagtggagttaagtcatcccctgcagtggatgcgacatacagatacatgggactcaccgagcgtgttttagatctgagatgccagttgatggtggtctgccgtggagctgaggcaatagtcagatgctcaccatgtatgcacaccatcgcttgccggggttgcttccttgcctcagtgacactactgaaatcctgcaccacctgtggctgcatggttgaacacttcaagatcgtttgacaagacttatctcccaatacacagtagtattactaaacaatc

SEQ ID NO: 351372 - DNA, 339 bp, Zea mays
cccacgcgtccgaacgctgaaggatattactgtagctgtgatcgagaatcgcctttggtgatgattgaatagctgagctgggcatgggaacgctgaaagatactgtttagcattgcgcaataggagccatcgtttataccatgcactaaattctggtacttttgtagttataccttctatctactgggattaacaaaaggtgggtttagaaaaaaaaaaaaaaaaaaaaaaaaaaaaaaaaaaataaaaacaaaaataaaaagggtccatatattagctattacaaaactatacaatattgtttggggcggccgttttaatggatccatagtttactga

SEQ ID NO: 351373 - DNA, 389 bp, Zea mays
cttgcacatcccccgcttccttcttggttgtttctccccttctgatccgtgctagccaggttgcgttgttgtggctgcttgtcgccagatctacctatccaccgtaccacagtcgtccacagcgcgcgctaacgatggcggtcgccgccgccgctcgccttcttcttcttcgcctcgtcgtcctcgcgctcctcgcagccgcacagcaggtcgtcgggaagagcgccgtgctgtctctgcgggagttggatggacgacgacggagtgccgcgacgacggatacccggagcagccgctactacgtcgacgcaatgcttgctgaaacgctaggggagcacaagaaagctggggcagcaacaagcgtgctagagctcaagcgccactccctc

SEQ ID NO: 351374 - DNA, 308 bp, Zea mays
cggacgcgtgggcaggaacaaaggattcgtaatgcgctcggctacagggcgtcatgacagcagctccccaagcgatgcaagccgcctattcgacgaaatgtgtgagaagcaaaatgaacatgcccgcgtgttaggtcctttatgtgacccaaataactgaatttcagctaagcaccagatctaatatctctaattcttcgagcttccatgggtgaggcaattaacacttactccaatttgttcttccttcatggtgctacttaattcaacatgttcttcgttgcaatgattataggtacactttggtt

SEQ ID NO: 351375 - DNA, 235 bp, Zea mays
tcttcctgaagagcgtctagtctcataagagagcccaaagctacatgtgctcgatggtagaaaacatggataataactagccgaccgtgtgcgccaagtacagggagggcgtggacaaagccaggctcatgctccgagccctaattgacaaggagagcagcgccccgataatgctgcgactgatgtagatctccaagatatcggtcgtcgtagaggaaaggaccggcatgacatt

SEQ ID NO: 351376 - DNA, 368 bp, Zea mays
cccacgcgtccggccaattactaactaaactttgttatcccttccaaaggtttagaatattaggtcagatcatacgcttatatgtataataagtcaatagcacgtgcaaggagcagctgtaaggtatgcgcttgtggacactacttgtttgcgtcactccaaagtaaattatgtgagatagtaatctagggaagtttgttatcatctgtgatatgctagagcttggacatcttcatgtcagctggccagcgagcttataattccattctgttgaattgagtgaatagctagctggttgcaccatctatttattggcaccaatttaatggccaccttatagtccacttgcatagacaggttgggctttc

SEQ ID NO: 351377 - DNA, 443 bp, Zea mays
cgagccgcgaccccgggcaggtttccccatggacggggcatccgaccgcgacgacctcccgccgccaccgcgacgaatctctggcctcccactgccgccgcgacgtccagctttgctctactccaaggtccagctctggcttgccgtcctccgcccgtactccacgctactggatctctagcttgctcgtacgggatctctacgggatctttgtactccacgctactggcttgaggtattcaaactttgcgacactacagagattaaagtggcagtatctctgttttatctttccggaagcctgcatgcggtcaatcaagtcagttcttgcaaatcaaactttgcgacacttcaggcactcctcaagcatttctatgttgttgcaaatgaaaaccagcataagtagtcaaatgatatgttgcttctgttctgtgatttacacc

SEQ ID NO: 351378 - DNA, 443 bp, Zea mays
cgccgccactcaccagcaaattcccgagccgccccttccccatctctttcgcgacccatttgatcgattcctgatggcgcccaaggccgagaagaagcccgcggagaagaagccggcggaggagaaggccgagaagaagccaagggcggagaagcgcgtgccgagcaaggagggcggcgagaagaagggaaagaagaaggcgaagaagagcgtcgagacgtacaagatctacatcttcaaggtgctcaagcaggtgcacccggacattggcatctcgtccaaggccatgtccatcatgaactccttcatcaacgacatcttcgagaagctcgccgccgaggccgccaagctcgcccgctacaacaagaagcccaccatcacctcccgggagatccagacctcggtgcgcctcgtcctccccggcgagctcgccaagcacgccg

SEQ ID NO: 351379 - DNA, 300 bp, Zea mays
gcatcacccccgcaccaggagggggtagcagccaagcagcaacgtccccaacacgcccgtgtcttccccatgccgagtaggtcgcccctgcctcattgtccttcatgatgaggcaggcggtgaagagcctgctgctgttggggagcttcaagtcgtgtgccgtgaagagctacgagtcctccatctcgaagttgttcggggccactaaagtggtggccaggacaccgtcgcttccattggacgatgctatggtcctcgcattacaacctggtagcaatactcatcgttcacttacagaac

SEQ ID NO: 351380 - DNA, 289 bp, Zea mays
cgcgacccgcgtctcctttccgcgctcctcctctcttccctctgcctcgtgcctgactcgcagcaaaccagtgaccacgccgccgcgctcctccgtcgtgtatacccctctgtatacctcatggacgtcgcgcgcctcccgccgcatctcctccgcaggagcctcctcggccagctccactccctgctcctccgcaccggccacgtggcctccgacgctcacgttttctccagccttgttcaactgtactgcacctgcggacatgtcggcgacgcgcgcaacgtgttcg

SEQ ID NO: 351381 - DNA, 183 bp, Zea mays
cccacgcgtccgcggacgcgtgggccggcgtccagtggttacgtcgagggagcctaggctagcttggaacaagcagccaccagcccgccacgatgctcgtgaggagcgcctccacgcctgtcctcggcgcgctgcacccttccggctgccactcgccggcggtctccttcccggccgggcact

SEQ ID NO: 351382 - DNA, 267 bp, Zea mays
accggatgcccgaccctagccttacttacctactgtggaagcgacatctcagaggggggttcgtgcaagcggtatcatgaaccacccaagtacaagcacaaatgagtccaagactattcagaccattttgccggagaagcaagtagtgctctagtcagacatgtttgtcgtgctgagcgctcatatactcatagagttgcgccaaaagggaattagatcgtattcgagcgtgcggtagctgagaccatatacccacattacgaacta

SEQ ID NO: 351383 - DNA, 378 bp, Zea mays
cgtcctcgtcctttgtccctgtccttcggggacaaaaacaaccaaggcgcaagcggtaatcttccgtggtgggggcgtgctctgctgcaagcagtggtgacgccgcttggagggagggcgggcgggaaaggatggaggcggtgatggacctcaagtacctgccggttttcccgaacggcggcgtggccgcggccaagaagaagacgaggctcgtgaccactgcggttgccggcggccagacgggggtgtactaccgggaatgcctcaagaaccacgcggcgagcctgggtggccacgcgctggacgggtgcggcgagttcatgccgtcgccggaggccgacccggcggacccgagttcgctcaggtgcgccgcgtgcg

SEQ ID NO: 351384 - DNA, 84 bp, Zea mays
cggaaacccgggacgaccgacgcgaccgcaaccccgaaccaagaccaagcacacagaagacaaaaacaaccaaagcgcaagcag

SEQ ID NO: 351385 - DNA, 212 bp, Zea mays
cgccactcaatcccctgctattcctatactctcgcctcctattctacctctaaggtgtacgcttagaagaatcataaagcaccccacctcatccaagttaacagaacccacccatcacattgagactttctgccaggcccacaagcctacccatcctctgcaataataactatcactttgttcatcagctctgaaaccatttacatctactc

SEQ ID NO: 351386 - DNA, 288 bp, Zea mays
agacacgcgtgcgtgatcaagcctggatgggacggtgttgacacagcacgtcctgtgtgcggcgatctcgaactgggtcagttcgtggagatgttcttctaggattctttcgtcattttgttttctgcttcgttgaaactgatcgagggtagcgcgtctttctgatggtcagagactcaagaccagttcatcaagtactccttagttgtttccgcttttgcttccttcgaactcatcgagcttagctgcgttcctgctcttttgttaggacttcagagctgagtccac

SEQ ID NO: 351387 - DNA, 129 bp, Zea mays
cccacacttcctatcaacttttcccaacaccttcaaagacatattttcttcaagagatctctctcacttatgggagattttttttttgaatattatctttttaaacattatttataacaattatattta

SEQ ID NO: 351388 - DNA, 452 bp, Zea mays
cccacgcgtccggtttgcaagtttagatataagcaaaggcttgattttgttgttatcagccttttcacttggctttaattcgtaccggtttctactgcttctacagtcctgtctctatgaattgcagctgcggcgagagatcttatgaactcgtcagtgacttgatcttttgtaggcacaaaatcaacatcaagtaattttctggtcactcattctctctcataaagtgggaatcaacttcaatgtgcttttttcagcatgaaaaaactagattaaatgctagcaatccatgttatcaacatatagctttgcacatggacttcacgttgtgtcccttgttgtcgtgttgcgccaatttttagtggtctgtccttagccgggtgctagggtatcaagcacattctgtcgctgctagctctcgtatgattagcctactttcgctaactgatgct

SEQ ID NO: 351389 - DNA, 441 bp, Zea mays
agcaccctagtcgtcgtagcggcctacgggctcttgggcagagagagaagctgcatagcctgcatatgctccagctgctgcgcgcaatgatggcactgacggagcggcagccgcagctggagaagaagccgacgcgcgggagggcgccgctgtccgggaaggccgtcgcggcgctgtgcgtgacgagcttcgttgtggggctgctgcttagcggcaacgtgtcgctcatgtcggcctcggcgtcaccgtcgtcctcgagcacggacagcgagaagagcattcgtgtttccggttgcgacaatgagcgtaaactcggagagaaccaccccaaggatctcctgaacgaggtgtcgagaactcatcaagcaatccagtcgctggacaaggcggtgtccaccctggagatggagatggccgtggaacgcgctaagggcgggggcg

SEQ ID NO: 351390 - DNA, 331 bp, Zea mays
cgcatgcgccctgctagtccgttattctgtttcttataacccaccccttccttaaatgtttttaatcaaaggacaaagaagtgtatcggacatctaatgagttaagcccttaagggcacttcagggagatgaagctatgctacttattgaaaccctaacacctttctattttagaacatcaaataaagttgccctttaggccaaccaagattcccctataactgagctggaacgcaacccagctggtaaccggttacgtgtcgtagactcgtagtcttccagccaattatattcatctttacaatcttcaatgacaactttggaatttttt

SEQ ID NO: 351391 - DNA, 205 bp, Zea mays
  unsure (1)..(205): unsure at all n locations
gtaaaaaggagatataacatcatacacacacataccttaatcccactatcacggagagaggcccantatgggggggctccttcatctcctccttcccatcccttgttcccgacggacataatcgttacgtgaactacttctacgacccgaatgtgatcaactactacttacttcagtgtcaaccaatgtaacctgacagtattcg

SEQ ID NO: 351392 - DNA, 340 bp, Zea mays
gagagaaggaaaaatatccccaaaccctagctcccgatctcgatggcgaaccctcgcgtcttcttcgacatgaccgtcggcggcgccccggcggaccggatcgtgatggagctgtacgccaacgaggtgcccaagaccgcggagaacttccgcgcgctgtgcacgggcgagaagggcgtgggcaagtccgggaagccgctccactacaagggctccaccttccaccgcgtcatccccgagttcatgtgccagggcggcgacttcacccgcggcaacggcaccggcggcgagtccatctacggcgagaagttccccgacgagaagttcgtgcgcaagcaca

SEQ ID NO: 351393 - DNA, 356 bp, Zea mays
caaagtagaataaaagagatgacctacaaaccatgcaacatacattgcgtggtcacagcgaagacaaggggcgcttgggttgcagatccttatctggggactgccgctacttcagatacatgactactagggtgatactctcattcacttgtctaggatttgtattagcttctgttctttaattgttgcatgaaggtgtctgatttgagcgcatatttgaggatctgcggattgtgctggtgtatttagtgcggtactgttcatgttcaggtttaggatcgcagttttattgtcactttgttgtgagcccgaacgcatctaccaacaatctattctcataagtcgtgccttatgtg

SEQ ID NO: 351394 - DNA, 209 bp, Zea mays
  unsure (1)..(209): unsure at all n locations
ccgacgcgttcgntttcaaatctcatttttcccctccccttgccattatctagcccgtccctttccagagccaagatagtcgctctctttacccaactctcccaaaatcatcctcccggacgcagcccgcaatgtagtcgccatcataggaaatgtcaactaggtggggctgttcttgtcgccagtgccgaccgtctggcggatctaca

SEQ ID NO: 351395 - DNA, 369 bp, Zea mays
  unsure (1)..(369): unsure at all n locations
cggacttactttatagatctgagtgcaaattttttactaccttgagaatttacacagacatcaaatgcttttgtgtagttagacaatatactctcaccaaggcacgtcagatgatggtgaaaactaaagatcatcgccatattgactgattggattgctccaatatcattattgcacgacaaaataggtggcgatcatcggggcctctaacatagaggagccgatactactactgctgctatcaactgccatttgacgcgttgctctaactactccaggcaatcaattgtgtagtcgactatcaatatgaaagagtcaagtacatcggcgtttcgggtgtnaaaaagctaaaagtacgctgatgtgggc

SEQ ID NO: 351396 - DNA, 391 bp, Zea mays
actagtgctagaccgctcgcctgctctcaccgaccagcgccgcgccactcctccgacggatctgcagcatgcagccctactcctcgtactcctccgctcacccgcccgaccatcccaactccaagcccccggccccgccggcccccgccatgggctaccccgccaaccccgcccccaacgggaaccccagcgcctactttggcgccgcgccgcccgccagcgtcgccgacaacggctccgctccggcgaccttcggcgtagcgtacccctaccccgcccctgctcaccaccattacccggcgtcggaccagcactacccgtaccccccgcccccgccgacgcaccatcactacgtgtgccacccggcggcgccggccacctgcctgggccg

SEQ ID NO: 351397 - DNA, 107 bp, Zea mays
gttcctctctgttttcttcttgctctgtaacctggacctggtacgagtcagcagccagcagcaaactcgcgttttgcctgtaaaatctaaaatctgatatgagatgc

SEQ ID NO: 351398 - DNA, 162 bp, Zea mays
gtttagtagcataacagtagcagactattttatttctagggtctttgcctttaagcctatacccattatttctagtgtttagctgaagtgctgaactgctgaatctgaatgctggaattctgagcctggaactttgggtgggttttcaaagcctggaccaac

SEQ ID NO: 351399 - DNA, 51 bp, Zea mays
  unsure (1)..(51): unsure at all n locations
agatattttcctacctncttcntaccatattatttctacgctctttgcctt

SEQ ID NO: 351400 - DNA, 249 bp, Zea mays
tgctggactctagcggtcttagccttactgagacactgacgataagataagttgtgtgtgtaacagcctaacaggggatacaatagtgctgtctagggcagcgggcgaacaggcacactatcgctattacgtttctagcagccattactaggcgatatgcttgtttaaaaaaaaaaaaaaaaaaaaaaaaaaaaaaaaaaaaaaaaaaaaaaaaaaaaaaaaaaaaaaaaaagataaaaactatataat

SEQ ID NO: 351401 - DNA, 371 bp, Zea mays
  unsure (1)..(371): unsure at all n locations
cccgtccccgcccctccatctagccaccgcttccacacgtccacgtccgcatgcccccgccacctgcgcccctcccctgctacacgcctccgcgctgcccggcgtcggcatcccgacgccgtcgttgtcgtcccagatgcccgcccctgggtcggcgatctatcgggcgccgccgcgtcctaccgggacggaagtgaggaggacgaagacgacgcagatgaagatgaggacgaagacgaggaccgcagcctggacctactggcccggttcctgcactccgtattcaggaaggcctnacgccgcgcgcgccgtgctgtcaggtgaagttttcggtcaatggcgtgcttgtcctgacgttcttatggatcctg

SEQ ID NO: 351402 - DNA, 372 bp, Zea mays
gcaagtctcgctacgtagcagtgcaataaaaaaaagcagccgcaatggcgagcagcaccatggccctctcctccacggccttcgccggcaaggccgtgaacgtgccgtcgtcgtccgccttcggcgaggcccgcgtgacgatgcgcaagacggcggcgaaggccaagccggcggcggcgtccgggagcccgtggtacggccccgaccgcgtgctgtacctgggcccactgtccggcgagccgccgagctacctgacgggcgagttcccgggcgactacggctgggacaccgcggtgctgtcggcggacccggagacgttcgccaagaaccgggagctggaggtgatccactcccgctgagccatgctgggcg

SEQ ID NO: 351403 - DNA, 350 bp, Zea mays
gccttccaccactcgtgagacaaagggtatttacaggcgtggtctgttgaattagggggtattgggtcggcttgcccacaggaaaaagttttgagacatggtgagggctaaggagctttacgcggtgtctcagttccattacatgcatgtcgcagagatggattctatgtatgacagctgcaagactcatcgctcgtacatcaacaacaatgcctgcggcatagcataacggtatttgtaacatggtgcacggacagactatgatcatagggtacggctttatcagcatgactagaacggtaggagaagacacctattggttcaccgaccagaatatcgatgatctgcat

SEQ ID NO: 351404 - DNA, 343 bp, Zea mays
cagaacttaatttcttgcgcccacagccaatgttttttcaactcaatcgtggtttaagcgtggtgctgcacacatggacgccagcgtagcaggtagaacggcaaataaaggggcgcctgcgcgcaaggttgtcgcccccaggaagaaatcggtgtcgagaatcattaaggccgcactgcaatgtctcatacgacggatcgggcgctacctcaagaagggtgaggcactcacagctcagttggcactcaggcctatgtgtatcttggcaacgtgctagaatacctggccactcatgtgcttgagctcgccgggaacgcggtgaaagacaacaagaagacgcgca

SEQ ID NO: 351405 - DNA, 232 bp, Zea mays
ggggacgcgcgctcactagcaaaaagcaggcctcttccctccggcgagccctgcttgtgcggggaccgagaggcgcccagctcttccccattcccgtaggcaacaagcgccgtgccttctcctacgcgttccccggtgcagcgcgctctctcaaagacgcttataatgcgccgtcgccgattatgccgacgctgccgtgaggtgatgcgcttgcagtcacgcagagcacctt

SEQ ID NO: 351406 - DNA, 305 bp, Zea mays
cccacgcgtccgcatggccgtcgccgtgaaggtggtgaaccctgacgtggccgtgcacgaggcccggttcgcccgagcggtggaacgcatcggccgggcgagacacccgaacctggtgacgctcgtgggcgcgtgcccggcggcgcgcgccgtcgtgtacgagctggtgccgggcgggagcctggaggagcgcctggacccgggaggcgggagcgggtcggcgccgccgccgttgccgcggcacgcagcggagcggcgtcgcctacggagcgtgctccgcgctagcgttcctgcactccacgctg

SEQ ID NO: 351407 - DNA, 293 bp, Zea mays
cgcacgcgtgcgcgcacgcgtgcgcgccagcatcagaatgtgaaattcaatgaagcgcgaatggaaagaggacacgattcttgtacaaagttacagttgactaccctcacgacacacgcacgcacgagttcatatataattctctcttcaacaagtgaagagtacgcctagcaccatagctaaaccttgtgtagcatctcatccacaacagaggtaagcatctgcgtcagattcattgcttgagctgtaactagactccctggggctgcagcctgccgttcctagatgagatg

SEQ ID NO: 351408 - DNA, 276 bp, Zea mays
ggttgttttgctttttgtgacctacatacagggctcagaatcaattgcttcttggcaggccaaccttttgttcgaacctgtcaaatttgaggaggtggacgtgctcgttcacaggggcatatacgaagccgccaaggggatgtatcaccagatgctaccctacgtgaaggcgcacctgaagagctggggcagatccgcgcggctgcggttcacggggcactccctcggcgggagcctggcgctgctcgtgaacctgatgctgctggtgcaagggga

SEQ ID NO: 351409 - DNA, 408 bp, Zea mays
cccacgcgtgcgcccacgcgtacgattctggtgaaacttgatgaaacacatttgggcaaaatgaaaagcatgacatgaagatccaacagagaacctgggcattttcaaatgtggcgaaccacaccccagaaacaaggtatggctgggggaggaagttggatgctgccacactgagatgctgcatgttggagttggagagggaggagcggagagagttgccacatgagcgcaaaggggcgaccacaccgagaagggccacaaccgcagtggcgcacgccatacaggagcaggagattggagaaggcggagctcagtgtcagagctggcgagccgcgagcacaggctgcggatggagctggagaggagagctagaatggtggtgagcacaggctgcggagaaacaagagt

SEQ ID NO: 351410 - DNA, 101 bp, Zea mays
cggacgcgggggaaaacggaaagctctgaatttctgggcactctgacgagaggcacgcgccaattcatgcacgagctgagaaggcatcacgtcactttatc

SEQ ID NO: 351411 - DNA, 266 bp, Zea mays
  unsure (1)..(266): unsure at all n locations
gagcgagcgagccacgtacgaagcggtaggtagcagcagtacgtgctgccgccaagctagtgccaatggcgagggcgatgctcgtggccctggcgctggtcgtggtggtggcggtggcnagcgcggacggggcggctgcgcatcagtgcagcgcgacacaactggcggggtgcgccccggcgatcatcagcggatcggccgccacggggtcgtgctgctccaacctgcgcgcgcaagagccgtgcttctgccagtacgggcgcaac

SEQ ID NO: 351412 - DNA, 405 bp, Zea mays
cccacgcgtccggtgagatcttgccaaaccaaatatttgaagtctgagctatagttccttcagaagttgctgagtatcgatacagattacagagaagggtacacctgactggatatttgatgttttaactcaggagcagcctgaattttcacatcaataatgttttgtaatagatcacctgccagctctggtgtatcagtaattgatcttgttttttctggaaacaagaggagaaccatatttatatctttgccatgtatcaatctattgtgccttgcagaatgtttggacaccgtcgaaggtgatagcgcgccttggcaaagaaataaatgatgaaagctcctatctttattgggcatacaagggaacatataacttggtatgcttaaggagtattaaaaggac

SEQ ID NO: 351413 - DNA, 403 bp, Zea mays
cttctcttggcggatattgccatcatgactctgcaaaaaatagctcttctatcttagattcttcatgccagcctgctgacggttcttctgttagcccagacctcatgctggacataccccctggaatatctgcgcatatacctcctggcttcacaaaagcccactgtcagcttcagatgggaactgctgctctgtcttttgctgataggcatcgcagtctgatttcggacattcctccaggctttactgaagttcatcggggactccctcctgcaattccacctgctggaccagcttgtgtgtcgacccctgggactgaaaagaagcccttcgttaggttctcgcttaatgtcccaaggcctgttggaatgggagctccacctggatttactccactgcatgc

SEQ ID NO: 351414 - DNA, 251 bp, Zea mays
gtccgcgcgcgcgattatatctcaatcgttgcggggttcaagagatcctatgcgaattggccctgccgagacatagcgactattacactattggtgttataacacatacagtgggctgttggatgctttatttaatgaatccactgagccccacaaccacaagcaactgactcttatacatccatatatttagctttccatgctggggcatcagaggcatgtgacggggatgggcgagaatgatctgtaag

SEQ ID NO: 351415 - DNA, 184 bp, Zea mays
cggacgcgtgggtgcgagaaccccatactaggaattgtttcttagacacctaaaaatcaatttatcttttagagtggatcttcttggcacatcttctaaattttcctttctacctctgtgacaagtttcaagtcgatctgatttgatttatttcaaatttaacttttggaggaacatttttaga

SEQ ID NO: 351416 - DNA, 213 bp, Zea mays
cccacgcgtccgcggacgcgtgggctgcaactgaaagcctgcgccggcgacgccgcggagaagctgctgctcgccgtcgcaaccgagggtcctatctgtggtgtgccagacttcaagatgaggggaaagaagagtgatgagctcgaacctgtcgatgctggcgatgaagatgatgatggtggtgacgatggggacgaggatggtgactttggg

SEQ ID NO: 351417 - DNA, 374 bp, Zea mays
aaaaaaaaaaaaaaaaaaaaaaaaaaaaaaaaaaaaaaaaaaaaaaaaaaaaaggggggggggcctattttaagaataacaaccataaaaacccttaccatgataattcttacctccattttcctcaaaacccaatttcaatcgaatgcacctaattgtaacccatctcctttaacacaaccccccccatatcatttctatttacattggcaggttgtttaaaataccttgttttttagcctcttccgaatttcggtgaatcatttaattttttgagaataatttttcctgctacaagtgctggcataaaattttttttttgtttttatgccctctcactttcttactttccctcaaaattatactgtttcttt

SEQ ID NO: 351418 - DNA, 406 bp, Zea mays
  unsure (1)..(406): unsure at all n locations
nttagaaaaagaagtgttggtacatgattagtccaaatcatgatttacacaactaaccactattatcatgtcagatggaagattgaacgccacttcatatcttagctttgatgagtagtatgcatctattgggatttcatatacaagattagatgctgggcatacaacactatatcacgtgtagcgtaatgacaaaagagttggtcatactcatggaacttcccttttgatgtgcttatatatgtgctttgacgcaaactgtatgaatacatagagatagtctacagcataatgtcctcacatactcgtccaacaacaaggaatcgctttgagatgaggagccacaagaaggggatcgatctctgcaggacaccatacgttggtaagcagatcaccttaaatacca

SEQ ID NO: 351419 - DNA, 276 bp, Zea mays
attcctccaagcggccgatataccaataagtgtacgaacgcggatttttcgggagctcgtaccttaaataaaaaatttgtatacaaagcattcttcttagcttaaaaaaaaaaaaaaatcaaggaacaaaaaaaaaagaaaaagaagaaaataaaaaaaaaaggtgttttaaacattaaaaatatatttaagtgtagattaaagaaaaatgaccaaaactcacttaaggtgctttacccccaaaaacttaacaattaaatttgagggcgcgctttt

SEQ ID NO: 351420 - DNA, 164 bp, Zea mays
cccacgcgtacgaccacactttcaaggacaagtggacggacgcgagggccgtgtccttatactactacgcaataatctaccatatcctaaataacccgaagtcctaccgattcagtgtttccaacctttgatgttgaaaaatcttttagtaacttgaccataat

SEQ ID NO: 351421 - DNA, 411 bp, Zea mays
cccacgcgtccgcgaatacctctttcttcgcctgctggctctctcgtcgtccgtgcctcgtcctctccggcattcgaggatagtttttcgccgggggcggcctagaaatcagccgtcaggtgaaccgggaggggtggttgcctgaggaggaagagatgatcacgccagcgaagctggtggagcagctgcgggagcaccagatccggtcggaccagtcctactccgccgcgctcgccgtgttctcgaccaacccccacatctgctccaggagagatctcaaggttgctgtgatctatgccggcctgttttgttttctcatggtgtgctgctatgccggcctttacttgaaatggttgagactgtcagccatgtttgtaaccttcgggatcctcctttcagagagtctcaaaa

SEQ ID NO: 351422 - DNA, 368 bp, Zea mays
tatggataaagagttcatatgtttctacttgagttctatactgttatggtcactattaagaagctaattttaagtcctatgtggctatgtgctgtgtactgcctcgttgcattatgtgaaagactgtgagtatcgagctctctaaagtcaatgtatattttcaaaaccttgatttaatatagttatacctgattacatatttggttcacaatgttggttcctactctgatttgtactttatgacaatttgaacatgtgtcttagttatttggcaacaaaggggttatattccacctggcatggggagaagcttgttggtttattacattggacaagtgcaaaggatcttgggatcctttgtcatggat

SEQ ID NO: 351423 - DNA, 372 bp, Zea mays
cggacgcgtgggcttcgcagcagcatccgcgtgcggcggcgtggaacaaggtgggatcttggctcagtttctagagtgttgcaattctttctatccatcattgctttgtgttcaagagaggttatctttttctgcgaatgcagtgctgcgcgtgccgatttgagcgagaagtttctcgtgcggcactcgaggtgagatttcacctcgtccacgttcttgctcaccgccaaaaacccaagggggagaaggaagggaagaggcggaatttccattggttggttgctgcgtgaatccgcgggattcaagctcgagtcttccttgaattgcggccggggccatggttctctcctccaattccaccaccaaggcaac

SEQ ID NO: 351424 - DNA, 216 bp, Zea mays
cgacccacgccaccgcctcaacctagtctaaagtatggtaattaaacatctcgccactatgggcgccgaaatatctagtcgacaacactttcctgaaccgtggccataccatacctcgcacggtgaaataacaagcagagtgttgtgttcaactcatatgctatgtcaagagaattagcccaaggatctttatcctcgcaccgcatgagaggatgt

SEQ ID NO: 351425 - DNA, 285 bp, Zea mays
cccacgcgtacgacgagcccggcgggcggaagggagagagcgcgccagagcggggccggacaaccctggtccaccgcactattctggaccgtggccatggccatggtcgccgcgtgccgatcccgggcgctgtgggcgtgccgctccgccgcctacctcaggatctccaccttgcccagggccttctccaccgtgctggaggatctgaaatatgctgacactcatgaatgggtgaagggtgggggcgattcaacaaccggggggattacttgaccatgcccagga

SEQ ID NO: 351426 - DNA, 188 bp, Zea mays
cccacgcgtccgagaagaccgtgcagaaaatatacgaagagttggtgaagtggcaaagcttttttctgatgctggtgtcatatgcattgctagcttgatatctccatacaggagagatcgtgatgcatgccgtgctctacttccacattctaactttattgaagtatttattgatttgcccctaaaaa

SEQ ID NO: 351427 - DNA, 294 bp, Zea mays
caggtaaccacctgagcccagagtggaccttatcaaacactatgcaggggagcgtagcgggctacctgagactgcttataaccaggcatgcgaggagaatgaatgcgttgtgctgactgaatgggctcaagcattgattgcttagcacgctatggctagatgttgatcccaaatcatgttttggaccttacaaacacatagtgtgacttcctctctggcatatgatgaggaacgacctcatgtctactttgaactaccttgaggaattttttatacttttgcaagaacatgtac

SEQ ID NO: 351428 - DNA, 196 bp, Zea mays
ttcactttatcttctaatcatttttctacacgtgtcaacttccaattataggggtttaacacccttgaaaacatataaccacacattttctttgctttttctccaaaacacatttattatacttcaacccacttatgactaatgagtatgttttttgttttttacaattctttcacgtacaacgccaccactattt

SEQ ID NO: 351429 - DNA, 143 bp, Zea mays
cagaccggcacgaaaaacggggcgacccacgcgtacgcacatacacaccattattcatacgcctgctcctccgcctactataagattcaggcaagggtggagatcgccatttcggactcctaagagcaccacttctaatcgaa

SEQ ID NO: 351430 - DNA, 192 bp, Zea mays
ggagtcgacggacgacccacgccatccggctttctttaaagtatggtgatgctatagcttgtgtttgagccagtggaacaatggattttgttgtggaagttgctggtgcaccacaacttacaacctggcgacaccggaaaatctaagacgtacgcgactctgatttactccatgcgcattatcgattacatc

SEQ ID NO: 351431 - DNA, 178 bp, Zea mays
aatcagtgtcgcatactcggatgagactgaacgtctagatggcatgcatttgccactagattttttttctgctattaccaaggactgcacaaagaaaatgtagatgtatacacaacaagaacattccatctgacttggtagaccatctatggcacaaataataataataatttgcaat

SEQ ID NO: 351432 - DNA, 373 bp, Zea mays
cccacgcgtgcgattcgacctagagactcgggacgagccgtaaagactacgattaacggtgccaccagcgacgcctggccgccttgacggctaggcagcgcccgaaccgaaccatcttgcgcaggagggccactacagcgtgcgacacggacacgcccccgctaggcgccatgaagctgacgggggagaccgttatagaagcgccactttgagatacgcgtgcatgccaacgactcgattttgtatggggagaagaatattgaatagactcacggaagagacacatctccatggctgcaacaaccgttgagttacaaagctaaggtgtcgtgcgacgaatgcacatttgaagagatgacagtctatgaggaag

SEQ ID NO: 351433 - DNA, 217 bp, Zea mays
gcgagagggcacggtggttcgttcaacaccctagcatgctcagccctagtccggagcccggagccacggcgcggttagggagccgtccccggcggccgtcggatccgtcgcgcggaccatgcggtgggtcgtccagtgtcgtcgggactcgcgccatgacttggtggagcgcgcgtttcgtttcttcggttcgccgcgcctggctggcctttttctc

SEQ ID NO: 351434 - DNA, 428 bp, Zea mays
gttggcttctcctcccccaccggttcgtgttcaggttctggttcgcgggcgagagggaagagatggcggcgtcggacgttgagtaccgttgcttcgttggcggcctcgcctgggccaccgacgaccactccctcaacaacgccttcagcacctacggcgaggtcctcgagtcgaagatcatcctggatcgggagacgcagaggtcccgcggcttcggcttcgtcaccttctccacggaggacgcgatgcgcagcgccatcgagggcatgaacggcaaggagctcgacggccgcaacatcaccgttaacgaggcccagtcccgcggcggccgttgaggcggcggtggcggatacggtggcgggcgccgagatggaggcggctacggcggtggcggtggaggctacagcggtggtcgtggaggctacggc

SEQ ID NO: 351435 - DNA, 430 bp, Zea mays
caattatgatttacaaatatcataggggtatcatcatctttctcttcattcttaccgctcaagtcttggacctcttccccttcgtagttttatgcacgaagctcttcttatgccgaagctggctttgcaccatcgtggcttgtaacttcgctgtacgtgcattcaaccgaagcttctttatgctactttggtcgaagttcatcttagtccgtactttgcttatatggttgaaacacattttcttacatcgagagtaagtcattttgaagacattcggcaaggtaggccccacaagttattaagcatgcatatactataggataatcatatcttagaattgttttgtttagtttatacccttggagtaaacctacatggtttaaaatgattagaagcacgaaacataggttgtctaaaattccactatacc

SEQ ID NO: 351436 - DNA, 129 bp, Zea mays
tgattgcttggaattgtgcagtatactatatgcacctttttaatcatgtgtgtcgcgtctgtcggtatgtatgtcgtctgggggaaaggaaatttaagttatatgaaatgaatatgctgttgatgtgtc

SEQ ID NO: 351437 - DNA, 418 bp, Zea mays
cccacgcgtccgatacgctccccccgcccaccgttcatttgcttggtaggctgctggaacaaaacttggggggtaagatggcgggcagcccagtgccgaacaggatttatgcaggtaggtatcctagggcacgaggtgggattgaatctgtggcgcagtgattttttttgtgcggccccggaatacaacacagggcctggggcgccaaggcattcccttttgggtgtgagaaaggccttgctaaacttagcttaactctgaccttggtctggctctctctttctctttcttgaaagttttgagtgtactatctctctctctcgctggggtgtgggcatactacaactgtagctggcgaaatataaatgctttgttctgggggtaaaaaaaaaaaaaatgggcagccgttctagaggat

SEQ ID NO: 351438 - DNA, 70 bp, Zea mays
cgaacgcgttcacaacactatttatcccaatagtcgattgtgattaggtagatgggggaggactctagca

SEQ ID NO: 351439 - DNA, 440 bp, Zea mays
ttggcttctcctccccctccggttcgggttcgggttcgtgaggttctccggggttcggtttcgtgggtgagcggatcgagatggcggcgtcggatgttgagtaccgctgcttcgtcggcggcctcgcctgggccacggacgaccactccctccacaacgccttcagcacctacggcgaggtcctcgagtccaagatcatcctcgatcgggagacgcagaggtcccgcggcttcggcttcgtcaccttctccacggaggaggcgatgcggaacgccatcgagggcatgaacggcaaggagctggacggccgcaacatcaccgtcaacgaggcccagtcccgcggcggccgtggaggcggcggcggcggcgggtacggtggtggccgtggaggcggcggctacggcggtggcgggcgccgtgatggcggcggcggctaccgc

SEQ ID NO: 351440 - DNA, 206 bp, Zea mays
tccgcttttccttccccatcgtttcccaatcgttttcactgaggtactcacgcgtaccgggggggagagtgagcagatcgtgatgactgacctctcatgttcagtacccctgtattcatccagcagcctagccagctccaccatcaacccaattctacaaaaagtcttcatcacctacagtcctgacccaaattacattatcatac

SEQ ID NO: 351441 - DNA, 436 bp, Zea mays
cggacgcgtgggtgaagaactgaggtccatattcaagagagatgtccatctaatcctccaagttagagttgcgaagaagagaagtgcttgaacagatttttttttagtgcctgtatagactgctagtgatatgggaagtgcagttcagtgttggcacaatgtattaacgagaatggttagtaagtggtgcttgggtgcatcagttccggggactgagttgatagaactttggattgaggatctaatggaggcactgagctgtactggtgtgtggagccaagatttctgaagaaaggatatattggcggcaattcacatgccagtagtgacaaggaaacggcttgcggcatggtgagctgccgcacctcctggcgaatcttgtttttgtgatacttgataatatagatacgtctatgctagaccactgacacccttt

SEQ ID NO: 351442 - DNA, 435 bp, Zea mays
cggacgcgtgggtttccaagtagagtaccagaaccagatacccgatctcaagggatgaagatagtgactgggccatgggaattagaccgagaaagaaagggccaggttgagatatcgggggcaggttgcccttccggtgcctgaagggcaaacaaaatgtcataccaagtcaggctgctgcgcttttcctatgaattggccttctcgcaatcccttctgttttgcctcgcctcaatctgttgatgcagatccaggttaagcagatggctgacaacagcattgagcaagcattgatagagaatcctcctaatgtgctgaaatggaagccatcagaaagagctaaacggtttcgacgatgcaggtcaactccctcagatcccaccgatcaaaaacctgcagaaaacggatctgtgcttaaagccaaagagttattca

SEQ ID NO: 351443 - DNA, 96 bp, Zea mays
cggacgcgtgggtgatactggaacatttggcgcgctgtgggcgtccctgtcatgagatcaattgcagaaataaaatgcaatttagatttgagcacc

SEQ ID NO: 351444 - DNA, 246 bp, Zea mays
  unsure (1)..(246): unsure at all n locations
agaaggnccaacnacaacaaaagaacaagcaagagccggaacagangaggaccgggggggccgcccagaaaagggaaggaccacagcacaagaaggaagggagacgaaaagaacaagagaagcacaagcacacggccaaaaaacaaaggcagaagacggcccgacagaggaaaacagaagaagcagccgccgcaacaaaaagagagaaggagcggcgggaagcaaagacgacaacacgggaaacaa

SEQ ID NO: 351445 - DNA, 434 bp, Zea mays
agaagctcctccccgctgtcgccccctctcctccccgtcctcctgccacgatggcaggctctgctaccgccgccgccattaaggactcataccggtcctactactttgcggtggcgaggcggcggagcaggcgcctgaggagggcgagagtctggggtgccctggcgcgcgcgttgtggcagagggcggcggcggccggggccctggtgcgcgcgtcgggcgccagggtggcgtgctggctgaggaacgctcggccctacgtcggtgacctcttcgtcgggaactacatgttcctgcaggtggcgccgtcgccgatgacgatcacgggcggcggcaccgtggtgcccttcgcgcagtacaactacggctgtaaggccagggccgtgcatctgcaccgctaccctactggggcggtgctctacgagacatagcga

SEQ ID NO: 351446 - DNA, 284 bp, Zea mays
gaagttactagttctgacactgttgtggggagagatcgaggcgtgcgtgcatgcgtgcctaatttgtaatttggtatggtcacgtactgattggtgggctggggaaggatttggtggacccacttgccagtgcaatgtcacctttgcgggctgatttgatttagttctgctcaagtagtcaggtgtttcactgtttgtatttgaagttctggaacatgcgagtggatttagacatcttcttcaggtcatgcgtgttaatatattagctttaagtgattgttaaa

SEQ ID NO: 351447 - DNA, 184 bp, Zea mays
aaaaaaaataaaaaaaaaaaaaaaaaagaaaaaaaaaaaaaaaaaaaaacgaacatgcgggggggtaaaataaaaaaaaacggacacgtaaatagcgaaacaatagctgttgtgggggccggtctatactgtccaggcttccgtcgttcccctggttaattgttttgctttaaatggggccccc

SEQ ID NO: 351448 - DNA, 181 bp, Zea mays
aagaatggagggtgctctgcctccggcgtatcggatatgtccgataggagtctgcggggggggtactctgcacccgcgtggattatgtgttgaccttcgatttcactcatcaacctactcatgcgccttcactgatgcacctttaagaagaaggcaccgtatgccattttggatatctatt

SEQ ID NO: 351449 - DNA, 188 bp, Zea mays
atgacgcttgacctacactgaccacactagttgtgattgcggaaacgctgggcaaatgggggtatccatattcgaaagaaagactagacctactgccacggcataataaatgcaccactcagcttcatacctacttccatgcaaaagctgcacctattcaagagctattgtctcacaaagtatgaacc

SEQ ID NO: 351450 - DNA, 303 bp, Zea mays
aaatagagagacagttaggggcaattatgaggatattgccaaggtattggattcaacaggaggcaaggataccgatagggtcaatggctgggtggcagtgcttgaggctcctgattcagaccctgcatccagttgctcggttccggctgcctcttctcttggcggatattgccatcatgactctgcaaaaaatagctcttctatcttaggtcacactatccccttggttgctcagttatgttttgatcaatgttcattatcttgttaagctttttacgactccacttttttacagattcttca

SEQ ID NO: 351451 - DNA, 335 bp, Zea mays
  unsure (1)..(335): unsure at all n locations
gaccagaaagnnnaaacctggcggggtacctggctgttcattctgctactagctacgtgaccacacaggagctcactattgatagtggcctgtccatttgaggcttttatgatcctgccaacagaactacagagtcaagcacaacgacaacaaaaaaaggacatcagacgctacagaacgcatcaaaagactactcgaatttgaaaacaaactgcatcgataactaaactgaaaaatcattgttaaaaagaagctattcatgggagagataaataaagctaatcgtcttgcttcggaaaaaaaaaaaaacaaggaaacctttacacataaaaata

SEQ ID NO: 351452 - DNA, 191 bp, Zea mays
  unsure (1)..(191): unsure at all n locations
cagccggcctccgccaggcacccaagccgcctccgcctccctagccatcaccagtcgnnnnnaacttgtcctgctccctcgcctctcctgctcggtgctcgacagtcgcccccgctccctgggcacccgcgtnccttggctcacccgacgcccgcggcccaaggatgggctgggccccttcccccttcccc

SEQ ID NO: 351453 - DNA, 212 bp, Zea mays
ttcgaatttttgtagatgaagtcagttttttttttcttgggggtaagtaggaactttcagaaacattttgttctgctgacattgccccggaagattttctgggacctgaccattttgatgtgaaaggactgttgattgccagcgctgtttgaacaggaatctttgtaaaactgaaacacatgttctcttctagttggacaaatatcacgagg

SEQ ID NO: 351454 - DNA, 259 bp, Zea mays
tccttctggcagcagagcggcagccaatggccatagagacggacgcggcggcggcgagggcgagggcgtcgggctcggtttcagatacggcgcccatgtccccggccgccgaggcggcagcggctgcggcggccccgggcccggcgcgcccgcgcgggggggtgaggaagctcatccccacggactacctgccccggagcaaacggcgctggaggctggccgccccgtccggcgacggcgcggacaggctcgcctcgac

SEQ ID NO: 351455 - DNA, 332 bp, Zea mays
ataattcaagtcatcgggggatgggatgattgttggagggcttgctaacatatcaaacactcagaaaagcatcaggggtatatgctacatttcttgctccttttgggtgaccaaacaatccccacaaaagcattggtgtttgttagtttctgaacactatttgatgtttatttccgttctttgttaattcaggagatggtttaattttcgggaggacttcttccttctctttttactgcctccaattatattatatccttgattgtattctgcttttatttcttattgggtcttgtagaatagatcatgttttacttgactgcatcttaccc

SEQ ID NO: 351456 - DNA, 53 bp, Zea mays
aaactgaggtcctggtgctcgctgatgccgcgcaccgggccatatctatacac

SEQ ID NO: 351457 - DNA, 305 bp, Zea mays
tccgatccatccacgactgcgctcgctgcccccgctcgagacgctgacacgccctcgtacgagatctgcgccccctccgctccatccacgaccgcgccccccaagcgagtcgccgccatttcgccgattcccggccgctgcctagggttttggcgccagcgcggtcggagggttgtgcctgtgggtcgcgttcccagtgtcgcgcgcggcggcagaaggtggaaggagtggcggttctccggagaggaagtggaggaggttgaggtggtgggtctccacggagcgagattatcagatgccgcggc

SEQ ID NO: 351458 - DNA, 292 bp, Zea mays
  unsure (1)..(292): unsure at all n locations
cggggacgagatcgggaccggcgactggcaagcggaagggccccagggggggatgctcggnttaggatacgggtccattcacaccggccgcgtggggcgccccatccaggtttgtcatggattccatttggggggggnngntgggtccttcttcgtgcagaatgacatgtgccgactgaactatgggtaaaagacagccggcaactcttgtgatgaacgaattcgctaagggcttgatgtcgagacgaagaataccgactgtcggcgctactctcatatgctttggatgttc

SEQ ID NO: 351459 - DNA, 399 bp, Zea mays
gttttatttagcatgtagccttaactggtcgtgtgttacagtacagaactgatgctgagttacaacaccctgatctgatccctcaactccaatgtaacccttaacagctcattctgtaaggaacctgtcaccctgttacctgttgctgaactaatgaagtagagctagataatgacgttttatcgtagttattattaataacttatcctctgtgatgttgcacctgaaaaaaaaaaataaggaactaccatctgaagatgacatgggcaacaaagaaagtttgtcacaatgcacttggtgactggaaaaataaaaaaacaggggggggccgctttaaaggatccaagcttacctccgcgtgcatgcaacgtaatagtttttttatagtgccacctaaat

SEQ ID NO: 351460 - DNA, 227 bp, Zea mays
gggttggcttctcctccccctccggttcgggttcgggttcgtgaggttctccggggttcgggttcgtgggtgagcggatcgagatggccgcgtcagatgttgagtaccgctgcttcgtcggcggcctcgcctgggccacggacgaccactcccttcacaacgccttgagcacctacggcgaggtcctcgagtccaagatcatcccttgatcgggagacgcaaaggtc

SEQ ID NO: 351461 - DNA, 387 bp, Zea mays
gtgatgtcttctccttcccctccggttcgttttctcattcgcgttatcattcgacatggggaatttccatttagccggatccacacccaaaaaactattttcttcactcataattcctagaccatctctccttggtcattaaacagatgaaaattttgtcaggggaggttgcgtttaatacaagtgctcttaatcgcctcacaaagtaagctgaaataactccaaaaacgaaataattcaaattgaaactaaaaataatacctttccaattaacccgcatcatcttcttatcttatctttggagagagaagatcgctcatgcaacattaggaactcaaggaaaggtccatacgttagagcattcaccgtcttatcattaactacttg

SEQ ID NO: 351462 - DNA, 357 bp, Zea mays
  unsure (1)..(357): unsure at all n locations
ctcgcatttcctcccaatccatcccgcctccaaacccgaactccaagtcgccccgcatcgatggcgcccaaggccgagaagaagcccgcggcgaagaagccggcggaggaggagcccgctgccgagaaggcgccggccgggaagaagcccaaggcggagaagcgtgtcccagcaggcaagtccgccggcaaggagggcggcgagggaaagaggggccggaagaagggcaagaagagcgtggagacctacaagatctacatcttcaaggtgctgaagcaggtgcacccggacatcggcatctnctctaaggccatgtccatcatgaactccttcatcaacgacatcttcgagaagctc

SEQ ID NO: 351463 - DNA, 412 bp, Zea mays
gcgcgcacacgttcgccggacataacctaggtaattgagggtgtaattgtctttagaaagacaggacagatcctcggttacatataaataccccgtacagtgtcattgcgggggacggagaaaattactattgccccaatatactgtgtttactggcatcaaacctttcactactctcccaccgtttgagcttgcctgaccacgagtttgaaagtttcaagagtggtacacgctccatcgctaatctagagtgcaccctacagccaggacactcgatcgatcgctgcttagagcgagagcacatgatatactcgtcatttcgtcgccattgtactcgtgtagctacaaattatggactggtaagctagcgcaacaagagaggacctggaattcatactacttaatgaagatg

SEQ ID NO: 351464 - DNA, 380 bp, Zea mays
attcttgagactaacctaatcagcattctttacataataatattataaggaggattaatttcatatacaatactatatataagaaataatgcttcgataattggtagcctatcaagagtatgaatctatacaaatataataatgagaaactaatgtagagggaaaataaatgccaaacaccagatcagagttgaatcaatgtaatcctgtttttatgtagagaacaagattgcagatcaccttcaaaattggaagtctgagttaatgaatcgggttggtcaaaaagctatagtgcattttgttctcagctctatgatggtctatcttgttatggcagttgatctccctccatgggtcatcatagaaattggtaagatttg

SEQ ID NO: 351465 - DNA, 434 bp, Zea mays
  unsure (1)..(434): unsure at all n locations
aagggactccgccacggtgttggcggcctcatttctgcttctgcagcaccagcacttgggaaccagtgttttccggaggaaccggcaaaggtggccgcagcggcgctcgtcgtctccgtctttcttgagcctcacgcgccgtacgaagacgaagtcgtcgacgatgtcctcacagcaggagagcttgctgagccagagacacaaggcagcttctttgccgtaccggtccggctttcccagggacagggagtggctgatgaggttgagctgcgaggtcttcccggaccaccgccgcgtctgccagcgcttggcggcctgcctcagcgacgcgagccagcggaggcgcggngtgctggtcctggtctccaggtacaccttggcgcggttggagaagatgaggagcgcggcgaccaggcancaggagcagatgcagc

SEQ ID NO: 351466 - DNA, 379 bp, Zea mays
tgaagatccagccggcacaccatcggcgaagaagaggccggagagaggatgatactggccgtgctcttcgccaactccgatggaaacatccttgtcgagcgattccatggggttcccgcggaggagaggctccactggcgctccttcctggtgaagctcgggtccgagaacctcaaagggtccaagaacgaggagctccacgttgcctcccacaagtctgtgtctattgtttataccacggtcggggatgtctgcctctacattgttggcaaggatgaatatgatgagcttgcttcagtcaaggatgtttgtgcgaaacctcctaccgagcgcctctttcttgacaaatacgggaggatctgcttgtgccttgatgaga

SEQ ID NO: 351467 - DNA, 376 bp, Zea mays
gcaaaacaagaagcaaccgtaagcagaaaagagcatgcccagatcatgacaggaagcggatcccactgaggaggaacggaagctggtgctgcacatgtacgagctgggtcgactgcttacacaatgcaccttagcaagggtttactaaccgagggacctgagggcctgtgcccgcacatgccacagttgcatcgtacacatcaaagtgatcgacaaggcgcgtctgcggtgtacggaagggatggtggagcacatgtgaccagtgatcatgcatcatggccacggtgctgaaccataacgaggtgggcattcagaaggtgctcgtcagtcgctgccgactattcttggtcatggactacacgcgcagcggggagct

SEQ ID NO: 351468 - DNA, 441 bp, Zea mays
gattgccatgatgattatggagatactcaattgcaatctagggagagaactagaaataacactagaagttacaacactgtattttaaaggatgccaagtggtagggctatttcagcatgtaagtttttttcaaaaggtgatggcactgaaggcaaccagcttaagcctatgattgatgtggaaatgattaatgtgactgcagcttaagcctaataatactccagcttcagaaatattgtaagaagtcaagctgtctcaagaaatattgtgaacgctatcagggaggtgttggatgctccagcaactgcagatgcgagagtagcaaaaatgcttttggcagaagagatggtgagcatttagcgtttcaaatttaggaacatgtacatttcgtgagtcccatcccgggacatcttttctgacttactatattatgatgctaat

SEQ ID NO: 351469 - DNA, 384 bp, Zea mays
cgatagcggaagaaacaagaggctgctgctgcttcttccgttgcaacttgcatgtgaggcgaggccgtgagagaagcgcgagccatgtctatcgcactgcatagcgggcgcggggtgggcggcggcggcgcccctcggttcggccacgtcgcccgctgcggctacgcggcctcgccgccggcggtggcggggcgcggcggttcgtccttggtgggacggtacagcgacagccccgctgcggcggcgcagtgggagtgggacggcgaggaggtcgagggcggcgactgcgaggtgcaaagcttatacaagggctccgttttcgacaccatggacgcgctccatgaggccctgccctccaagaaaggggtatgcaagttttataat

SEQ ID NO: 351470 - DNA, 318 bp, Zea mays
cccacgcgtccgcaggagttggttttggctacctgacaacgtttggagcaaatggtcaggttgttttttacctaggctcgcgggtggcaatctagtcttaggattgatttctactagagttattaggttgttagtcttctttagactgtgtgcatctagcgcgatgtagaagttttgttgtcaagaaagttgtgacttatggttatcttgatgcaataaattttctcttctcgaaaaaaatgatgatgccgctgggaatgtaataaacttatataggaacagtttttacaattgaaaatgtcaattaccaattcttgt

SEQ ID NO: 351471 - DNA, 396 bp, Zea mays
ctcccctctctcccccaaggccccaacccacttgagcgagccctagagaaggcaaaagccatggcgtccttggttgttcgtgccgccggcgccgccgccgccgccgaccgtcttccctccctccgtcctcgccgcaacggcagcggggtgctctccggcttgagggtcggaacagggcactacggcgcgcggctcgcgcttgcttcgtccacagcttctcacaaagagttcaagatcgcctgccttactgtcgatgacagcagtttgggcccgggggatgaatatgagtctgacccccgcatgccaggcgaggatgagttcgaccatttctaccgtgttctcgccaagaagactgacaacctggtcaactgctacattccaatgccgcttgcactt

SEQ ID NO: 351472 - DNA, 293 bp, Zea mays
cggacgcgtgggcggacgcgtgggttaagaaaggcaggcatgcacaagagctgatatcaacatattgggtgaattattgatctttcgacgagagggtgtgacatgactcaattcatggaggagatgacattcactgctcgactactaccatgttgcatcttagcaattaatacaccacctcatatggttgcgacgatcttgtatagcacaatacctagccattatggcacttgtcctgcaagtaattgaagaactaccaataacaagtaagacaagtactgaattaaggtttc

SEQ ID NO: 351473 - DNA, 335 bp, Zea mays
ctcttcccgcccactcgccaagacaaacgcggcggcgatggccgtccaggcgcagcacctggtcgcaccagccttcctgccccacgacgtcggccacgccttgagggcgttggagggtgccgcggcagtcggtggctccgcgctcctggacgagctcggcctcggcgggtgcgcgccggcgccggcgccggcccccctaggtgacgcagcgatcggcggtgcccagccgcgcagtgagctcacttgcaacgccgccggtgacaacagcgtgtttctcccaaggaagcgggcacacgttgtgccggggtttctgctggtcgacttggataacaggt

SEQ ID NO: 351474 - DNA, 254 bp, Zea mays
cccacgcgttcgcccacgcgtacgcggacgcgtgggtttttttttttttatacaagtgccaaacatgacacgtacaaactcttcgtcgttttgcctgtaggcttaaattcccttgactcagattacgtctacaccctggacccttgtgctacggatcgctgcacaggatttcggtgcagacggtgagtgcgttctgcaggtactacgacctgctctggctctgaactggagcgttgagcatctgtagaagacac

SEQ ID NO: 351475 - DNA, 335 bp, Zea mays
gcgatgcctacaggatgctgatgcgagagatgtcaaaataaaccgtaaatctataaagaggtggagtataagacttatggagatcgcactggaggactctactatgctccaacatgatactgaaaccattactgcatgaatggctgtgcaagacaacaatagtcaatgagtaagctagctatccaaccataaggtgcacagactcataggctgtggttgctaagaattacacacctgacatggcttacttgtatatgtggtgaacacggcaaagatgtaccgtgctcgctatgctcgacatcttgcagagaacaccagttgatgtgcatctacta

SEQ ID NO: 351476 - DNA, 327 bp, Zea mays
gggagaagtagatctgcatctgcgagaggaggcagcgggggtggtgatgatggagagccagtcgctgtaggccccgacagccacagctcccgcccccggatctgcggagccagccggagcttcgccagccgtcacccccgacaaggagttcacgcgcacctgcaagggccttgtcgtcgtgctcatcgtaagatacgtgctgctccagctcctaccttcgtaactaaactacctcgccatcattccatccaagacaattccctatgtatggaccggttttaccgctggttacatctatcaaggcctgccaggggccattggcagttc

SEQ ID NO: 351477 - DNA, 373 bp, Zea mays
ctaacaggttaggtcaaccataccataaatgctgttgcgcgttctttctcaagacggtacatcgtggggattctcgattttgactgcgctacaaaaggaaacccaaagaatgcagggtctgattacgtgcttatacctgaacatggaagagttttttctctggtcatatagggttttcgtgtcatttctaattatgatgctgagtctggcagctttatcttcggactggaatgtgccatttggccttgctccaagcgacttaaaggacatgccgtctctcttcttgtttgcaataatgagaatggtgattggttaacgacacttactaatatgatctagctgtgcactgaagcaattatgcttgaatagaact

SEQ ID NO: 351478 - DNA, 336 bp, Zea mays
cggacgcgtgggcggacgcgtgggttcgggttcgggttcgtgaggttctccggggttcggtttcgtgggtgagcggatcgagatggcggcgtcggatgttgagtaccgctgcttcgtcggcggcctcgcctgggccacggacgaccactccctccacaacgccttcagcacctacggcgaggtcctcgagtccaagatcatcctcgatcgggagacgcagaggtcccgcggcttcggcttcatcaccttctccacggaggaggcgatgccgaacgccatcgagggcatgaacggcaaggagctggacggccgcaacatcaccgtcaacgaggccca

SEQ ID NO: 351479 - DNA, 273 bp, Zea mays
ctgacgcgtggtctccgtgacaagcacaccgacgctcgctccgaatgagaggacaggaggaggagcctgcgagcagaggaagcatctgctatggaggcgcggaggacggacagagatctatctggagagcttaacgctcgcggaatgggccgctcacgcattcgaggccggcgtctaatccagggacagcctctcggctaaggctagtcatggcgactacgtgaagaagccggactgcgtgccagggatggacccacgctcgttcccgatgat

SEQ ID NO: 351480 - DNA, 459 bp, Zea mays
aaattgtgaaggttagaactagttgtgagatattggaggaaaccaatgagagttagttgtgctcattgtcgttgatactgaaacaaagctgaatgcttcaatctagcttgcatgattgcattatatataagcaataagtgttgtgattcttcggttgttccatgatttgttggtagagttcaagaagacatgtttctgcttcgtatttagtttcttgaggaaaaaggcagctcggatcaaattatcggatttgaaaagtaaatttgtagtcaaatcaccatgtagctagtatataatgcaaagtataaattaattaataaaaatactttgcattcatgttgagttttgtttgttgcaatttatgcttgaaatagaaaatttaactcatctctaaattagacttgaattttcaatttaaaatagaaagcaaaaaaatagaaatataagctaatataatag

SEQ ID NO: 351481 - DNA, 319 bp, Zea mays
  unsure (1)..(319): unsure at all n locations
ggaagccgctgcataggtgtatcaagtggttgatttcgtctcagttgattcctgcctggtcgtaggcctataattgtgttcttcgctatggtcttgctgatttcgtctagttctggttgtgtgtgcttgcttttctgtagccctcatagttgtgacgagcttaataaatgtctgtgtgctccagttgtggtagttgacaatagagttctttccttgtatctgtgtctagccaatagttttggatggttgttgactctccttttgtggtgattgttaagccatatatcgaactctnttacctaaaaagaaaaaaatatat

SEQ ID NO: 351482 - DNA, 189 bp, Zea mays
catacccataaaaaaaaaatgatggtgacccgatcgagtcagctcgccccgccaccgggacccataagcgccactccaccacctgcttgctcacggtccgcaccatactgtacgcgctctacgtctcctcgatcaaccaccttcacacccacgccattaatgattgcaagctgtatcacctgtctccac

SEQ ID NO: 351483 - DNA, 338 bp, Zea mays
gttggcttctcctccccctccggttcgggttcgggttcgtgaggttctccggggttcggtttcgtgggtgagcggatcgagatggcggcgtcggatgttgagtaccgctgcttcgtcggcggcctcgcctgggccacggacgaccactccctccacaacgccttcagcacctacggcgaggtcctcgagtccaagatcatcctcgatcgggagacgcagaggtcccgcggcttcggcttcgtcaccttctccacggaggaggcgatgcggaacgccatcgagggcatgaacggcaaggagctggacggccgcaacatcaccgtcaacgaggcccagtc

SEQ ID NO: 351484 - DNA, 393 bp, Zea mays
gttggcttctcctccccctccggttcgggttcgggttcgtgaggttctccggggttcggtttcgtgggtgagcggatcgagatggcggcgtcggatgttgagtaccgctgcttcgtcggcggcctcgcctgggccacggacgaccactccctccacaacgccttcagcacctacggcgaggtcctcgagtccaagatcatcctcgatcgggagacgcagaggtcccgcggcttcggcttcgtcaccttctccacggaggaggcgatgcggaacgccatcgagggcatgaacggcaaggagctggacggccgcaacatcaccgtcaacgaggcccagtcccgcggcggccgtggaggcggcggcggctgctggtactgtggtggccgtggaggc

SEQ ID NO: 351485 - DNA, 432 bp, Zea mays
gtggactccatacgaccatgcctacccccatcctcctccttcgccatcgacgaagctgaagcccaatccatcatgcgaggcgacaaccttggccacttgctgctccactcactcttgcgtcgcgtggacacgatcgagtacacccttccctgccggttccggtcctcacctccggcttgccgaacggtacgcttgaactcacgcgcgcgtcgcatggtaagctaccatgagcaagaggtggacgacgacgaattggagacagaatactcgccctcccctcagttgtcatggccatggcgatcagcgcacacgtgtttggttttgttttattttccttaaatttggtgtggttgccaagagaaaataggagaagataaaaaggtaccaaccattaaagtgcttgaagatagcttctcatctttgacttgcttc

SEQ ID NO: 351486 - DNA, 265 bp, Zea mays
  unsure (1)..(265): unsure at all n locations
gtttactccatacgacctttcctaccctttttttaatcttacaccanccaccaggcgggagcctttaacagtgatgcgaggacccaaccttccccactcaacaatccaatcaaactttcatctcccggacacaacctataacacccatcaatgccggctaattcaatgacctacggcaagccgaactctacccttgaactaacacacgcgtaccaagaaacactaccaagaccaagaagtgaacgacgcccattaccacacaaaa

SEQ ID NO: 351487 - DNA, 256 bp, Zea mays
atctcatgttccggtcgacccatgagcttggacggaagccaccacaggtgcattaacgggatatatcgcgtgtgcatgactgatcgactctcctacacctctttcgcactctgttctttacttcctgagaactcatggagctcaattgacatagcctacagatcgaggtcgtagtactggtctcggtcgagcagtgtgtgctctgacaatcgtcgtcatggcggctgatgacatacgctcgtgtctgtgtataggc

SEQ ID NO: 351488 - DNA, 400 bp, Zea mays
  unsure (1)..(400): unsure at all n locations
agatgagaaaggccctattattcaagcagacttgcaaaggtggtttggtgatgattgggataaaaaagctcatgtaaaagtctctaccgatgggtgcaccaatgactttttaatggttggtctttccacaaaggacatgtcagtgatcaaagccgattcaatagatgttttatgtgattatatcatggcaatagaagacgatacgacactagagtaagtgctcattgatttatctattttatgtgtatcaactacttagattcttgatatagactttttgccatgctacattacacgatgacatgggtgtgtagtttcaatccttttaagatagaaatatctgtcaaagatctgcanaaaatattaaagataaatcaagatattattctaagatgttttg

SEQ ID NO: 351489 - DNA, 257 bp, Zea mays
atcttctttctccttgggggggggggggggggggggtacaaagagatcaaaagaagcgttggtggcgatgcttttctaatgaactatcatggcatggttgccaaggcacgttgtttgaaaggccgacaaggcgacaacgcttttatcgagttaaatatccagcatgggtcgcttcaaaccaaccaacaaatcaatcataggaaacaattaaccaataagcaacagcaaattggctactgcagctagatgcatccacc

SEQ ID NO: 351490 - DNA, 372 bp, Zea mays
tttttttttttttttttttttttttttttttttttttttttttttttttttttttttttttttttttttttttttttttttttttttttttttttttttttaaaaaaaaaaaaaaaaaaaaaaaatctttttttttacaagaaaaaaaaaaaaaaaactcttaaaagggttttttttttaaggaaaggaaaaaaaaaaaaaagggtaaaaaaaaaaaacccaatttttttttataaaaaaaaaaaatattggaaaagggaaggaattgggggggggggaggtccctaaaaaaaaaataattttaaaatgggggggggccctttaaaaaaaaacaaattataatgctggaggacaaattaaattttttttatt

SEQ ID NO: 351491 - DNA, 234 bp, Zea mays
caaaatcatgcagctctttctactgggtgataaacgttctacaggttccagttgcgggaagtgtgttcttgtgggaggccatgcagttatgtagggagagtcatgcacgacgtatgaatgggaacctggaatgtgtgtgctttgatgcctatcattgttgactgttgttgaatgacatgtttgaaggtggataggtcagatcacagaatgtttctcatgaaagtttgttcaagg

SEQ ID NO: 351492 - DNA, 252 bp, Zea mays
ctgattactactcttccttactccaactttttttacttaaataaggctcccctttgggcggggattcaaatgatcatggatccattcacattcacccttttcacctacatcctgaccacaccatttttttaaaacgcccttctcctgagcacaatatatccccccctctaaaaaatcctttttttcaagatctccaatggcccctttaagaacccccacccccactctttacttctccgctagctctctaaa

SEQ ID NO: 351493 - DNA, 415 bp, Zea mays
agttggtccacgaagagatttggctaatcaaaggcagctgagatccagtcaatgaaggttttgtcttacctcgagcgaagagaaggcttttttatgcaccgagaggtttctctcggttttgctgtagaaatatttatcatgcatcctatattatatattcggttactttatgaccaaggtaagtaagctttggactatactgattctataaatacccttgtaggaatgcttgacacagagaacgccttgctctatcataaggtaccagatttaaatcaaaaaccaaatttctaagaaaaaaacgaacggtaaccttatccatcagctttagtaatttatgtgtttatcttacttgcaacaaatactatactgagactaccaaactatgaatgttgtttatgtgacatgtaaatga

SEQ ID NO: 351494 - DNA, 265 bp, Zea mays
ctacgaacccaatcgaggtcaagtaaaacccaagtcctaaatccgaacccgccaatggcgtttcctgtgcgtagctacccccacacctcgggcgggacgacaataacagttcttcctatttctactaaaacatgcaacacctgcgccatctctagagtgaaaaatgtatgtcactaggacacgcaatacctcatggtcaatgcccatgtatgcacccaagcaaatattacataggtgatccttcattctgactatagacgaacaa

SEQ ID NO: 351495 - DNA, 430 bp, Zea mays
ataaaccaaggtaatccttcctaccacaaatgcgagaggctgcttcgtatccgtgacttggacttactgagtcgccaggtcacagttcgaagcagcctttccgcgtttacggaaggaaggcttgccccggtttatctcttcttcagacctcactcgtcactggttctgcccctagtattttttctagaagtctaaaaataatttgtatccaaacagggtctaaaagggttaaaaaactggataagcattgttttgcatcatacttcaccaagaagcccgaggaaatagtcgaactgcagatatgtgaaattcgttcataatttgtccttgctatcactgttgtcacccctgaaaagttctgtttggactttaaagtgattaatccaatgttacacaggtgcggtcacatgtgttgctgtatggcatgctc

SEQ ID NO: 351496 - DNA, 382 bp, Zea mays
agttatttcatgagtctctcgaatcaggcactgaaagtgagagttagagaattacaaactgcataaccaagtttttcttcaagcacgatgctaaatgtctatgggtcttaacatatggcatgttctatgaattgtgggctattagaggaaactcaaaccacatccatgagagtttgcagaagttgttagctatgatgtgtgcacttgtgttttatgtaatatgttgctccattctgtctcactgcgccacctcctatctcgtctccttcgtccccacgagcgagtaagctagtcttgctagtatcaacccgacgacatgttggtctaccaagatctgttctactgggttgaaagaaattgtgaacttaaaaacggcattctt

SEQ ID NO: 351497 - DNA, 139 bp, Zea mays
ctttttcactttactctttattctttcaccaacaattatcctgatctaacataccatttgaccattaaaagctcaagcaaccactctaccatcacccatgggaggatttactttacaccaagtgagaaagccattcttt

SEQ ID NO: 351498 - DNA, 392 bp, Zea mays
tcgtagagagaaggaaaaatatccccaaaccctagctcccgatctcgatggcgaaccctcgcgtcttcttcgacatgaccgtcggcggcgccccggcgggccggatcgtgatggagctgtacgccaacgaggtgcccaagaccgcggagaacttccgcgcgctgtgcacgggcgagaagggcgtgggcaagtccgggaagccgctccactacaagggctccaccttccaccgcgtcatccccgagttcatgtgccagggcggcgacttcacccgcggcaacggcaccggcggcgagtccatctacggcgagaagttccccgacgagaagttcgtgcgcaagcacaccggccccggtgtgctcttcatggccaacgccgggcccaacaccaac

SEQ ID NO: 351499 - DNA, 321 bp, Zea mays
gttggcttctcctccccctccggttcgggttcgggttcgtgaggttctccggggttcggtttcgtgggtgagcggatcgagatggcggcgtcggatgttgagtaccgctgcttcgtcggcggcctcgcctgggccacggacgaccactccctccacaacgccttcagcacctacggcgaggtcctcgagtccaagatcatcctcgatcgggagacgcagaggtcccgcggcttcggcttcgtcaccttctccacggaggaggcgatgcggaacgccatcgagggcatgaacggcaaggagctggacggccgcaacatcacc

SEQ ID NO: 351500 - DNA, 53 bp, Zea mays
ctgactcgtggtcttatccattcgctcgaccacaccaccatcccttctatctg

SEQ ID NO: 351501 - DNA, 426 bp, Zea mays
cccacgcgtccgcggacgcgtgggtgtcaagaaaacagggctcctgtggatcctcgaaggcagataagctgctaggaagtggaacagctgctgatattcttctttggagggatgaaaagagaaccttttcatttgtcacagtattgtttctgcttttctactggttcctgctttcagacagaacttttgtttcatcagctgccaaatttcttctagtgctctcgcttgctctctttatccatggtgtgctgccttcagaagtgtttggttttacagtcgagaaggtcacatctgatcattttgaagtatcacactcagcattgaggaattcacttatgtgtgtggcttctgcatggaatgggagttttcataaactaaggcttttagcagaaggtgaagactggagtttacttttgaaagtatttg

SEQ ID NO: 351502 - DNA, 421 bp, Zea mays
gttcaacggtgcgcccttggctccccctcccctaccactgtagccgttttaggggctacagtgcgcccctattctcttcaccggcttcctcctcctcctcctctcccctcccgatttcttctctgtcccgctaaatggatgggcacgctactgcgccggatttctccccagccggttccttcggccacgcgaccgcgcgctcggaaaactccgctgacagcgaaggaggcgaaccaagggcgacgtattcgccgccggagaaggtaagcgtcgatccgccgtgtcccgcgattcgtttgtcttccgggcggcgagcaacagtgggggtcgtcctcgcggatctgccttcaagctttcgcggattcgccttcaagcttcgcggatcccacacgaaacctccgagttctgtcgccaattcgat

SEQ ID NO: 351503 - DNA, 410 bp, Zea mays
cccacgcgtccgctgcaacctgtttggaggatggcaagctgaagacatctgactgctccttgcaggccactccatccaaaccaaacgatctagctctcgcagatctcgtggagaagaagctgtccagctcgatagagcagatcgagaagatggtgcggcgaaacctgaagagaacttcgaaggccgctcagccttccaagaggaccatccagaggcgcgtcctgatgtccatgcgatgagctgagaaagctatctgctctgccatggcttcccttgtctgctgctttcttagcggcaaccggcaagtcgtaaccaaccatttacgccagttttgcctgaaggaggggtggggtcgtgggggctcctggttctctgcttgaggaccccggggtatgcgccttactactagc

SEQ ID NO: 351504 - DNA, 300 bp, Zea mays
ggctcgcgatctaaacccacacatgccgtttgtttcggggagacagcttacattaggtccctacgaggaggaattcaggggttacgtctgttcaaggccagcagcagcctgagcggcagaaacctgtcccacagcattctagccataccggccaacactctgctcctgcaactggaatggaagcctctgcctccagcaatggtgatgcgtactcaaacaactcactcgagagagcaccatgtacttccgcaccatcttcttcatctgtgggtggtctccttcaaggctcactgagttaca

SEQ ID NO: 351505 - DNA, 305 bp, Zea mays
actctgtacgtccacagctgcgttcgatgtatgtgcatattcaaggcccgttgatggatgaacttttgtagttgtggtccataggtgtacgtatgtgggacgggcataaaaaatatgattttgatctacgtgctttgttattggcgaacaggcgagtgagtgaagagagaagccatgcctctttcgagtgaggcaagcgatgaacgagtagatgctgccattcaacacgggattcagggtctgcacctattgtttagatgagatcggcttcttgtatctacatcattgtagagaagttgtttaca

SEQ ID NO: 351506 - DNA, 350 bp, Zea mays
gccgacgagcactataagatcccttctgtttcttttttggagaaagccgtgttcggcgcgcacggacggttaatcgtggacgtaattctgttgatgaccaacttcagtctgtggggcagatacctgtcccacataattctaaccagagtggccaaaattctgctcctcgacggggatggatgattctgcgtgctgctatggtgatactacgtcaaacaattcactcaattgtgcaccatgtacttgctcaacatcatcaagactctgacgctgcttgcgccgctcagcatcttcgccaaacaagaccatccaacaagcatgggcgatggtatctataatggaggaaacaa

SEQ ID NO: 351507 - DNA, 272 bp, Zea mays
cccagttcgtctattaaaggggaaccagtgaaccacccgatgcaacttgcgtagagagttgggcgcagagaatccccaagcaaacaaacagggtagagggagaggagaggagaggagaggagaggttgggtctgggacaccatggctccgatgaagctgtacggggcggtgatgtcgtggaacgtgacgaggtgcgcaacggcgctggaggaggctggctccgactacgagatcgtgcccatcaacttcgccaccgccgagcacaagagcct

SEQ ID NO: 351508 - DNA, 273 bp, Zea mays
cccacgcgtccgcggacgcgtgggctcaaatccaacgatcaatctttagatcatcccacctcatcatcaatcactcaaatggtggtgacagagtgttcctgttgcctgtggctttcatgtcgagcttctcgttctttcccatgtggaacaacacgagcctactgagacaccgcagttggtggctacctccttgactccaaggaccgcacgggggcctacaccgtggggtttagtgggtgtcaacggtaggtagaaccccacgatcggtagcgt

SEQ ID NO: 351509 - DNA, 273 bp, Zea mays
tccacgcgtgcgtacaacttatgagaccatgtatgtgtccgatcctgactttgatccaccgtatgatgctaggaaagctgctgaatcagatgctgagtcaggcatataggtagccattaccgttcacaagactgatggcagggctgacggaagggctgactcaagggagtccactggagatcctgctgatactactgatgatgctaccggtgcagcctacggcgagacctatggggtgcaagagaaggcgccagggaagtcagcaggaaaagc

SEQ ID NO: 351510 - DNA, 216 bp, Zea mays
gcgtcgagaaagtgtggaagaaccaccaagagctgttgcggcggaagacagctattctgccagattgattctatggaacaaaacgcaaggtcgtgggcgtggcaggaaaggagagatcaggatggcacgtgatcttacaaatttgcgtactgttactaagcacactggtgattgatgagattgtgatgaccagcttgatctaatgtctgtttgaac

SEQ ID NO: 351511 - DNA, 274 bp, Zea mays
accgtcactcaacacagcacaggcagttcgagagagagagagagagagagagagataaagatgtcgtggttcgggcaccaccaccacaaccagccggctcccccggcgtcgggccccaaccaggtgttcaagatcttctgccgcgccaacgagaactactgcctggccgtccgcgacggcgccgtcgtgctggccccggtcaaccccaaggacgaccaccagcactggtacaaggacatgcgcttcagcacccgggtcaaggacgaggaaggca

SEQ ID NO: 351512 - DNA, 273 bp, Zea mays
gtttagagacaaggataggaaaaagaaggatgagaaacatagagactttggttcaagagaaggtgagagaaatgatcgtcggaccggtatccagcttggaggtagtggagttgagcgaagagaaatgcaaagggaagagagggatgctgaaaaatgggacagggaaagaaaagattccttgagagacaaggaaggcaatgatagggaaaaggattctgctaagaaagatccatctatggtaatggaaaaggataacacaatagttgaaaaact

SEQ ID NO: 351513 - DNA, 297 bp, Zea mays
  unsure (1)..(297): unsure at all n locations
ggcgcggacgcgtatgcgaagcgccacctctaaaccttaccgtgtatggagtctgacagcttctacctcctcgcctccgggtccgttatggccggggcaaacctctcagcttccgttaccggacctagccaagttacgtgttgtnttttccaacgctcctccatcaactaatccgttgcataggcaaactgtgttgttggagaataccatacatggactattgaggggccttttatgcctatagataagaaactcgtgcctcctggaggtggtcttggaccgcgtgcactactcccg

SEQ ID NO: 351514 - DNA, 271 bp, Zea mays
cccacgcgtccggcttctcctccccctccggttcgggttcgggttcgtgaggttctccggggttcggtttcgtgggtgagcggatcgagatggcggcgtcggatgttgagtaccactgcttcgtcggcggcctcgcctgggccacggacgaccactccctccacaacgccttcagcacctacggcgaggtcctcgagtccaagatcatcctcgatcgggagacgcagaggtcccgcggcttcggcttcgtcaccttctccacggaggaggc

SEQ ID NO: 351515 - DNA, 274 bp, Zea mays
cttcagcacctacggcgaggtcctcgagtcgaagatcatcctggatcgggagacgcagaggtcccgcggcttcggcttcgtcaccttctccacggaggacgcgatgcgcagcgccatcgagggcatgaacggcaaggagctcgacggccgcaacatcaccgttaacgaggcccagtcccgcggcggccgtggaggcggcggtggcggatacggtggcgggcgccgtgatggaggcggctacggcggtggcggtggaggctacggcggtggtcgt

SEQ ID NO: 351516 - DNA, 273 bp, Zea mays
cggggttcggtttcgtgggtgagcggatcgagatggcggcgtcggatgttgagtaccgctgcttcgtcggcggcctcgcctgggccacggacgaccactccctccacaacgccttcagcacctacggcgaggtcctcgagtccaagatcatcctcgatcgggagacgcagaggtcccgcggcttcggcttcgtcaccttctccacggaggaggcgatgcggaacgccatcgagggcatgaacggcaaggagctggacggccgcaacatcaccg

SEQ ID NO: 351517 - DNA, 271 bp, Zea mays
cccacgcgtccgcccacgcgtccgtccaaaacgcttatgttaacatctcgattgctcgaatttgtgatgaagattgttgtgctgattgttctggcaactgtttatcagcgccagttccatgttcttgtgcaagaataacagggggcgagttctcctatacacttgagggcctgcttaagacagcattccttgatgaatgtaccgcagtgaataatttcctacaagagcaccataggttctactgtccagtttgccctcttgaaagatctaa

SEQ ID NO: 351518 - DNA, 274 bp, Zea mays
ggagggcatccctccagaccagcagcggctcatttttgccggcaagcagctcgaggacgggcgcacgctggccgactacaacattcagaaggagagcaccctccacttggtgctgcgtctcaggggcggcatgcagatcttcgtgaagactctgaccggcaagactatcacccttgaggtcgagtcttctgataccattgataatgtcaaggccaagatccaggacaaggagggcatccctccggaccagcagcggctcatttttgccggcaag

SEQ ID NO: 351519 - DNA, 171 bp, Zea mays
gcgcgcgcaccaccaccaccatccaccacccacacccccacggccccaccctgaccccgacccgatcccgatctgagcgtctccacccggtcccgctcccacctgtctccaacagaacaacagaatatgatcaatcaagacagccccgtgctagctcacccgccggggctg

SEQ ID NO: 351520 - DNA, 124 bp, Zea mays
cggtcgaccacgcgtccggactatagctacaccagaaattgaagataagactaactaggaaggtatgaaaaatcaagaacgtgatagaaccaggcgactatgtactgcatgacacctctattga

SEQ ID NO: 351521 - DNA, 271 bp, Zea mays
tttttaaccgtttgagactgcagttagttgtgatgtgctttgttgttcttacgatgaatgtgccggtctagtttcgtctgggttggcccctctgcttggccgcgtttgtcgtttagatctatccaaatatcatcgtttgttgatttcgaaattggggctgttttgctcatgatttcagttcaaacttcaccatgcttcatgttttggaattgtaattggtggctatgttaattgtctagacaattgtttagacttcagttcagatttgtgg

SEQ ID NO: 351522 - DNA, 269 bp, Zea mays
gcaacacacacggactgattcgaatgatgtaagagatcacaaaggttttcctaaaggggcatcaatgctgtgcgggacatacatcgcaggtggtcggtacctgtggcctgtgctggaagtcatgaaaagatgcctggaagcacacacggtctatgagtcacggctgatgattacatctccaccgggagcatgagaggcgttccttgttttgtggattccaactacgatgacccactagcgcggattgatgtgacacattgttcgtgctg

SEQ ID NO: 351523 - DNA, 339 bp, Zea mays
cggacgcgtgggttgagtttcatctttaagtttccctttattatctgtttgagattttggagaaaaacaaatcaatgttgattttattgaatttacttgagataaggggaccatgcaagtatcggtgcaacagttttatttcagttgctagtttgtacaaaaatcagttatggtggatataatttagggtgttgagactaaagctcgacaaataaaattaatacagtaataataattaaggagatgtttgcgactactccgatccaccattttaagttctggtccaccaactacaccatgaagttgtttcatgatcgaagtttttagaggttttaaact

SEQ ID NO: 351524 - DNA, 238 bp, Zea mays
tccatgcgtccgtatttgttacctgtcgccagatagccggccctagggtccatagacaaacccggccaccctccgattttctgccagctccacactccctagatccgtttcttgcaccgggagattgtagcaaatacgctaaccaatttacctgtcaagaaggcggcggctgagccggctgccaacgaagccatatgcccatccttcgaggtgtctaaccagaaggagtctgcttcaa

SEQ ID NO: 351525 - DNA, 340 bp, Zea mays
caaacaaaatgaaatactatattaagaaaactggtacatgtaagacagccatcccattcatttttgttacatgtagcacttgaatcattctaatcctacctgcctatattccttacatcaagatacattgcagggaaacaatgtgcatcactggtaggaacttcatctctgctccaaccatcagcttattcaacaagctttctggcacataaaatggaggatgataacacaagtccgaataatttagttcatctgagggggctgcatctccagaaccctcgtattcaccgtcgccagccgggacgtccagatagcgctcgcgatcgggctcggtctcagt

SEQ ID NO: 351526 - DNA, 186 bp, Zea mays
  unsure (1)..(186): unsure at all n locations
ttgccgggtccacccgcggatncgttgcgggccgctcccggcctcttcctgctgcctgaggtttaaatggcaacatcttcataagcttcatgaagtgctctgcatgtgtcattagacaccaccctaaaactgcataaatcgggcgctcggcacattgaggatgaaatcaagctgaaagaaatccaa

SEQ ID NO: 351527 - DNA, 311 bp, Zea mays
ggaggttctataacaaaaagagtgcagttttaacaaagctaactatggctttagaaaacacaaggctacctgaatgcatcaaccaggtaccctgagtattgaaatccaaatagtgaacataaaaagccagcagatggcctcccattgtgctatctgcttttcatcctgatcctgcttagtggcttgttcttactgtcgtggaaagtagaaattcgaatttggagggtgcatatcacaaaatcctaatgtattatatgagctgtataagcccgcaacggcaatcaagcagctgaacagggtgcatcccatgc

SEQ ID NO: 351528 - DNA, 372 bp, Zea mays
gtcacgctgacctgaggcttctaatacaaagattgaggtgtaacttgcaacatatttataagctcgatgaagtgctctggatgaactattagacaccacccaaaaactgcataaatagggcgctcggcacattgaggatgaaatcaagctgaaagaaattcaactggcataggacacggagcggagactagtaagaaaacaggagatggaagaacgcgaagcagcgacagaagctgagttttatcaacgctccgatgaaatggaagcaaaacagagttatgatggtgcgcaagaagctggtgagaacgaaatgggaaagaagattgctgatcgcggttttggcgagtataataggtacacgtgggaggagat

SEQ ID NO: 351529 - DNA, 349 bp, Zea mays
ggtcaattcagttgtcaatgggctaaatgctgatgagctttacaagagaagccggcatgagattacatcatccaggaggaggatacaattttttttgggatgtgttgtttatttgttctctatgtaacattttctttggttagttctttgtttgtttagattgctgacagaggttcatatccgtacacatcatgcggactacccagaattcagtcaggaaacagaagcccttatgttttgcttagcatcggtgcgtccctttgaagctggagctaacattctacaaatgagtgctctatcaagtgcacttggcattccattgcacctgtcttgtacggatgtaaccacg

SEQ ID NO: 351530 - DNA, 290 bp, Zea mays
gttggcttctcctccccctccggttcgggttcgggttcgtgaggttctccggggttcggtttcgtgggtagcggatcgagatggcggcgtcggatgttgagtaccgctgcttcgtcggcggcctcgcctgggccacggacgaccactccctccacaacgccttcagcacctacggcgaggtcctcgagtccaagatcatcctcgatcgggagacgcagaggtcccgcggctttcgcttcgtcaccttctccacggaggaggcgatgcggaacgccatcgagggcatgaac

SEQ ID NO: 351531 - DNA, 291 bp, Zea mays
gaaaaggtgatttccttgattgttagtatctacctgtattttccctccttttgggagtgcaggttataatactatttgcttccctctattgccaacctcactacaaaatttcctctttttgtttttttggtacaaagcactttttaattgattcatgtgccagaaaaatgttttttatctacaggactatggtgcctatgagaaaaagcaggccttgtcgaatattcatcagcaggaatccagtcttcagtcaagctttaccgaagtcatagataacacttgtgcatcaat

SEQ ID NO: 351532 - DNA, 329 bp, Zea mays
ataactctcgatcgactcacacaattccccaacaaagtctactccgcgccaagtggataagattgcggaagctccgtatgtaccatcaaaggagaggcggggaacaaccaggaagagatcaatttaaatgcaacaacttgaaggttgacaagcatctggagaattaccttggccatatggctatggacccgcctgctgtacgcaacataagaaaatatctgtactgctttactgccgattagaaatactgcacgcaatattctcacagggaagaaatcaggttagtgatggaattggacgaacatgttatgcgtgtagctctcgcctta

SEQ ID NO: 351533 - DNA, 244 bp, Zea mays
gttcaatttagttgtcaatggtctaaatgctgatgtgctctacaagggaagcgtgcatgagattacatcatccatcaataggatacaattttttttgggatgtgatgttgatttgttgtatatgtaacattttctttggatagactatttggttagttagatggcatgactgacgtccattattcggcacatcatgctgtctacccagaattgagggaggaaacatatgcccttatgttttgct

SEQ ID NO: 351534 - DNA, 428 bp, Zea mays
  unsure (1)..(428): unsure at all n locations
cggcgaggggtagggcancggcacatcgtctcggcagctcacatagaaaccaccgcccttggcggcacatcgggctcgaccatcctgactccatcanccgttngcctgtctgttngttctagggaccaagaanngagcagagatgatcccatggatgcgagccagagggcggggatgaatgaggatgtagcatccacatacggcgtctgtctgctgaaaccccatacgcgcctgcttcttcaatcccggtcggcgtacccggcatggtggaagggtacttctcgcccgagtgggtgggaggctcgtcaaccaccaccgcctgtgttccgggaccaactgcttctcggcaagcgccaggcttccacgagggccgtcctgcgacgacccgtcgccgcgcttccttccccgacgaacctnctcgacaccaa

SEQ ID NO: 351535 - DNA, 279 bp, Zea mays
tggggccggctaccgccgccatcgattctcatctcacgccttcttcatcccccttttctgcaggcccagccggacgctctctcctgatcttcctccgccgtctcctcctgtcacccgcttgctttgaatcccttttttctgctcctccatcgctactctcctacatgactgtttcttctaagaagcatgacctctaatttaatcaaaaatttttaaaagaatattatgttttacacaaaattaaattatgcatttcttttcttaaattctataaatact

SEQ ID NO: 351536 - DNA, 146 bp, Zea mays
gactggtacaagatcctgggctccgagtacgccggtagcaggtgggcggagcggggacaaccgtgcggactactacacgcaaccttctgtggagcaggtggccgttgatgtgtctctaggcacaatttgctgaacgggccttagtc

SEQ ID NO: 351537 - DNA, 367 bp, Zea mays
gtttcatcagtatatatatactgaaactaatgctatatatatatatgttatctgcagtacgtattctcccaacaccggcccccttcaatctgcaggtggaggttgctcaagagaggctgaagagatggtacatggaagagaacagaagactccaggggtccagacgaaacccttaggccggccctcagctccactgtgtatctctagttttccactcaccacgagaacaaaacgagggagacgactgctccacgtacaggccgatcgaggctgaaggatcatctctgggctgtatggtattgtagacacaaataatcatctgggctgggctgggcatgcaggtaatagtggtgtgcactagttctga

SEQ ID NO: 351538 - DNA, 377 bp, Zea mays
tttaggaatcgtcagaacttgatatttcacacctctaactcatgaaaagaaattgcgaactaaggttttaagccttgtaatcaacaatgcgggcttgtgctgttttgacaaagtgggatgagagtgacagtgaaagttttgaagggtttcatattggcaatggatttaaatgggatacaacaagacacatgtttgaacaatttggggatatattcattgctgcaatgtttgatccaatgggtattggttttgtatctttttatgctttcgtgtgtcaaagtgtaaaatacaaaatgcaaagaagatcacattatcattaaaaaagcgtcagcacaaaaaattccttctatctaactggaataaaaatcataagtaat

SEQ ID NO: 351539 - DNA, 242 bp, Zea mays
ccctagcttctgtttggctgttgccttgcgggtggcggatgctttggtgcgctgtgcagtgcgctccagtcgtagtggactcggaatggccgcacttagccaatagatcagtgtattactaagtcgctcgtgtataatataacgcacacgggtccgatacctaggttgtttatcatgaagagcgcgcaagtcgatgatgcactcgcattaaaggaatgaagatatgcttcaaggaagggata

SEQ ID NO: 351540 - DNA, 217 bp, Zea mays
cccacgcgtccgaaaaagccctagccagatcagcgatggcaacgcacccggcgtccccgaccgccggcgctgtggcgacaggtcgccgtccggcccgccgccggtgcgcctgtctgcggcacaggcggtggcggcgatccagcctacctcaccgcggtacttattctgctcgcttgccgcttcctgtgccggggggatatccgtgcagcgacgcatg

SEQ ID NO: 351541 - DNA, 370 bp, Zea mays
atttacagctaaagcaaaatgctctatcaagttccttagaataaacaagccaatccctgtcacaactttctcatttgatagaattctattatagaatagtgaagaaaatcttctagaaaacctgtccttaggccccttctgaattgatagatctcttttaggtccgttttgtgctaaaatgtcaacttgtttaatattaagtgaatcccaatatcttggatcaaatatatcaggctgaaaagaatcaccagcatccgaagaaggattcaagtcttcgctgttattgcctatctgagtatttgtgttgtcagggagagcttcctcaacttcgacattattttctagaggatctatacgatcaatgtcaata

SEQ ID NO: 351542 - DNA, 111 bp, Zea mays
cccacgcggacgcccacgcggacgaaaaaggacccagggaccacaagggagaggagaagcgagacgagaagcacacaacaaacggagcacaacacaggaagcaggaagaca

SEQ ID NO: 351543 - DNA, 115 bp, Zea mays
gaaacgcttactttcttgtttgttttgatctaccttttttttccggggcggtggcaatgctaaattcaccttccattggggtaaagagaagtcccacatcaacattgtggttatt

SEQ ID NO: 351544 - DNA, 367 bp, Zea mays
cctttgtgctataaaatggtctaccaccatgacacatgatatgtggtaaatataatataagtcacctgtaaactgtggcagatagaaatagaaaagagaggggaggaggaagtgtgtgcatatgtgtgcgcgcgcaaacagaccatcacagagagtattgtttctttcattaggactatgaggtctcgagaatcgaaggggccacaatgtatcaagcaaatgttataaggtgtatgcttgggctggtacgattggtgtagcaacctcattgatacaaccgtatgttgctagttatatgaaaggtgtaccaggggaggtgatcgaaagaaaatcctatgtgatagtgtggcacccagctttcatgcga

SEQ ID NO: 351545 - DNA, 267 bp, Zea mays
atcatgctatcatcaacacgagcgttcaaattctgatctgctattacatgaatggggctcttattgtattgactctccagataatacaacttctcatatttctttcaattgaagcgtgcctggcaatttctttccttggcttgaacgccgccatctacatcaccaggaaatggctatgggtgtatattgacaactaaatctagacttttgctttcaatgcttatacgaccaggctactgattctgtgtgatgtcccgcttttcgcat

SEQ ID NO: 351546 - DNA, 319 bp, Zea mays
cccacgcgtgcgggcgctgcagatcatggagaagctggagatcgtgcgcaagatggtgtcgagcgcttgcggcggacccctcttgacagaggcacggtgttcgccaggaaggtggacctcaccggtgtcgacggtcaggcgctcgccggccacgggctcgggagcaacttatcagtggtgatcttcgtgctgctccacaacgtcttcagcaacgtcaagtcggacatcgatggcatggtctctgcttccactccttattagccatcgtcacctagctaccctacgtgtctacagatttgcagtcactagccctaaagtc

SEQ ID NO: 351547 - DNA, 385 bp, Zea mays
gttctaaggatctgaagcgtgggaggagctacttgaggtctgcatctcctcaccatgggaagggccgagggagaagtactcaaggtctctatctccttaccttggaaggggccgagggagaagctactcgaggtctccatctcattatcatcgcaggggcagaagctggagttacagtcggtcgcactcgccaaggaacaactctaaggcttatggtgaagaattgccatcaactagatctggttatagccgcggccccaggaggagctccccaccgatggagcgagctgaatgcaatggtggtagccccatgagaggtgaagctcgggggaagtgacagcgacctataaaatcactctgggattgtaaagtgtcaaacatttgg

SEQ ID NO: 351548 - DNA, 195 bp, Zea mays
ggttcgtgaggttctccggggttcggtttcgtgggtgagcggatcgagatggcggcgtcggatgttgagtaccgctcttcctcggcggcctcgcctgggccacggacgaccactcccttcacaacgccttcagcacctacggcgagggcctcgagttccaagatcatcctctatcgggagacgcataggttccgc

SEQ ID NO: 351549 - DNA, 96 bp, Zea mays
ctgagcaatcgtaagtttgaaaggccttgctgaaaacaccacctttagtggggcggataataaacggtctccttctggaaaggttgaggggggggt

SEQ ID NO: 351550 - DNA, 289 bp, Zea mays
gacgatgacgacgacttggacaacgttcctctcgcactttccagggccaagaggggaaacgagaagcagaaaggcaacaatgcaatatgaaggcttcttcaaaagtcaagaaagaagtcagttctgatgatgattttgtcatgccaacggcgcaaaaaaaaagtgcaggtgctgctggaagtattgccaagacatccaaggttaaaaaaattaaagatgaaaatttggaagatctcaaggaggccaggaaaaggaagaaacgagtgggtgtcaaagaaaaggcaaagtt

SEQ ID NO: 351551 - DNA, 271 bp, Zea mays
ttagctttagaacgagggtacccgagactgcctatgatgcgggcattaatgacgactctagtccaacagaacagggttgcttgtgatgtgagtgaaatataaaacattagattgggtttatagcgatgccactgtgtcattgacgtatgatgatgacatcaattaacttggcagggttcaggttttaataggtgaggggaactcacaacacacgtggattcaattgttgaggagggttacttaatgtctacattctatacatttattattg

SEQ ID NO: 351552 - DNA, 229 bp, Zea mays
ggcggcgccgtcctgctcaccgcctaaggttcagtgctcgttcgcctgctggttttgaaatctatatctgaactgaagtgttttcctgtctcatcattttgagttaagaaaacctgttgttctaaaatctgtggttcctgcctgttgtgcagtgctaattctgttgtcgatgccggctcatatcaattatttcacatcaattacatctatcctcgctatcagttgtgct

SEQ ID NO: 351553 - DNA, 349 bp, Zea mays
ggacaccagatgcaaatgctacatctatggttgctggaccagaacttgatgtattaagtgccatagagaataaccagggacgttatgttgaaagcgtcaaattgtactgccttttgattttttggaacgagttcggatgcgagagtttttataaagtttcgagtgtaaccagagctgattcactatcggtggagttactgaggtacttgtattgacataaaatttcaggcctatcgtgtttgctatggtttgttcttggacaagcgcaggttcatcaaggtttaaatgattatgccaaatttttttaagtttgccatatttatcatttgtgtgcgtagtatattaggtc

SEQ ID NO: 351554 - DNA, 276 bp, Zea mays
cgtttcgcgtacgactcagcccgcctcaaggagaggtaagttcaggagacattttcgagaagctagaatggctcctaagctgttcctgccaagaagggtgatgccaagacccatgcctttaaggttgccaaggctgttaagtctggggcagccaataagaagaccaataatatccgcacgtatgtgacatttcactcgccccacgaccctttagaaggctagggtcctcaagtacccacgatttcatcactaccgaagggaacattgctttgatca

SEQ ID NO: 351555 - DNA, 149 bp, Zea mays
tgcactcgatgcaactcccgttcgctttctaatcggcccatacatgagaatgggacccctcattcgtccatggacttgacctcacaagaacaggttcaaagaggaaaaaaggagccagcttatcaacgggaaggaggccatagaagaaa

SEQ ID NO: 351556 - DNA, 412 bp, Zea mays
  unsure (1)..(412): unsure at all n locations
tgccgtccgcagaaaaaagggnttgtctccacttacccacctgtgtanntcctccttngtttttcagcgaggctgtctggagtctgtctgnnctttttccgcatcgggccaatatgcctctgtccgccgtgaaggtttccgtgtcccgcgacccgcatgtctggagtcagtcctgagcaaaggtgtgttatgcagagcgtgattatgacgctgttttgcactgaagtctaaagagtaagtaagataggtgtcagataggaaggctgctgaatggactctaaattgtacactataaaatttatatggtgtttggtttgtttcattcaaatttaggtggtcatcatgagttcatttcttaaatatggtgtgatgactcaattctttatattagtactaactggtgtgatgactc

SEQ ID NO: 351557 - DNA, 239 bp, Zea mays
tccttccgctccttcttaacgccgagctataataggcgtcgcttaaggcgagggcagcttatgggtgcaccgtacaatttctgtctattatcgaccacgctaagtgccccacccttaagcctgttatttgactttatgggcgcaacgggtacactacgggtgtgaagagggatctcattgacgaccgtgagcagtgatctcagccaaccattgtcgctttaatccacccgttgatgttc

SEQ ID NO: 351558 - DNA, 102 bp, Zea mays
  unsure (1)..(102): unsure at all n locations
gtgaacgtaagcgagccatattctttggtatgcagtctgaactatatgttaacgtttgggatttttgttaacatgaagtatctgcttggttgccttgnaaaa

SEQ ID NO: 351559 - DNA, 278 bp, Zea mays
  unsure (1)..(278): unsure at all n locations
agcagctagctctggttccgctctgcgcggcgtaccggccgacgacgacacgatgcctttataggaagctcattcctcctcctgctcctgcatgccctgcaatgcctaacccttgttctaggagacatgacgagcacgacacctgccgccgatgaccggggcgtggtggacgtgaacacgacggcattcaccatgcatgactctgctgcgtgggcgtctcccgatggtgccgaaaaccttgaaatgtactactgcttnctctggacggaacgacaccc

SEQ ID NO: 351560 - DNA, 106 bp, Zea mays
gttgagccgagggttccacagcgattttgtacttcgactgtgttcttgattttcaagtttaatcaaaggaagggtcacggtccagcccacagggctatttggcttc

SEQ ID NO: 351561 - DNA, 291 bp, Zea mays
cccacgcgtccgcgtctgtgaatcatgaaaacaaaataaaaagcagttgaaacctgtatcgcaaagggtaacatctctgaactccagcattcggcctcgaaagatggcctcagctttcctgacctcttcctcctgtccctgatgacatagaggctgatgtttatgttcctgaagccgatatcctgtcagtcttagatgtgccttctgtgaaaatgggacgagttattggcagagaggggtcaactataactggcttcgaaagaatgttgcggggtggtaaatcatattggt

SEQ ID NO: 351562 - DNA, 120 bp, Zea mays
ggccgccgccgcgctgagtttgggccgggctctgttaatctgggcgactttgaggttctctgctcgcgctgcccctgccgttagagtgaaacgattctggagaaagaccgtataatccta

SEQ ID NO: 351563 - DNA, 383 bp, Zea mays
tttggatctctcaagtgggaattttgttgggcttgcgctgtcattatttatgtcatttttttagattagtccatagttaaatattgagcaaatggcatgaaaatagatgtggatgctgcaacaactgaggtgtgcttgataagcagccaaataatatatcgtgtaatagattaatatatatgcatgccttaatactattctttagcaaagcaaaatatgtgactttcaatatgcaccaatcacatgcaatttactttagtgggtagcattatttttttttccagccaaaggctttaattcttgactactgaagtgaagcttagcattattttctaatgatctgtaaacaccaacttggattgaaatcttgtaactatgtaatt

SEQ ID NO: 351564 - DNA, 272 bp, Zea mays
ctttgctcctctccccgcgtgctctccctctctctcgcgcgcggcgacgactcggctagtcggctaccgccgccgcccctacccagcttcccagctcttcgtctgatccctccacctcgacgagcacccactacatatcccggagcgtctccaccgcacgtagggagtgtatctattagggaaggcccaagagacagagacctggtggtggctgggggccttgcggccttcgtgctcggggtctactactacaccatgagagccttgggagg

SEQ ID NO: 351565 - DNA, 262 bp, Zea mays
cccacgcgtccgaaaagttagatctatgttgatccaaacagtccgatgcgttgtcttgtgcagtgcttctaatcaatctctttcaatagcagctcccgaagacccgaactgagttccttcaccgacccataccgtagggcgcacgcacctcactgcccctttagcagcgtacggttcgggatttgagatgctggcgctgctcgcggacggcaggatggcgctgacaatggcgccagaggctatcgtgtcactgggcagtgct

SEQ ID NO: 351566 - DNA, 376 bp, Zea mays
ggggagtagtggtaaagaaacatgcgctgcatacgtgcacagagagtgtgctaaactgtcaacttctgacttatggacaatgccaatggcaatgtcatgctacatgttgggttttcgccggattctgttttggagctcgcttctgttacatgtgaaggtaatgcttctgcaagccatgatgttatgttgcatgaaaacccaaccgatgctggcgcattgaatgatggtgatccatctgctttatctacttctgactatgaaaaagaacatgcttcatcattgatgaacttggagcagcatgctagaagtactttgcacgaggacaccagaaaggaagagggtgtgccatctcatggcatagtagaaaatgatattg

SEQ ID NO: 351567 - DNA, 305 bp, Zea mays
aataccaaccaagggcaaagagcttcacaatttgtctcaacagtgcctatcatactcaatcggatggacatactgaatgagtgaatcaatgtctcgagacttacatcgcaagttgaacaaatttggctgttgaacaaatcggaacaagacttggataacatctgcccacatcgcaaatcctagatcgtgagttccttcatgtgagtgctaacactcctgctaactaatggtggaggagagccttgacctgctgtgtgccgcacagctcgaaaggcagagcgttcccctggagctggaccgcgctc

SEQ ID NO: 351568 - DNA, 322 bp, Zea mays
acccacccgtaccggctagatctcctagctggatgacctattttttttttttattaatacctagggcaggcgcaaaggagctttacacaacaaccacagaaaggaggctattacaccgggaacgagggtgctctacatgcatgggggggctgaaccttacctaccccagggccatgcggaaacctagttaggagaagcctgttaatggggcctggcgggccaccacctccaccaacattgctgtgcttattgtaaccccaaccaaggctgggctgttcctgtgtttacaatacaactgaaaaactaggagaggggggatttg

SEQ ID NO: 351569 - DNA, 296 bp, Zea mays
gcgagtgctgcggattcacggaggagtgcacggagccgtaacatagagggcgtgcgcgcgcggttcggaggaagaggatctgaaaatctgtgcggagacgcaatgggcgaggagctgggacgcgcggtgacacccggcatctctcaaggcgaggcgctgtaacgacatgtccacacttatattagtgtgttccagacaacgataccagagggccttgagtaagctgacaagaaggctactaatgaccaactttggcctgatcgcggagagcgtggtgcacgcgtaagtgctgttag

SEQ ID NO: 351570 - DNA, 275 bp, Zea mays
  unsure (1)..(275): unsure at all n locations
aaannggggggggaccaccccgtccgcgagtcgcggggttttcttgtttttttacaaaacactctcgaccccacgggtgggtaaggtggggggtgtgccccacaccataatttctccaaaggccggaggcgggaggacataaaatacatgcggtgccagctgtgcgagcggatcgcccacgccatctccgcgcacgtcctcgagaggcacctggcgctgcaaccctctacgaaagtacctgagatcgagatcatggaaggcgtggaaaatgtgtg

SEQ ID NO: 351571 - DNA, 331 bp, Zea mays
cagactcgcagcataatattcttacaagagccttgcactaatcaaggaaggttacaattgacagttcgatacatgataacagtgatgtgaagactactcaggatcttaccgggtgatcttctagatctgagcaacatataaacaactattgctgcccagacaaatgctatgtctggagggatggacaccaactactactgctgtacgatacagtaccgtatattgggattataaacgtctgagagattgtcttcaccctgtagaaccttgaggtagatagaattctgcggctcactattgtcgagaaaggacacaagctgctgcttgttga

SEQ ID NO: 351572 - DNA, 385 bp, Zea mays
ctcgcattttccttgcaaccgattgcctatccccctcccaaccaaagaccgatggcgcccaaggccgagagaagcccgcggcgaagaagccggtggaggaggagcccgcggccgagaagacgaccgccgggaagaagcccaaggcggagaagcgggtccccgctggcaagtccgccggcaaggagggcggcgagggcaagcgtggcaagaagaagggcaagaagagcgtggagacgtacaagatctacatcttcaaggtgctgaagcaggtgcacccggacatcggcatctcctccaaggccatgtccatcatgaactccttcatcaacgacatcttcgagaagctggccggcgaggccgccaagctcgcgcgctacaacaagaa

SEQ ID NO: 351573 - DNA, 376 bp, Zea mays
  unsure (1)..(376): unsure at all n locations
gggttggcttctcctccccctccggttcgggttcgggttcgtgaggttctccggggttcggtttcgtgggtggcggatcgagatggcggcgtcggatgttgagtaccgctgcttcgtcggcggcctcgcctgggccacggacgaccactccctccacaacgccttcagcacctacggcgaggtcctcgagtccaagatcatcctcgatcgggagacgcagaggtcccgcggcttcggcttcgtcaccttctccacggaggaggcgatgcggaacgccatcgagggcatgaacggcaaggagctggacggccgcaacatcaccgtcaacgaggcccantcccgcggcggccgtggaggcggcggcggcggcgggtac

SEQ ID NO: 351574 - DNA, 365 bp, Zea mays
aagcagcacatgcgcactcggagcacgatcggcaacaatatgtttctgctattcacgatgacagaggcgaagatataatgaaacgcccctggtgaagaggcccaggatgggcacggctaatttcagggcagagttgcagccatttgagtctggaccacagcaacccactgtttcaacccaaggtgctctgtctgtttcgccacaaaacagtcgtggagtaactaggtccttgactgtagtgctgcaagatgctgggtgtgaatatactttagctgtcgatgattctttcatcgtgaaagaacccaaaccagaaccacaaattgatatagcagaaatcaacattggtgaccatttaactgaaccac

SEQ ID NO: 351575 - DNA, 382 bp, Zea mays
gatttacggaaatttcctataaaaataatttatctttattaggcttctttggtggggctctcagttggcaagggacttctatattacgaaggttcacaagttctgttgagtagacaataactgtctatttgacatgacattggcaccataagactgtacatgcttaccttgtctggcttaggaaaccccctgtattttaagtagctttgtatgtggatgcaccgactggaggcacgaacttacgtttcatggtgtacccgcctaataagactaggcttgttgctgacaccgtatctttgtacaccgcactgttgctaggaccccttagttggctcagcaacctgtacattatcggcagcttgcacattgatgatgtttagct

SEQ ID NO: 351576 - DNA, 382 bp, Zea mays
cggacgcgtggggtcaactctcgtttccccccttgcgccgtcagctatcccggtccattatcggtacgaattcgggagatctccgaattcgggatagataaatttgttgtgctcgcgcaagggagtttggcaaatgagggccgtgcaaatctagaagccccagcctgggggcgggtggttggcctctgactctggggatgtcgcggacccaaagacggatttttgttctggtttcgatccccattgcccccccgcgaggcttcatttttcttcccctttgtcttgacggccttaagttaagcgggtgtgtttcagtgattattattagtatacatctgcactgacatggtacgtttcttgatccgcagttccttgtgaattg

SEQ ID NO: 351577 - DNA, 371 bp, Zea mays
cccacgcgtccgcccacgcgtccgcgtgttcgttcggagcgcacacacacacaaccagatctcccccaaatcccccgtcggcacctccgcttcaagatgcagatctttgtgaaaaccctgaccggcaagactatcaccctcgaggtggagtcgtctgacaccattgacaacgttaaggccaagatccaggacaaggagggcattcccccagaccagcagcggctcatcttcgctggcaaacagcttgaggacgggcgcacgcttgctgactacaacatccagaaggagagcaccctccaccttgtgctccgcctcaggggaggcatgcagatctttgtgaaaaccctgaccggcaagactatcaccctcga

SEQ ID NO: 351578 - DNA, 314 bp, Zea mays
gtttagtttccgcccaacctgaaccagataggacgccgactggatcacttgaagggggtattaaacagctcagaacttactcaagaatctttttggtaccaaagattcatataaacaagaaaaatgcattcaatttcccaaggacctgaaccattcagaggcatttacaggcacttcataaacgtagaatgcctgccaagccattcatgaaccccataaacagcctctgttctcagccgcttattaccacctctgtcaactaaggtctcactgcattttcaaagacctgcaatagtttataatatggaccattt

SEQ ID NO: 351579 - DNA, 245 bp, Zea mays
gttttactaacaacaagtatggattaattacaatgatgttactgtaattgcatggggtctaaaagatgcgactttttaactaaacacagtgtttacgacgttctacgattaggtgctaaaaaaattttcggtagtcgtgatacacatcaagatttggcttcggtatatagttacacatatcgtgatgtttatattgttatagtctgttcaagccttactgatcgttttctggtttagacttctgc

SEQ ID NO: 351580 - DNA, 374 bp, Zea mays
cgaattttggtcgacatgaagaaacggggtctctctcttaaacaatgcatctcgaaggctaatcaattgatattgtctcttcaaaactgcaatcagaattgacaaatttggaatcgcgacatgattgtcctcacatgaatggcactcttagcctaggtctttcctcagcgagagcagcagttgttcttcctctcaaaatggacaaaggtggacctcggactgcactttttaggctatgcaagagtttacagtggccaattccagaatttgaatttatggaacaaaggtttaggactcctattgttctggatggggttacaactacaaacttcaatagcttcgtttcaactatcaccttgcacatacctgatgtg

SEQ ID NO: 351581 - DNA, 374 bp, Zea mays
cttactacagtcgacatgaacatgccggggctctctcttaaaccgcggatgcggatcgctaatcaagggatattgtctcttcaaaactgcaatcagaattgacaaattaggaatcgcgacatgattgtcctcacatgaatggcactcttagcctaggcctttcctcagcgagagcaacaattgttcttcctctcaaaatggacacaacgtggactctccgactgcactttttaggctatgcacgagttaacagtggccaatcccagaattcgcatttatggaacaaaggtttaggactcctattgttctggatggcgttacaactacaaactccaatagctttgggggaactatcacctcgcacatacctgatg

SEQ ID NO: 351582 - DNA, 377 bp, Zea mays
attcgctaatactccaaagcttacttcgataattctttgttcattgtaagcttcagagattttgaaatggctgagagggaaagggtgatgaactcacccatgtggagtactatgatgctgcagagaaggccaaggttggaatgattactgaagagatcatggctagcttgtttgatgattctgatgacagcgaagaatttgattttgaagaggataatgccaatgtcgatgatcggtcatattgaggtactgagaaattctaattatatcagtgatatttctatcgtgaggcttggtggagaggaaattacacctattccttagaaggatgaagtagtggtagtgaagtgctttaaaaatttgatatctaccttcat

SEQ ID NO: 351583 - DNA, 221 bp, Zea mays
  unsure (1)..(221): unsure at all n locations
aaaaaagggngggagggacgcgtccgcggacactacgcatcaaacaaataattatattttaaccttagacaaaaaacgtggcgggtggaaattttggggcgccacaccctaccacaaaccttcctttatatccacaccggcggcacacacaccttgtttttgactgagcttggggcgtccacatcatatgcgtgggacgggcgttttcggtttcataagcc

SEQ ID NO: 351584 - DNA, 260 bp, Zea mays
cgtcatcatgcactaagaagtgctgcttaaccttgatcctggaccagatgcctggtcaatgatgaatcaaacttcaaggctgcacgaatatagaacgacgctctccggtatgaaccggagaagaagtcctggacagaactcatggaaacagcttcagtctaagagactatttctgcactcctggatgtttagacccctatagtgaaggctccacaaatgcctgtcattaagattgacaagcctgccatggctgaaatctc

SEQ ID NO: 351585 - DNA, 247 bp, Zea mays
agtaaacatgcactaacaatctctgcttaaccttgacccgggaccacaagcctgggcgggaagaatgaaacgctaatcgaccacacatacagtacgacgctctccgatcggaaccgttgtataagtcctggacagcactcatgaaaaagtctcagtctcagagactacttctgcacaccttgatgtttagacccctatagtgtaaactccacaaaaccctgtcattgagatatacaagcctgccatg

SEQ ID NO: 351586 - DNA, 275 bp, Zea mays
acgcgtgggttctggagaggtctcggatgctaatcctgctaagtcccggaaggggcttacagaagaagaatatgaatgcatcgcttaatcagcaacccactatattaacctaacccaggtacatgcagccgggaacgacaaaagctaccaccagacggctcctcgtaacgattctaataattaaacttccgcctctattttctcgggctcacgcgatgaactttacttcaccataaacccaagggtcgctcatggtttgggcccacaaaatccca

SEQ ID NO: 351587 - DNA, 375 bp, Zea mays
ccgccaccgtcgccaccatctataccttcacagggagcatcggcggcactggaacgcgatttcgagcaggcgcgcgagctgtttctgacgcacaacgaaaaactacctgaagcgtcaacatcagtatcggcgccaccgctagcgcagtcgccggctcgccgcttccggtggacaacgagatactaccgtaggcgccttcatcgcagttgacacgcgtgatgaagcttggataggacagtgttaacacgtcctgtggggcggtctggaactggatcagttcttcgagaggttcttcaaagatactttcgtcatttctttttctgcatccttatcgaaggtatagtgcctcgaactgatcgaccttagctgcgttct

SEQ ID NO: 351588 - DNA, 394 bp, Zea mays
gaaatcgtgaccgcatgcaaagcagcctcaacatttttgaccggcacatcgtcaagcgcctcttcaaatgcggaggatacggtggctcaacctcgacaggaaattccctcttcgagggggcatggatccgaagtattatcggtatgacaatgaagccgtcgaagagcctagtctgtgtagatagttcagatagcgacagctccgggagcgaatcagaatcagatggcgatcggcccaacagcgatgacaacgctgagcgacaagctaaaggcgtgaagcaggagcgaggcacgaaaaaaaagaataacggaccacattgccattcatgaagctcactcacaccaatactgcagagagaggaaagacctctacatgctgccgttttctgataaac

SEQ ID NO: 351589 - DNA, 395 bp, Zea mays
gatactcattagggtgctcactgttgtgcactcagcagtccacgcaggagcctgggctacattcctgactccgtcatcatcttcagatctggagccaaaaacgcggtactaaatgacgtggaggacggcaaaggcgacggcaaagaaagcgaaccacgacgcgagagctactcctacagctacttccacctcatcttcgaccttgtaagcatgtatgcaggcatgcttctgaccgtgtggacgagcgcttcatcaaacagctcataacagatcgatgtggtatggactaccggatggacgcgcatctgcacgcaaaggttcaccgacggggtgaacatctggacgcacatgggcacactgatcgtaccagaccgtgattcatactatgcacccac

SEQ ID NO: 351590 - DNA, 292 bp, Zea mays
cccacgcgtgcggaccaccccgttcacctgcattgttaaaagtatagatgcctatgacgaaggtgcttactcatgaatcttaaggccaacactttatgttgtccagtcaaaatgtattacatgacagtgccaactcggatagcttgtcgtctggacgcactaaatggctcaaacaagcgagagatgactgcattaagacttggcatgagcaagcggccaagccaagacactgaccgacgtgttgaggttgatttaattatggggtattgaagatgccattcatacttgaata

SEQ ID NO: 351591 - DNA, 332 bp, Zea mays
ctcacgttagcctcacgttgttaccgctttgagctccatactggtgtgtggtgaagtcatgggcaaataaaagccactatgagaccctttgggaagttgttggcgccgatttggacgccaaaaatctagagaggaaccgcctgacggttcgcggtcctggacggtctgcgacctggacacagaagcgggtccttatctgcgtacatctggatggtaagtgatggggcacagggttgtcttcttggcagaagacctagatctcgccttttagagggaccttgtcgaggaggagagaacctagggtgtgtcttgcggttggcaggccacgcaaa

SEQ ID NO: 351592 - DNA, 390 bp, Zea mays
cagaattatatgcataaacatgtagtaggctattattctcttttatgcaggatggtgctcaaattttgaaaaatagatgtagtgatccaattatattttactaccatggttcattgagcggcttgcttgtggacattccttttgtggtattttttctatatattactattgactcatgtcataaatcagttagttatattttactttgttgatgaggtgacaatataatgtttcatttgcaaatttaggtgaaagtgaaggttgtttgcccctcataatgttccatgaaaccgaacaacagtcaaactgttagttgtgagttatataggatctgtttattttcctattttcatttgtctaattttactacacatgtttttccccacccat

SEQ ID NO: 351593 - DNA, 376 bp, Zea mays
accaaaccttgggaggggctcactatacaatttatgtttataatgaagggaagaagggttgacctaatttgaccatccgtatatggctcccctaaccgatggcactataacgacatcggcagcttatgttcttttttaccttcggactcaggagactggcttaaatacaatggcactcctagactctggtatcacaacctggggggtgcgatgatgcaatttatgagccctagtcccgcactgtgtatagattcattggtttatggtgacagatgtgcggctgtgccgtaacttaactgagaaataggaacaggtccagaagagctttatcggcttttttatcactacggagacgataatcagtcgcggctcctta

SEQ ID NO: 351594 - DNA, 190 bp, Zea mays
tgtttttacatgcgtatatagaaaggaagactacatcttctgtaaccatgaagaggaaaatacacttggttctgattatgtgctatgtaattggcatagctctatgttactaaaaactggtaaaaaataaatacttataattgaaatgaatttggtaatcaacaaaagacgtaaagtttattatgaaata

SEQ ID NO: 351595 - DNA, 100 bp, Zea mays
ccgtcccttaatgcaaaggaactatgtggtctctagctaccaaataaccgggagggggccagggtatgcgcgatcagaattttatgagcggggggtagag

SEQ ID NO: 351596 - DNA, 403 bp, Zea mays
cccacgcgtccgccaccatcgatctgcaagtctcgctacgtagcagtgcaataaaaaaaagcagccgcaatggcgagcagcaccatggcctctcctccacggccttcgccggcaaggccgtgaacgtgccgtcgtcgtccgccttcggcgaggcccgcgtgacgatgcgcaagacggcggcgaaggccaagccggcggcggcgtccgggagcccgtggtacggccccgaccgcgtgctgtacctgggcccactgtccggcgagccgccgagctacctgacgggcgagttcccgggcgactacggctgggacaccgcggggctgtcggcggacccggagacgttcgccaagaaccgggagctggaggtgatccactcccgctgggccatgctgggcgcgctcgg

SEQ ID NO: 351597 - DNA, 396 bp, Zea mays
aaaaaaaaaaaaatcttcagtcgtcgctgcaagccttcaacccgtgctaactgcgggggaaaaaaaacatgaagacgacctgggcagaacgtccccggtcgttgctgccgtcctggtggcgctcgccgtcgtcgccgcggccgtcggcccggcgccgaagcggagaggccaggagatccacctgttcgaggccacggtccgcttcccggacgacggcgtggacgagctcgactacaactaccgcctgctcgccaaagtgctcggcagcgtcgaagcagcgcggagagcaacgtacgacagtgagctcggggtattcagcgcgctcatcaccaacaaccaggcccgtcggctgtcaaaagtcccaggcgtgctgaaggtcacacgactcgaggaccc

SEQ ID NO: 351598 - DNA, 397 bp, Zea mays
  unsure (1)..(397): unsure at all n locations
cccacgcgtccgaaacgataaaggcggcggcagcagcaagcatgacgaggtcgcgagctgtagtgacgttagtgctcctgctggcctcgccacggcgagctgcaggctgtcgctcgccgccgacgagaccatcgcggccatcttgggccgcgacctgcgggggttcatcgccagggccggcaacctcttcaggtcggacggcggcgcctggcgcgccgcgaacctcaccgacgtcgaggcgaagaacctgagggccgccaggaagtcgttctccggcggcagagcgggctgcgtgagcgccgcggcgtgcgggaagaggcggctgttctgcggcaagaggtgctctgacgtcgcctgctcgcgcgccgccagcctcagccacgtnccgtcgcgatgc

SEQ ID NO: 351599 - DNA, 385 bp, Zea mays
gtcgctcggcctcgccggctgggtccgtaaccgccgcgacggcagtggggaggccctcctctccggagaccctgagaagatagaagaatgataacccgccgcctgccggtcggccaccacaagcgccaccgtaaacggcgaagaacgctacaactgctaccccgtggatccaggcaaacgaacagagagcaagtgtaccggttgattccatggacaacctgtacgagaaacaggacgagcttcagaaggcgtatgtggacgcacgatacatgcactactacgtggaatctgcgtacaaagagcacaggcgacatgtaatgtaccgaggtgtgacaacatgaaaagcattcctatctgttgtgtgagagaattcatgacacattgt

SEQ ID NO: 351600 - DNA, 249 bp, Zea mays
aaaacacgttgacggacgacttcgttattcatcgactttacaggggggagctccatcatagacatggcttcttccaaagatggatctgtcctccgaccaagtggattgcgatttatgatatctactagctctagacactgtctgcgtgtcacgacaatatatgatgacctgtcacatacttccttcctaatatcagcatcgctatttggtgatttgactgtaaccgtttgatttaaataaacgtcattt

SEQ ID NO: 351601 - DNA, 368 bp, Zea mays
cccactcatacgcggatttaaagaggaatacccaatcttccacaacgcgggcgtggagcgcacacatgcttcgccggtttacccagtcagagagctcgccagcctggtttggtcgggttatgatggatcaaatagcacgttaccatgcatgaggagcacaaacatgtggaggtagactactagcatctgcgcattgagagttattattctaggtgctatagacatgcaacaggccctagaaggattgtgattgtgagcgagagtcgagcgatacaccacacaatgcgcagctactatgggaactacctggaatattgcgtcgacatcatatttagaccggacggcatattttatctgtcatagaattc

SEQ ID NO: 351602 - DNA, 391 bp, Zea mays
ctaacatctatgtttctgtaatcgactaacagctctttagcatttaaatatatgtatagcttgctaaagcatttacacatcagtaatcaactctaacatctctgtttctgtataccaaagaacaattcaacatctctgtttgctcatatagttgttcttgactacttcatctactattttatttaaatgctttagcattgttcatatctaaaattaattttaaattgtttttttgaaatcctacttgtaccttatttcaagacctccattctgactggactcattttatatcattttagaagaaagaaaaatataaggatgctgaacctagtgcaatagatcttttcaagtagatgcattgcaacaagaagggaggttttagtgaaaatgt

SEQ ID NO: 351603 - DNA, 384 bp, Zea mays
atcccatgctgccccacggtgcatgactacgcgataatccaggtgctaattgaagctgagacatgggcggttccagggggaattctcacctgcgattgaattgatggcgagcctgaccacggaattgagcagcacacggcggagacgacacggcagcgagcaattcccccggccccgatccctcctctgtttggcaatggcgacatggttatctgattgtttggggtagatctagattggttgggtctaactcctgcgctagccatgattatatagggcaaagtatttcagagtgttgaggggtattcgatcgaggagattgagtccgtcgtcccggacggaaaacccggcgcggataatgcaacggccaaggggcccaacggc

SEQ ID NO: 351604 - DNA, 144 bp, Zea mays
cattgatatcttttacgaacataaacatgattttcccatccggggggagcaaggttcaaaatttacggtattttcttcaacatcgaggaacgatagtgtttaatcaaacagcgtttttcaaaaaagtacttacacttattttag

SEQ ID NO: 351605 - DNA, 397 bp, Zea mays
  unsure (1)..(397): unsure at all n locations
gccggcctttcgccaaaggaaggcacaagtgcgctacgcacgcagccaaagaaaaggcgcaaaaggccaagggatatgacaaggacggaggcaaggcgaccggtagctttcttcggcggcgaagtaggagctaggagggggtctgaagaataccaacaaaagcttcggtcacccttaggtttaatttggaagaacacgttctctatttctatgtccgaataaacacagcaaagagaagtgcacgcggcgtgtacagntgacacgcacacgcacacgcacacgcacggagagctgaggagctcccctcccccgtttggccgtttggcgccgctgctacaaaagtagtgggttcacttttgtcgggctgcatgcttcttttcttcgcttgtttgtttgc

SEQ ID NO: 351606 - DNA, 251 bp, Zea mays
gcgcatcctattgccctcgcgcgaccgtggacgccgccgtcgctgcagtgagccaccgacctgtcttcgtttgacgtagacaccaattaccgaggtggaccgtatgcacaggcacgggatgggtatctatttatcggcgctgtcgtacaagaggacttctcctatctggctgaagacagctaccaccgaggtggaggagatgattaccaacgcgtgtaatacggccagatgccatctagattcgtgtttgc

SEQ ID NO: 351607 - DNA, 134 bp, Zea mays
cggacgcgtgggcggacgcgtgggcggacgcgtgggcggacgcgtgggcggacgcgtggggttagcatattttggaaacatcctttttaagagttgctatttctcattgatgtatggaaaacaacatattttgg

SEQ ID NO: 351608 - DNA, 355 bp, Zea mays
cggacgcgtgggatcgaagagatggctatctgcagaccttgttgcatgcacttatcatttggatatgttctgttgcttgattctgccaggcctctgctgtgtgtacactttatatgcttaagcgccaacatttgaaggtcctgggatggagatcgctggaccctcctctcctcatcatggcttctcatccccatcaacagtgctccatgtgattaacaaaggttaaaatgtcctaatgcgatcctccacaacatgtcagaatcgtatagaaagcaaaatctcacagattttcatcttcgcctttatggaagccaatttggatttgccaattcaccattaaaaaaaaagtgggtta

SEQ ID NO: 351609 - DNA, 313 bp, Zea mays
cccacgcgtgcggtcttacttctattctcccgttcactaccatcacatcagtaccttttgagccgtaatcctttcctcgcccaacgagcgaactactgatcagacaccgatcccaccctacaatagaactacaaaccgtcggttcgacgagcagaacaaaatatacccctgaatggtgaaggcaaaaggtaagatctgcgcaaaaagatggcatcagacgagtataatattcttaacgcacctggacaggctggtgcgaaagatgcacgacgacacgttcaagatcaagatcctgtacagagtgcaattgagc

SEQ ID NO: 351610 - DNA, 226 bp, Zea mays
gggtgagcaaaggacactttacatgggtgcgaagtggttcacttgatagcttgctgtgaaaggtctacacattggctggacagtttgttcatacacgttcggggctaagattcacactgatgtaaacatgctcgtttagtgtttatatcaaatggaaaatgtaaccgtggaggcgcgtctttactacaaccacatatatcttgtgcatacaaaggaacaaccgctg

SEQ ID NO: 351611 - DNA, 390 bp, Zea mays
cccacgcgtccggccacgcgtccggttacataatgatcaacatgtcgcgtgaggatatcttttatctttgaaagtataatgtgttacctaactacaagaactcaaatataggactgtgttgttggagatgctctaaggagatcgaggatgatcccatctacggtggcaagcagtactacaattaaataataatggagggcgtcctgtagttgacagcccaacagggacaggaataccctggcggatcgaacctcctcgtgttatggcgcagagtgcctagtggcgccataaaactttattacaataatactcttcgtgctctacgctatcttcatgacactatctatagttgtctatatttaaagagagaatattgatgaaggagttttc

SEQ ID NO: 351612 - DNA, 327 bp, Zea mays
gcgcgacgcacccaggccacgcgtgcgggggattatatcaaaacacagtgattaattatatcgaaactagtattaattagataacgactatgcaacagtatcatgacgcctatcaatatttgtcaccgtgtgtataataatacgtatattgtgatcacaaagattatgcaatgcaaaccaaatcggcgacgcgtttatatatacttagagatacatatacctgctactactttcttattggtcgggaaccacatactttttgctagtaggtgcttacattagtcttggcgtaaaggtgtcgtggtcacattgcactaatgcacagaa

SEQ ID NO: 351613 - DNA, 338 bp, Zea mays
acgcccgcaggcaccggaccggaagcccgggacgacccacgcggccggccaccaccacacacaccacaaactaaaggaacggcgcaaaagggaaggcaagaagaacaccgggaggaagaagaaccagaggagaagggaaaggagccagccgagtgggaggactcccaagcccaggccatcctggaggcggagaacgcgaaccagcaaccgaagagccacccaaaggacaggaacaacaacaatgcgaggcagacggaaagcaccgggagcaggaaggccggagtcaccaaacaaccataccggcggcgcaaggccggcaggaagaaccatgcaagacc

SEQ ID NO: 351614 - DNA, 149 bp, Zea mays
gatgaatcgcgtctacgcacgccgcagcccatatttcctaggtagggggggggcgctgcagccactaatcttacctgcaatatccaaagcagatgtgcgggaccaagatctcgatatccatctatacaagcgaggcgggtgctgttcag

SEQ ID NO: 351615 - DNA, 94 bp, Zea mays
gtttaacaaatgccatcggcaatgtggtggaaacgtgatcttgggaaaggggtattccatgatctaagggggcagcacgatcaccagacagact

SEQ ID NO: 351616 - DNA, 368 bp, Zea mays
accgtattttgctcttgttcatctaggacaataattgccttcggtttcaaagtacaggagtcgggcacgtttgcattgcaccccgttattatcctacagactccacagattaaacacacacacacacagcatgaacagaaggatcatggcactctagtctggatggaacatacaggggggtctagaggctcgctgaatcgacgccgcagcagctcctctacggcgaggacgcgggcgccgccgactaccagggcctcacttcacaggccagcaggcagcagtagcactcgccagcgcccagcggccggcctagcctatctgcctatgtgaggtggacggtgcactggctcttccgcggcccgccccat

SEQ ID NO: 351617 - DNA, 307 bp, Zea mays
gacgaagttaaattctggatttggaatcaatgacattcttctgctgcgaaaaagtacaagattatttgataatggaattgagtgtaggcagactttggatactgttattgatagatgttcacctttgcaaaatattcggaagctgttttgactaccagggtatttatcaccacttgtgggctaagtagggggtggttaaatcggccctattttgggggaccaaaatatggctttttgataccttgagggaaattgatggtttgggacaagacaacaagatctatttaaaggaggtgcacagcgcaga

SEQ ID NO: 351618 - DNA, 301 bp, Zea mays
cacgacatcatgcatatttgtcgtgataaggttggtttctaatcttataaaccatttaagatcttaccatgtaagaataaagttccaaagtaactataagcacaggaagaatggtaaacaaagattcaggtgggcaaaacctgagaacagatatttataataaaaccaatgccaacggcattagaactacaaatgtctgacacccacatatttaagaaatactccattgtgatcctgaatcctgacttaccagagaatatagcgaacaaaggaatgaaaattgtgaatcaaattaaaacta

SEQ ID NO: 351619 - DNA, 393 bp, Zea mays
gaaactatggttcaagaaatctgtcgcgacatcaaaaagttggattgtgctaagaggcacataacaactacaataaccgctcttcaccgtcttactatgcttgtttcggctgttgagcaacttcaggttatggcatcaaaacggcagtataaagaagcatctgcacagctggaggtaagaataatttaattagctgataaacctgcataggctctagagttgatttcaatggatggaacattttaacacttgttgtgatcatttttgcatgattttgcacatgatttccaaccaaatttataactttgttccaggcagtgaaccaactatgcagtcattttgaagcctatagagatgtgcccaagataacagaattgagagagaaattcaaga

SEQ ID NO: 351620 - DNA, 355 bp, Zea mays
caccgcctccccgatctcgtcgagaggaagcccaatcccgaaaccgtcgccgtattccaatggcgcccaaggccgagaagaagcccgccgccaagaagcctgcggaggaggagccggcggcggagaaggccacggcggggaagaagcccaaggccgagaagcggctccccgcgggcaagtccgcaggcaaggagggtggcgagaagaaggggaagaagaaggcaaagaagtcggtggagacgtacaagatctacatctttaaggtgctgaagcaggtgcacccggacattggcatctcgttcaaggccatgtccatcatgaactccttcatcaacgacatcttcgagaagctggc

SEQ ID NO: 351621 - DNA, 308 bp, Zea mays
  unsure (1)..(308): unsure at all n locations
gnggtgctgtcatcccaatcccggcttggacagaaggtctggaatgagacacacaaaggaatccggtgcttgttgaacattgatcgacctggtttatttttatatactggacttttttttttgagggagatgtttgtttctatagaattgtaggccataacaaaaaatgggtacccagcgggctgcgcctgacattagcagccgggaaccggccacgttccacgatacaaggaactgtttcgttgtaattgctctcccagagtgtgaaattctccaaaggtatcgtatcaccttctttattccaaann

SEQ ID NO: 351622 - DNA, 242 bp, Zea mays
ctcaaggtgctcgtgcccttgaacgccgacttgcaggacaggcgccgctacccggggcccttcgcggaggcgacgcggcgcgagctcgagggcgcctcgatggagctcggcctcgccgtcgccagcatgggcagcggtccgccacctgtctctccggggcggtggaattttaatctgatcatgagctgattgatttggatttttatcttaaggaggttgaaacactttattttgttctattg

SEQ ID NO: 351623 - DNA, 130 bp, Zea mays
aaaaataccagaatgaagaaattttagatagagttaacttatgatatacatcatacgaacaccacaggtactggtacttatgacctccatacataggttcagagaatacaccaccagtagatccaacata

SEQ ID NO: 351624 - DNA, 384 bp, Zea mays
cccacgcgtccgtatatgcaacgctcgtgtcatttgttccaatacttgaagaagcagcacgctacgagttgagatatgggcacacaaatagagctacaagaggaggtggatattatggcatattacacgttgagtggtgaactcaagtatcagtttgggtctggaaggtgaagctgatcagttgctgctggatgaggcttttcaacgacggcttctcgacaaacatcattatgcccgagtgccaggtggcagagcctgcacttaatcagaaggaggaagttatgatagaatatcgaccaccagcacctgcagttgattctaggcctgcaccccaatggatatgcccagtgtcttttatagagctcagtaaaactaccttccctt

SEQ ID NO: 351625 - DNA, 262 bp, Zea mays
cggacgcgtgggcggacgcgtgggtgagacggaaccgggacagcaaaggaagatacggcgcgatattttagactacaggagaccggcgccgaaagctccgtggcctcgtctccttccccacttcggcctcggcagttccgcgtgccggcccgagccttggttcggttcgcatttcgcactttgggcctttggcggtgggatttcttaagaggttcttgaccggttcaaccaaccctgggccggggagaatggagctaaagcc

SEQ ID NO: 351626 - DNA, 293 bp, Zea mays
gataagcgctatcgctgaaaaactgcatttgttcactgcacaagagacgtgggatccgcttgcacaagaacacaaggtctctcatgcacgtggtgagttgtatattatagagaactcgcatcactgcacgatgatcgaaaaccatgctatgatataataagtacatgtcatacatcggctggcaaaacatctcgagcccttgtgtgtcgtctaacaagtacgcggttctatgcatcattgctaatttcagactttgtagcatagaactttgctacttctctaacgcataccac

SEQ ID NO: 351627 - DNA, 301 bp, Zea mays
gggggatgcgaggtcgtgcgtagccatatttcacacaacggggcatcgaggatcgagctaccatctcgagatattaagatagagccaagcaagtggcgggtcaacgttagacacgttgatcgttgttgtgggaattaaaatacattgctcgaggatggcattgcctatcacgagagccgcttgtagaggaacagctaaccttgggaaggtggagaggccattgaacgtgtgaggtctagtcaaggcggaagaccccagaagcacattggccattcctgcagtgcgagctatgatgctggta

SEQ ID NO: 351628 - DNA, 67 bp, Zea mays
ccggcgcctagggcgagaggtggtttggactagcaacggacttgttcgggggtgggcacaacttccc

SEQ ID NO: 351629 - DNA, 227 bp, Zea mays
ccaccgggctgttagagcccatgacgccctactcgttcgcctcaggcgccgacttcccgctcttatcgccgacgggcttggacgggcagctgagaagcatccacggggccggcatcggcgtggagttggagaccctgttctaggagctgttgccggacacctgaacatacatgtatggttgcgtggagggcatacatagtttattgcatctaaaaaattgggggggt

SEQ ID NO: 351630 - DNA, 104 bp, Zea mays
gttacaaggatcacgcctaggtctgtctgctatgaccagaatacagagttcgtggcggtcttgataatatcgatcgacggctgcagtcccggcctaaaattgaa

SEQ ID NO: 351631 - DNA, 166 bp, Zea mays
cccacgcgtccgatcccactgcgcctggtactccttttctccggtgctctggtgtcttctatgccgcacgcctgggagcagtccgtgccttttctttatacttggtcgtccagccatcctctgctcccttcgttctcctgtgatcggcctcctttcagctgcgacg

SEQ ID NO: 351632 - DNA, 215 bp, Zea mays
ctggcgcgtatgagaaaaaaagggcgaatacgaggccaccaactgaccgccgggtcggaagcagtgccaaccaaccaatcgccgtcctgggccagcggcgtatgctcgccccatgtcgatggcctggctctgcgtgctgggctggggaggccgtgccgacggatacctaaagatctccacccttgaccggggctgtctgaccctgctgcaggatc

SEQ ID NO: 351633 - DNA, 148 bp, Zea mays
cccacgcgtagtgacccctcgcggagttaacgaggctgacttaatttattgcgtgggataacatggatctcatcactcatgaagtcatggctggcttaacaaatgtctatactataggcgctgggagggcagctgcactaaccaacga

SEQ ID NO: 351634 - DNA, 282 bp, Zea mays
atgcgtgcacgcttgcaaggctatgatcaaaccctaagcatagagtggctttatcacgggggaaacagaagcgaatcgcaaccatagacaataaaagagggcatataccagagtggtgccaatgccactgacaagcattggaggacctcttatacagcccaactacacacgatggctacatactcatcagccccagaaagagaacaaattcaatgcttcttaatagtgagactatctactggattggaactttaaaaggtcataaaggagctagtcgcagct

SEQ ID NO: 351635 - DNA, 263 bp, Zea mays
atttcatttgatctaaacgagctcgctttagatgagctagatgaagggggccagctgccggatgatgctaatgagctcggcctcaacgatgtgctcgttggaaaatggcaacgacatggactcgaacttacctatatatgcgtttggcgcggggtgagagtaccaccatcgaaatgagatgacaaatgatatgaggagacttgtgtatcaaagggcgatggctcgaagcaataacgcgagacttcacaagaaagttacccgag

SEQ ID NO: 351636 - DNA, 405 bp, Zea mays
cgccagcagggaccggtcctgactgggtggacccacgcatgcgtccacgcttccaggcaccccacgcacacgtcagcatcgggtgctgcgtgacccgtctacgtttatcgagaaggttctagaccccacaagcaggaggcgactctgctccttggtgcttcgtactcctcccacgtgtgtgcgctctgatgacccaatctgacaggccgttaatcttctgaacacaggagtcatgggctgccaccgctaggatcatgtgtgaccaatcgactgttgagatgagcgaaccttcgtatcatgatataggaactaatttgaacctttgccttgagcggaatgctttgagggctgcacatgctgttgccgacattccagcttaagcatcataaacactcactggggatg

SEQ ID NO: 351637 - DNA, 389 bp, Zea mays
attcccccagaccagcagcgtctgatctttgctggcaagcagctggaggatggtcgcaccctcgcggactacaacatccagaaggagagtacccttcaccttgttctccgcctcaggggtggtatgcagatctttgtgaagaccctgactggaaaaaccataaccctggaggttgagagctcggacaccatcgacaatgtgaaggcgaagatccaggacaaggagggcatccccccggaccagcagcgtctgatcttcgccggcaaacagctggaggatggccgcaccttagcagactacaacatccaaaaggagagcaccctccaccttgtgctccgtctccgtggtggtcagtaagtcatgggtcgtttaagctgccgatgtgcctg

SEQ ID NO: 351638 - DNA, 387 bp, Zea mays
aatacatagcacttattctaaagtttgtcaaggatcatatgggagctctgctttttggtggaggaagaacttatgaaagttgaggaacaatcagtggagctggagatggattagaaggagagatgctgttgaaacaacagtcatttcttgatctcaatcattccatccaccttgccatccacctgttcgaaagggaatccatggtctaacctagggtcgcggatgagctcaccgagcagcaggcctggcagctcaacttcgaccttgattcggcctacaatgccttcttggctgcgctgcccgctgctggtctgtaaccgggcaaggatctaccagcttgatttttatttggttggttcagtctattatgcttttgacactggagca

SEQ ID NO: 351639 - DNA, 366 bp, Zea mays
gggacagggtcagtctgttctgcctccttcgcacccagatcagttgttgtgctcacatgctcctcctcctggtcatgcttcttcagatgatcaggacttcgccacagccttcaccgagtagttctttgcatcgcctccggggggtgatccctatagtgggtcgtgagatgttacttttccctttttagtgcttggtgtcaagaagggggagatgttcgcggagagctggagttgtttcacttggcgttcgttagttatctttatctttatctttttttttgttacgaacattgggcttgcaataagtatggcatgaactatatgtgatgcaatggatctttctgttatggttacagctagagatgt

SEQ ID NO: 351640 - DNA, 390 bp, Zea mays
cttctcctcccccaccggttcgtgttcaggttctggttcgtgggcgagagggaagagatggcggcgtcggacgttgagtaccgttgcttcgttggcggcctcgcctgggccaccgacgaccactccctcaacaacgccttcagcacctacggcgaggtcctcgagtcgaagatcatcctggatcgggagacgcagaggtcccgcggcttcggcttcgtcaccttctccacggaggacgcgatgcgcagcgccatcgagggcatgaacggcaaggagctcgacggccgcaacatcaccgttaacgaggcctcatcccgcggcggccgtggaggcggcggtggcggatacagtggcgggcgccgtgatggaggcggctactgcggtggcggt

SEQ ID NO: 351641 - DNA, 365 bp, Zea mays
ctcatttgtcaccaccgccgtcgttacccacgttcgacaacactatgagggcgggcatttggagctacatcggccgggccaatcttcaggtcggatactcgagctgggagtctgcctgcatcaacaagagcaattaggcaaagttgtgctggcttgccaaaacatggactgaatagggttcctgaaatattgggtgatataaagctgactgcacggtaatggaccttccgctgctagtacgcatttgtgaaaagagtgtatgtccgtatagttgagcggatagaagcacaggcagtgattgcataccttatttatgcttgtacaaaaggatgtgtgaatgactgttataaggcttgtacataagt

SEQ ID NO: 351642 - DNA, 318 bp, Zea mays
ccaccacgtactgccacgtcgaggtttaattaagagcgagaggaagcagggaccatggctacctgtctagctgctgctcctgccgtggcctggtgtggtaataactgtctctatctctctctctctctctgtccacggctggcgctactactgcagtagtgcagtgatgcgggatgtaaaggaggggtaaaaaaaattcctttcgttctaaccccttgtgttttttgcatcttcttcttcaccttagcatatactactattattctctgtcgactgttgttcaaaggaagcttccaattgtcaatatacattgtggat

SEQ ID NO: 351643 - DNA, 384 bp, Zea mays
gaggtattttgcacatctttttgagtttgaggagccaagtagctattttgaagttgaggctccatttaacaagcttcttctggagataaggtggcttgagaccttggattatcttgttaggagcctatccctgcatggaaaataaggtggaatccttttcgaataaagaggaaagttatctttccacctcatccatgtgtcctaccctcaattttttttgcttttgtttgctttttcaaataaatctggtgccagcaatcactaatcagttccctctatgtgctaaacttgatagtctttagttatgcactcataagtgttaatgacacacaaatcatgtgaattttgtaatcaaaccaagtgctagttagcaagccatacagt

SEQ ID NO: 351644 - DNA, 387 bp, Zea mays
cccacgcgtccgaagacatttcatggcaactcactcccactcccacacaagcacaacataaacataacgatcgctcggtcgtttattcaatcgttcgtctaactattcatattttgttcgttcattcgtctgatcgttcatccaattcaaattttggaatattctaggaatattcattttttcttttctttttctaattcctatgattgtaaaatccaaaactccttcgtccagactctgattttgacagttctgattttaaaattcttatcaaattaccctctgtctaaccataccatcccgtaagcatgattcataacccagaaaactctagaaatactcttatcccatatttttgaaagggaaatgtgcccttggaccatttgt

SEQ ID NO: 351645 - DNA, 355 bp, Zea mays
gctaccgccgggcgcagcacacacggtgcctgcgccgcagaccctctctcggacgcatgagaactcgcacggcgctgctcaccatgactgcgctcacgagggcgcacatgtctagtactactgaccgactagggcatctgattcagcatagagcacaactctaggcacttcgtaaggataaacactgtgtcatgttcacgttggaaagacaacgatggctaaatgcaaaaaagaatgccacagacaaggttcaagactgcaggtgcttgcacaaaatcatgagcatgacaactcacataaccctaccatgcgcggagcttaaggcctacccgagcgtactcaagaaatgctctta

SEQ ID NO: 351646 - DNA, 392 bp, Zea mays
cccatgcgtccgcccacgcgtccgataaaaaatttgcatttgggtggagcccaagtcttccacagcctcttccacggttcaaaagtaatcgaacccaagaaaaaagccttataacatgatttagaagagaactgtccagaggaagaatgaattctgagttgcatgtggcccttttcctgagctctgtaaagaactacaacatcaacaagagctggcagaactaagatgactgttcccgtcgctccttcatttgtgtgtgctaaccgtgctgacaagaggaaggaggtgtatatagttttcttgcattatttctagatggttgcttaattcattctgattattcacaactagcaagcagccaagcacttttgttccaaaaagggtctggtagt

SEQ ID NO: 351647 - DNA, 388 bp, Zea mays
ggcgtctggcagggagcgcggtgccgagccaagaaaatagataggggagagagaaggaggtgccgccatcgctgggctctggggaggggcatcgtgggagattatcggacttcatgtggtatgggcgcatcgtttgtaggcgattgggagcaccagggggattggaattcgtcgtcggggcctcttcatccctgcagaaccaccatgcgccagcgaggctgggcgacgggagctggaagatgaatggtggccctcgatcctgatttggacggatacagctgcgacacgcttaccttgtgccacaaccataagtcttgatccctcggtcccgtcatcatatcggttcgcggtctaatctggactcttgattcttcatcggacgtccggg

SEQ ID NO: 351648 - DNA, 390 bp, Zea mays
ctttatctctggggctaagcttcaattcgacattcgcccattcttcagtattaatgtcgttgccgccgagtacaatagtgattccccggtgcatccacaccaaggatttcatcaccaccagccccatcaacgattacaatggtgaagagtttgtcttctactctacaaggaagtaccgtgccaaaaaaactcaataatagagtatcacagcaaccaaaatggctaattgttgccactagagagaatgtatagcctattatgtctggcacttagtgaatcgatagctttaagggcaagttatgcactcgagtgactacaatagggaagggaggccttccaaggcaagaaagtgctcgttgtcggttgagataacacctttccaaaaataat

SEQ ID NO: 351649 - DNA, 360 bp, Zea mays
agcgcttgaggagatcgacggagaggaagctaagctgaagaaggccagcgaaggatctgatatgacgatgagccattgattagatttattgcagattaaatctgcctccagcatgattctgttcctagttatgcgctgcggagagagctcatctcatcagggtatttatgagattctagcttcgtatattgtttttcttcttcttgattgaactgagatcaaataagacaaagctgctgtgccttgttgtgtgccatctgtgtatgaacttttcggttcagcctccagcagtctttaatctgaaagaaagacgaggtaggaattctctccctcagggtaaaaacatcaaaaaaaaactca

SEQ ID NO: 351650 - DNA, 244 bp, Zea mays
aactggatgtcaaacatagtgtggtgtttaaactgactagtgagacagggcaggacattctagcttagctcagtgccctcctacaaatcacctacagaaaggctctgatccataggatcaagcactttctgactggtggggcccacaacttttatgttaagtctgatgaagcgttgattacatgccttacctttttaaaggagtttatgcacgccattgaatccaaatcagttggtgtacaaaa

SEQ ID NO: 351651 - DNA, 361 bp, Zea mays
gccacgcgtgcgaaacacctctgggaccgtgagaaccaccagggaggtgctgctgttgcgtgcatgccgagcaagcagcgcgcaaagagaagaaccatcgctctgggcggctgctgcgatgccggcatggcagtggcgtgtgtgcagctgcccctgtgcggtggaggggaatctgcatgagcactgtcagcccggagccgccagcatagcatctgggcgtatcggagctcttgctttctcgtcggaatcgggcagtacacgtgtcgcgcatggccgcagatatatagccctgcacggtgcaattggtggttagtagctccctatcgtacccgacatatgcttcgttttgtttgtgcatcgc

SEQ ID NO: 351652 - DNA, 245 bp, Zea mays
cgaacccgtagtcgccgccgtcaaaccacaccgcgcttctttttggcggggagcgggcaacgattttgatcggcggtcctcagacctcatcccaacccggcccggggtggaaaaaaccaaactggcggtggcggttccgcttcccctggggcaccgggagggttttggggcgcggccgtggcagtggctgaagaccgtcttcttcatcgtggcgatgctggcgtccctgttagtcgtgggccccc

SEQ ID NO: 351653 - DNA, 175 bp, Zea mays
cgagtcgagactcgagaggcacctgatctttccttcccgtcttcctcccacacgtgcccatcaccattgctgcgactagagtgagcgggagagggtaggtggcgaggcggcagtgatggggcgggggccggtgcagttgcgccggatcgagaacaagatcaacctgcaggtgacc

SEQ ID NO: 351654 - DNA, 299 bp, Zea mays
cgcacgcgtaggcaacacctttaaaacacagcgaactcctatgtagggggtagcggtcagtgaatttgatgggaggtgctcagacctcatacaaccctggctctggatggataatacaaagctggcgttgcagttaccgctacccctggtgcactgagagggtgtggggactctgcctgagcagtggctgacgaccgccttcttcatccaggcgaggctgccgacctttttttttgtgggcgcaaccgcgctgttcaagtttctcttatacccgcagatatagaccccggtacttttca

SEQ ID NO: 351655 - DNA, 104 bp, Zea mays
cctacgcgtacgctgccgcttgttgagcactatgaacttccaaaggccgttttttttattgatctgccagctccacagtcatagccatggacgggagcggatca

SEQ ID NO: 351656 - DNA, 155 bp, Zea mays
gccattcgtcagggtcctcggtgcctacccaagaaaacatatatctgagagagagagacatgccagcatcgctgctctctggggaagcgcatgctccgaaaatatgctactttatgtctattgggcgcatcattagctggcaatatggagcacta

SEQ ID NO: 351657 - DNA, 389 bp, Zea mays
ctactacgtcatcaccgactgactttaaactagcccactagctaggccggccctgccttgctcttgctgaaagtcgcggcatgtgaatccatagtttgcgagtccaatcaggcgtgccccccaattatttaagagatgagacagggggggaggggactgactgatggacagcgagcgctagctacctagccttgtgtctggagagctgcatccggcgtccattagcctacctgaagggtcttcagaaaaggcagaactcaaaacagcaaagatccctgacgacgattcagctgctatgactgatgaagttggctcatgtgctggtaactaaagagtttgcctcagggccgttcgtcagtcgtcacggcttcgactttagccttggtatt

SEQ ID NO: 351658 - DNA, 241 bp, Zea mays
tagaagatccaggctacggagtacatacacacttaactgtgagcaccgccgcatggtgacgaatgcgctccacatctctctcgcagctgtagatctcacagagaccggtatcacactgacctggacggacattgacaagagacctaccatgccttcagatagatgaacaggacccatcttgccatcactcccatgagtgattttcacaaatatgatatcgcaaacggtgactacttgatga

SEQ ID NO: 351659 - DNA, 244 bp, Zea mays
gcaagaccagctagctagctcctcccactgttatcacccgggccccggccatccatctagtttaaagaaaaatcgcagccatcaaaactactagctaagggcattgcattcttcctcctggcggcaatgctggcagcccattccgtgggggacaacatctaatgctaccacgcgctcatttacctgtcatcatccctgcggtatttgtatgggaagtaatccaaacccagcaagagcagcaaca

SEQ ID NO: 351660 - DNA, 338 bp, Zea mays
  unsure (1)..(338): unsure at all n locations
gggggngaccgangcgtccacccacgcgtccggttggcttctcctccccctccggttcggactcggcttcgagaggatcttcgggggacggtttcgtggcgagcgcatcaagatggcagctttcgatgttgagtaccgctgcttcgtcggcggcctcgtctgggccacggacgaccactccctccacaacgccttcagcacctacggcgaggtcctcgagtccaagatcatcctcaatcgggagacgcagaggtcccgcggcttcagcttcgtcaccttctccacggaggaggcgatgcggaacgccatcaagggcatgaacggcaaggagctggacg

SEQ ID NO: 351661 - DNA, 284 bp, Zea mays
cccacgcgtacgtcaaactattgttagctcggtactgatacattcatgacattatcttgagacattggaggcaccaaaacttaagaaaggcaggcatgcacaagagctgatatcaacatattgggtgaattcttgatctttcgacgagagggtgtgtcgtatgaggctgtggctagcatgggttgcacactacaagtgccaactaatgacactgacgaacatgaactggatatagagagcgaggatagtaaggtcagagatggtaatgctgcaaaacaatcaca

SEQ ID NO: 351662 - DNA, 332 bp, Zea mays
ccacgcgtccgggtgggggcatgggagatctacaaccacagaacgccggagcagttaccggcacacacaacttagacgggcaggctgcgaggcatcatgcccctgtacgagaagtacggggagaacttgggacatgctgacggggtgtcgcgttgtgctctacgacacccgtacaggacctacgtggcgggcgcgacgccatcggcgttaacccgtctacatgggctggggcaggacggttccgtctggatcgcggcgaaagaacgcgctgacgaggactggtgcgctttgagatttcccgacggccacctctactccaccccggcgggggg

SEQ ID NO: 351663 - DNA, 345 bp, Zea mays
accatgcgtgcgaagatcatgtagtctgggatctttgcatcctgcataccgtcgagcgttgataatgtccgcgactgaggaaagaacatggatgagtttacgatgaaagctgtatacatgggtacctctgggaagggtatgccttcatttgatcatggcactggacccactggcactcgcgtttaaagaatcaatgaagagaacgtttgggacaaccgttcaccaatctaacagctactatgccgatgctgtggcgctcatcattccatcaacagtgggatcctgatccatgctacaaatgcttatagaacctggggggggtagcgttgttactaatgacggaaa

SEQ ID NO: 351664 - DNA, 370 bp, Zea mays
gggctatagggcggtgacattccagctgtttaactccagcgggcttcaagttgtttgtactttatctaatgccgctggcatatcacattaaacgaagatgttctccctttcgaggttagtgccatactgaaagtacaaagtaaaaatatagaccatgatgtgggctaacggcatcaactacatttagcatgagatgccttgcatgctacatgacaatagctgcacacattatttttaccttctgctgatcgaccaacacaaaaaaaatactcttgtatctaactgcactgctactgcatttattgcattggctttagtgcgctcctagatacagtctaatcgtggtgacatttaatcaatgaaacatgaa

SEQ ID NO: 351665 - DNA, 162 bp, Zea mays
gtttgaccccccggggcctggaggagctgaagccgggcattggggagaggaccaatgccgaggcggcggcagagggacaggcgcgggcaatggggtggttgaagaagaggaggaggaggactatgaggacgacgatgatttcatcaccaatgaggtgaagcg

SEQ ID NO: 351666 - DNA, 365 bp, Zea mays
cggacgcgtgggcaaaacactaaatgggtaaaaacagtaaacaatgagagcgagagttggaaccgatgatggataccggaggaaaccaatctcacagaaaccaatatcttgggtgttttttactggacaatcatagttagttgtgctcatcgttgtgtacatgaaacactgagtagtaagtcagctatgttttacaaaacatatatcaaatcggaaccagtggtgagcgggtgtgtttcacaaagttaggtttggatacaagggtcatgtttgttttacatttaaatcatattttacgactgcactaccatgaaaataacaaaattccatcaaattttggcaaaggagagttgcaaacaatgaat

SEQ ID NO: 351667 - DNA, 346 bp, Zea mays
cccacgcgtccggcaagaaatgaatccttcctctaatcctctccgatggcgcttctccgtccgtcctctagagcctgcttggccgcccacatgcatgcatgcatgcatgagtcaagcacaagcatcgtcttcccatgctactcgcgtgaatatgaatcgatgcttatctcgcatcaatcaatcgacgctcttccgtctcttctatcaatcaacgttctctagtgaaagaaccggcccttgagtggtatatgtattgttgcggcctgcgacgagttgagcagctaagttatgttgctatcttttgtttttatcttcggagatcttttattagctatgacaactggac

SEQ ID NO: 351668 - DNA, 209 bp, Zea mays
cggacgcgtgggcggacgcgtgggcgcgcatcgcgccaccccatccgtcaccgtcgacccgcgagcaccctgtcgaagggaggaggtggaggctagctcctgactagattcatgatgactattactatcgtcaaattaaggttgggtctggtctctattaatgtgctgacagttttcttgaccttaatggtgcttcttccacacaccat

SEQ ID NO: 351669 - DNA, 368 bp, Zea mays
ctcccaccccctccctcagccatggcgggtgccgccgccactgcccactgctcactcagccgtccgcccagccctactcttgcacgcacctcatcttctccatcccctccccatcttcctctagcgccagccaccagggaggttcgagctcgccccctccgcgccctccctgctcgctgccctccagctcgccagtcgtgctcagctctgctccatcttcctacgccgcccaagtccagtcaggaacttccttgtgtcaatctgccactacccattgctaccagtgctgtttttattaccatgctggtcactgcttccatgtcttcacaggccttcttaagctcgtcgagttctgatctgagcatgcc

SEQ ID NO: 351670 - DNA, 363 bp, Zea mays
cccacgcgtccgcccacgcgtccgcggacgcgtgggttcgggttcgtgaggttctccggggttcggtttcggggtgagcggatcgagatggcggcgtcggatgttgagtaccgctgcttcgtcggcggcctcgcctgggccacggacgaccactccctccacaacgccttcagcacctacggcgaggtcctcgagtccaagatcatcctccatcgggagacgcagaggtcccgcggcttcggcttcgtcaccttcttcacggaggaggcgatgcggaacgccatctaaggcatgaacggcaaggagctggacgggcgcaacatcaccgtcaacgaggcccagtcccgcggcggtcgtggaggc

SEQ ID NO: 351671 - DNA, 340 bp, Zea mays
cggacgcgtgggcggacgcgtggtcggacgcgtgattggagaagcaggggctgtggattcgtgatccaaaccgcataatgataatcacattccgcttacaccattgagtgagcgaaagcaagcaaaaatagaagcattggctcgaatgtaacaagggatcacaaaggggatatcatggtaccccacattcaagcgccgtttgtactcccttgagaagtgctctatcagaagagcttgcgcggacaatgggtgttaatcaatctgctaatgggtcgcaggtccggaagatgaaaagtggtattgtccgaatgcttagtcagagatcacttgttaaagcaac

SEQ ID NO: 351672 - DNA, 370 bp, Zea mays
atcagtttcagcctctgtgattacccccatgcttcatgtggagactcaagttctgttagcaattatattttttgagctccttgagttttgaattcactcgattgttctgagccgtgggtgctagttgtccaatggttgcaattacacatacctaacaaacaaatataaatatatttagatttactactaatatgaatgcttcacaaaagataccaaaaaaatacccagactgcagaactctgtttaacaatcctaaaagggattttcatttgcataaatagtgtgtatcacttattgcaaacatatagcattttgtaagtgtaaaaacatgtgggaggaggctggagctgaaaggatgtttctactggca

SEQ ID NO: 351673 - DNA, 347 bp, Zea mays
gcggaaatccataggttggctacacacaacgtggttctatatcaaaaactggaagggggatactaccagctgcaccacatgtgctagataccttgtacacccttgtgggtgttgacattgcaatagcaattgcagctcctcgctcaaggaagagccttgaagaaggcatcaaaactgatgctctagaaggctacttagatgctataattgcattgtgatgacttgtgcctagggaaacctgatggtgagatttacgaagacgtatgcggagcaacttggactggagccagatgtctgtgtagcgtttgggaactcaaactcgccgacggactctgcacataactctg

SEQ ID NO: 351674 - DNA, 191 bp, Zea mays
gccacactatttactcaactatagaggagtacccgcccaacgtcaacggactggggctcttgccctataccatcttctcctccaatctcctcagtttcaacatcatccactaatactgataaatccatcgcgaagggtattcttttgatcgacttcaagcacattttataatacatgcacttggaaactct

SEQ ID NO: 351675 - DNA, 197 bp, Zea mays
gagctgaaggctgcctgccctgtgttgtgtctgttggctccatctagagagctactagtggtcggtctatggacgcggaagggacttctacaacggtggcgtctccggggcagtggccgcggcggcccaagaacggcggtggcgcggtggctgtgcccaccacgaggagagtagtgttttgagcaaccggggggggg

SEQ ID NO: 351676 - DNA, 308 bp, Zea mays
gccatgcgagcggtcagcgttccacgccacaggcgaagaggaccctcccgtggtggatgactcctactactcacaaatcaatgggggattacgggtggcacggtgtacgagtcggccaccacgttcgaggatctgaagctgtcatccgagctgcttaaggcgatgcacgacgagatggcgttcaaccgcccgagcaagagccaggcgatcacgctgcccatgatcctcacgccgccctacaaggaccttagattccaggcgcacaactccttttggaaagaccacctgtttcgaaactttgcatgctc

SEQ ID NO: 351677 - DNA, 207 bp, Zea mays
ctcactcctcaccatttcccaaaccctacccaatcccccggcggccgccgccgcattgccgccaaagttgacccgtccaagggggggggggctttcttccggtgaccggccgggagggtcggcccggcttcttccttggcgccaaaaatcggcccgttcggcttttcccggaaaaaaatcgggaagaccatggccaaggaaacggcc

SEQ ID NO: 351678 - DNA, 331 bp, Zea mays
ctaatcccacatccagtctctgggcacaaaatttccggcggcgatggcggcggctgtggcgaggacatggttcggcgcatgttgtgcggctctgccttcgcgccggcgaaggcgcgcgccgtgcgccccaaggcctacccatcaagaaacctctgtttgtgctgttcaagcacgcgtaccacaagtgaatgactcagagaaccctcaagggcgggaggggactgtgtgcaacctctaattgtgaccgaccgaagcagcgggcaatgtaagggataggcctttggaaggtctgcttctactcaataggcacacagagccctagagggaccgg

SEQ ID NO: 351679 - DNA, 350 bp, Zea mays
tcgctcacgcgacagtgctgctattaatgaactcgccccgccctccatcagttagataatcggagcggattctgtgcgcgcaacgtctgaaagaactccgcgggaacataggcaaccgtgggcttttcggctgaactaacagtacttgattggattcctcgccgtactaactgttatgcttcaccctgaatccacgaggtcagatgtcttctgagcaggcttggtgccgcattgagtggataaggattctccttgtggcccgtcatacaaaatttgctgcatgattaacactccatccagattgatcataaaagcagatataaaccgtctgcattgtaaggtgtgacatg

SEQ ID NO: 351680 - DNA, 351 bp, Zea mays
tgaataactaccgtgtcggctgccttccccagttcccctcctctccatttctccccttctgaccacccatggcgctcgcacccagtgtctctgctcacccttggcgaccgaacaggtgaaccacccactcctttccgccgtcctctaagggccatccagttgcacctacgcgtgagctctcccttcaacactccagtgcccgagctccctcccctgtggcctccgctcggtgcgcccctctctgctcctctgccgtgtccctgctagcgcctgccgtcaaccacccgccgtccgagcagacaccgggcgccagcaaactacgtggaggctagctagaggtgccggggatcc

SEQ ID NO: 351681 - DNA, 313 bp, Zea mays
cgagtactggtactctaacagatcttggattccttgtgcttcacagaatcataccttgaatacccatgtgatattaagctacaattgaaagctccgtcacgaagctgctggagaaccatgtcattgaatcaaaagacgctaatattctagaacgcattaagctctcctctagcctgtacactgactgtggtaagcatgcactaactcctctcaagccgagatgactttatgatgtacatgtagctggtgctgatccttgctcagatcttcattgtcagaagctcaatgagatgatcattacgtactatatgag

SEQ ID NO: 351682 - DNA, 299 bp, Zea mays
cccacgcgtccgtccacacctttttagctgactgatcggagagttactcctaggcaactcttgtttctagtttgcaaatggtgtctgaaactatgcgtttgctgcggcataacgtgtacttaattgttcgtgataggtgtgaataacacatggatggtatcagtgttgtcacaaaagaccaccttaaatagagaaaattacggcttctaaatagaagaaaacaacattgcgctgttgaatctttttgacacgcaaggcggaaataatgggtaaaccctgtttttcttccatgaaagttt

SEQ ID NO: 351683 - DNA, 351 bp, Zea mays
atagtcccaaagaatataccaagagacatgaaccttcaagagaaactgataataataaggtatgacctgttgaatccttgttttatacatacatatgtgggttcctgggaagtttggaagcaccggaattcttgtttatttgaaggaactctgcctattatccatgcgctccttcagaccataggagatgagtgcagtttatggtgcatggctggagcatcaaagtttagtgaattactcgcaaggtcgttggtctagattgtctaatatatagagtagtttatttgatcagcagatcaggttctggtcatgtatagaaccactcaccccttcctttttcggttagggtgg

SEQ ID NO: 351684 - DNA, 387 bp, Zea mays
cggacgcgtgggcggacgcgtggggaatcaattaggtgcattgttttggcaatagacatgatggcaaccggagaagatcggtgggactatgtatgttgttgtacaaatcgagactaccataatggataatggagtggacacactaataataatatagcagctcaactattcagcggaaggaactataccttgtctgatctctgtatacccggatctttctgtctatatcaaccattctttcattctcccaaccctagctgtttggcacctttagatattttttagtgtcgttactgtatatttggcctattatttctctcaactccacacatgctcatgtcaggggcgattagatcttggtcctattatattatgttggttcctatt

SEQ ID NO: 351685 - DNA, 108 bp, Zea mays
tcggaaaaatttcaattagaaacttaaggaaatagcaccggactgctgttggagctgacagtacacacagatgaagaacacaatgctccattgaggaaaagaaggcca

SEQ ID NO: 351686 - DNA, 82 bp, Zea mays
  unsure (1)..(82): unsure at all n locations
cccacgcgtncggatgtgatttcccccctacctgaagctcgacgtgatctgctctaccgacggcgcagaagcatgggttcag

SEQ ID NO: 351687 - DNA, 403 bp, Zea mays
gctgggcctcagatgctagctagctcttctccacgtttagcttccaatccgtccatctctctgcagactgcaggggtatttcttgtagttcagctcatgagtttcacaagacttcatcacacggttaaactacaaattgtgcgagacaaattagtagcgatactgttgaccagaattttggaaataaaccggctccaacacctacttgcaaagatatttggaaccggtgaccagctgcacgacgatgaatcctacaagacgaccatgtaatacacagtgtcgtcctcttcgttctactactcaacagagcagtcgccgaccaataacgaatggagtacctccgcgtgttcgtgatctctgtcactgccaacatcatatctatgggattgatgatattcttgat

SEQ ID NO: 351688 - DNA, 75 bp, Zea mays
ttttcccccacgtgcgccgccgcgaccttcctcgatcccatctcccaacgcccccgcctcgcctcgggatcccgc

SEQ ID NO: 351689 - DNA, 385 bp, Zea mays
tgcaagttgtgaaacttgccgcgaaaccggaaggtgctgctcctgctagtgaagatgctgctgatcctgcaactaaagctggtgtttttgttgtcaatgatgctgctattgagcagggagttaaatgtatagcttctctctcaagtggtgcctccaagatggaggttacagtggagaattctcttgcaaatggaccgaccactgaattaggagtttccaattctcttgcaaatggaccgaccactgaattaggagtttccaagggcacgtcccttgctaatgaatcggctgatctgccaggggttacatgcattatgccagaagttacagacaaacctgttactgatctaggggttataagcaccgtggtggaagttagtgatac

SEQ ID NO: 351690 - DNA, 415 bp, Zea mays
tctttttgctggaaatcacttgaagaaggacaacagactagctgattacaacatcatgacaaattcttgtgtccacctttatgtaactgatgggatacatatatgtcagtatccccatgtttgggatcccatagtgtttgctaatgtcaaggcggtgatcgaatagatagggggagttcttcttgatgaacaaatcttgatgcatggatgccaaaagcttgaggacaacaagttgctgagtcaatgtagtttgagcaatggccacacactgcatgttttggtctaccccactaaaaagatgcatatttagtacgtgaagcactgcaaccgctacaagaaccccattgtcctgtgctaggtccgcgagatgcttagctgctacgacctcgccaagttcgagctctgcacgctcgac

SEQ ID NO: 351691 - DNA, 394 bp, Zea mays
  unsure (1)..(394): unsure at all n locations
ctccgccgcccaccacctccatccccctcctctctttatacgccaccgcggcggggcttcccccatccctctgtccgttcgctgcattgctcccctaaccgttcggccaggagacagcggagagggcagagatggcggccgcgtccttcaccgccgccaagttcctggcgccggtggccgcgagatccggcggagagagggcgcccccgctccccgccggcgcctcgtcctcctccttcgccaggaccctgcgccgcggcgcggtgcaccacccgcgcctgcgcaccgagctcgccgtctcctccgacctgctcgctgggaacaaggccgcgcaggccagcgccgcgcatncggcggttacacgggaagaggcactggagctgtatgaggacat

SEQ ID NO: 351692 - DNA, 403 bp, Zea mays
gtggcttcctctcttcccctcctcccttggccccgtctcgtctgctccgcctcaccttcctctccaccttcctccctcccacccctccgcgcctcgccccaccgcgccaaccaaccaacacggcgtcccagcctgcctatataccgctccccccgcgcccccccacgcgcaaatccatatgctcagctcccgcctcctcccatccccggaccccggaccccggccatgggcgcctgcttctcctccggctccgccgcccccgccggcgccgccgtcgacgagcgccgtccttccaaggagggcgacggcaagaagaggcgccgggcggccggggcatcgcccgatggccgggcggccgtgcgcgtggagttcggctacgagagggacttcgaggcgcgctacg

SEQ ID NO: 351693 - DNA, 408 bp, Zea mays
cagaaacaccaaagccccaaacctcaccctctcccgaatcccgatggagttctttgacgaaaccctcgccttcggcaccggcaccggcggcgtcgagaagcccgcgctcaacggcgtcgttgcggaggaggagcaagtccccatcacccaccccgcaaagtcacacgccgcggtcgctgccgagaaccccactcctatcagcagcgtcgcgaacggtgagggtgagggggtccccggcgcccacactggcgccaagtcctacgctgccgtcgccaccctcgcggagatcgccgccctccgcgccgccaagctcgacctggaagcgaagctcgacgaggcccgccgtgagaacaagttcctcgccgaggagactcaccgcatcgaggggatcttcacgcaggttcggga

SEQ ID NO: 351694 - DNA, 127 bp, Zea mays
ggtggagaagaagaggtgtgttattcccccgctctaccatcagagtgggctgttggaggtgcgctttcttaggtgattgtaccttacctttctctaccttcaatccatctacccttacgtgattctt

SEQ ID NO: 351695 - DNA, 394 bp, Zea mays
ctcgtagagagaaggaaaaatatccccaaaccctagctcccgatctcgatggcgaaccctcgcgtcttcttcgacatgaccgtcggcggcgccccggcgggccggatcgtgatggagctgtacgccaacgaggtgcccaagaccgcggagaacttccgcgcgctgtgcacgggcgagaagggcgtgggcaagtccgggaagccgctccactacaagggctccaccttccaccgcgtcatccccgagttcatgtgccagggcggcgacttcacccgcggcaacggcaccggcggcgagtccatctacggcgagaagttccccgacgagaagttcgtgcgcaagcacaccgcccccggtgtgctctccatggccaacgccgggcccaacaccaacg

SEQ ID NO: 351696 - DNA, 142 bp, Zea mays
  unsure (1)..(142): unsure at all n locations
ggtccacttgcatctttcattgaatcgaccaaatatggcagtgactgtgtgcgggcgggctcaagaattgaaggccaatccntcatcgtatcaatgattgttgcgtgcctatctagctatcactaaaggcaaagatgcatta

SEQ ID NO: 351697 - DNA, 261 bp, Zea mays
  unsure (1)..(261): unsure at all n locations
gcagggacgcgggcccgggacggaatgtcccgggctcgaaacccacgcgtcccccgcccacgtcgtccgcgtgacgtcgttggnngcctcgatacccgcagtcnatgtgcgtcacgattgcatccgtggaatggggcatacgctttcaaggggtcccatngccactgnnttcctccnnngtcgccgattgacctggcgacccagggctgcgcccaaagctnattccaagggggtggnnggcacgaaccgaannngcgctca

SEQ ID NO: 351698 - DNA, 217 bp, Zea mays
  unsure (1)..(217): unsure at all n locations
gtgccttgccgctgcactacatgctggcagcaggacgagtgggtgctgtgcagggtgttcaagaagagcatcgagccgccatccgngcccggcagcaagaggtcatcgtcggttgcgtgcatggggacggagggcacgggagtgggagtggggccgtcgtccatgttcacagaggacgacttcgccgcgtgcgccgtgttgccttcgatgttggact

SEQ ID NO: 351699 - DNA, 406 bp, Zea mays
cacaccaggctatgaacaggaaaaggcacctgaaggatcatctatctctgagttaactcctctggcaagtgacagaccatcatccagcagagtggccaaaacaaatgctgatcgtattaccccttttgcaacacgagtaaataaatttacccaacagtatgttctcaatgctgataacgcagttggtgtgccaagtaaaagtgctgaaatcacagaagatgaaataattagaagagttcaacctagtcaaagatgttacttacaagttcagcgctcacagcctgaaccaggttgcagattcatgtatgacagaatggaagacagatttaattacttggaagatcggatacggaaatcggcgagcttgttttctgcatctggattttgtggacaacctgcagatgct

SEQ ID NO: 351700 - DNA, 407 bp, Zea mays
cttctccctagccgccgccttctctcctccctgtcttctccctcgcgcagcagtccttccacggcaagcagcgagcctcgtcggacgctatatgctctggtcgcgcctgggactcctatggccgagctagccacctgccaggacaagccgcagacccctctgctcctccatggccatgagctcgacgtccccttcttcctctcctcccccatttccctctatcggccattaggcccctgcacgtgcctctccatcgcacaagcgcaggagacctgtccgtgggttggggccagggttttccctgggtggcctcgctgagagtagcaggtcgagtttcccttgtccatggcgcgacatctccaatggcgtcttcccctctggataacatgctcggctacctactctag

SEQ ID NO: 351701 - DNA, 393 bp, Zea mays
ggaatttcgtctcatgatgggtctatagcccttcctagattcccttgggcattttcttctcaaatttcagcccaggaactgtctaagccccctagtagactgccttctccattttcttctggattttcatctctggatgggcctaattcctcgtctaggtttccttctgcattttcttctggattttcatcacagaatggccctaacccttcatctggattccctttttcttctgggttttcatcacaggatgggtctaatcagtcgtatggctcaacaaacccagaaaatcttctccggaatactgttctgggtggcagtagtaatcattatcaatctcagtttggaaggcactcaagtgacatggagttcgatgatcctgctatattagct

SEQ ID NO: 351702 - DNA, 286 bp, Zea mays
gaacacaacagacttggattttatacaccggaaccatttagtagggggttactactacatttttactgggggctaaaagggggggccagagctggaagcaaatttggggttgttaataactactccccctaagcgtttttgtggagatcggacagcgagaaggaccttggggttttgaagctcccgaggccgccattcggccctttcttccgccgtattcaaaaaccgctgattttaaggggtggcagtgcccgcgcgtcccggacttttttttcgtggtgcgggg

SEQ ID NO: 351703 - DNA, 345 bp, Zea mays
cggacgcgtgggcggacgcgtgggcgcgtacgttcggttctcggccactgctcagctctcgctgcagcgatggccctgcaggccccgtcactcatgcgcgcgccggcgccgcagcggtccgcgccgccacggccctccttctccgacccgtggtcgctgcggatgccggcgccagcgcggcgccgggtggccacggccactccattcaccacgcgggaagcgcccaaaaaaggatacatctgcgcaggcggcggaagcacctacaccgacgggaggctgctcaaaatgctggctggcaactacatatgccctgctgcttcgctcacgaatagtatggtcggaccg

SEQ ID NO: 351704 - DNA, 405 bp, Zea mays
ctggcgcgtgggctggtgtctgatggccagctcggccgggacagataggacggtgacctactccaccatgaaacgtctgactacgaacaggtataccgatgaggcgagagatcgagctgtactcacgctaagtcacaagcgctgagcgcttacgcatggcatgtatacttgcgtttggcggagcagttgaacctcttgattgacaccggttcgttcattaccatgggcgtgtactgtgacctagccgcagcggggtacgcgcacaggcagatgatcaacaacagcgcgttcagacttagctgcatgcaacaggacatcgactatcgcgggggctcagaggaaacacgatgggtggcgcctcgctaggttcctaaattaaaaagtatatgtggctaattatttttg

SEQ ID NO: 351705 - DNA, 406 bp, Zea mays
cggacgcgtgggaccagccatggacgggccgcgttggacggaagaggtggacgacctggtcgacgccggcgacgtcgacggcgccatcgccctccttgagtccgtcgtctccgatttgtcaacctccgctgctccccctgccactgaccttcgcctcgccacggcgctcggcgacctcgcgggcctgcacgcctcccggggagacaccctccgagccgacgagctccgcgcccgcgccatcgcccttcggtcccgcgccacggtccctgggactgggaccctaggggatcaggagctgtcagagaaatgtccatcacaagagtgtgcaacgggttcaaaagactcagaagtctcagctaatactaataaaagcaatgaagatgaggaggatgattgggaggctatt

SEQ ID NO: 351706 - DNA, 260 bp, Zea mays
cccacgcgtccgtccacagcgattcgtctcctctgctcttatctccgctgtgcctgtgcctgacttttcctcctcttcgtcccctcccacccgcaaccgcacagagaaaggggaggaggctctctacccagcgcagcccgagcaccctctttatggatgcttagaattttctgacgtaagtgatcttgccaccatcaaccatctcaactttttttctgctagaaccccccaggccggtctttcgtgctagaaagctcact

SEQ ID NO: 351707 - DNA, 401 bp, Zea mays
  unsure (1)..(401): unsure at all n locations
cccacgcgtccgcccacgcgtccgatcccttcaatcttacgctactgctagatatctcgttttttcgcagattgacgatgcatcggagatccgatcggctaaccgaaagcgttgtgacgaagctcttgccgaaccggtcacaacgatgttctgggttgccctagaagatgaacggatggtgagaaattcctcgccggagttgtcgctagagtttgggtggtaatcgaacttcgacgagatagtcatgtgtaacaccctaaatccatcatctaaaagcaaaccagtttaagttattggtttccaatagaacaaaaaaatatttgtgttttcaaataatgtaatggtgacataactaaatcaagcaatntcttgaatagataaaatcttaccaagattgatgc

SEQ ID NO: 351708 - DNA, 357 bp, Zea mays
gatgattatatgataaaacagccttagtgagttgttaaggtccatttaaacatacaaatgagtgaatgaccatcattttagtttagctagctctttagggtgcctgaagccctgaaccatgtagctgcctttttacaagaccacaacagcctttatttaaaacatgctataatctattcaaagcatactcggatagtaaaacagtggcaggtgtttccccttcatctgttgatccatgtagcttgttcttgtgcttttgaagcttttagttgtttctaataataaaactatagatagtatgcggcaacatataacatatttactttctccaaaacaagagtgaggctttcctatttt

SEQ ID NO: 351709 - DNA, 54 bp, Zea mays
cgcagacggcagaccttgttgtattgtatctttgcttcacatctcatgctggct

SEQ ID NO: 351710 - DNA, 159 bp, Zea mays
  unsure (1)..(159): unsure at all n locations
tcgtcgactccgataaaagcgcagcaaagcaacgcaaagcccactcctctacagtgctctcttgccngccgtgacgagccaaggacttgaacgcattcactccaatgtatagatactgtgattgcctatcatgagcccccttgtctacgccacccccgg

SEQ ID NO: 351711 - DNA, 143 bp, Zea mays
agaacccacaaggttcactcatggcgcccacgtccatgctcccgttcgcgccctccaatacgtcgctgccctattcctcccgcgccacaactgccgccgcgttcgctcctcgtgggctccaccacgccgcggccggaaggagc

SEQ ID NO: 351712 - DNA, 332 bp, Zea mays
gttggcttctcctccccctccggttcgggttcgggttcgtgaggttctccggggttcggtttcgtgggtgagcggatcgagatggcggcgtcggatgttgagtaccgctgcttcgtcggcggcctcgcctgggccacggacgaccactccctccacaacgccttcagcacctacggcgaggtcctcgagtccaagatcatcctcgatcgggagacgcagaggtcccgcggcttcggcttcgtcaccttctccacggaggaggcgatgcggaacgccatcgagggcatgaacggcaaggagctggacggccgcaacatcaccgtcaacgaggc

SEQ ID NO: 351713 - DNA, 330 bp, Zea mays
cggacgcgtgggcgggcacaagatcaaactcatgcacacgaccttgtaaccggggctggagaggggtcgcataagatagagggcgaccaacataccacattgtacagaaaggggcgtggacatcactatgagttgaagatgcacgggccagggtctatttgcactgggatcagtcagcagtttcgaatgatgcgttttactgctggagaattacaaaagaagcttcgaacgtaggctggtcgaattgcatgaaccaaggactaatgacaccgttccctgatgttaacgcaaagccaggcgatgtaattgcaatcataaagacaactgttt

SEQ ID NO: 351714 - DNA, 59 bp, Zea mays
cgctcgcgcacacgacctagctgatgcgctggtggacaagtcacacattgagctttttc

SEQ ID NO: 351715 - DNA, 410 bp, Zea mays
gtaaacttgaatatgtgttaattcttgttgtttttcctcttgttgtatttggtatacattcatctgaacaatttcccgtttctcctactcgctgccctcttccttgtttattcctctaatgtgttgctgccttgctgggtaacaagtgagtgcggccccatgtattttctcaccaatttgatgaattcgtacagaacttactttagtacagtaatctgttggaagggagttcctgtcttccatcaaatattctgctttttaccagggtacctggtttcatgtacccatggatgttttgtttctttcaaactttaatagcttcatataattcccaaaaaacaagttttctagcggtatctattaaataacatttctttgtgaggcgtattgctgcatgcttgtttattaag

SEQ ID NO: 351716 - DNA, 324 bp, Zea mays
atcggcaacgttcgctcctttcatattccatcctcccttgaaacgatttcacagcggcaaatgctccatcacagagcaatgccatattgatatgccatgctgccgcgtcaaaaatatgcagcaggaattccagccgccagcccaagcaagaagaaagagaggcctacatgcccttaacgccacggtcttacggccaccagctcagtccagcgcctacggtttctgcggcgcctgcttgaacgcaacggtgggtgcgatccgggaggctctgctgcggggctcggcgacaagctctgccgcgaaccagtccagcttctccgtgtt

SEQ ID NO: 351717 - DNA, 412 bp, Zea mays
  unsure (1)..(412): unsure at all n locations
ggccggaccgacgcgtccgtccacgcgtccgaaggaagagagctaggatgctaaaccatccacacatgcaagcgagacatgtgtacaagactaatcaaaatttcaatactctgacgtaaagcagacgctatataaccaatcgtatcacagaaaacctttaatctttttcccgacacctaccaatattttaaaaaccatgttgcgctatacttaccaatgtacagaggaaacacagatgcattacaaacagcaagatgactggaatcaggatgcagcctatcaaacctctggaaagttttgacacgccaagaaatcacaattccaaggcatatgaagtgctgcttngaacgccctaattccaccgcagcttcgttgaaggagcaatgtttgtactgaagacatgagcaaactc

SEQ ID NO: 351718 - DNA, 118 bp, Zea mays
ccaacgcgttcggagcgtggcctcactatccttgtagcatcccccatcgtgggcttcttatcggattcaaccgcaatggatatggacttcacctacgcgctagacgtctgcgccacag

SEQ ID NO: 351719 - DNA, 167 bp, Zea mays
tcggggagacgttgtaccttcagcgccgtcgttgatgatagggagctgggggccttacgcgcattcaacgagagctagcatcatttgcggccgctatatagcagtttcggctccgcaagggtgctgtagaactagccttgattctgaatgtggaggtgtactctgat

SEQ ID NO: 351720 - DNA, 287 bp, Zea mays
ggctaaaggtggcattgcgcggatgatgatagacatggaaggcctaatcggggactggaaatctgttttaagggcaaaggctgctggtacagaggattctacagaggaaccaacatatgatggggcaaggggacggaggttagctggcgtaagctcaaagccagctgggcagctgaatctatcatacagaggtcaaggccacattgggttaacggaggggacatccgatggagatcgtcttgcacatgaccactgaaacttgaacaaaaagcaagcctgtgatgctg

SEQ ID NO: 351721 - DNA, 367 bp, Zea mays
gaaagaaaaacaaacaggttactcggaagcggttaaagccttagtgggggcaagactctggtagttcctgggaacctcccaactaggtgtgccaaaatatatgttgatattcaagagtgatgacagaaaagattatgagccggaaacagactgccttatgtggatgaacaaatttttagagatctacaccaagcttttttgggcagaactcaggtaaactgttcaagacgaagtcccgagtgtctttaagatttggtcactcatatggagcttcagtggaaattatgcatttcttttaaccatatggtgctcggtgcttgaggtatattttttattataaatatccatgtggggagaacatgttttg

SEQ ID NO: 351722 - DNA, 396 bp, Zea mays
atctcctcgcattttccttgcaaccgattgcctatccccctcccaaccaaagaccgatggcgcccaaggccgagaagaagcccgcggcgaagaagccggtggaggaggagcccgcggccgagaagacgaccgccgggaagaagcccaaggcggagaagcgggtccccgctggcaagtccgccggcaaggagggcggcgagggcaagcgtggcaagaagaagggcaagaagagcgtggagacgtacaagatctacatcttcaaggtgctgaagcaggtgcacccggacatcggcatctcctccaaggccatgtccatcatgaactccttcatcaacgacatcttcgagaagctggccggcgaggccgccaagctcgcgcgctacaacaagaagccca

SEQ ID NO: 351723 - DNA, 271 bp, Zea mays
acgcccactcgtccgcctgcacacgaagcctagaatagccctcctgttgtgggccacctactaggatccccaccaccccacccctaccccatacaacagggtgatggaggctaagatgggacgcttctttcagtacgtgaacaatttctttaaaggaggcgaccactttccctggtgcgaccacgacctcattcgtcggctgtaaaagagagcttgttaatgctgcaaatgatgcacagaggaatgaaagccttattaggctgtcatgggc

SEQ ID NO: 351724 - DNA, 408 bp, Zea mays
cttcaacattatgcacctggggtgcccgttgttttggcaggcacaaaattgggtgagttttatttacagcaagagcatgctgctgtcacttactgtatatagctgggctgactttgattcactatagtctgattagtcatgctatccttaactgctaaacttctatttctctgtgcactgttggaattactttggtttaggctgcactagtagtgaacattgcaattttgttataaatgtgatgttatgacgtgtcgagttgccaacagaacggacgaggagtcagccagccacacttttatctttctagtacaacttagtagtcatgggaagctcagggctattttttgttagtgcatgaactgtttgtgtttatgtgattagttgacacttagttaccattaaaca

SEQ ID NO: 351725 - DNA, 284 bp, Zea mays
aaaaaaaaaaaaaaaaaaaaatttaaaaaaaaaaaaaaaaaaaaaagaaataataaaaaaaaaataaaaaaaaacaaaattacaaaactataaatttaaaaaatcaaattttaatttttttcttttttttatctttatactattttattcctttcttttttttttttttttatatatgttctttatttcctctttatttatctttctattacagctatctttttctgattacttttctattttttatttatttttaattttttttttcttcttttttttttttt

SEQ ID NO: 351726 - DNA, 407 bp, Zea mays
cggacgcgtgggtggaggaggagcaccatatgaaggagcacaatgtggatacccatacaagtttggaggagggtatggatatttgaaaggtgaaggtctagaggagtgtgcattaacgatatgagcttcaatagtaggaggagctgtgatggtaggatttatatagggaggaggttaagcacccatggatggttggtagggatatggaggatgatcatatgaatatagagattggaggttgtggacttagggaacacggatggacagaaacatccgtctaacgacgatttatgggagaaaggtcatggaaaatacatgtcccacattgataggggtgtcacgatgttgtggagattggtcattgaacatgttggtgaaggttttaaagtttgaacttccacctgtga

SEQ ID NO: 351727 - DNA, 405 bp, Zea mays
gcggaagagagatcgtggagactggagagggggggaacgcacgagtcgaaggcggatctgcggaagcgcgagcgggggcgcgagagcgagagccccgcaccgcgtcctccggagccgtcggaggccccgggcagcgatagcgcgccgagggccaggagcaggagcagcgccgcgcacgccagcagcagcgccgccacgaccgccatcgacggcctcccgccccgcttcccgcccccgccacttccgcctagcagcggcctcccgcctcgccccgccagccggcccgccatgcccccgccgcctacgttgcagctcacgcgtggtggctccgctcgtctggcttcctgccggttctaggcttctagctcgctctccctctctgaccagagtcgcggggttttttat

SEQ ID NO: 351728 - DNA, 421 bp, Zea mays
cttttgtatagcatgcacgtaagaaatgaccaaaaaatataacaagaatgcagctgttagtttaaaaaaaaaaaaaaaaaaaaaaaaaaaaaaaaaaaaaaaaaaaaaaaaaaaaaaaaaaaaaaaaaaaaaaaaaaaaaaaaaaaaaaaaaaaaaaaaaaaaaaaaaaaaaaaaaaaaaaaaaaaaaaaaaaaaaaaaaaaaaaaaaaaaaaaaaaaaagggggggcccctttaaaaaaaccaaattttccttccccgggatgggaaactaaaaatttttttttggggcccaaaaaataaaattatgggcccggtttttaaaaccgtgggaaaggaaaaaccccgggggtccccaaataaaatcccttgaaaaaaaaaccccttttggcaaggtgagtaaaaaaaaaaaagccccccccc

SEQ ID NO: 351729 - DNA, 354 bp, Zea mays
cgaatccccagaccaaatcgccgtcgccgtcgccgtcgcatcggagcagcgggagtcccagggtcccggaccgaatccatttccagacacccaaggccaagatccatcgctcgttccaaccagccttcttcttcttctgcttggtcgtctgatctcgttttccattcgtgtccaatccgatccagccaaccgctgtgaatgatggcagctcaacctgtaccaccagaccggcgcggccgtggcggaggctaccggctgttccacgcacaaacgttgtaccaaagtgttgatggatcatgtcggatttttgatcaattcatacactccaaaaattatttaaggacctgaatttta

SEQ ID NO: 351730 - DNA, 317 bp, Zea mays
gggtcgacgacgcgtccgcccaagcatccgcccacgcgtctgcggacgcgtgggcggacgcgtgggtttttttttttttttttttttttttttttttttttttttttttttgtttttttttttttttttttttttttttttttttttttttttttttttttttggggtgggtgtggtgctcttttttggttttcgttcttggttgctttttttgctgtttgtcggtttgttccttgggggtttttcggctgcgtgttggttttcctttttgggttgggcttctttgctggttcttgtgttgtctttgcgtttgttgt

SEQ ID NO: 351731 - DNA, 179 bp, Zea mays
gttactaccaggaggtggacataggcccggaggaggtgaggtcggtggccccggccggcttcggccgccacggaggcggcttcaaccagcacttcttcaaggacaagttcgaggaggtcaacacggtctcaccccccggggcaaaccaccacaaccaccacaatggtcaccaacggcgg

SEQ ID NO: 351732 - DNA, 179 bp, Zea mays
tgataattaggttgcaataacaccataatggtttatttatgctggattctgaaatctaatctgccggattctagattaaaggattcgattgtcagggatttctcgaacttggatttgattagtgagctggaatgactaaattatagttgatgcagtacataccattatttttttttgtt

SEQ ID NO: 351733 - DNA, 420 bp, Zea mays
cgcaacaaacgcacctagccatgacgatcaactccaacagcagcggcagccatgtcatccaggtcacggtcatctccaaagcgcacaggatacatgaagtgtccatggatccgtccttcggcaagggctcccgggatcaccccgccgtctcgttgacgcaccgcaccccttacgcgtcgttcggcgacaagcacagcaacggttgccagctgacccactgggtgaacaagctgtgcacaacggcgcatggcttcatacagcatgtgaccttgcggccgaatctgtcacgtactgtgaacgggaagctgagccttagcgctctgatcctgcaggccggcagtgtggatctcgtgttccgccatgccttctccgccgccgacaaaggcgatcggctgctcaatgcgctgcagtgctacatct

SEQ ID NO: 351734 - DNA, 438 bp, Zea mays
  unsure (1)..(438): unsure at all n locations
ctcaacagccgcagccaaaccctctccagcagccgtcgtcgccaccgctgcagcgcggaggcgacccccatcgccgccaagatgcagatcttcgtgaagaccctgacggggaaaaccatcacgttggaggtggagtcctcggacaccatcgacaacgtgaaggccaagatacaggacaaggagggcatcccgccggaccagcagcggctcatcttcgccggcaagcagctcgaggacggccgcaccctcgccgactacaacatccagaaggagtccaccctccacctggtgctccgcctccgaggtggcgccaagaagcgcaagaagaagacgtacaccaagcccaagaagatcaagcacaagcacaagaaggtgaagctcgcagtgctgcagttctacaaggtggacgacgccaccggcaaggtgacncgcctccgc

SEQ ID NO: 351735 - DNA, 428 bp, Zea mays
cccaagcatccgaacactcaacaatatggacagcagggctgtacttgatccttttacttcagtttctggaaaacaaagttgctgtggaacttacaaggtcagaatttgttgaagcccaagaggctttagctcagatgaaaaactggtttactcgcttccccacaattcttcaaggttgcgaaagtatcattgaaaatttaaggggacaatatgcacattctgttggctgcttcgatgaagcagctttccactttcttgaagcaaaaaagctgacagagagtaaatcaatgcaatcgatgtgtgaaacctatgcagctgtgtcatatatttgtaagggtgatgcagagtcgtcttcacaggcactagaactggttggtcctgcctatagaacaatggactcatttgttggtgtgcgagagaaaacctgt

SEQ ID NO: 351736 - DNA, 377 bp, Zea mays
ggcaatcactccccctccggttcgggttcgggttcgtgaggttctccggggttcggtttcgtgggtgggcggatcgagatggcggcgtcggatgttgagtaccgctgcttcgtcggcggcctcgcctgggccacggacgaccactccctccacaacgccttcagcacctacggcgaggtcctcgagtccaagatcatcctcgatcgggagacgcagaggtcccgcggcttcggcttcgtcaccttctccacggaggaggcgatgcggaacgccatcgagggcatgaacggcaaggagctggacggccgcaacatcaccgtcaacgaggcccagtctcgcggcggccgtggaggcggcggcggcggctacggtggtgg

SEQ ID NO: 351737 - DNA, 99 bp, Zea mays
atccttcgccgtctctctctctctctctctctctctctctcttatatagtccttttaatccatctctatggctcctgtttctcctcattttccccctac

SEQ ID NO: 351738 - DNA, 196 bp, Zea mays
gataagttcgttcccgtctgtgttttgttttggaaaggaagcttctatggctcatacatagacaaggactaaacggtaagacgagtcttctaagtctaattagtccttacctagtttagtgattaactaagtttgtaggaactatgtgtggcgcaatatgtagcctacgcaatcaaagtaaaaaagttatagctct

SEQ ID NO: 351739 - DNA, 114 bp, Zea mays
ccgggcggacccgtgggcgaaggtaatggcggctgtggcgcctgcgccagctcgcgtgtctgtggccggcatcagctaccgctggttcgtggcgtaccacgtggcccggctgct

SEQ ID NO: 351740 - DNA, 451 bp, Zea mays
cggtccggtctccgggtcgcccacgcgtccgcacaaggtcgaggatgtcttgcaactgcggatcaagctgcggctgcggctcaagctgcaagtgcggcaagaagtaccctgacctggaggagacgagcaccgccgcgcaggccaccgtcgtcctcggcgtggccccggagaagaaggccgcgcccgagttcgtcgaggccgcggcggagtccggcgaggccgcccacggctgcagctgcggtggcaactgcaagtgcgacccctgcaactgctgatcacatcgatcgacgaccatggatatgattattatctatctagcttgtggtggtggttgaacaataataagcgaggccgagctggctgccatacataggtattgtgtggtgtgtgtgagagagagagaaacagagttcttcagtttgctatctctctctgcatgtttggcgtcagt

SEQ ID NO: 351741 - DNA, 455 bp, Zea mays
  unsure (1)..(455): unsure at all n locations
gggtcgnagcccgcgtccgcaggagactaacaaagcaatccgaccagctcgatccggacgagctagcagagcagatcgagaaggcggccgtgaatagttcaatagtctcgagaccggccgcgggagcgaggatgagccatccgaggtacggcggcggctacccatatccggggcagcaagggtactacaaccagggcccgtacccgtaccagggcccgccggtgatggcgccgccgcagtaccagtacgcgcagccgccgccgccgcctcggtcgcctggattcctcgagggctgcctggcggcgctgtgctgctgctgcctcctcgacgagtgctgctgcgacccctccatcgtcttcgtctcctgagtcctgcatgcggtcgagagaacaccctgcgccaagaggaagggtgtgcacgccattttcctcagtcgatttttccaatttcctcag

SEQ ID NO: 351742 - DNA, 408 bp, Zea mays
cccaagcgtccggatgcatgcagttctcgcacctcgctatgggacggacgtccttaggagttgctggcccgtatgaagcttgttccgtattcatctcatagctcccagtataaacagcgaacattcatgatgaagtggttgctaaagaggactctactccaatgcctgctcatcaactgggtggatccatctaactggggtttaagagagggatttagacctccgtctcagcaacaaaggtgttgacgagtactcaaagtgattcggacgctggactgcaattccagtactgggggaggattaattatgcgtgtgtataagctttggacggttcctaccttccggctagtgtcataagttatgcactttatatacatcaagacgtgttctaaatgtgactcttcctat

SEQ ID NO: 351743 - DNA, 183 bp, Zea mays
ctaaatgatgagaaagacgatcttcgcgacgataaccagcaactgagtctggcgacagagagtctatagcagcaaatgaagactgatgggatcagttccagactagatgtacgacacgaggcttcagcaggcaggcttctcctatacaactctagcacgattccatggacatggggatactgc

SEQ ID NO: 351744 - DNA, 119 bp, Zea mays
cgggcgacccacgcgtccaaacagactacgccaggcactcgtctcagatgtgcatagtgctctcacagacgatctggctcgtctgatagtctcctaccgtgattcccccacttgcgccg

SEQ ID NO: 351745 - DNA, 280 bp, Zea mays
catggagctgaatctttaaggcagtgccctgccacacagtcacggacacgaagatctggtgtgatttcccggatggggacttgtgcctaggtactggcatcccccacaggtggtgagagatagcattagcgagttggtaaagaactggcttaaaagtgtaaacgcctaggttttcagacgccactttttatgtggtcctggatatgtgattcttttctgccttggcattcctgtctagaacactgatctagcaatcccagaccaccctttcatttttgcg

SEQ ID NO: 351746 - DNA, 141 bp, Zea mays
ctcacattgcagcttatactacaacagggtctcggcttaccgatcgtcatttgacgtatcgtgtctgggacatggctgtcgtgggtcgacgtacgtcgcctgggatcacgtgcgccttccccgagatggcgtggtatcgaa

SEQ ID NO: 351747 - DNA, 98 bp, Zea mays
tctgcactggcgatagcttcatctagcaggctgacgatcttcaacgccctgtgcgtatccaacagttggagccttcatgttggtctggacacctgggg

SEQ ID NO: 351748 - DNA, 452 bp, Zea mays
attggatgtggggatgctaatgaggtggaatgcttaatttcatactccaaagttaaagacaatacatatgcacatatgtagagtagagttagaaacaaggtaaacagagaacacgagttgggttcaaaaggcatcataattcaggttataccacaagaaatcattataacaagtgtcttggcctctgaaccaacaccagagttggatgcctgttcaattactcgaccgcttccagtagagatggccattttccagcggtttaatgaatgtgtgtttgttttgttgataagtgggcaaatgttgtctcctcaggtggttccaacattattctttttgtaaattgctaatgtaggatacttatgatgctacttgtaggttctcttgtgcatttcgaccagtgtttgtgttgaattcttatccttgaatccttctgaagtttttgtgtaacatgt

SEQ ID NO: 351749 - DNA, 109 bp, Zea mays
cggacgcgaaggcccacgcgtccgcggacgcgtgggcgtcatcagtggatgaatcaatctatcgatggcctgtgccattcatttttgaaaaagaagacaaaacagaaaa

SEQ ID NO: 351750 - DNA, 244 bp, Zea mays
aaggaaacaccgccgccgccgcgccttccattccagtactcgcggaggaaaggaacaccagccagcgccatggtcacgtcgacgaccgccgccgccgtgctgtccccgccgtcagtgggggggcttcgcctggcggcgtctccccgggcgcgcgtggcgttccgcgcggcgcgggcgcggccgtccgtggcggcccgcgcggagctgcgcgcgtcgccggggatcagcctgagcacgggtagtg

SEQ ID NO: 351751 - DNA, 354 bp, Zea mays
cccacgcgtccggtgaaaaatagacataaagttcatccttgcagttactaaacatgaggacgaacaccttcaagtgatgttgcttgatgtatatttatgacacaacagtgtcgtaaattaaaaggagacgatcactgcgtttggaacaaattgtttgctctgataagtttgattattgcaaatgtagtcaagtgatcgtgcagtcatgtttcggacttcctgcgcatttcatattcgcgcattgctgttgagtatctggagaatcaaagcaactgttctcccctagacaagtgttgtattacgaatataatatccctgattccagagcaaaaaaaaaatcatccttttttcaac

SEQ ID NO: 351752 - DNA, 145 bp, Zea mays
aaacgtcagaaaacattcggggatagctgaaggtcagcaactaacggcaatgatgccagacaaatggtagaccacggatgtcacagctgaatcaaggtagggataatgccacatttcatgcaccacgggatccagtcgactccgg

SEQ ID NO: 351753 - DNA, 132 bp, Zea mays
agacaaacatccgaacaccgacgccatagcttgtgcgcgcgcattggaactcgtttccaccactccgttctacatgactgtcgctgcggagctctctaggcattggcagcatttgggttcaaccacggggtt

SEQ ID NO: 351754 - DNA, 377 bp, Zea mays
cggaagcgtgcgaacggcggcagcaaggaaagcaagtcccctagaatggccaccaagtccccaagagagggaaaccaagtcattgaagaagggttagaacctattcacttcactatcacactgctgtagcaagttcgagtctagatgcgaggaatttaggtgttccaaccgaacttcctctttcccttgtaggtcctgatatctgcactggcatgtttgccctgttgtgtaccatgttctgactctccaattcagcattgctgtagaatcatactcactaacaggggaacttaaatggaagcacgtaatactagatccgttgtcaggaacatctgccacctacatctgagatcgtctgtcaggttccgttccgtaat

SEQ ID NO: 351755 - DNA, 427 bp, Zea mays
cccacgcgtccgcccacgcgtccgctatagcaaccggtccaacactttcacgctcaggcgctcagctctagcaatggctgcctccaccatggcgatctcctccacggcgatggccggtacccccatcaaggtgggctccttcggcgagggccgcatcaccatgcgcaagaccgtgggcaagcccaaggtggcggcgtccggcagcccctggtacggccccgaccgcgtcaagtacctcggccccttctccggcgagcccccgagctacctcaccggcgagttccccggcgactacggctgggacaccgccgggctgtccgccgaccccgagaccttcgccaagaaccgcgagctggaggtgattcactcccgctgggccatgctcggcgcgctcggctgcgtcttccccgagctgctctcccgcaac

SEQ ID NO: 351756 - DNA, 447 bp, Zea mays
cgagcttgccttcattaagttcatcctggagaacgcggatgcactgcaggagatggcgattgtgtgtgtcaatggtagtttctcttcgtgggacgaggctgccgccaaagtgacgaaggatctcacctgtgttaagcgggccagtcagaactgcaatgtggaggtcttggagagttctaattctagaggaagttcgtcttggagctgccaggtggcatccgatccttgtgttattgacccttttgagtactgctactgactactgagctcagtatggccatctgagtgtctcgtgatccaagctagctttctcggcaattggttatggtgttctctagtctgttcattgcagtatctgcatgcatgccactgtcttaacactagggcatgtagatagatagggagtcctctagtagcatatatcatgacaagctgtaatggctgaaa

SEQ ID NO: 351757 - DNA, 321 bp, Zea mays
cccaagcgtccgaaggcatgcgaaatcagagaggtcttcggtgttactactatgctgttcttggacgtgtttgatttttaatctccttttatatatatatatatatataattttcctacggaggtgggaggagaggaggtggacgaagaatagtgtaatgataatggtggtggtgcagcggcggtggttgagggcccaaaacgatgaacacatggggttgggttgggtgtatgtatctatctgtcacacgcagcttttgtgcaagactattatactacatcgctggtccctccaatttgctcaaaaaaaagtttcctgtgt

SEQ ID NO: 351758 - DNA, 424 bp, Zea mays
cggacgcgtgggcggacgcgtgggcggacgcgtgggcggacgcgtgggcggacgcgtgggttggatttgaagcaggggaggccaacatatcttttcgttctcccggaattggatatcaattgtacagattattgattgtaaatttgcttattcaatcaagaagcaattcatcgagtcaaattacaattccttgcccgaccacctgatctatttcagcgtcttcctatcattgcaagggaagtgacggcatgatcacgattccatcgatttggatcgcgccgtaaagttgcttctaattactactacttttttcctcctctttttgacttgcgtgagacttggtatgacgtcagtattggttcggtgattttactgaacaaatcgtgttgacggtaagataatgatgactttgggacataatcaa

SEQ ID NO: 351759 - DNA, 56 bp, Zea mays
attttgagtttccttaaatctttcgtggtaatagtattacgtacgtgtaattgttc

SEQ ID NO: 351760 - DNA, 280 bp, Zea mays
aacgtcatcacgtgtgtgttgctcgatcactactccatcgatctacttattatcgtctgcaaataacgactaagtgcatgcttctgcagcgtgtaacgatcgagatatgcatgcagaactcgatatatatacggcccctagcgccgtacacgtgcgtgcgtgtaagtaaataagagcaaacgtcgtcacgtgtgtgttgctcgatcactactccatcgatctacttattatcgtctgcaaataacgactaagtgcatgcttctgcagcgtgtaacgatcc

SEQ ID NO: 351761 - DNA, 108 bp, Zea mays
gtgagtcgtattagatctcacggacgaccttcacgtgtcagcggtagacatagtggtcttcgtctacgccgtcgatatggatgtctcgggctcctagatcgctgcagg

SEQ ID NO: 351762 - DNA, 142 bp, Zea mays
accggttttgagttgtggttgtgcaaaagatcagaagatggctgccccttgttctgctagagctatggctgttgtaaatgcaaaatgtagggtatatataaggtgtgtataatgttgggaaagagaatcacgattttgtttc

SEQ ID NO: 351763 - DNA, 370 bp, Zea mays
tattttcattctcatttctattattggttgtgacaacgttcgcaataactttcacggcgatggtcaatacatcaaacacagtagacgggttcagtttcgagttacatacagaatgtcttcatactagtgttctattaccgtaacagtcgagacgcactctcggatatccttctgtccatacgaccacgaagccatgtttctacacctacgactacgccgaaatcgccagcagctatgtacaggcacatgtgcaggagataatagtatgccaaagtccttgtcttctacgacgaggtcacagtttctgaactcgccgtaagccgcgagtgatcaaatcaagctcctgcagacgaggcgggtgccgatctct

SEQ ID NO: 351764 - DNA, 186 bp, Zea mays
atcacgaatcagattaagtcggacgctatcaccacggccacaacagatgccctcgctggcagttctctcctcggaagcacgcatgtcaccgtggaccatgctccaccagtggagtctgacagcaaaacgaaccatcagcaatgtgatctctctgatcgttcttgaggaggtttcccacagaactgg

SEQ ID NO: 351765 - DNA, 401 bp, Zea mays
  unsure (1)..(401): unsure at all n locations
accacgcgtccgcaaccggtccagcactttcacgctcagctccagcaatggctgcctccaccatggcgatctcctccacggcgatggccggcacccccatcaaggtgggctccttcggcgagggccgcatcaccatgcgcaagaccgtgggcaagcccaaggtggcggcgtccggcagcccctggtacggccccgaccgcgtcaagtacctcggccccttctccggcgagcccccgagctacctcaccggcgagttccccggcgactacggctgggacaccgccgggctgtccgccgaccccgagaccttcgccaagaaccgcgagctggaggtgatccactcncgctgggccatgctcggcgcgttcggctgcgtcttccccgagctgctctcccgcaac

SEQ ID NO: 351766 - DNA, 112 bp, Zea mays
aggacgcatgggtgaattttaatttgaagtaaaaaactggaaaagggatgtttacaagttcctttattggcacccttttcagcactgctagcggcaaaaaacttctctcatc

SEQ ID NO: 351767 - DNA, 349 bp, Zea mays
cggacgcatcggcggactcgtcagttgcctgggaagatcagcggggcgccacgcccgtcccagtgacaaaccacatatcacctgatcacagaaagcgcttccgggaagcgcgcataaacagccgttgtccagcacatcagccgcatacaaagagttagcatcactgtgtggaagggcagggatcttaggtgaccgcgatgacgatgctcgtagtgagcgacagagccacggatagagtggccacgctcactgatccagcggttcgaggatcttgacagcgctgcgttgtgacagattatctggacgttttgtgtctgtctgaccaggtcattagccgcatctaagtcgc

SEQ ID NO: 351768 - DNA, 138 bp, Zea mays
attctagatcgcgagcggccgcccgcgatctataactagttctagatcgcgagcggcagatcgcgaccttcaaccggtacattcgcgtgcatgggaggtcatggctcgtggccagtgtgagcgtcattcaagtcaatg

SEQ ID NO: 351769 - DNA, 155 bp, Zea mays
agttgtgtcatacgatcgcgtcatcctagattcgcttcctctcactgcagctccgatgggcgtatgcacgcaagcctgcggcgccatgcgtctcctcctggtcgacgctggggcgcgcgctgctatcggtccgcagctcatcgtcccaatctctc

SEQ ID NO: 351770 - DNA, 401 bp, Zea mays
aattaattaagctcaaaattcatgtcatcttcatgcaatttgttaaaactcatgacctgtatactattaactgaatttcgtgtggcactattatatataactcatgacctacatactactaactgaatttggtttggtttttcctcaaaagcaaaaacaaaagatcggtttcagtttcgttttgatgtctgtgtgtttgcaggatgatgttctgggcgccattcgtcaacttcaggaagttcctgagggatcccaccatgaagtacccttggtccaagccgaacgagggcacaccgctgttcaaagacagatacccgcctatagactcctagatacagccttgatgcttgtactcggctcatcgcgcgccacgggcatgcatgcagcagcgaaaaggccgg

SEQ ID NO: 351771 - DNA, 413 bp, Zea mays
atctgtcgcgctgtatctgaggctggctggaaagagaacgacgaccgacggcgtggagctcgtcaagcgggtgatgggcgggtgccagttccgcgaggagcaggccggcgtggagctgctggcgcggtgccgcgaggacgacgacgcgacgggcctggtggtggtgaagccggtgcacctgcggctgcggctggtgtgcggcgaccacccggccggcgccaccaacaaggagaccatcagcaccgagtccagcctcaagatcaatgtcaccttggactagctagtggttctgaattctgattttggattttgatccgtgtctatttttattctttggaacctgtctatttttattctttggattttgatccgggctggcgatgggaacgtgtcagtacgtgtatgcgactatg

SEQ ID NO: 351772 - DNA, 404 bp, Zea mays
aagaggtctcgcggcttcggcttcgttaccttctcctccgagaactccatgctcgacgctatcgagaacatgaacggcaaggagctcgacggccgtaacatcaccgttaaccaggcccagtcccgtggcggtggcggtggcggcggtggctacggcggcggtcgcggcggcggcggctatggtggcgggcgccgtgacggcggttatggcggcggtggcggctacggcggtcggcgcgagggtggtggcggcggctacggaggcggtggcggctacggcggtcggcgcgagggtggtggtggcggctacggcggcggcggcggcggctggagggactgatgtgtgggcccatcctggcttcggccgagttatcttatctatctatagtatcgtgttaccgttcg

SEQ ID NO: 351773 - DNA, 173 bp, Zea mays
gcaccagggcacatggctccagccataagtcaaccagagtagttccacctgaaccttgcgagtatcaattgtgaggcacaacaggacatcctaccaattgtacttctaaatgtacagcatggaacttagagcttgctacatgtattatacagtacctttttatttttcccatc

SEQ ID NO: 351774 - DNA, 303 bp, Zea mays
cccacgcgtcagcagttcccctctcctgatcgtcctgttccgcacagctgcaacgatggcggccgtaacccgagaatcatgcggctcccgcgggacaggagaacgccgtgcgcatcgtgtacgttgacccccccgaggacaccgacccttacgatgtccgtatcggcaccctcacactcgtgctcagcagggagtaaaatccgctggacacactgctctacctcgaaagaacacggcaccagcagcatcttcgccacactcagcctgagtacgtcaagcatttcaaggatcaaccacctgttc

SEQ ID NO: 351775 - DNA, 415 bp, Zea mays
gaggagggctagagcgatggccggcttggccgacaggcaggtgccggaggttgtggctatatcgtgggtgaagtataacagcagcagcaaatgggcgcgaaactgagacgaagatacactccttgtctggcatgtatggtgtagccttctgcaatttttttttgcgctgttggactccttgtccggcatgtatggtgtagccttctgcaattttttttgcgctgttggattatgattatgaatgcaatccgacgctgccatgcaaacgtgaggcctatgtctgaaacaaaaatgtaggcagagtcgattcttaccagatagatttagtgtttatttttttggagagatataacgagaatatagtactgttgtaaatccctgtatattatgcaatcaacttggacgtgtgtatcag

SEQ ID NO: 351776 - DNA, 391 bp, Zea mays
accacgcgtccgcccacgcgtccgaaaaaaaagaaaaaaaaaaaaaaaaaaaaaaaaaaaaaaaaaaaaaaaaaaaaaaaaaaaaaaaaaaaaaaaaaaaaaaaaaaaaaaaaaaaaaaaaaaaaaaaaaaaaaaaaaaaaaaaaaaaaaaaaaaaaaaaagggggggccgcccaaggggttcaaactttacttacccttgaatgcaattttatacctcttcaagagggtcaccaaatttaatttcaagggcgttttttttaaaacttcgtaatgggaaaaacctggggtttaccaaatttaacccctttggaaaaaatccccttttcccaattggggttaataccgaaggggcccgaactttttccctttccaaaaatttttgcacccta

SEQ ID NO: 351777 - DNA, 407 bp, Zea mays
caacaaggcagcagcacaagcaagaaccacacctcctcccttcgcctgtgatcatgtcgtcttgctgcggcggcaagtgcgggtgcggctccagctgctcctgcggcagcggatgcaacggctgcggtatgtaccctgacgtggagaccgccgccaccagcagcgtcaagaccacggtcctcgccgcgccgaccaccaaggccagcgccggcggcttcgaggcggccaccgagggcggcggctgcgactgcaacacctgcaagtgcggcaccagctgcggctgctcctgctgcagctgcaactgagctggcccggcccggcgatggcgcacgagagtcgagaggaggaggacgacgacgaggcgtataaatataatagcggcgtccagtaaataagatcctgtcaac

SEQ ID NO: 351778 - DNA, 86 bp, Zea mays
aacacatcatgcaacaggcggaccaggcagacacaatccgtaccagtagtgtgcatcagtactgcagaacgtttgacacccacggc

SEQ ID NO: 351779 - DNA, 405 bp, Zea mays
cacacacacacacacacagacaagtggtttccaaagccaagtgtgtgtactagcaaccagctagctcgggcggcagcaggcagccatcatgtcggaggagaagcaccaccacttcttcaaccaccacaagaaggacgaggagcagcccgccggcgagtacgggtactccgagaccgaggtggtcaccgccaccggcgagggcgagtacgagaggtacaagaaggaggagaaggagcacaagcacaagcagcacctcggcgaggccggcgccatcgccgccggcgccttcgcactctacgagaagcacgaggcgaagaaggaccccgagcacgcgcacaggcacaagatcacggaggaggtcgctgccgcggcggccgtcggcgccggcggctacgtattccacga

SEQ ID NO: 351780 - DNA, 417 bp, Zea mays
  unsure (1)..(417): unsure at all n locations
accacgcgtccggcatctatagcaaccggtccagcactttcacgctcagctccagcaatggctgcctccaccatggcgatctcctccacggcgatggccggcacccccatcaaggtgggctccttcggcgagggccgcatcaccatgcgcaagaccgtgggcaagcccaaggtggcggcgtccggcagcccctggtacggccccgaccgcgtcaagtacctcggccccttctccggcgagcccccgagctacctcaccggcgagttccccggcgactacggctgggacaccgccgggctgtccgccgaccccgagaccttcgccaagaaccgcgagctggaggtgatccactcccgctgggccatgctcggcgcgctcggctgcgtcttccccgagctgctctcncgcaacggcgtc

SEQ ID NO: 351781 - DNA, 65 bp, Zea mays
gcaaaatgatacaaattgagcgtggataggcgtcagattctacgagacgaccttatattgcttcc

SEQ ID NO: 351782 - DNA, 190 bp, Zea mays
atagttctaggatcgcgagcggccaccctttttttttttttttttttttttttttttttttttttttttttttttttttttgagcaccaaaaacttctttaggcatacttgaaaatccatacaggtaccacaaaaactgacacaatgtttcaccatagtaccatccatagcgggacacgtcctttttaac

SEQ ID NO: 351783 - DNA, 370 bp, Zea mays
acgcagagcatcctggccatctgggcgtgccaggtggtgctcatgggcgccgtcgaggggtaccgcgtcgccggcggcccgctcggggaggtggtcgacccgctgtaccctggcggcagcttcgacccgctcgggctcgccgacgacccggaggcgttcgccgagctcaaggtgaaggagatcaagaacggccgcctcgccatgttctccatgttcggcttcttcgtgcaggctatcgtcaccggcaagggccccctcgagaacctcgtcgaccacatcgccgaccccgtcaacaacaacgcctgggcttacgccaccaacttcgtccccggcaagtgagcgagggcatgatgcttgcatgcgtgtaccg

SEQ ID NO: 351784 - DNA, 125 bp, Zea mays
ccgggacgaccacgcgtccggatatttcggatcacacttccgtctggccaccgcaaagcacaccctcttccgccgtcgccatggcgagcgataaccgcgcgttgctccttcccttcgccgccgcc

SEQ ID NO: 351785 - DNA, 286 bp, Zea mays
gtcagcttgctaataaagctgagacatccaaatattgtccagttgaggatggatagatgctaacaatactgatttcttgcagaaagtgttcactctgaagacgccccaacttgttcatacagtaatgtactttcagttattttgtttttgttattggtttgtatgaatgctgtagttggtttcatgtttggatatgcttgtatgattattaatctggaaatggtacaaacaattcagatgaacattgttagtgtacgaaaatatggtttaatttgtttatatgcct

SEQ ID NO: 351786 - DNA, 163 bp, Zea mays
acccttcgacccccaaccagtgcaagaacaagatcgagtccatgaagaagcggtaccgggcggaggccgcagcggctgtgctcgctggtcccgccgctgcaggctcgatctgcaggttctttgcccacattgacgggctgctcaaatggcctcacgtctgctc

SEQ ID NO: 351787 - DNA, 85 bp, Zea mays
aattttttttttttttctgacaaaactggttgtaaaacacatggaaaacaaatacacagaaaatttgagatatacataagctaag

SEQ ID NO: 351788 - DNA, 428 bp, Zea mays
gtagcacagtccattattgccgtctcccttttgcgtgagcaaagaaagagagcgagaagcagtcgccatgtctggcatcatccacaagatcgaggagaagctccacatggggggcgaccacaagaataaggaggaggagcaccacaagaaggccgaggagcaccacaagaaggaggagggggagcaccacaagaaggacggcggggagcacaaggaaggcatcgtggagaagatcaaggacaagatcaccggcgagcacggcgacaagtccggcgaccacaaggagaagaaggacaagaagaagaaggataagaagaagcacggcgagggccacgaccacgacggcggccacagtagcagcagcagcgacagcgactgagatctggtgtcgcaggtaattaattgatctggggctgtaattttttttc

SEQ ID NO: 351789 - DNA, 388 bp, Zea mays
  unsure (1)..(388): unsure at all n locations
cccacgcgatccggatcgcgagcggccgcccttttttttttttttttttttttttttcgcaaaaggtttgtgcacctcgtttcaattgttgggacaaaattggtacggagtacagggtgaacggattcattacagcagcaggtaacatgacaatgaatgtagcagtagcaatctcatttttacagtggctaaaccaatcaatcaaccgaacggacgaaggagactaggggaggaaggaattgtagcagcgatctcgctcaccattctcaccgggacgcccgcggaatcctcaaatccacccgaaccggtcaccatttttttcctgagatactttggacacctttcctttgaccactcaatcagcgttccttcncctgctccggtccga

SEQ ID NO: 351790 - DNA, 385 bp, Zea mays
aggacacgtgggcgcgcgcagcggtcagctcagcccgtctgattcccgtgctgccagccctccgccgatcgtgaaacagaaccgtcggtggtttgcttgcgtgatcgctgatcctcgcggacgctcacggtcatggcgcctcagcctttgcgcgctccgaggctgagcgcccccgctggccacgcggcgtgcacgtgctcggccgctccgctattcgggaagcgggcgccccccgtcgtcgcgttccaccgcgcccgtaacggcggcgccgtcgcctcgtgctcggccgtgcatgagtcggcaacctccagcactggtacgggtcttgctactctaattgcggggtgggtgggatctcgtctgaataagttctctcgagacgtag

SEQ ID NO: 351791 - DNA, 264 bp, Zea mays
agtcacttcgcttccccacctctccattccattgcggttctgcgagctcctacctccctgtggtgcttggtcatggtcgactaccacttcgtgtataacgacttggagggggcgagcacatcgtgggacgacatccagcgccgcgtcaggaacttgcctccgaagccggagccctccaagccggcttttctccccccgaaggttgacgccaactaccaacccaagtccaacggatggcctgacgttccccaacccgaacaactc

SEQ ID NO: 351792 - DNA, 378 bp, Zea mays
aggacgcgtgggcgagcggccgccctttgttttttttttttttttttttttttttttttttttttttttttttttttttttttttttttttttttttttttttttttttaattgggtataatttttaatgtccaaaaaggggaaaaggtcggagggcccgggaagggaaaaggaagaaaaaaggaaaaaaaaaaaaaaaagggggaaaattaaacaggagcaaaagggaaaacccccctaaaagaggaaaaacaaaacacccaaaaaggacaaggggaaaacggaaagcaccaaggccaaggggaaacgggaaatcccgaaaacaaaaaaaaaaggggaagcctggaaaaacaaaaaagaaaaccaggggatcaagaa

SEQ ID NO: 351793 - DNA, 390 bp, Zea mays
accacgcatccgctcctacgcgcgcacggctcccacggcgcgtcggttccctgctccgtggtgcttgccgagctcaatcccaagctaccgcggcgtccctgctcggatctcctccctgcagcgcccaaccgaagcttctatcgtggaacgcgcgcctcctctgcttctcctcaagtggagtcttccctgcgcgcgcctacgtcctgcgtcgcgaactcccctgttgttagcaacctccaatcacatgaacacaatagccaccaccaaagcaagggtataaatctgatacatgcatacactagtacagagatggagtttgggaagtagcaagcagggaagggaagaagattaaccgcatcgaaaggttagaagcatcacaagcacatctca

SEQ ID NO: 351794 - DNA, 77 bp, Zea mays
caacaataaatgcaacaaattaattgttgtacatgtgaggaaaacaattaatgcaacaaatcaagtacgtacttgag

SEQ ID NO: 351795 - DNA, 249 bp, Zea mays
acacacgcgtccgccgacgcgtgcgcggaggcatgggcggacgcgtgggttaagtctagctggcgtcaggcatcaaaccatgtgcagaatgtaccacatggcgcgactacaatcgcaggaagcaacagctaatacatctatcgataccgatggacacctagcttaactacttgacggtgatcttgtcgaccactccagcgccatgatgcggtccgcaatagacaccatatgttcccagtaccgtgaggg

SEQ ID NO: 351796 - DNA, 426 bp, Zea mays
gacgacttgtttcattgattcttgaagagatcgagcttcttttgcaccacaaggtcgaggatgtcttgcaactgcggatcaagctgcggctgcggctcaagctgcaagtgcggcaagaagtaccctgacctggaggagacgagcaccgccgcgcaggccaccgtcgtcctcggcgtggccccggagaagaaggccgcgcccgagttcgtcgaggccgcggcggagtccggcgaggccgcccacggctgcagctgcggtggcaactgcaagtgcgacccctgcaactgctgatcacatcgatcgacgaccatggatatgattattatctatctagcttgtggtggtggttgaacaataataagcgaggccgagctggctgccatacataggtattgtgtggtgtgtgtgagagagagagaaacagag

SEQ ID NO: 351797 - DNA, 405 bp, Zea mays
  unsure (1)..(405): unsure at all n locations
atcgaccttcaagtctcgctacgtagcagtgcaataaaaaaagcagccgcaatggcgagcagcaccatggccctctcctccacggccttcgccggcaaggccgtgaacgtgccgtcgtcgtccgccttcggcgaggcccgcgtgacgatgcgcaagacggcggggaaggccaagccggcggcggcgtccgggagcccgtggtacggccccgaccgcgtgctgtacctgggcccactgtccggcgagccgccgagctacctgacgggcgagttcccgggcgactacggctgggacaccgcggggctgtcggcggacccggagacgttcgccaagaaccgggagctggaggtgatccactnccgctgggccatgctgggcgcgcctcggctgcgtcttcccggagct

SEQ ID NO: 351798 - DNA, 89 bp, Zea mays
aatttcaaacttatacttttgcaatcactccgataaaataatgtaaaatttttgtaacttgtaaaatttggtaacaagatttccgctgc

SEQ ID NO: 351799 - DNA, 148 bp, Zea mays
agagaacatcctggtgacaacaagcaggggcaccgaattaacctccaatccaaaacaatgggtccaagaaaaggaaccttcctcccaaaaaacccaagttaaccgttcaaaagaaaggtaatttaaaaaaaggaatccgtttaacctt

SEQ ID NO: 351800 - DNA, 162 bp, Zea mays
agcgaggttccatgagatcttcagcagatgtcagggtctgggcaacgtttgtttcttgcatggcatctctacacagaatgggacgatttgtatagctatgacgttctatgaaggatccatcgggaacaagatggctcggcttacaggtggaaagctcccttt

SEQ ID NO: 351801 - DNA, 393 bp, Zea mays
aaccggtccaacactttcacgctcaggcgctcagctctagcaatggctgcctccaccatggcgatctcctccacggcgatggccggtacccccatcaaggtgggctccttcggcgagggccgcatcaccatgcgcaagaccgtgggcaagcccaaggtggcggcgtccggcagcccctggtacggccccgaccgcgtcaagtacctcggccccttctccggcgagcccccgagctacctcaccggcgagttcctcggcgactacggctgggacaccgccgggctgtccgccgaccccgagaccttcgccaagaaccgcgagctggaggtgatccactcccgctgggccatgctcggcgcgctcggctgcgtcttccccgagctgctctcccgc

SEQ ID NO: 351802 - DNA, 284 bp, Zea mays
acgatgacgatgatgataccatatataatctaggactgcgcatatatatattttgttccagaaatgatcgatcactgtactgtactgtaaaatcttatagattattacacgcatggtgtgcgctgcatcttcattagttgttaataatggcgcacacatggtgatctctctgtatttgaatatttgatcacaaagtatttgtttcaaattaaaaaagagacaagaaaaagaaaaagaaaaaaacgaaaataatcaacaacaaatcaaaaacagaaaggcagcac

SEQ ID NO: 351803 - DNA, 341 bp, Zea mays
ccaggtccaccacgcgtccggacccccctccctcccacacgaccatggcgtcctggttggtgcccttccggtcctgctgcgtgtggaggctcgccaccgcgctagcgcctttgccgcacaacctctcgaggacccacgcgagctcatcctccgtcatctcccccgctcctccgggcagcttcttcccacctccgccggccgcgccctcctggctcccgtggtgcctctttcgccacgccgctgggccatcgccggtggcgggggcctcggacgagaggcaggagcccatgatggccaatgagagggacccacacggtggggcacatggtggaggtggcggt

SEQ ID NO: 351804 - DNA, 89 bp, Zea mays
ttccgggtccacccacacgtccgaggacgcgtggggaacgatgtatcctttgaactccgcattataatttttgaagccgttttagccag

SEQ ID NO: 351805 - DNA, 398 bp, Zea mays
cactcctcgccatcacataaaaccagtgcaagcagaagcagcgcaatggcgagcagcaccatggccctctcctccacagccttcgccggcaaggcagtgaacgtgccgtcgtctctcttcggcgaggcccgcgtgacgatgcgcaagacggcggcgaaggcaaagccggcggcgagctccggcagcccgtggtacggccccgaccgcgtgctctacctgggcccgctgtccggcgcgcccccgagctacctgacgggcgagttcccgggcgactacggctgggataccgcggggctgtcggcggacccggagacgttcgccaagaaccgggagctggaggtcatccactcgcgctgggccatgctgggcgcgttgggctgcgtgttcccggagctggt

SEQ ID NO: 351806 - DNA, 420 bp, Zea mays
  unsure (1)..(420): unsure at all n locations
aataagacgacttgtttcattgattcttgaagagatcgagcttcttttgcaccacaaggtcgaggatgtcttgcaactgcggatcaagctgcggctgcggctcaagctgcaagtgcggcaagaagtaccctgacctggaggagacgagcacccccgtgcaggccaccgtcgtcctcggcgtggccccggagaagaaggccgcgcccgagttcgtcgaggccgcggcggagtccggcgaggccgcccacggctgcagctgcggtggcaactgcaagtgcgacccctgcaactgctgatcacatcgatcgacgaccatggatatgattattatctatctagcttgtggtggtggttgaacaataataagcgaggccgagctggctgccatacatangtattgtgtggtgtgtgtgagagaga

SEQ ID NO: 351807 - DNA, 92 bp, Zea mays
aaaaaaaaaaaaaaaaaaaaaaaaaaaaaaaaaaaaaaaaaaaaaaaaaaaaaaaaaaaaaaaaaaaaaaaaaaaaaaaaaaaaaaaaaaga

SEQ ID NO: 351808 - DNA, 403 bp, Zea mays
  unsure (1)..(403): unsure at all n locations
gtaacctggcggcagcttcgacccgctcgggctcgccgacgacccggaggcgttcgccgagctcaaggtgaaggagatcaagaacggccgcctcgccatgttctccatgttcggcttcttcgtgcaggctatcgtcaccggcaagggccccctcgagaacctcgccgaccacatcgccgaccccgtcaacaacaacgcctgggcttacgccaccaacttcgtccccggcaagtgagcgagggcatgatgcttgcatgcgtgtaccgtagacgtaccgtattcctacgtactgcaggttgcaccagtatttgtgaagggagctgtgcgtgggagccagagattgtaccgctagtgtatttttgtatgcacgctgtggagctgatcaatgaaatatgctgtanat

SEQ ID NO: 351809 - DNA, 355 bp, Zea mays
acggtccttgcgtagcgtcggtatccaggtcgaccacgcgtccggtggggtgatccgcgtgagaagctctgtcaagttatccatgataccccgctgagctgcttggttataggaagcaggggccttggcaagctcaagagggtgcttttgggaagtgtcagcgactatgttgtgaacaatgcaacctgccctgtcaccgtcgtcaagtcaacaagcaccgaaggttgatcttatcgccgagatgcctggatgtgatgttgtaataaagatggttggcctgaataagaacatgcactagtttctagctaattgaaacatgttgaaccaggcaattccaatgtaatactaatagacc

SEQ ID NO: 351810 - DNA, 292 bp, Zea mays
cgcaagcgtacgcacacatacatcgtttcttctactacacgacgaccaacctggggaagcctgccaagatcggcgagtgcggtggatacgcccgccatcttcgggatcttagggcgactccggatcggcttatccacgtcaaggtcccggctgcgaacgtcagctccatctcctcccacgccctcctcaccatctgacggcacagcttgccgctctaggcacgcccattaggtggcatgtcacatggctcactgctgcaatagcggtccatggccagcccaagcatagcccc

SEQ ID NO: 351811 - DNA, 118 bp, Zea mays
aacccaatcgtcagctgagtagcatggacttgcgcgactgctcatcacgtcatcctcatcctctcttctcgcgtcggacgcgtcggtagcaacggtcgctagacgcagatgaatcgca

SEQ ID NO: 351812 - DNA, 416 bp, Zea mays
gaggtgcaatattatcacaggtacgagtgtttcacataccagtcatgtttccttctttctttggatcatttgtacatgcaacatgtactttttctaaagggtttgacatagagaacatcttgtttgactgcgagaattagtggctgcggctgatgccacaacttattatgttgtagtaagtactataaatggacaacgataagggtattaggtgaagaataaatggttgtaggttgctgcgatctactctcataagttactatagcattactgtacaattgtacatacaacaagagcagctgaaagtagctacaatgaatgcagacagtatctagaaaatttaaaactattttgatagccccttttttgcacaactagcagatcatattccattcttgactagcagcacaactagc

SEQ ID NO: 351813 - DNA, 350 bp, Zea mays
tgggccgtccgcatgagatcaacacgctgtcttgtcagaccctacgatatgtctcaactgcaggagaaattaatatcttcaagtgtaacttgtgttcattctgtttcagtcgtcgcaacatccgtatatgaacctcttgcactatcagctggctcgatcgtcttctcagttaaataggttctgagattaggttaacgatggccacgtaatttcggacttgtgtttgttcaggtggcagcgccaaatgttccagtttcatgttcatattatatcaagagttcttgacattcagaatgtcaccgtaaattcaggtcacgtggcaggtcgttttgggaggtcgttctagggga

SEQ ID NO: 351814 - DNA, 108 bp, Zea mays
cgcgtccatctaattctgccaccgctgacgtcgtcttcgtccgtcccagatctgagagcggggaggaagaaacagcgatcgacggcgtccaactatctggacactacg

SEQ ID NO: 351815 - DNA, 176 bp, Zea mays
acggacggattccgggtcgaccacgcgtcaggttcaagatcgcgagcggccgcccttttttttttttttttttacaagaaaaacacattactggatatcaacaattaaccagcatgaaacataaaccatcactattgcacaaacatggttcatcttagtgtacaacgccaattcga

SEQ ID NO: 351816 - DNA, 207 bp, Zea mays
gtcggatatcagggtcgactacgcgtccgcccaagcgtacgcccacgcgtccgggtggatctccacctacatgttccgggtggccaacaaggacatgacctacgcgcaccagctcagggactacgagaagcacgtcatggagaaacggctggagagcttgtcggatgctgagctgcaagctctgctcgagcaagttgaggacgagaa

SEQ ID NO: 351817 - DNA, 225 bp, Zea mays
gtcggactcagggtcgaccacgcgtccgtagacataatgcatatctaaatgcataccaaaagttatctgtctagatatagtgttttttctatgtatccagacataatgcatatctaaatgcataccaaaagttatctgtctagatacatagaaaaaacaatatatctagaaaagccaaagcattttataatttgtaatagagggagtatatgattgcttcagaag

SEQ ID NO: 351818 - DNA, 174 bp, Zea mays
tcggtatctaggtcgaccggcgtccgggggtcgaagagctatcaagaaggctcgtggcctagatcagtggccttcattgcactttggagggtgcgctggtttaccatctcccacggggagagtggacgtcataatttgtggtagagggggtacgcgttcgcgcggcccctgttg

SEQ ID NO: 351819 - DNA, 402 bp, Zea mays
gattcttgaagagatcgagcttcttttgcaccacaaggtcgaggatgtcttgcaactgcggatcaagctgcggctgcggctcaagctgcaagtgcggcaagaagtaccctgacctggaggagacgagcaccgccgcgcaggccaccgtcgtcctcggcgtggccccggagaagaaggccgcgcccgagttcgtcgaggccgcggcggagtccggcgaggccgcccacggctgcagctgcggtggcaactgcaagtgcgacccctgcaactgctgatcacatcgatcgacgaccatggatatgattattatctatctagcttgtggtggtggttgaacagatgtaagcgaggccgagctggctgccatacatacgtagtgtgtggtgtgtgtgagagagagag

SEQ ID NO: 351820 - DNA, 60 bp, Zea mays
cttaagatacgctcactcgatcttagcttcgcttccatgaagcgcaacgcccatgggtat

SEQ ID NO: 351821 - DNA, 416 bp, Zea mays
cggcgccacaacgtctcggccatcgggatggccttcaacggctggtacaaccgcctctacactgtgacgggccagtacatcgacgacgatgactcggagaagtacaggcctcagatagagaaggcgtgttggatcgttcaggctgacatgaaagatgcgatgtcatccagcaccagcagcagcagccgcccacggtacataaaccctaaatatgtatgcggagaggtccagcaacatgttgtgcccgaaaattgacaccttgccatttcgatgagacaagacaaggcatgtgcctattgccctattccaattcttgagcactgtaacactgccaatatgcagagtatatgttttctgcctgttgaggtggatacaaatgcatgccttttttttagtagaaaagagggcggtcgcgg

SEQ ID NO: 351822 - DNA, 291 bp, Zea mays
gtcgaccaggcgtccgcccacgcgtacgcccacgcgtccgactagttctagatcgcgagcgggcgctcgcggccgcccgggaatcttttttctgtgttttagaacgaggcgtcatttaagttaaatcaagtgcagaaccagacttagttgccacccaattcggagcttatcagcgtccgttataaggtgcgcggaactgatctatatgaacctcagagaggaatagacggtctgacgcgttcccggggctgcagggatgtactcagggacatggggcacaggggacgtctt

SEQ ID NO: 351823 - DNA, 254 bp, Zea mays
acccaagcgttcgtagaatatcaagctaaatatccactcccgtcgtcctggactcgcagttcatctacgacccacacgacccagcatggcgatgttcctgagaagctcaccggtgctcctcgctcttcacatcaccaggtcgctcatctccagcgcgctgccccggcacccggtaattgcggagatgcacagtctctgtatcgatgcacaccgaatgcatcgagccgtgcactctctgcgagcgcaaccacaac

SEQ ID NO: 351824 - DNA, 218 bp, Zea mays
gtcatcccacgcgtcgtgcccgacaagccacgctcagcggaagcaacaatggtgatgacctcggctaacggacggaggaaccgcaggcctgtaggcactgacgccgcagagacgccctcgaccccgtcctgccggatgacgccttgctgcaccaacacgtccacctgaggccccatgaccatctgtgcgaagtggacggcctggaacgcacgcctcgc

SEQ ID NO: 351825 - DNA, 324 bp, Zea mays
ggcagcagcacaagcaagaaccacacctcctcccttcgcctgtgatcatgtcgtcttgctgcggcggcaagtgcgggtgcggctccagctgctcctgcggcagcggatgcaacggctgcggtatgtaccctgacgtggagaccgccgccaccagcagcgtcaagaccacggtcctcgccgcgccgaccaccaaggccagcgccggcggcttcgaggcgggcaccgagggcggcggctgcgactgcaacacctgcaagtgcggcaccagctgccgctgctcctgctgcagctgcaactgagctgggccgggccggcgatggcgca

SEQ ID NO: 351826 - DNA, 334 bp, Zea mays
aagcaacaggcgggacctcttcatccacaccatgcgtatgttaggctactagggtacgtgagatgactcccacatggagtaccatgtgacgaatgtcatcctggtgaacgcgacggcggagggctcctcgcgcactgcgcacaagtcggacctgcaccggatcgccgtcatcaaggacgtgatccagcccatgttcgcctggtaggacgtgttgcaacccatcgacatccatgcacttcatctggtggctcgagacgttcgtcacctgcaccctgctcaactcgtggtatctcttcaacctgccaggactaccacagagcttttgggcaccgct

SEQ ID NO: 351827 - DNA, 173 bp, Zea mays
ggcctctgggaaacctcaacttacagcccgcaggggcgctatcagacgagcagagcaggctagcagcactgcagcagtacaccagtaccgcagcggcgcagcgcaggtccgcagccggagatccccggcccgcgggcaggggcggtaggatcgccgcgcgcatagctgccagg

SEQ ID NO: 351828 - DNA, 141 bp, Zea mays
cccacgcgtcaggcgtgttgccagggacagcggtggcattgtcccatgctctgcaattaatactagccctctgactctgaggctattcattgtgatactgtcatcggtgctgcctgttagcacgcagggctgtccgtgacc

SEQ ID NO: 351829 - DNA, 278 bp, Zea mays
gcaacagacagcatctcagtccactactccgtcatcgtgccatccaccagcagcagtgaaagcatatggctcgccgtgccagcctgctcctgcgccgcggcgctcgtcgtcgccgtcgctgccgcggcggtgcagccgaagtgcgagcgcatccagtgccagctgtacgtggtggtggacagcgccaacgggttctagatacggcggtagaccgacgccatgtgaattacgacggggctcatcgaggagatctacttcgtcgccagcaacgtcgcagc

SEQ ID NO: 351830 - DNA, 433 bp, Zea mays
cccatgcgtccgcccacgcgtccgccacgcgtccgcccacgcgtccggactagttctagatcggaaggggagctgctttcccagcttgtcgacttgctgaagctgtctggggctagacacacgattctctacgcttcccagccatctggttatctactggagaacccttccggctcgccagtggctaggcaccttgcggagaggactaacggtacaaaaactggcctactgagcaaatgtgacggagagtgcctagtcaaatcaactcttcttgaaggaacctttgtcggaatagtgctccttagcatcttgatatcagggctcatgtgtatgatgggaatcgatactccctccaagtttgaagctccccaggagtccgtgatctcccttcgaagcagaacccttgttctgtttggccgcactgtggatagat

SEQ ID NO: 351831 - DNA, 99 bp, Zea mays
acgcgaccgcccacgcgtccgcccacgcgtccgcccatgcgtccgcccacgcgtccgggacagcgtccacagaagggccagagagcacagagagtggag

SEQ ID NO: 351832 - DNA, 224 bp, Zea mays
ccaacgcgtccgcccgccgccgccccttcctctacgtcgctcgcctcgcgcctgcgccagcagctctgccatggccccgaagaatgataaggccccgccgccgtcgtccaagccggccaaatccggaggcgggaagcagagtaagaagatctggagcacgggtaagcaaaaggagaaggtcaacaacgctctgctcttccgaccaggccacctatgacaagtgg

SEQ ID NO: 351833 - DNA, 250 bp, Zea mays
ccgaagcgtcggactctatcgccttcgcgatcgcactcgagcctatcttgtccgcaactacatccactcgctttggttcgtcgacaacccactcaacggcgacgtgctcaaggtctctgacatcatgtacgcgcggccgagccatcgtccggcgatgacgcttcgtagctcaggcgaccgatcgagcgtagtcgttcctcgaaaactcgcgctatcagatgaactagaccgtcgagagcatggcattggt

SEQ ID NO: 351834 - DNA, 136 bp, Zea mays
agcccaagcgtccgcggacgcgtcggcgtggcgagcgccaacgtgcgggagagctccagccccgtggtcaaccgcagtcactacgacaacatcaccgtgcggaccaggacggccgacggcaacgagcgcggcagac

SEQ ID NO: 351835 - DNA, 220 bp, Zea mays
aaacgaaaagcatggctgtaggacaagagcaacgaacaacagtctgtgtccgtcaccgcgggacagaaacaccagactcatcgagtgcgtgtgatctggatggagcttggagatgacggaattgcgacggatcctcatgtgccagcggctccgcctgcgctgaaccgctgtcatgcctagcatcgttgaggaaaggcgagttcgtgttctgccgagcgtc

SEQ ID NO: 351836 - DNA, 88 bp, Zea mays
gcagcagcacacagccccatcccaatcctagtcgatcttcttcccctcctcaaggaataaaagaagctgaaccatggggaagagaaag

SEQ ID NO: 351837 - DNA, 149 bp, Zea mays
ccacgcgtcagcatcactctctcgcgtctatctcctcccttagtgccgcccgccatcatcgccatcgccgcacccgcccatgccgcgcccgctcccggcctcggccccgtccgccgtggaggccggggccgcgcgcgcccgcggcacta

SEQ ID NO: 351838 - DNA, 369 bp, Zea mays
atcgacggaaccgtgggcagagtcgtcggccgcaccggcggctggctgcacagccggtcggcgttctccatgaacttcacgcggcgcatccgggggtccgcgaagaaccccctgataaccaggaagctggagaggaatggtaggatgacctgcatgacgtttccccgggactggctgccgagggacctgagcgtcatgtggttcgggctcagctgctggatcgggccgtccatcgtctcggtcatcaacgacgacaggctcacagggctcatcgtcacgaacatcggacacgagctggcccacctcaccacaccgtcgacagtgatatcccagttctggctgtgggcaatgaccttgcacctgggcctg

SEQ ID NO: 351839 - DNA, 71 bp, Zea mays
accgaatcctctgtgagtgtctacacggtggacttgattttaccacgacatgattaaagcgtaaaagcaaa

SEQ ID NO: 351840 - DNA, 425 bp, Zea mays
  unsure (1)..(425): unsure at all n locations
agtgaggttctccggggttcggtttcgtgggtgagcggatcgagatggcggcgtcggatgttgagtaccgctgcttcgtcggcggcctcgcctgggccacggacgaccactccctccacaacgccttcagcacctacggcgaggtcctcgagtccaagatcatcctcgatcgggagacgcagaggtcccgcggcttcggcttcgtcaccttctccacggaggaggcgatgcggaacgccatcgagggcatgaacggcaaggagctggacggccgcaacatcaccgtcaacgaggcccagtcccgcggcggccgtggaggcggcggcggcggcgggtacggtggtggccgtggaggcngcggctacggcggtggcgggcgccgtgatggcggcggcggctacggcggtggcggcggctacggtggt

SEQ ID NO: 351841 - DNA, 432 bp, Zea mays
cacacgcgtccgcctagcgtagtaggaaattctccgccgacgccccgccatcatcgcccccgcacccgacattctacccctcgcgcaccttccttcggctccacccctccccacccccgctatgcccctgcctccgtgacacccgtgcccagccccaccacccccggcaatctcccatgctcccccatcaacgctccctcctcacatttcccgcacaccgagacaaatccgtccacgctatggtttggattcgtggatggagcccgaggttagatccagcaggagaaggaagatagaggaggagagggaatgggtggcgggcctatcagacatggatggccgccaccgtcgcagagtcggacgacgctggtagcggcggcggctgtgggtgcggcgagcggatgaagctactattcaacctgggcgggcgca

SEQ ID NO: 351842 - DNA, 435 bp, Zea mays
cacacgcgtccgcccacgcgtccgaagacgacttgtttcattgattcttgaagagatcgagcttcttttgcaccacaaggtcgaggatgtcttgcaactgcggatcaagctgcggctgcggctcaagctgcaagtgcggcaagaagtaccctgacctggaggagacgagcaccgccgcgcaggccaccgtcgtcctcggcgtggccccggagaagaaggccgcgcccgagttcgtcgaggccgcggcggagtccggcgaggccgcccacggctgcagctgcggtggcaactgcaagtgcgacccctgcaactgctgatcacatcgatcgacgaccatggatatgattattatctatctagcttgtggtggtggttgaacaataataagcgacgccgagctggctgccatacatacgtaatgtgtggtgtgtgtga

SEQ ID NO: 351843 - DNA, 83 bp, Zea mays
aaataatttggtatatttgccattccgctattgtgtactctttggcatacatacaataattaaaatggcgttgcgtggctctc

SEQ ID NO: 351844 - DNA, 399 bp, Zea mays
cccacgcgtccgcggcgatggccggtacccccatcaaggtgggctccttcggcgagggccgcatcaccatgcgcaagaccgtgggcaagcccaaggtggcggcgtccggcagcccctggtacggccccgaccgcgtcaagtacctcggccccttctccggcgagcccccgagctacctcaccggcgagttccccggcgactacggctgggacaccgccgggctgtccgccgaccccgagaccttcgccaagaaccgcgagctggaggtgatccactcgcgctgggccatgctcggcgcgctcggctgcgtcttccccgagctgctctcccgcaacggcgtcaagttcggcgaggccgtctggttcaagggcggctcccagatcttcaccgaaggcgggc

SEQ ID NO: 351845 - DNA, 366 bp, Zea mays
cagacgcttgggttcttatttgttgttgttacagcaattcgaggttttactgcgatttcgtcccaccagaagaaagttcacatactgggactatgctttttacacgtcggaactgtgcattctaaacgtacacagctcactgtcttccacatcatgttaattggcaaaatgttacgccttagaaacgctgactcgtgttcactgatcgtcactcctgtactatcaacgtacaccatttcagttatccaccgtcatgtacattccacaagacggatcaagacgcgtggtagtattcgtgctcaacaccttacatccttacctactgtacatccatgtgcctgtgcaacgtttctactcaactgtgcc

SEQ ID NO: 351846 - DNA, 303 bp, Zea mays
gacaaacgcaacgtgatcagcgtcacacccttccgtacgatacacagactgaagtgctcaactgacgcaggtcgcctcgcagtggcaactgccgatcgatgcaacacataatcagcgcctgcagtctgcctcagacacagcgggccgccgcgctcctgccactgaggcgatcgctcaggcgccttccagtctcagcatgtgcgccgccgccgctgcgattggtactcaggaggagatgctaagaagaggataagcatcagcaataggccgatgagggaagcagccctgacaatcaggagcagg

SEQ ID NO: 351847 - DNA, 435 bp, Zea mays
ggagaggagagatgatgatgatgccgacggcggcgtcgctgatggacgatcttgtcgaggagttcctcatccgcctcccgcccgacgaccccgcgagcctcgtcaacgcctccctcgtctgcaagcggtggagccgcctcatcgccggccgcgtcttccgccgcaagttccgcaagatccaccgcgccaagctgctgcacatggcccgggggcaggtctataggcagcggcggcgacggcggcagcggcagtgatggagcggcccgtccggtccgaccgtcgattggctgcttgctctgcatcttctggcttctgcaaccaggaagctgactgaacgctcgctattgccaataattaattagtactattttcttcgtttcttttttttatttgtcgtatacgaactaaaacagagttagtgataatgataatgat

SEQ ID NO: 351848 - DNA, 194 bp, Zea mays
acgctcacatcttgccactcgctcgctcgatggtaacttaccttccacgaatcgcaacgcctatggtcatgtcgacgcatgcttccatctccacgcgctatctgctgtccgccgcatgtgcgcccggttcaacgactcagcagcttagcactgagttcgcgctgtccttgccgtccacccgattgtcggtcccg

SEQ ID NO: 351849 - DNA, 323 bp, Zea mays
gattcttgaagagatcgagcttcttttgcaccacaaggtcgaggatgtcttgcaactgcggatcaagctgcggctgcggctcaagctgcaagtgcggcaagaagtaccctgacctggaggagacgagcaccgccgcgcaggccaccgtcgtcctcggcgtggccccggagaagaacgccgcgcccgagttcgtcgaggccgcggcggagtccggcgaggccgcacacggctgcagctgcggtggcaactgcaagtgcgacccctgcaactgctgatcacatccatcgacgaccatggatatgattattatctatctagcttgt

SEQ ID NO: 351850 - DNA, 65 bp, Zea mays
cccaagcgtccgcagatgcattggagtgaatgttggaggtcgcgcagggcgttctgcacaacagt

SEQ ID NO: 351851 - DNA, 223 bp, Zea mays
gttaaacaatcgccagctgtctacagatatgaatagcctgccaattttttttaacttgggctaaatgtattctgaaaacgtttatacatagcatagtagcacactggactttttttttgtttgataacattagtgtgtgcgcgttactttgccatttctcatgaaagccatggcaaaataagaaactttggacgtgttactagctccggtatatcacctttgc

SEQ ID NO: 351852 - DNA, 422 bp, Zea mays
cggacgcgtcggctgacgcgtcgggacacctgcaggaagctccaccacctcctccatgagagagatctaccaaagcatagcctccttcctgctgacgggatcgccgtttgggtcgcagcttatcacataataggaggtcgcacaacaccttggcaaatgattaagtctcagcagctgcagctacggattcacgatatgatgagtctgaaagggatatcattcatcagcagcaaggtgataatgcatgaatccactgcagtcgcgtcatcatcatcatcacctgcacgtgcggctacaggccagcatgttgctgcccatcgtagtcccagcaagattgcggcgtcctcgtggactcattaccgccgtctgcactgacagacgacgaatacgcctcagatggccgtgagtccgaatcttcgacc

SEQ ID NO: 351853 - DNA, 72 bp, Zea mays
gtggagatattcttgaggcatgagtaatgctacatgcatgtgatgtaaacaaatacaggtgcagctccaaat

SEQ ID NO: 351854 - DNA, 350 bp, Zea mays
gggatggcttctcctccccctccggttcgggttcgggttcgtgaggttctccggggttcggtttcgtgggtgggcggatcgagatggcggcgtcggatgttgagtaccgctgcttcgtcggcggcctcgcctgggccacggacgaccacaccctccacaacgccttcagcacctacggcgaggtcctcgaatccaagatcatcctcgatcgggagacgcataggtcacgcggcttcggcttcgtcaccttctccacggaggatgcgatgcggaacgccatcgagggcatgaacagcacggagctggactgccgcaacatcaccgtcaacgatgcccagtcccgcgggggc

SEQ ID NO: 351855 - DNA, 442 bp, Zea mays
gacgacttgtttcattgattcttgaagagatcgagcttcttttgcaccacaaggtcgaggatgtcttgcaactgcggatcaagctgcggctgcggctcaagctgcaagtgcggcaagaagtaccctgacctggaggagacgagcaccgccgcgcaggccaccgtcgtcctcggcgtggccccggagaagaaggccgcgcccgagttcgtcgaggccgcggcggagtccggcgaggccgcccacggctgcagctgcggtggcaactgcaagtgcgacccctgcaactgctgatcacatcgatcgacgaccatggatatgattattatctatctagcttgtggtggtggttgaacaataataagcgacgccgagctggctgccatacatacgtattgtgtggtgtgtgtgagagagagagaaacagagttcttcagtttgctat

SEQ ID NO: 351856 - DNA, 412 bp, Zea mays
cccacgcgtccgatactacaacgcggaggccgacaagatcctgcacatcaatctctcggacggggaggcaacagccacgttaccgtcccggctgagcaatgcgcgccaacagcaggccagcgcacgccaggctcaaggagcatcgtcatgctcgttctctcatcaccgtcccgggcaccattgaccaatgaccgtcagtggacatgcgagctcatcaaccagatacttcccacaccattgaaggacaatcagcgcgtcatcgaatgatctcctcggctgttcatcccgcatagccccagagcggtgagcgacatctccatccagatcctcgacggcctcctgcacggatcctctgtcgccaaacactaagctgccggcctgctgttgcagctgcagctgctcaacaagacca

SEQ ID NO: 351857 - DNA, 66 bp, Zea mays
  unsure (1)..(66): unsure at all n locations
ataaaataaaanatcaccactatgccaatgctacagctaggggctaagctccatcctaaagcaaaa

SEQ ID NO: 351858 - DNA, 290 bp, Zea mays
ctagaagagaaccagtgtgctagtgctacagctacggcctagctacctactacggcgcagctagcagcggcggtcatgagcggcgggcgcgaggagagcaccatcagcatgtggtcagagctggccgccctgcgcgcgctggtgcgcgacgcggcggcccgggccgggagggagacggcggggtggcgcgggcgggagtgatacgaccaccgccacgtgctgtgcctgagcgcaatggcgatccagctgctgatctgcgtaaccagctaatttgcagtcaactactgctg

SEQ ID NO: 351859 - DNA, 125 bp, Zea mays
aaaactaccaataatttataacagttcaaagtaacttctttgaatcacttttgtaatcactccgatcatgtacattgtaaaacttgatgtaacttgtaaaaatttagtaataagatttctgctgc

SEQ ID NO: 351860 - DNA, 382 bp, Zea mays
gacgaagaagctgcaatgagtcctagatagcaaagggagcacctaatctgttattcaacttacaagagatgtgttagggtcaaatacgatatttgtactctcgcgattgccatgccggtgcctgtaaaaacgttgcggtttgtttgccacggtgaatgcttgtgttcctttgtcagctggatttgtcatcagctcataggaaaagaaaagaacttgtaaggtccagtgggcctgacgagcccttcaattttttttgttcactttgcagcctgaatcctaacaggcgagaatttcatctgaactgtgatattacacagaactcttggtttctagagactaattttagtccctccattttaaaaaaaattggttacaagaaaaa

SEQ ID NO: 351861 - DNA, 236 bp, Zea mays
  unsure (1)..(236): unsure at all n locations
ccgggcgactacagctgggacaccgcggggctgtcggcggacccggagacgttcgccaagaaccgggagctggaggtgatccactcccgctgggccatgctgggcgcgctcggctgcgtcttcccggagctgctcgcccgcaacggcgtcaagttcggcgaggccgtgtggttcaaggccggctcccagatcntcagcgagggtggactggactacctcgggaacccgagcctcat

SEQ ID NO: 351862 - DNA, 74 bp, Zea mays
aaattgctcctctggagcttcgttccgcagttttgtacaaatatgttttaggtgaatggaaggttatgggccgc

SEQ ID NO: 351863 - DNA, 299 bp, Zea mays
atccgtccaccgaacctcgcccattagcaaattccaggtcacttggcggacactctcatgtacgccaagctccatgagctgttggccctcgaatagcttgcgcacatgctgagtgcgaacccatacgtgatccaggagtatcactcacgcaacggagttcccttccagcaggtcatttggatcctcgacagggccctgataatcaacctgcgtggcatgaactacctcggaacatcatacctcatacaaggcaaactgtccgcctacaacttgccatgttaggtatcgcacatcatgcc

SEQ ID NO: 351864 - DNA, 142 bp, Zea mays
agcgaacgactaggcgcgcacatagacaagaacctcggcgctgacatgactgatgacatggtgtccaggtcccacctctcccacgacatcctgcgcaacaagcgtgcctacagcagggccgaagcagccgtgtaccgtgtca

SEQ ID NO: 351865 - DNA, 329 bp, Zea mays
cgaacggacgagccccgcagagaaagaacgcctcgcatgcaactgctcaaaccgaaggaagccgccacactcccgcgcgaggccctcgaggcccacatcgtctcgctggtccgcagatgcccgggcttcctcgcgctccgcagcgcgcacgcgcacctcacgcggctccgcttgccgcgcctcaccgccgccttcgcgctctcgaagctcctcgcctcctgcgtctcggcgcccgcaacagccgcagcccaagccgcggggtcctcctacgcccgcaacctgttcggacaaatccccgaacccgacgccttctgctacaactccctcat

SEQ ID NO: 351866 - DNA, 434 bp, Zea mays
gcgcaagaatcgcaaaccagatccctcctatccgagctggataaacgtctccaggcgatcgattccaaatgggaatcccgtgttggcttgctggaacagcgcgccgccgagtcggccagatccatgtccgatttctccaccgcgctgcgcgccgatgtggaggctcacctgacggctgccgacagcgagaccgactcgaagttgctccagatcgacgcagctgccaactctcggatggcggcgctggagtcatccatgcgctccgtcgagacttggcgcccgcgcgtggactcgacgctcgacgccttacgctcgtctctggactccgtcgctaccgaggtgtcgaaaatggagattcagtggtccccgggacggacgcgccgatggcttacacaagccggggcgtgctcggggcacctggatcggtgccggga

SEQ ID NO: 351867 - DNA, 295 bp, Zea mays
gtagcggccgaggtacaggacacaggcactcctttgtctggtagagacgaggaggggaaatggagggattcgaggatacaagggatggcactgagggatgcataagtcccctgcctcccttgtctcaacatgttctcctctgcgagcccagtcagcttggggagctaagtatcagaatcctgaaggattcaagccggctttgtcctactagtgtctagaagtctctgtcgtgagatcctggggctcctcctatttctagaagggatgacgtggcatcaacaataacttcgctggg

SEQ ID NO: 351868 - DNA, 59 bp, Zea mays
cgtaacaccctgaggtgagtcgtattaattaatacgactctctatattgtgtcgtttta

SEQ ID NO: 351869 - DNA, 53 bp, Zea mays
tcaccacaccctgacgtgagtcgtattaaatgctgccacactcgattttcagt

SEQ ID NO: 351870 - DNA, 408 bp, Zea mays
attcaagtctcgctacgtagcagtgcaataaaaaaagcagccgcaatggcgagcagcaccatggccctctcctccacggccttcgccggcaaggccgtgaacgtgccgtcgtcgtccgccttcggcgaggcccgcgtgacgatgcgcaagacggcggggaaggccaagccggcggcggcgtccgggagcccgtggtacggccccgaccgcgtgctgtacctgggcccactgtccggcgagccgccgagctacctgacgggcgagttcccgggcgactacggctgggacaccgcggggctgtcggcggacccggagacgttcgccaagaaccgggagctggaggtgatccactctcgctgggccatgctgggcgcgctcggctgcgtcgtcccggaggtggtcgcccgg

SEQ ID NO: 351871 - DNA, 472 bp, Zea mays
cgcgggtcgacccaagcctctatatcaagtctctcaatttcgttattccagcctcatgctgaatgcccgatcgcctacgcatcccttgcttctgccggaggtactgcaccacctcggttgctatcttccccgtcctacgcttctccttagtctaggagtttgccgcacatggcaccgtgccttgcagccatatctgtggtcgactctgcagctcgagaatcagccttgcaacttcacacctcgccaggcgactcccacggtgcttctcaggaataagcaccatatcaggcacctccatgagatcggctccaactctctgctaaagttcctagccttctcaaccgcaagcttgccgatgcaactgactagcatccatgtgtccatgctcagccctgaaatcctgattgtcgctcagcagagtgtggagacccttgttacgttcagctggcgcgccaaaccggcaccaaaagga

SEQ ID NO: 351872 - DNA, 477 bp, Zea mays
gtcgacccaagcctctacacaagactcgtgatagaacagcttagactcttgcaccacaccacaccaccacacacgacgctcattgctctcacacctttcccttctcccttgtccatctccaccgcttttgcacacaaacgcaaacactcacagtcagcacacacacacgcacaaagaggcaacgctgtagcggctcggtaccaatgtacgttatcgtgcgaccgtctaggtcctatgggcccattcagaacgccatcgcagtcctcaatctgctctccttgctcgtgggaatgattttgctctgcgtcggcacgtttgtctactttgcacccggcgcagtctttgtgacctcaacgcttttaccacacttggtccttgtcctcggcgccacaatctcaatggtcccctttttggggtactaagggggtgataatgaaaagcgctggatactctggctccatggattgaatccgttga

SEQ ID NO: 351873 - DNA, 349 bp, Zea mays
attcacctctctgctcaccatctcatcaactctccaagcatgacgcaactcccacgccccccttcgggcttctcatgccgatgcgttaggcgcggcattgatgaaaactacgatggtgtcatttaccagtacgcctcaagctcctatgttaaagaaggatatatcgaacccagagccgtgatctatcctaccgatgacgaggacgtcttcaaggccatcgagtacgcgagaaccaacgatgtctgaatcgcgatccgtaccggcggccacagctactgcggctcttcctcgaccaatggtgccaacatccagctggacctgtcgccgacctacacagactttcactggg

SEQ ID NO: 351874 - DNA, 448 bp, Zea mays
acacgacccacggaacacggtatcgaccacgcgggcctgagcatgtcaggggtcgtctttgcttcaagcgcttcatttagcgctttttggtgcaacaaccaccggacttgttcaaactgtgtacaaggaaagccaggcatatccagaaaggacaaactactgacagcctggtgattatcgcccccacttagtactacacgaaaaagtctcttgcaagatatacatatctcggatgacttaccctaccccagggagttcgcctcaagattcgcatgcgaaacttaagtcctcgccagcagggtcaggagtcaactctatcaagacaaactcactttctgcacatggaggacagagcgacaacatggacctgatattttccagattgcagaacgagctcctgcgctcacaggagacctatgctgatcttgggtttttaaagcagggatta

SEQ ID NO: 351875 - DNA, 460 bp, Zea mays
gtcgacccaggcctctgctctttctcagataatcttggtccacattctcgtgccctgtcctttctcacatcccgagccttctccccatccgcaaacactcgctttcactcgcactgcgtggaacactcacgcatcctcaggtaccacgagtgatcacacagttcccacgttctcgccacttggtggccccaaccatagtctaccatgaacgaagtcggagccggtgtcgcgacggtctcgtcgctcgtatcctccatcatcagcagctcgaaccgtgtgcgggtgaacaagatccagtgccaggagttggcaagagagtgcaactggctccgcgatcgcctggaatctggcaatctaagcgctgctgatggtcccactgtcgaggctatcaacgaccttctggtgcagtgcgacaaggacatgaagaagtttgcaggaatcggcttttccatgcgcacca

SEQ ID NO: 351876 - DNA, 471 bp, Zea mays
tcgacccaagcctctacagtaagtcatattatgtctctcctccgcacgcacgcctcgtcgcgacagccccattgccgcatccctcgtccctcgcacactccgtctctcgtggtctctcctttgctgactgcattctcgtttgactcccacggaaacaagagaccattcaacatcagcagagcgagaaagggtctcatcctcgttgggaaagacggcaggtacattgtctcgacagagtggagtggagtgcaggagagacatcagctaggacagcgttaaaggcatgaatcgaagagagcaagagcacccctgctcttccatccaccatccaccacagcaacaacaccaacccctcgcaaggtctattctgagcacactttcgcctccaccagcaccgtctgcaaagcaagcgttcttgcgtcaaagtcgatatgggacaagagcgccagccggtgcaactgaatcacatcg

SEQ ID NO: 351877 - DNA, 439 bp, Zea mays
cacacacgcacaccaaaacgtatacacacagcacacacacacaccctctctcttctctctgcttattctctggcaaccaaccagaccaacaatccatttctcagaaccctcctatcttcattctcattatcaaaccatgactacactcgccccactccggacgtccttcggaccccatgctcagcccacggcgaccaaggccgtccagtcgctcttcaacaccctccaccataccacctatgcctctcataagcgcttcctggcatcctcgtaccactcgacggccacgaccggctttgcgcgaccctgctcgatcctcaccccggcctcgacgatccgataccgtcaagagtccagcagcatgcagcttcatcagcaacagcaacaacaacaacaacaacaacgtcaacagagccaacgacgagccctctcgttgttt

SEQ ID NO: 351878 - DNA, 480 bp, Zea mays
tcgacccaagcctctacactaatccatcacaccttcctgcccactcactcctgcacgctcacacgcttaagaacactgttccccgtcaccttcgtttccttgaaccacagccgcctgcctgcctccctctctgtccctcaaggctcacacattaattccctctttgcgttcacttctcccacactcgcctcgatcgatcacacggctcgtgcaacagcttcttcaaaccttgtcactttaacctcggctcaccccaaattttccggctactgcacaccagcgatggcgtcctcaaccgctctctcctcatcgtcaccccccgttctggcggctctggcccgtgttctcgcccagatcttgacccgctccaatatctcaaagtcgctgggggtttacatcctctacctattgatcaaatatcgcaataccgccttttgggttcgtccccgttctgaaatcactgggccatggagcgtgccc

SEQ ID NO: 351879 - DNA, 432 bp, Zea mays
gctatccttttctttcccgttctacagccgtctggtcgcccacgtccgcccttgccaccacccgcagccttctctgtccccgcactgctgccacacgccttcgacgcaaaactcaggtcccttgtaagggctcagcgctagtggatacacagctacactcccacactctacatccaatacagcttcttcacaggcgaactggctgcaaacacttgtcttagatgtcaacctcgctggagataacaccgtttgtgaggcgccctgctcctggcaaggcgggtaagcctattgccatccgctccaactttttcgaagtcctgcaactcccggacatcacagtgcatcactacgacgtaacgattacgccagacgttccacctccagtgaaccgcaaggtgtttacgcaacttctggaaacctaccgcgactctg

SEQ ID NO: 351880 - DNA, 464 bp, Zea mays
ctctacagagagtcactactactctccactctcccatcatcatgtctgctgcctcccaagccgtcaagaaggctcccaccttcttccagacctggttccgtgtcgaggtcattcccatctacgctgtcctcggcgttgcatgcggtggtgccgcctggtacgttacccgtcttgcccgtggcccggatgtcacctgggaccgcaagaacaacccccacccttggttgaacattgaccaggagacccagctcaagctgatgaccgtcaaggagaaccagggcttcaccaagacctactcccgcgatcgtctgtaaagaaaagcctcggccgctctctctctctccttcatttcagcacactagacattcaaaacacagaatcaatccgggaatccttgggtcatcaagagtctttgttgatgccgttggacgaaactggcacgtggatgtgaggcgtttgatgag

SEQ ID NO: 351881 - DNA, 459 bp, Zea mays
aacaccctatagctaagtcgtactagtgctctgtagcctctcagcactagttcgttgcttccttggtgttcccactgttcacgagtttctttcgctgctgctgaaggaactttgttgcgtctgttctcgctccccagccctccctgcttcctggtcaatgtcctcgtactttttccagaacggaaagcacattggtcgcgacgttgacatatcgttctctgcccagtaccagtaccagtagcccactgccacccgctgcagtctagccataccatcccgtcccatcctcttgtccgtatctcgctgtatcattatcaccctccttccttttctttctgctgcgtgtattatccgatcaaaccaaaaacctaatcttttgtgactgtctgcactatggatgtcgttagaatcacccaagccttgagacagcagcagcatgcccccgcccgattgaactcg

SEQ ID NO: 351882 - DNA, 488 bp, Zea mays
  unsure (1)..(488): unsure at all n locations
tcgcggttcgacccaagactctacagtgagtcactattaaacatgaaagactttccccacaacgaagaattcttcatcgctcttcgcgacactgaccttgtcctcgatgtgcaaggcggcagcgctgatgcaggcgcccccatcattctgtacacccagaagcatgaggacaatgacaaccagaagtggatctacgagaacaagcagcttaaaaacaagcagactggtctcgtcctgaccttccctaatctcgatgctaacgttactgccactcagaaccacgctggatgctctgacgagcagacattcgagtactacgactacaccatctcggcccaagctcaggaggacctcgtccttggaatcaatggagaaaagaaggagctcgctcccatcaccttgattagacgcgacaacgattccgacaagcagcagtgggagatcacgcgttgatgggtgctgcatancgcaggctcacaaatcatgtc

SEQ ID NO: 351883 - DNA, 453 bp, Zea mays
caaccctcgtccactctactcctattgacaacaaacaacatgcgtttccagaccgtcgtcgcagcgctgctcgtagccacactcgcccatgctcagacaccgccaactccaccaacgatgcccgagcctccatcgatgccggcaccgccatcgattcccgcaccaccctccatgccggagccgccaaagatcccatcacctcccgtggttgaagtgcccagtggcgagtgcttgacgtgcttgaatggagccatgaagtccgtcccggcctgcagcaaagtcgattacatctggggtagtcttggcaacttgcccaaagatcaaaaggactgcatttgtgcccttgccgcgtcctctacctgggtggatacttgcaaagctacttgccccgccaagatgattgagccgagcaatctctacaacaacgactggaccaagagtcagtgcggagct

SEQ ID NO: 351884 - DNA, 346 bp, Zea mays
ttcgtcccaggcctctattctaagtcatattaaactcgccttgatctcagtcaacacaatcccattgcctcaagcacgttgactcttctcccccatccctaatgacactcaccaaccctgccaatctcgtggtcgttattaccggttgcgataccggtttcggctcagagatcacggaggacctctatcagcgtggacgctttaccatctatgcgacctgcttgaccgatcaagccgtcgagaactacaacgccagacagtcatcccgcatccgcgctctccaagtggatgtcacaagacagaacgacgtccaccgtcttccggctcaagttgcggcggagtgccc

SEQ ID NO: 351885 - DNA, 385 bp, Zea mays
atgctaacgcgcatgcctggcatctcgtcgcggcaacaatcactcttctcctgtcccagctagccgggcgtttgttcgcattcactcttccactaccgcttaccgccaatctgctccacagtagccatccgcctctctccattcatcgacccacacttccaacccgccatggaggaccacgaattcgtcaattatctactggaggtggaacaccctatcagcggtcggaaaggtgtcccccacgttcttatttcaggggcgggcttgggaggcctcttcctggccatcctcctagaggaggccgggatctcctacactatcttcgagcggtccagggacatcaggcccataggggctataatggcgttgtcggccaacatcttac

SEQ ID NO: 351886 - DNA, 465 bp, Zea mays
gacgacccaaccctctacatagagtcgtatcatcatcatgaccgagcagaccagcaacaccggcaccgccccagtccacaagcccaactttgtggaaaagatcgtggacaagatcaagcatcacgggcacggacacggccaggaccagaaccagcactagcaacctgctaccgctaatgattcccaaaagatgtgccacacctatggtggtcccgacaacgaacacgacaatgcctatgttgctgaggcctcgattgtgggagcccatgcaattccccctatgacgtttcacacagaagcacaccgctctgaccatgtatcctctggagcaccccgctctcagactcagcctcaggcagcacaagcgcaacagacctcgacatcgacgggtgcgcacgggcactcgccaaatgagccattccatgagtttggtgatcgagtggccggacatgatctccattccgc

SEQ ID NO: 351887 - DNA, 375 bp, Zea mays
tcgtcccaggcctctactctacagcaaacttaatacgctcccagcccatcccatcatccactcctccgctcccctcacgggccctccatctggtcattcctgactccaacgctcctcactctctgccgcctctcgccctccgccatcatgacacgcatcgctctcttcaccctcttgctcgtcgtgatcctcgccctgttctcgcaagccgacgctcagtccaggtcaaccgtcaagccccactgtgctcctctgcacaccctcttcaatgacgctgttgctgtctttaaccataacgggtataacattcccaactcagattccgaactacgatgcaatgcatgcatctgcacagacggtgtcatcactctcgct

SEQ ID NO: 351888 - DNA, 462 bp, Zea mays
ctccatttcctcaacaacaaaccaacaccaacactccccaatcatcaacatgactcactccctcaagattaccgtccacaattgcgagcacttggaagacgtcgagaccgggggaaagaacgatccctatgtccggatctccctcgcttgcacggatgacaagcagtacggcgcgcacaagactagcactaaaaagaacgctggcaagaaccccgagtggaacgagaccatcacctttgagaactacgagaagagcacgagccctgagtgtttcatcgaggtcatggagcaagatatgaccgccgacgccccaattggttactgtatgatccccttgacgcaggttctcaatgctgagaatcacgtcctcaagggtcgcttcaatctgtttaacactaaaggaaaggagcacggaagtatttctcctgaccttgccattgtcgctcccggccaggctgcgcc

SEQ ID NO: 351889 - DNA, 474 bp, Zea mays
ggtcgacccaagcctctacacagagttctctatacatctgtactctctcttcactctctcactttatatccgagaatggtgcgttctaatctcaaaatcgtcatcgcggccatgcttgtggccttgatcgctaccgccgccatggctgcccctcaagctaaaaagaagcccgccgcacccaagcctatcaagggcaaggcaggccaaacaggagtgatcctcaaccaatccgacttttgcatcttcttgcctcccatgtacggaggagacatcgctgcgaacgaggaccgcgctgttgccttctgcaccaagcctggccttcccggtgccaacgctcagaacctgcccgccggctttattaagtcggctcactttttgtccgacccggccaatggttacgttcaggtcaccggtcgcatggatggcagcaagtacggcttgagcaagaatgatggcggtggacagtatgatatc

SEQ ID NO: 351890 - DNA, 466 bp, Zea mays
caaacccatatcctcgacatcctgacccagcaccctccactcccacaacccactcttataaaacacctttacaacatggactcttcaatcgagaacaagatcaaccgcgcccctgccgccaaagtcggaggcatgagagtcgccgcaccagaccaccccgtccccgttgtccgcaaggagcacgaacgcaagaaggccgactccgaggaggaaagcaacgaggatgagcgtgagctcgagaagacggatcggttcgagcacgagcaacagacccgcatggccgccgctgaacgccaggcaaagatgcagcagaaccagcccaagcacgagcccatcaacaacttccgtcaaaaccagaacatccaggtcaaccagcccatcctgcatacccacagcaagtccggtgccgctgcccagaactaagcaagtataatcactggaacgacgagcgcatgaacctgtattc

SEQ ID NO: 351891 - DNA, 437 bp, Zea mays
aattgcccctactttcactctccctccactaacatctcagaagacaatgtcctcagtaacagcatcgcccagggcgcgttctctcggatgcccgcctgtctacctgctggtcgtcctctccgcactcttcaacttcattgtccaagcggcccctatctccaccagtgccaagaagcccaatgatgataacgacaacattctacgcaccgctcgcgatggtccatacaatctcactgtccaagccggcatcgcaggagccatcctgatcgtctttggcctcatcctctgcttccttggtgtccgcttcttccgcgtgtgcatgttcttgattgggttctacttctttgccaatgtctcgtacatcggcatgtccaatggcggggtcaccaacttctacctcctgctcgtcatctcgatcgttgtccgtatcctcggtg

SEQ ID NO: 351892 - DNA, 397 bp, Zea mays
ctatttgtcactgaagtgttttcattcttcttcagtgcccgttctgtatcttttgttctgctgtcccttttcgttgttgttttttactctcactctcactctcactctctcacgcaatcgctctctcacacttgactacgtctgtgctctttcctttttgcccacttgtctgttttgagttgaacatttctgttctttttgtgaagttgcacctttttcttaattttccttatttctgagcaatgtctgcatctaaccattcgcgcaagaccggagtcgtcaagttcttcaacagccagaagggttttggttttatcagtccccacgacaaggcaccggataacccccagggaaactccgactagatctttgtccaccataccgccattcagaatga

SEQ ID NO: 351893 - DNA, 447 bp, Zea mays
  unsure (1)..(447): unsure at all n locations
gtctacagctcgctgctcgccccatcgtctgcacactctctccaccatgtctttcgtggactgacagtcgttcgaccttcaagcgcacctctgccacaccacaactcgcctcgccatgaaacccacgcggcaccatctgcttctggcgcttggcttctcgctcctggccatcaccctttccatcctctactcgctccggcagagtgcgctcgataacctcctctccaaccatgtctcggcgtcaccaaagccctcgcgtcctgttgcgctggctcgtccacccgcgccaaagagccggtgggaccctgctcaaaagtaccttgtctatctgccctttgagggcatatccaaccagttctactccttccagaacgccgccaccatggccaaacgcctcaaccgcaccctcgtcgtgnccccatcacctcanaccgccatgaccgtctc

SEQ ID NO: 351894 - DNA, 463 bp, Zea mays
gttcacctcacacgttcgcacacctcctctcttcctctcttcctctcattccttcttctcatcccttcttcactgcacaccatgctggcttcaattcacgagaaggtctcgtccttggtcaaccgtcatagagacaccatcggcaaggtggtcgaccctgcgcttgtacagggggccgtcgacaaagccaacccaagcaagaactgggactataccatcactttcaagggcgcaaaggacgtcccccgcggcgatatcctctcctccgatccgtttcttgaggcctatgtgggtgccccagaggacccccagaccttggctttcgtcactggcattcactggaatacactgaatcctgtttgggatgctgtgtgggaactgctcaacgttgccgatgatactgtgttggacctgcacatcaaggacaaggacaagatgaaggaggacacccctcttggcaagg

SEQ ID NO: 351895 - DNA, 371 bp, Zea mays
gtcgaccaagcctctacagaaactcgtgttaaggtcgacgacaccaagatcaccgaggagacgaccaccactgtcaccaaggaagaggtcactctcgagcacgtcaccaaggagactgttgtcgtggaagagaccgaggagcacgatgaagccgtcaaggaggtcattgtcacggagaagaaggagaccggagtggttgctaagcccgccgtttccgagaagtcatcgtggttccgccgtgctctctctaccggtgctgcagccgtcgctggcgcaggtgccattgcagccggtgcagcctctggagctggccaggccgcctctggagctctcacccaggttgacggtgtctggaaacgcactgtccaggt

SEQ ID NO: 351896 - DNA, 464 bp, Zea mays
  unsure (1)..(464): unsure at all n locations
ctctactttccaccgccatcacgcgattgcttctgtcccttcgcccaaacctttgctcctagcatcacaaccccgactcttcaactctctcaccatggctaagaaagctgccgccgccgacgtttccaagaagagctgcgcttgcggcagacactccatgggcgacaaggagccctgccgcttttgccctcgcgtcgtctgtgacagctgcagagaagagtactgctgtggcccgatctgtgaaccttgcaacgcggaccgcgagcatctgatgcagtgtgacaagtgcgaggcccccgtctgtgaaaagtgcattgtcatcaccaagggcgctcgcgagggaaactcgtgcaagagctgcaagaagaacgcccatgctgccgcggccgatgcccagcctgctgccatcagcgtctannatagaggacacganaggaatgttcatcatgtcaggcaacccgacg

SEQ ID NO: 351897 - DNA, 454 bp, Zea mays
cttactgcttcgatctaccattcacatctctcaacagcacccttcgcccccactgcgcatcgccatctgtttcgggaattctctctgcctgcaaacatgggatgcttcactcgcaagacgcacgcagccgcacagccaggagttaacaccaccactgggaatgccccccacgacatatattccatgcagacccggccaacgtttggccagtggatcaaacacacatggcttgaccttttgaccatggcaatcctgggcgctattggcctcggagtctacatggctcgtccagttccttctcgatcctttgccgtcaccttctcagatggcgagatcgtctaccccgattttggctaccctttgcgcaaagagctcgtccccatttggctcgccgccttcctggccgtccttgtacccgttctgggtttcctgatcatgcagattcgcgtccggt

SEQ ID NO: 351898 - DNA, 449 bp, Zea mays
  unsure (1)..(449): unsure at all n locations
cacaaccacaaccacggccacggccacaatcacgcccttgttcacggacacgctcatgcgcacacgcatggccatggacatggacatggcccagggcacgctcatttgcatcaccacggccgtacgccgtcaacaggccatactagccatgtctcctcctcgcggactcattcacaccgccattcaaaatcaccgtcctatcaaaagagccccagcctcgagcgtgctcaacagcaaaagcgtgagcaacaaacctcagatcaggcacggcgccggtctcagattttggcgctcccagcaccgcagccgcagctatccacgtttacgagtggttcgtcctgtcgggaaggcttcgcagtanggtcagataccaacggctttcatcgtccttcaagtccgtcaatacagaggcaggataagcgctcgccatcgccagcgcatgaggatgt

SEQ ID NO: 351899 - DNA, 463 bp, Zea mays
ctccacgtcaccaccgtcgcctgtctccgtccactcgacactgagctaagcacgtcttgagcagcagtgcagcccagcccagcacacccgcacggtcaacagataactccgcgaacgcagctcccatgacaacgcacgacagcgacccgcagagtaacagctccatcgcgcaggtcgtgtcgtccctcagcagtctcgacatgaaccacacacacgacagtaccgagtccagcaagcgcgtaatgccagccatggccgcaactcacaaccacgtcggaatgaatgtcaacaggatacggcctacggaggacatcttcaacccgcacgacccacatattcgcgaggatatcatccggatgattatgcagtacctcagcgacgaaggctacaatgcttcccagatgacgattcaggacgaatccaacgtcaaatggcatgaccgggaggaaaacacgcatgagac

SEQ ID NO: 351900 - DNA, 465 bp, Zea mays
  unsure (1)..(465): unsure at all n locations
cgccatcaacgccaaggacgcctttgctcgacacaccgacgagatctggggtacgcagctcagcaagaagtctgttcaggacaagtctggacgcgccgcgcgccgcgcagctgaaaaggcccagaaggctaaagagcaagcgcaggctaatgctaagcacgccaaggccgaagccgacgcccaggcagagagcctcaaggacacgctgttgaagaaggcggccagtgcccaaaagctggcggaggagtatgcagagggcatcaaggcagctgtgcgcggtcaagccgacgaggtcaagaaggcagccgatcatcacgccaaggacgtacccaagcctgaggagatcaaggctgctgccgccgagaagggacagggcgctcagcgaaaggccggggagtttatcgagcatctgagcgaaaccatgatcaggaaggcacacgacgcgcaaaanaattgtcggtgatg

SEQ ID NO: 351901 - DNA, 413 bp, Zea mays
  unsure (1)..(413): unsure at all n locations
cgttccatcaccttctattcaccatgagcaacccgcgttaccccgccggcaactaccacaacaccaagcctgacggcacgtactactacacaaactcgtcaaaccccaactcgtactactacaacaacagcaacggctcctactactaccagaacgccgacggctccaagtactacaacaaccccaacaccggcacctcccgctacaccaccccgagtggctatgaaatcaacaccaaaggtggcagaaagtattaacgggctttcttttcgtggccaatggctctattaacctatgccataatctctgaggccacccaagcatgacaaaggctaaccctgcccgctatttacctgtatatcgaatanaacgacanacgaaaagaaaaaataaagccttcttgtcctacttca

SEQ ID NO: 351902 - DNA, 428 bp, Zea mays
ctcactctttcttcattcctcgcgctttcacattcagattcttgcattcacctgttcattcgcttgacttgcttgttacccactccacctcaagaaggtttattgacaagcgcgcgacttctgtacccctgtgccgcgtgtgcccagctcttgtatcctttgtgtcatttttccatcctatcaagctctccaacaaccctcgcacagtcctccatactttggcaaacagtggacttagttctgacgagagcatatatataagcgccacagacaacatcaagccctcgtcctcaaaacccgccctcctcgagtccacaatgccgcccccacctgacattcctctgacagagacagaagcactactgatcgaagcctacaacaggattctaaacgaaccctttgaggacaagtacgaagatctttgggag

SEQ ID NO: 351903 - DNA, 459 bp, Zea mays
  unsure (1)..(459): unsure at all n locations
ctcacacctgctcctgcatcctcacctcactctgctcggcaggtagcattcctcttgatcatccgctctgtccagggaagccgatccatccgggtgccgatctgatcccaccaccgcaaccagccatgcagttcctgaaagtcgtctcgcccctgcgcaggacccagtctctacgcatcctggccatcctcgtcatcttcttcgtcctggcatccgtctcccgctaccaggggtcatacgaatactccatcgacgaggacggccaggtccagtccgtgccctcagacgtcacagagcacgatatctactttacgcaccacatcgccacctttgaccccaacgaccttcggccctggaccaaaagcgacacagaggcgctcaagacgccagnaggacaggaagtggtcgactacctgacagactccagtttccaaaagcacgtcgccgagaatgacacag

SEQ ID NO: 351904 - DNA, 429 bp, Zea mays
tgccgtagtgctctataaaagcccagcacatacccgccctctctcattccgttttcacacctcacccgcgttccattctcttttttagcattcgcttcctggcgcacggctcattcacgtcctacgcctactcgacctaagccccgcccttgttgatagagcagcaattccactctccactctacactctacactctccactctccactctctcatctcccccttcgccgccctgttcccctgtttagtccttccttacaatgccgctctttgcgcctctaaggatgcccatcaagcgtcgtatgcagacaggagctgtcctgctctggatctcggggatcatatacatgctcggtatctttgtctttctctgcacgttcaaggtcctccggaccctgatcatcatgtacctgctctgggccttcatac

SEQ ID NO: 351905 - DNA, 458 bp, Zea mays
  unsure (1)..(458): unsure at all n locations
ccaccactcactaccccctggctataacttccagagttacctctgtcaaggaaagctatcctcggtattcgaaccaaccgatgcaaagccaaggactggcatcagagtcctggccgtaccaggcccctgggcatcgccttggaagcaacgtacccaggacaagtgacctttgcaaacacgccgaaggctggggtccgctgagtccaagtcggtacgatctgaccccatgtttcgagtacagtgtcctctttggcgccgtgtccctgatcgccattctcgggttcaccatacggatatactacctgactcaccatgcaaaggcacataatttcggaagaactgcttggatctattggccgacgcaactctgcatgggactcggagcgcttatggcctgcacgttatcgancgcgcatttttcgtctgagaactcatcgccaatcttttcctgnagctgc

SEQ ID NO: 351906 - DNA, 448 bp, Zea mays
tctgctacgagtcacttcacatccacagctacaatcaggacaacgccaagggcgcgctaggacacaccaggagacatgcttcacgagcttctcgtcaccctctcgggatacccgggcgacatctttcgcccattcccacaggagccagaggttgcaaccacatttgctgtgacagactttcccatgctgcatcctgccgagaaggagggtctcgatcgactggcacagctcggcttctacttcaaagagttcaacgccttcatagcctcttgcaggtcttgctcctaccgctcttcgccgacacacggcactccggctcactcaccacctggactttacctgacggccctcgcacactcgttggaaaagaaacttcagacctatcggcgagttattgtcgacaccgagtctgccattctctctggagaggataacttaggacgcatag

SEQ ID NO: 351907 - DNA, 361 bp, Zea mays
actctaactagttcgcctcctgtctgctgtgcagaacattaccgtgcactcgcctccctcgtcaccattcattcgctcaccccaccaaccaccgaggcagtacaagcactactcactattgctaatgctaacaagcacatgctggtcattggcctcagagattaaatccatcctcagaaacttgacggcatctacatgatggatgtcgtacaactcacggtacactttcaagtgccttgggtcaaaacagcgatccttacaagccgacgtctctatcagcatcaacagtatcactttcacaaatggctgcaatcctgcccaacgcaaagtacactttcttaacgactcagcagctgtcttg

SEQ ID NO: 351908 - DNA, 455 bp, Zea mays
cggacgcgtgggtttatacgcaccattcgcatgcccttactcttcagcgaagaaaccagcacagcagcagatatgactggcatactcgacgtcaacttcgatgaggctctcgccgccgccatgacaagccactacactgaggacctggagccccacctcgctcagaggtcgtttttaccgcactcgcccaacattccacgtaacagccgcagcagcattagctcgccctcctccagtaacagctcattctctgcccggaatgactcacccgcttatagcaatgggtctccttcgagcactggctcctccctcagcaatggcttttctcggtatgccaatccagtggacaggagaaccatcttgaacacccgccagcagtttgaagaccaaagacgggcaaagctggacagcctcgaggaagccctttcgcgattggaccttagtaacgcccgcat

SEQ ID NO: 351909 - DNA, 383 bp, Zea mays
tgacacactctccagcggcccacccttacccctgctcaagacgtctttctctcttttgctcactcacgcacgcatacacacacacgctctctctctctatctcttcttcagtcacgtatataactcccagtgcgatggtcgcaacagccctcctccgtagaactccagggacgttgtccgcggctatccgcctgcatcgagccaccacagcttttgccacacctgcagctcgcgcgttgagtacgcatgtcacaaacgccgcctgtgaggaccacgaaccaagcttcctaggttctgtcgaaacgttttacgatcgcgcggccaagattagcgggatctccgaaaagtctctaatgggcatcaaggccgttgactctgtgctc

SEQ ID NO: 351910 - DNA, 421 bp, Zea mays
  unsure (1)..(421): unsure at all n locations
agcaaccggtccagcactttcacgctcagctccagcaatggctgcctccaccatggcgatctcctccacggcgatggccggcacccccatcaaggtgggctccttcggcgagggccgcatcaccatgcgcaagaccgtgggcaagcccaaggtggcggcgtccggcagcccctggtacggccccgaccgcgtcaagtacctcggccccttctccggcgagcccccgagctacctcaccggcgagttccccggcgactacggctgggacaccgccgggctgtccgccgaccccgagaccttcgccaagaaccgcgagctggaggtgatccactcccgctgggccatgctcggcgcgctcggctgcgtcttccccgagctgctctcncgcaacggcgtcaagttcggcgaggccgtctggttc

SEQ ID NO: 351911 - DNA, 216 bp, Zea mays
atggccccttggggtggtgttgcagcaggaaatgcaaattcatatcctgcctgcggaaaccaacaggttggcaacatgacccaggacgttctcgggagtgctccggtgcatggaaactcgattcacgacaacatcaccatggactggtatgcaacagatggtagtcccaataattgggataatcagcacagagacaatgacggcatggactctgga

SEQ ID NO: 351912 - DNA, 433 bp, Zea mays
cacacgcgtccgagcaaccggtccagcactttcacgctcagctccagcaatggctgcctccaccatggcgatctcctccacggcgatggccggcacccccatcaaggtgggctccttcggcgagggccgcatcaccatgcgcaagaccgtgggcaagcccaaggtggcggcgtccggcagcccctggtacggccccgaccgcgtcaagtacctcggccccttctccggcgagcccccgagctacctcaccggcgagttccccggcgactacggctgggacaccgccgggctgtccgccgaccccgagaccttcgccaagaaccgcgagctggaggtgatccactcccgctgggccatgctcggcgcgctcggctgcgtcttccccgagctgctctctcgcaacggcgtcaagttcggcgaggccgtctggttc

SEQ ID NO: 351913 - DNA, 434 bp, Zea mays
ctcgcgcctcccactcctccccgccactcgccgccagcgaccaaccatcgcccgcccagcagcagcacggccccacgccaggactcgacccacgcgcggctagctaagctcccgccgccatgatcacggccctgcaggtctccggcggcggcctgccgctcctgttcgcccggcgccggcgccgggcgttccggccgccccaagcggtggcgtccgacgccgccgccgccgccgagggcacggcgagggaggatggcgggaaggtggccctgggcgggtccggcgtctccgtcaccaagctcggcgtcggggcgtggtcctggggcgacaccacctactggaacgagttccggtgggacgatacgaagctgaaggcagccaaaggagcgtttgacgcgagcatcgactgcggaataactttcttcgacaccgcc

SEQ ID NO: 351914 - DNA, 423 bp, Zea mays
atcgaccttcaagtctcgctacgtagcagtgcaataaaaaaagcagccgcaatggcgagcagcaccatggccctctcctccacggccttcgccggcaaggccgtgaacgtgccgtcgtcgtccgccttcggcgaggcccgcgtgacgatgcgcaagacggcggggaaggccaagccggcggcggcgtccgggagcccgtggtacggccccgaccgcgtgctgtacctgggcccactgtccggcgagccgccgagctacctgacgggcgagttcccgggcgactacggctgggacaccgcggggctgtcggcggacccggagacgttcgccaagaaccgggagctggaggtgatccactcacgctgggccatgctgggcgcgctcggctgcgtcttcccggagctgctcgcccgcaacggcgtc

SEQ ID NO: 351915 - DNA, 75 bp, Zea mays
atgcgagacactacactagatcgaggcgcacgaaggcattaaccatggtcggcgtgaactccagcgtcgtcgggc

SEQ ID NO: 351916 - DNA, 356 bp, Zea mays
ctcgcgggtcgacgcaagcctctagactgagtcggattacgctaggccactgattgggttggcagcgcgccgcggcagcacacggggagagagagaggcagagcgagcgagcgagacagcgctggtcatggcgtcactgtctgtcgccgccgtggcggccaccatatcgatgccagtcagcagcggtgtgagagggcgccgtctcatggtcgcgtccatggccacccagaacggccacaagccgacgcccaagatcgtctccggcacgacaagatccggcacgatgacggtgttcccggtgggcgagccgggcccgcggccggccacgacgagcggcagagcgccggttaagctgc

SEQ ID NO: 351917 - DNA, 427 bp, Zea mays
tgcacacacgttcctgctgtccctcacgcacgccatggtgttgaattcatcccttccctcacgcgcgtctggttcccttgcccatggtcgcgcccctgctatgctcgtgcctacgccagggatgctagcaagtttgccttctcttccattccacgcgacgccctgtgctcacccatctcatgtctaactcccctgttgctgacgaacgcgtgctctgctagcaggatccaaggtcgtcctcgtctccttgctcgccggcgaccttccctctgtcctccagtgccgcgccggcttggagctttcatggccgccgtcctgccctgtcttccatggcgcgcggtggtggtgggttggtgttggtggcagtgactcactgatgggcacgcgtcctgctcgtggaatccacgacttgtgcgccctgctcagt

SEQ ID NO: 351918 - DNA, 356 bp, Zea mays
caaatcctccacgacacgacacctcgtcgaggacctcgagggcatcagttatcgacggcgtgaactccagcgtcttccggctcaagctcgccgcagtattgcggcacggctcggccggcgcatcgcccgttaaccgggtgcagctggacgcgcccgaggggtgccgcaccgcacttcacgacctggccgccgtcttctccgtcatcagacacgacggcggtcggccaaggccgaaactcttcaagtggtacgatctgagagatcacctgcaacatggactccttcctcaacgtcatgatggtcagcattggcgtcaactttgcgcgcgcccataccgtcgagttctggacctgcca

SEQ ID NO: 351919 - DNA, 298 bp, Zea mays
aaacgaaccttcctttgttatgtacgtagtagcattgtactttaaagagatctattcgatcggagaaccaatgcaactacttgagtactattattgcccatgtattgtgtgctgtatatcttctgtatacaaaggaaggttcgtttgttatgtacgtagtagcattgtagtttaaatgtatcgtattatctatctgctaaattcttctttttgatttagcaaatttattgtacgtaaacaaaaataagggtaaaacaaatagagtgtgtaatctaaaaggtcagcaaccaccgaacaa

SEQ ID NO: 351920 - DNA, 431 bp, Zea mays
aagacgacttgtttcattgattcttgaagagatcgagcttcttttgcaccacaaggtcgaggatgtcttgcaactgcggatcaagctgcggctgcggctcaagctgcaagtgcggcaagaagtaccctgacctggaggagacgagcaccgccgcgcaggccaccgtcgtcctcggcgtggccccggagaagaaggccgcgcccgagttcgtcgaggccgcggcggagtccggcgaggccgcccacggctgcagctgcggtggcaactgcaagtgcgacccctgcaactgctgatcacatcgatcgacgaccatggatatgattattatctatctagcttgtggtggtggttgaacaataataagcgacgccgagctggctgccatacataggtattgtgtggtgtgtgtgagagagagagaaacacagttc

SEQ ID NO: 351921 - DNA, 239 bp, Zea mays
  unsure (1)..(239): unsure at all n locations
atcaccaccggtgtctctgctcaacctccttgtcggtcgtctctctcgctcaacgtgatcgaggcaccagaaggtcattttttgtgattgccatggagccgacgaggtttctgcgcgaccggcgggaccaacgcggangaagagcagagcgacagccagctcgagcatgagcaggaggtcccctgcgtgcccgacatcttcgtgcaaaatgtgcccgtgtcccgccgctcttctcccgc

SEQ ID NO: 351922 - DNA, 448 bp, Zea mays
cacacaccaggccaccaccaccaccaaccagggtccagactccagagacaatccagccatgccgcctccgtccaccgccgcggcagtctcctccattatccgcccgacgccgcctccggccgtatccttccaccccgtacccctcccgcagatcaggcggcgctcatcagctggcgccgcagccgcttcccggctcgccgtggcgcgcgccgccgcctcgggggccccccggcggcggcgacgccgagacggtgttcttcgacggcggcgcgcactacgggcacctggcggggaaactgctcctggggccgaccctgctgtggctgccgctgacgctggcggccgtgtcgcgcgcgttcatcctgcggtaccgcttcacctcgcggcgcgtgacggtggtctcggggctctccggcgccgaccgcaccgaacttccctactcgtccgt

SEQ ID NO: 351923 - DNA, 400 bp, Zea mays
  unsure (1)..(400): unsure at all n locations
cccacgcgtccgatccaattccggcgccggagaagacgcgcgcaggccccacccagccgcctacaggcgctccgcttccacagacggacagcttgggctcgacggatgagcatgtgtgagaaagatcagaatttgccatggggatacgacctgttccgcgacccttttgctcctcccaacgggtttttcattttccatgtgacaagtcatggggcaggaagcacccatgagcacgagcacgagacagtatatgtagaaccgtctagttcctctccagacacaggtggtgacggttgttttgagatggaggaggaagtanggaagaggttttaccccatggtcccagttccccatgtccccaaaattaatggagaaatcccatcaattgatgaagccacta

SEQ ID NO: 351924 - DNA, 434 bp, Zea mays
  unsure (1)..(434): unsure at all n locations
ggcaaagtctacactaatggtgattccacctccgtcaaggaatcaggaatacccatgcaattatttagaattagagttagatttcttgaaagatcaacatgcttatgatgaagacatcccatctgtagtaaatgtgtccatacaggaaccagaaccatccaaacagacgccagagccagtggaacaatcgttgttgtctgcactttcttgtagacaggctgagaaccggctcaggatagcatcagaagcttgttatgatggtgaaagttctcattgggcatcatcagcttttcacataaatgatgctgcccgccacaaatctggttcaaagtctataggaaagcacanagccgcattggaatctggtagacttctcanatccaaagttcagaagataactgaatcgcatcaggaaagggcaattgctatgagta

SEQ ID NO: 351925 - DNA, 374 bp, Zea mays
ctctgatagcttgcaccaggtcgtacgtacgtacgtagatcgatcgatcgatcgctagctagctgacgaccattgcgtccctctcctcagcggccatcaacggccattccttcacgggcgcacccgctcgcgcagtggtcagcaggaggtccttcaccgtgcgtgcctctctccgcaaggcgattgccaacgccgccgtggtcgttgccgccagcgtcctgcatgccggcggctgagccatggctcacgatgtgctgctgggcgcaggcgacggcgggctcgtcttcgatctcagacagttcaccgtgaacgtcggcgacaccatcacctttaagaacaacgccggcttcccgcataaagtcgtgttcgacgaa

SEQ ID NO: 351926 - DNA, 406 bp, Zea mays
gtactctcataacgatcttgaagagaagtccacatctgatgagactgatcaaatggaacaatctctacaacaaattgatcctccacactagcaacaagaacagaactgacacgagcatcctgatgcaaccacaacttgtaagcattgaactaagactcatatgatgccatgagatcatcaaaatcagcgagaaactttgccttgtcttcatcaattgcctttggtatctaagaaggcgagcatggaagcttgctcgtgagaaactcctagaggtgcatgccacacgtggtagcatatgcgaggaacccagacatgatagatggtcccatgaaatagcagtggacaacgaaggacgagagcatcaccgttggaggaaaatggtgacatcttagacaagcagatgatg

SEQ ID NO: 351927 - DNA, 191 bp, Zea mays
cagaagcttgggattccagccggctgctgagcaggatcgacgtggacgtgcacatccagatgacgtcatagacccggtatagtgtcatggcgctgtacttcactaaccgtagtatttctgggcgctgcatgatgatagcggggtggataccatgttaaccacgctggagcacatcgtacgttcgtcacctg

SEQ ID NO: 351928 - DNA, 400 bp, Zea mays
cccacgcgtccgaaaagcagccgcaatggcgagcagcaccatggccctctcctccacggccttcgccggcaaggccgtgaacgtgccgtcgtcgtccgccttcggcgaggcccgcgtgacgatgcgcaagacggcggggaaggccaagccggcggcggcgtccgggagcccgtggtacggccccgaccgcgtgctgtacctgggcccactgtccggcgagccgccgagctacctgacgggcgagttcccgggcgactacggctgggacaccgcggggctgtcggcggacccggagacgttcgccaagaaccgggagctggaggtgatccactcccgctgggccatgctgggcgcgctcggctgcgtcttcccggagctgctcgcccgcaacggcgtcaag

SEQ ID NO: 351929 - DNA, 203 bp, Zea mays
cccacgcgtccgtgcttccaagacgaagcgcgtctgcaccgaaggtcgagcagacggagccatgatgccaccccgacgaacgacgtccctgaaccacccaccaagcacagaaagatgcctcccaggacaatgaatctggtaccagttgtaatgcccctggccgccgaggagagttcctcgcagacgtgagccgcatacatgag

SEQ ID NO: 351930 - DNA, 389 bp, Zea mays
gacagcatggccgcctccgcctctagcgtctccggcctcgacggtgcctcgctgcccaggcgcccggcgttctagacgagcttcatgcggggcaaccgggtgtcggcgaagacacctctgatgaacaagaacctggataagaatggcacgatcaactgcatgacgtttcacctggactggctgtcgacggaactgagcgtcatcggattcgggctcatccgctggatggggccgtcgatcgtctcggccatcaacggtaacagcctcacggggctcttcttctacagcatccgtcatcagctggatcagttacccactcgcccgcttgtcaactcccagttctggctgtggctagtgacgtgtgacctgagcctgttcatcgtgctcac

SEQ ID NO: 351931 - DNA, 106 bp, Zea mays
cccacgcatccgcggacgcgtggggttgtgtgatgcatacccttaccttctgtatacataacgaaattaaagagaggacagcattttgccttgccagccatttctc

SEQ ID NO: 351932 - DNA, 162 bp, Zea mays
caacatagccgcctccgcctccaccgtctccggcctcgccggcgcctccctggccagccgcccggcgttctccaccagcttcacgcggggcagccgggtgtcggcgaggaaccccctgatgagcaggaacctgaagaggaatggcaggatcacctgcatgac

SEQ ID NO: 351933 - DNA, 87 bp, Zea mays
cggacgcgtgggcggacgcgtgggtgaggatgatgctgtaaaatactgcaaccctccgcaaggccgccggcaaaggttccaaggaaa

SEQ ID NO: 351934 - DNA, 68 bp, Zea mays
acgtcatgttcctcaagctggactgcaaccaggacaacaagcctctcgcgaaggagctgggcataaag

SEQ ID NO: 351935 - DNA, 404 bp, Zea mays
ctcctcgccatcacataaaaccagtgcaagcagaagcagcgcaatggcgagcagcaccatggccctctcctccacagccttcgccggcaaggcagtgaacgtgccgtcgtctctcttcggcgaggcccgcgtgacgatgcgcaagacggcggcgaaggcaaagccggcggcgagctccggcagcccgtggtacggccccgaccgcgtgctctacctgggcccgctgtccggcgcgcccccgagctacctgacgggcgagttcccgggcgactacggctgggataccgcggggctgtcggcggacccggagacgttcgccaagaaccgggagctggaggtcatccactcccgctgggccatgctgggcgcgttgggctgcctgttcccgggagctgctcgcccgc

SEQ ID NO: 351936 - DNA, 244 bp, Zea mays
gtcgagcacgcgtccgcccacgcatccggcaagctcgatctactactactactagctggtacacatactagccagcctgccagccagcttgccatggcgcccaccgtgatgatggcctcgtcggcaaccgccgtcgccccgttccagggtctcaagtccgccgccagcctccccgtcgcccgccgcagcaccaggagcctcggcaacgtcagcaacggcggaaggatccggtgcatgcaagtgt

SEQ ID NO: 351937 - DNA, 89 bp, Zea mays
acggacgcgtgggctgccttttggtataatctgtacgccattagggtatccattaatcggctctgtaccgagattgagttttgtatagc

SEQ ID NO: 351938 - DNA, 436 bp, Zea mays
ccgacgcgtgggtcagtatcaccgtcagggatggagagacgtattggcgaccgcatatcgaaggcacagaagcacagcacgattgactaagcggcagtaaaatctcatatcacaacttgctcgcttcgagtgcacgctatttcaatcgcttaatttaagcacgcttcatactacatgaccagacgcacgtataaaatcgtcgtcgaactaagcttgccaactcagcaccgccacacaggatatacagagagatcgaggcctgtcacattcatttttcgactcgatgcacctgcatgcgccggttggctaccgacttcgtgccgccgaggaactcgttcgggacgaccttgatctgcttgcccgtcttggacttggcgatcatctggatcgtccgtgggttggtgagcctccgcaatttggtgcacgtgccggacac

SEQ ID NO: 351939 - DNA, 370 bp, Zea mays
  unsure (1)..(370): unsure at all n locations
gcggaacatccggctgagctcaaggacttcctgaacctctctggagaagcttcatggagaggcggtttccatggagagagcagcggcgtcgctttcagattcagagagaaggtggagtttcagttcttgtctgaacagctcgggatcgccatcaccgaccacgacgagagccctcgactagatgatcaggaggacatatacgacaggccgccgcaaacctcttcttgtccggtactgtcttgccccaaccaagaagagggtctccaganggcagggtctcctgttaaagctcagctgagttcatatcgagctgcatgtaataacaagccaagactgaggtggaatctggagctccatgagcttttcgtga

SEQ ID NO: 351940 - DNA, 135 bp, Zea mays
cccaagcgtgcgctaacggatctgagtctgagtccgtcatgtgcatcgcctgcacggctggtgcggctgccatgggtttccccaccacgccgaacctgaatctggagcactcacctcgcggacggaggctcctgc

SEQ ID NO: 351941 - DNA, 237 bp, Zea mays
gttcaacatcgcgagcggccgccctttctttttttttttacacggtgaatagcgcaagcaattagatgataggagtatgtggattaagctcgtacacataggatcgatgttgtgaggctagccagcacagcatgcactttcagaggctcatttcacgcgtactagacctcattcacacggtagctagcgcagagcccttgacccggagggccccagtcatttcacctctgcgcactc

SEQ ID NO: 351942 - DNA, 150 bp, Zea mays
cacaacagcgccactgtccagtgcgcgcgtcaagcttgcttagctagccgccatggcctcactcaccgccgtctcagtgaagcccgtggccatcaaaaggtctcgccggcagctccatctccggaaggaagctcgccgtcgccaggccgt

SEQ ID NO: 351943 - DNA, 183 bp, Zea mays
cacgcgtcaggtaagcagttactgccgcggtcagagcacggcaggaaggagcgagcattcgtgcgggagagctggtggcacatggatcgccgggactcctccgacgcgccggggccagccgtgatctgcactggcagcgtccgacgcgctggcgcggctgtgcccgccgtcgtcgactcgatc

SEQ ID NO: 351944 - DNA, 186 bp, Zea mays
ctgaaatctggactgggccgtgtggctgacgggctgcttcgtgcgcgcatgtgggacgcgaggagctctggcggtgacccctgacgatgacgtgttctacctggtggcgttcctgcggtcggcgctgccgggcgcgccggttagcctggtcgcgctggcgctgcagaggcaccgggtgctcgactt

SEQ ID NO: 351945 - DNA, 71 bp, Zea mays
agcaagcgtccgcacacatgcatagacagcatatactcacgtaggcatcctagaacgtctgtgatctgatc

SEQ ID NO: 351946 - DNA, 109 bp, Zea mays
atttatatgatatataacaatggtagcaaagtatgaacaactggctagtaacatatacatgtatataggtattgaaatatttgtttaaatataattattgtttatttct

SEQ ID NO: 351947 - DNA, 261 bp, Zea mays
acgcgtcagccaaggctcccttctctgagcagaacacacgatgactccgcggctcgagcagacacacacacgcccagagccagtccatagaagacaaggagcaggacgctccagggtcaactgcaagtcggtgccgcacgagcactcctcggattacgacggctgccgacgccggtacgactactacgacctccgcggcgggcccgcggcatgccggcagctcctagagcttcaaccggcccagccgcccgggacgacccg

SEQ ID NO: 351948 - DNA, 271 bp, Zea mays
acgtcatcatccactccgggctgccatggcctgctccttctccgccgacatcaccgtctcttccgcccctacaccggccgccagacccctcgctgctgctacgcactccgtccgtatcgcacgctcggctgtcgctaccaatgccaggccgcaccgcctcgccgcctcaaagttcgcgcaggctatcatactcgttgcacgcgctagtctactcgatgacttgctgctggtcgggaacaaggtgcctgacttcgaagttgacgctgtattc

SEQ ID NO: 351949 - DNA, 103 bp, Zea mays
cacaaaccactccacagatgcacttcaacgtcacacggccttctgcactatcaccacaccacgcgtccgcaccactggcttaccaccaggacgtggatcattg

SEQ ID NO: 351950 - DNA, 440 bp, Zea mays
cggacgcgtgggtgactactgtgttgccatcctgtcatttgaaacgcacctcaagctccgtgttctctcactgtcaggctgctctagggttactcagaagaacgtgctgttcttggtcaaccttggacagtcaatagacggcctcaatcttcagttctgtgacatcattggcatccacaccattgcatcgctggtcagatagctctggtggtgtgatatccttgcatacgcagacaagatggtccattgctggaacggctcatgtctagtctactgggagccacctccagatgcagatatacgatcgtcgcagtagcacatccaggtgatcttcaggtttttggctcacatgcgatgcgacttatgatggtgggcttccgcattgttcatcgaccacttgttttacggggtgctttctactcaagtggcccgttttcaca

SEQ ID NO: 351951 - DNA, 419 bp, Zea mays
gccactcgccatggtcgtggcgtccttgctcacatcaaccagcttggactgcacgctctggcatccgctggccgagcagctccctcacgccgcgcccctggtcaagctcgtccccatggcggctttcccatggcgtcccttggcctccagcttctgctcgcgctagctcgccggtgacggcaaggccgaccatccctgctacccagcgccgaccgctcactttccatggccggcgctcgcccttaacgccggcgctcggaccacgccctcgctgccggtgctcgccgaccgcggccgtcctgctccctgctccaaccaagctcgcccaggtcttccacttcaccagcagcaggagctgcttctccctcaagctcgccctcacctccattaatctacttgcgttcacactcctctcatcc

SEQ ID NO: 351952 - DNA, 432 bp, Zea mays
cccacgcgaccgcccacgcgtccgcccacgcgtccgtcgaccttcaagtctcgctacgtagcagtgcaataaaaaaagcagccgcaatggcgagcagcaccatggccctctcctccacggccttcgccggcaaggccgtgaacgtgccgtcgtcgtccgccttcggcgaggcccgcgtgacgatgcgcaagacggcggggaaggccaagccggcggcggcgtccgggagcccgtggtacggccccgaccgcgtgctgtacctgggcccactgtccggcgagccgccgagctacctgacgggcgagttcccgggcgactacggctgggacaccgcggggctgtcggcggacccggagacgttcgccaagaaccgggagctggaagtgatccactcccgctgggccatgctgggcgcgctcggctgcgtcttcc

SEQ ID NO: 351953 - DNA, 424 bp, Zea mays
cgacttgtttcattgattcttgaagagatcgagcttcttttgcaccacaaggtcgaggatgtcttgcaactgcggatcaagctgcggctgcggctcaagctgcaagtgcggcaagaagtaccctgacctggaggagacgagcaccgccgcgcaggccaccgtcgtcctcggcgtggccccggagaagaaggccgcgcccgagttcgtcgaggccgcggcggagtccggcgaggccgcccacggctgcagctgcggtggcaactgcaagtgcgacccctgcaactgctgatcacatcgatcgacgaccatggatatgattattatctatctagcttgtggtggtggttgaacaataataagcgaggccgagctggctgccatacataggtattgtgtggtgtgtgtgagagagagagaaacagag

SEQ ID NO: 351954 - DNA, 177 bp, Zea mays
aactctctattatgagtcgtattacatcatatttcaccgcatcacgacatgcacgccgcacgcgcagaatcaaagatacagctactgaggctcggcgtcgatcacctgccgctctctctcactcaatgtagtcgactgcacaggcgatagcggcgactgatgacgctatgctcaccg

SEQ ID NO: 351955 - DNA, 322 bp, Zea mays
atacatccatccatccatccatctatagcagtattatgtatgcatccacatggtaataatctggctgaccgcatccgcatatggtcgtctcatcgtccatctataccttgaaagctactaattaattactgagttattattactactgtttttactactactacgtacaactacctcatctagctggtgtattaattgattttgtttgttactgctgtactactgttgttgtggagatgaaccatgcatggagtggttagtcactctttagtactttcatgacgttgttttcaacggtcaaaactaatgataaaattcaaaa

SEQ ID NO: 351956 - DNA, 361 bp, Zea mays
tcgacgcccgcatccgtcgacaaatgggttatccgccggcctcttcattccgtcgctgctgcttgctcacactccactcacgactcgccgacgcaccagctcccatgagttgtccattgcctccagcaccctctcatctgtctttagcctcctctctagacactcacatctctgcgatctgggatggtctactccctaggtctaccatcctcgttgctcaacacaccactgatgactccacggtttacaagttacatccatctggcaccaatcagccaacgttttagtcctcagcgatatcattgcctttctcaattttgactatgcattgctgcgttcttaactacttctacgaccggtt

SEQ ID NO: 351957 - DNA, 181 bp, Zea mays
aaaataagcagaaacatgggattaaaaataaaaaaaacaaaaaaaaaaaatttcaaaaaccaacagcaaattattaagtcaacagtggagtacagcagtcaaatacctgagtggccctaggtggcttgggctaatacacttaggatcgatggttgtgacgcctgtgagagaagggaggggg

SEQ ID NO: 351958 - DNA, 217 bp, Zea mays
ccaggtgacttgtactactggttctcaactatgcattgggcggtggtaatactaatacatgctcctacatattcagttactatctcctcatctgagtctgacgaatctggtacaacgtcaacagtttgctcacttactatctcaatgagttttagtcgcactgccagcgcctcgccaatcaggctcagactagtcgcggatggatatggcaaatggg

SEQ ID NO: 351959 - DNA, 413 bp, Zea mays
caacgacgccctcgccaccgacgagccccgcgaggttgccaagatcgccacgctcgtgccgccgctgccggagcgcggcgggctgttcgccgtccaggccacgctccttcccgcgcgccgcggcctctccatcggcgtcaccgtgcaccacgccgcctgcgacggctcgggctccacgcatttcctgcacacctgggcggtcgcctgcagagccggcgcagaagcgccgccgccgccgccgcctgtcatcgaccggtcactcatcgccgacccaaggcgcatgtacgacgtcttcatccaaggagcgccgagcactgaagagtacgagttcgtcaagatgtccgccgaccagctcttcgctacgttcgcgctgtccaatgacgaactgaagcgcatcaaggacgctgtggccg

SEQ ID NO: 351960 - DNA, 278 bp, Zea mays
catatcgtcaaatgacagctatgtttatgccgaaggggaaaaatgattcaacggtctaccgatcgatacgtccatggagggtgttggttatgttttgatgacaatgctgttcgaaagcagtcttcgtccgtctacaaggactactatgtactatcatcgtcaagagagatagagagatgacgaccacatgaacagtgcgattatcaagtggaagtttgcttgtaccgatgatgatagttgccggtggaatcgactaggctcagttcagtgtgatctct

SEQ ID NO: 351961 - DNA, 433 bp, Zea mays
gtataaatccactccacaggtgacagcacaacacctgcggacagatgcacctaacgcaagcggctgtcttgcatgatgagttgcaattcccaccgttgctgctgctagagagcatggacaccatatcacatgtaagatacgtgatcatatcagcacggtgaacggtgctgcgctaacttgtactggcccgcgcaatgtgatccatgtcatgagacctagacatgctccccggcagaatcatcagcgtcaagtcagtgagcaacattcgatctgctgctaccagtggcaatgcagtgaactcgaaggtcgacgactccttccatgaactgtaggatcacgacctcgatcgcttgatcacacacgatctgatgtagagtcggtttgtcggagacgcgacaagattgtgagcatgtccaccacgctcaaactacta

SEQ ID NO: 351962 - DNA, 353 bp, Zea mays
cccacaagtccgcccacgcgtccgcggacgcgtgggtttgtatatccaagccactaaacctgaccaaacagttcacagtcaaatactgagtatagcatatataaaatgttggttgcctgatcagtgtaaaagaatgctgcaaatgcgtgtgatcgataatatcagctctcttcgggggctatggttgcctgatcagtgtaaaagaatgctgcaaatgcttgtgatcgataatagcagctctcgtcgggggctatggatagcaatacaaagcgttctctgccctgtgacaacgtgggagaacgaattttacctccggccttaatctgtaatataacatctcacccagctgtggt

SEQ ID NO: 351963 - DNA, 382 bp, Zea mays
gtcgacgcaagcctccgcggacacgcgggttatttttttttttttttgtttttttttatgtttgtgatatttctatgttgttcattatgatctattctcattctcttttaaagacgaagccgtccattttgcagcagtgagagattattaagtccacggtgaacgaaacatgcacaaaattacatgcggattgaggagactaacccataagtcgactcacgcttcgacgccatcagctgaagtcgcacccaggcgctagcctcatctcacaactacaaatccaaaccgagcagtgggtccttgacgacactgggctgacacatttctccgcgaagatcgcgtccaaggcggacttcttgggagacagcccggagtactacac

SEQ ID NO: 351964 - DNA, 452 bp, Zea mays
ctcgcgggtcgccgcaagcgtccgcacacacgttctgacgtgacgcgtgggcgcagctgacggacgactgaaccaccgacagacaacatggccgcctccgcctccaccgtctccggcctcgccggcgcctccctggccagccgcccggcgttctccaccagcttcacgcggggcagccgggtgtcggcgaggaaccccctgatgagcaggaacctggagaggaatggcaggatcacctgcatgacgtttccccgggactggctgcggagggacctgagcgtcatcggcttcgggctcatcggctggatggggccgtccagcgtcccggccatcaacggcaacagcctcacggggctcttcttctccagcatcggccaggagctggcccacttcgccacgcccccgcccgtcacctcccagttctggctgtggctagtgacgtggcacctggg

SEQ ID NO: 351965 - DNA, 132 bp, Zea mays
tcaacaataaccttcgagattccctacgttacgatgaataacgctgggaactggtgagtgttgtaacaacatgatagaactactcctcgaatcacttcagtcacatggctatacacgtgcggtcatcctccg

SEQ ID NO: 351966 - DNA, 244 bp, Zea mays
ctgccctgttgcaatgcctgcatggtctgaaaggacctcggctcatgcgtgactgccatgtgcattagctgcaggggacgttcagggtatatatcctttgatcagctccatccgatgttccccatgcatgatggtttcgttttgtccgcttacttctggcatgccagcgtagtgctcatcaagtacttgactctcatacaccctcatggatacattgaactaattccaatacctgcctgatcac

SEQ ID NO: 351967 - DNA, 207 bp, Zea mays
cgtacctacactacacgaatgaccccacattcaaagttggtataacagagggagacatgatctcaacgcagccacatcacagatgtggcaaactatacggaatgaacaatattctatacagggcacttatttcatagccagatgtgacaagcattttcagttcgtacctgatctgccgcctgtaagcgttcacagacttgaagttga

SEQ ID NO: 351968 - DNA, 205 bp, Zea mays
tgcgtacagaacacgcgtccgccgacgcctgcgctcgttctgccttcagtgcttgctcgtcagctcggatactatatctcctatctgcactggccatgcgaagcgttccagctcctcccaccgcggctatggtcacggccagcacctccgggctcttcacgctgccctccctccgcgccttccctctttcctcgatctgacttca

SEQ ID NO: 351969 - DNA, 84 bp, Zea mays
aagcctatagactgagtcttattatctgctcaagtctggtgtctgggatccccgtattctgagagcaaccaatcgctcggggcg

SEQ ID NO: 351970 - DNA, 401 bp, Zea mays
gtcacgcgcagagcacagcaggagcgacgccagagatcgtgacgctcgacgcgaggcgaatggggtagctgtcgtgggtgttgctgtcatcatttgctgtccgcgcggcgacggcttcggccacggggttcttcctcctctacaatgaccacgtgttctcacgcactgcaatcatcagacagttggaggacatcacagaaacttctgaaaagcattatccagctcttaactaaaggatatcttcactggaaaccagtagagaagcaggatctatcactcaagcatcacattagttctgacttgcgcttacgtcatcgttacatctgcccatatgttattgattgctgcaggcagtagaaactgcagcattttaagccgtgctaatgtattgttgacattct

SEQ ID NO: 351971 - DNA, 454 bp, Zea mays
gctgcttcgtcggcggcctcgcctgggccacggacgaccactccctccacaacgccttcagcacctacggcgaggtcctcgagtccaagatcatcctcgatcgggagacgcagaggtcccgcggcttcggcttcgtcaccttctccacggaggaggcgatgcggaacgccatcgagggcatgaacggcaaggagctggacggccgcaacatcaccgtcaacgaggcccagtcccgcggcggccgtggaggcggcggcggcggcgggtacggtggtggccgtggaggcggcggctacggcggtggcgggcgccgtgatggcggcggcggctacggcggtggcggcggctacggtggtggcggcggcggctacggtggtggtggcggcggctacggcggtggcaaccgtggcggcggctacggcaactccgacgggaactggaggaactgagcggt

SEQ ID NO: 351972 - DNA, 482 bp, Zea mays
tcgtggtacgacgcaagactctagactgagtcgtatcatcctcctctgccgactgccctcatccactccactcccaagtccccaccacccccaaccccgtctctccactgcggcgcaggcttcgcttcggctccgctcggctcgagcagaaaatgcaacgggcagtgcagaccgtcaggtcacacggcaatgttcttaaatatgctgttctacaacacatcagcgctcccaagccagcaatgcttcctgctgccttttctcgtttcatgtcagtttcatctgctcgcctagaggatcgtggatttgaaactgccactgtagcagatgtcttgaagtctaaagggaagagtgctgatggatcttggctctggtgcaccacagaggatagcgtctatgacgctgtcaaatctatgactcagcacaacgtgggagctttggtggttgtcaaacctggacagaataaatcaatcgctggcattgtc

SEQ ID NO: 351973 - DNA, 459 bp, Zea mays
cactaacctagtgttacccaggtgcactgcacgtaagtcagtgatccctttttgccttctcacctggcggagcatccactgcgtcgcacggtgccaggtcagctagtcacctggagagactgcatcgtcgcctgcacgaggagcaggagcgctgacaccacgagcaggagcaggaccaggagcagcaagactcttccccctcgcctcagcaggaggtggagactaggaggctgccttcccctgcacctcagccagagatgcccctgcactaccatagggcatcccagctactgacggagacgacgacgacgttggtggcagttcgagccatgacacgaagctctaggaggagccagagccggagggatggatcgctagacccatcactcgcgacgctgctcctaagtgtcacttccacgacgctctcaacatgctgctgcgttcgggcatcgactgaca

SEQ ID NO: 351974 - DNA, 103 bp, Zea mays
cccaagcgtccgcagacgcgtgggccagttttctctgctggatgtgatgtatccattgttgcaagcatggccttgcattggctacctctatacctgctgctac

SEQ ID NO: 351975 - DNA, 454 bp, Zea mays
ctcgaatggtcgaacagtagtttgctcgctattatccatggcgacttctacggctgctgccactgcactgctccgccccaggccggcagttccagccaagttggcgcagaggaggtgcctccatgcggttgctgggtggacgacgatgaggaggaggggagctgcaggggtcgtgcgagctttcttcaaccctctcggggatgagcgcatcctccgagaagccatcaaggagccagtagcattcatgggtggtgtgtttgctggcctcttgaggcttgacctgaatgaggatcctctcaaggaatggataagtcggacagtggaggcttctggaatagctgaggaaaacagctctgaagaatcaagtgaggcagatcaaaatgatgcacctcagcagattgagattgagtgagaagaactgcacatgagaacaggggaaaggtcctcaaaatac

SEQ ID NO: 351976 - DNA, 101 bp, Zea mays
acccaagacgtccgcgagattgtttttcatcttgacgcgtggagctcatgtttgataactacgtctagtaccatgtatgaacataataatcttggtctaat

SEQ ID NO: 351977 - DNA, 312 bp, Zea mays
cccacgcgtccgcccacgcgtccgcccgttccgccttcataccttgctcgtcagcccggataagataacgcccatctgcacgggcaacccaaacctttcaacctcttccaacggaagcaatggcaacggcaacaacttcccggtccttctcctttccttccttcggggcttccttcctttccccaaccgattttaaaagtctctctcggtccgagccctctccccaagtgctcgtctctctggcggcctccctttcggctccccaatcgcttcaagcgggtacgggaactgtgcggcgacttcaatctcgtc

SEQ ID NO: 351978 - DNA, 461 bp, Zea mays
cccaaccatctctctctagccgccagccatctcctatcccaacgctagcttcttttcccagccacaacatgtgagctcctcctcttaagccgttgccatctccctcctcggccacctttaccggccccctctacttcctggctcccaagcttcagccatggagcacgacccctccttgcctctctgtagcgtcaggacctcctccgagctcgacaaggatgtgctgtgtctcccccagtaccgaccatgtcgagctccggtgaccccttcccacagcacagcacgccgacgcccctgcatatgctcctccaccggggttctcctccagcagcacttccccgtagcgtgagcttcgtcgagccgttgctcccttcgtccccagcttcggcagccgagctccaaccagggacgtctagcgcccaggacgtacggccccctgctcctctatccacgacgcagag

SEQ ID NO: 351979 - DNA, 118 bp, Zea mays
taatttgaacaagtggtgcaactgcgcgtgtacatggatttgctcttcctctatgtctctgtctctctgtctccggttactttccctgtttcactatgccatgcacatagacattgcc

SEQ ID NO: 351980 - DNA, 459 bp, Zea mays
ggcttctcctccccctcttaccaagtcctcctcgggttagggttccttagggttttgtggaggggcgatggcggcggctgatgtggagtaccgttgcttcgtcggcgggcttgcctgggccaccagcaacgagtcgctggagaatgccttcgcctcctacggcgagatcctcgactccaaggtcatcaccgaccgggagacggggaggtctcgcggcttcggcttcgttaccttctcctccgagaactccatgctcgacgctatcgagaacatgaacggcaaggagctcgacggccgtaacatcaccgttaaccaggcccagtcccgtggcggtggcggtggcggcggtggctacggcggcggtcgcggcggcggcggctatggtggcgggcgccgtgacggcggttatggcggcggtggcggctacggcggtcggcgcgagggtggtggcggcggcta

SEQ ID NO: 351981 - DNA, 446 bp, Zea mays
  unsure (1)..(446): unsure at all n locations
ccctgctttgttcagacttcagagcccttcctcttgtgtccgtgcaaattggtgatacttgaacagggatctcctccatattagtgagcaggatgtataatcctcccagtgggcaggacatgtcctactacgatcatgtgcagaagcgccatgaggagaagggctgcctatatgcatgcctgttcactgcgtgctgctgcttctgctgcttcgagacctgtgagtgctgcctcgaggccatctgctgctgctgctagttctgcttggagggcatgggcgtccatcatcgtggagatgtggccatgcgggacnaccaccgccgaataaaatgctgtacttatatgcacgcacgttagaaatgcattagtgtctgtttgatgtgatcttgtgtgtgtgtgaaatgcattagtgtctgtttgatgtgatcttgtgtgtgtgcgcgcgca

SEQ ID NO: 351982 - DNA, 341 bp, Zea mays
actcgtgggtcgacgcaagcctctaaagtgacgtcgtattaaagcgtgggcggccgcgtgggccggtatctggatcaaggaccatgtccgggacttcctcgtgaaggactcgagcaggccagtgaacatcaggtgcgcgatgattcagatagactgcacgcacacgaaaggcggcctctgcgtggattcggtcgtggtgaaaccgcagcagctctcgcagaacagagcgccctggacttacgtgtagactcgtcgaacaagttgctgctgctgtctacggacgatggatatgatgcacagtttccttttggcttgttctactaccagagtgtcgttttgtt

SEQ ID NO: 351983 - DNA, 125 bp, Zea mays
ataccagcctacctctcttctacgcgtcgttgaattgatcaccagccagcgccatgggcacgtccatgaccgacttcgctgtgctgtcccatccgtccgctggctcggggatcccctggtgccgt

SEQ ID NO: 351984 - DNA, 95 bp, Zea mays
cacaggaccaggactcgcggttcgacacaagcctctaaacagacgccgcccacgcgtccggcaccatcctcaatggagaaggacgatgttttttt

SEQ ID NO: 351985 - DNA, 162 bp, Zea mays
aagactctaaatcgagtcgtattatacaaggatattgcttggtcttgattgatgatgtcgactgaaatcagacctgctcactcaggaccagccaggacccgtctaatccagtcagagagacgtacgcgatgatcgcctcggaatttctggggcggctcctgc

SEQ ID NO: 351986 - DNA, 402 bp, Zea mays
  unsure (1)..(402): unsure at all n locations
ctcgcgggtcgacgcaagcctctaaaatgagtacgctgcatggcgagcagcaccatggccctctcctccacggccttcgccggcaaggccgtgaacgtgccgtcgtcgtccgccttcggcgaggcccgcgtgacgatgcgcaagacggcggcgaaggccaagccagcggcggcgtccgggagcccgtggtacggccccgaccgcgtgctgtacctgggcccactgtccggcgagccaccgagctacctgacgggcgagttcccgggcgactacggctgggacaccgcggggctgtcggcggacccggagacgttcgccaagaaccgggagctggaggtgatccactcncgctgggccatgctgggcgcgttcggctgcgtcttccccgagctgctcgcccgc

SEQ ID NO: 351987 - DNA, 408 bp, Zea mays
acccacgcgtccggcaaccggtccaacactttcacgctcaggcgctcagctctagcaatggctgcctccaccatggcgatctcctccacggcgatggccggtacccccatcaaggtgggctccttcggcgagggccgcatcaccatgcgcaagaccgtgggcaagcccaaggtggcggcgtccggcagcccctggtacggccccgaccgcgtcaagtacctcggccccttctccggcgagcccccgagctacctcaccggcgagttccccggcgactacggctgggacaccgccgggctgtccgccgaccccgagaccttcgccaagaaccgcgagctggaggtgatccactcgcgctgggccatgctcggcgcgctcggctgcgtccttcccgagctgctctcccgc

SEQ ID NO: 351988 - DNA, 134 bp, Zea mays
actcgtgggacaacacaagactctaaaatgagtcgtacgacgtcaggccggtttgctgtattctgctacctggtagcgtttgcgtgctatatatgctacggtgaaagtgaaataaatctgtggttccttgtgtg

SEQ ID NO: 351989 - DNA, 402 bp, Zea mays
gggtcgacgcaagcgtctacgcagttcctcagaatattgaaagagatgactaacaccatcaataattagtacagttccatcatgggctatatgttcttcttcttccacaaaattgggcatctgtatggttcaaattttaagaacctggttatcctagagatgagaatctcttgatacttcatccttgatatcatgagaaaggagacatcatgttgcaataactgatgcaattcttctgaatattggaagaaatgactagcaccatcaataactagtacagttttaccatgggttatatgttcttccacaaattggcatctatatcattcagatctgaagaacttggtcatccctagagatacgaattcactttcattttttttggtcggttataaaaaaata

SEQ ID NO: 351990 - DNA, 85 bp, Zea mays
aaagcatcctactcgctaacgtgagtgataacaaatcctcgtgctcgggccgcaagaatgctactgaggcgtgtgaggcacatcg

SEQ ID NO: 351991 - DNA, 432 bp, Zea mays
cgatcaagacacatacagagtttcgtcgacaacacgactactcacatggggaaacctgcgaagatcggatagtcgggtggagaccccggcgatcggcaggatctgagggctactccggacaggatgatcgacgtgaacgtcactgcggacaaccagcaggctgcaaccgctccatctccttcatcaacatcggagccgacgccaaagcctacgaagaagggccaaagggtttcagccaagctgcaacacggtacaacatagatctgtgcaagttccactatagcttgacggagatctccgggaccacgggccaaacccacaatattgacgatctagtcaagtctcagaaatgcgtcaccacaaaagcggctacggaacgtatagcaaggaccaaggcagcccgttccgtgtcaaagaaatgaacaacgggca

SEQ ID NO: 351992 - DNA, 395 bp, Zea mays
cccacacgtccgctttgctcttgatccattcgtattcattctaactcaattaatcaaaagctccccctgagttcatgtccaattttctcttgtgcatatttccatatctttgttccaacttgcacatttacatatctttgttccaacctctccccctttgtcattaattgccataaaagggttgttctaaggctctgggaaaatgtacttgtgaatattataccaacttgaaagtactcaataagtttttgatggacaccatatgcatgataaaatccttgacatcacttgcatgaacttattttacgagagagttgctctcttgaattgatgatcacttaaggttgtggatcacttgaagtcttgtatcactcaaaggatatcaattgtatgat

SEQ ID NO: 351993 - DNA, 359 bp, Zea mays
cggacgcgtggggcgttctggagcgcaggcaagctcaatgcgacagcaaccgtcgcgcagctcgatacccttggtgccagggtcatcgccacgtcatccttgaactagcaaaagattcggaaagtggtactgcaattgtatcaccaaacaaggaagaatgaaggggaaccccatggatttgtatgttttctcttctttcttgcatctttaggtggttaattggctttggaataagtgagatggaggacatcgctagaacaattctgttccctgggctgtaatttcaatttgggctggtttcttcatcatgccatggatattatgaataaatttgaggtactttgttaaaaaagagagca

SEQ ID NO: 351994 - DNA, 93 bp, Zea mays
ctgacacgtgtgccgacgcatggggggaagtacacttctagagtcagatcgcaatcgcgactcgatgatagttgaagccgaaccgtgaagtag

SEQ ID NO: 351995 - DNA, 62 bp, Zea mays
gttctagatcgcgagcggccgcccttaattaaaagcagatgctcagaagagaaaaatcaaaa

SEQ ID NO: 351996 - DNA, 432 bp, Zea mays
gagatgtcgccgcagtctcagcagcagacggcgatagtcggggaggagtactgcgagggcgaggacagggagctgacggtgcgcaagacgacgctcttcaccccgggggacgggctggaggcgtacgaccaccgcacgggcgcgctggcgttccgcgtcgagacgtacggccgcggcggggcgtgcgggggcggggccgccaggggggacctcgcgctgctgggcgcccagggggagcccgtcctcacggtgcgccgccgccgccccagcctgcacaaccgctgggacggcttcctcggcgacggggccgcgcacgggcagaagaagcccgtcttctccgcgcgccgctcctccatcctcggcgccggcacgggcgccgccgccgtcctcgtcgacctcctcgcccccggcgccgacgggggagttccgcgt

SEQ ID NO: 351997 - DNA, 76 bp, Zea mays
gagctttgggagccagagattgtaccgctagtgtatttgtatgcatgctgtggagctgaacaataaaatatgctgt

SEQ ID NO: 351998 - DNA, 104 bp, Zea mays
tccggtctgatcgattatccggaattctgaattcactgatttgtatgtagggatgtagttcagctgaaccataaactatgccgtgtgttggatttaaagctggt

SEQ ID NO: 351999 - DNA, 340 bp, Zea mays
cccacgcgtccgctgtaatagcagcgacttcaatattttactttgttttagttgttggtgatactgtttcatctgccggtttaatcatcaattcgtctactgtaatagcagcgacttcaatattttattttgttttagttgtcaaatgcacctgtttttgaacaatatttgtgatgtagtgccctgccgcgcttagagtctgagactattttgttatctgctgtgatgtttcagatgaaccagagttgatgtctggtttagtaaatggttatattcttagtgcattgcacttttgtatggtcttgtcgtatctagacctgttcgtggataatgaagtgtc

SEQ ID NO: 352000 - DNA, 179 bp, Zea mays
aacgttacacgtctgcctcagcccgccgcaaggagaggtaagttcaggagacatcttcgagaagctgaaatggctcataaagctgctcctgccaagaagggtgatgcgaatatccagtccgtgaaggttgccaaggcgtgtgaagtctgggacatccaagaacatgaccatcaagatgc

SEQ ID NO: 352001 - DNA, 82 bp, Zea mays
acaccacactacggcccgaggtcaggcgcatgaggttctccggggtacggtttcgtaggtgagcggatccagatggcggcgt

SEQ ID NO: 352002 - DNA, 135 bp, Zea mays
acaggtataggactcgcgggtcgacgcaagcctccaaagtcacttggggcacgccactgcgaagtctgagataatgcatgtatgcttgacggcgagatctgaggaaaaataatttctatatatgcatgtttcgag

SEQ ID NO: 352003 - DNA, 242 bp, Zea mays
tcgtgggtccacacaagcctctaaactgcgtcttatcaagcgagagcacacacacggcagcacctacctaggaccaccagcaccggcggcaatggcggcctccataatcccctcgtcagccctggcgttggcccctcagggcctgccgcccctcggccgccgcccttcttccttccccttcttcggctccaaaagaagattcagaaccaacaaccctaacggaattggggttgccctaacct

SEQ ID NO: 352004 - DNA, 273 bp, Zea mays
tctagactaagtccgagtatctacgcccggccaagctgccgctgcaggggcgtcggttcgctatccccaaaaccgcgggacgtatcagtgtcaggggtcccccgggcccaaccgcagcagaaccacaaggtaaaggaggagaaggccaaggcggcaaccttcccccggccgcaggccccggaaaaggagccaaggaaggggaacccccattccctgcgccggaaccctttggcgagaaccagaaacttgacccgcaattacggcggccattgc

SEQ ID NO: 352005 - DNA, 397 bp, Zea mays
tcgtaggtcgtcgcaagtctctatagtgacgtcgtattatacgtccgttcctcttcctctcccaccggcagggcaatagtcagcgatgggcggcggctcgggcaatcctctacctcccccaccggcggcggcagcggccttccgcgtggaccggccgctgcaggcgctgggcttcgagttcactcgtgtcaccgccgaagaggtggtcggtcgcctccccgtcaccgagacctgctgccaggtaggtacgattagaataggatacgcaggccccgcgcgccgccgccgcctcgagtagtattttatttgtttttgttttcatctcattatcgtctctatcggcgccgcgcgtgatgacggagaccggatgtgggtcatgcagcccttcgactggctc

SEQ ID NO: 352006 - DNA, 373 bp, Zea mays
ctcgtgggtcgacgcaagcctctaaactgacgtcgtgttacgcgtccggcatcgcacgtccgccgagagttagctcactcgtctgcgtccagctcagctacaccacattcgcaccaagttgccagcaagttgcgagcaaggacgacgaacgggtcaatagcgagtctctcgtcatgcagtcgtctgagtagcggcagaggcgccgcagcgatccagcggcaaccggccggtactggagccgtcctcgacctctcctgcacgtggagcgccggcggaactgttcgcgcagcatccgctgcgaaggcggtggcaccggcggcggtagagctgcagtacaacggggtgtcactggggacttgcgcggaatttgagc

SEQ ID NO: 352007 - DNA, 379 bp, Zea mays
agaggggtaccgcgtcgccggcggcccgctcggagaggtcgtcgacccgctctaccccggcggcagcttcgacccgctcggcctcgccgacgatcccgaggccttcgcggagctcaaggtgaaggagctcaagaacggccgcctcgccatgttctccatgttcgggttcttcgtccaggccatcgtcaccggcaagggcccgctcgagaacctcgccgaccacctcgccgaccccgtcaacaacaacgcatgggcctacgccaccaagttcgtgcccggcaagtgagggggtcggacgcgccaccgcccaccgccaccggccaccgctgccgatatctaggtgttcggatgcacgtgagcgcgcactggttccagtttg

SEQ ID NO: 352008 - DNA, 254 bp, Zea mays
atgactctcctcttgtgcttctgctgtccccagtcgagtctcctcaaccctaggcactcgccctctgtcgcctcgcctcggctcgcggctccgatgccgccgctgctcctcgacccgcgcgactacctcggtgccggcgccacctcgtcgtggtgctcgtcgtcctgctcctcgggccgcgagggcgctggggcgctccgcgcgctgctgctcaggcttcaggggtgctatgacgctccctgccgctgcgcgga

SEQ ID NO: 352009 - DNA, 333 bp, Zea mays
caggtcagagaactcgcgggatggttacagcagtgaattaggctttggatttgattgacagatcgaagaaattacaagtgtaaatacggtagacaaagttgtttgggtagtagaacagacgtgtactgttcagttaatgtttgtctcggtcaacctgtaactaatacgtcatcttttttttcttgtcggtgaggatgtaaacagatcatgtgaaagatgtacaacgaacaatctatggaaccagagttagacgggcatgtatcctatgcaaaagaggaaaggagaacaggggaggcggagcgggggggtagcggcgggctggcatcgccggcg

SEQ ID NO: 352010 - DNA, 268 bp, Zea mays
gcaacactatagagtgagtcgtattaaacctcccagaacctcctcctccgcttgtctccaccctccacgccgccaccgatttatacacgcttcgtcccgccccgccgcgaccttctgttccataccatgccataccatttctcctgataaaccatccaatccagagttccattccagtctgaattgctcctcctaccttctgataagcaatcacgattgtgccatcaacactacagcgccccacgaaggccgcccgcgccccctctgt

SEQ ID NO: 352011 - DNA, 234 bp, Zea mays
actacgcgtccgataacgcgtgtccagccaaatgctgaaatcacatccgacaccgacatccagcaaccaggcctctcagccaggacgtctatggcctagatccgcgctccagcagccgacgacgcagatacagatgccagtcgctccaggcatcagcacacgtcgaacgcgcaggcaaaccgacatgccgtgcccatgctcgaggccaatgcaatccttggccgtccatacatc

SEQ ID NO: 352012 - DNA, 210 bp, Zea mays
acgtcgtgagtatacttctagatcgcgagcggccgctctttttattttttttttttttttttttcgaaaaaataaaaaatgaactaggagagaggaaagacgtaaaggggaaggggggacgaaaagaaaaaagaaaaaggcgagaataaaggggcgggccccccagaggttggaagcttaggtgggcgtggatgcaagttcagaggtgtt

SEQ ID NO: 352013 - DNA, 360 bp, Zea mays
cattcgacggtccaaccacgcgatagacaatccgtccacccacgcgtccgcgcacgcgtccgcccacgcgtccgcagatcgagaggtacatcacgacaaagagaggcaagagagataggggaccggagggcggcgggccggggcccaagaccgaggggctcgtgcgcaggaagctgatgaggctcctgtcgctcgtccccttcggctgccgtgctggacgcatcgacgacgcgccgccgcccgtggaccacgctgccgccgccgccgccaggaggcgcccgaggaggaggggcaacagagccggccagctgctgggggctgctgcgggtgcgccgcaacagtggggcccctcgctcgggg

SEQ ID NO: 352014 - DNA, 63 bp, Zea mays
tcgtgggtcgacgcaagcctctatagtgactcgtgctaacgcgtgggtagttctagatcgcga

SEQ ID NO: 352015 - DNA, 443 bp, Zea mays
gggtcgacgcaagcgtctaaactgagtcattatatcggcgtcaccgtcaccgccgctttccgagctctcatggcggcgtccgcgtcctccctccttgccgcccccgcatcctcatcctgtggggccatctccccccagctccctcgtggagctccggccgctgcctccgtcgcttcgccgtcgcgtcactcctgctacctcctccgcgcttccccttcgaggcgccatcggagtcgcttcgtagccaacgccgctcccaccatgcagcctccggcggagtccaaggtctccacggtagtcgatgtcgacctcgggcgacgtagctatccgatctacatcggcgcaagcctcctcgacgagcccggacctgctgcagaggcatgttcatggtaagagggttctggtggtgaccaacacgaccgtcgcgccgctttacctggaca

SEQ ID NO: 352016 - DNA, 428 bp, Zea mays
cacacacgtctgctcacgcgtccggagccaccaagcgacgtgagaggaacgtttagggaaagagagaaataactaaccttaatttttgcctatgtataccatcttacgaattgcactctatgaggactctaggcccaaatatatacatcgatgcaggatagaggatagagagacagaccgtgtacaacaaagactatatgagaccaaatacaacaaggatacatgcatagacatctaataattaacagtgtatacttgcaaaaaaaggtgtcaacactttatattatccttgtcttaatcatattgattatgacaaaaggttgattgtaacactatcttgagttgtttttcgcagtggcatatgaatttggggtgcctgtgttatttgagccagtctcagtggtgaagtgtcgaataattgcaccagt

SEQ ID NO: 352017 - DNA, 175 bp, Zea mays
cggaccactctaaagtgaatcgtatgacatcaaggcgttggcaatcgcactcgattcctcggagcactcgcagtttcgcgtcacagctggccaccgtgatagcctcgtcgtctcaggtcgtcgcgctacaggcactcgcccacctaggcatacggaccgcgcgctgcgccatcct

SEQ ID NO: 352018 - DNA, 222 bp, Zea mays
  unsure (1)..(222): unsure at all n locations
gtcgacgcaagcctctatagtgacgtcgtgctgaagcgtgggcggacgcgtggggtgctctggtcgatgccgtacgtgtgtcnctgatacaatactattttagtactgatgctagtcatcatatatatcgatcgagctcgccactgcgaagtctgagataatgcatgtatgcttgacggcgagatctgaggaaaaataatttctatatatgcatgtttcgag

SEQ ID NO: 352019 - DNA, 446 bp, Zea mays
ctcgtgggtcgacgcaagcctctacacacacttctgctacgcgtccgggaaaactccaactaaacaacggactttctggtttggcagcacaaaagaccagcgggaagcctgatttgtttgcatattataaggaaaaggaattatcatttgcaggtagtgacaaagttgcaaattcagaagaaaacaaaccaaatggtgctgttaaacatatgcaaaatctggacttgccagcacaacagaaaaacgacaaaaatgattgtgatcgcaaggcagaggagttttcctctgcattagaggatgaatcatcaaaatcaccaactcatacagtgccaaaaccacctagataccctctacttcctgttacttctcatgacagaagcatgctaagaaaggtaccaactttggttcagccttcgagtaagcttgcagatgagaagaacacacta

SEQ ID NO: 352020 - DNA, 400 bp, Zea mays
gcaaccggtccagcactttcacgctcagctccagcaatggctgcctccaccatggcgatctcctccacggcgatggccggcacccccatcaaggtgggctccttcggcgagggccgcatcaccatgcgcaagaccgtgggcaagcccaaggtggcggcgtccggcagcccctggtacggccccgaccgcgtcaagtacctcggccccttctccggcgagcccccgagctacctcaccggcgagttccccggcgactacggctgggacaccgccgggctgtccgccgaccccgagaccttcgccaagaaccgcgagctggaggtgatccactcccgctgggccatgctcggcgcgctcggctgcgtcttccccgagctgctctcccgcaacggcgtcaagt

SEQ ID NO: 352021 - DNA, 76 bp, Zea mays
gtccgaacgctaggacatggaggtttgtaatatatgatccaaccagtgatgaatcaatgcattcacttgtgtacac

SEQ ID NO: 352022 - DNA, 179 bp, Zea mays
taccaatcctcatgctaatgcaagagatcctgatcacagcaaacccgtcccggtggagatagattacaacacctgtacgatacctcagccactagtcacaatttgacgagggttcggtaacgatatagggaacattccatagagggtacgttatttggttccaagcctttagcccccca

SEQ ID NO: 352023 - DNA, 91 bp, Zea mays
aggagaagctcgtgcccctgtacggccgcggcaaggaccgcgtctaccccaggtccaagaacgtcccccgggcggccgacatccccagccg

SEQ ID NO: 352024 - DNA, 116 bp, Zea mays
gtgggtctcccgcgtcatgttctacccggagggcttccagcccatcattgactccaaatggcgggactacaccgtcgtggtctagagccttaacacctggcagctggccgtcatcc

SEQ ID NO: 352025 - DNA, 415 bp, Zea mays
ctcgcgggtcgacgcaagcctctagaatcagtcgtattaggtccagcactttcacgctcagctccagcaatggctgcctccaccatggcgatctcctccacggcgatggccggcacccccatcaaggtgggctccttcggcgagggccgcatcaccatgcgcaagaccgtgggcaagcccaaggtggcggcgtccggcagcccctggtacggccccgaccgcgtcaagtacctcggccccttctccggcgagcccccgagctacctcaccggcgagttccccggcgactactgctgggacaccgccgggctgtccgccgaccccgagaccttcgccaagaaccgcgagctggaggtgatccactcccgctgggccatgctcggcgcgctcggctgcgtcttccccgagctgctct

SEQ ID NO: 352026 - DNA, 302 bp, Zea mays
aatacgtccggccgcggatgcggcagtcgtcgctgccgccgcaggcgccaggaagaggaggaacgcgtggaggctcgttcgtctacgactgcagcgcgttctgagcgacgcacatcgatcgatcgatcagcctcgcggatgaaccagatcggcaggcgtacgtgccaactttctgcaggtgatccacctcagagatccaaggtcgcgatcttctgtgaactcctgaccaggctctcgaacgtgatcgggctatcagggggcgtcatcacgagacagcgatcgagcatatactgggggctcgt

SEQ ID NO: 352027 - DNA, 428 bp, Zea mays
ctccacccaggaccgccgccctcatccgtctcccccgtcttcctcgccctcgtctacctcgcgctcgtcggaaaaaacagctcaggtgagtcatctacctcgctctcatccatctcgtgtcttcctcaccctcttcctctgctcatctcgacgatctggaggtcgcgatctggaggtgtgtctatcaaggggattcccaggatcgcgtaggatctgcagctctggagcgcgcgggcgtcggggaagtagcggtaggatctgcagccggacgggacggggcctgaaggtccagcgccgctctggacctcgcgtgggtgaagtccgaagcacagtggcctctccttggtttcactctcctcctcgtcgttgtccaatctggcgccagcaatgcccgagaagcgagcgctgctaccaggaacgcccgtgaa

SEQ ID NO: 352028 - DNA, 313 bp, Zea mays
cacactcatcagccacagcccacgtcacgctatctctctagcggtccagccagtccacacagcacagggatgacatagttcgccgtgaccacggcgcagatcatcacagcgcacgcagcaagtatgacgcgaacgctggcataacatacgctcgagaccaggattgccaagagcaggacaaacggggccagcactggcaccatactcggagtgcgcatgagtacctattcctctctcgctgagctcctgttctctcaggtacaattcagcaagtaaggactccactgcgcataccgcgccaagcttagaggca

SEQ ID NO: 352029 - DNA, 89 bp, Zea mays
aacaccctaaagtgagtcatatgatatgcgttggtgcataaaagtgctgtaaccacgaataaaaaaccatactaataacatgtgttttt

SEQ ID NO: 352030 - DNA, 81 bp, Zea mays
cggacgcgtgggttaccctagtccagagtgtttatcttcgttcgtctcgtgtttgttgttgcccatctgtgtttttgattg

SEQ ID NO: 352031 - DNA, 334 bp, Zea mays
aaaccacaggtgccgccacaggcagtaggagtcaccgagtagagctcatcatcaatcaactacaccgtggcgctgatcaagaacacctcggactcaccacaagggcgagcgcgacactaggctaccttcatgagccgacgtctacatcggtacccgacactaccaccagaggtcgacagcacatccatcacagtcgactccagctaggacccgctcaaccacgcagagcgtgagctcggcaatgacaacggcatcgagggcaccggagtcatcgtagacatgccccagccccggcaagcacatccacgtcggcgcgaacaacgtgatcatcaac

SEQ ID NO: 352032 - DNA, 379 bp, Zea mays
  unsure (1)..(379): unsure at all n locations
caaacttctctgtgtcgtgctctctcccggagcttcttcctccacgcgctcttctacatccctgtgccctaccgctcctgctcgttcttcaggcagtcgcggcagccgagctcccatggcgcgcgcgaccccctgcttcctctctctctcggctctgctcatcctggcgcccgcgcgtggagctgcttctcccctgctcgtcggcctgcagcgtccccagctgccctccctgcttctctcttccccgcggcttccatcctctactcgccattgcaagccgtggctcctcgccgtgggatttcnctctgcccggccgagctcgccccggccccttcctgctgcagctcaggaccccagctcctctgctcgcctggagctc

SEQ ID NO: 352033 - DNA, 372 bp, Zea mays
gtcacttccattttctcaataccttaagcaaggaccaatgtctcaagcccagccccctcgttcccaagcccagtggaaacacgttaaatttcaggataaccaagctaatgccatgaaggaaccaggaaccggtgggtatggctatgggacgaaaaatgacaagaataaggatgtggatacaatagcttcggacttcatcaagctgaagcacaaagcttgggcactcaagaagagcacaacaatgtaccaaccttctacctaaagccttggatatttgcggatccggagtgaagttaccatggcatcgttgctaagaataggaaagtaatgtggttatgaggagatgtgtaatttggtggcgatattatttgc

SEQ ID NO: 352034 - DNA, 401 bp, Zea mays
gcaaccggtccaacactttcacgctcaggcgctcagctctagcaatggctgcctccaccatggcgatctcctccacggcgatggccggtacccccatcaaggtgggctccttcggcgagggccgcatcaccatgcgcaagaccgtgggcaagcccaaggtggcggcgtccggcagcccctggtacggccccgaccgcgtcaagtacctcggccccttctccggcgagcccccgagctacctcaccggcgagttccccggcgactacggctgggacaccgccgggctgtccgccgaccccgagaccttcgccaagaaccgcgagctggaggtgatccactcccgctgggccatgctcggcgcgctccgctgcgtcttcccccagctgctctcccgcaacggc

SEQ ID NO: 352035 - DNA, 425 bp, Zea mays
  unsure (1)..(425): unsure at all n locations
gccaccatcgaccttcaagtctcgctacgtagcagtgcaataaaaaaagcagccgcaatggcgagcagcaccatggccctctcctccacggccttcgccggcaaggccgtgaacgtgccgtcgtcgtccgccttcggcgaggcccgcgtgacgatgcgcaagacggcggggaaggccaagccggcggcggcgtccgggagcccgtggtacggccccgaccgcgtgctgtacctgggcccactgtccggcgagccgccgagctacctgacgggcgagttcccgggcgactacggctgggacaccgcggggctgtcggcggacccggagacgttcgccaagaaccgggagctggaggtgattcactcncgctgggccatgctgggcgcgctcggctgcgtcttcncggagctgctcgcccgcaacgg

SEQ ID NO: 352036 - DNA, 442 bp, Zea mays
cccgggtcgacgcaagactctacagtcactcgtgttatgatttgtgacactacaaaggacatcctcttttctaggttcctcttcacaaactaatttaagggtgtcatctgaatttctcttcctttgccttttgatgtcatttttgtagtgttctgcctgaacactttccatgttttaaacatctgatacattcatacatccaagtgttactttttgtggactgctaagtttgtacgcttgcctgttaaagtaaaatgttaatatgccatagtctgacacttggttagagacatttaacgatcttaaatggttcatttcgtttcgcctgttatttataggttgtctgcacttctagtttttatttgatagaatcatatgatttttttcaggaggttttgtttttcgaggaaggagagcctaagattgatggtgaacctggcga

SEQ ID NO: 352037 - DNA, 355 bp, Zea mays
gagaggcgttcgccgagctcaaggtgaaggagatcaagaacggccgcctcgccatgttctccatgttcggcttcttcgtgcaggctatcgtcaccggcaagggccccctcgagaacctcgccgaccacatcgccgaccccgtcaacaacaacgcctgggcttacgccaccaacttcgtccccggcaagtgagcgagggcatgatgcttgcatgcgtgtaccgtagacgtaccgtattcctacgtactgcaggttgcaccagtatttgtgaagggagctgtgcgtgggagccagagattgtaccgctagtgtatttctgtatgcacgccgtggagctgatcaatgaaatatgctgt

SEQ ID NO: 352038 - DNA, 431 bp, Zea mays
  unsure (1)..(431): unsure at all n locations
cacgccatcacataaaaccagtgcaagcagaagcagcgcaatggcgagcagcaccatggccctctcctccacagccttcgccggcaaggcagtgaacgtgccgtcgtctctcttcggcgaggcccgcgtgacgatgcgcaagacggcggcgaaggcaaagccggcggcgagctccggcagcccgtggtacggccccgaccgcgtgctctacctgggcccgctgtccggcgcgcccccgagctacctgacgggcgagttcccgggcgactacggctgggataccgcggggctgtcggcggacccggagacgttcgccaagaaccgggagctggaggtcatccactcncgctgggccatgctgggcgcgttgggctgcgtgttcncggagctgctcgcccgcaacggcgtcaagttcggccaggccgtgtggt

SEQ ID NO: 352039 - DNA, 175 bp, Zea mays
aaactatgtgcctgagaatcgggatgtaacatggtgcatgctcacgcatgtcttacaccatgcggatttgacagatcgacagaatgccaatcctgctgagtcggtggcacagtatgaccgttctgcaggagtccgtgaccccaacggccttcttttcatgttcggaatggcgctc

SEQ ID NO: 352040 - DNA, 378 bp, Zea mays
ggtcgagcaagcgtccgcacagacgtctgctgacgcgtgggctgttctgagtggcaatgtagagacagaacaggaatcgcgttacaacgtgtgtacttctcctggtaacgcgattcctgttctgagtggcaatgtacagacagatcgcagattcctaaggtcaatcaggattaagggttgcggatagggcataggggtggtaatggatgacgatctaaatgttttttcataaaatggtacagtaggacatacattataaattttagtgtacaatgaatatccataagatttgtttctaagccgatctttatatctgatagtgtaaacttatatcttaaaatgtagaagaaggaagctgccagagactcaagcaggggg

SEQ ID NO: 352041 - DNA, 429 bp, Zea mays
gtcgacgcaacactctaaactgagtcgtattaaacaataagataacggtgtacagattcttctgtgatcatcccatgcttgcctgatgcctgtccccgtcccgtccgatggcgaccgccgcaacgccaaatcccggaagcggttttcgcggctcctatagtagtactagctagcatataccgccataccatatccatccgcctgtttgttgttggctttggtttggttccgtcggcctgccgtggttttggtgtggctccgtccacgatccacacatctgtcggcggctcctcatggtgaagcttattgaggtctatgaaaatgatcctgagaacatgactaagatttttgacatcatgcaaaacatgcaagaatgtggtcagccccccagtgattttgtccaaagatactgttactgatcgggatctg

SEQ ID NO: 352042 - DNA, 192 bp, Zea mays
ctcgcgggtcgacgcaagcctctacactgactcgcgataaacaaaatatatgagcttatgtgtaaaaaggaattgccatgctgttttatgtccgcagcaggttcatgccctgtgatatgtgtaatcatgaattgtacagtttatctgtaccgcagcagtttacgagaggtctagtaaaagcacattttaccc

SEQ ID NO: 352043 - DNA, 392 bp, Zea mays
ctcgtgggtcgacgcaagcctctaaactggacgttctgggaggttgtccattatctgttagctatctaaggctatattggaacctctacagctattagctagctaataaattatttgcagggttgcttaatttgtcctccgccactgctcgagtcattgctccctccctccctgtttccctggcggactctgatgctgctgctctcctggaggctagcgctactcttcggctggatccccacagctggtcccctccggcagcgccccgtctcctcggctccggccgtgcctctcctcgtctgagaagcggacgaagaagaagcgagagatggcgcggcgcgggagccacaagcgcgggtgcgcttcgcggacgacgtcgtggacaaagacaa

SEQ ID NO: 352044 - DNA, 363 bp, Zea mays
acgcaacactctgaactgacgtcgtattacgcgtccgggcttctcctccccctcttatcaagtcctcctcgggttagggttccttagggttttgtggaggggcgatggcggcggctgatgtggagtaccgttgcttcgtcggcggacttgcctgggccaccagcaacgagtcgctggagaatgccttcgcctcctacggcgagatcctcgactccaaggtcatcaccgaccgggagacggggaggtcccgcggcttcggcttcgttaccttctcctccgagaactccatgctcgacgctatcgagaacatgaacggcaaggagctcgactgccgtaacatcaccgttaaccaggcccagtccc

SEQ ID NO: 352045 - DNA, 414 bp, Zea mays
  unsure (1)..(414): unsure at all n locations
gacttgtttcattgattcttgaagagatcgagcttcttttgcaccacaaggtcgaggatgtcttgcaactgcggatcaagctgcggctgcggctcaagctgcaagtgcggcaagaagtaccctgacctggaggagacgagcaccgccgcgcaggccaccgtcgtcctcggcgtggccccggagaagaaggccgcgcccgagttcgtcgaggccgcggcggagtccggcgaggccgcccacggctgcagctgcggtggcaactgcaagtgcgacccctgcaactgctgatcacatcgatcgacgaccatggatatgattattatctatctagcttgtggtggtggttgaacaataataagcgaggccgagctggctgccatacatangtattgtgtggtgtgtgtgagagagaga

SEQ ID NO: 352046 - DNA, 412 bp, Zea mays
accacacgtccggttgttctttgttggaaaattatcatttcaaataatgaatggttttggaatgacagtgccctctcaattcatagaaagaaatgcagttaaggaagtactacaaattattcaagttgctagggataggaatattcctatttattatccaacagatctctggtgcttgaaaaatggcaacagtgaaatatcaggggtcatcaactctaccggacaattggctggctggacaccagctgatataggaccatcgacattggagaagatttcttctataattacatcatacaagaagatactgtggattggccctacaaactacggtttaacagaaaaaaattcagttggtggaacacagttgggtgaaatactggaaagtgcaagctctgatggctgtgatgtt

SEQ ID NO: 352047 - DNA, 108 bp, Zea mays
ctcacgggttgacacaagcgtccacacacacgttctggtaataataagcatcgtacaatctgcatgctgttttgtaataattaattaatatcccagcccattggatgg

SEQ ID NO: 352048 - DNA, 273 bp, Zea mays
gacaaaaatagtgtatacctattagcctgcatggtatattgttggtgatatatgttggagtagttttgatgccaaaagaaaaaaaataaaaaaaacaaaaaaaaacaaacaaaaaaaaaaaaaacaaagtaaaagaacacataaaaaaaaacaaaagaaacgcaaaagacatatgcactcataacagaaagaaggtaatgcaaaaggaatggagggcgaccccagacgtgaccgccggatgtaccacacaagccacggaattggcctcaacaa

SEQ ID NO: 352049 - DNA, 399 bp, Zea mays
taaacacgcttctggcaaccggtccagcactttcacgctcagctccagcaatggctgcctccaccatggcgatctcctccacggcgatggccggcacccccatcaaggtgggctccttcggcgagggccgcatcaccatgcgcaagaccgtgggcaagcccaaggtggcggcgtccggcagcccctggtacggccccgaccgcgtcaagtacctcggccccttctccggcgagcccccgagctacctcaccggcgagttccccggcgactacggctgggacaccgccgggctgtccgccgaccccgagaccttcgccaagaaccgcgagctggaggtgatccactcccgctgggccatgctcggcgcgctcggctgcgtcttccccgagctgctctccc

SEQ ID NO: 352050 - DNA, 68 bp, Zea mays
aagtccggggagacacttcggggattcgtgggggagttggtgtaccgtgccgttggctgggggggggg

SEQ ID NO: 352051 - DNA, 203 bp, Zea mays
actcgtgggtcgacgcaagcgtctacacagacgtcgtgactacgcgtccgcggacgcgtgggcatgtctcgtgctgactcaagctgtcacgcccatgtgcttcttgcacacgattatcaattcagtagttgtgattaaccaaatttttatgtgtactggcagaacccagttgcaattgcaatgaagctcgatgttgctctatc

SEQ ID NO: 352052 - DNA, 434 bp, Zea mays
tcgtgggtccacgcaagcctctaaattcatgcatactaggctcgcgccggaggaatacctgatatcatacctgaggatcaggaggggaggaccagctttttgtacacaccaggggatgtggatgactgtgttggcaagatcaagcagctcctgtcgagcgaggagctgagggaggccatggggagagctgccaggaaggagatggagaagtttgactggcgagcggcgacgaggaagatccgcaacgagcagtacagtgctgcaatctggttctggcgcaagaagagggcacaggtgctgcggcccctccaatgggtgctgcggctgctgaggcggacaacgccaggagctgccgaatgcgatgccgcagcgaagcaatcctaggagagggcggctactatggttgatggtcctccttttttcccattccttgt

SEQ ID NO: 352053 - DNA, 356 bp, Zea mays
cgggtcgacgcaagcctctacactgacgtcctgttacgcgtccgcaccgacataaccgttacgaattcgaatggttgctagatcagctaaataccacatgtttgtggacttcagttacatgtaatattttttttgtgattccacagatgagaactcttcaaagtttaaaccgtcgatttagccttcattctgcctcagcattttatcgccttgtttctgtagtagcaaccagtaacaacaaggttgcctgtagtctgtacaagatagtagaggtttttttttctgtgctggttgtacgacacaactgtgaatgacttgccgtagacggatactatactgtacgctcgatgcgccaa

SEQ ID NO: 352054 - DNA, 217 bp, Zea mays
atacagtccaaaccacacaaactaagtcctccaaccaacaggccgcagcacgcacccagcgcacagcgatggcctcgctcacgatgatggcatcggtggccggccgtggcggtggccgcgccttcgcgcggcggcagcttcgccgtggtcaggtcccccaaggtcgatcgcggccagcacccggccacgctagcagcaaccgatgccaggcccgccg

SEQ ID NO: 352055 - DNA, 162 bp, Zea mays
ctcgtcggtcgtcgcaacacactatactgactcgtattagacaagctctcgatctcaccgacaccgaggaagaacagatcaatagccctcgagcacggattcgcgactacatgccacagctatgactagtttggggcccacaggaccacagcccaggaagcc

SEQ ID NO: 352056 - DNA, 388 bp, Zea mays
cgcgggtcgacgcaagcctctacagtgactcgggcggacgcgtgggcgccggtctcttgctctgatagcttgctccaggacgtacgtacgtacgtagatcgatccatcgatcgctagctagctgacgaccatggcgtccctctcctctgccgccatcaccgccccttccttcacggccgcgcccgctcgcgcagtggtcagcaggaggtccttcaccgtgcgtgcctctctccgcaaggccactgccaccgccgccgtggccgttgccgccagcgtcctgcttgccggcggcggcgccatggcccaggaggtgctgctgggcgcacgcgacggcgggctcgtcttcgagcccagcgagttcaccgtcgaggccggcgacaggatcacc

SEQ ID NO: 352057 - DNA, 397 bp, Zea mays
tcgtaggtcgacgcaagactctaaaatgagtcgtatcacatcgtggcaatatttggattggattggttgcttgttgcaatgtggttgtagaagaatggaacaagcatggcagagaggaggccgagcctgtggcagaaatgaagaaccgaagaagcattgcccaagggtcatggctcgagtgccaaagtgagggattgatgctaccttcagtgcttcagtagaatatgttcagcacttaattatggtaaacatgatgattttgactgttttgtgcttcaattttgtaactggcagttgatggttggcattcaaactctataatgttcactacgtgtagctgtgtttttgacaatctgtaacattctgctaacatttggttaagagacaaaaaacaaaa

SEQ ID NO: 352058 - DNA, 150 bp, Zea mays
atactggaccatcgcgctctgcctggtcatctccgtcctgccctacctggtgctcacggtgagcgcagcaggtgtgctggacagcggtgccttctactcggggctgtagctgcgggcgctgggctgtgcgcagcaccctgtgctgtcgtc

SEQ ID NO: 352059 - DNA, 367 bp, Zea mays
atcctagcgccacgcaacagcagcgcatgccatcagcagcgctcccgattcggcgccacctcgatcccccagttcccgtccagaccacccaatcctgcgtgtgtgcttgctgcagccgttggtctcctgctttgttcgggtgctagctgccacgcgcgatgcctcctaacgcccaagacgtgcacgggagcaacggcgggctcgccatgacagccccggcggcgtccaacatggactgcctcctagccgccgtctgcacgccggtcaagctccacttcatcgacgtgtcctgccgtgtgaagcacacggagtggtcctcgaaagccgcccccaggcgggcggcgtatcgcaactccggttcccggcg

SEQ ID NO: 352060 - DNA, 216 bp, Zea mays
gggggggaggggggggggggggggggggggggggggggggtggggggggggggggggggggaagggaggggggggggggggtggggggagagggggtggggagggggggggggaggggggggggagggggggagggggggggggggggggggagggggggggggaggggggaggaggggggcggggggaagggggggggggggggcggggggaggg

SEQ ID NO: 352061 - DNA, 251 bp, Zea mays
aaacagaacgactcagtagctgcagtcgtcggaacgccctctgggtgttcgatgtgaccagcacgagctggaccgtggtgcccccgccgccggagtgcgccggcttcgtgttctccgttgcgtccgtccggatctgagaaaacctagatcttcttcgtcctgtccgtccctccgcgatcgatcaacagacgtaaaggctactgcgagtgctagtgctagtacgggtgtaccggccgtaggtccgtgcgcca

SEQ ID NO: 352062 - DNA, 301 bp, Zea mays
ctcgtcggtcgtcgcaagtctctagactgagtcgtatgactgctcctcttcgctgtgtggcactgctcccctcgcgagctccctcagcgcgcttccatgtccacgctccgtcgacctagcgctcggtctcgctacaccatcggtgaccgagctcatctacttcaacgccaaccatgcctcttgttggagcgaaggtagaaacgccacccttcgctcgaagtctccgctgcttagccgctgctctgagagacagagcagatagggacacccttcgcgtgatcggcaccagacgaagaccggc

SEQ ID NO: 352063 - DNA, 450 bp, Zea mays
gcaagactctagattgagtcgtgctacctgcctacagcgtcgtgcgtatgatacttcttcctaatcattcgcgtgcaccgacaaacaagagagcaggtctccaaaactattgcccccagagatcttgtatcaggagagggtaaataaagtttttgggaagcactctacatggatgctcgatcacttcattgccgtcttcaatctcattgccatggctcatctgtcgccttgtcacgtggacgtttcatgtcgtcggtaacaatgagatggtgttaggcgtcaagttgtcttctctacccgatcgtcggcaaggaacaaacgtataactatctcgctttcatcatgtattaaatattgtttaatttaatttgtttagatcagtgcaagttttaatcttagttatctttgtaaagacaattcattatgtaataaatttgtgccattggattc

SEQ ID NO: 352064 - DNA, 208 bp, Zea mays
atacaccagcatcatctatacggattgctacatagtcttgcatgttcgtgttgtttgtgcatttccgcgagaacatagtagttttatagtcgaacccgttgtctgaattgtgcttggattttgtcaactgatgctttggcgcatctctgcatctccgcgctgtgctcccacagaacgcgagacctgcccacgaatagcatgcggaaat

SEQ ID NO: 352065 - DNA, 328 bp, Zea mays
taaacagcggtcatagaaccgccgggcggcggacgcggctgcggcggccgatggcgggctgacgaggctgctcctcctgatgcagagcgggtgctcgccggcggcgagacagatggcgctggagctgctgaagatatacagggtgaacgccaagagctgtctcgccggctacgactccaagaccacccacatcatgccgttctgaggaaccgaagcggacgagagtggtttgccgcgatcctgggtggctgttttgacatgatgaaatggattcaattcagtgaatcaattaaatcgcatggaacatgggaatgtgttcttgttcctg

SEQ ID NO: 352066 - DNA, 384 bp, Zea mays
agcttcggccaacgcttcggcgtccctcttcatgtcggcctccgcttcggccgcggcggccctcaacccgcattgcttcggccgcggcctcccggttgacggcttcgtcccctgctcgctcttcagcttctatggccgaacgggacacccttcttgcaacccccgcagggtgttcaacaagatggagggtcccccggacctggcctcctgcaacgcactgctcgacgcgctgtgccacgccggggacctggacggtgccggggacttctttgagcggatggcggtgagggaacccgtgtcgtggacgacgctcgtgtctgggctgtcgcggggcggacgccaccggtgcgctctcgaggtgttcaagggatttttgctgggtaa

SEQ ID NO: 352067 - DNA, 435 bp, Zea mays
cggacgcgtgggcggacgcgtgggtatgcatattataatcttagtaacatgagcattggttctcctttggtattctaccgtatgtttttaatttatagatgataaaataccatgaagacaatgttataccaatacgtccattttattctgtaatggattaacagtcatcagatcaggcgcaaacgtgatactagttgtgttctttgctacatatcgtcaccttgcttttgtctgcagaggttggtccatgagttgctggataaacagcagaatccgaccgtaaaatcaaggctggcaactgcgttccataaccttacaagttcaaacaatctctcaagctcactcgaccggccaaacaggcagagattcaggaaaaacctccttagcttcatggcggatgtatcgggcttcatgcagataaagtagatgcgatgg

SEQ ID NO: 352068 - DNA, 230 bp, Zea mays
gggtcgacgcaagcctctacactgagtcctgtcacgtcttcaaagcctccgccacttgactcccatcccctctcgcgtggtccttctcctgctcccgctcccgctgctcctcatcttctcgcgccgcggcccccagcctttgcccgccgctacctctctctaattggggggagggcatccggtccgatggcgttcaactaccacgaccacgcgctggcgatggaccccgc

SEQ ID NO: 352069 - DNA, 438 bp, Zea mays
cacacgcgtccgaatggaggtgatgacttggatgaggatattgccagtccagctagtggagcaagaaagaagagggcgtgcaacactagtactgcaacaagtccattgaagagaggacaaagccctatgttgaagattatgaggggcatgtggggaactttgcagtctaatagtgttgctgcaaaaagggtcctagagggagaattaaggacagagtcaatcaagaaggcgatgaatctggttaaggaatgtggtgcacctgaaggaagtgttgagcattacatggctacaaaattgttcgtgaaagctgaaaaccgagatatgttctttacttttgaatcaaatgaaggaagattgtcttggttaaagagaaattgtcaggactatgggttgtcttgagttggtagtagtcatgagtgtgtctgcctatctactgtc

SEQ ID NO: 352070 - DNA, 398 bp, Zea mays
  unsure (1)..(398): unsure at all n locations
cttatccgcggaggaagaaccttggcccgacaccatgctcccaatggccgtccaccccaccaccacgccggccttgtccccgcgcgcccgcgtctcgccgcacaggcctcccatctcctccctggcggacccctcgtcctccccctgccatcgcatcgtcagtttcaaaagcaggaggctgccacttcgctctctccacatcgccgctgccgctgccgccggggcagaggaagaagaggcgcaactaggtggaagtgtgaacgcggtcgacgaggaggaagcggaggtaatggcctttcgtacccaatagctaggattcgagcaacttacccggctcagtcgctgtcntgtctgtataaccggaaattacgcagttcagatttaaaatggttatgttt

SEQ ID NO: 352071 - DNA, 432 bp, Zea mays
accacgcgtccgcccacgcgtccggtttagaccagaagttttagtgtgtttttttcaaacaaacaaaaaaaaactccagaacgcatgtgcatcattgtacaatgatcaggattcatggtcctatcatcctctgcaaatctcggtgaggtcatcaaggccgtcggactcggcggcgatcttggacgccgcggccgacaggaagcggaagccggcgtcgctggcgctcttcctgacggaggcaagctgctgggacttcttgcagtaggcgatgaacccctggatggggttctccacctcggagctggcgctgctgctcctcctgagcgccggccccgcgcagtcggactcgctcgaggacggcggcggcgggagcggcggcggcagcgcagggactggggacgtcttgttcgacgaggagtaccggacgatgac

SEQ ID NO: 352072 - DNA, 416 bp, Zea mays
cgtttagttacagcagtactgattgcacttgctgttctctgtgagtttcttttttccattggtcatctgttctttttaagcatttaaatatgatgattgatcacgttgttttggaacaaaagggttaaatcaacaaaagaaattaaggcatttgtttttttgcttaagatctgaagaaagatgtagaacagaacaccatcagttgtaacttatggtgttcctgaaaacttgattgctgcaaatgaaaggtccagggacaactctttaataccatcggtattcattttgcatatgattcataacacactgctagttatttcttttgactaaggacatgtttggataccaagggctaattgttaggccgtggctgatccaaacaggccccaagacaacatggaactgtagaatgccat

SEQ ID NO: 352073 - DNA, 144 bp, Zea mays
tagacggacgcgtgggcggacgcgtgggatttgttcccaactaatggtacctagtactcacaattagttgggaacaaattgtgagtactaggtaccatttcctgatttttgagtcacaacaggacctctgagttctcccggatg

SEQ ID NO: 352074 - DNA, 348 bp, Zea mays
gggtccacacaagcctctacattgattcatattacgagcggccgaggcgctggcggagttccgggcgacgttggaggacgtcgcgggcaacatcgacaggcggaacgcggaccctgcgctgaagaaccggacggggcacgtggaggtgccctatacgctgctcaagccgatcgaccatgacggagaggggcgccctctgagttcctcaacgatgtacatctacaaatgctactacaggctgaacactgcataattcatccatagcaccatcacatggtagtcagttacgttactctaactcttctacttcacgtttaacaaagggtttttttatgtatcttcttgtta

SEQ ID NO: 352075 - DNA, 431 bp, Zea mays
cacacgcgtccggttcaaaatcgcaagcggccgccctttttttttttttttcacaatagaagctccggacttctgtattcaaaagttgtttgtcactttacacagttcaacagtttcatgttgaatctaatatttgcattaaaggcatctaatccatttatcaaaactaaaatctacaacggagttgcatatgcctggctatctacagggatcatcagctctccggttgtccagcatcccactgatgatacaacatcccgctactggttcttccttctcgatgacagcggcctcgtagatcttggccaagcttgggactttgaccagaaatggcctgatgaacttggccacgaaatcctcctccgtgatggcagcgatgttgttgaagtccctgccgcgccacagccgccgcgcctgcagcaccctcatca

SEQ ID NO: 352076 - DNA, 393 bp, Zea mays
ggccagcaagcgggcttgggattggattggagctctcgtcagctcctatcttatcaccagagccagacagacagtcgtcatcgtctccgatccatctccgtcttcgtcctcctcgctcgacaacccaccaaggagcaagagaagaagatcgacgacgacgacgacggctgccctctgcgttcctcaaggctgtacaactactaatgctactacaggctgaacactggataattcagccacaacaccaccacatgtcattcagttactttactctaagtcttctacttcacgtttagcaaaggctttttttatgtatcttcttgttaattgaattgttaactttagttttcttttagacatagatggattaaggatctttaacatatgtttttt

SEQ ID NO: 352077 - DNA, 126 bp, Zea mays
gtatgataagagcaccttctatacctctgatccggtggttgggtacacagattatccatttctcgatcaactctaagatgattggcttataaacaatttccccacctggagtactatcttgacctt

SEQ ID NO: 352078 - DNA, 111 bp, Zea mays
tgcaagggttcgacacacaagaagaacttgacctccggaattgaactgaaccacaagaaaagcctccaacctccgggcctcctggcccaaattccaaaatccggcaaggtc

SEQ ID NO: 352079 - DNA, 458 bp, Zea mays
gtgggtccacgcacgcgtctgcaatgcgtcgtctatacccgcgagggccgcgtcgtccgcgatgcggcggcgaaaacgaaggggggcctctttctcttctctcctctcctcctgtggtctctgcagcagagacactgctctgctcgattgctccgttgcgcctgcgcctgcgaccgccttgtcgaggagggggaggagtgtttgttcttgggcggagccggtgcagagggggcgagagagaaagaggtcaaaagagccgcatcgcattcgcatggggcagtgcgcgtcccatccggggccggcggccggcggcggaggcggcgttgcgaggagggggtgcctggcggtgccgcgggagcagcggtcccggttctacatcttccggcgctgcgtggccatgctcatctgctggcccaagtacaagaagatctgacctcaccaagccctctccgcctgta

SEQ ID NO: 352080 - DNA, 127 bp, Zea mays
ggatggggtatatatatatagcatccctccctaataattcgttctatctgcgtagcgaggttaattcaaaaaaaattcgtaaaagatggtgaagctaattaagtgaaatataaaatatgtgacatac

SEQ ID NO: 352081 - DNA, 209 bp, Zea mays
agtccgctctcgatcggtccgtcgatggaaccatggtagcagcatgtatcggtcaggagctgtctctcgtaggcaacgacgcgtcgtctagatgtctcagagcatggatgaagcgtttcgggctcgccgcagtgagagggaacagtcttctctgcattgtatctggcaccggttcttctggggtgggggcgaaggagaaggatgaagga

SEQ ID NO: 352082 - DNA, 273 bp, Zea mays
ctcgcgagtcgacacaagcctctaaagtgagtcatattaaaaccacgaaaagcaagaacagccgagccctcaatctgttcttgatgtgttcttcctcgacggtgagttgcacaaagatatcttgaggacacgcgacaacaccacaggggatggttcagaccaatggattttctgggaggacaagcatccgatgttatgttacataaaggaactgctagagctgtcagaattgtgtgcaaaccagaaattagaggtatgggatctagaacatga

SEQ ID NO: 352083 - DNA, 51 bp, Zea mays
tggacatgttccaataatcagtgctactcttcattacataattttgatgct

SEQ ID NO: 352084 - DNA, 414 bp, Zea mays
accgcctacttaactctcacatgtcatgatcctcccaccgtgtctctcacccatgcagcacgccggagtggcagtagcggtagagctcggcatcagctcccctgctactcgctccacagtagctcatcggctccctggtagcgctctgcaccgcggtcgaactcgcacaagtccagtcgtcctccaccttcggtctcttctcgcctctgcaatcatcaccggccgttgtttcccggcgccgtcagcctctcacgcagccgctgatcatcgctcgctcgcttctactgatgctccctgttgctgttccatccaagccacatctgggttcctccctcatcgaatcagttcgggctcatcaacacatgtcggtcctcagtctaccatgtcgcgccctgatgacctcaaactccccga

SEQ ID NO: 352085 - DNA, 425 bp, Zea mays
cgaagaagaagaagacggcgaggcgaggcgcccgaggcagccccgcgtcgcccctcgactacagcggcgcgtccactagcggcggcgaggacggcgccttctgctcccggccagagccagcgctcccgccggccgccgcgtgccagcagctcgcggcgcccacgcctcccagcaaggtgggtggcctcgccggacggcggacgacccccccggtgccggtgccagtgccactgccaccacctcggcccgccggacagcgggcgcggaagaagatgaggctcccggagatccagcagatggtgcggtcgctgtcggtggagaacgacgccctccgcaaggagatgagagcgttgcggagggattgcacggcgctgtcccaagagaacggcaagctagagacaaggctccatcagtccgttacgctg

SEQ ID NO: 352086 - DNA, 284 bp, Zea mays
cgcacgacacgggactaagtcgaagagctcgagggcaccaatcatgggcggtatgaaccccagcgtcgtcgggctcaaactcgtcgcgggagtggcgtaggtcgccgtcgtctcatcgccggagaggccggtgcatctggtcgcgcccgagggcagcctctctgctctgctcaggttgtcggccgtcgtcgccgtcacgggttatgcacgggtcggtcagggccacgatgttcgatgagtatttcgacacgagcatggtcggagagggggctgggcgacaggaa

SEQ ID NO: 352087 - DNA, 403 bp, Zea mays
atttcattgaggaagaagacagaacaatggggcatcagagaaacccaaaaggcacacacccaagatacaactctcacgggtaacaactaacaacatcagcaagcttgatgcagcaagcaaccagacgacagaaaagctagtctaatgtaatggctaatgccctgggggtgcctttgctccagcaagcagcagcacaccaaaggatggaatatagatgccccggcaagtaactcctggagtcattttggtccagctgggagcagcacaccagagtatggactatgaactctatttgcagcacttttgatatataaggatttaccccattgaagatacagttgttgcaacggttctaaattttccatgccacaagaataatgaaataataagccctttcttgacc

SEQ ID NO: 352088 - DNA, 387 bp, Zea mays
gcactctggcagctagctattacccccctgctgcgccgcgcagccttctggtctacccccgttggctgcttcttctacctaccctcgccgtcgcctcaacttcccggccgccgtcccctccgatcaccagctgctgcttgtgctgctgagccaagagcagctagcgatgaacatcttgaacctgcagcccatcaacccaggcgggcacccggcgttcccggcggccaaggagagcgggcacctcacgccggcgtcggtgcgcttcgacggcgtgccggtgccggcgcagtcccacgcgcactgtccgaggtggcaggctcagacgctgcgccgggacagcagctacgtcggcgtggagcacgaaggggacaggaccaccgcgtccgt

SEQ ID NO: 352089 - DNA, 430 bp, Zea mays
gggtcgacacacgcctctaaagtgagtctgatcaggctccagcgcgccaccggacttgatgtcgtcacctagtcttgatgcttggggacctggattccgggatgccgtcggcgcttcggtacgcacgcaacctctcatcgcttctcgccaccaaccgtcaccgatgcgtgctcacgtccgtgtacgacgtagctatcattagagtcgcgcagttcgcaatcaaggccgctgtcctaaagtactgacgactgtggatggtagtcaacatggacgagtagtaaagtttagcacaagagctgtgacagacttgacgaccacagtttcagtctagtacaatgctacagagttaccgtctgtaccaaacaggatcattatgccatgggccagtatgacgactactggataagtccgagctggtctcgaatccaat

SEQ ID NO: 352090 - DNA, 422 bp, Zea mays
  unsure (1)..(422): unsure at all n locations
accatactttgaaacatactccatgttcatgtcatgcctatgcaaagcaggtagatcagaggatgggttgcatcttatccacgatatgtcagattgtggtttcattcccagcacagtaaactttatgactgttgtccatggtctaaatgtggagggcaaacatgagcttgctgagtctgttctactgtcaaaatggcacttgcggaagcaaagaaccatctcatattagtttttgcttctctcacgctctcaaaagatttcttggtgtttacatcttggaacgcaaggaacaagcatatggtangggcatgaagtaaaatgaatcatggacacttttgctcnccccccccctccatttgtcaatggtggatggagaagggtacagtaaaaatcgttgtgaggactgactcaatgtggcatgt

SEQ ID NO: 352091 - DNA, 426 bp, Zea mays
gttccagagccttatctactggatcatcggcgcactcgccaacgactcccaaatcctcagcaggtacgtcgggttctacaagggagtgcagagtgcaggagcggcggtggcatggcaggtggacaggcgccacacgcccctcatgtcccagctgatcgtcaactgggggctcatgaccatcagctaccccttgcttgcgctgctggtgttcctggccgtgaaggacgagagctactcggtttcgtcggtggaggacggccgggagaaggacagcaagctgtccgcgccgaccagcttccactgatgaagaagaagaaggaggaaggatagaccaagatgcatgtcattgtaacacggtgtttccatccaagtaagttttagtagtagaaatcaagaaacaactggagtacctataccaagaatata

SEQ ID NO: 352092 - DNA, 334 bp, Zea mays
tctacaatgactcgttctatagcggccgcagcctcctccggcgtcgtatgtcgtctacccatccctgcattaacactactccgccgccacgccttactacgtgtatcgctaccatatagctcaatgttatattcctgttgttgaaggaatgcctgttaaaatcgctcctcttcgatgttgtggccttggcatgaggtcgtttctgtgaactagtgggtacatctttacaagtactctatggtaaccttgaacgtttgtgcgcagttgtgtgtgagtacctgattaaattgaaacacctctatgtgtatcttgcactaacgctgcctcacttgct

SEQ ID NO: 352093 - DNA, 229 bp, Zea mays
aaagcgtggggcactcttaactcaggggacacgatcgccatggccgccacatcgaccgccgccgccgtgctgtgcccgccgtccgtggccgggcgccgggtggcgccgtcgcccggccgggcgcgcgtggggtgccgcgccgcgccggcgccggcgcgggggtcggtggcggcgcgggcggagctcggcccggggcgggtgatcggcgggagtgcgggcgtgtcgcgcg

SEQ ID NO: 352094 - DNA, 56 bp, Zea mays
aaaccctccgccgccgcgtcgccccgggcgcagcgagcacagctcacgttccggtg

SEQ ID NO: 352095 - DNA, 433 bp, Zea mays
aaataagtcatatataaaaaaaaaaagaaaaaaaaaaaaaaaaaaaaaaaaaaaaaaaaaaaaaaaaaaaaaaaaaaaaaaaaaagaaaaaaaaaaaaaaagattaaaaagaaaaaaaaaaaaaaaaaaaataaaaaaaaaaaaataaaaaaaagggggggccctcctaggggttcaaattttgcttccccttccatgcaacttaatgccccttcaatggtgtccccaattttcatttcaggggcgttttttttaaatcttgttaccgggaaaacccctgggtttcccaattttaccccctttgaaaaaaacccccttttccaaatcggggttattcgcaaaagggcccctacattttccctttccaaaaatttgccccccttaaaggtcaatgggaccccccctttttccgggcttttaaccccgggggttt

SEQ ID NO: 352096 - DNA, 154 bp, Zea mays
actagttctagatcgcgagcggccgctcgcgatctacgactagttctagatcgcgagcagcagctcgcgatcttcaaatagtcggcgcgaggatagactagggcactccggcccggtacatgcagctgtaccaacttcccctgaagtgggctct

SEQ ID NO: 352097 - DNA, 241 bp, Zea mays
atcgcaagcggacgacctttttttttttttcccagaaatgttgtgcgagctcgcagttatgcagtagagctgaaagtagctcttggttccaagatatctgaatggtaatttgagtgcttggcagtgtttcttgatggactaaactctggtattagatatgaactagtatgttaatatcacaattgaccagcttatgatatcaacaaacgtcaataaaatagtactgcaaatgatgtaatgc

SEQ ID NO: 352098 - DNA, 374 bp, Zea mays
accacgcgtccgcccacgcgtccggacgtacgtacgtacgtagatcgatccatcgatcgctaactagctgacgaccatggcgtctctctcctctgccgccatcacggccccttcgttcacggtcgctcccggtcgcgcattggtcagcatgaggtccttcaccgtgcttgcctctcgccgcaaggctcagtgctcaccgccgccgtggccgttgccgccagcgtcctgcttgcaggttgcggcgccatggcccaagaggtgctgctgggcgcatgcgacggcaggctcgtcttcgagcctagccagttcatcgtcaatgccggcgacaccagcactctcaagattgacgccggcttcacgcgcaatgtcgtgtt

SEQ ID NO: 352099 - DNA, 341 bp, Zea mays
accacgcgtccgcggacgcgtgggaaaaaaaaaaaaaaaaaaaaaaaaaaaaaaataaaaaaaaaaaaaaaaaaaaaaaaaaaaaaaaaaaaaaaaaaaaaaaataaaaaaaaaataaaaaataaaaaaaaaaaatataaaaaataaaaataaaaaaaaaaaaaaataaaaaaaaagggggggcctcttaaaggtttcaaatttaatttacccttgtttggaatttataattttttaaagggtttccccaatttttatttaaggggctttttttttaaaatttgcgtaggggaaaaacctttgttttaccaagtttaatccctttaaagaatacccccttt

SEQ ID NO: 352100 - DNA, 214 bp, Zea mays
gtctccacagcaaccagcacacatttccctttggcggatcgaaggaaggaaggaaggaagagatggctggaggcacgtccgtacacatcggtcggtggatcaatgagtggcacgccgggagagacaccatctcattcactttcggctggacccgacacacgctgtcctccgtctggttcgtctggctctctgtatccacctacatctagacagc

SEQ ID NO: 352101 - DNA, 371 bp, Zea mays
accacgcgtccgaaaaaaaaaaaaaaaaaaaaaaaaaaataaaaaaaaaaaaaaaaaaaaaaaaaaaaaaaaaaaaaaaaaaaaaaaaaaaaaaaaaaaaaaaaaaaaaaaaaaaaaaaaaaaaaaaaaaaaaacaaaaaaaaaaaaaaagggggggccccccaaagggttcaagcttaacttacccgtaaatgaaacttaaaacccttccaaagggtcccccaaatttaatttcaggggcgttcttttaaaaacttcgtaatgggaaaaccccggggttacccaatttaaacccctttgaaaaaaacccccttttcgcaaatgggcttaaaacgaaaagggcccgacccattccctcttccaaaaatttg

SEQ ID NO: 352102 - DNA, 430 bp, Zea mays
tacagacacttgggttagccatatctcagcatatggatggtgtcgaggtggcccgggcgcatacctagctcagacaaggcgactcggctgctcaagtttgctgcaaatgtgtgcttgactggagcttttctgatgctgtttgccttgcttgatgaaaaggcactggcctatcgtctctttggtttggatgagattattgatcctagtcaactcaaatatcttccggctgttcacttcagtacagcggtagccctgtatttctttcggaagcatcttgctggtgcgttggcaaatttaggggaggagctagggaatctcctatccctccttattgctgcttctccaacagagaagcaagggagaaagagaaggaggaagaagaagacagcaagtacagatgtgagaagacgtcgataatgaagagcagcta

SEQ ID NO: 352103 - DNA, 415 bp, Zea mays
gatgcggccaatacataggacgcggggccgcctgcgcgcgcgtgcgcgcggccaaggcgccaagccgagagcgggcggacgcgctgagctcgctgggcgtggccatggcggaaataaattctacaggatacagggaaaatggcgacggccatggcgatgagctgagtcaagcgcgcgcgagcgggaagatggcgatgggcgagcgccgagggacgcgggaagagtgcaacgatttccgcgcgaagatggtagtgggtaggtacgcacgagttagaactcctgtttcttgcacgatgtagcagcaagcaaaaaaaaaaaaaaaaaacaaaacggaagaaatcgaagagagccagcgggcgggcggattggattcggaacatcatgtggttgcggatcgccagagcgacaggggaac

SEQ ID NO: 352104 - DNA, 393 bp, Zea mays
gcgggctctgcgcggcgcacggcacgctggtggcctcgcggcagcgccgcagcggcggcggtggcatgattgggccaggcctcttccgcggcatcgttcggtccgccagcgcggcgaacatgtatagcgagtactcgtcgtcgggcgtgagcacggtgtcggactgcgacggctcgcctgaggcggcgacagggaggcatgagttgatccctccccaggtgctggtcccccactctatgaaatctttgacagcggcagccgtgcagccaccggcgaggagcagagagggaggggtggtcgctgtccccgaggggagggtgcacggcggtggtctgctgtcgttgcttggcgggagcttcaggaacgtcgacgtcgacaagctctgaaaatctg

SEQ ID NO: 352105 - DNA, 419 bp, Zea mays
  unsure (1)..(419): unsure at all n locations
agataacaagcggccccaccacaccgctgcagtcgccgtgctcgcgcatggagcttggaggcggagggcgaggcggcggcgaccgggtccggcggcagttgcagtcggtggggcggctggcagcgtatctcggcggcggtttcctcctcctctccgccacctcttccgtcgccgtccgcgccctccgcgccatctccgacgccaaccagaggaagttcgcgaagccgtgcggtgcctgcgaggggaagggcagctactcgtgcaggctctgcangggcagcgccaccatcgagtggtctccgatgcacgacccggtgttcgtgaatccgtgcctctgccctacctgcgatgggactcgggtgcagcgctgcttgaactgcctgggaaatggttacgcttgaagaagcgatgtcagtttc

SEQ ID NO: 352106 - DNA, 237 bp, Zea mays
acaacaccctgacgtgagtcgtattaaacatgaccactgcagtcgccttgatcatccacaggtcttcgttgccgggctccaggctcccggcagcaattctggccacactggcgttccctatgggggctagcagctcatctcgcggaggctctgtgcccatctgcgcctccacgtccatctccttctccaccctgcgttacgacgtgaactccttccggttcaacttcatcaaggagt

SEQ ID NO: 352107 - DNA, 405 bp, Zea mays
tccatgagctatacgccgacggccaaccgacaggaggctcgtcgtcagcgtggcaggacctgctggtcatgtcgccgtccaaggggtcggggcagcgggagctcaaagctgccatcgagaagaacgaagggggcttcgtcaaaccgggataaccgtgtaactgctacgttcgttcgttagttcggttccaacttccaaaggaatcgttccctagccggattgttgatcagctggaacgatttctgaatagattccttcgtaaccgaacatgcccctaacaggcgcatcatccagaaaccgggaaagatgaagctaatgtgatgctttgattgtggaggtggcctatcttcttcctgttgtttccaaacatacgaatttcgcaatgcattttgtatgatgcgattc

SEQ ID NO: 352108 - DNA, 449 bp, Zea mays
  unsure (1)..(449): unsure at all n locations
cccacgcgtccggattctcacttctcacctccgcccgcctccggttgtcttctcaattcccaacgcagccagcagcgcaaggtccanaagcccaggacaagacgacggacctccgcgccccatcgatccgcgcggccctcccccaacgcgcgtgcgtccgcaactagcgtctgccgccggtcgctttcttccgcaccccccgacgcggcaaggagcccccccgccatgagggtccacccggccccgcggaagcgcaccatcgccgtgcaacgctgcgcctccgcggcggcgggcgcgctcggcgggaagaagctgcgccgcctgccgcacatattcgacaaggtgctggagctcccgttcgcggccgacgcggacgtgtccgtcgaggaggacgcggcggcgctgcggttcgtcgccgccgccgacgagttctccctcgcgggcgcccg

SEQ ID NO: 352109 - DNA, 180 bp, Zea mays
gacagatatgctgttggcctggtttggtgacagcggctagttttttctttcaaaataaatgctcacgccacatatactatactagccatttgattctggccattacaacataacgactatttgctctttggtatgatgctctatggccattacaacaaaacgactgaggatgtttggttc

SEQ ID NO: 352110 - DNA, 57 bp, Zea mays
agactaggcgtaagaccagatggttctattatcaggatgctatgtgatgtatttcac

SEQ ID NO: 352111 - DNA, 426 bp, Zea mays
atgatattgtctgatgcagttgcaaaagtacatatagtactctaatgctctaagtgtggctccagttgtgcacataacacaacatcatcaggatgtctttggttgattggaacttctcatccttgatgcaacttttgggcaagcttttattgcacataaattgcctctacctgttatggtcattagtggaaaactggctgttgtagttgcttcgtagactgaatatttaaaaagaagctaagatattagtcttcattttttttccaacgaagttacccatgtaggttggactgttgttgctgctggaaatttcacggttagatgaaaaaaaaaaaaaaaaagggcggccggacgacgcaagtccctactcctccaaaccctcgccgactcagatccagcttcctcgcaccgccgtcgccatgccgt

SEQ ID NO: 352112 - DNA, 88 bp, Zea mays
gtccgacacgcaactgcggactcgtgggctgacgcatcggcagacccgtgggttctcaaatcatgagttgtacggagggacttatgtc

SEQ ID NO: 352113 - DNA, 65 bp, Zea mays
aaaaatccggttgccggtacacagcggtattaattcacctgtaactgaatggaataccgtgatgc

SEQ ID NO: 352114 - DNA, 88 bp, Zea mays
aaaatatttcgaattgaagtaaggtcccaaatctgagggcatactgttgcttctctgctggaataaatgtgctccttgttcatggaac

SEQ ID NO: 352115 - DNA, 225 bp, Zea mays
ccttcaatgcaacttcaaaccccttcaaaattttccccaaatttcatttcactgcccttctttttaaaacttcttaactggaaaaaccctggctttacccaatttaacccccttgcaaaaaatccccttttcccaaattggcttaataccaaaaaggcccccaccttttccctttccaaaaatttgcccaccctaattggcaaatggaaccccccttttaccggc

SEQ ID NO: 352116 - DNA, 61 bp, Zea mays
cacacaagcgtctaaacatgacgtcctaataaaaaaaaaaaaaaacataaaagacaacacc

SEQ ID NO: 352117 - DNA, 174 bp, Zea mays
gtccggaaaattaaactattttacactccaatctgcctcaatacacatggattaaggtgaatataggagtatccaaacaagccctaaagttttttactcttaaccatattctacactcggctgtgtttattgtgatatgctgtgatctgcattctgggcagtgcttcatcattt

SEQ ID NO: 352118 - DNA, 58 bp, Zea mays; identical to SEQ ID NO: 77172

SEQ ID NO: 352119 - DNA, 63 bp, Zea mays
caagagatggaacgcgcagggtggaaaaagcaatgtttactttgcaaagacactggatgaaaa

SEQ ID NO: 352120 - DNA, 336 bp, Zea mays
ctcgcgggtcaacacaagcctctacactgacgtcatagtatctcgtgctccccccaggctcctcttcctcgctttccctccaccccgggcgcaaaccctaaccctaccgtcgctcgccccgcggcgtctgccaatggcgcgccccgtgtgagtgtgcgcgagagaggggtagaccttgaggccgctacccggggaggagagcgagaaatgtataaacaggggggagccgggggaagggctggggctgaacggaaacggattaacgacgcgctggataagcaacccgaaaaaggcgtcccctccccgttcaacgtcgaagggggtcggcggccggcg

SEQ ID NO: 352121 - DNA, 188 bp, Zea mays
  unsure (1)..(188): unsure at all n locations
atanccatccgctgagggcgtcggccttctggcccttctccccccggccgactccgcctctccggcgctccgtccgcttcctgaactcgtctccctcagggccgttcgcgtccctccgcgcgtcgcgcctcagctcgtgtatgacaccgccgttctgtcggtcgccacgtggggcccagcgtcctcgt

SEQ ID NO: 352122 - DNA, 128 bp, Zea mays
  unsure (1)..(128): unsure at all n locations
atacantccgcgacaggtgcagcacgtccgagacaggccagcacagacaggggaccggcgggcggccggccggggccccacaccgcggggcgcgtgcgcggtaagctgacgaggccccggtcgctcgt

SEQ ID NO: 352123 - DNA, 432 bp, Zea mays
atcagatgatgataaaaaagattatgaagagctggcggaaaatgtcatgaacattgttgatcggcttgttcacaagactgatcaaaagattgaacaatcaactgatgtgctgaaggcaattattagtcctgcaatgcatgaaggagatgtgaagtggccaccaagagatccagatacactcaaattgatggagaaagaaataacacgccgagaacaagaaggacaacttgatgagggatttctgtcagaagttagtgctcagttgaggcaagctaaacaagacggagataagccagggcttcaggctatgctgcaaaaggtgttgcagttatatgcttctaaatctctccaaaaacgtagttatgcatacaaaggggggcaagttgtagttcccgaaaagtttctcgaatgtgtaatacaggctcctgagaa

SEQ ID NO: 352124 - DNA, 403 bp, Zea mays
gaccttcaagtctcgctacgtagcagtgcaataaaaaaagcagccgcaatggcgagcagcaccatggccctctcctccacggccttcgccggcaaggccgtgaacgtgccgtcgtcgtccgccttcggcgaggcccgcgtgacgatgcgcaagacggcggctaaggccaagccagcggcggcgtccgggagcccgtggtacggccccgaccgcgtgctgtacctgagcccactgtccggcgagccaccgagctacctgacgggcgagttcccgggcgactacggctgggacaccgcggggctgtcggcggacccggagacgttcgccaataaccgggagctggaggtgatccactcgcgctgggccatgccgggcgcgctcggctgcgtcgtccccgagctgc

SEQ ID NO: 352125 - DNA, 152 bp, Zea mays
caaacgcgtccgcggacgcgtgggctgcaagcgcctgagcccaagacccatggccatggccgccgccaccgtcgcagcgtcactgcacgttgcgcaagggctcgggaaagccctctgcgccgggagcaaggcgtcgtcgtgccagggccgtc

SEQ ID NO: 352126 - DNA, 383 bp, Zea mays
cggacgcgtgggcgacagggtcgacgaaggcagcatcgttctcaggaaatccaaggcggtcggcttctctagcgacggagtcgtcctgcgagacagaaacgaaagcgtgagaagcgatatcgtgatcctggcgacggggttcagaggagaccagaagcttagggacatcttcactgcgaactggtgcagggagatagtggcagggtcaccggatacagcagctcctctgtacagagaatgcatccatccccggattcctcagctggctatagtgggttactccgagagcctcaccaacatatacgcctcggaaaggatgagcaactgggtagctcaatttctggccggcggcttccagttgccaagcgtgagatgcatggagg

SEQ ID NO: 352127 - DNA, 411 bp, Zea mays
gatctagatcgcgagcggccgcccttttttttttttttttaaaccatagtattcaaaaccatagtattcaaaactttgctaccaaacacactctaaaatgtttacagattacagtcacggctaaatcatagggaacactaggattagccatagtgccccttcggccttcccaacgccagttccccccttgaaatccacaggaatttaccgtacggcgagcatttcaaaggtcatttgtcccgagtttgaatggtttcttagatcaaccaaggtctgttattacatttaccccctgagattaataatctaatcactgtctacttaatcctcgtcgtcgtcttcttcgtattattcctcttcaacctcctcctcctcctccaccacctcatctgactccaacgacggtggaga

SEQ ID NO: 352128 - DNA, 146 bp, Zea mays
atttcgcgtttcacggcggcgcggatatagagccatcggcggcacactgaccgctggctaacggtacagagatgaccacggttatcctcagcgcctctcggccttccattgtcagcttcctcatgccgatgggggataacctcgtg

SEQ ID NO: 352129 - DNA, 103 bp, Zea mays
agggtggctgtaataaactgaccccgaacaagagacacggatgtaagaaagactgactgccgcacgtttggcacgaagtagcaagacagatagcttggggcgg

SEQ ID NO: 352130 - DNA, 190 bp, Zea mays
gcgggtcacacaagcgtctacactaagtcgcgatacactcatccgctgagggcgtcggccttctggcccttctccccccggccgacctcgcccctccggcgctccgtccgcttcctgaactcgtctccctcacggacgttctcctccctccgctcaccacgccggaacccggaagaggagagcgtcgctc

SEQ ID NO: 352131 - DNA, 149 bp, Zea mays
gagttgaggtcatcctcgatatatgctggtttagacaaactcagccttttcgctgtcttcttttgcttccaacaaaggcttatttgtctatatatcatataacaaagacgttgaggccatccttgatatatgcgtgaaaccctcgagat

SEQ ID NO: 352132 - DNA, 69 bp, Zea mays
agggtcggggaagggcggactggcgtcggtctgctagcggctctgctcggtctcggtgcgtgtaggggc

SEQ ID NO: 352133 - DNA, 107 bp, Zea mays
caatactctatactgacgtcgtattaacgcgtccgctagaggtacagcaccaaaaagatatgcaagagagataggggaccggagggcggctggccggtgctcaatac

SEQ ID NO: 352134 - DNA, 405 bp, Zea mays
catcaattcgtactgctcatgcaattcctggaggccctaggaattggttctgcagttgtacctgtaggctgtagctgccaatttagttcgattttgaatttggcaggtagttgttgtgcttgtttctagatgcaagagtgcttattgtttgtggtgtttgttattggaaattttggttggtggtagttatttgtccggaaaggttaatgcaatgctgtggcttgtcttgcttttagtcaatggtagtaagttgagtaaaatgttcatgtgtatgtgcagcttgtggtcggcagtgtgaaattttgacctctaattatttgttagtaatgtaattttctcaaaaaataataaaaaaagaaaaacaacaacagtaataaatagaaaaacgtgccacacaggatgggt

SEQ ID NO: 352135 - DNA, 231 bp, Zea mays
caacaagtcgtccaacgtccaggcttttctgttttctttctctcacgcaagtcgcaaagcgtctccaatgatggcttccatgagaactgaagcggagaagaaccctggaagcgtgttgttcggcattctcgctcaagggctgcatgggatgtggtacgtggtcgcagtggccgcgaggcaggggctcggcactgacgacgactctgggttgctgtgcgagcagtagcatga

SEQ ID NO: 352136 - DNA, 307 bp, Zea mays
caccatccaaggccctcccaaagtcccaaaggccgccgccgcccgccagcccaccatggccgcgcagtccttcctcctcgccgccactgccgccgccaggtcccccgcggtcttcgccgctccctattcttcggaaggccctttcaattcggtcaacttcgtcgccggcccttggggcgcggccgcggcaagggcgctcgtcgtcccggacgccactaggaaggccgtacccgtcctcaggggcgcgtctgaggtcgagggcgtggtcacgctcacccaggacgactagggccctaaaaggtgtgaa

SEQ ID NO: 352137 - DNA, 430 bp, Zea mays
aatcttccaaaacccaacgcggcaaacggctaatgttccttcctgtcaccatggccgtccacaccaccacctcctcctcacatcccctcctcttcctctatcgcggcaccgcaaaccctagccccgcggttctctccttgccttcttctctccgtggcgtgtctctccgctcccgggccaccgccgcaccgcccgcagagaccctctctgacgacggcatccctgacgcgccaccggaaggggagggaacgggaattccgttgccatcgtcgattggggatgatggggagcagctcgcacccaagcagaagatcagaatcaagctgcggtcctactgggtgccgttgatagaggactcatgcaagaagataattgaagctgccaaaacaaccaacgcataggaccatgggtcctgttcctcctgcccact

SEQ ID NO: 352138 - DNA, 394 bp, Zea mays
accacgcgtccggttctacctgaagtccacagcgtggatgtggtgatccttatgttcctgctggtgctaaactcctccccagtctccagagtaatatgttccagagctatacacactgtcttccttggtctggtgaccgcacccatagattctcttacctcaccatggccaagtcatctggagcagttgtgcatctggggccatgccaccgtggtctggcgctacggacagcctccacgccggccgagcgactcacgctttctccggccgtcttcacgcgagcaccaaagtcttgccatggcctttaactactaccgaagcacttggtgtgggtctgctgcagctaataagaacaatgaagaaattgaagcatgtgctgttttggttgcaacat

SEQ ID NO: 352139 - DNA, 328 bp, Zea mays
accacgcatccgcggacgcgtgggcgagtacgtcgtgcaggtcgacaaggtgtccatcgcgccggcgtgactcgtgagggcctgttggggcgaagctacattattcttagaggtgcaaattcacccaaaaatatacaaaatctataaatttagttaagatttcaatacatttacatatgcatctttataataaattcttatgcacgtataaaaaaaaaaaaaaaaaaaaaaaaaaaaaaaaaaaaaaaacaaaaacaaaaaagacgaaaacaataaaaacaaggcaagcctggcgagcaaacaaaaaaaaaaaggggggcccccccaa

SEQ ID NO: 352140 - DNA, 410 bp, Zea mays
cggacgcgtgggtgccagtgccaccatctcgccgtcggcgtcggctcgtcgcctgagagccgaggccacgcaggcacccgggccgggggatgtcggcgccggcggcacaggccgtggtggcgctggctctcgcggccatcctctcgaccccggcgccccaggcggacaccttctccaacgtcccgcccacgctctccgggggcgacgggaagcaagagcggatcaagcaccccaggtcggccaaggcgttgcagtgcacgaccaagtgcgtcggcacctgcatccgcggcggcggcggcgcgcccggcgaggggcccctcaacgtcaggaggcccctcgtggtgttcaaggacggcttccgcagccggcagtactggtgggtactactactacctgcactacagccccct

SEQ ID NO: 352141 - DNA, 266 bp, Zea mays
atgaagatgagacagagctgtgtgggagaaacagaaacatgggaccttctcttgtgtgacggcgaaatagtgtagcgctagcgcagcaaccagcaaaaggctcatgtaaagaattgttcacgaaacagaagagcttcacttctaccttctgtaggacatggtcatcgcaagaggcataaatcgcaaaaggcattggtattatttcctgctggaagtaatttctgccgggacggatattcattttcagggtgaatttgaattttttt

SEQ ID NO: 352142 - DNA, 104 bp, Zea mays
aggacaacctcgttgttcatgtataaacctagctatattctgctttatgagcatatatgtgtgtgtaactaaatgaatcctccacacgtgctgtgctgctggat

SEQ ID NO: 352143 - DNA, 196 bp, Zea mays
aggacgcgtgggcgaccgcgaccggtgggcggcggaggcaaggtggggtgggtttctacttctaccacgacacgcgcgcgtgatcttgcggtggtttcatcagctcacacacagagaacaggatcaggatcaggatcaggattaggacagatgggaaccgagaacggtagcaacccctcctcgaacgtcctggatg

SEQ ID NO: 352144 - DNA, 415 bp, Zea mays
accacgcgtccggtcttccctatagagccaatcgcaagccttgctgccatggaagttgggaggggagcacgtgcccaggtgcccgtccaggatccaccacaaccgccagtgccttttacaggtcatgccgcggacggcactgcttcgccttgctgcagcttcgacgcgcgcgtcctcggctcccgcggcgcggcggctgtactcgtcctcacactcacacggacacggcagcgaggagcacgcgatcactcgggaggatgagcagcttccaccgccgccccacgggccggaccccggcgtgcggcggctgcctcgtcgccgtggagagcatcggtgagcatggatagatagtaagcttgcattcgagcacttctgcagttctgctcatgcgaatacccagtgtttcttttctgca

SEQ ID NO: 352145 - DNA, 233 bp, Zea mays
gaccacgcgtccgcccacgcgtccgcccggttccgcgtgcctttccccacctaatctcgcggctctcgccaaccagttcaagggttccggtcccgggttgctaaaccgcccccgccggcaatttcaaaccaagggggaaaggcaaaccccttaaagggcccaaaggccacaagaaagggtttcaacaaacaggtcttggacatctgcagaagaaaaaagattaggaaaaagca

SEQ ID NO: 352146 - DNA, 193 bp, Zea mays
cgcgtccaattttaggcaacacgcagcagtagttacattgggcatagtgttgtaggctttaaagggaaccatcaaaaccctaaattacatgtatgagggattgaacgtgtatataaagtattcagtggtaccactttacaaagctggcccggagattgataatgttcacaaaaaagaggtgtcccttgataat

SEQ ID NO: 352147 - DNA, 418 bp, Zea mays
ctcgtgggtcgacacaagcctctaaactgacgttgtgactaagcgtccgcccacgcgtccgggatagacttagaagctttggagaagggaaagacccaaccacagaagaaaatcaaactgcagaaaagaagtgttcttcacaaatgaatctgaaaaattctgctcgttcatcgtctgtcagtatcgtttgggaaagctgtctgaagcattaacagttttacttaacgtcagatgtgtaggactgatggtcaccaagttcccggtgacactgtatacaatcgcagacgcgatgctatgttggtgattgaacaggtgtagccgaatagttggatccaataacttcacctgtaatgtaatggtccaattttatcatgggaactgtagttctaaatactccagtgaccagtgctattgtggt

SEQ ID NO: 352148 - DNA, 387 bp, Zea mays
acccacgcgtccggccaccggacgaacacacagatcgctacagcccgcatgaccaacctctccgccatggcagcgagccaatcctacgtgatccgattcgacggccacttcgacgagccgtcgccgagctccgcgggcgccgagccgccgggcccgcagccgccgttcgcagggaggatgatctcgctcgagcgggagcaccaagtcattgtcgccgccctgctgcacgtcgtctccgggtacgccacgccgccgccgcaggtcttcacgccgccgccggcagcggcgcgctgccaggtgtgcgggatggagcggtgcctcggctgcgagttcttcgccgccggggaaggcgcattgggcggcggcgcggagaaggcagccgcgaca

SEQ ID NO: 352149 - DNA, 159 bp, Zea mays
aagtatatttccaacttatactttgaacgcgcttcgagaggaatatacataggccactgggaatcagagcagttcatggctctcacatgcaaactgtgcgcacagatcgtttctcggacactggacagctgaacctatttgacagagtgcccagcagca

SEQ ID NO: 352150 - DNA, 402 bp, Zea mays
catcaacgaccgagctcttcatcgtttaataaacaactcttccgtttttttttcaagatcagtctaactgctgagtgcatgtgcttcggccgcgtacgtaggtgaacacggcatgggctctgggtctcattgttggtccagctcttggaggctacctttcgcagccagctgagaaatatcctcacgtgttttccaaagactctgtatttggcagatttccataccttttgccctgtctaagtgtatcagcgtttgctacacttgtcctgataagctgtgagtggcttccggtatgtatcaacactctttagcctacacaaaagccatgatggtttaaattttattcctttggaaatcactaacactgctactcgtctgaatatattacaggacattgtcatt

SEQ ID NO: 352151 - DNA, 426 bp, Zea mays
ctgctatgctacacctcctctgcagttcattccgttcgatctccataaagaccttcctgagctcctcctccaccaccgcgcggtgcatattgtattaggctccagagaaacaaaggacggagagcaatttcgtcgtaggctgttttcccttcgtttcctcctcgatcggccggtgaacgaacggtgataataataatgagatacccggtcgtcctcacggcggcgttctccgcagcggcaattggattcttgatcggaatctccttcccggtgcaaatcacgcccaaggtatacccgtccagcttcgtcgctgacgacgcggacagcagcaccctgggtctgggtgacagcaatttgctcggaagattctccacggcacgcaatagctgtagccgtgctacttctaccgtgggggcatctcctcct

SEQ ID NO: 352152 - DNA, 391 bp, Zea mays
  unsure (1)..(391): unsure at all n locations
ggctatcccggcgccgtgcgcccttacgtgcggccggctgatgaacctgagcgagaggctcgtgctggttggcggcatcggcaagcaagataggcctggggtcatcaagggaatcggcatctgggagctccgtcgcaaggagtggcacgaggtcgcccggatgccccacaggtacttccaagggttcggcgagttcgacgacgttttcgcaagctgcggggcgcgtgatcttatctacatccagagctatgggtcgccggcgctcctcaccttcgagatgaaccacaggtcgtggaggtggtccgcgaagagccctgtttccaagaggttcncgctgcagctgttcactgggttctctttcgagccccagctggacattgctctctagttt

SEQ ID NO: 352153 - DNA, 236 bp, Zea mays
tacagacacttgtgctaaacccgcacgagacgacaccatgtcgaggagctcgagggcacaagtcatggccggcgtgaactccagcgtcttcgggctcaagccagccgcggcactgcggcaggcttcgtctgctcaacgcccgggaaaccttttcaacttggctggccccatgggcggctacgctccactgctcggcttaacggccttcttcgccttaacggcaactacaggttcgg

SEQ ID NO: 352154 - DNA, 389 bp, Zea mays
agatcggaacgtctcatgttggtggagttggtgtccggagtggtggggtcggcgctgcagcggaagcagcaatcagcgattctgaatatgggaatgaacctgtgtaacgtggcaacctggagctgggatatggacatgaagtcgaagatcaggaggaagatggtacgcaccagctgttctggggctccgtgattggcgatatgaagaagatgaaaatccattgcgacaatatctttggggagcagaatacccatcaacgatacacgcgcatgaagcatgatgtgaggattttggattccctgagttgaacagcttcataggcctacaagtagtgaaacgtccatgtgttggctgtactgttccgtcactaggagcagctatttatccat

SEQ ID NO: 352155 - DNA, 325 bp, Zea mays
atccctgcgagtttcagtgcaaggcagcatccaatttttttgcaatatcgtcatgtctattagctcccagtcccagtgctgaaaagcgaaatgtaaactagcattgtctgattgcatgcctcagtttttttttccccttggccccaagtgtatgaactaatggtacacctacttgttcagctgctctaggcctgattctatttggagcttgttgtggcagagatttcatctcagtttacaaaggctagtgatgctagaaggtgttcctgccaaaaaaaaagaagaaaaaaaaaacaaaaatgtaaaaaggaaaaacaatgtcaag

SEQ ID NO: 352156 - DNA, 363 bp, Zea mays
accacgcgtccgcggacgcgtgggcggacgcgtgggcggacgcgtgggcggacgcgtgggcggacgcgtgggcgccaccgccgcgcgccgccggcggcgcaagggacgcacgatggccatgcaggtggtgcgcaacctcgacctggagcggtacgccgggcggtggtaccagattgcgtgcttcccgtcccggttccagcccaagacgggcaccaacacgcgcgccacctacacgctgaacccggacggcactgtgaaagtggtgaacgagacgtgggccgacgggcgccgcggccacatcgaaagcacagtctggcgcgccgaccctgtcagcgacaaggccaagctcacggttctcttcta

SEQ ID NO: 352157 - DNA, 127 bp, Zea mays
cgaccacgcgtccgaccaaacgtccgttaactcgtgggcggacgcgtgggcgggcgcgtgacgagttgtctgtgaggtatggtgggagcgagttattcttcatcagccgtcatgttgcgatctccaa

SEQ ID NO: 352158 - DNA, 306 bp, Zea mays
gatcgttactcgtcattctagcccgggaaacacgcccggtcgaccgggggtggaaaatatcctagcctggaccgcaagcgaacgcgaagggcacgcgacttctcgtcggcgtcgatctgctccggcgaccgcttctcatcgacttccaggggtcgagttatgtatgaagtagctccaatctttagaggaagaatgtcttctcaacgggttttatgtacttgttctatcaaagagtgagatgaatcattatctagatctatgatctcgtcatgtttagtacactggaaatgtattcttttgcaactt

SEQ ID NO: 352159 - DNA, 400 bp, Zea mays
acactccgccatggaaggtgcagccggccaaatgctcgtcccgatcctcggcatcgttgccgtggccgccgtgaccttctacaccgtcagcttcatggagatgcgagacaaatccttcgaggagctcgacgagaagtactcggacttcgacgagtcaggcgggcggcagcggcggtctcgccgcagggccgagcgcgacaggaagaagtccaaatgattggccacgccgccatttgtgtccctgctggtttgagaggggactgacgggggatgaagacgcagctgctacttacaaatttttgggtttcaagtcatgggtgagtgtgagtgtgtgtggttatgaacatctgcctatttcctagctattagccactgaagcagctaaaacgatggatttatt

SEQ ID NO: 352160 - DNA, 377 bp, Zea mays
ccccgtgactaactcgctggcccctcccaatggccaagcgaagaaaacaagccggcgagatgtgggtttcaaattccgcctttggggagccctcaacctcctccccaaccggctttggctccccggcggcgaacccggcaacaacaagcctttttcggcaaaggaaccggcggcgagaccggacaaagcgggaaacagggaatgtgaagcgcctctcaacgggttcgcagaccccggggcggaagatgtgtggtgtggggcacagtgagaggcggtgtggccggagaggcgagactcgaaacctgtcgtgctcgcgggcggacacaacgcggtggggcggtacaagaccctcacgggcgaagatctcgaggagctca

SEQ ID NO: 352161 - DNA, 406 bp, Zea mays
  unsure (1)..(406): unsure at all n locations
gaagacaaatcaatatagtatttaattgttgaaacagatccgtcatgtggcatgtgcatatatacatggatccacatccaaataaactgggatgtgtatgtgtggtgtcatgctgtcatcattactattccctgactgacagttaactaatacaagaggaaatccatcaggaacacctactaattaaagctacagctacagcaccagcagtaggcactatactaagcagaagcaacaccaaattaaacaagacatatatctcttgtttttgctactagaatcatatgcatgcgtggtgctccatcgtcctcacgcgacgccgctatcaattcattaattagcttgtgaaaaaacanagctaatgaattaaggggggaggggacangaatatatgcaatctagtgaa

SEQ ID NO: 352162 - DNA, 434 bp, Zea mays
gacaaatctcaaaacctaaaaaaaaaagaaaatatttagttactgcttgacacaaatgattagatgccacataaaaatgtttctaaattgctagatagtttgattgaatatatatacaaattttagatgacataccctaccggaaaattctagatcagtgcttgcttcgtctttttttattgccatctactgtcacgggtaaccgtataatacatacctcatattaaccgctaaaactttgacaacaattttcctcggcgtagtacaaatccctcatatgacgcgttgggtaaagaggaggtagtggtttggtcgactcaagcaacccttttgacccttctagtccagtcgacagtaggtacgctgcattcaaccctttacccttttgataagccacaatggtatggtcaactttggggggctcatggcatgga

SEQ ID NO: 352163 - DNA, 403 bp, Zea mays
ctcctatcctatcatccgtcggccaccgcgccgctccgctcacgcgacgcgccgtcgcgccgaagcccggcggccttgacccttaagggcttgaggccgtgaccgccgtgagccccttccgtgattctgttccctccaggtaggctgccatccctccagcgttggcacaagcggtcaggctgccaggttggggcgttgagctgccacctgcacctgccaagctggggcgctgggctgccatccctccaggagccgacgctgccgacctatcgctggtcaggttagtgatctgaaattctgaagtccatccctccaagctccagtctgcctgtcacgtactcaggttagtgatctgaaattctgaagtcaactagatggagttcaacttacaagatgttgcata

SEQ ID NO: 352164 - DNA, 426 bp, Zea mays
cggacgcgtgggcggacgcgtgggtgctgatgtaactgttatgtctgaagcgatttcaaacgaaagagagaagaacaatgctagtatgcctcttattcatggaaaggcattataccaacctaataaaataaaattaaggaaacctgcaaaactttggaaactccggtgggtccaatttccgacaatgcgaaggaactgcattccatggtaatgaagcttggacacctttcaagtcttcatgctgggaatcttcacaaggctctagaagttccaggagaaagggaatctatgagatcccaggatttgctctcaacacatcctgatcttttgcaaagtgattcatcaactgagaaggatagagcctctcttggcatggattctggctctccagatttggaattgaatactgacatttgtttgcaagat

SEQ ID NO: 352165 - DNA, 302 bp, Zea mays
ggagaaagaaggagaggaaggtagccccctttccatggaaggatccgccactgctgagggccgctcagggttacgacaaatggcgagtgtgagctctctcgtctctcctatataaagggaggacgcgccttggcgcaaaagcaagccccgcgcgccaatggccaaccgagcagaaggcgccgccgcgggtgaccgcgaggctctccagaacctcttccttgacgtcgcgcgcgtgctggtggtgttcggccggcgaacccgtgctggcgttcctcagcctcctgctctggctgctcggcgtg

SEQ ID NO: 352166 - DNA, 251 bp, Zea mays
atcaggcgtccgggaatacagtatcaacatggggttcatgaaactatcggccatgtaactcctgagtacattcagacaggaatgccatcaatgcagactgatatcgttggttaagacgtcatcctgttagaaatgctgaccgggaaccttgaaatgcaatccatcctggacgtatatgaaaagcaagccaaattcctgcaaatggtttagggcagccttcggatggaaaagggctaatactccaccttatg

SEQ ID NO: 352167 - DNA, 58 bp, Zea mays
tcgtggttcgatgtacccctggtcatgcctctgcatgttggtccggtctcgcttcttg

SEQ ID NO: 352168 - DNA, 385 bp, Zea mays
  unsure (1)..(385): unsure at all n locations
caagaacgcagaaccgtgacccacgtgctcgcagcgtaccagcagccgtcgtcgccctcgcaactagctccctgctgaacacgctgctgcatcgtaagctcgctccgttcgctgggaagagctcacggccgtccgtggcgcacgtggcgcaccgggcgccgacggctcgtgtgtggcggccagggggtacattgttcagagtcaagtggacgataacgatcggggaggagtccatcttccgtacgttcaggcgggacgtgatgcgcgccggtgtgctgcaggatatcaagcgcgatccgaagtacgagagctagtcggaacgagaagtacgcactgctcgctacgcctgacgcagtanacgtcgcaggggtatgatgggcagagc

SEQ ID NO: 352169 - DNA, 60 bp, Zea mays
accacgcgtccgcaacattacatttgtatatggtatatgcaggaaatagtgtaatattac

SEQ ID NO: 352170 - DNA, 380 bp, Zea mays
gttaggaacgagttcaagaatgacatcgcttgttacgttgactacgtgtcgactgggtgtcatgttcggctgttgtccaaggtgtagaatggcattatcggtatgcgatcggttttcttcaccccgcgatagccagcggcttctgagtaccggacgttcctgtcagggattctcgctcaggcaccgcgcagctccttgcgcgactacctgtacgctctccatacgtcgggctgctgatctatatttctcctgccaacaatgtgcgctctagcctgatcgctttaacgagtctggttacctgtgctactagtacgacgtgacaggtgccaacacacatagcctcatatccgtgacctgcgctcggaacattctctccacgc

SEQ ID NO: 352171 - DNA, 126 bp, Zea mays
tctaaagtgactcgtgctaatatggacgtcatccggtagtgggagccactcctgcgtcaagggtcgtaggtcaagcacctcaaccactccaaccacaccatcggtcgacttcattaccttcatcaa

SEQ ID NO: 352172 - DNA, 359 bp, Zea mays
gtcatgatgctgcggcagtcgtcggcggcatcctactactcgtcgtacgcagcggcagcggagacccagcagctgcagctggcgagggccaggtccacgtcgggggcggggggcatcctcctccactcggcgtcggagagggccgagcagctggcccgcgccaggtccacgggcatcttcgcggaggagatgctgacgccggcggagtcgttctcggagctgtcgaggatggggagcatcggcggcggaggaatgcaggcggtgaagatcagcctggaggagatggcgcggatcgaggaggagcagcggtttatcgagcgggagatggaaaagggggtggtgtacatcctcggggagag

SEQ ID NO: 352173 - DNA, 424 bp, Zea mays
accacgcgtccgagaaggctgtagaacaccggctggagggcacgcattatcccactgtgcagatgggcttccactactgaatgtcggtgagccaccagacggatggcgtagagggacagcaatctcttccaatgccagatcccagagaagcagttgggtatcctaagtgcaagcaaagtgaaaagatacaagagctgcaactcagcaagattggagtgggacagccaaaatacaatgaagctgtcacttcacatctaacacactatgttcgtcttcgctgatgcatgcactacaagttgtaagtcaagaacttagtatcttccatgcatatgggttatcgttacttttgtcagtatctcagaccgtgtccagcagctttttcatatgattatccaaaacactgttttacattgttttgcactgt

SEQ ID NO: 352174 - DNA, 52 bp, Zea mays
ctcgaaatgtaagagaccattgttttatagagctaatggaaatcgtttgaac

SEQ ID NO: 352175 - DNA, 136 bp, Zea mays
  unsure (1)..(136): unsure at all n locations
gcagcaagctactagctagcctactacagcctcatcacttgttagcctagccatagtccacacgacaaactgatcgatggtgcccaccaagagccatgtcntcctcgccgctctcctcaccgtcgtcgccgccgtc

SEQ ID NO: 352176 - DNA, 227 bp, Zea mays
accacacgtcaggtatccagtatcacggcgacgaacgatgcgctcatgctcatgaagaatagaccgctgcagaccgtgaacatcacagtgacgatggactgctatggttgccagcgtcacgtcaagagcggtgtcaactcgatgcacggggttccgagcgtgacggtgaacacgtcgcagagtacgtgcacggtgaacgggtaagtcaagtccgccagggtgctgga

SEQ ID NO: 352177 - DNA, 286 bp, Zea mays
cgcacgcatccgactacgcgtccagcactcagcctcacggtcacgtgtgcagcgctgacgcctgcggccctacgccaggtgtccagggcatctccggccgattcgccggccaccaacagtccagaacatcaaccgagatatgcactgactgtggtatccgggggacgaactctgccggcagcccaatgtggtggaggaccaccagtggtcgctcatgtcatccacgctggcagatatcaccacgtccacgggccagaggaccaaccagctcgacgacccaagtatg

SEQ ID NO: 352178 - DNA, 248 bp, Zea mays
  unsure (1)..(248): unsure at all n locations
agacaagctgctggtgctttctgccgaaggggccttgaatgaatggtgaaaaccgctggatggttagaggatctgcatcntcttgtgttcttctgtaaaatactgagacttgggcagcataaaaagcttggcaaatttctgttgtgtggcaaaaaaaaaaaaaaaaaaaaaaaaaaaaaaaaaaaaaaagaaaaaacaaaaacaaaaaaaaaaaaaaaaaaaaaaaaaaaaggggcggccgctcaaaa

SEQ ID NO: 352179 - DNA, 117 bp, Zea mays
cccgacccacccatccgcccacgcgtccggcaccaaagccaaagccaaagaatcctcttgacttgctgccaccaagcaagatggtccttgatgactggaagaggctatactcaaaca

SEQ ID NO: 352180 - DNA, 345 bp, Zea mays
  unsure (1)..(345): unsure at all n locations
cccacgcgtccgcggacgcgtgggcggcggaagagaaggaataacacgtctaagcagagggacctggacgcagtgctgagctagtgagtagtggcctagtgtgctgtattatgaaaatgcataggtgggcactgaccctgtgtaattgcggttaattcggcacacatttttttgttgtacataacgtttagtcccatgagggaagatatgttggtcgctcttgaaattggagtatgttgtcatacagggcccagaagaactcaggtcttgcaccggaggcctggagcccaggcatctttcagttgcaacacttgatgtanaaaaataagaaaaaacattttacct

SEQ ID NO: 352181 - DNA, 135 bp, Zea mays
  unsure (1)..(135): unsure at all n locations
gcgaggaaggtcgacagctgcccaaaggcgattctgtggcttgctanattcaaggatttcaaaactgccctgttacaaaagcttgaagaagactccaagcaacaacaacaacaaaacctcccgcaactccttgaa

SEQ ID NO: 352182 - DNA, 224 bp, Zea mays
  unsure (1)..(224): unsure at all n locations
cggacgcgtgggcggacgcgtgggccaaggatanggccgtctggtcccagcatgatcagcagcgccgggatagaggactcttcgcagaaaaaccggcgcggccggccgccgggcaccgccaagaagcatcagccttcgccttctcaaggcattgctttcgccggttaagctggaacaagcttcattcggaaaatcatcacggcttctccttcaaaggacttggc

SEQ ID NO: 352183 - DNA, 211 bp, Zea mays
aaaaaaaaacaaaaacaaaaaaaaaaaaaaaaaaaaaaaaaaaaaaaaaaaaaaaaaacaaaaaaaaaaaaaaaataaaaaagaataaaaaaaaaaaaaaaaaaacaaaaaaaaaaaaacaaaaaaaaaaaaaaaggggggcccctcaaaaggttcaaatattcctttctcttgcatgcaacttcaaacccctcccaaattttccccaaat

SEQ ID NO: 352184 - DNA, 402 bp, Zea mays
aattatttgcctttttaagtagcagtttaattgctagcacacctttaaaaattcttcaaaatgaaattaaaaacagagcaaagttgaaatgagagcaaacaagcaccatagagggaaagtgaactatttgaagcaactctagcaagcacagtaacatacatacctcatcatgcattattttaaatgcttgtttaacaggaagctgagtgtccaaaactgttaactgaaatgttcatatgaagaatttttaaaggtgtgctagcaattatttgcctttttaagtagcagtttaatttgttttcctattatgttttgcagtttaaaaacacaacaaaatcgctcctagaagcaggcacttctttcatctgcactgcatacgtggcatcagtttaataatttaag

SEQ ID NO: 352185 - DNA, 220 bp, Zea mays
ggctgaagagtttttgacagattggactggtagcttccccagggtcagaaaaaagaatgtgactcactgactgtaggggaatgccatggaagtgtagatgtgatgtttcttctcaattgtatatgccattggattgatgtttggaaattttacgtgtagtatgtctaagataagtccttttatgtactggttccgtgaacctataaaaatgcttcagctg

SEQ ID NO: 352186 - DNA, 62 bp, Zea mays
caaagttagtccctttttttacagataatctacatatgatatgaaattctagtgcaattaat

SEQ ID NO: 352187 - DNA, 66 bp, Zea mays
gtacgttggaaccttcctggttggactcagagacagcagctggcactatatcctttatatcactat

SEQ ID NO: 352188 - DNA, 415 bp, Zea mays
agttcttctcccttgcgtctccatctccctgccccagcgcctgctcccattgccgcgcgtctctcccatgacgcttgcccagtccggccgccggtgacagggccgctcgcagcatcttcctcatctacgccgatgtcgtatgaaaattgtcgcgctggcacgtcgatgtcgttgatcatcatcctcatctacgtcaagccccaaaccatgaagatgctcttgtgctggccacgcgccaccagctcgacaaaatgcatcccctgagtatctggtcaaaaacgagattatgtgcaccgctcgtcaggtgtgtgcgatcatagacgtcaagcaaaaaccattgtcgttcttccgactatcgtgtcagatcggtcatggtaagctgatctattattcctgctagctaaaatgttgaatg

SEQ ID NO: 352189 - DNA, 66 bp, Zea mays
ccttcggcttttttattgtatcggggctctatttcgtgaattaaacctactcaattcgccgctctt

SEQ ID NO: 352190 - DNA, 405 bp, Zea mays
gcttggcagaacaaatattttattttctttacatgtctgcgtacgaatttgtagctgttatatttttatgttattgtcatatcaccaaatgagatagcctcacctgacttttagattataataaataattttttcatagcactcttttgatttcagttatcggatcccgcatcgtggaatgcttgccaaagggaggaaggtagctggaaggcgtgaagaaatgtctgcaaattatgcgtttggaccacaggatgatgatgcgattattaaacacaggcttctgactaggacaacgaccaccaggggtgaaccgccactaaagaagcttcagaagaagttcatgtcctttgcaactgagatcgagaaggatgcagataacataagtgactgtgaaagactgtacaa

SEQ ID NO: 352191 - DNA, 384 bp, Zea mays
cagacgcgtggggcagcatatatcaccgagcaccctctctctctctgttcccctccctcgctcgacatggaggtcgccgccgccacttgtacgctccttgctgccgtcgccctaccagtttcgtcctcagcagcagcagcacgctctgcgacgaaacagagctactcgaggaggaagacgacggccgtgcgagccgtcatgcgaagccgcatcaggtgccgccgcctgccaccgccaccgccaccacgtaccgcgacaactggttcgacaagctggccatcgggtacctgtcccgggaccttcaagaagcttctgggatgaagaacagagaggacggctacgacggcctgatagaggcggccctggccatctccgcgctgttca

SEQ ID NO: 352192 - DNA, 453 bp, Zea mays
acgcctgcagtacctgtcctagactccgggtcaaccacgcgtccgaccacgcgtccgcggacgcgtgggtagcttagagatggctgtgatgtcaacgcctcagcattaatttggacttctaggccttccttgcgtatttatgctttatataagcatatggggtatggtcgatcttgtctattgcccttcggagttcctttcaacttcacttgagcctttgatgggacaattggagtcatgtgcctctgctcagaaaatcagtttttaactgaaacccttcccttttgcttgcttccttgcttcgtcaatggtgataccagctattttagcatcaatcttgacggtgtgaatcccaaatggctgtggttttaatcttcctgggtttttttggcactcatgatattgatatagctatgatgttattgatatagtatactcccttcaatcattttt

SEQ ID NO: 352193 - DNA, 88 bp, Zea mays
aaaaaaaacaaaaaaacaaaaaacaaaaaaaaaaaaaaaaaaaaaaaaaaaaacaaaaaaaaaaaaaaaaaaaaaaaaaatcaacaac

SEQ ID NO: 352194 - DNA, 313 bp, Zea mays
actgcctggatcagatgcagttacagggggagatgcgagcagcatccgacggcgaccgccatgggcactccgaggggtggcgtctcctgcctgtgccggccctgcaattgcccggcgtgcgggctcccgacctgcctgtggagcatgctcctttctcttcgtgttctcatgagagtcctctccactcatcgtcgagggtatcatcgaagcgaatattcattcggtcaccgtggactcgggctcgggctaccacttcatgcattcagggtcttcgattttctactactatctcaaggtgtccaggactgtgtgt

SEQ ID NO: 352195 - DNA, 111 bp, Zea mays
agctcttccttctctctcctcacttccgccgcgtctcgctggtgcaaaggctgcgtggggcctgcatcgtcgccagatacgaacgcgctgtgcacaggcagctaggctcat

SEQ ID NO: 352196 - DNA, 101 bp, Zea mays
agttcgaaacaggactcatcaccctagtttctaatttgtatatatttagcacccatccatataggatgttggtgacagtttattttttccttttaattttt

SEQ ID NO: 352197 - DNA, 106 bp, Zea mays
aaaaaaaaaaaaaaaaaaaaaaaaaaaaaaaaaaaaaaaaaaaaaaaaaaaaaaaaaaaaaaaaaaaaaaaaaaaaaaaaaaaaaaaaaaaaaaaaaaaaaaaaaa

SEQ ID NO: 352198 - DNA, 418 bp, Zea mays
atagaatcaggcactttatgcctatgcttgtattcctttatcagattttagctcgagctatggcgctttccttgtacagcagtacactatagtttagtggcagctgtatgggcttcagatcaaacatggtgctggttagtagtcttcattactggatatcgatgcctgaatcttctctttaacaactaccaccgtttttttttactgcagggccttcatggaggcacatcttccagcctttaaggaaaagaatccacacttagaggtggtgacagagcttgtccgcggtcaacatcctaacttgaagggaatttacaactcattcaattggctttaatattctcggtgtcaacgtccgttgaaagggcattttcagcgatgaaaattattaagatctatttacgaaacaagatggctg

SEQ ID NO: 352199 - DNA, 120 bp, Zea mays
accacgcgtccgaccacgcgtccgcggacgcgtgggtagaatggaagagataattcaatttattaagttttgaacttctacttttgtttagaatttaggcattatttttcccttgcttcc

SEQ ID NO: 352200 - DNA, 181 bp, Zea mays
acggcgaccctgcccctgccggcgaaccagtaccaaccccattgcaaggaccagcccagcgtcgcatctcaacatcccgcatctcccagatcgtgcgcacctacctagacctctccagttccaggaagcgccgttccgctcctaagaaccagcccaaggccggggacaaggaaagggatgc

SEQ ID NO: 352201 - DNA, 386 bp, Zea mays
  unsure (1)..(386): unsure at all n locations
cagaaggtaccaagctagtaggtgacaagcagaggagaagccttacatgtcaataagggcctacctctgatagccaaggatgacttgcctatgtcctttgtttacaaaggacctgaatgtgtggaccattgagaggttcatangcagtctccttggctagcctgagtggcccctattgctcatgctaggcttaatcgagactctttgacttggtgcacgcaattagacacaggagtctcctcgacttgtgcatgggcgtgcatgcaattagacacgaccttgtcatatgtagctgtgtttcagtgtccatgcatgctccattcctagcattttcttgaaaggccaatatagcttggcagtttctctggaaagaatcagcatcaaac

SEQ ID NO: 352202 - DNA, 388 bp, Zea mays
acgcgtccgaccacacgtccgcccacgcgtccgggcgaggtttacgttttcgaatccgtcacccccgagaaggttcaagctgtgctgctacttttaggacgtggtgaactaccacctggtttagctggcatggttttacccaatcaaaatgaaaacaagggctatgacgatatacttcagaggacagacattccagcaaaaagggttgcttcactaattaggttccgtgagaaaaggaaggaaagaaattttgataagaaaatacgttatgctgttcgcaaagaagtggcactcaggatgcagcgtcggaaggggcaatttgctggaagagccagtctggagggagaatctccagctcctggatgtgatcctggttctcaaggctcaa

SEQ ID NO: 352203 - DNA, 201 bp, Zea mays
gacgcacgcctctgaaatgactcgtatgaaacaccgccgccgccgcgccttccattccagtactcgcggatgaacggaacaccagccagcgccatgggcacgatcgacgacctccgcctccgtgctgtccgcaccgtctgtggccgggcctctcctgtcgccttctcgccaggcgcgtctggtcttccgcgcggctcggtc

SEQ ID NO: 352204 - DNA, 79 bp, Zea mays
  unsure (1)..(79): unsure at all n locations
aaacatngaggccctacccggtcgatggccgacggcggcaaccgccggccgggcggcggcaaagcagcggtgcccgtgt

SEQ ID NO: 352205 - DNA, 144 bp, Zea mays
taacattttgccacttaaattgatggggaagacactcagatgtgtaagttaagaatgcacagttcctacgtgtaaaaagcttagttccagtacttgaactctcatcagttgggacaaaatcgcaataaaacctcgaattgctct

SEQ ID NO: 352206 - DNA, 205 bp, Zea mays
aatgcgtccgcccacgcgtccgcccacgcgtccgcggatgcatcggcatcgtctcatccccggcaaacggcacgaagccggatttcgggccggcccctcagggggtcgagcatgcgcgcgcggtcggctaaaagttccggaatgagcttggcgagattggcgtgcccgtgggttcagtcaagatttgtgaactcgccgtcctcat

SEQ ID NO: 352207 - DNA, 175 bp, Zea mays
atatcgatctccacggagcttgcgcaggagctgggcgtttacgcgttgtccttcgatcgccccgggtatgccgacagcgacctgcgcccggccaggaccgaggagagcattgccctcggacgtcgcggaggtcgtggatagcctgcaggtgggtcgcatgttctaccttgctggc

SEQ ID NO: 352208 - DNA, 384 bp, Zea mays
actacgagtatgcccatacgtccatgtgacgtatgctacgatatgatactttgaataccatattctgacaagtatctccaacgagcatgctagtgcagatcaccttgtctagtcacgctatgcatttatcaatggtcacttgcatcatatttcgctcagaagttttagactttccagtggtcaaatgctacgtattcaatcgatgccatgttactctctaactatgcacactctctctcatgcaaatgtctactgccttagtgagtgtaattaattatcacatctgtcagggagagctacaatcgtcaacaacatgctctaattaatgtcataatgactctttcatcgtgtctcaaataacctggatttttccttttgccttgt

SEQ ID NO: 352209 - DNA, 344 bp, Zea mays
attacaatacatcgtacgatggaaggttcaacgcatagttcacgcaatttatgatgtccacgggatgttgagtgtcgtcgcagttggtttggcaactgagatgtctgtccaaggaaaggtctggaacaatgttgtgtatgtggataagcttgtgtagcagttcagataactgccaatcgagcagcatacaatacctgacgttggatttcagcaacatccttacgtgtatcgtcacaagggcgcaattgtagttcgatgatctccacacatatactacaaggacttacagttgatatctgacagttcggaggcctcaagtatgtaagatcttgcaatgtgatatt

SEQ ID NO: 352210 - DNA, 263 bp, Zea mays
cgaactcgccgttgccattcgcctagggtgaagtccatgtcatctccctgccctggtgcacaccgtcgcgcttctgtgatctgggccaacacacctagccaatggagcccgtccgcatgtcactgttccgcttcccacgccgaggtgggttatcctggaagtttagatgaaggaagtgaagatcaacacgacattactagatgtttgatgaattgtgtggatcggatccgtcattagtttggtacgctaatgatcaaaatgcg

SEQ ID NO: 352211 - DNA, 176 bp, Zea mays
aaagcgtggccatgatgggggaggctccaagacgtaaccttacgattgggaattgcagtgatacgttgtgtgtacatgtgtcgcgtcagtgaatcttttatgatcccgaggaggggtctcagcgtttccatgctcacagggtccgcagccaggagggggtatgccatctgcgtagc

SEQ ID NO: 352212 - DNA, 300 bp, Zea mays
ctctagactctgtcctgttactgctactgcgcgcgtgctcgtcggtgttctcagctcgcccgaccggagtttttcctgcgcgcaccgttttcccagctcggatttcgcgagccaccgttgtcctatccgcgtcagcacgtgaccgtgggcgtgttcaaccagtttggcaacgccttggtaacgaatccaatggcctccctggtgccttgctccgtgggtgctcaagtttggcctccaactggtgaaaacggtcccccctggtcctgatctccttaaccgtagaaccctccccggaatcct

SEQ ID NO: 352213 - DNA, 255 bp, Zea mays
gtaagcagctggatatcccggagcgcttcgtcgtttgtccattttaggtcggatgagctgtgtttccttgactataggtatcctgtccttgttgaatacttgtggacacacacgcaagacgactgcgccatagttcagagagagcgcaaataccattggctcagtcagcgatacgcatctcataggaacagggagagacgatcagctgttgatcatgtcatgcgaaggctcgatctcggaactgggttgaagttc

SEQ ID NO: 352214 - DNA, 382 bp, Zea mays
ctcgtggatcgacacaagcctctatactgacgtcgtattacacaccaccgcgaaaccccagcagccgcatcgatggcgcctaaggcggagaagaagccggctgcgaagaagccagcggaggaggagcccgctgccgcgaaggccccggcggggaagaagcccaaggccgagaagcgcctcccggcggccaagtcgtccggcaaagaaggcggcgacaagaagggtaagaagaaggcgaagaagtcggtggagacctacaagatctacatcttcaaggtgctgaagcaggtccacccggacatcggcatctcttccaaggccatgtccatcatgaactccttcatcaacgacatcttcgagaagctcgccggcgaagctgcca

SEQ ID NO: 352215 - DNA, 337 bp, Zea mays
aaagcgctgacaagcaccggataaatgggcctatagctcggttgctgaatacttgcaccgctaacggggcaggcaatcgaacaaccagcatcaccgacactgatggacctagtgaggaggacgtctccactttgacatattctatacataaacagttgtgaacaatccacgcatctgttagatcatatagccggaccacctgtttgattagaatttcaccattgaagttcccaagcgcggcaaagggcgcggtcattgtggtagacggcatgggcgtggcaatcatcaatagaacaatcatcatcaacagaatcatcagcactagaacatccacccg

SEQ ID NO: 352216 - DNA, 214 bp, Zea mays
aaacgctggcgggtctggcggagctcgctggggtcctggtcgttcccctgcacggaccgctgcaggggggggagatctggggtcgaccgtgagattgggatgtcatccaaggcacatggagaccacgcagagtcatgcgaggtgaagattgagttggggaaaccgcagctagggctacactagacggactactgggggaggaatgagctagaag

SEQ ID NO: 352217 - DNA, 89 bp, Zea mays
ctcgcggatcgacacaagcctctagaatgacttataatatgctccatggttcaaaactctgttcttcaatacatcatcaattatcgatt

SEQ ID NO: 352218 - DNA, 321 bp, Zea mays
aacgcgtgggcgccgtcgaggggtaccgcgtcgccggcgggccgctcggagaggtggtcgacccgctgtaccctggcggcagcttcgacccgctcgggctcgccgacgacccggaggcgttcgccgagctcaaggtgaaggagatcaagaacggccgcctcgccatgttctccatgttcggcttcttcgtgcaggctatcgtcaccggcaagggccccctcgagaacctcgccgaccacatcgccgacgccgtcaacaacaacgcctgggcttacgccaccaacttcgtccccggcaattgaccgagggcatgatgcttgc

SEQ ID NO: 352219 - DNA, 162 bp, Zea mays
ctggtctagcactcgcggggccgacacacgcgctccaccctcttagtcattcgtctcgcgtcgatcctatgcttcccgttctcaagaagcgcagctgcccatgcggcactgtccacgcgaagcctccgaccgccacgcgccgagctggctggccgccggcct

SEQ ID NO: 352220 - DNA, 118 bp, Zea mays
actcgtctagcactcccgggtcgaaacactcattcgatagaggtccctttcatcggatagtattcgaatcaagtagattcaattctggacatcgtctttcccagaacagggactacat

SEQ ID NO: 352221 - DNA, 223 bp, Zea mays
atacgcagtatcacgtgtggtctgcagacctcgggctgcagcgcgcgcggtgtcagtgtctcagtcccggcgccttcgcgcgtgagcggttggggcgcgcggtcacggggcggccgtgggtccgtgtcagtgcgcagcacggtgtgtgacttcgtgggcggtgacctgttgcggcgcggcctggggagctggctgcaccacgtggagaaccacagggcgctgg

SEQ ID NO: 352222 - DNA, 243 bp, Zea mays
gaaactctttttttttttttttttgaaaattagaatttttttaatttcaatatatcttatcataatatgttcaagccgtatcaacccacgggtatttacctagtaaatagataccttagaattggacaactcgcatgacaacatgaacatgtaaaagccaagttctgtctccagttatctgaaacagtgattcatcaccaactagtggtacatcaaagtgatagtagggcagcagcacgtgat

SEQ ID NO: 352223 - DNA, 63 bp, Zea mays
cgacacacgcctctagccatgtgtctgatgacatgcacgcggagtagaagggacgcagaaatc

SEQ ID NO: 352224 - DNA, 315 bp, Zea mays
attacgacgtaccaagtggtggcataatacaatcatcatcatctagtggacagatttcagtttttggttctattccaacgctaacgttatactgcattacacactgtttcactcagcctgtcatattcacatggtaaaaacatgtcactgagcagaagaacttttggacgtgcatcacgtgtatacactatctcaacggttgcttcactatctgttcatacaacgtcaatcgaatcatcattcacattacttaagcagcttgacagaactattcggtcacctacatcatcaccactacggctgagactcacatta

SEQ ID NO: 352225 - DNA, 387 bp, Zea mays
attgttttgaaccacccactccagaggataacagagaagcagaacagggtctcgataaccgacaggatgtgggcaaggcttctgtcgtcgaccaaccagccgagcttcctctgcaacaaagtcatcgaagaggcaaagaaggagcaggaaagagcggcgcagcttttagatggctcgccttcccatcggaaggttgacgacgaggttgcagcttccaacttgggtcgtaccaagtgaggtgaacctttttttcctgtccaaagtttcagtagctatggcgaccggtgttgctgctgctcagtggtctgtgctccctgtccatttttttttctaaaaaaagaacacgttatccctttctagtttaaacagagtgttgaataatatcgt

SEQ ID NO: 352226 - DNA, 311 bp, Zea mays
ccgcccttttttttttttcttgtgtccaacgtaagtgtcagtgcatcccatgatggcatacatacatattttgcgtacatacacatcacatgactggataaatacatatgtccaacgtattagtcagtgcaccccatgatggcacacatacatattttgcatacagtagacacatcacatgactggcaaatcaggcatagatctctcatctcattctcagtcagtatcaggaactatgaagtaggcctcgtcgactgagtcaggcacctcgatgcgtgacttcgtgaacaggcgcgctccgattctcgtgg

SEQ ID NO: 352227 - DNA, 287 bp, Zea mays
aaaaaaatttttaaaaaaaaattattaaattaaattggccggttcttttcttttttttttttcttttttttttcttcttttttttccttctttttctttttccttttatttttctttttttttttttctttttttctcttttttcttttcttttttttctttctcttttattccattttttctctcttcttcttttctttttttttcttctttttctccttcttctttttttttttttttttttttctttttttttttcttctcttctctttcctttttttttttct

SEQ ID NO: 352228 - DNA, 387 bp, Zea mays
gacgacttgtttcattgattcttgaagagatcgagcttcttttgcaccacaaggtcgaggatgtcttgcaactgcggatcaagctgcggctgcggctcaagctgcaagtgcggcaagaagtaccctgacctggaggagacgagcaccgccgcgcaggccaccgtcgtcctcggcgtggccccggagaagaaggccgcgcccgagttcgtcgaggccgcggcggagtccggcgaggccgcccacggctgcagctgcggtggcaactgcaagtgcgacccctgcaactgctgatcacatcgatcgacgaccatggatatgattattatctatctagcttgtggtggtggttgaacaataataagcgaggccgagctggctgccatacat

SEQ ID NO: 352229 - DNA, 388 bp, Zea mays
accttcggcgaggcccgcgtgacgatgcgcaagacggcggcgaaggccaagccagcggcggcgtccgggagcccgtggtacggccccgaccgcgtgctgtacctgggcccactgtccggcgagccaccgagctacctgacgggcgagttcccgggcgactacggctgggacaccgcggggctgtcggcggacccggagacgttcgccaagaaccgggagctggaggtgatccactcccgctgggccatgctgggcgcgctcggctgcgtcttcccggagctgctcgcccgcaacggcgtcaagttcggcgaggccgtgtggttcaaggccggctcccagatcttcagcgagggtggactggactacctcgggaacccgagcctcatcc

SEQ ID NO: 352230 - DNA, 53 bp, Zea mays
ctcgcgggccgacacaagcgtctacagtcactcgggcgaacgcgtgggttgat

SEQ ID NO: 352231 - DNA, 330 bp, Zea mays
aagaggactctccgactaaagcatctgcgggtggctcgatgaatgtcaacctcttcataaacgaagatacctaaggcggtgccgacagacgtaatgacctggacatgaatcctggctggcaccatttgtccctgtgccttaatttcatgcaagctttcctcacacaaaagtttatgcgccacaccgccaaaaacgtgcgacgtgccaatcgcactacaggatacatactgccattaactctgaagcaacttcttacctcttcgacgctcacacataaactcatgacagaggccctcattttaacacctcctgaatggcaaaacacgtatg

SEQ ID NO: 352232 - DNA, 362 bp, Zea mays
actgatgctattgttctcagcacaactggggagagagatcctgtcacctctgctctgcttattattcttggcagaaaggtgtcacttgatatagctcaagtcgttagatggaaaactagcccaacagctgaggttttgcctactgtacgctatgctgcttcatttgcaggtgatggacaaggatcgccaaggtgcggcgcaaaaacgccaggcggctgtcaggctgcatgaagctaggccgaagaggcagcggggggctgcgaatgctgcggcctccggcggaggcaagccgccgaatgcgggcgcctctgcacctagcaaggcgccggaggcaacggcaggcgccggatgctccaagacaa

SEQ ID NO: 352233 - DNA, 334 bp, Zea mays
aacaatggaaattgaggctttattggatttggatctaaatatactacaggtacagcatccatatgcaactaacagcaacgatcttttctaccttgaagatcagcaacggtatagatgattacagcaccaagtcagtggttaatcatagatagccaaccgcattacgtgcaaacgagcttctgacagatgtacacgtacacggcgagggagaactctcatgagcgtgatgtccttccagtcccctttcggcttggggctcaagctctcccgcgctgctatccctccctaataaaagcgaggggcagtagttaaaaaggggggggccgcccaggag

SEQ ID NO: 352234 - DNA, 370 bp, Zea mays
cccgagaattggcaaggaggcgatggcgcggcggcctataggtttgggcctggcccggcagtgctcaatctgacctacacagagttgacttgggacaggggaacttggaaaggacagagaacatcttattttcctatttgttgttttctttgcataggggaatgagacgatggttactattcagaatgtcatttcggtgattgaagggggagaagaacctgaacggtatgatcaaaatccccaatcaccttacccccaatacctccttccaaactccaatttaggtaaggggcactgtatcatctacagtacaaatccgtctgtgggctcaagcattcagcctgaatgcgatggatggaaatttaacctt

SEQ ID NO: 352235 - DNA, 363 bp, Zea mays
caggaatacatgatgcactcacatcaaatagctgacgagaacatggatatgtgcagacctgcagaaggctttgcatctcacttagaagaattctgccggtcccaattcagattcttcaaggccaaagttaaaaggacagttattggataccgtgtcatgttcctgcagcaaggacgacaccaattcaacagattgtctaatagacgagcaccatacaagccactattttgcaaactcaaagcatgaactgccctctgtatctaacgaaaacgaattcaagtttgcaagaaacaaccacaatcgaattcttgcaagtgcgtcccataaacatgaaagtgttgcacaggccatgttctgtgcacc

SEQ ID NO: 352236 - DNA, 290 bp, Zea mays
accacgcgtccgcggacgcgtgggcggacgcgtgggcgcagagcatcctggccatctgggcgtgccaggtggtgctcatgggcgccgtcgaggggtaccgcgtcgccggcgggccgctcggggaggtggtcgacccgctgtaccctgccggcagcttcgacccgctcgggctcgccgacgacccggatgcgttcggcgagctcaaggtgaaggagatcaagagcggccgcctcgccatgttctccaagttcggcttcttcgtgcaggctatcgtcagcggcacggggccc

SEQ ID NO: 352237 - DNA, 243 bp, Zea mays
agggaaacttgtaatggtcccaaacttttgttccatgttgatctgcagagttcacatggctatgtttacttcacgtatttttgccgaagttgttctgggattgcttaacatgctaatatccttcttctgtacgtgctgatttataactcctgtttctttcaactaggctcatgcttcttctaatggcgacctaataatagaccatgctggaacttttacaagacataaaaataaaaacaaaaa

SEQ ID NO: 352238 - DNA, 221 bp, Zea mays
agcagtatgtgaataaagcttaccatctcattagataagatggtagaacagctgctgatgccttagccactagccagaacagctgttctaccatcttatctaatgagatggtaagcagtatgtgaataaagctggtgttgcttaccttcagtttgtgaatgccattatgtactgtaataaaaaactctgtattgtactccctagcattatcattatgcttt

SEQ ID NO: 352239 - DNA, 366 bp, Zea mays
agaggtcttcagaagaaacatcatcttcgtggtaggccgcaacggtcgcctctaccagtacaacaggatcacggagctctggcacaggcactaccaatcacctcacctgttcctatcgtgctccccagggacggccatgcggccatcgccgctgtccctggccggctccctgttcatggtgtccgagcacggggggctggtggagtaccacttcagcccacaggacgggtgggagtgggtagagcacgggacgccccaccggggcgtgaccctcgtcggcgcccctggcccgtgcttcgacggctcccagctgttcgtggtcggctccgacgggcacgtgtaccggcggcacatggaggggaggac

SEQ ID NO: 352240 - DNA, 88 bp, Zea mays
cctatattgagtcatattacagcgtgggatcacacggtgcactcaacggaattcttgggtacacagaccaggacgttgcttcccaaga

SEQ ID NO: 352241 - DNA, 116 bp, Zea mays
acaataaccactacaagggtgaagttgttctgctgttctagccagtgctaatcctctcccttgctgcagagttaagttgttcctgagctgtgtcagcgcccctgtgtggtgagcac

SEQ ID NO: 352242 - DNA, 235 bp, Zea mays
aaaaaagcaacttatgctgatgagaggttggtgacgattcttggctactggctactgtaattagcttgagctactattctggttgcagcatctgtggctgaacacgagtaccatatctgagtgtcataagtcatgttgcgaagaacatgagtagcatatttcaggtgccgtttggttcatatatttgtaatgtaatgggtaacggataacgttagaggggaagggtccgcgataa

SEQ ID NO: 352243 - DNA, 113 bp, Zea mays
aggagcaggtgtcagtgcccatatcgaatgcaggctggttttggttggaaacaaaaggctgatgcacgaatttgaagttccgttgagtcctgaggtggacgcgtacatgtccg

SEQ ID NO: 352244 - DNA, 53 bp, Zea mays
ctcagacagacacttcgagactgacgcactgggtgcgccttcacctacgtctt

SEQ ID NO: 352245 - DNA, 339 bp, Zea mays
cgaggacgaggacgacgcctccggcggcggcggcggcgccggggacgaggacctgcagggcgtgccggcggagagctactgcctgtgggcgcccggcgggcagtcgccggcgcccgcgtccccgcgccggtgccggaagagcggctccacgggctccgtcctccgctggcgccgcatcagcgaccgcctcgtcggccgcagccacagcgacggcaaggagaagttcgtgttcctcaccgccgttccggatccgcctcgtcctagtaggagtaacaaggaagtggatgaaggaggcggcgacggcgaggcaggcagcctggcgcatcagatgagatatta

SEQ ID NO: 352246 - DNA, 206 bp, Zea mays
caacgcgtcaggacgcctgcatccatcagacgtccgacgaatcgactactccccttgccccgagcacacgagaaccacggcggccgccggactttacggcggtttcaaagggaagcttggagtctctgattcccccgcgctgcagctcaaccgcatccgtatcacactctcatcatcgaacgtcaagaccttggggatagtttgtg

SEQ ID NO: 352247 - DNA, 166 bp, Zea mays
gtacgtagtattgcggagatcaatgcaatgcaaactcatcaccaccagattgcattgcattgtacgtagtattgcggagatcaatcgaatcgtttggctcgtcgtcattctatcgatgtacatacattatatatgatgaaagacatatataatcgtttctttcagg

SEQ ID NO: 352248 - DNA, 384 bp, Zea mays
cccacgcgtccggcaaccggtccaacactttcacgctcaggcgctcagctctagcaatggctgcctccaccatggcgatctcctccacggcgatggccggtacccccatcaaggtgggctccttcggcgagggccgcatcaccatgcgcaagaccgtgggcaagcccaaggtggcggcgtccggcagcccctggtacggccccgaccgcgtcaagtacctcggccccttctccggcgagcccccgagctacctcaccggcgagttccccggcgactacggctgggacaccgccgggctgtccgccgaccccgagaccttcgccaagaaccgcgagctggaggtgatccactcccgctgggccatgctcggcgcgctcggctgcg

SEQ ID NO: 352249 - DNA, 156 bp, Zea mays
gtacaacaattaatgcaacaaattaagtacgtacttaatttgttgcattaattgttgtacatgtgaggaaaacaagtagagatggatgcatcatccatcgacgggcggagtacatacatgtacaacaattaatgcaccaaattaagtacgtacttg

SEQ ID NO: 352250 - DNA, 341 bp, Zea mays
gcttctcctccccctcttatcaagtcctcctcgggttagggttccttagggttttgtggaggggcgatggcggcggctgatgtggagtaccgttgcttcgtcggcggacttgcctgggccaccagcaacgagtcgctggagaatgccttcgcctcctacggcgagatcctcgactccaaggtcatcaccgaccgggagacggggaggtcccgcggcttcggcttcgttaccttctcctccgagaactccatgctcgacgctatcgagaacatgaacggcaaggagctcgacggccgtaacatcaccgttaaccaggcccagtcccgtggcggccgcggcgg

SEQ ID NO: 352251 - DNA, 160 bp, Zea mays
cgccgctcttccacccccaccacccacctctccccggcctcgcacccatggccacggctttgatggttgcagccaccacctcctgctccccgggccgcgccgcgccgcgcctgaagccggtggcctcctcctcctccagcagcagcagcagcagctcggc

SEQ ID NO: 352252 - DNA, 103 bp, Zea mays
cgtccgcacacgcgtacgctgacgcgtgggcggtcgcgttggcagacgcgttgactgatgagtgggtttgggatgggaaacagcacagataaggaggatgcgt

SEQ ID NO: 352253 - DNA, 382 bp, Zea mays
gcccgctgctcggtgggcccctggcaggcttcgtgtacgagtcgctgtttctggtgcagaagatgcacgagccgctgctcaatggggaaatctgacgaccatcaccaccttcatgcttgtttctgtaaaacaggtcattctctgcaagcatggtacatacattggccaaggtaattagagaggcttgctgtaaagcagtaggattgctggctgtagaaattgttgatgggcttttttggggggtttcctgccaaggaattctttcttttatataatctcaaaaaagttttttttttggtatgggctgggttctatcaagggtttgttaagtctattagtttaccatgtagcagaaaaactagtgggacgtgaagttttttca

SEQ ID NO: 352254 - DNA, 425 bp, Zea mays
cccacgcgtccgcggacgcgtgggcgctcggtcactcctcattcctcagtcctcactaacaatccgcaccaggactcatcagggccgcgcgcgcgcgccggcagcgatgcggtgggacgcagccgaggccgaggcggccctcgagcggatctgggacctccacgaccgcctcagcgatgccatcctcgccgtctcccgcgcgcacctcctcctgcccgctcccccgccccctcccgtgccgtccgcgccctccgccaaaggggcccaccgcgtcggcgtcggcaggaacgggtgcgtcttcgtcaagggcggcgccgccggcggcggagggcaagcgctgaccgccgccgcggaagccctggccgagggcaagagcctaaaagccaattccttccggcctcaaggacttcgaggaccacctcgag

SEQ ID NO: 352255 - DNA, 359 bp, Zea mays
  unsure (1)..(359): unsure at all n locations
cggacgcgtgggcggacgcgtgggcggacgcgtgggcggacgcgtgggcggacgcgtgggcggacgcgtgggagagaccataactctgagcagaggccagaagagcggtctaatcagagagctctgaagtctggtcttgcttaccttgttcgtagtggtgggccgaaggatacaggtgcagcaacagagatcaggaatctgaccagacggaagagaaggatccangaggttggagggctcccaactcctgtttacacgtcggatacggatgcttggaggcaagttagcgctgtagttctttttggaacgaagggacagaaaaggccgagaggagatgaaccgtaggagttgccgccttt

SEQ ID NO: 352256 - DNA, 87 bp, Zea mays
ggctaaagcccgtaggaatttgcgtattggtaacaagacgatatgatggtgtacctgttgattatgtcaggatctattgacagcttt

SEQ ID NO: 352257 - DNA, 174 bp, Zea mays
gggcatatacatacttgtatgcgtgtaccgtagacatacgtattcgtatatgtactgcaggagatgtaccagtatttgtgaagaagggagcatgggctcagagattgtaccagtagtgtacgtatttgcatgcatgctttggtccttgtggacattatcaatgaaatatgctgt

SEQ ID NO: 352258 - DNA, 89 bp, Zea mays
gctgtatatgcatgctagtatgcattgtccctctcttgtcaatgcttgtaatcgaactttattatgaaaaccaaaacgagaatccaacc

SEQ ID NO: 352259 - DNA, 187 bp, Zea mays
cacccacgcctccgaagagacttgtgtgattgctttggttacaacgctcacggaatccagggcagacctgggagttaatgatcacgtgggcgtcagtacatgcgcagcggtgggatgccataagtatgcaggcggtgtcatcagtttcacttctcacaccatgggacacgtgactggtcattgttat

SEQ ID NO: 352260 - DNA, 94 bp, Zea mays
attgcgacgtggacgatatcagcgacgtgttagctcacgtcagagatggataacatgttgtagataatggaaaccaagttccggatttgtcccc

SEQ ID NO: 352261 - DNA, 324 bp, Zea mays
atttttatttttttttttttttttttttttttttttttttctttttttttttttttgttattttttgtgtttttttttttttttttttttttttattttttttttagacgccccaagcaaacaagccccgaaaccgtccccaaagacacacaagggaaagttacaggtaaaattacattaaacaaaggttccaacaactttcttaaagtacaggaaagcttccatttccaaaatggccaaaaacccccaacaaagcaagcacctccgacaccaaaagccatccatgtttcccaagttgttaaccaagcgcccaacacggcaaaa

SEQ ID NO: 352262 - DNA, 357 bp, Zea mays
cccacgcgtccgcccacgcgtccgcgcaagcgcaacagaagcatactacgccgctacgcgctgggcggtgccgcacagctatagatagctagcagtgttgcatagaaatggacagcgccagcagcctcgtggacgacaccagcggcagcggcggcggcgcgtgcacggacaagctaagggctttggccgccgccgccgcctccgcctcggggccaccgccggagcgcatgggcagcggagccagcgcggtcgtggacgcggccgagccgggcgccgaggcggactccggctccgccccggcctccgtcgccgccgtcgcggcgggcgtgggcgggaagctgccgtcgtccaggtaca

SEQ ID NO: 352263 - DNA, 175 bp, Zea mays
accacgcgtccgcttcaggaacatcaaaaccattgctgaaggcgctctctctgaaaccactcgagtgcagccatatgccgtgactttcgttacgcacacggccgataagctgcacgtggtccgcgacatcgtcggttcttcagtggcattccagtcactgcatctcgacgtgcct

SEQ ID NO: 352264 - DNA, 366 bp, Zea mays
cagaaactggagaaggagcgggaggagaagcagaagatggccgggtgcatccagaccctgcaagaggagctcagccacgccatggaggaacttaagaggctcaaagcgcgggacgacgaggaggccgccggaaccaaggtcatcgacctggagatcgacgagggcctctacttcaccgaggccgccgagaagcaaatggcgccgccgccacagggcgctgccggcggagcaggcgagctccagaagaagaggtacgtgacgttcgctgacccgccgacggtcgccaccaccgccgccgccgcgtgccgggcgccaccgttgccggacgtggtgatggaggtgcaccgcgcgccgccccaccagctc

SEQ ID NO: 352265 - DNA, 380 bp, Zea mays
gggccgagacacgcgtcagtctgttttctttatgtcgatcatatgggatagctcccaacgcttttgttgcagatctttgctactcgataatgtcacttcaatatcatgacatcaggaaggacatagctgctgccagtcgtccgatgatctgcacgtcacatgtccaaacttcaagccgtctcgcagcattaaatatcaaacctagggtgccttgggccagttcaaccacatgttcgtagcttcactctaacgatcagcgtcccctgcacgacaccggccaaggcatccacggtggtggagctgccaccgcagttgcagatccggtatgcgccgtcgacgtccgccggggttagcggtaagcaacacgggaagggcaaatt

SEQ ID NO: 352266 - DNA, 356 bp, Zea mays
agaccgttggctaaagcaaacagcttccgcaacatgctggagatcaggtcgacagccttcgcacaatggaatggacgcgagattgaggtttcatcgtccaacggcggatcgtctactctgcatctgtgcaacatcagcctgccagttacgggttcacataaggaccaccactgggcgggcccagcattcattatgtcacacccgagtttcaggcacatcgcgcgtgctttgccaatttcatcgggcgtaaagtggaacatcctgatcgtcgcaagtactcctgtcaagtacaatgcagggtgcgccctgtagaacctgctacgatctggactgcaagaaccatcgagtcccaacac

SEQ ID NO: 352267 - DNA, 132 bp, Zea mays
ttgcaactccctgacgtgagtcgtattactcagcctcgtactcggaggagagaacacgcatcatggcgtctggaacatcatcacgcgtggcatgttctacagcatgcttagctagcgcggttacaggggatg

SEQ ID NO: 352268 - DNA, 356 bp, Zea mays
atcgtctgccccaactgcaacggcctcggcaagctcggacagatcgacaagtagctaaataatcccatccaccatgcatgctacgtactaagctcatatacatgtgctgatgtgcatgcatggaccaaccaaactgctcctttgtataagctcttaattaaatctcctctccgacaatgtctgaatgtatatgctgagtgagtgttaatttggtctgtaatataacctgttgctttgtcagaaacgatgttgtgcaataacattgttgtcggtggtgttgttgtatgtgctagtgatgtctctcaatatatgtatgtctatcagatcaaactgttgtgcaatcaagcttttcgtgc

SEQ ID NO: 352269 - DNA, 405 bp, Zea mays
  unsure (1)..(405): unsure at all n locations
cagggcttagtggtgtgtgacatatgtggcagtggtagtgcccctcatcttattgcaaactgcgctcggtgcaatgcgcgtgagcacgggtactccctttcttttctcctacctgcctattacctttttcctttggtcttcacatactgaactcgtggaaaatgtacatatacatacaacatatgttcgtctgtgtataacatgtggtgatcagttggtagacatgctttgtaaggatgtttggatagtagttactagtgaatggtaagagaagagaagaatggtaaagagaagagaatgttttgccacagataactcatgtaaatactgtaactaaataaggccttggatatttcctccatttgttgttttgttctttacaanatagccactatctgttaaaat

SEQ ID NO: 352270 - DNA, 61 bp, Zea mays
cccatatgcatcagcagtgtgtaccactatatatgttatatactgtatttcgctaccgaat

SEQ ID NO: 352271 - DNA, 407 bp, Zea mays
aacaatttatcatgtgaagagccatctgcagataagaaggcttcctcggaggataaaaaagcacaattaggaaagggcagcattgattcaagcaaaaacaagaatttacaagtggcagaagctctaaggatgcaaatagaggttcagaaacagcttcatgaacaattagaggtgcaaaggcagttgcagctacggatagaggaacatgcaagatacttgcagaaaatactagaagagcagcagaaggccggcaatgtgccactaaaagctccaaccaaagcacaagcaacaaagtcgtcacctgaatcgacgtcagacgagagaactgaatccgaggtagacaccatttctccgcggccacccaagaacaggaacccgggtgtagacgcagaatgcaaatcgccggg

SEQ ID NO: 352272 - DNA, 142 bp, Zea mays
atttaattagtattgcacaatgaaaaattcaacatcaaataaacaaccaacaggcatcacaacaaaatttgtatatctatgtgattatgtgtataaaaattggtgatttgtgatgcatttgtatatataacagttgttgaat

SEQ ID NO: 352273 - DNA, 423 bp, Zea mays
atgaccatctactcaacctagtgctagatgaagcagttgaatatgaaagagagcaagatgacccattgaagctatcagggaaaaccagacagcttggcctcattgtgtgcagaggcacggcagtcatgctggtctcaccgactgatggaactgatgagatcgccaacccttttcttgcggaaggagcataagcttgcagttggtcgattatttagaaccgtgctctcatgtcaccctcagaacgatgtgtcccagtggggaaaagaactctctattctcgtaccggttggtgatgaactctgtaatattcaccgtgcaagtgcaacttaaaacatctgtgatacgagctcttttttttaaaaaaaaaaaaaaaaaaaaaaaaaaaaaaaaaaaaaaaaaaaaaaaaaaaaaaagggcggccgc

SEQ ID NO: 352274 - DNA, 108 bp, Zea mays
agcgccgccggccggcaggtgcaggtggtgactttgtaacgtgtgtgcgtgcgtacgtgtacattgcatccatcttggttccaatggacatatagctcctgttgctcc

SEQ ID NO: 352275 - DNA, 359 bp, Zea mays
cacgcccacgacgctgctgtggccatcgccggggagagaaggcggcgccgcgcaccggcgcgacgggtacgcgtccgacacgctgggcacggccaccgcggacgacgccaaggagaagggcgtcgccgtggaggaggagggcccccgcgtcccgacccagtgggtggcgttctccgccgaggcctcgccgctggaccgggtcagcgcgtgggtgaacagcctcgggaactgctcgttccacgccgtcgatgaggacggtggcgccacggggcacggcggcgacggcgcctcgcgcccgcgacgctctgagatcgtggagctgccgacgtccgcggccggcggaaggaggcatccgcagc

SEQ ID NO: 352276 - DNA, 429 bp, Zea mays
cccacgcgtccgggtcgacctcggcgggcggagcagcaaggagcgggaccgcaaggtgctgctcgagcagacgcgcgaggagcggcgccggcgccagggcctccgcctccagaacacctccgccacgaagatccaggtctgttgacgactcgctgcccgtggcgtggctcagggtaggcgttggagcagtacgatcgtgcaggggtttatctacctccgctctcggtagtctcatgggctctgaaatccaactatgagccttttggcggttgtgaatgctcatggctcagctggttttctttggctgaaccgctgaagacggattccgtgttaggatatagctttaggcttctcggcattaaaatggaccgctaacttggcttcttttccttttcctcttgtgtggtgagaggatgagttagcgtgttc

SEQ ID NO: 352277 - DNA, 160 bp, Zea mays
cccacgcgtccgtgtaaattcattgatgaaatccttcggtttgtggagcttgtgctattaatgtacttttgacatttacaaaatctgtgctgtgttcgtggtgcagaaaagttttgttctgagtattatcttgaaacttttgttcaaccaaccttttgag

SEQ ID NO: 352278 - DNA, 283 bp, Zea mays
gacgcgcgggtcgacgcacgcctctacactgagctccactagctgaggccggtacagcggcacagccgtgcgacgtagaactaccacgacccaggcgcggcacatggcatcccagctcgccgccgccgtgccccggttcgacggcctccggggctactccgcggacaggtcccccgtgggaccccagcggtacttgctggtcggcaggatgaggtcgtcgtcgcagggcgtcctctgcaacgacaccggctccgcgaccgccctgatgacccgcatcaagtgt

SEQ ID NO: 352279 - DNA, 165 bp, Zea mays
gttaattatgttgaagatattgatagacatatatgccatattttggctagttcataacatgtaaaataggtttgggattttaagcaggcagccaatagtttcgacgtgaatagtagtggtgaagtagtgatttgctttatgaaagacgtgttggcaccttaaaaa

SEQ ID NO: 352280 - DNA, 56 bp, Zea mays
aagcaaggataatgcaccacacgtgcacgccacacttgtagtccactctgacagtc

SEQ ID NO: 352281 - DNA, 333 bp, Zea mays
acgcgatgggacgacgcaagaccctacagggagtacgtactcagttcttcaatacatcatcaattatcgattaaaaaaaaaaaaaaaaaaaaaaaaaaaaaaaaaaaaaaaaaagaaaaaaaaaaaaaaaaaaagaagggaaaaaaaaaaaaagaaaaaaaaaaaaaaaaggggaaagaagaaaaaaagaagaagagaaaagaaaaaaaagagaaaagaggaaggaaaacaaagaaaaaaaaggggggggggggacaagggggtcgaaacggaagtcggggggatgggaaatctgaaaccccgagaaggggaggcggaaaaggaagtaagggg

SEQ ID NO: 352282 - DNA, 120 bp, Zea mays
cccacgcgtccgcccacgcgtccgcattccatgcatctcgatctgtatgtactccgcccgtcgatggatgatgcatccatctctacttgttttcctcacatgtacaacaattaatgcaac

SEQ ID NO: 352283 - DNA, 114 bp, Zea mays
cggacacgtgggcggacgcgtgggatcgtgtttcaacttgcccttgattaaggcgctacagctactgccaactaaatgtagtattatgtgagctctttttcatcgagaattcct

SEQ ID NO: 352284 - DNA, 128 bp, Zea mays
cccacgcgtccgcggacgcgtgggtgtatatcttatttctcttcaacattttctaaatcatgtcgtctatatgtaaatatctatattagaaacaatttcttcaacattttcttcaacattttattttt

SEQ ID NO: 352285 - DNA, 430 bp, Zea mays
ccggcgcagcggaagcagcttccatggctgcccaggctttgctcggagctcccctctcctgctgcgctcgcccggccatgctccacctcgccccatcgcgacgctccagctcgcgtcgagctccccatcgaacctccatggcggccgagctcacagcctgcgcgcgctccggctgctttgctccagcgtcgcgcgctccgctcctgcacgccgagcgtcctcttcagctccttggtcgaccttctctcgcgctctgctcctctctcttccttgccgcggagctcctgtgcgcgcgctgttcctgctcgccgagctgttctctgccctgcgcacagccacttttcatctccctgctcagctcaccgcgctgaactgcccagcgccgcgcgcgcttgcccctgatgcctctcgcgtgatatttggatctcgt

SEQ ID NO: 352286 - DNA, 84 bp, Zea mays
cccacgcgtccgcacacgcgtccgcccaagcgtccgcgcatctctcaactcacatatcatcactggggccgtcaacgtcagttc

SEQ ID NO: 352287 - DNA, 117 bp, Zea mays
ctcacacgtccgaggtcgcgtgggcggccgcgttgggaagacttgtgcttaccgccaccatcatgctagtgtcgatgtcattagggaactgactcgcatcgatggtcgtagacctga

SEQ ID NO: 352288 - DNA, 99 bp, Zea mays
aaaaaaaataaaaaagaaaacatagacaaacacaaaaaaaacaaaaaaacaaagaccaaataacaaaaaacaaaaaaaaaaaaaaaaaaaaaaaaaaaa

SEQ ID NO: 352289 - DNA, 392 bp, Zea mays
ccgccttcggcgaggcccgcgtgacgatgcgcaagacggcggggaaggccaagccggcggcggcgtccgggagcccgtggtacggccccgaccgcgtgctgtacctgggcccactgtccggcgagccgccgagctacctgacgggcgagttcccgggcgactacggctgggacaccgcggggctgtcggcggacccggagacgttcgccaagaaccgggagctggaggtgatccactcccgctgggccatgctgggcgcgctcggctgcgtcttcccggagctgctcgcccgcaacggcgtcaagttcggcgaggccgtgtggttcaaggccggctcacagatcttcagcgagggtggactggactacctcgggaacccgagcctcatccac

SEQ ID NO: 352290 - DNA, 307 bp, Zea mays
ctcttcatacccgcctcttcacctcaactcacattgtcatggcctcgtcttccttctcttcctctccatctcggcggttggtccacctcacacaccatctcgtctcctcttcttccggcgagctttcctcagtcggcgcccccgccgctggcgcctcagtatccgaccccatggattgcccacgctccactgcctcacaagttcacgcatcggtgctggactgcagcttccaggatcctatgcataggtctctgttcatgctttctgggcactctttgccatcctcttcacgatccggttaggtgtc

SEQ ID NO: 352291 - DNA, 355 bp, Zea mays
gtctcttatagcaaagcaatagagctatagtagaagaccacgtttggttgaaggccataccctagaagctatttgaaattggagaaaaaggttggctacagttggaccgtcagactgtacataactgaattttgttattcagttctgagaactgagttacagcaggatgcctactttggaattcatttgtcactgattcgtggggttttggttgaacttttccataacatctctagagaccaccataaaaataagttttgtaaagttatgtggacttgggtccacatgaattttgggataacaatgggccaaaaagggaacaactttcatcacacggagtggggctttctaccgt

SEQ ID NO: 352292 - DNA, 382 bp, Zea mays
cattacggtgttgcacactttggtacccagtttgctaatagtatacgtttttatgctattttaggggaattgtttcttctgtagagggtcttgttctgttaattggttgtttggtgaagttggtgaccgatttctccacctttttctcgatgcatatcctgagagtttacgttcctagctacgagagctacggacgaatgtggccacacatgcacacgaggatcatcgcggctctgatggtttaccagaccaccatgattggcttcatctccctgaagaagttcgcctaagcctccgttctcgtgcccctgcttccatccagcataatcttcgcctacgtctgccacatgcgcctctacccggcgttcgccaagactcccct

SEQ ID NO: 352293 - DNA, 375 bp, Zea mays
cggaagcgtgggcggacgcgtgggcggacgcgtggggtcgccggctgatttttttttccttcagcagccgcaagctcgagcttcattcttcctctgtgcgctgatcgatccttatcccgccgcccttccctgagatttttcaggcgccaccgcccttgggctcctacaaatctcctctgccggtgctccaattcacgaaatcgcgttcctgtgcttcccagctgagttctagccatggtgccggtcgagttcctccccagcttcttcttctagctcgcccagccgaagttccatggcgctcctctctgccggcgttctccccagccgcgctctggcgtcgacctccgctcggccgcgcgctccctccctgcccag

SEQ ID NO: 352294 - DNA, 212 bp, Zea mays
cggacgcgtgggaaaaacaaaacaaaaaaaaacaataaaaaaaaaaaaaaaaaaacgaaaaacaaataaaaagaatcaaaaaaaaaaaaacaaaaaaaaaaaacaaaagggcagaccgcaaaaaggaagcaaacaattgaatttcgcaggcaagcaaccttggcggtctctcgcggcggctaacttgatctcctcctcggcccgtcgcattc

SEQ ID NO: 352295 - DNA, 287 bp, Zea mays
cagacacatgggcggccgcatgggtcatccactacgtcctatccacggcatcatcgctcaccagcactggaggtctccgagtattcatggcgccttgaccatcggcccgatcatcagcagccatcacaatcgccagccagatagtcgcacaacagcattcacaaagaccctttgatgcctaacaccatacagtcgagtctttcgcccttgtcactccacgactagcatactccctactgagaagattaagcctcagaccccagactactgcattcatccaggaggat

SEQ ID NO: 352296 - DNA, 293 bp, Zea mays
gtccacgtacgcctctgacaccgttttgccgtgtggtcatgggtagtctgcaccagggatttcctctgcagggctaccctgcgtatgcactaacagtactttttccaccaatggcttatcctcatcctcgatcggcatatcatcgtccatctgagggataaccaccataatgtgggtaccgtcatccagtttgctacacacctcaaggtggatatcatcatgcacgctactctggcacatcacaacaccgttatggtaacaaccgccacggacgccacgtaggcaacattcag

SEQ ID NO: 352297 - DNA, 160 bp, Zea mays
gcgtccgcacatatgtccgcggacgcgtgggcagacgtgtgggtcgccatgccaagtgcagctggtcatctgaaggagtgctcaagaaccagcaattttcgtgggtgcacgacactctgggagataagcttctgcatttacatgatgcattttgcatgtt

SEQ ID NO: 352298 - DNA, 342 bp, Zea mays
cctttcatcccatttcgtctggccgtctaatccgttggacggcccgttctgtgcgtggtagcgctatgatctgctctgaaggagttttgagaagcatacatggatccgaaagttgctcctgtcaagaatgttgatgccaaggtcaaagtcttggatgtggccaaggtcgtcatgtttgaggcaggcaaggagaagagcaaggtcattcgtacatctgtcgcagttcaccagatcacaatactaaatatcgccaaggatacgaagttatcacgcttcaatactactgtcatcaacatactcgatcagtatcatatcctcaaatatcctctcaacacataatct

SEQ ID NO: 352299 - DNA, 142 bp, Zea mays
atgaacacctggttttcagacagccgccggtgtttctgtttgacctccttgtaattttaaatatatatctagacattttcgcaaaacaaatcacaaggaaaaaaaaaagaaaaaagacaaaaaaaaaaaaaacagatggtga

SEQ ID NO: 352300 - DNA, 409 bp, Zea mays
gtgtctgcggtcgccgtggaggcgccggagctcgacttgggccggaatgccgtggacttgagccttctcgtgaaggagtcctcggaaaagagccagcaaggggagcgtgtcaggcagtggcacatggcgttcccactagccggtaaggccaagggcggcgagctcgtcgtcaagctggcgttccagatcatggatgacggaggcgtcgggctgtacagccaaccgcccgttgcagcttcaggcaaaactagctcctcttcgtcctcctccttgtttgcacggaaacatagcaagtcgtcgttcagcatcccgagccccaaggtgatgcgctcggagccggcgctgataccatccatgggagcgccatcggtggacttgctaggaatcgacgatttcaagctcgattagc

SEQ ID NO: 352301 - DNA, 401 bp, Zea mays
tcaggctgctcgcaactcccatcctccccctcccggagtacgaagtaccagagagagaacggctttcctctagcaatggcgggtggccgcgccggcgacgacgacgtggtggtggtgaactgcggcggcagctgcggcggcgaccccggcgcatacgccgcggtgctcaacaggaagctcgacctgtactgcgccgccgtcgctaaatccatggggtggttcctcctcctcctacccctccaaagattagacctttctaggcctacttgcgtattggttgtgtgattgtgccttgtgtgcatcgatctgtcaatttcagctccagcttaatttccagtctcaatggtaagaagtgcatgtctttcagttacttccccccatcatttttgggaggggaattt

SEQ ID NO: 352302 - DNA, 379 bp, Zea mays
cccacacgtccgctatgccattttattcattgcttatttgacatggcttatatacaaatttacaaattttctactctactcccaccattccaaattgcaagatgttttagcttttctagacatcttttgctatgtacttagatatacactatatttaaatacatagtaaaagcaacgtagcaggaaaaaccaacaatttggaacggagggagtatatgtttttcatgtccagctgtttatcttctattaagctcagtcataacactgtttgtacgagctcccaatcactccacaaatctgtaaatgagcctgggctagttttccttctgactgaccttgatttctccttagacatgcagatgtgactgtttgcgttttt

SEQ ID NO: 352303 - DNA, 106 bp, Zea mays
cagaggctcgtaagaatgcacaggcagctatcatctcagtggtatgcaagtcgcgacgactgatcacagctcacgacctctccctcctcaggctacgtgacaatgc

SEQ ID NO: 352304 - DNA, 408 bp, Zea mays
cccacgcgtccgcccacgcgtccgctgatgaagaagtgagaaatgccacagggtattcaaatgtcatggtggctgaacatccactgaagctcagtagttcatatgccatgttaaagggaaattcaaacaataggggtcttcatggtgaacccttggcaacttcctaccacaagaagtttcttggaactgttgattacctgtggcacactcatggaattgaatgctccagagttttggacacgttacctattagtgttttgaagagaacgaggggtcttccaaccagggaaattggcagtgatcatttgcccattgttgctgaatttgctttcacggaatcagttgaagatgattccgatgaagatgatgaatctgagcaagatgacgaatctaagaaatgagcgaaac

SEQ ID NO: 352305 - DNA, 389 bp, Zea mays
cacaaacgtccgcggacgcgtgggttttttttttttttccaaaatgcatcaatatataagtaccaaaaaagtgtcgcaagcacagtctgcacacatcatacaacacagatcaaactcaaacagcactacagaaattcgtatgctgcgtctgcatcactggatgaagcgcaaagctagcaattcggcttactcccatcaagaccaaacaactaagcagccatacgcaacgtaatgcacaggtggcaaactggtgctcacacccacaagcgctgcccccctccggagaaactcgaaccggttttgctaccattccctactaacatggacctcgaatcacttgcatctagtgcttcatgtctttcccaagacccctgggtactttgctcaga

SEQ ID NO: 352306 - DNA, 365 bp, Zea mays
  unsure (1)..(365): unsure at all n locations
cgcgccatcgtctcagtgtcacagcaggaagccgcgctcccgcccgccgtgccgcacgcccgccagccgttagctgctcccaacagcggcgggatcagggcttgcgatttggcagacgcgagtccccccacccccccggccgcttacttcatgcctccatggatccggtcgcggacccgtcgccgtcgcggcggtccctgaagcggaggccgccggcgcggtcgccggagctgtcgcccaagtcgggtccgggggcaggagaggcggcggcggaggggctgatccggcgggtagaggagctggaggcggcggcggcgcggctgcgcggggagaaggangcggcggaggacgcggcgcggggcctg

SEQ ID NO: 352307 - DNA, 143 bp, Zea mays
cccacgcttccggtgtgtgtgcgtgctgggcgtgatgggtggagtgggccactgtaaccgggatacatatacactgtcttgtggagggggaaagggaatgcataatgggaattatcaatataattcttctcgttcctttcatc

SEQ ID NO: 352308 - DNA, 418 bp, Zea mays
cccacgcgtccgcccacgcgtccggtgacgatgcgcaagacggcggggaaggccaagccggcggcggcgtccgggagcccgtggtacggccccgaccgcgtgctgtacctgggcccactgtccggcgagccgccgagctacctgacgggcgagttcccgggcgactacggctgggacaccgcggggctgtcggcggacccggagacgttcgccaagaaccgggagctggaggtgatccactcccgctgggccatgctgggcgcgctcggctgcgtcttcccggagctgctcgcccgcaacggcgtcaagttcggcgaagccgtgtggttcaaggccggctcccagatcgtcagcgatggtggactggactacctcgggaatccgagcctcagccacgcgcagagcatcctcggcatct

SEQ ID NO: 352309 - DNA, 347 bp, Zea mays
cacacgcatccgcggacgcgtgcgcggacgcctgggctgacgcgtcgctggtgggaagtacagcgttgcctggttactgtcggaggagctgcaatgtgtgctagggtcaggacgtgagagtagtagtatttgttagtgcatacgacttgtctccatagtctgttgttggtctcctacatctcgcagtacagaaatactcccatgctataggttatgccgatggaggtgcacttagaatcagccgactacttggtcgattgatttactacattgcctggctctgccatctcataagttgtaccgggagcttacaacatctctgatccgttgtcatctgtaagattttc

SEQ ID NO: 352310 - DNA, 290 bp, Zea mays
catgttttcactataaaggaacccctggaggggggagtaacggtgtagaaggtttatgttgtcacagttggcatgcattcatataggaatagctagctgatggcaccgttatgccaacacagttataacaaatatcaattgtaaattttatgattggttatcgactaagcaaaacaattttataagaaattgttgtgcggcaatatcctttgactaaaccttagtcagatgctcgaatattgctatggtttgtaaatataatatatcatatttatagattttgttgtaat

SEQ ID NO: 352311 - DNA, 394 bp, Zea mays
caaggaccccgcctcaagcgcccctcgggccgcccccacggccgcctcgacgtccgcgtcgccgtcaaggagccgtccaggtactacgaccccaacccctacccggcccccgcggcctacgccaacacgggcggcggcacccgtgacccctacggctcgtccgctgctgctgccggcggctactacggctccggaggcggataccgttccggtggtggcgcctacggtggcggcgcctactgcgccgcacatccctataccgcagcgcccccggcggagtacccttccacctactgcgccgctccgccgcctcagccagcggcagagtacggcgctcctcctgccgctgcatacggtgctcctcctgtcgccgccaacgccgcgtccgggaccg

SEQ ID NO: 352312 - DNA, 413 bp, Zea mays
aacacctgggaagtatgcgtacaatgaacaaacaagacaaacaattacagaatcaggtcctgatggggctgtagttcttgggactccagttgcacctcctgtaaatggggacatgtatactgatatcagtcctgagaatgcggtgctgcaaggacagaggagattaagcaaaggcgtggattacttggttgaagcatcagcagcagaggcggaggcaatcagtgctacattagctgctgtgaaggccacgcaggttaatggtgagatggagcagttgccagacaaggagcagtctccagactccacatcaactagcaaacattcaagcctcatcaaactggacactgctctttctaacaacttggcagctccacctggggttcggttgcaccatagagccgtcgtggtcgctg

SEQ ID NO: 352313 - DNA, 404 bp, Zea mays
gagccgctaagcatcagtactcggcatccaccccagccgatgacactctctgctcctctctccgtccctgctcatctcccgcgcgcttgcttgcttccctacccagctcggccttcagctcgtcgagtcccttcccgctgcgcccttgccggttctctgctcggccatggaaatcgcaacccccagcttcctctgtcgagtccggccggagctccctcctgctttgctcgtcggctgcgcgagctagccggcgtgctcctgctccagccttaacgcgcgcgcctgctctctctgtccggccaccctcgccccacctctctcctttgtcggcgctctgtccagtctcctccatggccgcgcctggtccctacttgagctcggctctgccctccactccagctcgt

SEQ ID NO: 352314 - DNA, 274 bp, Zea mays
acgcttgcagtgccggtcctagattagcgggtccacgcccgcgtccgaaacgaagaactgaaaatatcaatatttccggcatctgccgttgccgtaaaaaagaatgaacattgaaaatccaagatcatcacatcactctagctcacctcactgagatgaataacacgtagctgacaaaacggcaacaatgctatagtacatacttccacaggttcaaattgatccacaaacaaatctgcaaaagggggggccccctcaaaaggtcccaatgttt

SEQ ID NO: 352315 - DNA, 314 bp, Zea mays
ctcagaagtctggttcgccgaagattctcgagtccccgattcaatgccgctgctgcgtctcgtcctcttcaccaccgatgattttattctatgggacgggagcgcaatctatgcacaggaacttttacactatccgcaagcagctcgatcatctcatggcggataaacgcaactgcgatgtgcgtgaggtcattcgctcgtactatcatcgcgacgtctaccgcctctagttcaccagactctgcacctactaccacttccaacttactaagattgacatggacccgtgcacgaaactgaactcgctgtaactg

SEQ ID NO: 352316 - DNA, 412 bp, Zea mays
accacgcgtccgctccccaaggccggtcgtcatcctccactccaagctgcacttcggtcttctgctcctgccaagtaccgacaccagcgctgctccttcttttctctgtcttggccagccacctctgctccatcttccagcgtcgcccacgaccggcagcgctcagcccgacctcctctcagctcgccagccatcgccatgaccgccgttcccagtgtcggcttctccagtccgccccgcctcggtcatcgtcgttgatactgcgcttaccggtggccgaagctcgcgtcgccctctccctcaccggattcagtgtccgagctctcactagagctcgtgacctcgccggctccctagagctcgcgctaacctgctcgaccacacctcaccagcttgctccaaacatgatttc

SEQ ID NO: 352317 - DNA, 236 bp, Zea mays
gaatcagacagttctgagatgcaagtcacggagcatagtacaaactcagcacagaagcagaactagacatgtgatccagacagccaagatctgagatctgacggtagatatctgatgaaatcattttacgcattccttctcagtaatagctgacaaatctgatgagaacgatctcaactcgagagtttcaattatgctattactccgtccaaaatccgtctaacaaaaaacgaaaa

SEQ ID NO: 352318 - DNA, 383 bp, Zea mays
aggacgcgtgggcagcactcgccagtcgccaccccgatgctactggtgcgcgccccgccgtctcccgcgccgctctcggcggcggccaatttcccggctgatctggagcgcccccttcgccttcgcggtctgtcctcttcccgtgccggcgttactacggccactgccacggcgaagccggcggcttcctccctgggcgggcaaaagcgcaagcaggtgacgagcgtggcgaacccgctggtgaagcactgcgtcaagctccggctctccgccgcgtaccgacgctcctgccgccgcctcctcctcgtcggcctcgcgcctatcctggacgtgtgtagttttgagctcgaagccatcgattacttgcttctcctggaccgcgt

SEQ ID NO: 352319 - DNA, 375 bp, Zea mays
gcggccgccctttttttttttttttgatccaaacagtctcataataaattgagaataggctaagctggagagtgacgcaaaccattcaatcaatcatatctcaattctcaaaacttggagctgggggctaccccgctacactcgaactcgatagaggtacgctgacatgggagtgtccgaagttgttaattttgctgtgagaaacgacaattgagacggcctactgactgaacgttgctgcgaggaacatgtcctcctcgctcccaatccacccgcactggccgcagcgctcgccggcacggcagcactcggggggcacgccgccgggcatccttcccgtcgtcaattgagcaccggcgacggcgtggacagcct

SEQ ID NO: 352320 - DNA, 60 bp, Zea mays
gggtccacgcccgcgtccgaccacacgtccgcggacgcgtgggctagttctagatggcga

SEQ ID NO: 352321 - DNA, 398 bp, Zea mays
aaatttgacactcttatttttggtatgcagctgctaggatgcctttcaaatcccaatgttgtgtcctttaaagagttatcgaaaatatgttgaaattgctacggacagtacgaagtttttcatcagttgtctgaaacatgttgaaattgctactaagagtagtgagtgttgcatcatagcctctcgaatcaatgatgtctttaaagaatggtatgccatgtgtaaaaagtgctactacagttgaggtcctagtgcaccagtattgatggtaacctcgtcaaattgattgagatgcggacatttgtgttaacatggtgccatgggttgcccactgaaagttgttgcagttactagtaagttcaccttgtgttaaattctgaaaattaacagtcacagta

SEQ ID NO: 352322 - DNA, 357 bp, Zea mays
aatagttctagatcgcgagcggccgccctttttttttttttttagcaccattgttagttcaatgggcagcagagtcctcggtccacaggctataagcttggatcagggccggtaaccgatcgacacatgaacacacattattgggcgcaagacacttacggcacacattatgacatatcatcacagctgagataaatccgtctggtttatgagtccatcacggtaagttacatagacagtccacacgggaatctgtggtattccgcacaggcaatttgcaaggagacgacgttcagaacacaaaggggttgccgtagacctcgaacatcttcgagcaagaccagttacgttccggca

SEQ ID NO: 352323 - DNA, 390 bp, Zea mays
atattagctagggtttcaacacatctgacggcggaagctatggcgtcgccaccgtcaatgtcttggcactcccgctctgttcatcaatcgcatcgacaggagcccatcccctcctccctcaaacgacgccgggtgacaagcaggaaaagtagtgctccatgattctctataatatccgaaataaattaggattaaagcaagaataggaagttattcaatactcaaaagtaaagggtttccggtcttccagttaaatgaccaaatgacctgtagaatgacagcaagcaagcaagataaacggcagacagatttcaccaactcatagcagtgcacgccagggaagaaagcaaaatttgacacatctcattgtctaataagtttgaagcctca

SEQ ID NO: 352324 - DNA, 334 bp, Zea mays
cgtcctctcctctggcaccaaccaggacctgctcgccgctagtgcccaggctgccccgctgcccctcgctcccatccccgtgtatgtctccccgtcgcagtgcacggtggccgcgcttggcgtcagtcagagcgactccgggcagcatctggaccgccggggcgactgatgagcataagaggtgcctgacatgcggtggctcttaccgagacgacgagaaacattcgagcgcctgcgccttccatggccacgtcacacgcgagaaggggctgttctccctgtctgccacgtaccatggcatcgacagtgagtggggcgacaagagcggggtcat

SEQ ID NO: 352325 - DNA, 205 bp, Zea mays
aaaagcgcggtgttaatatctcccctcgcttccctcttctggtctccgccgcgctccgtgcctccgatccacaattccgccatcggatctcgcagtcagcgcaacggacgtgtgaacgaagggggacgcagaggaagatagggctcacgttcgggaagcacttcagcgggcgcgtcgtcccatatggagatgcaggatcctcatg

SEQ ID NO: 352326 - DNA, 413 bp, Zea mays
caaatcattcgcgagcagggcgccctattttatattatcatcatttgagcagctgcaatctggattcatctaggtcagccgccatcaaaggataccacctcacgcgtcgcacaacggtcacgcccgcagtgggcatggacggtagatcggacgagacggttccaacaccattccacacgatagacgacaagctcaagccggactgagtcaggtaccagcagattccagtgggagggccgtcatgtgctgtgtaccctgtgcggctcaccgccggtgtacgtgacctgcgatttcgcctgggacaagtggtgggatagccccgcgctattcgcagacccggagactttctacaaccatcgcaaagtgtctctcatccacaaccgcttgactaagcatcggcacccccgggtttg

SEQ ID NO: 352327 - DNA, 332 bp, Zea mays
tggtacgcctgccggtaccgtgccgaagccgcgggtcgaccatcgcgtccgccctcgcttgcgccgtgacgggcgcagggcatgtcagtgcctgtggttcctcctccttctcctacgacacatggcgcccgttcgacatgcactctgcttatttctcggagtcacctttctcgggaccgtcatacacggtgtccaggtcggacaccatgatcgtgaatggctcccactaggtgacactcgcgggctagtctcactcaaaaggaagccatctgtggaagttcaacaattcttagtcctgcaagattggaggatgctactgagggatgtagttc

SEQ ID NO: 352328 - DNA, 431 bp, Zea mays
cggacgcgtgggcggacgcgtgggcgtgcccgtgcggtggttcgaccagatccatctcacacccttatcctctttacgcctcaccactacagagaaaaagagaaacctgcgagcgacggggactatggccgccacccgcaccgccctggccctgctagggcacgagggcatggaatctgggcccaggccggcggcgccgcgccgcagcaggctacgcgtcgtcgccgtcgcgctgcggaccaggcccaccagcctcgcggccccgggtctcccgcccgcggcgccggagcccgtgctgccgtcgccgcccgtggccgcgggcgccgcggcggtgctgctcgaggcgggcgtgccgcccgccgacctccggcgcgcggcggggatgtgcccggagctgctgtccgtgtccgcggaggccgtcgaggccgcgc

SEQ ID NO: 352329 - DNA, 137 bp, Zea mays
tccgggtcgaacacgcgtccgcagacgcgtggggtaggatcgatcttgttagcagagcagaactcgttactaaaaaaatctatattatattacagacactatagctttttgataacttgccgtgcaaatgtggtaac

SEQ ID NO: 352330 - DNA, 363 bp, Zea mays
cggctgtcatcttccctaccggaagcagcggcagggggcaagatggtgcggcttggggcaagatggtgcagtggctcacctaccggaagcggcacagctacgccaccaaatcgaaccagacccgcgtcgtcaagacacctgttgattaggtgggaaacttgtgttccagtacaccaagaagcgcgcgagcggaccgaagtgcccagtcaccgggaagaagatccacggagtatgtgccgcccatctttctattttatcctctcgttattgtgttacgtcgttgcatcatgctccatgcagagatttcaactttaatgctgcttgatcagcctacgctaagagtttctgatggaacatgtattt

SEQ ID NO: 352331 - DNA, 348 bp, Zea mays
caccagcccagcagcagaagcgcccctcggccctcgctcccacaacaagctcaagccagccttctctctctctctgctccaatggcgcgcttctagctcgcagccgtggccatggccatgctcttcgccgcggcggcggctcatgcttcacagccatctcgtactcggctcgaaaggtgtctctcacgcctggtatttctcctccaatgcccgcgcgggtttacccgagcctgtcggcacgtttcatacttgccgtgttgccagcactcacccagattgcttgtaggccgcacctctaagaaccatgcctagctgatgtcgcctccgtcagtctgtcagcattcaagc

SEQ ID NO: 352332 - DNA, 368 bp, Zea mays
ggtacgcctgccggtaccgtgccgaagtctccgggtcgataacgcgtccgcccctgcagggagacaaacagcgattgcgtgataggattctagattcagagaaatctgcaaagattgacgcccagcttaatgatcacgtcagtaggatgctcacgtcgcttgactaggatatgagaaatgacacatccaactcgttctatcaaaagacattacgatataagctactcctaaaagatcattgtctcaaccaacacaacctatgacagcgacagtgttacctcaactatattcacctgaagtcgttgccatgataacggcaatctctcaaccaacggcatcaatggtccggaaagtactgcgccaaccta

SEQ ID NO: 352333 - DNA, 406 bp, Zea mays
gcccagaaagcgctcgaccgccgttcccagcgtcggcttctccagtctgccctggctcaacgcttggacaccgggtccactgtgctcgtccgtgccccggactccatggcgttctcgcctccatgctagctccagccgagtcttttttcccatcgagctcgccctcaactctacagcgccgtctagcccgtcgtttttctcgtccagtgctcgcgcggttttacccgaaccgcgctgccgtctcctagttgccgtgctgccatcactcacccagcttccttgttggccgcgcctctatactctactcctaccggatgtcgcctccgtcagcctgtcatcattcacgcgaatatcaaatcaaattgagatatggtgagctgattcactagttttactattagtttta

SEQ ID NO: 352334 - DNA, 169 bp, Zea mays
catcctgcctgatgcaaacatttcctcttccgatcgtgccgacgtttagcgtggtacgaggctgctggttctcggcacggtcgagatgtctgaagtgtccgttagaaaccacgcggacgtggaggacgcggacgccgggtagctgatggacctgccggcgagcttcggc

SEQ ID NO: 352335 - DNA, 122 bp, Zea mays
acgcctgccggtaccgttccgaagaccccgggtcgataacgcgtccggcatgtttgtatatcactatctgggtaaatagtgtccgccttcgaaaataatacagcaaatgtttgtgtacccct

SEQ ID NO: 352336 - DNA, 424 bp, Zea mays
cacagcagacgccgtcacaactcccatccatccgcttcttcgactccacatcgggagccgcaagcagaaccaatgacgacgacgacgaagcagctccgccgcgtgcgcaccctcggcgcgcggcgcgtcgggcgccgtggtgtggctggcctccgacgaggcctcgggcgagctggtggcggtcaagtcggcgcgcgccgcgggggccgcggcgcagctgcagcgcgagggccgcgtcctccggggcctctcgtcgccgcacatcgtgcgctgcctcggctcccgcgccgcggcgggcggcgagtaccagctcctgctggagttcgcgccgggcgggtcgctcgccgacgaggccggcaagagcggccggggccgcctcgcggagcgcgccatcggggcctacgccggggacatggcgcgcggg

SEQ ID NO: 352337 - DNA, 377 bp, Zea mays
cggacgcgtgggcggacgcgtgggttttgcagcaaccaggaagctgactgaagataaatatcagcaaatgttaccacaccagatataataaaacttatccagtaacatatactgatctccttattatttcacatgaaatggtggcaaaataaaacgtatccaggatgaggatggagtcaattcaaaactgctgctgttccctgcatgcataactcatctcccagcacccatccggtacaactactggcggtatagacacatcatgacaaagctttcatgagaagatctttgaccttccgactaaagttgtctatttgaatctgctcacattgagatagttctatttgcagacaacaaaagattgatatggataaagg

SEQ ID NO: 352338 - DNA, 213 bp, Zea mays
aacacgcatagacagagacctctaccgagacaagagggagtgagagaggagggaagctaagccgtacgcatcttatcctgctgattctccccatcactttgttggctctgcgtgcatcattcatgcttacttacaactctgacctcaatgtcaaagggatgtgctaataattttttttgtacgagtagaatgttcgtatttggcaaatcagtt

SEQ ID NO: 352339 - DNA, 418 bp, Zea mays
ttcccggggtcaccgacgcttgcgattgtcgctgcacgcgctgcgcagccatccggcatccggcaagacggcgagggagtatgtaccgatccatgtatcatagtcgtgttccagcaccgattccatccaaatctaaacttcagcagtttcactgattcacttagtacgtagtcagctaatcaaccttgatccatcctaagttttctgtcatgttgtgtagttcctctatttccagtttacacgacaaccatgacgattaatttcgaatggacggagttcatagctaagttgcaatcacctgctgtatagtgttccaagtcgtggtaatctatcttcttcattatgataggagattagccagtcagtgtgactcagatcacacatgtaacaggtgcaggtatcattggattccatatgc

SEQ ID NO: 352340 - DNA, 382 bp, Zea mays
aggctccacatcgcgaaaagcaccatcttcgtcaccacagttaacaggccgaagcgtttttataatgtgtcagagaaatcgccagttggtaatgttgtcattgaccgggatcacaaagtttataagtgaatcatacacacataatgagtctggaattatatactgcttttcaaagaaggaatgtgtataggttgcacaagaactgcgctaaaggggtatttcagcacattaggagcatgcagacatggagatcctgaatcctgacaaaattcataggcggatcgacacacatcggatgtgattgggactggccgtctccgtaaatcttcgcctcacctctatatcatggacaccttgcgtcatcgttcacaccatatcacta

SEQ ID NO: 352341 - DNA, 417 bp, Zea mays
acgacgcgcagcgagagcgcagcctgctgcgggactggctgctgcccgtggagggcgcggtggcgctcagcatcgtgctggccttcgcgtggcagaaggccgtgcgcgcgtggccgcgcgctatggtgcgcgtcatcctctggtccagcttcggtgtgaccctggccgtgggcgcgctgctcatgtgcttctcgatgctggccactgtggggctgggcgtggcgatggtggtgttctccatcggcaccgggctgtacgcgtgctgggtgacgcggcgtgtgggcttcacggcgcgggtgttcgagcgcgcggtgcagccggtggataagttccacggtttgaatggccccgcgtacctgatggtggcggccggcttcgcgtggatctcggtgtggtgcgtggcggtgatcggagctg

SEQ ID NO: 352342 - DNA, 366 bp, Zea mays
ctgggatcgccattgggtcctcgatcctcgttggggttaggcacggagaaaattccttctctgtggtagggaacaaggacaagggtgcatggattttcttcaaaggtcttgtttagatactctagtatgcatcacaatccacaggtcttgtttagatactctagtatgcatcacaatccacatatgttgaggtgcattggaatgtaaaattaaattaatttatactccaatccatatcaatacatatggatttgggtggatactagagtacccaaacaaagcataaatggggcggttacgaggagacattcctagcaggaatttccctttttcatctcgaattaccctaagatgggtaagagtttg

SEQ ID NO: 352343 - DNA, 378 bp, Zea mays
cggacgcgtgggcgggcgcgtgggcacaactgcagtgtaagtagcgctacgcggccggggagagatcgggaaagcgggaagcaaggactatggcgtctctgctcagcctgtactgcggcgacgccgccggcggtcggatgacgatgagccgaggtcgcggcacagcgcctgcgccagtgaggcgtctgctgacgaagctgaggtccagcttcatcagaccgagcgctgctcggccgatgactaaggcggcagcgatgttcgcctactacctgcgcagctactcccagaacttcgacgactgcgtcatttcgtcgtcagctccggcggccactgctcgtgcgtacctgcgactccagtatgattctgcttcttctgtgt

SEQ ID NO: 352344 - DNA, 308 bp, Zea mays
ttcagaactcacaaacacgcctgctccctcttcgagaaatccaacctactatccaaaccgtctcccgtgtgatgcgtcgccgtcgaagagtcaactcgcctatccagatgcagacataacaaaaatgagagagtatctagctaagagcgtcgccggcgatgctctgctccggacgcatgctggcctgcaacggggtcttgcccagtcggctccagctgccgaggggcgacgcctaacacctgcgtccatcagcgctcgcgcggaagtggcgcgtcgtggcctccgctgcggagtccagcgggtcccct

SEQ ID NO: 352345 - DNA, 198 bp, Zea mays
ccacgcatccggataccctacgtacgtgtaaccgattcaccgaggtcaccgtttgtgtgccgaaacaattggcaaggtactcagtgtgttccgaatcgatcatggcaaagaacaatgctccggacgaccgagcgtgccggcaccaataacgagcggcaccagcacgagcaggaccatgacgatgtgctgcaggagcac

SEQ ID NO: 352346 - DNA, 164 bp, Zea mays
accacgcgtccggttctagatcgcgagcggccgcccttttttttttttttgtgtatccaaagcacgcacgtacttcgtcaaacagcagctgcatgttttcagctcccttgtctgtacgtacatattgattttattttacctcaattgttagagttgtttgttat

SEQ ID NO: 352347 - DNA, 176 bp, Zea mays
gggtccacgacgcgtccgaaaaaaaatcaacaaaatcatgagcaagaaaaatctgaatttaactgaaaatgaatgtatgaaaaaactgacagttgcctcacaagaagaaaaaagagaaaaaaaggtctcgaaaaaaaagtaaggaacatgtaaaagtacgtcaaaaagggggggcg

SEQ ID NO: 352348 - DNA, 185 bp, Zea mays
caaggaggaggcgcgcgcgtcggcgccggccgatggccttgaccccgccggcgggggccccgggggcgtttagtgggtcgtcatgtcgccgccctgacccgcagaaccatgctcacgccgcgcgcctcgcctatgtgctcgccgtgctctacatcgccacggatgcgctcatcaagcaggatctc

SEQ ID NO: 352349 - DNA, 403 bp, Zea mays
cccacgcgtccgctagcctaaacttggagagaatgaaaggaatacctgaaccacccaaaccactccctttcttgcgtgctcttgagagttgctaacattttggtaccagagccaacatggatccaccacacgagtacttcacgagggcataagcaaagggcggagtgatggcaccaccgcgagtggaggattccttgtcgtggttgatggctaagatcgacgaaggcaacaaggagacatacaagcggacgcactctatacagtccgccatggagaatttgaagaataccgtcaagagcctagtgactgatgggagtgacttcaagaggtggataccggagatcgaagccaaggtggtggagatgacagaagtgctgaagacactctagctcaagtgaacacg

SEQ ID NO: 352350 - DNA, 431 bp, Zea mays
cccacgcgtccgcgaggaggagatctcgtcctccgccgaggaggaggaccagtccgacgccgccggctccgtatctggcgaggaaggggatgacgacgacgaggatgctgcggcgccgcccgcggaggaagctgagggcgaggggcagcaggaggaggaggtcgacgaggaagagatcgaagccgtcactaccggcgctggagctgaggacgaggaggacgccggtgccgttaccgccgctgaaggcgacgacgagtcccagtccaccgaggacgacgagcccgtcgcgagggacaaggacgatgacgacgagactgatgcagtggttgggaagcgagagaaagcaaggctaaaagaactccagaagatgaagaaacataaaatccaagaaatattagatactcaaaaagaaaaaaaaagggcggccgctc

SEQ ID NO: 352351 - DNA, 155 bp, Zea mays
aggacgcgtcggtcactccgttcagtggatctcgcatgagtccttgggtggggctgtctatgccgagttcggacactggggcctatttcatcttacggggttctcagtcgggaagtgctgttctctcttcatcctctcgctgctgagtattgcag

SEQ ID NO: 352352 - DNA, 322 bp, Zea mays
cacacgcctcgtcgtgaccgaggcagccaaatgccgtattcaacatctgtccgagtccgcaccttcgactgctctatccgcgccagacgatccgggggagttctctagcacgacgcctttatgggaactcataccactgttggcgagactgaggcttaatatgcagcaactagcatggctacacgcactaggcttgaaaccaggcttcctatgttgccagatcggccggagcagcgcgactgtgccatcgatatgacgcactgatacctgtatgtatggatagacccgcaaatttgcctatccacaagcggggttccaaagg

SEQ ID NO: 352353 - DNA, 263 bp, Zea mays
cgatggtggtactggtacctcatctgttggtaagcgtaaatatactgtctgggttgtgagagagtcattttgtattgtaatatacatttgtaacagatacaaacttagtgattaaactttgagctggctgcactcttttttcctttctagggtttctcacaagggtgagttttacctagaaaggtttttaatgaggcagcattgcacaaaacagctcatttattatatttgtctatattttctactgttttttaactttggtt

SEQ ID NO: 352354 - DNA, 320 bp, Zea mays
cactgtcactgccagcctccccttcgcttcgcttagctcgccgttaccatggcgacctccaccttctctccgcgccccgccagcctcaagcccctgcgggcacgcgccaagcccgccggcctccagctccaactcctccccttcccgcgcctcggcgtcgcctgcgccaccgtcgccggggaggcgccgcccgttgagcagcgggacgaggtggagccggcctccgccgcgggatcgaacgggactgccgttaatgtcgaggcgtccgccgcgaagcacgagtcccagcgcgcgcccgcgctggtcccggacttccgcga

SEQ ID NO: 352355 - DNA, 430 bp, Zea mays
cgaagaaggccgggggcgggggcgggcggcgtgggtcgcgcctacccgaggcgccgggcaacctgttcgacgacagcaagcgcgggatgcccaaggacgggtggacgttcgagctgccgttcggggtggacgtcttcctcgtcctcgtctccttcacgctcatcaccaccatcatgttcggcaccgccttcctcgtgtggaagctcggcgctatacacttcaacgagtactagcctttagactgtctctacttgattgggggataaagggcgattatgcagtgattcttgcagtgctagacgagagaactgtgtgcattcgtaatgtactgtattgaccacagacactggtctgccggagattttcgagagaacgtagaaatgtgtgattgcgcgaaacaggtgtcctgttatgtagaattaataaatat

SEQ ID NO: 352356 - DNA, 426 bp, Zea mays
caagatctccgaagatgctggctgagtcaatggcactaagaaaagatggtgggaacatcccctgctggacagtcatactcggaagaaatccgtccaggttgtgcgtgtgttgctgtgccaagagtactcttgcgagaagatgtaacagaaccgaaaactggcatcaagttccccactctacttaaagacaattccaatctgactacagaggtacactgcccccagttgacacatgcatctgatggttaaattggcaggtccttgttggaatgggtttcagaagcatgcgaataatgagggttaaagatctgaatctttatgcctttggattatatatacaacctgattctgtttgcaaaaagctgggtccaaagtatgcttgtattccagatgctgagttgaatgatcacccagatttctatgaag

SEQ ID NO: 352357 - DNA, 314 bp, Zea mays
caaactcatccgcccaaccagacccgcacgacacgacaccaagtcgaggagctcgagggcaccaatcatggacggtgtgcactccaacgtcgtcgggctcaagcccgccgcggcagtgccgcaagccgccgccgcatcatctctggcaaaaccggtgaatgtggtcacgttccgacaggtcgacgtaccgatcagtccagtctgacggccgtcgtacacgtcccgacatcacagattcagctaatggcacaattttcaagtccttactcgaaaggattacagacacatacgagcattgcgagattaagatgctg

SEQ ID NO: 352358 - DNA, 267 bp, Zea mays
caaactcgtccgcaacgactcatcgatcgagagcagcacacactgcacgcagctagctaggatcatcaacagcggcggccatggcggactccatgatctcctcgtcatctctggctgtggcgcctcacggcctgacgcccctctgccgccgcgcctcctccttcgacgtcgtccgctccaagaagatgatcactcagcgctagaccctacgggattgtgggtggacttaccgtctacatctactcgatcagtataaagggccatggc

SEQ ID NO: 352359 - DNA, 282 bp, Zea mays
aatcgatccaccgaggtttcttgtgcgtgccgccatggccatggcagtagctcaccttcttcctcagctctccgccgaaggcaatggagctatcaggaacagaatggccattctcttgattcttcagctttttctcttgacggttctttgttccataactgattcagcgctaggcgtggatggagcggcgtcgttcatcttcaccaacgcctgcaagtcacgcggtgtgggtgggcgcgctccacggtgccagctcgccgccgctcgcgcggtcgggcttct

SEQ ID NO: 352360 - DNA, 135 bp, Zea mays
accacgcgtccgatgaacactgtcctaccatgcagtcaacgctcatcgtcggggtatcagcttccgcgtaagacgacacccagtatcagctgggaaggtagtccgttgattgtgctagctgctagtgatgaccct

SEQ ID NO: 352361 - DNA, 373 bp, Zea mays
gcagcacctgcaacgaacgacgacgacagctcctcctggagcatgcttcgtcacgcgccggcagaccagcaagcaatggtggggagctacagcttgcaccaccaggcaatggaggcgaaagctgtaggcggcgtcacctccccgagtttctccgctggtttgccgagctcgccggtggcggactacgtgggaaacgatgcttctggctaccatacaaacaactattaattaatgatggatgatgagccgctgccgaaaatatagtgatccaataggtggtgttaggctattcacacttactgtacagttttaaaacaatgtcacatcaaattttgtttatggaaccgtgtacactgagtttcaactagatgca

SEQ ID NO: 352362 - DNA, 310 bp, Zea mays
cccacgcgtccggggaggcgtcagcgtctgcatatgctgatgtttatagcgcatttgcggagatcgatactattcatgttgtggaaaaacgtgacacacatgacaatgtccgggacgttcctaaggttaacccactggcacctttagcaacgattaatccagaagagcttcactccaaaattctccccatcttcgctgggcgacccgcaatcatggcatgtcaacgacatggctcatgtggcgagccagtttccggggacactgagcgccaccagctactcgatcacagagtagaacatacctgccctga

SEQ ID NO: 352363 - DNA, 206 bp, Zea mays
  unsure (1)..(206): unsure at all n locations
cccacgcgtccgaccggccccactcgcgtggttcctcatggagagccccaccctctggctcccaccgctcgtcctcctccgctggccgccgccgccgctctccggcccactcgccgcactccccgccgcgctctacgcgttccactacgtcnagcgcacgctggtcaaccggctcggcctcgccggcctgcgcggcgccccggccc

SEQ ID NO: 352364 - DNA, 286 bp, Zea mays
cccacggcctccgaacacgcgtcaggcgagcggtcgcccttttttttttttttttttttttttttggcaagaaaagtaataactatacgattttgggaacgaaagcaaaatacgaacgagcttctgacgctactactcaagatagataacggttctacacatgttaccatcacaagttcatcaatatgactccaaggtggtaggtaagtctaaggggcaactttgttacactcacgaagcagtggaaaactatacaaaattactgccccggtatcacacgtcctca

SEQ ID NO: 352365 - DNA, 336 bp, Zea mays
cggacgcgtgggcgctgtaccacccccgcagggcggcggcctcctgcccgctcgccgtcgccgccgctccctcgtcgagaaaagcgttcttgacgtgcccgctgctgggccactggaccacggccgcgccgccgcgcgccatcccctcctcgtcgtcgtcgtccccggcgctcatcgcgtccgtgcaggacctgtacgacttcatctgctgcggcccgctggtggacaggatcggctacaccagtgagaagatcgccgagtccatcgaccgctggcttctcgccggggctccggtggcgcgcctcttccgcctcaacgagctccagctgtcggacg

SEQ ID NO: 352366 - DNA, 261 bp, Zea mays
agttaacggtgtcattctattgtgagtcccgttgtgataaatttggacaagtatatatatgtcggttataattcgtatgaatggttagcttgtttatgttgggtccgaggaatgtaatcgatggttcaccgttcctctggaaaatgttgtgtttgcaatttagagagtattgttgcaatgactattatgtttgacaacagaatactcagaaagtattgttgcaactccaaaaaaaagaagaagaaaagggagagcgggcag

SEQ ID NO: 352367 - DNA, 419 bp, Zea mays
atgcattggaggagtggatgcaaaagttactttctgacattgacttgtcaagaagtgctcctgttgctgctttttttgagcttgaagctgctgcacgttcatatttccaagaacggaatgggcgtccttctgaacagtctgacaggagcaactggtaatggtgtgcttggagaagctatcttagatcagtccgatgagcttgttagtaatgccttgaatcacaggaaacggaaccttgtattggaacatgatggtaggaatggttcagtagcgtcttataggggagttgtttcagatgaggaccgtgtaactaatcccgggcatgctaggaaagactctgctgaaagtatttggagtgatttgagttctttaagaggaagtgaattatctattccaggggttagtagtttcctttggga

SEQ ID NO: 352368 - DNA, 418 bp, Zea mays
gccgcccagagcggcggcggcggcggtacggcggcggcggcgtccaagatggagagcagcccgaccagcaccaccatcatcggcgaccatgccagcgacgacgcgctcgaccacatcctgcagtacatgggcggcggcgacaccaagccggcgctgctgaaccaccacaaccaacacctcgctgccgcggcagatgctactactactacgaccgccgcgtgtcctgccgccgccacaagcgccggcctctacgggaacaacaagttcatgaagctcccgcccctcgagcacgccggcggcgggctgccgccgagcccggggccgtgcgagtacggcgcctcggggatcgccgactgggacgccctggaccggctcgccgcctacgagctcaacggcctctccgacgcgttcaagaaca

SEQ ID NO: 352369 - DNA, 382 bp, Zea mays
accacgcgtccgcccacgcgtccgggctagaaaagcataattattataattagtcatatatcactagttagtatctgcttaatgctttgttataagtgtttcgtcatcttcaacgtagattaattgttttataagattcctctatatattcatacatgtgcattgtgcatcccatgaggtacgataattaatcgcgtgatgcggaagacgagccaagtcgagcccaagcgcgggttactacgcatggtaatgctgatggaagaacctccctcatcaggtgctaggacaaggatactcgtcaagtggtcatcgtctaacaacactaacctagtgttatccaggttacgagtcacttgattgtgattggtgttaaacgctggtg

SEQ ID NO: 352370 - DNA, 295 bp, Zea mays
aaagaagaaggacggtggcggcggcggcggggccgatgagaagaaggatatggataatgagaaggataataaagcggacggcggcgataataaggcggacaatgagaatggcggcggcggctcctgcgtgatagatgaaggccgacaatgaaaaaggcagcggctagaagaatgccgacaaggataatggctgcggcgagaataatgcctgacaatgagaatggtgccgacaagcccattgaggataatgaataagcccaatgacgagactgttacgctgaagattcggctgcac

SEQ ID NO: 352371 - DNA, 389 bp, Zea mays
tcgcgggtcgacacacgcctctagttgtcgtcatgcaataaatatgatgaggaaccaacctcgaggtggtcacatattcaaccttgatggtgctggttctgatggaaggccaactccaagatttgctgcatatggtgcaacaaagagaagtgttgtgcatcttacgaagtcacttcacgctgaattgcagatgaatgaagtgaataatgtgatggtgcacaatctatcgcctggcatggtcacaacagatcttcttatgtctggtgcaactacaaaacaagcaaaatttttcatcaatatattagctgaacctcctgatgtggttgcagactaacttgttccgaacgtcagagaaatccctaccaggcaatccatgaagccaacctaga

SEQ ID NO: 352372 - DNA, 156 bp, Zea mays
aacacgcgtcagaatgtgttcacggacctgtaatgcttgctccttgtcatatgaccttgctctaaacatttgtgatgaagctgtcaaggtaatatattttctctaaatatttagcctaaaaaaaaaaaaaaaaaaagggcgagttctagatcgcga

SEQ ID NO: 352373 - DNA, 393 bp, Zea mays
cggacgcgtgggcggcgccttcccctcgggtcgtttcgtgcgcccgtcgccgcccagacccagacccagaccctgcccacgcgcggctcctccccctcctcctcgctctctgccccgtggccgcgtttcggggcaacgccgtccccgacgtcccgctgctcaccttccaggacgacctcctccggcttgctcctatcgagttcgtcgccggccccgtcgtcggcgagatggttgtcgaggatgtggccgttgactgcagccctagtcgtccagctgaactgcgccgcaggctgcggttcaagcgcatgccctgccttgtgcagacccaggtgcgcctgcgtcagtcacacgcgtcgccgtcgctgtcgctggaagcactgggaggctcatcag

SEQ ID NO: 352374 - DNA, 88 bp, Zea mays
aaaaaaaacaaaaaaaaaaaaaaaaaaaaaaaaaaaaaaaaaaaaaaaaaaaaaaaaaaaaaaaaaaaaaaaaaaaaaaaaaaaaaaa

SEQ ID NO: 352375 - DNA, 273 bp, Zea mays
tgtagatcgcgagcggccccccttttattcttattttttttcgcacgatgacactgagtatatttcacaggcatgtggaagagatcccctagccttacgacagggtgccacagaggattagtagcagtgtcccaatgtcggcgtgtgcagcaacacacgtagtctcctcgggtgtcagagtccacaacgagacattgctgacatataagccccgtctggtttatgatcccgacgcggggattgactgcgtccaggctgccagtactttgccgc

SEQ ID NO: 352376 - DNA, 380 bp, Zea mays
cactcctcgccatcacatagaaccagtgcaagcagaagcagcgcaatggcgagcagcaccatggccctctcctccacagccttcgccggcaaggcagtgaacgtgccgtcgtctctcttcggcgaggcccgcgtgacgatgcgcaagacggcggcgaaggcaaagccggcggcgagctccggcagcccgtggtacggccccgaccgcgtgctctacctgggcccgctgtccggcgcgcccccgagctacctgacgggcgagttcccgggcgactacggctgggacaccgcggggctgtcggcggacccggatacgttcgccaagaaccgggagctggaggtcatccacgcccgctgggccatgctgggcgcgttgggctg

SEQ ID NO: 352377 - DNA, 191 bp, Zea mays
aaagacgcgtgggcggacgcgtgggcggacgcgtgggcggacgcgtgggcggacgcgtgggaagcaaaattctgcgggagaagatgtattttagcatgtttttaaccttggggtcagactctttcgctgtcaaaaaatcaaaaaattacagacgaatcacgaaaaactaaaaaacatatatcgagagctcc

SEQ ID NO: 352378 - DNA, 107 bp, Zea mays
tcgcgggtcgacgcacgcctctaagttgagtcgtgtcacaataggtgattgtcctactacgatgcaggtacaacagtttgcacaattattcttcatcttagtctgct

SEQ ID NO: 352379 - DNA, 421 bp, Zea mays
ggctgaggttgcagggtgcctctgttccagaaggagctttgtctctggcgcattggaatccagtgccgcttcagcggcgtgtatctgatttggaggtggcaaatgccgatatggctcagcagtactctgatcttgaagaaaaatattctcaaggtcagactgaactggcccggcggtgctctgatcttgaagaaaaatattctcaaggtcagactgaactggcccgggtttctgcttctctgaacgatgttaacacgctgaactctactctccatgctcagctcaactctgaaaaggaagaaaaacgtgcccttgctacttctcgtgacaaccttgataagctataccgtgacgccagcaactcattgaccatcttggagaggagtcatcgcttcaccagggaggagttagataatcatcg

SEQ ID NO: 352380 - DNA, 53 bp, Zea mays
aaatcgaggctccgcgaaacacggcggtgaggatgctgtttagcacatggacg

SEQ ID NO: 352381 - DNA, 249 bp, Zea mays
cgtcgagcttccaggtcctaaaatgatccgaacaaatgtgtggtgaatgtatgttcccgtgcgatggcacgtgacagagccagttgcggggttgtctgctaaggtaccatgtatgcgggtggcctgcataggtatctgtatctcccgataatctccgcctgtggcacgattaactggaagcccagaacgcatgtctttatctgcgtgctgctgggaaccctgatcccatggtgcggtggacgctccatc

SEQ ID NO: 352382 - DNA, 147 bp, Zea mays
gtagtatgacagaatcatgtggcacttgctgcattgattgaactggttcatatctgttggggtcttggggcttgatgtttgcttgatatcgtgttgcgcgtttatggtcattgcttacctttcaatgttggatttatggtctcgctt

SEQ ID NO: 352383 - DNA, 185 bp, Zea mays
cctccgcttccatcgggttcgacgacttcacctatggaatctgtcgacaatccacgacgacgaggcaaactgctttggacgcaacgtcaaagggtcccacgctcgcagggcgtcgaggctttacatgccccagatccatcaagaacctcaccccacaaaaattttcactgctcggtgactctccg

SEQ ID NO: 352384 - DNA, 299 bp, Zea mays
  unsure (1)..(299): unsure at all n locations
cggacgcgtgggaaacggacataccaagaagttgcaaagctagacttccctgcaaaatagtgtaatctttgaaggtancagtgaggatacaagtgtcaaaggcttctggaaattgtgaggtactttggtatgccaatactcttgggactagttggcccaaatttctcgagtagcatctagacatataccaaatatgtatgtccatgtgtaacttcttaacatagatgatagcgactctaactataagagtaactatggctgcggacttccccaggatcttgttttatcatcctttagac

SEQ ID NO: 352385 - DNA, 170 bp, Zea mays
ggagcttctcccgcggcggcggcgtccatcacggtaggtcgttgcgtgcgttcgtcagtcagaatttcagaaccgagttcaaacgaaatgaccgagggatggctgtgagattaagatccctcgatggcgacgcgggcgcgggagaagctccgagagcggctgttgaagga

SEQ ID NO: 352386 - DNA, 411 bp, Zea mays
aaaatcgtcattttgctgattagatacttaaatatgatggatttgccaactttctttatccttgtgatgaaaacggctgaaccaccagcagccttgccacttgtgacattaacaagtaacttgcactacctgacttgtgactagccatatcatatctgatttcttaagctcatcatgtttacacatgttttcttgtatatactagttttgtcatttgattctagtaagaagtgattttctaaagctgttgaagtatcataagcatataattatgatgagtttgaagtgatattttattttcatgtatctcatttttgcataaacatttatgtggtattatccaggttcaagattgaagcaagatacaagagcatggcagaactaaggtgatgtttcttgttgtagactcct

SEQ ID NO: 352387 - DNA, 401 bp, Zea mays
cagacgcgtgggcggacgcgtgggttgctggtggtgcaacatatactatggaatcgggaactgcctcacagagagttgatgttaatgttatgtatgaatcagaagattcaaaccgacagaaaggcaacattaggtccatgacactagttggaaccagtggaccaaaaataatttcttctgtcagtgcggaagaaagcactactactccagcagatatctctgaaacagagaatgtatcctctgatttgcctcccagtagtttaaggaaacacaagatttcaaaacatggacctaggtacagggagcattctcctggcaaaaggcagaaggttttcacttctgacatttcttttgaaggcaatataatgaataaactttccattccggagattcgtgacaca

SEQ ID NO: 352388 - DNA, 191 bp, Zea mays
aaacacacatccagttgttgaatggtatacttaagttaaaataaaaaaaaaatcacaaaatcaaaaaaaaaaatacaaccacaaccaaaaacataaataaaataaatcaacaaaaaaaaaaaaaaaaaaaaaaaaaaaaaaaagggccccccccctaaaaattccaaccttactttaccttcaattcaaat

SEQ ID NO: 352389 - DNA, 401 bp, Zea mays
cacacgcgtccgcccacgcgtccgggcgggtaaagttttggtgtccgtgtccctcgttggctcgttcgccgacagggaggacgccgatctggccgacgaagtggtccgggagcttggcgggtggttcggcgtcggagaggtcgcgtcgtggacacacttgtcgacgtatcgcatcgggttcgcgcagccggaccagacgccgcccacgacaccggcggggagggacccgagagttggtgacggattgtacgtctgcggtgaccactggtgctccgccacgttcgatggcgcgctggtgtccggaaggagggcggccgatgctctggccaatgacacgggactgtgaactccctatcatggggctgtgtttgagttggtccgtgctgcactgcagagtgcag

SEQ ID NO: 352390 - DNA, 162 bp, Zea mays
agagatcacgttaaataggagagctaccgctgggacttggtggtttgtaatatatgatccaaccagtgatgaatcaatgcattcacttgtgtacacatatacatttctaccttgcataagaaaaagaaagaaaaacaaaaaaaaaaaaaaaaaaaaaataaa

SEQ ID NO: 352391 - DNA, 140 bp, Zea mays
ctaaaatgagtcgtattagcttgagcagaacactgagagatcaagattattagcttttgctggagctacggggattgccacagattctgaggagtgatcatctcgcaaggattgcccagttgggggtatttccttgtaaa

SEQ ID NO: 352392 - DNA, 276 bp, Zea mays
cagtcacattgatgggatccagggccacatcacgagcacggcagcatgaaacaaatcaagtcgtcgctcacctcgaccaacacatctagcgatgacaactagtaggcatccgatgcaagcactggctttgtgttcaattcgacgggcctccagatcatcgaagccgagctcaggcatctcagcacagcagctcgaagacagcggtcaactgcagctgacgcatacctgatgtcgaccaatttcgtgtcgatgtgggctattgaacttcattgctcc

SEQ ID NO: 352393 - DNA, 363 bp, Zea mays
gactaccacaggcttgctacacccggggaagctgccgcagcaggggcgtccgatcgctgcccccaaaactgtgggacgtatcagtgtcagggtcgctcagagtcgatcgcagcaacagcagcacgtgcccgaagaggaagcccaggcagcaatcgtgctgccgccacaggacgctgcaaatgatgcaacgtaggtggacgtcacagtctccgacacagcagcctttggctgagagcatgatcataatcctcgagtgcagcaggcagtagctgagcagcaccaaacgacacgtccgcatctactcggcgtacatcgatccagtgacgaacactttcaaccagatgcatatggccaagctgatgc

SEQ ID NO: 352394 - DNA, 301 bp, Zea mays
cacgcgtccaaccacgcgtcaaatatatagaagatggagagtaaaaaaaaaaaagaaaatatataataaaaaataataataaaaaaaaaaaaaagaaaataaaataaaaaaaaagaaaaaaagggaaaaaaaaaaggggggccgctctaagggttcaaactttatttgtccttacatgcaacttaaaggttcttcaaaagtttcacctaatttaatttcacggggcgtgtttttaaaatgtttttgattggaaaaaccctggctttgccaaatttaagtccccttgcaaaaaatccccttt

SEQ ID NO: 352395 - DNA, 226 bp, Zea mays
aagcatcgcgctcaaccccccgcccccgccactcccgacgcgcgcatcggtcttcttggcaccgcgtcagatcccaccctgccgctctctagtccgcagcaagcgaccgccgcggcaaggcgtccgatcatccacgtctccgcagctagagactgccaacaccccgtcgccgccgtcttcgaggcaggaggccgtctcccatgcacggtcctgctctcgccacggc

SEQ ID NO: 352396 - DNA, 106 bp, Zea mays
cccgggtcgacgcacaactccaaaacagcgtccggtcatgggcacgctcgccatgcacctcatcctgtgctcctcctcgccatctcagcaccgccggcgccccttg

SEQ ID NO: 352397 - DNA, 297 bp, Zea mays
aaagacgcgtggacggacgcgtgggcaattttagagcactgagcagagcacacatggactagtattctaagatgtacggtggacgtctattttgcactgacaaatttagaagtattctaccaaaaaaaaaaaaaaaaaaaaaaaaaagaaaaaagaaaaaaaaaaaaacaagaaaaggagagaaaacaaaaatgaaaagacaaaaaaaaaaggggggacgcgcgatatctaaaataaggccgcaaaaccaacccagttctacgggtctcccgcgttgcggggcaagccgggaaaagg

SEQ ID NO: 352398 - DNA, 411 bp, Zea mays
aggacgcgtgggtgcgagctcaaccgcgccgaactgccaagccagtggccgacatgctctgtcctcactgtccctgctcgttcccctgctgcaagttgtcgggcaacctgcagctcggacttcaccatcggctctttgcgtgctccgctgcaccagatcgccgcgtcaccgtgaagctacatgccttgccttgcgttgcctttcgctgctgctgtagccgagtcgtcatcgcccaagtgctgagcgctctgaacttgccagcgttctgcagccctgccgtcgactctctactcgtctcgctatgttgtcatagttcactatcctcgtcctcgccgtctaccttgccggttcgtagttgactgttatttatttagaacggttggccgagtacttagttttagtggtgtcgtc

SEQ ID NO: 352399 - DNA, 174 bp, Zea mays
taaagtcactcggggtcactgccagggctactgcaactactaccactccgtctttgtagacatgttttacagcgctgttccgctcgcttcgtggctatatgcaaatgcaagtgttgtacggagtactaaactcatacgtggcaaaagatgaataaagacttaaacatttcttcg

SEQ ID NO: 352400 - DNA, 379 bp, Zea mays
cggcgaattcagcttcaccgccccgatacattcgcgcactgcatgtctgaggatcacttcctcgccgtggttcgtgctattcgccaagagctccggtcagcattattcgcagaggattctcacataacaattgtctccatcacacaggtcaactcgatttggtcaccgacaacggcacagtttgctaagacctcatcttcatatcacctcccgtatcacttcccaggatccatattgatgctggaggaagagtccacagggcattcagggtatgcctgagttcatcgacgactcaacgttgatcgtcaatcacgacttacgaatcactaagctcttccatagtttcccatcatgatgtgtcaccgttagtctcaccatt

SEQ ID NO: 352401 - DNA, 348 bp, Zea mays
acccacacgtccgctcacgcgtctgcccacgcgtccgcccactcgtctgcgaggcgtggctggtccgagtcgcatcaccgccgtacaacggcgatggcaagcataaccagaatcacgctgccgagtgcggctcgtgcagacgggccctgagcgcgtagcagtatcgctgcgtgacgtgcgcctcggagttgcacccccgctgcctggtgccggaggtacaacagtgccgcagcgccagcgagggctatgccgggcgcgcgggttccgcgggcagtagctgctgcttcgggctggtagacgacctgacgcgccgcttgggaacgccaggcaccggtcgtcaatagcgtg

SEQ ID NO: 352402 - DNA, 413 bp, Zea mays
gtcgacccatacgtccggtcagagaatgaacttaactccatggtagctttaatagattcaattcgatcaactgaaaaagctcaaaagacttcaagaagtgacgtttccaaactttccaaagatcttgaggaggcaaatgaattgaatgaagacctgatatcacaaatttctaaactccgacaggaatccaatgaaatgcacgtacatatcactaataaactaggacaggcacaatcactagctaaagctctgtcagaagaattggcttcactacatgaaatagctcagaacggacaacaataactcgaagccacctcgattgagctggcatctattgcagaagctcgtaataacttgaagaaagaactgctggctgcgtagaacaatttgcagtcaaccacacatgagcttgt

SEQ ID NO: 352403 - DNA, 390 bp, Zea mays
cgtcagctcacgcgtccgcccaagcgaccgtgttatgccttcaagtggtgccgtcaattgtcaatgtacttgtgacatattaggttgtccatgatgtgtgatgactacagatatggaaatcagactgatgatttgcgttttcagctcatatttttgatcgccttgtcgaagttgtgttttttatcgcaggcatagtagatatcaagatatgacagcgggtccattgatcaccatgacatctctggcatcaggtcctaaaatttgttgctggctcgcttccatggtcagatttcggctgtaaatcttaatgatcatttcctcaaggcttcagttgatgtctacttcatacatgagatgttccattatttttgcacttagttcggtactatg

SEQ ID NO: 352404 - DNA, 94 bp, Zea mays
accacgcgtccgctaaaaaatactacaaataatccaaaaaagtaaagaaataaaaagataatacatcatgggctgtcgctctataggatcatca

SEQ ID NO: 352405 - DNA, 419 bp, Zea mays
agcacattcaaattgaccaattgctactagtgctataactttattccgaatggataacttcctttcgaaaagactaaactgaataattatgtcaaagttgtttcactagtttggcctaataggtattgatctatggtatctagactgcaggttgtactatagggttgattgttctgattttgggcttggttaatctaacatttctagcatccaaacatatagatatatgtcagctacctgtgtaccctgcacgaataatcctataaatccaggttgaatattttctgcatgtaacctaaaacttctacgctatggtctttcacttacaggttgtcaaagaagagcacatgtgctaatttggttgggctaaaattatatagaaaagagtgttgccttgggctacgagtctaaaactatat

SEQ ID NO: 352406 - DNA, 78 bp, Zea mays
ctcgcgggtcgacacaagcctctacagtcactcggggtcaagtcgttcaacctcggcggcatggggtgcaacgccggt

SEQ ID NO: 352407 - DNA, 417 bp, Zea mays
aattttgtattttcaattttattattttttttttatgtttttttttttattatttttgatttgtttacttctttatttttcatttttttattatttttaaaagaactaaacaccgtccccaataattttcaccacaagggagaatacatcatacacaacagcggggtgaaggttcaattaaaaaggacttcttcatcaaatttctctaattgtaacagtccagttccaatccttccgcctaaaccaaaagccaggtttcccacgtacgaagactggcacaatccccatcgaggatttgcaatcaaccgtgcatcagccaatagaacccgaggtccttgtcatcgacgacaaagtcacccttcaaaaccccacagtaagccgcaacgggccaaaaaaaaaccccggggaagaggcggc

SEQ ID NO: 352408 - DNA, 419 bp, Zea mays
atgcgtccgcccacgcgtccgcccaagcgtccgcccacgcttcagcggtcgcatgagatcggcctcattcaccatcaccacccgcaccagacactagcatactcgaccactgatacagtgaggggagcactccgcagcgattgcccgttgaagcgcccatggaggcaccacctactgtggctacagcatcccgcacatacaggcgctggcacatcgtcgcctgcaatggcctccgcgccgtgatgtggatctgggttttccacacggctaagcaggatcgggcttagctcttgggtttgcgtcatccctgggatggacatgatgaccactctcatggtcatggacacaggcatgaagcatcatcatcggcatcttcacatttagttccgtactggctgctgacgatactttgcatgttc

SEQ ID NO: 352409 - DNA, 191 bp, Zea mays
aattcgagatcgcgagcggccgccctttttgtttttttttttttgattttttgttttttttacttcttttattctcatattttttttattctgatattattttgtatattttctcatggggaaaaggaggtaagaaaatgacagcagagggaaccgcacggaaaaagcagcatgccagcggaaaccaagtc

SEQ ID NO: 352410 - DNA, 415 bp, Zea mays
agaagatgcacacctacacgatatcatccatcacgttgatcatgacaatgatggtcggatctactacaactattttgtgacaatgacgcagaaaggaaatatcccactagggaacttggggcactgccagatgagctttggtcttagataagcactgaaacttggctaagtagaatgatcaatccagtgtgtagtgccattcggcttcatatgccaactttagctgctgagactaagtccgtcaaattgggacgccgatacctacagtggttcatatgcgcggtacgacaacctttgggagaccaactaatcagtcagcatgcaggatcacattggagatccatcgtcgtaaacctcacatgtacatggcttatttgaggtaggataggaatcactgttgtgtttcacatagtca

SEQ ID NO: 352411 - DNA, 394 bp, Zea mays
acctttttattttttttttttttttttttttttttttttttttttttttttttttttttttttttttttaaccaactcggctagagtcgccttcctaagcgtttctaatttacagttccagtaaacacaactgaagccgcgtgtcttccgttttattaacgattagatgcattattatatgcaagttaatgcaatatagatactgctttccacgcacccaattctccgaataatatgcattcacagtaaaaacaacaatctccgagcaacaaaaacctttaaaaacgtactcatgaccgtgtcacttgtaggcgtggatgtaatcttgaaagtataagttcttcgggcttaagttggcaagccaatgggaggcagcaaagcacagcacggggcg

SEQ ID NO: 352412 - DNA, 153 bp, Zea mays
tgctattcgctcgctcaatggcagcttcccttctcattacctcaaggcccatgaccaattccacactaaccacccatgacaagccccacatgttgggagcattctgcgcaccggatgataatcagcagcaactcatctcggaggccgctttgc

SEQ ID NO: 352413 - DNA, 371 bp, Zea mays
tcgggtccacgcatacgtccgataacatccgctcgagtgggcgtgcataagccgatataatgcactctgcacggcacatggatgggctgatctccactgagatcacaggattcatggtgggtggcctgctgctcagctccagcatctctgctcccaaagtcgacggcttcatcgcttcctcccaaagaaggtcactagggatatgtaagaggtgcggtgaccttcggattgtaccatgtccgcagtgcaatggaacaggatcagctcggcgctgcgggatgctcactttgggcgtgcaggatgatctcgacgagtctcatgtagccgaagccactactgataatctggttccttgcacaaagtgcaggtcg

SEQ ID NO: 352414 - DNA, 353 bp, Zea mays
cacaggacacccttattattttattgtgtttgtcaccacacatttccaaaccatacatcaacaatatttaatgggcatttctcgaccaataatatcgcattggtactcccacttacatttacacacataggcaagctcctctcacgcaatagagtctacaagcatgcaccggattacatcgtctcgatgctacacctatttcactctacagctgaatatggatatcagatcgacaaatctgttcatgatttgtggacgatgtcttcatgctctgtacgcatacacgatgatattacacggtgcggtgtcttgactctaacatgtcagttgtcgaaactctgctctgttctcac

SEQ ID NO: 352415 - DNA, 279 bp, Zea mays
aataggtcgacgggataggctttgtcgaaaccctcttcaacagtggaggtattgatggtgatcggcgaccgtgagcttccatgtgattgcgttctgacacgtgagacttttattatgactatgtatgagatattgtcttttagtagtactggatgacgatatgtgtgagacgtttgtgatgtgagtgacgacactaaggatgagacttttgtgatgtaattgatgagactatcggtttatatattgttatgtgattgtgtgtgagatgttttatgcgag

SEQ ID NO: 352416 - DNA, 99 bp, Zea mays
atcgggtatgccgtaccaactcatcatctgccgttgatgtccccaacagaccgtatcaattccccgccgccgtgcccatctctagatccgaaccgacaa

SEQ ID NO: 352417 - DNA, 97 bp, Zea mays
gtcgacacatccgtccgaacagatacgtataaggattcggccgttaacgaacaggatgtgaacaaggatatcatggcttcatcaaaagtatgcctca

SEQ ID NO: 352418 - DNA, 269 bp, Zea mays
atacgtccgaacttgcgactcgctcgctcgatgctagctttccttcgagtaaacgcagcgcctatggccatagcaacgcatgcctctgcagccacgcgcgaactgctggccgtggcatgtgcgccagaggggaacctccgggacttaacctcggagctcgtgctgctgtcgtcatcctacttcgggccggcaccactctgcccgtccacccaggaagctgtggaggatccaaaggggtttttggcccagcaactggacccaagaatgcc

SEQ ID NO: 352419 - DNA, 128 bp, Zea mays
aaccgccgccctttttttttttttttgtttattgtgttttttctgggtgaaaatgtttgtaggataactttcggcagactgggcagaaccgggtgggggctcgcgagggtgttgggaagctatctagc

SEQ ID NO: 352420 - DNA, 60 bp, Zea mays
aacacgcgtccgcccacgcgtccgcccacgcgtccgcccacgcgtccgcccacgcgtccg

SEQ ID NO: 352421 - DNA, 400 bp, Zea mays
accagcttctccctcggctcgcccaagctccttcttcctcctccaactcggcgcctggatctctctcctccctccagctctctccagccgcgcgtctccctgctcgctgcgttcttcttcctccctggctcctgctcgcccaacgacgccatcggccggatctcctctgctctctctgctcgccttggcccgccgtgctctgctcgtcaatgccgcgtgagcggtgagctctctgccgcggcttccttcctcttccgctccagccttctcctttctctcttctctagccctgttcggcccccagcttggatcttccttccgctcggtcgtctgcctctcgcgctcggctccctggagtggatttcctcgccgtggagctcagcttgtgtattgtccgccg

SEQ ID NO: 352422 - DNA, 415 bp, Zea mays
aagacgcgtggggaggacgacgacacatctatattgagtgagcttatcgccctcgcagaggcaggattacatgaagaagaggaggacgacacgtcaaggttgagtgagctcatcgcactagctgaggcaggattacgtgctcaagaggaagaggatgagtttatgtcacaggccgccgcagaggtagaggcagcttattacaagaagaagtctgatgaggctgacgctgaggatgagctattctcccaagctgcagatgaagcagaagccaattattacaaaagaactggtgacaagtgtgatgcaggacaatgcagcaagtggaatgaggttgttgttgaggattgcgcgacggatgactccgaagatgagttactcatagattgtgattcagactggagaattgaagatttga

SEQ ID NO: 352423 - DNA, 285 bp, Zea mays
caaatctctgtctcgcgctggtgcagcgcagggcacccccacgcgcgcctcatccggtaccggcatgacgagcgcctccgaactcttcaccgcgcgccgtgccgcccgtggggcccgcttctccgacctcaacctgggatcgaaggccgacgcactccgggacgagcagggccgtgcgggcccggaaccggcgccccggttcgcgcccgcaagccaatttgaacgcgtcggggaacgtgcggcaacacgtgcacaccggggcccccacaccgcgtcgccgcgggt

SEQ ID NO: 352424 - DNA, 204 bp, Zea mays
gctccaggacggacgtacgtacctagatcgatccagcgatcgctatctacctgatgagcatggcgtccctctcctctggcgccatcacggccccttccttcgctgccccgccggcactcgcactggccatcacgatggccgtcaccatgcgtgcctctcttcgcaagggcagtggcaccgcctgcgtgggcgttgccgccaccg

SEQ ID NO: 352425 - DNA, 297 bp, Zea mays
tgtggatttgggggagcttcttcactggcgagtgtagagctccggtacccaagcgacggaacgaacacggacgaggggaatcacataggtctccccgatggcggactggggccccgtgatcgtaacgacagtgctgttcgtgggcgtcacaccggggctgctcctcacgctgctcgggccggcgccgcgtctcagagttcggcagctatcacaccaaccgcctggccatcctcgtccaacccgtcctctacttcgcgctcatcagcatcttcctcatcgctagtcggatccacgttt

SEQ ID NO: 352426 - DNA, 408 bp, Zea mays
cgggtcgagcacgcgtccggcccaaagacaaggccgccgcgctcaccgagggcgacgtgctcgccttctgcagcaagcgcatggcgcgcttcatggttcccaagaaggtggaggtcgtcggagcactaccgaggaacgcgcttggaaaggttgagaaggtcaagctccgggaggcggcacgtaagctggcgcccacagtagcagcggcgcagaagcccaaggcgaagacgacgacggtcggcggtcgccgccacgaccaaccggtggcgcacgtcatggcggtgtcaaagctataggtagcagcagcacacagcgccgctccacggcacagctagctcgtgctacacagtaaacttctttttgccaaaagttttggagcactcaaacatatgacatgccaaagctcct

SEQ ID NO: 352427 - DNA, 343 bp, Zea mays
aggacgcgtgggtgctggacctttccagagggcggaggattgcaccgtattgcaggcggcgatatctactaagacaccatacattgatgtctgcgatgacacggactattcttggagagctcagggcttccatgagcgagctaaagctgcctgtgttccggccattactagggctggcatctatccgggagttagcgatgtgactggcctgctgaccttgtcgatgccgccagatgtcaagttggcgaacctgatggaccaacatgcctctactagagtgcatgtactggtggtgccggtccaccactattgactcggcgctctttctacgtcgtggggagga

SEQ ID NO: 352428 - DNA, 118 bp, Zea mays
aggacgcgtgggtttgtcctgacagttcggattaccactttcatcaaacgcagagacgaaactccgcaactccgccgacgaactaataaccaaaataaatatgtataaaatttgatgt

SEQ ID NO: 352429 - DNA, 252 bp, Zea mays
gtccgagaagaagacgacttttggaacatgcttttgatcagctaagtttgcattctgaagaacatctcaaaggaccgattctagtttcatttactaatgagcatcgcgacgaacaggttagaatctgaagcggcggaactttcaaagatttcatggaaaatactactccagcggcttttggtgtgcagtaccgtctcttcaaggcgactgccgattatctttcgtagcccatcaccacggtcaggattggct

SEQ ID NO: 352430 - DNA, 376 bp, Zea mays
gtccgatgctgcatacccttcaagcctgccgaccatcgcatcatcggtcatcgctagctttttttcttcacttctggtctgcgtctcttgtttgctgttggattcataagcgcaaggaaggacgagagatagagcgacgaactgtcttgctcggaactctcccacaactgggctctgacatgagtaatgggttctgaggatataaccgcgcgagcttcctcccgttctgcgtaccctgcgacgtatgggcaacgccgggggctatgacctgtcaccaaagaagagggaaaatgcgagaaaagcaacggctgtaccatgataaccaaggatgcatgtattgctgtttgagtttccgtcgtgttcacagaatcctctc

SEQ ID NO: 352431 - DNA, 62 bp, Zea mays
accctccggttccggttcgggttcgtgatgttctccggggttcggtttcgtgggtgggcgga

SEQ ID NO: 352432 - DNA, 396 bp, Zea mays
aagatatttacatgtacaaagacttgattattgcattaaccaaatgcaagaatatggaggaaaccatggtaatcctggggaaaaagagaaaatgacaattgtttcctgaatcacaaacttaagcccaagttataagaaggttccttaaaaaatggtccccaaccaattgaaatgactatttacgaggacatgaaaaagtcacctgatccaccagaagatttaccttttagggtactgttaaagggtcttttacctcacccactgtctaagaaatacatttaaaacaagattttgaacaaatgttcccaaaaaaggcatatctatgattctccagaagaaatttttggcatgcactgacgtatattcagaggcatgaatgtatttaccaactggatg

SEQ ID NO: 352433 - DNA, 204 bp, Zea mays
gggtcgacacaagcgtccgaactcattccccgcaaaataaacccccgaaaagcaggagaagcgagacccggaagtggaaagctaaggttaaggtcccaactccccgttgcctggggcaacccaattatggccgcccctgccccctccggcgcaactaatgccgccgcctcaacgtctccgctgatggaaccgccgtctccgttc

SEQ ID NO: 352434 - DNA, 280 bp, Zea mays
aagtctgtaatcaaggctccatgccgcaatgtacatttgctggcatcccacttcaactggcaggaaccaaaaaaattttggcattcatggaccgaggtgaccacggggcgaacggcaccttcattaatattggcccactaggtgctagagatgttcccacataatatgatatgtttgtcctcattgctccacagaatgctgttggcaaccgcacaattgatgatatcagagctatgactgatgctgctggtgatacacctgtcaatcttgtgaatcctcg

SEQ ID NO: 352435 - DNA, 307 bp, Zea mays
agctgatcgtcaagtggacgtcatctaacaacactaacctagtgttactcacgatcactcttcggatgacaaagtcgacgatgaaccccatggagtaaacgacgacgttgttgtatccaccacatggagacgaatgacgacaacggcacaacggcacgagcagaaaggcttggccagggcacagtccgagccggttgacggcgagcccgaccgtcatagatcaaggctgacgctgacggacagtgaccgggccacaagcaagctgccccaactgatggcctgggccatggagagcaagggatgggcg

SEQ ID NO: 352436 - DNA, 158 bp, Zea mays
accggacgcgtccgcccacgcgtccggcagcactgcgagcccccacagcggcgctacccgctcgagaagggcgttcctccacgttggtggcctaccggcaacaacaattggtggccgcaatccggaattccaatggccaagggccaacccccttcaaa

SEQ ID NO: 352437 - DNA, 159 bp, Zea mays
cagacacgtgggcggacgcgtgggcgccgccatgcatcatcaccagcagccgccgcagcagcaccacagctcggcgtcagcggactccgacgacgcacacattccatgggttctcgggggggaggttcagcagcatcatcatgtacctgcatggaagcg

SEQ ID NO: 352438 - DNA, 387 bp, Zea mays
aggacgcgtgggcacggccgagccccgacattctaccgcactccctccgctgcacccctttccattctaccgccggcgacgccaaagttcttgggcctcctcatcggcgacttttccgccggcgacaggaaacaacgaaccaaaccacttctctgtccagaggcgtcccgctcctctcttcgccccctgctgttgaagatgaggaacctcaagttcaatgagcagaacctcctcagaagggacaatttcttggagtacaaaagggagggcggccaccgcaaggcgctcgtaacacagggctacggccccttggaaagggacgactacaagaagtacaatgggatatgcttaatggtgcaaaagctcgttaaaatcataaagcagatg

SEQ ID NO: 352439 - DNA, 78 bp, Zea mays
atttcgctgtgaattggatgtataactttgaccattgatatcttggttaatcagacggtgcattgtaatcctggcctc

SEQ ID NO: 352440 - DNA, 212 bp, Zea mays
acacaaggcggaagctcagtttggaccaatggctccatcacattgccgtcgcgatatacatgacaggtgtgccatgttgtccctgatccatggcagaccatcagcgatatccgcagcttcaacgcggatgaccactgaatggcacatagcaagcatgcaagctcatctgacctgcgtctctttaccttattggaaagcatcactcacaaaaa

SEQ ID NO: 352441 - DNA, 257 bp, Zea mays
gtccgaccacgcatccgcccacgcgtccgcccacgcgtccggacaacatggccgcctccgcctcgaccgtctccggcctcgccggcgcctccctggccaaccgcccggcgttctccacaagcttcacacagggcagccgggtgtctgcgacgaagcccctgatgagcaggaacctggagaggaaatggaggatgaactgcatgacgtttccccgggacgggctgcagagggaccctagcgtccaccggttcgggctc

SEQ ID NO: 352442 - DNA, 410 bp, Zea mays
ggaaatcaatacaatacagtgggtccaagatttactgttgtgaatccaactgaaagctttgatccacaaaagatgatacatcaagctgcatatccatctgatcagaggcttccacttccaagaactggctttcctaattctcctacatccagaagaggagggactgttccaaattatcaaggcatatcatcctatgttggagggccgatgacttatccgacaagtccagtgtttcagggacaaaccttgcctggagtattgcctcctgatacgagaaatgaccctgttggatttcagtccccctcaagaaacatcaccggatagtcctgagattcaaaggcagcgagacagacagaagtttggtgaatcaaaaacttgctctttcttagaagagttgaagtccaacacaa

SEQ ID NO: 352443 - DNA, 194 bp, Zea mays
gtccaccgacccgtctgatgacgaatgggctgcttctccccacggcgcacgcgcgcaccatcttctgcgcgccgccagccccgcttgttctggcgcccgggcgccgccagccgtcaggccgtcaccgagtggggatccttgggcacctgcacgcccccagcccgtcaacgcttggagacccgcgcaaccgcggc

SEQ ID NO: 352444 - DNA, 414 bp, Zea mays
aggacgccataccctagattggagcgcaccacgggcgccggcggccggcggcccgccaccggtgattgacgccccctcctcggtccccagcgcggcgagcaggctatttgaggagatgccgtcattgtcatccttactctctggctccaatactgcgagtgctgagcttcctctaatcccttgcaagctctgcaatggggtggtgattgagcgggtctccaaacaaccagaaaccacgtcgaggaagttctaccggtgcagagccaagaaaacggatgggtcttaatgtgattttttccactggcaagcgagctatgttgttttgttaatcgacgatgggtttgtcagtggtgatcgacgccttgagttgttaatgatcgcacttaatgatcatggcaaagccgttgaatctct

SEQ ID NO: 352445 - DNA, 185 bp, Zea mays
aaccacgcgtccgcccacgcgtcagcagggcgtccggccgggtccatacccgcggctaccgctgccgtcgtcgtcatcctcgtcagctggctacaggcactccaaatccgtgtccgtgaaaacactcgccctgttcggcaaatccaaaggcaagaccgcgcccgcgaaaaaggatctgcgtccca

SEQ ID NO: 352446 - DNA, 297 bp, Zea mays
aacacgcatccgcctttgtgggctgcttcagccgtgttgatgcacaagtgggaggagacgcggcgaccgaagccaaacctgtggctccagacaccgtgggctcaacagcggtggttgcgcttgtctgctcatcgcatgtcatcgttgccaactgtggcgctttccgtggaccataaaccaaacacggaagatgagtatgcaaggattgaggcccacggtggcaacgtcatcaattgggaatggctatcgagtcccccgtgttctcgccatgtcccggtcaattggggacagatacct

SEQ ID NO: 352447 - DNA, 424 bp, Zea mays
atcattttgaatttgaatagggtcccttgttttgaataggaactttctttctagtgctcatctgcacaaatagacagaagttgtacttcctagtgctcatctgcacaaatagaaatgattggatcacgtgtcgtttagaaaagatggaataatcctgaaacacactagactgaatcatctatgtgttgcatgacgtggactgtgtcgttcttattattacgcactaacatagctgaactaattctcttgacctcgagttgcctgggtgcctcttcaaccttcatgttcagaatagcatttgttgtgagatatcatctgttatcttggtatatgtcttcaggtctgctctcttggagcagacaaacagctcagagtcactaagttgtttggttaaatgtctgcaggatttaatgggggggtaaat

SEQ ID NO: 352448 - DNA, 132 bp, Zea mays
attgtcccgactcctgaaccctaccgatcttcccctgctgcagccatggtgaactccgcgggagctctccactgccgccggtcccacccagttctaccggtcccgcgcttcgctgggcaaccccgtgaatgg

SEQ ID NO: 352449 - DNA, 346 bp, Zea mays
aacacgcgtccgcccacgcgtccggcgatctcgcctcgagtaactagtgcctcgcgcgccgggggcgactgcgcgcgcggtcagtcagtcttcggcgtgcggggcgcgcgcgagatctcctcacgggtaggggagaaaatcggtgaaggtccgcgggccctgatgggcgggggggtctccggtggcgccgccggtggggatgcggcggcggcgggaacttagcccgtggttctcaacgtgtacgagcgtgacgccggtcaacaactagcgtccactggggcgggcttgggatcttgcactctggcgtccaagttcatggatcggagtacagttttggggcgcatga

SEQ ID NO: 352450 - DNA, 161 bp, Zea mays
aaccatctaccagcgactcagcgagcgagagcagcacacactgcacgcagctagctaggagcagcaacatcggcggcgatggaggcctccatgatctcctcgtcagctctggcggttgcgcctcagggcctgccgcccctcgggcgccgcgccgcctcctt

SEQ ID NO: 352451 - DNA, 224 bp, Zea mays
ttccactagaacgtggtgcatcagcatacctgctgctgccgccgccgccgccagttgtttgctgtggaaagctagatgcatgcgtgttgtaaaggaacctgaagcgttgcatcggtcatgattcatgcatggccagcctgctgcctgtaacaacaaactagtattgatcttattgagaccggaaactgtattgcacatggtaaatcaatgtacaattcctccct

SEQ ID NO: 352452 - DNA, 288 bp, Zea mays
agcaagcgcgtgcgacaggcttcaccttcaccaagcctgcacctggccagctgggtcgacgggctggcggcgcgcgtcgtttgcctcgcgtcgccgagctgcgggcaggcccgaccggttgggactccacggggctgtcgggtactggtccgtcgagcgggagccgtagccgggacaggacctgtccgcgccaaccttcttcccgcggggcccggcatgacaccgagccctacgggacgcctggcgcaacatccgtgcccgccgaagcaactgcctgggccaaaggag

SEQ ID NO: 352453 - DNA, 74 bp, Zea mays
gggtccatccaaacgtccggattaattgcatgcatgcatatcattagagacaaggaaaaaagatagatcaacac

SEQ ID NO: 352454 - DNA, 233 bp, Zea mays
gcatacgtcagaacagacatcagcacaaccatggatgcacccagacgcgccgccgccacctgcaacgctcagcacggtgtgcaccacgagaagctcagcgccgtcgcactgcaactgcaggcgtgtagccacaccatcgccggcgattgcgggtcctcgctcacaagcgaaacctacgtgggtccgcgcggctgagccgacgtggcgttctcgcgagcagcggccatgttcct

SEQ ID NO: 352455 - DNA, 325 bp, Zea mays
cccacgcgtccgcgtacgtacgtagatcgatccatcgatcgctagctagctgacgaccatggcgtccctctcctctgccgccatcaccgccccttccttcacggccgcgcccgctcgcgcagtggtcagcaggaggtccttcaccgtgcgtgcctctctccgcaaggccactgccaccgccgccgtggccgttgccgccagcgtcctgcttgccggcggcggcgccatgggccaggaggtgctgctgggcgcaggcgacggcgggctcgtcttcgagcccagccagttcacggtcaaggccggcgacaccatcagcttcaagaac

SEQ ID NO: 352456 - DNA, 117 bp, Zea mays
aacacgcgtccggtagcagccagttcgttgtaaattacaaataaatattacaagtaataagaaaaaacacggactttacctgtaaaaaaaacaacaaaaacacaaaaaacaaaacca

SEQ ID NO: 352457 - DNA, 408 bp, Zea mays
tctcacgcatccatacatgcgtctgcatactcgagagcggacgcccgttcgaacgctgacgtggatgtcctatacgacgaaatggaacttttccatactctttccaggaatactgtcttcaaccactgtactgtcagtactcgcagctgacgataatgccatgctaccacactgcgaattcctttgctcgttgctttcaatatggatcgtgtgaccaccaacgctgggaccttccacatcatgacctccatagacagctctgttaccgagatcatgccgagtcaccaacagaagtcaccctgctcaaggcggacgacaccaccgccaacgcccacgtggagcagctgcacgcgaagttgctcaaggccacgacctcgcagtcggccctcatcgagatcatccagttgt

SEQ ID NO: 352458 - DNA, 438 bp, Zea mays
cgcgtgactcgactttaccccgctgctccgcgtccctctctcgtgctcgccgccccacagctcgaagccgacgaggtggcctcagcacacgcgcgcgcagccatgggagcattatcagcgaagaccatacagaatgcattcttggcacaacacagacggagataggcatggtgcaagatatcccagtgatttttgttctctcaatacccgcagcatgcattccgtccaggaatgtagattggcagtggctgattcttcagccaagtggttaaataccacatcgacactatggacgagcttcaacagacaagcatacattagctgcaatgctgctcaagggggcactgttgtgtgttcatctgagacagttgagtttccgaagcttcagaatgggagtgagattcgtggggttggtgttgccggggtttaaggtgagcc

SEQ ID NO: 352459 - DNA, 90 bp, Zea mays
aagttcatgtgcatctgctcctcatgtctatgcatatgacaacgttgccataacacctgaatcattcaatagtgcaaaagaagaagacaa

SEQ ID NO: 352460 - DNA, 301 bp, Zea mays
cggacgcgtgggcggacgcgtggggttctagatcgcgggcggccgccctttttttttttttttaatttgtctgtgactatgtatttgctgtttctcccagtaaatagatattacagttcttttcagttctgagacacctagatttaaacacatacactgcacaccggaccttttctcgtccttattgctccactatgattcctgtcctttctttcactaaccaaaactctcttttcctttatctttctctcatatgagcacttcacaaaaataagtatatggatgcagctagtagtaaatt

SEQ ID NO: 352461 - DNA, 398 bp, Zea mays
acgccgccgttttcccccatcgtctcggcgactcctgagtcccgacctctacgctacagcggctgtggtgatccgtcctccactcctccttcgtccattcctctggtgcaaggtttgtccagctctggcctctggttcttctgctttgaaacgtcagtctctgcctcttcgtctctggtctggtgtgccgcgccgtcctgttcggcagcctcagctacggcgccatcccggtcgaatctcatcgcagctgatccctctggatcacgtccgcggcaacggcgccatcccggccgaatctcgtcagcgtaactggtccctttggatctcgtctgcgcacggcacagctgctcagtctcatgatttaaagcgcagctggtccctctggatatttacttttg

SEQ ID NO: 352462 - DNA, 90 bp, Zea mays
aaataatgttgttctgaataccaatatactgtgtatttgatcatcttttgacattgaaatgttgttgctgttgtaaaagcagctttgagg

SEQ ID NO: 352463 - DNA, 421 bp, Zea mays
cggtccaggactcgcgggtcgaggcccgcgtccgcgtccacaagatcccgagcggctgtccgtacgtgctagtacgactaggtgggttaccgccctcgcggcgcttgtgcctccgccatcatactacacgtgcgaagccttcatcgctaccagaatacgggacaattaccaccccgtccgcactctacgatggcggcgcctcgggccacggctcacgcggcctcgcggtgtctctccggtgccaagtcgtacgaggctgctgagcggatctccagcccggttgccatctcggagccttcaactggcctccgggaaaataggagccgcgtcctcagcgttcgtgccaatgttgccacaggcgttcagacagccagcactgtggctgatggagcgaaaatgccgtggtagcacaatgatgctc

SEQ ID NO: 352464 - DNA, 409 bp, Zea mays
gttgcccagactcggagggagttggtgcctctgtgtctctgtgtgtgtggagatggaccccaagttccccccacccccaccgctaaacaaaacggagcccaccaccgcgacgaccaccaccacctcgaccgcgcagcagcagcagcagcagctggatcctaaggactaccagcagcagcagcagcagccggcgcagcacctgcaaatccatatccaccagtcgtagcaggacggaggcggcggagggaaggagcagcagcagctgcaggtggtggcgcagcccggggagaggaggcagcaggcgctcgcgcccaagcggagctccaacaaggaccgacacaccaaggtcgacggcatgggccggcggatccggatgcccgcgctctgcgccgcgcggatcttccagctc

SEQ ID NO: 352465 - DNA, 59 bp, Zea mays
ctcctccccactcccagggaacaacattcatcatcaatcgactataaactcttgggttt

SEQ ID NO: 352466 - DNA, 160 bp, Zea mays
cccatgcatccgcggacgcatgggctgacgcctgtgctacttcatagtaccgtgtactcctatcctattgtactaataataataatagtataatacgataggagtacacggtactatgaagtaccccacgcgtccgcccacgcgtcagcggacgcgtgcg

SEQ ID NO: 352467 - DNA, 98 bp, Zea mays
aaataaatcaaaataaaaaaaaaaaaaaaaaaaaaaaaaaaaaaaaaaaaaaaaaaaaaaaaaaaaaaaaaataaaaaaaaaaaaaaaaaaaaaaaaa

SEQ ID NO: 352468 - DNA, 283 bp, Zea mays
cgatgacatgagctccttcgtaggcggggtcaactccggctcctaacccttcacggtctacatgcagcagcaggaggtccgacaaaaacagcattgcatgggcgcatactgagagagtcccgtggcaactgccgcgcatgaaaccaaggggtgtatcgagcaagtacaccaggttgttataccgtatactgcacaaaggatgggactattacaccggtgcggctttcgataccacgatgcaatgaacggtagttacaggtttgtacccatgccgcagacttgc

SEQ ID NO: 352469 - DNA, 387 bp, Zea mays
ggcacgtccggtccatatggaccaccccgttggtattttggacctccaactccatagccactgccaccgctgcaccgtggaccagctggtccacccattccacctccaagataaggaagccctcgcccttgctggggatatcggccactgccatagcgaccaccctgacctccactgttcagattgtagcctcccccctgattcccagccgtaggatagcggttacggcctcctggtcctcggggctttgtacagtcatggcctgacccagctgccacaggaagcacattgtgcataccctggtcatgcctgatttgatgatgtgcttgccctgcctgcaggatttgaggcaagcgagaatctagtggacgattatcaagtttttga

SEQ ID NO: 352470 - DNA, 203 bp, Zea mays
cttcggtatgcacttgtgttgtgttgtgttgcagggccagagcagcaactgggtggtcgtcgagttcaggcatccgaacccctccaacgacgactgggtccgcgtcttctctccctccggtttcaaggaatccaacgaccaagggaagtttaaggtccgccataccaacaacggagaaggactgaaggccggaaacggaccat

SEQ ID NO: 352471 - DNA, 255 bp, Zea mays
gttctagatcgcgagcggccgcccttttgtttttgtttttttttttgttttttttgtttttttggtttttgttttttgttggttttgtttttgttttttttttttttgttttgtgatacttcaagtaaatgattgttagggaaaatctttacagcacatgacgccgagacacattacgtggcttaaaggcgcgcgctggcgcgcgcgagggactagggcaggtgcacacacggccaggccgagcgacgtgatcga

SEQ ID NO: 352472 - DNA, 69 bp, Zea mays
aaactgagtcgatacgtaggcatcgagcgtcagcatcacagacgtcacgcatcggcccatgagtaccag

SEQ ID NO: 352473 - DNA, 404 bp, Zea mays
agcctaaagcctcctttatgttgccagtacaaaattggtcggtgtcgttctaatttgctcgtatagacgtacttaataagcaggtgtacgtaccttcatgaacctgtaagattgttcagatgtatataattctacttagtgcacacaggtagtggataataatggatagacgaggaagtttatgcattcggctttgtgctccaggagcctgtagtgtgtgaacatgatatgtatgaatgtattatatatctcaagtgtgtttatggagtaaaaaaaaaaagacacgacaataatcgaacatagaaaagaaagcgacattgagaagaccagaatacatgaacatacgtaaataaaagtacaaaaaaataaaaaggggggccccccaaaaggttccacgcttactt

SEQ ID NO: 352474 - DNA, 361 bp, Zea mays
cccacgcgtccgcccacgcgttccgataaaaagaattctccacttccccactctccctctcccgctcgtggctcgtcagtgggtgggagtgtgcggggctagccgctagggtttccgcgagcccatcgccggccggccacggacgatccgggactccatccggcgcccgccctgaatcggcttcgcggggcgcaaggagcgagagaatgaagtcgtcgctgcggaagctgccgggcttcgcgctgcagcgccaggagcagcgggtggaccgggaccgcggccggggccacgccgccgccgccgccacggcggctgacgagctcctcgcggctgctcatgatatggcagatatgagaagctg

SEQ ID NO: 352475 - DNA, 187 bp, Zea mays
ctgggcgcacactgcatccgtactctgtgctagcagagcatccacaacttccggttcgggtcccgcgccgaacaatcgcgtcctgtgccgaagggccggggtgctcccggcactcagaagctcgcagacatctctgccgatgtccgcgtcatacatctaccgtagcgtattcgcgtagagcttcccg

SEQ ID NO: 352476 - DNA, 264 bp, Zea mays
cgcctcagcccaggcgtccggtatccctttgcctgccctgtagagcgacatggttcgctatgggcgatacagggagcatctccattctggtgcatattctggtggtcgccctatgcctgacctcctttggcttcgccgtcgccgcctatcgccgtccgcagcaggggttcaatatacacagacagctccaatgccacattttgtgtttacgactccgatattgctactgggtacggtgttggtgcctttcctgtttcttctctc

SEQ ID NO: 352477 - DNA, 417 bp, Zea mays
aaggggcttcctcctgaggctgcagccgagcaaattgttaaagtacaacactagtacccttcccagcccatcttaacacaaggtctaaaatcctcagttgtactgttcctaactggtgtactgtttgcaggaagcagttgaatcaaaaggattgagagatgatacaacttgcattgtcattgacataataccaccagagaaacaaaaatgcgctatagaatctccaaaaacgccaggaaaaggccttgtccttctaaaaaatttcttcttaaggaaaacggcatctggttcattgtctctcgctgacaaggataattatcccgagccagatttcgtggaggaggtctttgaggatggatgcccatccctttcgaggaggtttgtgcccttatctcatcttgaatacggatgcataat

SEQ ID NO: 352478 - DNA, 320 bp, Zea mays
aaaaaccaatgcctgtttcaaataaaatgtcctccaatgctgatgtcgtcagatccagcaagacaggaaaggatcctgaagaagaaaagaatcaaacttccagcagtgatattagtgaaaacatgataaaagaagccagtgaccaaagggcatcttagtttagaaagaaatctgatactcgtaacttacaacgaggtcggcgtactttggaagaagatctcaagcgtcagaacaaagcgttagatgcgtataagaattttagtacgacaggattagacaagagtttgcaagaacctgcaaatgggacaccgaagaacgac

SEQ ID NO: 352479 - DNA, 372 bp, Zea mays
atcgccatcacataaaaccagtgcaagcagaagcagcgcaatggcgagcagcaccatggccctctcctccacagccttcgccggcaaggcagtgaacgtgccgtcgtctctcttcggcgaggcccgcgtgacgatgcgcaagacggcggcgaaggcaaagccggcggcgagctccggcagcccgtggtacgggcccgaccgcgtgctctagctgggcccgctgtccggggcgcccccgagctacctgacgggcgagttcccgggcgactacggctgggaaaccgcggggctgtcggggggaccggggacgttcgccaagaaaccggagctggaggtcaaccagtcccgctgggccatgctggggccgttggg

SEQ ID NO: 352480 - DNA, 64 bp, Zea mays
attacactagcgttcggcaggaagcaaacgcaaacgcgtgtcgacgtcagccggccacgccaca

SEQ ID NO: 352481 - DNA, 390 bp, Zea mays
acagacgcgtggggttctgactgcatgtatggttttatttcagaatcttaattgcactgtttataattttcttatgtgtgtagtttatttgatgcacaggaaatgcaagttaataatgaggcaccactagggtgcctcaagccaaatatttctcagtataactctccagagcagataggtggtgttgaagggtttcctgagaataatgaaaaaaggaatgatattgttgctgcggaaaaaatctgggaggcgactccaaaccaaggccttagcaggcccatctaccgacaagaattttatgcctggccatatatttattcagattatcaaatcgtgcgtcagccactaccttaaagttttgacaaccaattttatcataaatagggacca

SEQ ID NO: 352482 - DNA, 298 bp, Zea mays
accacacggattagatcaccgagaaggattggtgatgagcttctaagttctagaggcggggcgccacagggcactgctcgtgaagtgagcgaaatgggggcaactcgattcgcaagcgctgatcgtcgatattaccaccgcagttggactcatacgtgcgatcttaaatccgctaaggactcccttggataccatcactcatcgtgacaggctgcatcagtgtagtcacctgatccttcaattaacagcgcttcgagagagtaactccaaagggctgtcttatcagacatcagcactg

SEQ ID NO: 352483 - DNA, 390 bp, Zea mays
gcaaccggtccagcactttcacgctcagctccagcaatggctgcctccaccatggcgatctcctccacggcgatggccggcacccccatcaaggtgggctccttcggcgagggccgcatcaccatgcgcaagaccgtgggcaagcccaaggtggcggcgtccggcagcccctggtacggccccgaccgcgtcaagtacctcggccccttctccggcgagcccccgagctacctcaccggcgagttccccggcgactacggctgggacaccgccgggctgtccgccgaccccgagaccttcgccaagaaccgcgagctggaggtgatccactcccgctgggccatgctcggcgcgctcggctgcgtcttccccgagctgctctcccgcaac

SEQ ID NO: 352484 - DNA, 327 bp, Zea mays
aggacgcgtgggcggacgcgtggggcccggcctccgcaccagagcgcgaacctggccagcgagttgagcgcgatggcgagcaccagcgccaggaacagcgccgccagcaggatcaccgtgttggtgtcgaacgtcgcgtcgacgaccccgggcgccgccgcgcgcgctcctccgacgccgccagtgccgttcaggggcggccccggcgcctcggaggagtcccggtggtccacgtcgcagcacgtcgctcgcacgaaggcacgcgcattcctgccgtgctcagtccgcggcagcaactgatagctagtcgccaggcgcgttccggga

SEQ ID NO: 352485 - DNA, 331 bp, Zea mays
tcccgggtcgacacaagactctaaactgagtcgtagcaaactaataggcggtaagatggatgacatcacagttgttgtcgcacaagtgaagacagtagtggtcccataggacgaggttcagggtggcgacacagaagaacataaggggaatgagcagggcgctgcagctgtggttgcatacaaaatgaatgatgaagaagtcgcttgagttttgggaccatcctcattttacctttttgtgatgactgtattatactgcacataaaggaattgaagcaaaatacatttgtgtgattgtgtctaaaaggaaaagaaaagttctagatcgcga

SEQ ID NO: 352486 - DNA, 111 bp, Zea mays
actcacgggtcgacacaagcctccagagaaacacgtaacattcgagattttggatacaaatcggaaaaatccatttatattgtttttacatcgacttgcagttctgatgtc

SEQ ID NO: 352487 - DNA, 398 bp, Zea mays
aacgcgtgggcggacgcgtgggtttttttttttttttgccataaccaaaatccttctgagtccgagctattagcctaaagagtgctggcatctaactaacagcctaattgacatggaagatgactcacatataaaaataggattcatgtattcagatagcacaaagtccatgtacacagatactgaaccaattgatacggccaaaggaagttccatagatagaagtcagctatattacaccttcgatttcttcgtgtgggcctcaaacagtcaaaccccggaatctgcagcactctcactttctcctactagttgaggagccacctgatgcctttaaccgggcatgtcgcccctctagccttgcttgaagtaattttgccttcaggggtgttctcatc

SEQ ID NO: 352488 - DNA, 66 bp, Zea mays; identical to SEQ ID NO: 62033

SEQ ID NO: 352489 - DNA, 69 bp, Zea mays
aggcagcaccatggcggcggggacgagagcgcctgcggctgtgggctgttgacgatggcccagggcttc

SEQ ID NO: 352490 - DNA, 234 bp, Zea mays
gtcgacacaagcctctacactgacgtcgtgttattgcacatcactagagcgagctgtgtgtgtgtgtgttcgtcagttcctcgatcatggcaaacgcgcatgcgcaagtggctgtaaggttcatgatgtatgtgccaccgcagcaggtggtgtctgtcatgcggctgtggaacgcgccgacgagcctgagtaccatcacctatgacgacacggagatgctggttctgtgctggt

SEQ ID NO: 352491 - DNA, 219 bp, Zea mays
atacatgactccaacctaacgtgactcgtattaaaccgcgggcttctgcactcctgctgccactgcacctgcccatgccgccctaagcccttctgacgagctcatggaagcacagcgccatgtgcctgtcccccaggccaagctgcggcggcggcatccgccgcggacaccaggcgcagctttcaattagaggcgcagctcctcacgttcacgcgctgg

SEQ ID NO: 352492 - DNA, 413 bp, Zea mays
agtcgacatcgtcctcgtgaaggacggtctacgtgagattgtcctcttgtcgagatcctcacgtcccggtcctcaccacgggtggccacggggtgtgacatgatactaggagatgtaacggagcaaagaattctgagaggagccaaagatgaggataagggatactgaagatcctcgtcgagctggacaaggatctcaagtctgctctgtgcgatttggaagacgtcctggatgttattgaatatcgctgaatcgagaagaaagtcatcggtggtgacaaaaagttgatcagcactactatttgcatctgggcgctgcaagctattggcgattggatcacctactggaagcgtagctcgttcgggcaaaagctgttgcagtgcgcgcgcccagaaccagtatcagaagctcag

SEQ ID NO: 352493 - DNA, 101 bp, Zea mays
aatgcggtgtcggacttctctactgacggttcagtctctgcgtccccccgtgtgtcttcgcgccatcaccgacgtgttgctcacgtgcacgtagtggtgtc

SEQ ID NO: 352494 - DNA, 225 bp, Zea mays
gggtcaacacactagtctaaagtcacttatactacgcaatatactgctcacaatgcactgcatttgggtcagtctctcaatacggcactgcgtgttcgtggagacacatctagcggcctaaccttattcccggcgtatgtgctgctgttactatcttaccatcttaattcttatcatacatctccatattcgacatactcttgctgaagttctgtttttcctatc

SEQ ID NO: 352495 - DNA, 405 bp, Zea mays
gcttgtgacatcgcggcgcggcgctgtgaaccacctctctattgaccgtcaactggtgctttccccggctgtcttcgcgcgagcaccgaagtgttgaacacctagaagaagtggtgtctgaagaaggagttcacttcagtgcctgctgatccagtggtggagtttcatctaactgcttaccacaatagaaggattttagatcttctcctgcaataaggaaagaatttgatgacttgggctttattagttgcttcttgtggaggtcttgaagcttaggttacttatgtgtatattttatggaaaggtttcacctttccaaatattgtagttaagttatgcactctaaagactatcaggacttgtaataatttcaatcccttttgtggtgtaagacttcagttctgg

SEQ ID NO: 352496 - DNA, 380 bp, Zea mays
gtataactgatcgttgaggagagcagtgatcaaagtctcaactctgaggcagatgatgtccttgccaggagtcgtcgcactcgcaatgtgatctttggcaactattgtaagtcgcatcagaacattgcgctcaattcagttcatggtgatggaattgcgccgtttcatccatctgggtaccataatatgatggggtcacatcatcgcccgaatcaatgaattaactggagcagctaggactttaatattttgcatcgtgtggaagtcataattcttatggtacttatgtgtataatttattgacaggtttcacctttccaaataccgtaattaaattaggcactccaccaactatgacgacatgggacacgttcactacc

SEQ ID NO: 352497 - DNA, 94 bp, Zea mays
gggtcgggacacgcctccgaatgaatatctcacggaggtacccactgagaaggttccttacgagacctcaggtcgtgcatccagtgacagacat

SEQ ID NO: 352498 - DNA, 310 bp, Zea mays
cgcgctggtcgtcgcaacaccctacagtgacgtcgtattaacgcgtccgcccactgcgtccgcggacgcctgtgttaacttctactccgaaggtggttggctcacatgcctcatcagaggccgtctcaatgttcatgttgagtggatgctgcttcaaccgcagtgccgctggtaaccccaagatatcttagcagcgatgaggactacgcgtgatcacggagagggacgcatccgtgatcaccttagacgtttccacattagaagtcgatcagtgccgtaccattttgctcaactggctatgactcctgaa

SEQ ID NO: 352499 - DNA, 124 bp, Zea mays
aatcatgccatggaggtgccgctctccccagcgcgggcgcactacaggatccactgctgcagctccatgcacgtcatcgtcgggctccgctcgaagtccgccaccgttccgtgcagcggttcgc

SEQ ID NO: 352500 - DNA, 190 bp, Zea mays
aaagcaactgggtacatacactgcgcacttcgtcatgtacttcccaatatgccactggaacaaaggagacaacttccagtcgacctgcctgaaggacatctcaaagctctaagcccgcaaaccttgggtcaaggggtagacatgcatctcggcttggctattgatagtccagaggcgacattagcagtca

SEQ ID NO: 352501 - DNA, 386 bp, Zea mays
ggctgactgcagacagccctgtggaaaacaagcggactgctaggagcaagccaaaggctaaccagaaccagaaggataccaatgcaaatacccgtccacatgttaacactcccaatcaagttaatgctccaaatgcttatcagacaacgcagcagggatactcagccgaaggaagcagcttcttttggaacccaagtgacgggacttgaagacgcaggcagcatcatgtagctgctcatgcattgcatggcacttatcaagcaaaaacctctaacatcatcgaccaagttggggctgagtagcttggcccttcacatttctaaattctaaatggttggtttctgcacgggggcctggcaggtcggtgtatttgaattttgaaatgc

SEQ ID NO: 352502 - DNA, 241 bp, Zea mays
acgatcctgctgtcggcagtaatggcggcacagtgcgcatgagcttgcgcgttgctgggcgtttaaaggttcactcagccacgttatcaatgggtgccacattggctcgtaccaatcagtttcaatgtctcgtctactaagctcagtcaaggtgtttttcatacctgcggcacataaacttcatttgtttcgggatctgatcttggtgctagacaccgacctctaaacgctgggggctacc

SEQ ID NO: 352503 - DNA, 405 bp, Zea mays
tcacgggtcgacgcacgcctctgaatcgacacctgtgacgtcgctgtcgctcaagcgcccgcgcacgccgcggaagcggtccagccagacgtacaacgaggcggcggcactgctcgcgtccatgtacccctccgtcttccccgtcgccaggggcggcgccgcgccgcgccgcctcctcggcctcgcctccgcgctcgccgacgactcgtcctgctccgacctcctcgcgccgttcccagtccccggcggccacgccgccttcctcctccgcgacctgacgccgcggatccccgccgcccaaagcctgccgtcgcccgctgccgtcagcagcgtcttcagcgagttccgcgacccggcgccgtctcctgggacccctgacgacgctgcggcggcgcctgacgagcg

SEQ ID NO: 352504 - DNA, 165 bp, Zea mays
ggaggcttttgccgacgcggatttgcctggagccagccaagcagagcgcagaattgggggtgtttggccgtgcaaagccagaaagttctcggtttggctgccgaaaccgcttgaagcgaccaccatctcatgggcctaatggtccgggttcggcacaagtagggg

SEQ ID NO: 352505 - DNA, 356 bp, Zea mays
gcagaatcagcaaatacccataaagggaaacctcgccaaaattagaacagaaaccaaatgtatccctgatcttatttttcagattgaggattatgagaagtatttaatacagctaagcaaactaactaaggtaaaccttttgaggcatgccaaacgcagtgtagcaagagacttccagataaaagataaatctgggggacaacaggaagatgatcacattccagacaatgctgcagcatctgataacgaggctgataaggacgcaatgggtccaaacgcaccagttgaatcatgtgctgacgatgctcaaaaatcatacgctgacgaaaatgcatcatgtgaaaatgggcatgatg

SEQ ID NO: 352506 - DNA, 266 bp, Zea mays
accaaacgtccgcccacgcgtctgcggacgcgtggggagcgcatgatgagctgactgctgtgaatattttaccttctgcgtctgggacacaacaacaacatcgtcgacaagcaagattatgccttgttttgtagtattcctcatgagtcgctttgtttaggaccaatctagtagctggtgttgaacagcagcacattacagaacatatgatcgtcgagtgaccttcatacacgcgtgtaactctcgctctctctctcgctctcagc

SEQ ID NO: 352507 - DNA, 124 bp, Zea mays
tggcgcgcgctgctcccctgcgttcttccctgcaactttcaagcttcccgcgcgcgccctcctgctccctggtcgtcgcgccatgccggtcggagctcgctcggctgcagtctccttctccctc

SEQ ID NO: 352508 - DNA, 200 bp, Zea mays
gggtcgagcacgcgtccgaccacaagtccgctagatctcgagcggccgcccttttttttttttgttttttctttatttatcctttttttatctcgttttgaatgatagtccgggatttttgattttgttttggttcgattcaaattcaaatgtttgattcaagactggaatggccaaaattataccccactatggacaca

SEQ ID NO: 352509 - DNA, 401 bp, Zea mays
gaggcggtcaacaccgcctgtcatgcaatcaaccgtctctatcttcataagatctacagaaagactgcttatgagcttctcactggaaattaagaactaccttgtgaagccataaagaaacttgcaataggtgaagtgagacctcaagaaaaggatgatgaggaaggaactttctggatgaccaataaggttgttgatgtaggtgcaaaggtggtgagtgacaaagtctccacccaagcaaacccatcaacctcaagtcatccaagccatgaagaaaatcatcaaaggatgccaacagtggtagaagatgaacacaaaagcattgacggtgaagtgtctcttgatcaagtgaattatgacgaggagcaaatccaaagacaaccataagtgcctcatccaag

SEQ ID NO: 352510 - DNA, 227 bp, Zea mays
acgtggcgtccggccggtctcttgcacagataccttgatctacgacgtacgtacgtatgtatcatgattattcgatcgccaacgtcctgacgacgatggagtctctctcgtctggggccatcactggaccttccttcaaggtagcgcccgcacgcacactggacaactggaggtcattcatcatgagtgtgtctcgacgaaaggccactggtagagcgaccttggac

SEQ ID NO: 352511 - DNA, 207 bp, Zea mays
aggacgagtgggcggacgcgtgggatctattcctggtttgattatagactcgaaactgtgtggtcatctttaagtgatgcagtgttactgttttagcagtaaccttacgactaatggggagctattattgtttcattcccatcgtcgtcttcagaattcacatcgcgtgtgcttgcctgtctggttgcgtgccgcgtggttccctgg

SEQ ID NO: 352512 - DNA, 428 bp, Zea mays
cttttgcaccacaaggtcgaggatgtcttgcaactgcggatcaagctgcggctgcggctcaagctgcaagtgcggcaagaagtaccctgacctggaggagacgagcaccgccgcgcaggccaccgtcgtcctcggcgtggccccggagaagaaggccgcgcccgagttcgtcgaggccgcggcggagtccggcgaggccgcccacggctgcagctgcggtggcaactgcaagtgcgacccctgcaactgctgatcacatcgatcgacgaccatggatatgattattatctatctagcttgtggtggtggttgaacaataataagcgaggccgagctggctgccatacataggtattgtgtggtgtgtgtgagagagagagaaacagagttcttcagtttgctatctctctctgcatgtttggcgtcag

SEQ ID NO: 352513 - DNA, 360 bp, Zea mays
agctcatctggtcttccctccagccctcgacggtggtcatggccgccgccgccgccactttcggcttcctccatcctccaatccggaaacctgcagtcccaccactgtacattctccggcttcccaccaaaccccactccaaaacgcaccctcgttctccccccctcctcttcctcctcctgggccgccgccggggaggccccatcgccgccttccccaacaccacatcttcatccacgaatgcccctgcctcgcccacctacgacgtccgggaggcataggccgccgtcgcggatctcctccgcgagggcggcgcctccgcggacgacgccgcctccatcgccgcgcgcgcgccggtct

SEQ ID NO: 352514 - DNA, 336 bp, Zea mays
ttttaattttgcatgcacacgttttaattttagtctaataagtgtatatatatatataattaaattgataccggactgtccagacgcagcaacggtttctttctttctttcctttccgaaagccacagataccaacttggatggcatgctacgtgtgcaagcaacggatcagtcacccatggaagcaaacatttattccaagtcgctgtactaaatcaagtcttcatttctgaatcaatagggcggcaagctcccctctctcagccatggacgaaaccaatttccaagctcccaagaagtcccctccgaagaagaacttagggaaactccggcaac

SEQ ID NO: 352515 - DNA, 307 bp, Zea mays
agaagaagttggatggacattgtacacagatcaatgagtcatcagcagcatatggcagtgatgaagaagaggaagaataacctgatgtccgtcctaattcagggagtgatgaggacctaagtgaagaagacaccatggagatcgatgaggagatggaagggtctgtggccgaggactgcaacatgtctgatgacgaatatgacgacctgggcatgcgggacagtttggataaccgctatttatctgatgatggcgttttctgttctggtttaaccaactcgtcaatcggcaatttctttggtggcaa

SEQ ID NO: 352516 - DNA, 297 bp, Zea mays
acgactcgtaggggaatatagacagagccctgtccaataccatcttggacagaccagctcagtatcagacttccagcttcgtgacatcattcctcatcgcaacgtgatatctccgtcggtcggtaaaggagctcttaatatcgatgctgtgtacagtactacagtcgacaccgatgtgactggacacattaggaccctgaactcgatcatccccatgttatcgattgcacagttgatttgagtacgatgccacatgtgcatgataacctagatgatcacatgacgacacatccacat

SEQ ID NO: 352517 - DNA, 284 bp, Zea mays
atctccaactctcagtggaaacactcgagtcactcatcaagctaacgaaggaaggtaccagttcagacaagtatgaacatgaaggttccacgtctgcgtttgggggaaggggtaaccgggctgatgcttccgtactgccagaggttgaagggcccttacaggttgttctgttcgaaggatggatgcctggatttaaacctcttccgcaccaagttgtgaaacaagtggatccacacctggaggtggttaaccacgaaccttgaggcacactctgatgcttggga

SEQ ID NO: 352518 - DNA, 270 bp, Zea mays
atagttctagatcgcgagcgggcgccctttttttttttttgtttttttttttttttttttttttttttttttttttgttttttttttcccggcagaaaccaggtttcaggctttttttaatataataccgggggaacagtttttccctttccgaccaagtttaacaatacagtagagatggacgacaatgacattgcattcgcgttttcctttgaccacacgagatactaggctaggagacgacctgcaataggtgacaacggaactgaa

SEQ ID NO: 352519 - DNA, 93 bp, Zea mays
accacgcgtccgcccacgcgtccgggttatgtatgtctggttataaccaaccattgcatcactatttttcatttttaatattggtgttacgat

SEQ ID NO: 352520 - DNA, 125 bp, Zea mays
aaaaataaaaaacaaagaaaaaaatcggcagaagaaaaagagggacaaaaacataaaagggcggccaccctacaagatgcaggcttaagtgaccctgaatgcgaggtcgatcacgcttccacaat

SEQ ID NO: 352521 - DNA, 59 bp, Zea mays
attgtattcctcacatgtacaacaattaatgcaacaaattaagtacgtacttgagagag

SEQ ID NO: 352522 - DNA, 264 bp, Zea mays
aacatcgttaatcttatcgcttgctactatctagttggcacacgttcttgctgcttgagtttagatctgttacgaaaagtaagcagttgttgactgcttttctaaccggcatttctccaagggacgtgcccctgcacgatccccttgtacggacgtggtttttggccactcctttagtgtccctttcctttgtagaaatatcaaaagcaataaaggatatggtacccctttttcaaaaaggtacctcgaaactaaactgcaaaa

SEQ ID NO: 352523 - DNA, 333 bp, Zea mays
actaggtcaagatcgcgagcggatgccctttcttttttttatttctgattgatgcaataaaattttaataattgtaggcctgagcgacacgtcaagacaagtttggagacctggacatagaatgcattttgagagacgagttcacacgtttaaggacgtccgaatgatcaacaaacctgacaatctcagataggccactggaatcggtgtaaatcctttgaactaagccctcgtatgtagctgtcgtgtatccacacgagctcaccatgagcaagctatacaacatgcaacatcacgtttaccaaacaatacttcacgaaactagttgttgca

SEQ ID NO: 352524 - DNA, 353 bp, Zea mays
aacacacgttctgctcacttcgagaggattcctcgcctctcctccccgcgcgctgcctccgctccgctcatgtcgtccgcgccgagcaccacggcgtcgaccatcgcagcctctatccacacgccgttctcctcgggtcgccgcggggcccgccttccggccgcgctccgcctctcgctcgctcatctccggtcggccggatgccgcgcggcgccaggtcgcctcgctcgccctcgcgcgcgcgttcggtgcggcgctgctgccacgttcattgggcaaggccagttccccgcggaggtgatggagtcggagctgcccgtgctcgtggacttcgtctccgactggtgccggcc

SEQ ID NO: 352525 - DNA, 91 bp, Zea mays
cactcttgttgtcaagtccaagtggaaaatcttggcatattatacatattgtaataataaacatcgtacaatctgcatgctgttttgtaat

SEQ ID NO: 352526 - DNA, 227 bp, Zea mays
cgtccgcggacacgtggggcgcctgctggaccatctggcgcagatctatgccgccggcgggctggtggccggcgcccgcgtcgccccgcccgccggcgtccaaggccgccgtccatgccatgcccattgtctcggtcgccgccactgtcggcgcagtgcgccgtctgcacggaggccttccagctgggcgtcctaggccagcgaaatgccctgcgcacacatctaat

SEQ ID NO: 352527 - DNA, 284 bp, Zea mays
aaggacgcgtgggcggacgcgtggggggtgccagccacgctgctgctcatgttcgagcatccgattcacgaatccgccgacaccgtaaagacggcgctgtcccgagcgctggtgtactaccaccctttcgccggtcgcatcgctgccggagccgacgcccacgccgacggcggcaagctccacatctggtgcaaccgcgagggcgccacattcgtgtctgcgcacgcaagctgcggggtgcaggaagtcatagggctggatcgctcgggagcaccgacgacctt

SEQ ID NO: 352528 - DNA, 416 bp, Zea mays
catctcaacaatccgaagatctccgtaccgttgaccaacaccaaccggccggcgcacgctcctcctgcgcccaccatggccggcagcgacgccgaccgcgagaagagctgctgctgcagctgctgcacgccgctcatctccctgggcgtcgtcgtgctcatgtactgggccatcttccagccgcaccagatacgcgccagggtggactacgcggagctgtccagcctcagcgtctccaacgcttcatccggctcctccccctcccccgtcacggtgtcctaccacgtggccgtgaacctgagcctctacaagcccagcaagcgcgtcggcatctactacgacaccctggacgccgcgctccggtaccgcggcgccgtgctgagcccggccgccagcgcggcgtcgcccgccgagtt

SEQ ID NO: 352529 - DNA, 247 bp, Zea mays
aaacatctgttgcaacataagaatatggttgacactacacgtctacaagggctggtctagaatgccgtgctattgtcattattttttaagtttatcaagagctatctgaacgcgttccatttggattgaggtgtattgaagtggatggatgaggattttgattagtagtggatttattccctcttaaaaaaaaaaagggggagtaactaagagaatgtgcctcagaaaaaaagggggggccgcccta

SEQ ID NO: 352530 - DNA, 215 bp, Zea mays
cccacacgtgcgtctattaggaggagtcaacttacggggcatctagacactttcgcaataagggtggtagccacataactacagcgattagccgttgcgtggtacgctcttgtacgacactgtgggacgcacgcacatgtggaggatatccattgtatcatcacaacataatatggtaccctccgatcatacagcggtgtccagttctgagggca

SEQ ID NO: 352531 - DNA, 114 bp, Zea mays
gtcgacgcctgcgtccgaatacagatacatcgatgttctcctgtttcctgagcatgactggttgcagtggagacctcgaaattaaattatacgatgtgttacaacttaagcaag

SEQ ID NO: 352532 - DNA, 146 bp, Zea mays
aactagttctaaacacacaaccttccctattaaaaaaaaaaaaaaaaaaaaaaaaaaaaaaaaaaaaaaaaaaaaaaaaaaaaaaaaaaaaaaaaaaaaaaaaaaaaaaaaaaaaaaaaaaaaaaaaaaaaggggggcccccccaa

SEQ ID NO: 352533 - DNA, 97 bp, Zea mays
aaagtcactcgtactaacgcgtgtgccgacgcctgggcggacgcgtgggcggccgcgtggggccgaaggcctgatggatcggctggcgccgctggcg

SEQ ID NO: 352534 - DNA, 234 bp, Zea mays
aggcgcgtccggtccatatggaccaccctgtcggcaatttggtcctccagctccataaccagtgccaccgctgctccgtggatcatctgttcgacccaatccgactccaggataaggtcgccctcgcgcctgctgaagatatgggccacatggcaaatccaacacgctgatcatccttcgttcggcttgtgtccctcccccctgagcacccagcatgcggatcaaggttacggg

SEQ ID NO: 352535 - DNA, 235 bp, Zea mays
aaagacacttgggcaatgctgttcttactagcacacacaagtgaagtttctaatttacccgaaggcggccaatgttaccctgacagtatatgagttcaatcagcagaatgtgccaaatttgcaatcggatcctgagaatattgatggagagaagcagtttctgaaccagtctgcgagagaagcctacagtatactaggttttggcatagaagtcacactcataagacagacattt

SEQ ID NO: 352536 - DNA, 203 bp, Zea mays
acacagacgttctagtaacacatctacagtgttcgcgtctgtgggggttacagcaaggctagtgtcatggcaggttgactgaatctgttacctatattttcgcggttcatgtctttaaaatgacagatcatgttgtctacgtgcttacgtgaagttccgactcaattccactaaattcaactggcacagtccccagttttttg

SEQ ID NO: 352537 - DNA, 149 bp, Zea mays
accacgcgtccgagtcaatccagtaaataggctgtgggcatgtacaaatagagttacctgttaatttgttgttcctaaaatgtatgatacatagactgcatttcagttgggacatataacaccaaagcaattacaatgaagtgtctgtt

SEQ ID NO: 352538 - DNA, 84 bp, Zea mays
atctgcacacgcgggtacatgttggaagttattgcaggacatgtatatgtataggacaagtttattacagtcctgattgattgc

SEQ ID NO: 352539 - DNA, 396 bp, Zea mays
atattattgcaatggagttcagacaatttttttagcattcaccattggtttgttcgttggtctgtttttggctcagtatttttttctcgcgcaagtcttctctacttgttgtgcattaggaagtttggggttctgcactgacttggctccattggagtattcgtcataaaagaatttctgtcgtggattgagtacaaggagcaaatgtgtcattgcgtaccaatcagttattgtgctgtaatttttttatttctttatttggtttccgggcaaaattgagattaacacatttcttcccacagattgcagttcttggtggctctttgctgggaacattcctgtctgaaaagattatagcatacattggagggagcccaatcttggcctttgctgcga

SEQ ID NO: 352540 - DNA, 103 bp, Zea mays
agtaaatattagtatattgcatagaactatatataggtggtgccaatatacaggtgtttaaaaaaaagggggggggtcattctaggaatctgtatgttttact

SEQ ID NO: 352541 - DNA, 335 bp, Zea mays
acccttccatgtggtcatccgccgacaaccctcaccgcgcttccgctgccaatcctcgccgctcttccgctgccaaccgttgcgccggcccgactctgtcctgaagccgtggcgtacgggggattcacttccattcgacgcaatctggcctcgtcgtccatctcgcgggcgcttgttcgtgcgcgtggattgttttatcagggtctcgtacccgtgccctaagtgggagcgtccgctaagtttcctcctaaagggcgcaatcactatggctcgcaactgccttacagcgtgcagcaaccgtactgccaaatccctagtagcactggatttgcagc

SEQ ID NO: 352542 - DNA, 418 bp, Zea mays
gccttgtatttgtactcacttcgtattccacctgcaacgctgctgcaagctcactcatctccccagcgctggtcgtcatcctccactccaatatgcagttcggtctggtgctcctaccaagtaccgacaccagcgtggtccctttttttctctgtcttggccggccacctctgctcctccctgctgccgcgtcgctggcccagctcggatctcgtcgaccccatgttgagctcccatctgccatggtcgccggtcagcccctgcgcacggcttcctgcgcgccgggatggctcgtctccactgatcaaggacgcttggaaacagcagtagcccatctcagcactagctatggtggtcgacgttcagtcggaccgtgccgctgctccattcatggctgcgagtccaactccggcgagct

SEQ ID NO: 352543 - DNA, 92 bp, Zea mays
cccacgcgtccgcccacgcgtccgcccacgcgtccgcccacgcgtccgcgcgtgtggagccatgcttgccagcgcgacgagagcagggacgt

SEQ ID NO: 352544 - DNA, 84 bp, Zea mays
tgatatttttgaactgtgtttgcattttgcaagctccacaaatatatctcttttggaaaatcttgcttgaaaagcgagaataaa

SEQ ID NO: 352545 - DNA, 89 bp, Zea mays
ctgacacgtgggcgcacatgccggtcaggccaagcgtcttgcacctgcggttcaagtcgagccacggtcacccacctcatgggtgtgaa

SEQ ID NO: 352546 - DNA, 421 bp, Zea mays
cagacgcgtgggggcgacgggaaggccaggtctagcaagtcgcgcggcgatgatctcctcaccctctccgtcgctgtcgccgtcgccgtccgggacgccttcgcccaagggcgtctccgctacgccgcggcagggcagcagcaggtggcgcagcggcgcggtgcgcggggcgtacgggcggcgcctgctggacgcgctccgcgccacgggcgacggccagccgcgcccacgcgccgtcaaggcggcggcggactcggcgctggcgctgaccgcgcgcggccagacgcggtggagccgcgccatcgtgctggccggtgcggtctgcggcggccgacgccgcgtcctcgtcaagggcggcggcaacgtccggcggcggcgccggcgccgcccgccggttgcaggccagtagacgaggcggcgg

SEQ ID NO: 352547 - DNA, 96 bp, Zea mays
cggacgcgtgggggatcatagaatctactgtaatcactgcaacagagtggtctcactcttctctcatttaagtaatttcttcaggttcatcgtaca

SEQ ID NO: 352548 - DNA, 94 bp, Zea mays
cggacgcgtgggcgcagtcgccgttctcatcgcctacgccatggccatgctcttcctccgcatcaagatccccggctacctttggtgaggctga

SEQ ID NO: 352549 - DNA, 92 bp, Zea mays
cccacgcgtccgcgagtagatcaaaaggaggaggaggatggcgaggagttcgttcaagttggagcaccccttcgaaaggaggcaagctgagg

SEQ ID NO: 352550 - DNA, 92 bp, Zea mays
tgaacctcttaaaaaatgtggggtcagtgatggagagatatgcatgatagcaaacattgggcctgagaccgttgaagaggtttatgcactag

SEQ ID NO: 352551 - DNA, 93 bp, Zea mays
cacacgcgtccggcggacgcgcggccggtatccaccaccaccaccacccaaccccaaaccccagagcctcccgtccgttgctggggtttgggg

SEQ ID NO: 352552 - DNA, 92 bp, Zea mays
cagcaatcgtcagacatatctaaagataagcaagttgatccagctttagcagacacactgaagctctccttcacacgctcagagttttccat

SEQ ID NO: 352553 - DNA, 341 bp, Zea mays
ccagagcctgacagatttaggcagccacttcttgaggaactacgttatgatgagattattgctccatctagcccagaggagacggtggctcttgccgaggagacacttgaagcgtgggaggccgttcgggacggagccttgaagcttatgaagggctatgcagtgagggtttgtggatactgccctgaggtgcatgttgggccaactggccacaaagcacggaactgtggagcttttaagcaccagcagaggaatggacaacatggatggcaagcagcggtgctcgatgacctgatacctcctaggtacgtgtggcacatgccggaatccggggaaaaact

SEQ ID NO: 352554 - DNA, 294 bp, Zea mays
cacacgcgtccggcatttgatgatatctaaggcaattcatgtaactccaccttgctgattcccagatagggttgcagatgattgaaaaatggctttgtacaagccgacgagcctcttgccatctagggcctttctcatgataatgtcttcttccttagtgaaaatttttgtggctgttgagcgttctatatgccttgtaagatgtattattatgaactttaactccttcaatcatccaggtggaaattttgtggaccatggtgcaattgaacaaaatggtgatattgtagaacc

SEQ ID NO: 352555 - DNA, 94 bp, Zea mays
tgaagacaccggtgcaccggccacagctctccttgatgctggcccttcacaagtttaaaacgtcagagaacctcaggagatattcaatcgatgg

SEQ ID NO: 352556 - DNA, 90 bp, Zea mays
ctgggatccacacgctcaagcggctgacagagcccggcacctacgagtacttggacaagatcaccggcgaactcgtccgtgggatactgg

SEQ ID NO: 352557 - DNA, 91 bp, Zea mays
cccacgcgtccggcgtattttggagcacaggttttgcttctgaagttgttttttcttggttcctgtatagaataattttgtcatggcactt

SEQ ID NO: 352558 - DNA, 89 bp, Zea mays
gaggcgctgaccacccgccgccgagtccggcgaaacaaccgcctgtagttccagagtagtacctcatggcggccatatcgtcacttccc

SEQ ID NO: 352559 - DNA, 322 bp, Zea mays
ccggatccacccacgcctctggagtaacgcgcgcgcgtgcatgaccctagggctgggcagcggcgcccgggaggccatggagaggctggatcagaaactccgtgcgcagagacaacctgtggtgctcaagaggcatgaggtgagcacgagccccactcccgcgaaagcgcacgaagacgcaacgttcagctgcagtctccatcgccagtagtcggcagcgtgcatcagcgacacgggcgtgcatctgcggcgggaagtggtgtcttctccgagacctaacaataaaggaggacgaggacggggccggttccgctggtgcctg

SEQ ID NO: 352560 - DNA, 277 bp, Zea mays
ggcgtccatctaccgcaacggcatcaacgacaacgtgcgcatctacaaaggtggcgagaatatggatagggtcacccgcgccgtcgcagcatcgagactcaccacgctgcagcagtggtagatcggtaggtcatgagcaaggaatgcaagcatcggtcgacgtacaaacacaaatagtggctctcgagtagccattgcataggggatatgatcaattcaggcatccaaccatccgctgctgctgtgttagacatgcgggagggggacgtcgcaaggt

SEQ ID NO: 352561 - DNA, 92 bp, Zea mays
cccacgcgtccgcagacgcgtggggcacgggcgggctgctccgcaaggcgcaggtggaggagttctacgtcatcacgtggacgtcccccaag

SEQ ID NO: 352562 - DNA, 113 bp, Zea mays
tacggtccgaaatccgggacgaccacgcgtccgatcagatcagttgagaaacagctagatttttcagcagatggactggatacttctggttctgagattaagaactctccttg

SEQ ID NO: 352563 - DNA, 91 bp, Zea mays
caggaacaccttgccccatattcaggtatttatagggcatggtccagtaaagaatactccttgccctcgagctctaaccaataaccactgc

SEQ ID NO: 352564 - DNA, 91 bp, Zea mays
cacagacagtgaccataaacccgtgagatgtacattcagcgtcgatattgcaagagtagacgagctgataaggaggcaagagtttggaaaa

SEQ ID NO: 352565 - DNA, 92 bp, Zea mays
gtcgtccctgccagcgttcgcgccgacggcgttcctgttctgatcatggcgtcggcgtcggcgactcgtcgtcatccacgaggacgacgacg

SEQ ID NO: 352566 - DNA, 82 bp, Zea mays
cacacggttccaggcaggacattcagatctgcggcgacgtcggagagcgccagatcttcatgagctagaacatggcgcagca

SEQ ID NO: 352567 - DNA, 436 bp, Zea mays
gaaaacttcggttggttaattcaattaatgttttaatgaaaacttaggtgactgcagtttaaacgactgcatctgtcatcctgtgttgtttggatacatggaactagtagtagtagtaaagtaaaattcggtccaccttttggtacaccgtaaggatgaaccaggatcaaaattctgtcaactaaactgattgtatggccgtcagacgttctgtgtttttgcactacttggtctgacgagaggatggacggccaaggactggggacactactacacaaagaaacaacaaagccactgcagaattctctaacctatatctgtggaaaaaaaaactagctacactccggggcagatgcaggatttagagactgtgtattcaaaatttagaatgggagttttcctgataacgcctcaaaaatagaggaagagaacgcga

SEQ ID NO: 352568 - DNA, 347 bp, Zea mays
cacttggcgccctatggaagagatagaaaggatattgtttcgttgcttaatccaaatgtatatgttatgttcggcaaagtgtacacccgaaggcccagaagggcagttgatcgacccacagtaggggtcgatgcagataagagattaggggaggattaaatatgttcagttgcaggattgttatgcaacaaatccagtccttaaaataaggagtctgttagctaagtcttaggagataagtcgtaggatgtggagtctgccaggaggactcggactatatagtccttttggttgtaatcatgaatgtaaagcaagtattaatctaaagaagggattactcttgcctc

SEQ ID NO: 352569 - DNA, 218 bp, Zea mays
ccacgcacgcgtccggaaccagtcaagttaccctggtctgctccatgcttcgtctgcaataggagtttttgaggattaagttgaggttttgtaaagaagacttgttcgttactttttttgtggattattaagatatatcctatgtgtagtttatgcttaaaatttaaaaccaatgttgaatacaaaaaaaaaaaaaaaaaaaagaaaaacaaagaaaa

SEQ ID NO: 352570 - DNA, 428 bp, Zea mays
attcctctgaatttttcgtggtgccgctgctctgctcagcctccagctcccgcgccggcccgagcttcctccagctagcccctgcgctcgccatggcagccgctggtttcggctccttgcgcgccatggccgccttgcccgtcccctagcactcgattcctccaccagacatccctcctcttcaacctcgttgtaccactgcttggagtttgcgcagctccctccctgtgtggtgctccagccgagctcgccccggtctcttgcttctatggtggatgagctttcctgctggcgcgcgtgtgaagccccctggccgcgtctccctcttcctccctctgcatcctccatgcccgagtccggaatcctagtcgcgccttccctgccctctgctcgatgttccttggcgcgtctgctccagcgtcgcgcga

SEQ ID NO: 352571 - DNA, 93 bp, Zea mays
cacacgcgtccgggcaggacatcaagaaccccggcagcgtcaaccaggaccccatcttcaagagctacagcctgccgccgcacgagtgcggct

SEQ ID NO: 352572 - DNA, 90 bp, Zea mays
ggaggcgtgtccgcgcacctgttcgccgtgttccagggtatcctcaagatgattgccgggctggacaccaacttcacggtcacggcaaag

SEQ ID NO: 352573 - DNA, 94 bp, Zea mays
cacacgcgtccgcccacgcgtccggttggctgatacatattactggatacgttaagagtcaagttaaatgtgatgaagccatgtataactgcat

SEQ ID NO: 352574 - DNA, 90 bp, Zea mays
cacacgcgtccgaggagagttcccatgtcgcactgaatcaaagttccgagtttgcgttgtgcgattgtacctggtcaatgaatgggaacc

SEQ ID NO: 352575 - DNA, 428 bp, Zea mays
caagggcatcatgtcagtggagagaagaagcaagtgtgtcatgttagccggcccattcttaacaatggaccaaagcaccgtccattgacccccatgaggcgatgccgtggtgtagcatgtgtagtgattatactgtcaacagcattcctgttggtagtttacttggctcctattactacttttgctgtgcggctgttcagtgtgcattacagccgaaaggcgacttcctttctatttggaatgtggttatctttatggccgttcttgtttgagaagataaacaaaaccaaggttgtcttctccggtgaaaatgtgcctccaaaacgacgtgtattgttatttgctaaccacaggaccgaggttgactggatgtacttgtgggatcttgcactgaggaaaggccatttaggatatatcaagtacatact

SEQ ID NO: 352576 - DNA, 114 bp, Zea mays
tccgggttaaaccacgcgtccgcacacgcgtccggtagccgccaccatgagccgctcggggcagcctccggatctcaagaagtacatggacaagaagcttcagattaagctgaa

SEQ ID NO: 352577 - DNA, 82 bp, Zea mays
catggtttcactaccggtgcctcctacaaactttgatgcgacaaaagatgaagccccttattcatcaaaaactgtacctgag

SEQ ID NO: 352578 - DNA, 85 bp, Zea mays
cccacgcgtccgcagctcttttgttacttgcgtacaaggggatggactaatcatatcaactacatctggaagtacagcatattca

SEQ ID NO: 352579 - DNA, 80 bp, Zea mays
cccacgcgtccgcggacgcgtggggcaaaggcagcacactcagctatccagcaaaagagatcgagaggcaggagtcatgg

SEQ ID NO: 352580 - DNA, 86 bp, Zea mays
cacacgcgtccgggagaaggcggttgaagtgtaccagaggatgaagaaggagcgctgcagaactaacaccgagacctacaccctga

SEQ ID NO: 352581 - DNA, 81 bp, Zea mays
tgcagatcctaataactttatgtgttgtgacaaaccacctctcattggacgacaaacatataccaaagttacaaggctaga

SEQ ID NO: 352582 - DNA, 81 bp, Zea mays
cagacgcgtgggcttgcccctgtggtcattggtgtttcaatggcatcccttactgagctttcattcaactggactggcttc

SEQ ID NO: 352583 - DNA, 84 bp, Zea mays
cccacgcgtccgcccagccagggtggtacagggtttattacatcattaataatattcaagagttagtaaccgctctgacccaag

SEQ ID NO: 352584 - DNA, 81 bp, Zea mays
aacgcttatatcttgtcagccatggcgaccgccgccacgtctaacctcctcaagtcctccttcgcgggctctcggctcccg

SEQ ID NO: 352585 - DNA, 104 bp, Zea mays
tcgcgggtcgacacaagcgtctaaacagacgttctggaacagattgcgctgctccataattacttgtgctctaagccttgatccaaatccacacacattgatct

SEQ ID NO: 352586 - DNA, 57 bp, Zea mays
ctccgcaaggtgaataatccagcactgcttatcaagtcctagatcttgactgtattg

SEQ ID NO: 352587 - DNA, 82 bp, Zea mays
gtgaggatgcttcaaatggaagtggtgatgtgtgggacgaatcacttgaggctccattctgaatggcgtcttgctgcatgaa

SEQ ID NO: 352588 - DNA, 82 bp, Zea mays
agatcgagatctcgaacggccgcccttttttttttttttttttttttttttttttttttttttttttttttttttttttttg

SEQ ID NO: 352589 - DNA, 71 bp, Zea mays
ataagttgtcagttgatccctctccaataagctaattaaaggccggtctcaaccccccttgaactcatttt

SEQ ID NO: 352590 - DNA, 413 bp, Zea mays
agatcggtggttccaaccggcaaaagagagatgatggtagggaagagggagcgggactgcaagaacccgatgcggcggacgacgagcatgacggagttcgcgccgcccgacgcgctcgcggcggtgatggaggacgaggagggcccccagctgtccgacgacagcagccgtgacggcgggcagcacgactggctgtccgcgctcggcggcggcggcggcggcgtcgggggcgccgcggcgcaggaggactggctcgcggcgtaccacgcccgcgcggcgccggcgcgggcggggctccgccggaactcggccgactactccgccgtcgagaccgccgcgttcctgcgcgcctgcgggctctgccggggccgcctcgggcccgggcgagacaccttcatggtgacgggcgacgc

SEQ ID NO: 352591 - DNA, 82 bp, Zea mays
gcgagggcgcgtcatcgtgcgcatgctctccccgatgtcgcacttcgagaacgggacctgggaccacggcggcgactgcagg

SEQ ID NO: 352592 - DNA, 81 bp, Zea mays
cccacgcgtccgcaacacaataatgtaacaagcatcagcccagcccagccagcttccattcccaaggaaaccctccgctcc

SEQ ID NO: 352593 - DNA, 77 bp, Zea mays
cacacgcgtccgcacaacagtaatgtgacacgtatcaccgcaggccagggaccttccattcgcaaggaatccctctt

SEQ ID NO: 352594 - DNA, 80 bp, Zea mays
aaaacatcttcgacgctaaagccgggattgccctgaacgaccacttcatcaagctcgtctcttggtattacaacgagtgg

SEQ ID NO: 352595 - DNA, 416 bp, Zea mays
gggggcttggccatcaatcgcttgacgagcgagcgagcgagtccatcgccaagctggggagctttaacctgccgaagagcgtgtgggttcagtcgtctttcctccctctccatctgtaggtctgccgtcgccgcctcgtgcagtgttcgtgtgccctgccgctgttctgcactagttctacccgtcatttccacccttccgcttgctggccgagtcccgcgcgcgtgcaggtctttccgcaatctcaccgggtggcgggtgcttccttccttcctcgccgaccctgtggctttgcaacgaggaaggtgaaatttgaatggaaatcgcgacgggagcgataagcgcactcctgcccaagctgggcaaccttctcaaagaggagtacaagctccagaggagcgtcagggatgatatca

SEQ ID NO: 352596 - DNA, 210 bp, Zea mays
ctcgcgggtcgacacaagcctctaaagtcactcgtgcgaacgcgtgggcggacgcgtgggggaagttctgcaatctgactatgttttaaaatttataattgttgtcaattagtgttggtgttggtttcgcccatcaacggatcaaccttattggttatctgaacgacgaattgatatgttaactcgtgaacttcgttatatttaggcagc

SEQ ID NO: 352597 - DNA, 81 bp, Zea mays
cagacgcgtgggggcctcaacaaggtcgccgggaaggtcttcaggatcggccatctcggcaacctcaacgagctgcaactt

SEQ ID NO: 352598 - DNA, 83 bp, Zea mays
gacggcgctgaccacacgccgccgagtccggcgaaacaaccgcctgtagttccagagtagtacctcatggcggccatatcgtc

SEQ ID NO: 352599 - DNA, 83 bp, Zea mays
atctgatgtggtcatggcgattgttgcggacgtcatgcttgtctatcttcctgctccaactattggtttacagccgccactgg

SEQ ID NO: 352600 - DNA, 383 bp, Zea mays
agccgccggcgaacagagagcagcgagcaggtcgacgacaagccgtagcaaaatcattgtttcctttcatgcatccatccatgcgtaatccacatgaaatcggtgcgtatgataatcctgcaatgtcggcgtcgaacaaggcagcttttgtagattattttttggcaagtgagctattcacctgtgtaggttcattcaagagagagtctgtgcgctgacgtgctgtctaggctagatccgatcagcgatgatccgaataagcagctcgtccttgcctgtcagcccccatgcggccatgctccccgtggtccgtggatggagttcttgaaaggttgctgagaaaacatgcctgattcgcagagacctggcccggcatggcaatg

SEQ ID NO: 352601 - DNA, 208 bp, Zea mays
cgggtccacaacaacgtccaaacacgcgtccgggagacactgccatgaggactctactaccggtggccgccggccgcgagaccgtcgcctgcgcggatacacgcgtctcccagaggtcactgcgcctctcaggcgcagccgcaagtacggcgctgcagccggatcgagttgctggaggtagagccgtttaggctgagcaagaacgagg

SEQ ID NO: 352602 - DNA, 79 bp, Zea mays
cactgccgaccatcctggtgatcgagttcgtggccatcgccttcgccgagcaccagcgcaccatggagaaggaccccga

SEQ ID NO: 352603 - DNA, 85 bp, Zea mays
aaaatgcgtctgcccagtgtcgtgtagtgtgtagtcgcagcagctagcgcccggccggccagtcgagtgagtccatcctccatcg

SEQ ID NO: 352604 - DNA, 102 bp, Zea mays
tcgcgggtccacacaagcctctaaactgattcatactagtctcggctgctatggcggcggagaagaacgccgatgtgcaggtagtcgacttcgtccacgatg

SEQ ID NO: 352605 - DNA, 407 bp, Zea mays
aacacgcgtccgtagatcgcgagcggccgccctttttttttttttttttttttgctggaatggttctacgtactcgtcattatcattaccatcttagatgcaacaactgaattacggtcgcatacaaccacggtcttaagcttcgtctgcaccaacgcatgcatagatcgatcgaactcacgggtcaggctgaacaaaaatacagtcgtagctaggaataatcgacggatgagttcagagcgagaggccggagtcgtcgtcctcgtcgagcgtggaggtgtagacggtgtagagggaccagatgaggccgaagacgcccagcaggatccaccccagcaggttgttgctgagccccaggcttagcccggtgccctccgtcgacatccgctcgtccaacaacgccagcg

SEQ ID NO: 352606 - DNA, 84 bp, Zea mays
ggaaaggtcatgctgaacctgctaagaagattggggcaggagtcgaagcatttgagataggcaaccacccggtgtggaaaagtc

SEQ ID NO: 352607 - DNA, 105 bp, Zea mays
gcgggtcgacacaagcctctacacagacttctagcagcacgttccccagagcttctattcctggccattcgccgtcgacgtcggcggagaggtgttcgatccggg

SEQ ID NO: 352608 - DNA, 65 bp, Zea mays
acgaactcgaactgctgctgtgcagctatccactctccagtgctccacgctctccaattctctct

SEQ ID NO: 352609 - DNA, 251 bp, Zea mays
aaacatctctgcttcacacaaccatgctgcttttgttacggagtctggggaggttttcacctgtggtgaaaattcaacattatgctgtgggccaggggaaatttgggaaaactaaaattccagcaaatgcaaggttgaaacccctaaaaggaatccccgcaaacaaggttgcaatgggccaaattttaacgggaatcctaaaaaggaatggcaaatataaaactttgggaacaattcacaagggcaaattt

SEQ ID NO: 352610 - DNA, 273 bp, Zea mays
attttattgggcgtgaacttttagtgccaatataatacagcaatatctttagaaatttaattcaaaaacaaatgaagtgtaaaaatattgctgtattttattgggcgtgaacttttagtggcaataatgggggtaaaataagttcccaataaaatgggcccccaatggtccgaaggcaatttgcaatccggaatgtaatccaaacacagaaaatttggtttggttaatttgaaccatctcaaggggcaatcacagaaaaaagaaagagcgaag

SEQ ID NO: 352611 - DNA, 397 bp, Zea mays
caaacatctgagtctagctcctgacagtcacagacctcaaaactgttctgcacatcctttcttttgcagttgcagacttgcagcccaggtgcatgttgtccagagataagcaggtgatggctgcgccgatggccgcggcggacggcgggctgaggcggctgttcgagaagtcgctgccggagaacccgacgctgctggaggcgctctcggcgtggaaccgcaacgtgcaccaccccagcagcaagccgcccattgacacggcgtccttcacggagatcttcggcgagctccatttccaggagaagcagcagcccgaccgaggcgccctcctgccgccgtcgccgtcgaccccgccgacgccgctccctccttcccgcacgctgtcgtggctcgacat

SEQ ID NO: 352612 - DNA, 357 bp, Zea mays
accacgcgtccgcggacgcctaggcggacgcgtgggtttggacaagtgtgccatgatcagttgccaatagatcggcacagtgggcgatgcaaaagttttggttttgtacagtttgcacgtcatcaagatgcacatgctgtccagagtttaagtgggcaacttgacattgctggtagagtaatcaaggtttcacctgtgacacagcagccatgcattcaactaagtggaagcacaggagatttgggtcatgataaatcttgatgcgtggcacagaatgccagttccagagctcgtcgaatgcagaaattgcgccgcaatggcattacgaccactttgactggtgggaagggcagtgct

SEQ ID NO: 352613 - DNA, 274 bp, Zea mays
cacatgcgtcagctgacggatccggggtcgcataggcggaagttggacacagagaagggaggtgatatgaccggactgtcgaagcaggaaaggcgtagcaccaccactgcaatgaagctcatgccatgtttcgtggatgcttcatcagggtcacattttaactcatgggctgttgacataaccacgggtgctaaacatgcaattgcaatgtcaattttagttcacgatcgttgttgcatcgatcaacgcatatgttgtctgcgatgctagtgtg

SEQ ID NO: 352614 - DNA, 421 bp, Zea mays
cccacgcgtccgcccacgcgtccggtcttcacactcctcgccatcacataaaaccagtgcaagcagaagcagcgcaatggcgagcagcaccatggccctctcctccacagccttcgccggcaaggcagtgaacgtgccgtcgtctctcttcggcgaggcccgcgtgacgatgcgcaagacggcggcgaaggcaaagccggcggcgagctccggcagcccgtggtacggccccgaccgcgtgctctacctgggcccgctgtccggcgcgcccccgagctacctgacgggcgagttcccgggcgactacggctgggacaccgcggggctgtcggcggacccggagacgttcgccaagaaccgggagctggaggtcatccactcccgctgggccatgctgggcccgttgggctgcgtgttcccg

SEQ ID NO: 352615 - DNA, 379 bp, Zea mays
cccacgcgtccggctacgtagcagtgcaataaaaaaagcagccgcaatggcgagcagcaccatggccctctcctccacggccttcgccggcaaggccgtgaacgtgccgtcgtcgtccgccttcggcgaggcccgcgtgacgatgcgcaagacggcggcgaaggccaagccagcggcggcgtccgggagcccgtggtacggccccgaccgcgtgctgtacctgggcccactgtccggcgagccaccgagctacctgacgggcgagttcccgggcgactacggctgggacaccgcggggctgtcggcggacccggagacgttcgccaagaaccgggagctggaggtgatccactcccgctgggccatgctgggcgcgctc

SEQ ID NO: 352616 - DNA, 352 bp, Zea mays
tcgtaggtcgtcacaagtctctagagtgagtcgtactagcaccccaaccatggcagatgccgccgaagcgtctcctcttcctcacaccgttggcctaggagaacgtctacggtgacgatcctcgcctagtgttatcgcagcctcgacaagggcgatcaccacactgatcggagcctaacaatacgtagtatttcgttgcatttttagaagcgcaattgacatgatatctatgtgttggatgtacaaacacgactatccgacgtaagtggtcccaggatttttagacttctacatttaatagacgaatttacggatgatttaactcgttgctatcttgagataaggactacat

SEQ ID NO: 352617 - DNA, 89 bp, Zea mays
acgcgccgcggcagcagatggggagagagagatgcagagcgatctagcgatagagcgctggtcatggggtcactgtctgtcgccgccgt

SEQ ID NO: 352618 - DNA, 286 bp, Zea mays
tacaatgcgtctgactacgcgtccgggcaggtcgagcactgcactgggcacgcgtgcaactgtacacaatcgattcgtcgtgtgatctcggatttgcatccctccttaaggttagtaagctcgatggccgatctaggctttgatcgtggcaacaacgttcttcccacgctcccgtgttacgtcggcacacacagcaccaaatcctcgtccacggacattattcgccacatcaactcatagattgttcacactcacgaccatatgtgagcgagacccgctcgccata

SEQ ID NO: 352619 - DNA, 59 bp, Zea mays
atcctccccactcccagggaacaacattcatcatcaatcgactataaactcttggtttt

SEQ ID NO: 352620 - DNA, 158 bp, Zea mays
cccacgcgtacgcccacgcgtccgctagaatccgggctcgtagatgctggagtacacagtacagggaaattgcccacttttttcatcaacttaagtttttagattaaacttttttgaaacaatcagacaggagatctgtcttatatattgatgaggag

SEQ ID NO: 352621 - DNA, 402 bp, Zea mays
ctttttctttcctttttttaaactggatttcgattcgtctagttttaactggattttataagcgcgggtagtaagtaactggtgtcgaggattgaacttgctatttgtgaatgactggagtacaagctaggtacaaaatgaatgaattaaactaaactagtctccggacgagccagattagcaacgctgacagtggactaaaaagctgcagctggcgaaagcagttcttttggaattacgaaatacgtagtaaagtcacctcaccacttcaataggcagcatcgctgcagtctgtaggagctcgatatcctgccgcggcagatttctgaaatgtcataatagttccccccaacatgtcaatgttggaagagtacagcaactcgcatctacatgtggcagagc

SEQ ID NO: 352622 - DNA, 167 bp, Zea mays
aaggatttgtagatatatgttttaacgtaaaatccaaaacaaatccaataacttcaactcaaagtattaaacattaagcataattgaagttattggatttgttttggattttacgttaaaggatttgtagatatatgttttaaagttatattattctctgtttgatg

SEQ ID NO: 352623 - DNA, 289 bp, Zea mays
aaactgagtccctccattatgttgccagtcaacttttggacggtgtcgttccaagttgcacgccaatacgtacttagtaagcaggtgtacgtaccttcacgaacgtcttcgagtgttcacatgtagatgattctacttactgcatacacgtagaggttaacaatcgagaaacgaggcagtttatgcatccaggtttgtgcgcgaagagcccgtagtctgtgacgtatgatacgtgtaagagtcgtatcaatcccaagtgagtttatcgcgtcacaactcagttgcagct

SEQ ID NO: 352624 - DNA, 302 bp, Zea mays
gctgaagttcagtatttttctgtggtctgaatgtccaaattccggtggcatcttctatagctatgctttgctttgctttgaacacttgtgttttagggctttctagctgaacccgttgtccaatattgctgacgttgaaatttttggttaatcttaaaactggaaaaaaaaaaaaaaaaggaaaaaaaaaaaaaaaaaaaagacaacaaaaaggagataaaaacaagaaaataaaaaaaaaaaaaaagagagaaaaacggagaaaaaaacgaaaagaccaagtaagaaagggggggcccccc

SEQ ID NO: 352625 - DNA, 399 bp, Zea mays
cggacgcgtgggcggaccgtgggcggacgcgtgggcggacgcgtgggtgagctgataaggttgcgctgtgggcacaggttccactcgacatgcttggagccatgggcgcggaaatgtgcagactgcccatactgtcgaacgaacatacggtcacgatcctgacgacaaacccttagttcagaataagcttataaccaccatggagtttcactgttgtaaaattcgctgttgtgggcatgccagttaatccggtgctcctatggcgacatgtaatttctaatatcctgaatattttgtgttgtgtcgctcagagaggtttatggtgttgtgtgcgagtggaggctgatagcagtatagcttagaaagcacccttttgtgtgtatgtagcgagggatcacg

SEQ ID NO: 352626 - DNA, 273 bp, Zea mays
accacgcgtccggatcgcacttgacgatcaaatcgaatcgcacctattcctctctttggcggtagccgcgtagcgcccgctcagtcgccgccgaccacggcggagaaattgcggcttcacctcgcctgtgtgtcctgattacgcgaggactcgagcggctaagcttagcagcgatctcggtctcagcgaggtcggtgggtgccggaagagaaatgggtggcttccacttacatcacacctgtgtcaaggcacgcaaagtgtttgtgcgagatg

SEQ ID NO: 352627 - DNA, 143 bp, Zea mays
aagcacttgacgatcagatcgaatcgcacgaattcctctctttgggggtagccgcgtagcgcccgctcagtcgccggcgaccacggcggagaaattgcggggtcacctcgcctgtgtgtcgtgattacgcgagggagcgagcg

SEQ ID NO: 352628 - DNA, 391 bp, Zea mays
gaaataagtgaatggtcgaatgctatgctggaaaagaatgttgaggagcttcgtgaatccaaggagagatgctttgagaaatccttggattgcgtaagaaaactaaaaaccagctttgccaaggtgggtgcgtagtcttccaaagaaaagttcattcgaggtgaccccgagggaatcattgattgggtaggtgaagaagccgaagcttttggagatatccttagtgatcatggggatagttgtgccttcgccggtgcttggggggttgcagcaattctggagaaagctggttgtgaccatgtgaaagctgtggctcagaccgaaacgggcttctccacagacgacaggaaggacccctcgggcgaagccactttggtgggcgggaagtttt

SEQ ID NO: 352629 - DNA, 308 bp, Zea mays
acggacgcgtgggcggacgcgtgggggagtggtcgaaactcgagaagaagggtccacagatcatccttgatcgtcatccacataatccctatctcggaatcaactgttctacttcgaagtatctatcaacttcactactacagactacagtccacaatctatcagcttcactactacagtccacaacagaggaagaaaattatccaacggacaattccctatatgccactacagttttgctcggtactttattcaccatcgtaaatattataatcggatgtaaattcttatccttctatatcatcgct

SEQ ID NO: 352630 - DNA, 374 bp, Zea mays
actcctcgccatcacataaaaccagtgcaagcagaagcagcgcaatggcgagcagcaccatggccctctcctccacagccttcgccggcaaggcagtgaacgtgccgtcgtctctcttcggcgaggcccgcgtgacgatgcgcaagacggcggcgaaggcaaagccggcggcgagctccggcagcccgtggtacggccccgaccgcgtgctctacctgggcccgctgtccggcgcgcccccgagctacctgacgggcgagttcccgggcgactacggctgggacaccgcggggctgtcggcggacccggagacgttcgccaagaaccgggagctggaagtcatccactcccgctggggcatgctgggcgccttg

SEQ ID NO: 352631 - DNA, 98 bp, Zea mays
attggaaataaaaagcgtgtaatgaccttactcagcaacaaggcaagtgccaagtacaatttccgaatgataccaacaatcctaactgagtttttgcc

SEQ ID NO: 352632 - DNA, 90 bp, Zea mays
acccacgcgtccgaaaaaaaaacaaaaaaaaaaaaaaaaaacaaaataatctaaaaaaaactaagataaaaacaacgccatacacagaaa

SEQ ID NO: 352633 - DNA, 129 bp, Zea mays
aaagacagaagatacaagcaaaacgaagaagctgacacgagacgcctctcctctctttctcctttatcagagatgatgaaaatggatgtacaaaaagatgagcatcgaacgcgcgcgcgcattactact

SEQ ID NO: 352634 - DNA, 120 bp, Zea mays
gggtcgaccgacgcgtgcaaggacgcatgggtttagaacaggttacatcaatacatcgtagtccaagatgattccaggccttctggggccctgggtggcctacacagggtgcagtttgtg

SEQ ID NO: 352635 - DNA, 83 bp, Zea mays
caccgaacacgttcttgggaccgccgccgccgccctacttccagtcccagctgctcaggtctccatctgcctcgagccctttg

SEQ ID NO: 352636 - DNA, 71 bp, Zea mays
aatgcacttgtatttcttgtacctgcttattgctgggactatcagccggtctcttgcacggatagcttgct

SEQ ID NO: 352637 - DNA, 168 bp, Zea mays
acgaagtttgagattgattcacacaatattattattaatcaagttagatttgatgaggaagctgtctagtcaaaactgctaaaagcacggatgagaatgcaacataaatacattagtcagtaccatatgtgaggactatgacttcgacatcaccaagcttcccttgct

SEQ ID NO: 352638 - DNA, 377 bp, Zea mays
gctatggatgtggaaaaggacgccaatgttgaaagtttggatgaggaccagagtgacagtggcaatgaagaggcagaggagtcagacgatggtgcgggtgacgttaatggtgcggaggagatgaacctgagaattggggatgtcaacgggggtgagggaatgacacattccttacagcgctgtgacacagttgggggcatggagtttgagacgctggataaacgagaggatgagatcagggatgagttaacatttgacgattttcctgcaagggcatctttggaaacgatgacatcatcaaacctcctccaagccatgaactcaattccctcatcatacaaggtgtgcggggaatgtgcatgatctgccctctgggg

SEQ ID NO: 352639 - DNA, 326 bp, Zea mays
acatccagattgtgctccacgagacagatggacgccgggggctcggggatgatgaaggagacgacgaagacggtgaggacctcgtcatcgtcgccgactgaccacacatcaccgggatcgatgagcatgattggggagaggacccagtagcggcatgggcacaatgagagcgaaaggacggacgtgagccctgtaagacagccgcggcacctgtgtggaacgatccggtacagtagcggcggccaagggttccatcaacagcaccattccatgtccaaggtcagttacttgggccaagaggccgtacgatacactctggccacccc

SEQ ID NO: 352640 - DNA, 83 bp, Zea mays
acccacgcgtccgaaaaacaaggaaaaaataaaacaaaaacgaagagaaccaagaaaagacacttacaaagggcggccgctct

SEQ ID NO: 352641 - DNA, 175 bp, Zea mays
acggacacgtggggcaccttttagcacaatatttcggacagtattgtgaccctatatatttcctaccaaacttaatttattaagttattgtggtcctacagttcagtttagtggcgccggacgagatttacgcgagacatatgtgatcttgtttttgtgttcctatcatgaatgg

SEQ ID NO: 352642 - DNA, 299 bp, Zea mays
aagatagatgagggcgcaccactggtcaatttgactcgatcctcggatgacaagatcgactgctgccgcttttctatgggtcgcatgaggcggttcctgtttggcagggtggggaaagggcgcgaagttcgtacggttgtctggagcataagcgattgggagacaagtgagtacagaacacgtcgggggaaacctatggcggcgggcgcacttaccgtggatgggaagtatctggcattacgaagccaccgagggtgacttctgtgctgttgaagtgaacaaaatggaagtttctcact

SEQ ID NO: 352643 - DNA, 79 bp, Zea mays
acctcgtcggcctccgccaacctctgctacgtctgctcccgcagcctcctcgacaacttccgcttctgctccctcggct

SEQ ID NO: 352644 - DNA, 192 bp, Zea mays
gcgagcgatccatgtctacacgtacacgaggcagcagcaccaagaagcagccgcatcatggcacgcagcgcaaagcgatggagtcgctcaccatgatggcgtccgtcgccgccgtggcggtggccgcgctctcgcgccacggcagcttcgccgtggtcaagtccgccaagggcgacctctgcgaggagcccg

SEQ ID NO: 352645 - DNA, 336 bp, Zea mays
gggccgacccaaacgtcaagtggttacactacctacgcttgccaaccaactttcctagcaagctagtgtgttgccctctgcagtatcacatacagttttcatcagaatagttgattcagctgacttgtcttcattgaaaggtatgcctgccgaggaatgcatcccaactaccagacctggtaacttcagaactaatgtgtgccatggaagtagggaacatgtggatccatatgcggcacagtctactgatacccacggtacctcagactcaggacttcacccaatttgcagtcctgctaacattggagatggcttttatgaagctaccgggccttg

SEQ ID NO: 352646 - DNA, 309 bp, Zea mays
tgttggtttactgagtggcactgacactgtgcgtgtggtctcagatgttaaacctgctcgtcttccctgtgtttgcagcaccccggactacatcacgccggagatgccgcaggtggccaacgagttcgacgacgacgacaaggtggggaagatggttttttattctctttttttgagcgtgggtatatcatatatcatatatgccagtgcagtggtagtgtgctgccttgttgagctccactgtttgtttggtttcgtgcatgagaccatcccctgcccaaaatctccggagaagtcagcgaaccctcg

SEQ ID NO: 352647 - DNA, 254 bp, Zea mays
cgcctccgcccatacgtctggtggattttggatcgatatggcttggctatagttttgtcctgctgttgacggcgttcagtgccggtgggatcggccttcctacatgtctaagtaacttttcgaaagcattctagtcaccatggtcagtctgagctatcagatacttgacactcaactataccttcccaaatgtcagcgttgacctccctgaatcactattgccgtctctcgcatctacaacgagttgatgcgat

SEQ ID NO: 352648 - DNA, 87 bp, Zea mays
gttgttaggaacgtatttgtgtaatgaattctgcaaagtatgatctcaactgcagttgtgtagcctttctcttacagtcttactgtg

SEQ ID NO: 352649 - DNA, 328 bp, Zea mays
ggcttcctcggggattggtgccggtcggtggactgctccgacgcgggctcgggtgtgtgctggtggtgggtttgcttcattgtcgtgcattgccgtagggaaggagccgttatcaacactgcgagccagaattaacatgaacggcagctatactcttacacgaacatcgacacacacctacagtgctaatgccaacggcggggaaacgctgttcaagtttctgagcagtgaccgtgatccgcgcggcagcagtaacactggccttgcgtacggtttggtcgtcccaaccttcaagccgatactaatgcatcgagctatgattagcaat

SEQ ID NO: 352650 - DNA, 85 bp, Zea mays
aaatacaaaaaaaaaaaaaaaaacaaaaaaaaaaaaaatgaaaaaaaaaaaaaaaaaaaacaaaaaaaaacaaaaaaaaaaaaaa

SEQ ID NO: 352651 - DNA, 201 bp, Zea mays
gaaaccggcaagcccgggcggtccgtcgtccggatccgcggcgtcaccgacgacgccgccgccgccttcgtccgcctcctctactcccggcaggtgtcgcgaggatcagtatgacgaccttgaggagcacgccgtgcacgtgccggtgcctggcgcacgcgtatcaagtgccctggctgaaacgggcgttcgagggcgcca

SEQ ID NO: 352652 - DNA, 284 bp, Zea mays
tcagagtctcatacacacttctaatctggccgggaaaactgacattggaacgtatcagtatcacggtcacgtcagttgactaatgtgtgactgtgagcgcgtgtgacagcttttacgtacacgggatcgctgaaaaggatacgtatatagctcgctatacggtcggcccccgttaagaaggaaaatatgctcggctcacgagcgctcttgcttcttgcttaagcctgtcttcgcttggtagccgtagcagtatagttttaccggacacacggcttatggatgtc

SEQ ID NO: 352653 - DNA, 258 bp, Zea mays
gggccgggccacgcgtccaaagcaaatctagccaccaaggcaccaaccaagagccatggcatccccgttctgcgccgctgccgccgcttgccgcctcgccgtccccgccccgtctcctcccgccgcacgggcgcctaagccccgacgcgggctgctggcggtgcgcgcggaagccggcggtgggataaaaccggccatccggaaggacggggggaaagtggttgacaacgttctcaacggcggagctcgccaagccgc

SEQ ID NO: 352654 - DNA, 303 bp, Zea mays
agacaagtatcctgactttttcactccttttgacacagatggtttcatcggtagtcttctcgatgttcatcacggggtctatgactatcgctatgatgataccaagggagtttacattgcaattcataatgctcttctagaagttcgtaatcctgttgatgtccccttcaacgtcactgtgtgccaaggttctactattagttctgcgctaaaccgcatgctatacttcataaaaaccttcctgtctactgaacagtcttttgaccacatatttgtatccataaacctgtcagtcattcacga

SEQ ID NO: 352655 - DNA, 226 bp, Zea mays
ttggattgtcaaccgacaggggtccttttcaaaagagaaagcatatgtgacgggacttgaagctggtaatagggtagtaaacgattttgacattggggactttgccaaaataattgcacttgacggagatcagccccatatacagacattgcgaagtcctcaatgaagagccaatgaactgaagctcacaaattccattcccagaattctttccccaataattttg

SEQ ID NO: 352656 - DNA, 331 bp, Zea mays
gggccgaatgatacgtcgacccacgcttccggggaagcagaagcgagacaaatccccagccggctccaaaccctagccacctcccccgtcgatcccttttcatcacccagatctcgctggtgtctgctccgcctcgcttcgatgtgaccctaccctacggtttgagaccgtgttgcggtgtgtgcgtgtgtcgcggcgattcgcgactcgagtacgactcaaggtgtcagaggcggtgcgagcgcaaatgaaagactctgcgcaccgcactacggtggtgctccggcggctgccgccggcgatctcgcaccaagtcgtcgtggtccaggtc

SEQ ID NO: 352657 - DNA, 319 bp, Zea mays
ccgggccgactcatacgtccaatccgactccacaggatgcacaagataaaccagctctctcctctccaccgccccatccatcagcagtcgcgcattcctgaacagcggtcatggcctcagagctgccgtcatcggagttccattgcactcctctcagcacacggcacgacagcacgcatagcgactcctcgcactatcacctcatgaaagcatctcggcagccaacggtgagagcagccgtccgcgtcaagagctcgcagtggagggcattaagaacgacggcggtggccgcggtcgcatgacctgcgcgccgcccacc

SEQ ID NO: 352658 - DNA, 357 bp, Zea mays
gcgtccacccacacgtccgggaagctgttgaagcctcaaaaggtttccagattattcccacgtgcttgttcaaccgaaatctggagttctggaagtgcaccgattgcaaccaactctactgggaggggactcagtaccacaatgcagtccaaaggttcttgtcagtgtgcaacattagtgactaagcagcacggccttggtactcatttgtaaaattgtaaggtactgagataccatcaccttcgaaagatcgaacataatctgatctttggcatccaatcgtgcacgatgaggcatgcaatccatttttagtggtttgctgttcgtcactgagatgctgttgtaaggaaaatagac

SEQ ID NO: 352659 - DNA, 379 bp, Zea mays
ccgggccgacccacacgtccacccacgcttccgcggacacgtgggcagttccgtgggttaactcttcaggggagaatcctttagttcttccataccgattggtaatgggcctatggtagaccaactagaacgttatggtccatcccttgtaacccttacaaaaccggtgcttgcacttaggacagcttggttctgcaacaggtgtatattcgactcttgttacgtatttggtccgtgttccacaggttttattgggtttcattcgacacctacgtgatgacaatgggcctatggaagcatagcgcaaacagatgtctctgaaggccccacacggtgtctgttactgattattccatccgactgccttgccgtgttcaga

SEQ ID NO: 352660 - DNA, 81 bp, Zea mays
acggacgcgtgggcggacgcgtgggcgctgcaatggtgaagaacagcggacaattatcctggaaactgacggttatgtgcc

SEQ ID NO: 352661 - DNA, 271 bp, Zea mays
agcccaggcgtccgcggactcgtgggcaggttcgtggggcgcctcgtcgcagttgaagcactccaacttcgaggcagttcatcactgccagggcgttctctcgctcgagtctggtcacacgcatgcccagccgagctcatgcgtccctctcccgcggtgcctggcttcgtcgagtctcgcctccagtcatggccacgccctgttacgcacacgagcccgccccagtcttcatcttgctatggatggtcagcggaagtctctccccttcctg

SEQ ID NO: 352662 - DNA, 294 bp, Zea mays
cgtccacccacacgtccgcaatacaagatatgttgcttggggacactccactcttgttggaacttttggaaatgtgattgcaacacctgaacatgaggaagcaactataataacgggcggtgactctacaggttcttgacctaattacgcattttcgtcacctgaaacaccttctaaatggtcacttaaatcaattcagtggcctcctttttacaacttctcgacggggaaaacaccaagcttgacaacattataccctttacgctaaatccccctttctccaacatgcgatat

SEQ ID NO: 352663 - DNA, 179 bp, Zea mays
ctgctctctccctcctcatctctgctctgctctggaccgttaactctccagctccccctcgctccgttcccttccgcccaaatcactgggaccaccaccgccttcttcaagatcggcgggcgggcaccggccggcgatgacatccaccgtcaccacaaccgtctggtccggggggcgcc

SEQ ID NO: 352664 - DNA, 314 bp, Zea mays
ggtggctcaagttgttgaaacaaacaggcttggagcgtcaacttgaattgatagaaactcatcaacgagacgtagacaaggctctaccgagtatcgaggaggaagctgaacgcgtattccaggatgaccgaagtgttacttcatgaatatggagctgcttcagcatgagatactatgtatgaatatacgagacgttgtggagcatgcactgcgatcgatgatacaagaccttcaatccaccaggcagactatgagcgctactcatggtcgtgagctctagtccgcggcacgtacgccaccatttggtgttgccg

SEQ ID NO: 352665 - DNA, 160 bp, Zea mays
aaaagataccgctttgcggaatagtatgacaaattccgttgcttagccaactagaagtgttgagcgagacgaagatgatcatctgaatacatcttctccaggactaggaaggcttggtgagtgctcatagggagcaggttgaagcgactctggacatcct

SEQ ID NO: 352666 - DNA, 253 bp, Zea mays
aggcaggccgcgccgccccagcaaatctcacgcacagaaacaccaaagccccaaaggcccaaactcaccacctcccaatggagaacggcgacgaaaccctcgcctcccccacggccgccgccgagacggacgcgctcaacggcggcgtcgcggaggaggagcaggtccccatcacccaccccgcaaagtcctacgtcacgctcggccgacgacaaccccgctcctaacggcggcgtcgtgaaggaggaggagg

SEQ ID NO: 352667 - DNA, 297 bp, Zea mays
agcggacgcgtgggcgcgcgcacactgaattagctgtgccgctggctgcttcgtaaacctctgcttccttgtcctctgtctctgctgcagtctgctccagtcccttttttcttgtcccgcatccatggtgcagcttttgccggcgctggtggcgctcgcccttctcctcggcagaccggtggcggatgcggcgatggcgaaatacacgttcacagtaactcgctctcttcctctctctctctctctctgtgtgtgtgtgtctgtgtctctcgctcacttctatctctatgcagagtc

SEQ ID NO: 352668 - DNA, 116 bp, Zea mays
aactctacctttccattactgttatctcttcataatctctcctctcatgtatcctgtttctctaccttctagaacaatttggctatcagatatcaaattagatcgtcttcctcgct

SEQ ID NO: 352669 - DNA, 138 bp, Zea mays
ctttgtatgaaaaacccaagaatttccagaaaggaattatccaaatggctgctgttgtgaaagctaaacctagaactgaaccacggcctgacaaaactgaaccaaataaggaagcagttgggccatcacaattgactg

SEQ ID NO: 352670 - DNA, 91 bp, Zea mays
agaccacgcgtccgcggacgcgtgggcttcgactgtacatgagaacaaagactaaggagagctccattcccgtacaaggaacacacaagcg

SEQ ID NO: 352671 - DNA, 73 bp, Zea mays
aaaaaaaaaaaaaaaaaaaaaaaaaaaaaaaaaaaaaaaaaaaaaaaaaaaaaaaaaaaaaaaaaaaaaaaaa

SEQ ID NO: 352672 - DNA, 415 bp, Zea mays
ttcccggaccgactcacgcgcccactcaagtcggaactacggatccccgcttacgttccgagtcgcctctcagccgccgcaggcccttgccgcggccccttacggctacggcagcgacctgctcaggcccatcgacacacagacgatcatcacaccctccgccgtcgtatcctcaatcggcctcgctcgcgtcttcggcctcaacggccacacggtgccgtgcgacaggtgcgctgggaatgggggcacgaaatgtgtgttctgcaatgatggcacggtaactgttgaaactccactcgttgagtgccgtgtatgcacacgaccacggctaatactttgcaagaagtgtgctggttctggatactccaagcggttgtaccggaatcccggtttggctggcattcagtgcagtttt

SEQ ID NO: 352673 - DNA, 315 bp, Zea mays
tattccgagtctgccggcgccccaagtgcccgagctgccagtgccgccggtgcccgagctgccgatgcctcaagtgccgccggtgcctcaactgccgggcgtgccgctgccgcccgccacggtgccgtagcccgtatgtgcgccttgcgttgatgctgtaccgttccccgtgccgtcctctcttgtaccaccaccgccgtcgcgtcgtcaccgaccaccgacgagcctacagacgtgcaaatgctgcctggtacacacgtgctgccgccgacgccctgtcgtgtacctgtgtttacgtacgacttttttgttgtt

SEQ ID NO: 352674 - DNA, 144 bp, Zea mays
gcacgctcgcgcagcagcagcaggcggtgcgcgaagtgctgcagtccatgctgccccccggcgcgccggctcaattccggccgctgtgtggcactgacgcagtgggcctgccagttcaacgcggcgctgaccgtgcccatcttc

SEQ ID NO: 352675 - DNA, 91 bp, Zea mays
accactattgcacaaacatggttcatcttagtggtggtttttgtttcctgctggttaattgttgatatccattaatttgtttttcttctat

SEQ ID NO: 352676 - DNA, 333 bp, Zea mays
agcgggggctggagcactcagcactggggagggatcgcagcgccgcggcgagatattgagcagcagcctgtcctccgggatctctggctcacgggctgcaggggccagcaccgctctggacccccatgacgcagcgccgcagcagctgacgagggtgaaggcggcggcgcggggacggctgctgcacgccggccgccggcgttcgagtgtccggaggatgccgggcggcggcgccgtggtggtgagggccgggcctgggccactgtcgcggatcgagccgggcctggaggacgacgccatcgacgtgtaccgcatcaacggcatcaacccgga

SEQ ID NO: 352677 - DNA, 128 bp, Zea mays
atgtctagctggtcggaaaccgtgagagggacgaatccggagatgcaatctggcttgttggccgttgcattgcagcacctattgtgtcgttatcagttcgttatcaattatctggctttaagtgtggc

SEQ ID NO: 352678 - DNA, 94 bp, Zea mays
agctctcagtttgtatgattatgggagtctaaactgagagatgcatcggtagaattaatgggtacaaactgctagctttaaaaaaaaagaaaaa

SEQ ID NO: 352679 - DNA, 317 bp, Zea mays
cgcagcagcagcagcagcggctgaggctgcggcggagcagcttcagcatggtgcggcgcgagcgcgagcgcgcggcgcgggatgcgtggctgggccacgcgtgggagatgaagcggagctggcaccagcgcaacggcggcgctcccgacgcgggcacccccgtggtggtggtggtggggacgtcgtcgtcgtcgtcgtcgcactcggaccatcaggccaccgcggcgggcggcagggtggccatggacgtggcggaggtcggcgcgtggcgggacctcgggctggagctgccctccgactggcacgtggagatccag

SEQ ID NO: 352680 - DNA, 325 bp, Zea mays
gaaacacaccttatgcgcacggggtcgaggatgcagggtagaacacgaaaacaggaattcttgcacaaccagatgatgcaaagagggatgtggaaccgcctcgcaagtcgcctttgcacccaagggtctacaaaactaatcctcaagaccaaggtccaaggaacccaccggatcgaccaagacctgaacttgacaaccaacgacactctgaccggcggaggcaccgtgagtctgcaccacgaagacattgggggcgtcagggggtgccggggagtagcgctgggacaccaagaagcccctacagaacagctgctgggtctgcttc

SEQ ID NO: 352681 - DNA, 191 bp, Zea mays
tgcagtttggagttcgcagcggcgagattcttctcgatgcaggagagaagtgtaaggagtgtgttgctacgcatggctctggtgccgcatggagcactggtgaagagctctgggacggtgccagattcagcaaggtgcagattcatgttcagaagactaattgccgctgcattacatcgcttgcatcatgt

SEQ ID NO: 352682 - DNA, 245 bp, Zea mays
aagccggcgacgccgcccagaggcgtggctatcttcaagctctcccgcgccgagctcgtccgcctccgttcgcatgtccccgcgcgcgaaaggcgcgcctcggttcagcacgtacgctgtgctggcagcgcacatgttgccgtgcgcgtccctgacgcgcggcctgccggtgcgaccagcccaccaagctatactgcgccaccgacgggccgcatacggtgcagccgccgcttccggagggctac

SEQ ID NO: 352683 - DNA, 257 bp, Zea mays
gggttgtaagggatgtttatcggggcaggcttgtggaggatggctatggctacggaccaacagccagcgcccaggagcacaaggattgcaatgtggcagctgcttgatggttgtggttcactacccgtttataccacaagaggggtcatattgtgcatcggaagaggttggcggcactagccgtcatccctcacctgtatataaaggcaatctgggcctatagtggtgcgatgtgaacatattccaggatttgctgc

SEQ ID NO: 352684 - DNA, 326 bp, Zea mays
cacgatagactgccaacaagaaaagggcagtgatggcaatacattgccaacaagaaagtacccagtgatggcaatgtatggccacgatacacggcaactcagtgaacggctaccaatgacaatcctgatctaagacttggccttctcattaatggcacgcttgttgtgccaagttgcgctcttatcacccttcagttggttctttcttgttggtcgtacgtgagattttattttcactgaatccgggtctaggtggaggttttcagtattgacagatgtcagatgttcaactttatgtggttatacaaccggcaacaacaggcacc

SEQ ID NO: 352685 - DNA, 422 bp, Zea mays
agcccacgcgtccgtcggaatctgaagacctgaaccaagtttgatttacttttcaaaggcaagaatccagatagcagagttgaaatgttacccatggatttatcagctggtgaagaatctctgaaagaagtcgtacatgtggcagaatcatttttttctaatgcaggcgttgactatatggtccataatgcagccttcgaacgtcctgtaaatatcacccttattttgagttaatgttttaactcccttacccttcaaacatcatgttgttttattgttagtagtttttgatgatagatctgctagacatcactcctttttaatcatattctgaatcagatgatccctaaatgcatcaatttttaatcagattgcagaaacggagggctctagaagaaagtgaggaaggtcttaaggctaca

SEQ ID NO: 352686 - DNA, 333 bp, Zea mays
gatcgtgggagtgagtcagctcatattcaagctcacggggccccatctgggccacctggagcatcagcaggttcagctccccaaaccttaattcgtaagtcgggttttggtgttcctccacagcagcctcaccaagtctatcagtcagaagcgcatctaagccattttatgatgcagcaagttccgaacagcatgcccatgcctgaacagcaacctaatagcatgcttggaacgcaacaaggtttgggttccttcaacatgggttgtgatcagggagcttctctcggagggccccaggcaaacaccccaccttcctacggctccgttggtggt

SEQ ID NO: 352687 - DNA, 168 bp, Zea mays
cacgcgtccgcgcacagacgtcgacacataacacgtgtcccaaacactaatttttttaaaaaacaaaggcacaaccaacgacacaagacgcgcagcacaacaaaacaccaaaacaaacaccaaacaacacaccaaaacaccaaaaaaccaaaaaaaccggccgccccc

SEQ ID NO: 352688 - DNA, 383 bp, Zea mays
cccacgcgtccgcccacgcgtccgcccacgcgtccgcccacgcgtccgcccacgcgtccgcccacgcgtccgccgctggatggttagaggatctgcatcttcttgtgttcttctgtaaaatacggagacttgggcagcataaaaagcttggcaaatttctgttgtgtggcatctccatgtaagtaacagtggactgcatgcagaagcgagcgttccagttttgcgacagaagggggcgtccgaagttgttgtactgctaatgaacgtcgaactagcatgataaaatgtatcccagcacatttggttgattgtgtcacactagaaagccatgtgacagcgtttggctatgatgctgtaccacctgaatttacatagctcctttt

SEQ ID NO: 352689 - DNA, 208 bp, Zea mays
agcgatgatgcaccagcgacgaccactgatgacgtttcaaggtgacgagcaagagccggcgctgccgtacagagaccttatgggctctcagttgctgcatcatttcgctgggtagcttgttacctacacatgcttgctagctagctaggagggtgggtatacggtggctaaatttttatatatattaaagacaaggtaaattttgttt

SEQ ID NO: 352690 - DNA, 319 bp, Zea mays
caaactgtcggataagccgcgggcgcgtcgccgtggggatggcgtccctctcccccgcgctcctccccggcgccggcgtgagccgcgggcgagcgccgcccgtgttccgcgtcaccgcctcgtcctcgagctcggggagcaagaagggcaagaagcccaagagcgggggcgagggcaaggacaccaaggcgctggagcctccagcgcccgtggtgcgccgcgcgccgccgggaagcgcctccatatgcgaggaggaagaaggtgaagcggcgtcgagggccgggggcgccggtgggaaagggcccacggaggaagagct

SEQ ID NO: 352691 - DNA, 303 bp, Zea mays
accctcaacaagtctcagttaggagacgctgactttaattgggactgcaatactcaagacgttgagaagctgttacgcttgacgttggcttggacgctggtgacatatgatcaattggagaccaacttgcctcactcattaagctatgggataatcagtgttgccgtcagaaagctagtatgcctcgctgctcgtcatgattacagtggtagcgtgagtgatgcaactatgacatatttcgacaggcgggctacggtgtgtctacacaactgggtaaattaagtcctcaatcactgtctacat

SEQ ID NO: 352692 - DNA, 71 bp, Zea mays
gggtctccattatgaagcaggggggagtagacctgtccgtccttctgctgcccaacatattatgcgagaac

SEQ ID NO: 352693 - DNA, 377 bp, Zea mays
  unsure (1)..(377): unsure at all n locations
gacgcgtgggcggagcttagccctggtggagaagttaacatgtgacatggagactttcacgaagcattgttctgttcaggttcaagcagagttcgagctcccacgtgcatcaatgtgcgagttctcgcagatatggtctggtcaacactgccatccggatcttggctagacgcgtcctgcttgctagggtctcagagagtgctgggaccctatagccaataagtagtccttaggattcagtcggaagggtttggagggcgtttgnncagcgccttggtgttccttgaacatcagggagggagggcagatgagtagtttcacaggaggtgaaccccttacgaagataatctcactgaaagttctggatttgtcgttca

SEQ ID NO: 352694 - DNA, 204 bp, Zea mays
taactgaaagacaagcttccccgcttttcaagagtagagtgaaatcacgtatgctcgcagaacaatttttcccaccaacatctcgatttctcttaaaccttttttttcacttccctatcgatatcatgggatttcactgtaatctctgggtatcatgtatgtaacagctacaactttatatcatacttggcttaccggaatgtt

SEQ ID NO: 352695 - DNA, 93 bp, Zea mays
aaacaaaaaaaaaaaaaacaaaaacaaaaaaaaaaaaaacaaacaaaacaaaaaaaaaaaacaaaaaaaaaaaaacaaaaaaagggcagcccc

SEQ ID NO: 352696 - DNA, 196 bp, Zea mays
ttgtgtgaggtaggtgtacaaactggcgagcgctctttccctcgctctatacctctctgtctgcgacgcggttgggtaggctaccgccgcggggtgccgactgccgatgccctcaacggcggcgaaaaccgcccgccagcaatggcagcaaggtgtattagcctttccggggcgtccttgttcgtccatggacccc

SEQ ID NO: 352697 - DNA, 354 bp, Zea mays
tgaagctgtgtatgggggttaaaggggcggagacgcagtgaagcactaggaatttctcgtcagttgtgcaacctcgccgcggagtcaggggttgtcaggggatgtctgcatcggcgataatagacactgagaacgacgaagaagtaatggttgaagaagaaggagtgtggcgaccaacacctgaagacccacctgcgaggaactacttttatttggacttgtggacagagccgactccctatgggagagcgaggtggcggagcaatttggagagcaagtggtacatggggatctcaagtctaagtatcgaggttaccaatcacgtgaagagcgagcgggtacctggggatccca

SEQ ID NO: 352698 - DNA, 162 bp, Zea mays
cgctggcagacaacacctcagcgatatgcagagccgcatgccctgcccacctcacaatgccatcccagcctgctcccggagatccggggggtcctggaaacaagtcctatccccgccgcctacaccggccgttcgcgctcacctaatcacgacattctttct

SEQ ID NO: 352699 - DNA, 139 bp, Zea mays
aggacggctgcgctcagtcactttgacaggttcatcgtcatgctggcaatgatcaaaaggggggctgctatcaggcaagaactcgccacgctgaagaatgcgtccacagggtaaatcccttctggtggatggcatgtta

SEQ ID NO: 352700 - DNA, 373 bp, Zea mays
gaattcacggctcgacgacgcgtcagatgactatgttaatatctatcttaaaagcgatatgaaaagcattcagacgaggaatgtgctgtcgacaatgctctccacatggcccatcacggttcatgattccgggccaggttagcttaccagtcaccatcggtggcacattcagggagtcaatcaaggagtatgtcggcaacaccttccggtacaccatcaagtggatccagatctgtgtaactggccctggcatattcttcataaaactcatggtccacgacaagaacatctccgtggagatatcgtcggctacatcgtccacgtacacgaccatctaggacctcgtccaagaggtcaaagctgcagagaaggt

SEQ ID NO: 352701 - DNA, 369 bp, Zea mays
ctcctcgccatcacataaaaccagtgcaagcagaagcagcgcaatggcgagcagcaccatggccctctcctccacagccttcgccggcaaggcagtgaacgtgccgtcgtctctcttcggcgaggcccgcgtgacgatgcgcaagacggcggcgaaggcaaagccggcggcgagctccggcagcccgtggtacggccccgaccgcgtgctctacctgggcccgctgtccggcgcgcccccgagctacctgacgggcgagttcccgggcgactacggctgggataccgcggggctgtcggcggacccggagacgttcgccaagaaccgggagctggaggtcatccactcccgctgggccatgctgggcgc

SEQ ID NO: 352702 - DNA, 291 bp, Zea mays
aacgacgctacccaactcctcagccggatccatcctcatgaacgcttctgcgctggcgtcacacgtcccacatatagcaagggtccccaaaccttgcattacccccgtgcccaaacatccccgtccccatggaccttgggataaggcctaaacggagatctcccgcgacgtccaccccaccgttaatatctctcaaggatagcactcactcccgcaggtttaaaaatggtgaattttcaagcccatcataattaaaaggttctaagataaaagcttctttctcatcaccct

SEQ ID NO: 352703 - DNA, 365 bp, Zea mays
agcggacacgtgggcggacgcgtgggtatccccctccgctccccgccgggcctgcatggtgttcgacgcttcgcccgagcgcccgaacgccgccacggcatggcttcctccatctccgccgccgctaaggcctccgcggcctttgcccaaaataaggagctggccgcgccggcgccgcaccgcgcgggctcgagccgtcggaccaagccgtgccgcgtgcgcgccgtcacgtcgcccgcgcgcaactctcgcgctccgtcgtcgaccggctcggtgaagaccgcgatgactatgacggagaacatcctggccagggcgtccgagcgcacggagctgggacccggggagaacgtgtgggtggacat

SEQ ID NO: 352704 - DNA, 310 bp, Zea mays
cacgcgtcaggtgatcatcaacagctagtgctagtcccccttccttccatccatccatggcatgcgtcaacaccttcccgagctgccccactgccaaaataacagaggtcaataccaagtccacgggcagcacccatatcctggcaaaggggtcaccatcactagccttccatttccagtgcatggcgtccactttctccgcgggcaacagcctccggcacgagctggacgaaaacgccgaggcgatcatctcgggggcgtagcccgggaactgctccctcctcagctacgacgacttccgctcctacct

SEQ ID NO: 352705 - DNA, 175 bp, Zea mays
ttatttctcctttgtcgttgcggcttgttcttggcagattggttaagcattgcaactgtaacttctgtgagattgtcttacggttcacatttcatgtatgcctgcctaataagccttcttttcccaaatacaactattaacgttctagcagcctcacaaaaaaatatactaaaaa

SEQ ID NO: 352706 - DNA, 379 bp, Zea mays
acgtcgagatgcttcgtggctccgccgccctcctccgccgcctcgcccctcgtatctcgggcggtggctgcggaaacaacaatcaacggggcccttcttcctccaatcgcccccttcctcggcgcccgcttcttgtctgccccgactacttcttcaccgccttcttcgtcttcagctgcctgccacgaggaggatgcggaggacagagacctccccgagatctccaatggtgatgcaggtgcccggctcagcatctccgtcgaccgctccgggctctacaaccccacagagcactcgcacgagccgtcgtcggaatccgagctcgtcaagcacatcaagagcatcataaagtttcggagtgggccaatcagcataactg

SEQ ID NO: 352707 - DNA, 306 bp, Zea mays
acgtgttaaacgtgttagtggaatgatggatggtctcactacgtataatatttattagatagcctgagtcgttgttatttttgtggaattcgtggcgggttaataatagtactctggtttactactaaaaaaaaaaaaaaaaaaaaaaaaaaaaaaaaaaaaaaaaaaaaaaaaaaaaaaaaaaaaaaaaaaaaaaaaaaaaaaaaaaaaaaaaaaaaaaaaaaaaaaaaaaaaaaaaggggggccccccaaaaggttcaaaccttaattacccgtcaaagaaaaatcaaaccccttcaaaactgc

SEQ ID NO: 352708 - DNA, 386 bp, Zea mays
aactgcggcggcggcgcgcgcggtgtccgtgtcaccagtcccggcgccttcgctcctcagcggccggcgcggcgggtcgcggggcggccgggggtcggtgtcggtgcgcagcacggtgtgggacctcgtgggcggggacctgatgcggccggacctgggcaagtggctggatccacctgcacaagcacaacgcgctggccatctacgcgccgcacgagggcggctacaacggccgctacctgaaccgcctccgctaccagtgctagtacttcctcgagctcaccgcgcaggggctcggcgacgcggacatgacgctcactaaggtccaccccgtctgcacgcctagcctcggaaggtaccccgtggcgtggtagtacttcccggcc

SEQ ID NO: 352709 - DNA, 58 bp, Zea mays
agaaaaagcatcggcagcacgtctgaggggactgccaactgcatggacatccagatcg

SEQ ID NO: 352710 - DNA, 337 bp, Zea mays
atttctttatttcatcatctaaagtaaaggttgcagaagatttacagcagactttaaaagattttgtcatctatatcttttcgatcaaaaaaaaagaaaaaaaagaagaaaaaaaaaaagaaaaaaaaaaaaacaaaaaaggaaaaaaaaaaaaaaaaaaaaaaaaaaaaagaaaaggaaaaaaagaagagaaaaaagagagaaaaaaaaggggggggccctcaaaggtgtcaagttggaataagcctgataggaggaggcagagagctcaaaaggggcaccaaaatgcaagtccagggggtgctttttaaaagcgtcggacggggaaaaacccggg

SEQ ID NO: 352711 - DNA, 353 bp, Zea mays
acgcccacgcgtccgaaccatctaccagcgactcagcgagcgagagcagcacacactgcacgcagctagctaggagcagcagcagcggcggcgatggcggcctccatgatctcctcgtcagctctggcggtggcgcctcagggcctgccgcccctcggccgccgcgcctcctccttcgccgtcgtctgctccaagaagaagatcaagaccgacaagccctacgggattgggggtggcctgaccgtcgacgtcgacgccaacgggagaaagggcaagggcaagggcgtgtaccagttcgtcgacaagtacggcgcgaacgtcgacggatacagcccaatctacaacgaggatga

SEQ ID NO: 352712 - DNA, 228 bp, Zea mays
aattcaaggctcgacgcacccgtacgcgcctaatagctaatacccaacaaacagcacgaaacacttcatccaccagcgtttgtactcgtgcatggccttcgttcgccatggatgcatgctctgtactcttctacaagcaaattctgctacatggcgcctagccaacgttgtgtacttgtgttgccattggttatcagtacaacgctacggagcccataaatcttcact

SEQ ID NO: 352713 - DNA, 311 bp, Zea mays
agcccacgagtccgcccacgcgtccgcacactcctcgccatcacataaaaccagtgcaagcagaagcagcgcaatggcgagcagcaccatggccctctcctccacagccttcgccggcaaggcagtgaacgtgccgtcgtctctcttcggcgatgcccgcgtgacgatgcgcaagacggcggcgaaggcaaagccggcggcgagctccggcagcccgtggtacggccccgaccgcgtgctctacctgggcccgctgtccggcgcgcccccgatctagctgacgggcgagttcccgggcgactaccgctggg

SEQ ID NO: 352714 - DNA, 341 bp, Zea mays
ccatctccgctccaaaaaaccagcagataacacacttgtgctcggggtcgggggagggggccggctagtgcaaatgaagcagcttcagaagatggctctcctacaactcttgttggaaaatattgttctcttattactgccgctgctcgctctgaccttttcttgctgcgacgcggcaaccctgaagctgcacgcccaccacgcggacggcggcctcagcctcagccgccgggagctgctgcaccgcatggccgcgcgcagcaaggcccgcgccgcgcggctgctctcggcctcggggagcgcccgcgtagacccggggacttacgccaacggcgttcccg

SEQ ID NO: 352715 - DNA, 385 bp, Zea mays
acggccgctggaggcacagacgacaaggcatccgccccggatcgagcccgacccctcttctcgtctcgtctctgcgctgggaacgccggctgccatggctcagcagaagaacgcgcacgtgcccaagttcggcaactgggacagcgacggcaacgtgccgtacacgctcttcttcgagaacgcgcgcaagggcaagggagccggagccgccggcggcggcaggatgatcaaccccaacgaccccgccgagaacccggaggccttctccgtggccgcgccgtcgccgccgccgggccgccacgagcgccgccccagcgacgcgccgccgccgccgatgtcgcccaacccctactacgcagccgggtcgccgtaccaccgccacgcc

SEQ ID NO: 352716 - DNA, 390 bp, Zea mays
acgcccacgcgtccgggccggcaccgcctccggcggccggtgagaggagcgacttcaccaaggcacaagaggagccggtcaagaagaggaagatcaagtgcgaggtgaaggtggaggagcaaggagctggcttcggcgattacgacctcggccacggcgacctgtggatggatctcaacccgggagggttcctgagcttcttggaggaggagggcgtgttccagggcctggctgctgctgctgaccacgacttcttgcagccctttggctcgtccaggatggatttggttggtgaaatgcacgcgtcttgacaatggagaagcaagtagaagcaagtgtgcttatatttcagacagtggagactggagaagcaagtgtaagcaacaccag

SEQ ID NO: 352717 - DNA, 280 bp, Zea mays
acgcggctaggtacgccttaggaattcaagactcgaccgacccgtacgcggacgagtgggctaaattcagatcctgaagatcaagaaccacagacattcaagacagctccagaagaaacgcgagatcagttggctgacgcactacatcaaaggtgtcgcgcaatggctgagagtgacacactgcagctccgatgaatcccgcgacgtatggccactagacccgctcgagtcgcccgacccgaagcgtgcccgctgaggtcagggcgtttacgagcactgt

SEQ ID NO: 352718 - DNA, 218 bp, Zea mays
cacgcgtacggtcagccacagcagtatacattgcacgcagctagcttggaccagcagcagctgtggtcatggcggcctccatggatcgcctcgtcagctctggcggtggcgcctcatggcctgcggcccctcggccgtcgcgccggcatctcttcgctgtcgtcggctccaggaacaagctcgtaccgacgtgccctatcggattgggggtggcctga

SEQ ID NO: 352719 - DNA, 355 bp, Zea mays
acgcccacgcgtccgcggacgcgtgggagctaataatgtggctgctaacgcaagtgtgaaccagggaaatccttcttccactggtgatggtcttcttgactttgatatgtacctttctgagattcaaagtacccagcctgcaaaatgtgatctggagcagtacttggaggaatccctcactccacgtatccaagagtttgatatccttaattggtggaagcttaacacactcaagtttccaaccctgtcgaagatggcccgggatatcttggccatcccaatgtctatggttagcagtggcagctccatattctctgctggaactgggaaccgcatgctcgatgactacagaagc

SEQ ID NO: 352720 - DNA, 381 bp, Zea mays
acgctttcttagcaagatgtttttatctctgtgctatagctcattagaaattttatcttaaaaatattattctgatttgaactcaagaatagggagaaattgtgaattgtgaaatataatgcaacatacactgaaacatattagagtcgattaggctagagtatgacatgttttccctttcaagaatggatacagaatgactcatatgaatgaagacagtgcttgttttgtagaagtctaaatggttacctatgtggcatctgattttgggttctagacatatttccgttaatatggagctatatatgaagatgtgaaatttagtttagttgttttatgtttcctgtctgttgagttctagtcgagtccaccccacagcat

SEQ ID NO: 352721 - DNA, 250 bp, Zea mays
acggccaaaacatcgcaaccaacagcgtaaaactgatgaatagctttactatttacatgaattttacgctgttggttgcgatgttttggcaggtcgagtcagtcgactcgacaccgtaggactgatgtctatagtagtgctattcatcagtttactgctttgtaacatctgtaactgaccgtgtactctgtatctacctattccaccgaagatgtacccggtaccatcctggccgtacagctcctgcggg

SEQ ID NO: 352722 - DNA, 199 bp, Zea mays
catgccaccgatcacagtacagcaaccagtgcatggtggtccgtggaccggggcctctgtagctgggcatggtctatgccggacgtcgaaagacggtaaggtcctcttcgactcgtgggtggataccgacttcatgaacggagatgactcaaggccgttggcatgatgatcatccggaaccagcggtgctcagtgctca

SEQ ID NO: 352723 - DNA, 96 bp, Zea mays
acgcccacgcgtccgcccacgcgtccgggttatgtatgtctggttataaccaaccattgcatcactatttttcatttttaatattggtgttacgat

SEQ ID NO: 352724 - DNA, 247 bp, Zea mays
acgcagaatcagaccaccacacgcccgaggcccgactgcaagcgcctgagcccaagacccatggccatggccgccgccaccgtcgcagcgtcactgcccgtggcgcaagggctcgggaagcccctctgcgccggcagcaacgcgccgtcgctccgggccgtcgcgggcgcgccccgtcgtcggtcggccaggaccaggatggccgtcgtccgggcgtccgcgcaaaagcagcactcggccaaggagt

SEQ ID NO: 352725 - DNA, 260 bp, Zea mays
cgaaacacgcgtacgcccacgcgtctgcggacgcgtggacggacgcgtgggtgcgattcaccaccaagagtagtttcttggggtgctataatagtaaggaagaataaagagccacggtgcttgacgcccacatgcgttgtaggcatggaacgggggcacctagcttgttctacagcgctgtctattttgaattggtgcgactttgttgctcttttttcctcccccttatagcttatgaaacaagatccttttgatctgtg

SEQ ID NO: 352726 - DNA, 380 bp, Zea mays
attcccggctcgaaacacgcgtacgggatattgctctggaggaattggcccccacccatcctattaggctttggctggtgctgaacttctcaactcgcctgaccatgcgtccatgcttgcagtctcgccaaataggtttgatttttgcacccattacatggactgtgtagtgttattttcttctttttttgcaatccttatgatccgaatgtgagctctgtgaaaaatatgaactaaggttattatgcatttcacagttcagacagctgttatgaaataacctggctttagctataacttgtgactagtgcaacatattactattttttacacactagtgtaaacaactaaaggtctgtttggttgggctgtggctgtgg

SEQ ID NO: 352727 - DNA, 426 bp, Zea mays
tcccgggcagacgcacgcgtcaaccgcacgcatccgtgtgtttacacgcacaggtaaagcgcgagcggagagatgggggttggttttgatttggagacagggatgagacagagcatgggatggggccatcaacaaagtggagggactagcttgcgaggcagaaagaaggtgccagtgccggtgcctccccggtgaaacgatgatgggagtgttgttgctccctcccctgcactgcctcttccctggctccgatcccccaccgttgcccatccatcatctccctctcgctctcgtttatgctcttgcctgcattctttttcacagtaggcatgcagtactacttttggttctctttgcaatatatatactgcaggtttgctaatcgctaagagcctaagaatcttccgcctggagtggactgttctt

SEQ ID NO: 352728 - DNA, 351 bp, Zea mays
acggacgcgtgggcggacgcgtggggttcttcaaactgctgttgcgacggaggaaaagctaagtgtgcattcaatcacgcttgtgccgccgtcgtgtgtggtgaggaggcgttggcatcccccagtaagcaataggacatccttcggatattttgcgctttgtatctccacacagcccgagggcatgaggggggccgtgagaaataagatcctcccatggacaaggacgagtaggagactgcatgagcagcaaatgcttgggatcgttcccaaacgggttcccttattcatcgcatacagccgggacaatgatcagtagcaggttttcaaggtttcctcaattcgctcgcg

SEQ ID NO: 352729 - DNA, 115 bp, Zea mays
acgcgtcaagcagaacaggtgcaacacatgtatgcttgctggatggaggattcataccagctgatgctgatgtagtgtttcactggtgtcatgcatgtatcgtgctattataatc

SEQ ID NO: 352730 - DNA, 197 bp, Zea mays
acgcgtccaggtaatgatagagagtggtcacatttcggacacagttggcagatctgtggtactggtaggacgatcaaatacacatgtcgctgcaccttcgacagtggcggcaaacaacgcggtgcagatccgcctcgccatgatcctgctgctgttgtgggatgaccccgatgtgctacatcagcgaggcagtgctg

SEQ ID NO: 352731 - DNA, 388 bp, Zea mays
aggcgagggatcggtcctgcctcccggggattgctgggaacttgatcctgcatcgttgcctcccgagttgctgtgcctgtgcatcgaaccaccgaaatgacctgcttatggtgtcaaaggttgttgcaggtgttttagttgttaggatcggctgtgtatatggcacataaatcgcagaggaaggctgctggtttgttctgccatgtcaaatagtatgaggatccgtctgatttgccaactctagctgggcactgctcatgtttatgatccttcttcatgtagtttctcagactaacactgctctggtatatggatgattcttatgaacttcctttatattaaagccgagtcgaaacggctcctgtccggtgtacacgtcgctcaaatg

SEQ ID NO: 352732 - DNA, 390 bp, Zea mays
  unsure (1)..(390): unsure at all n locations
cgcgtccgacgaaaatggcggcggcggttcctctcccctgaccagagccagggcgtgccactgccatgtcgccactgacaaaggcggcgtcggcggcggcggcggcggagtttctcatctcttccggattggatacagggcgtgccatgcctgcgtctcagatctcacgattggcatgcgccctgacttctcgctcttcgtatctccccctccctctcccggcccgtgctagcgtcggaggaattgtattgtcgtagatctgttgctccataaatgccttccctatctgtggccgagcgcaaccaagaaacgaggtatggccggagggagaggtanggctggtcggctggacctggtcggctggacgttgccggactggacttttccctg

SEQ ID NO: 352733 - DNA, 377 bp, Zea mays
acccacgcgtccggaagctacagctgcagcacacagattcacagatacctgttgttccagctcggagcagatagagcatctctagctagttagtttgtggcaagagcgtgagaacccaaccgaccgagtgaacgatcatggcggcgtctctgctaggcccgaacaccggaggcaacaacggcttgggcgggagggtccacgcccggagcggcggccaccgccggtcagctgcggcggtgaagcggctgctgttgaggctgaggcgctcttggagaagacgcgcggcgcggccgaggcgaacctcggtgaggttcgggtacgacccgcatagctactcccagaacttcgacgacggcactgcttcctacgaccaccac

SEQ ID NO: 352734 - DNA, 90 bp, Zea mays
gacgcgtgggcggacgcgtgggcgccatcttacgctgttttctccattacatagttctgcagcactaaaatttaccactcttatttctga

SEQ ID NO: 352735 - DNA, 243 bp, Zea mays
acgcgtccactgatcggttccggcagtcaggcaaagcctgatattcatagctggttaagagatgatctgaatttgacggtttcattctttagataaaagaagcagcttgcttcctccctccgtgttcagaacgtcaggaagcaacgccccacatgttaggtcaggatctcaactctgcagcgccgtcaaggaaggaggcgaatgagtcgctcagcaggatcgttccgaaatactacagttctt

SEQ ID NO: 352736 - DNA, 338 bp, Zea mays
acggcagcagagcaagaagagaaccagtgtgctagtgctacagctacggcctagctacctactacggcgcagctagcagcggcggacatgagcggcgggcgcgaggagagcaccagcagcaggtggccagagctggccgccctgcgcgcgctggcgcgcgacgcggcggcccgggccgggagggagacggcggggtggcgcgggcgggagcgagaggaccaccgccacggccacggcaagacggccaaggtgatgcacctgctgctctggggacccaagtgaggtgaagtgaagcgctgctgctgctgcagctgcctctgcctcgtggcccgcgcgcg

SEQ ID NO: 352737 - DNA, 403 bp, Zea mays
acccaagcgtccgagccaccatcgaccttcaagtctcgctacgtagcagtgcaataaaaaaagcagccgcaatggcgagcagcaccatggccctctcctccacggccttcgccggcaaggccgtgaacgtgccgtcgtcgtccgccttcggcgaggcccgcgtgacgatgcgcaagacggcggggaaggccaagccggcggcggcgtccgggagcccgtggtacggccccgaccgcgtgctgtacctgggcccactgtccggcgagccgccgagctacctgacgggcgagttcccgggcgactacggctgggacaccgcggggctgtcggcggacccggagacgttcgccaagaaccgggagctggaggtgatccactcccgctgggccatgctgggcgcgct

SEQ ID NO: 352738 - DNA, 335 bp, Zea mays
acgcgtccagtggaaactgactggtgtcggggtagggcgaggtaatcatccgtcagcgcgttgttgacaacgacgacaactacggttctgtacggatggagattttggtgacatagtcgcttgattcatgatgactccactgacttattacacagttggtatggtctacgtggttcgcatcggaatcgacaggagtacttgagaaatctagatgagaaagttctatagctctgagacgtaatccatagtatgagtaccatctcctcagctactgctggagccgtcatgagagttgcatcagattagtatctacaagagaagaagctggtcctctc

SEQ ID NO: 352739 - DNA, 363 bp, Zea mays
cgtcaacggaagcgtgggttacagtaattcctgcacagtctggttttacatgggtgaacgcagaccccctattcaactttatgttgaacaactccatttatcagattttgggtaatcttacagagctcaaggatcagctgaaacttggattgaacttaaggtcataccagaaaatatattttcagttcaggaatgagattggttcttcagttgaagctccagcaactattgtggcatcagtattagatggaagcagcaatcttttaccagatagattgagacaactagctaagctaatcagagaacctgatgcgatgaatcttggacttaatcactctgtatttggtaaagttaagggtgttc

SEQ ID NO: 352740 - DNA, 108 bp, Zea mays
cgagcatcgtggatacatgcaattcctctgcacatggatggattgggatgtaacttggaactgttaattttttttactttgatttggatgcatcatgacccccccttc

SEQ ID NO: 352741 - DNA, 81 bp, Zea mays
acgcgtcaacggaagcgtggggtttttgtaataccaaataatcagctgttttattttaattgagaaagtcgtggttctgtt

SEQ ID NO: 352742 - DNA, 339 bp, Zea mays
acccacgaatcaacgcgcgcagcacgggcttgcctgctagtcccacaagccgccggcatcggcgcacggggagcagaggcagagcagcgcttgccgcagcaatccggacgacgctccagcggcagacggcagcaggtccggccaccttccgcgcctcgccccggccagtggcgttcacgccttcggccttccgccatgaaggccgccgcggtcctctccgtcccgccgccgtccgccgtgacacttgtgtcagtggtggcgcggcgcgcgctggtgccggcggccctgcgcggcaacgcgcggcgtggcgcggcgctggtggcgtctgccgcggccgat

SEQ ID NO: 352743 - DNA, 415 bp, Zea mays
acacgtcaacccacgcgtccgtttttttttttttttgcaaatagtgctactgtcattctgtctccatttttgactctgtgcctccgtctccaacgagccagagccgtgccagaattgtgcacgtattctcgttcttattcgagcttctacagcgattttttttctcacttccccgatgcaagcagcatattttgcaaagcagtcagcacatgattcgctccaatccgaccgatcgatcccctacgttacttacaccgctttccatagattgtattacagctgcaagctgtgaagctgcagggcgatgcgtttccgccggatccatcagtacggcatgacatggatggtgcggctgtcgtaggcggcggccatgcccttcttctcatgctccatccgcaccgctcgcagcagctct

SEQ ID NO: 352744 - DNA, 383 bp, Zea mays
acgcgtccaggaaaggggaattcctacaattgcttcaaaattccaaccgaacccaataaaaatatgggcatataaggaattccccttcgccaaattattacaaaaaacccttgttaatttggaattcacatctgcaacacacctgcgcaagaggcagccccaaacgacaagaatttttcaagaaaaaggggcttttccaggcgccgtacatcgaagatcctaacacgggagtccagatgtttgaaagcgctgaaatcatagactacctgaaggcaacatatgccctgtacccaagctcgtagtgatgtatcagaaatggtcattgtaatgttgcgtgtagattcagttcttcccggtaataaaaggaaaagaaatagtgggcc

SEQ ID NO: 352745 - DNA, 87 bp, Zea mays
agcttctatcaagccgaaggtacaaatgtaattcgatattgttcatatttgttcatgataatataataaaactatcttaatgatgtc

SEQ ID NO: 352746 - DNA, 261 bp, Zea mays
gtgttgttgttttgtttgtgttgtgtgtgtgtttgtttttttttgttgttttttttttttttttttgtttttgttttgtgtgttttgtttttgtttttttttttgtttttgttttttgttttttttgtgttgttgtttgtttttgtttttttgtttttgttgttttttttttttttgttttttgttttttgttttttttttgttttttttttgttttttttttttttttttgtttttttttttttttgttttttttttttt

SEQ ID NO: 352747 - DNA, 171 bp, Zea mays
aacggacgcgtgggcggacgcgtgggcgttgttgtatacttgtgtgttgttacttaacagcgtgtgtagtgattagcactgcacactccctgattgtaccatggtatattgaatgtttatactgctggaagaaaaaaaagggggaccttgtgatggtcagatgtttaattt

SEQ ID NO: 352748 - DNA, 421 bp, Zea mays
cgtccaaccaagcgtccgcccacgcgtccgaggagcacctgcagcatgtagcccggccttcttctacctctagccttcccctgtcgagctctttggtacatggaattttccccctctgctacacctcccctgggctacgcacttgtcctcacctccccgccatctacctcaaccagcagccaccatctccctgtatttcccagccgtggagcccaggatgccgaccagggacaccagcagccggcgtcccaagctcgagcagccgctgctcctcaacgccggcacccgccaagtttcgtcagccggtctgcagctcccctctgctcggacgccagtcgagctcctccctggcgcacctcgccagcagcagagaatctccaagtgcaggcgaccagcatctttccccatggcgcccctgctc

SEQ ID NO: 352749 - DNA, 406 bp, Zea mays
agcccacgcgtccgatatatcgtcccttctctccgactctccctcccttctccacggcccagtgcgcacctctccctccacccctcgtcgcaaggcccaggcacccgagctaggcacgacgatgcaagtcaagccggaagctgcggttccttcgccgtcaccgccatcgccgccagctccgtctttccatcaccgaagaactgaggaggacaacagcggcgtcgaaattccgcggcggtaaccggcctaaacgtatcggcgtcgcggcatacaagggcattccaggcgaggcgaacctgagaatgcccagccgaaacgtcaacgctacgcctacgccgggtacagtgcacttgcacgagcatcgttctcatggggtcactgtctcacttgctggctcactgcacgc

SEQ ID NO: 352750 - DNA, 409 bp, Zea mays
acgcgtccgaccaagcgtccgcgaccacacgccaagggaagaagcagcagcgccatggccgcgccgctcacggccgtccgggcccgcctcctcctcctcccagtgacctgcacggcagccggtaccaccggccggccggcccctccgtccaagagcagcaggccgcgtctactaccaccaggcaccacccggtgccggtgctccaggcctcccatggaggcggtggcgccggtgtccgcggcggcggtggcggcgctgctgctgctgccggcggacgcggcgctggcggtgggcggcgagttggggatcctcgagggccgcagcttcgcgctgctgcacccgctcatcatgggcgggctcttcgcgtacacgctctgggcggggtacctcggctggcagtggcgccggg

SEQ ID NO: 352751 - DNA, 391 bp, Zea mays
acgtcagaaatgatgtaatttgtggggcgccagcatcttgtctcctagagtaatattctgtttgcagtaccaacgtcctttagcgctctggtgccaattattgcaatgcatcttgtgcacaacacgaatggcaatctggaggtgccataatgacgagcagcggagcagatggatgaacacacctgaactgcatgagctacctgttatcttcatgcatgcaacggtttgtcggagtgctatgccctcttgtactttccagttgtttcgtttcttggtggtataaggaaaggtccatgggcagcactgtgagacatggcatggtggatggtgggtgcatcggtgcttgttccaccggccctgtgatgtgagcatctcacgctggggtgttcag

SEQ ID NO: 352752 - DNA, 422 bp, Zea mays
acgcgtccagtttatatcataattgtgaaaggcattgttatcagcctatattaccatggataaatggtgatggtagtactaatagcactctctatgaaggtttaagtcgccgagttattggttatgtcatgcactatccaggactatcggaggaagatgttatccgtaggatggatgtattgaatcctcagacttgcaggaccctgctagaaaagctaacgctcgatgggaaccttcatgttcgggtttttgaagaacctgtgccaatggctccgaccacactgcaggatccagacttgtgagggcatcaagatttggaatgtttaaatgttaccgtccccagaactggtaaggccatctcgtggtaagaccatctccgccgtgtaaatagtcgtgcaaagtactattttgcacctgtttgc

SEQ ID NO: 352753 - DNA, 294 bp, Zea mays
tacggcacgcaaggagtcttcctctccgacgccggcaacgtcgacaccgctggcaaacttctctccgattgtccctgctccagtaagagtaggcgaggacgagcctcccccatcttgggtgttggtgcctgacccattttctcaagatatgatgttcacaagaggttctcccaaaattttgatgttatctaaagctgctcaaaagaaggtttctcctaaagcttctacatcaaagaagtgtggaggtggtgttcagagagcagcatggaattctgaattggagaagagcctcgt

SEQ ID NO: 352754 - DNA, 297 bp, Zea mays
agcacaacaccatgagaccagagtcatggccacaaggacgagacccgagtaggcccgcggtgaaagaaagaggctgtgtgtggctgtagtggagagcatgtggagggactcggaatgcagtgtcagggaagctgatggagaatcgagctctggatccagggactcgggactcctatggtgccaccagccagctccccaacaagggggccctggcgaaggtcaagaacaacttcaaagacttgatgtccaaactgacggagtagaattatgtgctgtgccggtggacagatggcctgt

SEQ ID NO: 352755 - DNA, 317 bp, Zea mays
cagacattgcagcacactttgtgtcaggggcagttcctgagtcagttctaatgtcagatgattttgtgctcgcatcgtgtgctttcataaactgctctggagtgctcaagtgttttccagtagcacccactacattgctagcagagacagtaggacctccactgggtgcatgtagagcagagtcaacatgagattttgtgctgatctctctaataggggtccttctgtcaatacgtctgctacttaatgagcctgtaccagcatattctgtttcatcttcagagtccttagcttgagctcccatgatctctacttcc

SEQ ID NO: 352756 - DNA, 163 bp, Zea mays
agcagctacctgcctcccttcttgcacccaccgctgccgtcctgcccagatcccgctcgcaggtggtgctcccctccccccgcgcagctggcccgccggagcgagggggactgcccaaaccctagtgggagttggagactaggaggaagggcgcgagatccgg

SEQ ID NO: 352757 - DNA, 315 bp, Zea mays
aatatatctatctggaaattcactcaccgggaacatacctggatggttattaagaagaaacaagatcgcggacatatcttttaataacttcacgatggggagttcaggtccgagccaatgccttcaagggagtgtcaatctggtggagagctattcagctgaagtgaaccgtttaaatagtattcatccatgcttaaagaggaacttcccatgtgttgcttcgaatggacaatatcactcttcactgcatatcaattgcggcgacaaagaagcaactattaacggaactacatatgaagccgacacaacacccat

SEQ ID NO: 352758 - DNA, 311 bp, Zea mays
cagcgcgcacgctctcctggctatagcaaccgccgtcgccgccccacgctacgtgctcgagtctagcctcgtcggttccttcgtcagttcttcgtcggatcctttgctggcgaccaacacccaccagcttgctgtttcccccttctttttgcttgcttcatcgaagtcctttccaggatgaattctaagcgtaggaggagtcatagcccagttgaatacaaagaaggtcgtgaaaaagattatgaggcttctggaaggaaggataaatcaagagatctagatgacacatttgatgctacaagaggtcatga

SEQ ID NO: 352759 - DNA, 294 bp, Zea mays
aaagtttggtatcttgcttgggatagaccttagaacacctagcacatctgtaagaacggataaacaagctgctgaaatacttaagagcccactggtgagagactcaatgcggggggcagcttttttgtcaagctcagtggacatgatgtcccctaagaatgaaacgtcgaatttggaacttgcatatgggcttcagaggggacctggcatgggattgtcaagctggtctcagggtatgcagctaccaaatacacagctgcagagctcaagcaatagcctacttgagcagagtgc

SEQ ID NO: 352760 - DNA, 140 bp, Zea mays
atccgccacttctgattcatggcgtacagttcaaagaacaccaaaaaaatacatattaatgacttcgacaatttccattatcatgcacaaccaagtccagtacctgcatcaatattgcaattagctggctcagcatattt

SEQ ID NO: 352761 - DNA, 224 bp, Zea mays
cattgtcatccagtagtcgcactcagggcaaggattctttaagtagccgaaggcttcttatttggttcttagatcagcacatcatcatgttggcttgcccctcaggtgctccattcgagaaccattttggcttttatcagaatcgccaagacatctatatgaagcaactcagtttgggaactgggtaatgttggtattggtaaaacggggaggcctctgtgggc

SEQ ID NO: 352762 - DNA, 258 bp, Zea mays
cagatctacaaaaaggaatgaagagtgctggagtcggcaggcagatgtacaataaatacaaaatactttactttcaatatctagaacaagataatttttgagtgcaaaaataacgtatagtgcagttcacagcatatgtggaaggaaaaagtctgataataattcaaaggatgggagggaagtggaagcttgatgtcagccgctgccatggatactgcaagtgtctactagtgattaaaggtatgcggcgtgaaattg

SEQ ID NO: 352763 - DNA, 148 bp, Zea mays
cgaagaatgggcctttctgccataattcttcactagtcaagaatgccagcagtttctttgtataaagagacctgcctttaaaatcatacattctgaacattttagtcaagctacaacaggtttggaaaacctctgtgggggaggggcg

SEQ ID NO: 352764 - DNA, 310 bp, Zea mays
aattgactgtgcccagctctcgatctactccaccctttaagtaaggcaacttcagttggcagacctggcaatgacaagctagaaggttaccaggcattccccctcccccaaaatgattgcaacgacatcgcactgagtccaagtatcagagtaggatgatgtattcccctccgcgcaccgatcccgacagagaggaagagcagtgcttctcaatcggaagtaatctgcttgcttcactagaccattaccataccatggattttgatgagcctgtcgtctcaccaatgaccaatgcaggcatgcaagaggg

SEQ ID NO: 352765 - DNA, 289 bp, Zea mays
cacatattgaaatagcaaatagaaatgtgcaggagcggagagacagcgacacctggttcttaagcaaattctagattggaacaattagaagatctgactgatgttaagagtggccagaggaaagtgagaggcgtccatttccagcagacacaatggaggctgacagaggcaggagcctacccctggccacaccacctctgggacacggcacccccctgggcctggagggagagggccaatccagacacactcacactctcatctctttccttggctggaaacaagtgca

SEQ ID NO: 352766 - DNA, 302 bp, Zea mays
cttctcttgtggccacgacgagcgacattcgctactcgctaccgtcctacgccaggtgccccaggtcttcttcggttccttcgccggcgacgaacgctaccagacatgtaaatggctgcccactgcactactgcttgattggctggttgctgctctctgcaatttgggctgctctctgattgattcggtattgtagattgctgagaactcaatgtttgatttctaattgtgcagattagacttcgcaaaaagaacttgatcttatattgcaaacttcaagatgttctctgctccaggcaaca

SEQ ID NO: 352767 - DNA, 297 bp, Zea mays
gaacggggccggccggccggcgagacatcggaactgaagtgtgggcacacaagagtcacaacagggagagtgggggacattcgaatcagttccctgcgtgtgagcgatgcagcgggacgcgagaagctggtcgccggcgccagcacggacgccgccggcccttacgcgatgccttcgcccgtgcagccgtcgaccaagagcacgaaggagacggtgaagaatgcgctgtcgcggtgggggcggaaggtcggggaagcgaccaggaaggccgacgacctgtcgcgcaacacatggcag

SEQ ID NO: 352768 - DNA, 211 bp, Zea mays
acattgtatgcattcaactgatctaccaattgagaaaagtgctcgacatagtcagtaacagtggagtgttggcgaatgtgtaagagctgtctaagtaggtactcatattggtttttgccataacgctcactgattaaccccccaaattcagaccatgtgacgctgggtaatttgtgctctatttactggagccatcgagcggctgagcctg

SEQ ID NO: 352769 - DNA, 255 bp, Zea mays
ccttattagcacaacacatgcatgtggcttgcctggagctcctcgagaagaatcttcagcatataatttgcatctgggatgcaggcaaagaagagagtattgaaggtagaactctgcactgggttgttgctcatggccatcttagtgctattgaggctcttgcaaaagaaaatatggaccaggattctatgcacaatgaagggcactcgacactccactatgttgctgtttatgaaagagaagacgttgcagtgg

SEQ ID NO: 352770 - DNA, 303 bp, Zea mays
gaggcatttccatgatctcagatcgctccagttttctttatgaaattaatggagaataaatatatgtccttgtttcagctgcttgcccgatgcacaaggtcgaggtttgtccatcatccaagctcgttcagctacaagaggatgctgccatttctaatggaagacgaaatatatgctcaagaaagtggcagggtcaaaattcgaaaagttgctgaggaaaggcagtttgcggcaaacaagcatgatgcctcagccaatgggcagcagtgtcttgctgtctcggatgactcttctcaggaaggc

SEQ ID NO: 352771 - DNA, 292 bp, Zea mays
gcatggcctgtcacacacaagctaggatgttccctccgccactgttgcagagtcccatgagcaatgtgaaaatgtggcaggcccaaggttttcttctctggtccagagagggcgaggcaagagcaggaagcaggttctacagctctgagaatgctgagctagagcagcagcctaccaggcaaatgggttaccaaagcaattgccttactgccagactgggtgctggggcctcagagagactccagtattcttgccttcctgaaaccagggtctagcaggacaaaactattcc

SEQ ID NO: 352772 - DNA, 307 bp, Zea mays
agagcttgcaccttgcaatgaacccagaaaatctacacacagaaggattgaaaaggacccctctattgaggaatttgaggtgaagcttaaagttgctaatgagagattgacaaacattgatgaaaacatcaacaagctaagtgggaccgagagagaagaaatgggaaatttctgtggttctgattggacaaaagagcaggacatggcattgcgcaaagcttacttcagtgcccgaccatccccacatttctggaagagagtttcaaaaatggtgccagggagatctgctgaagactgcttcaacaga

SEQ ID NO: 352773 - DNA, 295 bp, Zea mays
gctggaaaagcttcaggggacattgttctccacagaagacgagtcctctaagcctctggtacagaactatcgagagcttcagcctctcaatcagcgcatggtctttgcttgcttatcatccacgcaggatcctcgtataccacaggtgaaatgctgagtctaggtcgtaggaatcttggttggctgtctctgcctactcctggctgtttatctcattgctataaagattcggaagaagaggctggaaaatcgagagagtgtggtcttcagctcagcacaagccacgactgaggca

SEQ ID NO: 352774 - DNA, 157 bp, Zea mays
agctcgcccggtcgtggccgcccttcgccgacccggcgctcctccccgccacggacgtcgccttcctcacctcctattccctcggcatgtacgtcgccggccacctcggcgactgcctcgacctccgccgcttccttgccttcggcatggtcaccag

SEQ ID NO: 352775 - DNA, 289 bp, Zea mays
caaggacgtacgtgatcgcttccaaaatgtcgtccagcatgctaacgagatggcagcagcagtggagctgttcaatgatgcacacagtcgttttcagagtgctcttcagaatgtcaacacctcagcagtaattgaacagttcaaggatgctcttgatcattttcaaagtattacgcataatggcaagatggtagcggctgtggagtacggtactgaaatgcaagagaagtcaatgtgtgaagagcctcagaggaaggccaaagtaatagcaattgctgaagtactgaag

SEQ ID NO: 352776 - DNA, 292 bp, Zea mays
atctcaatcagctgaactgtacaaagatttgcttcgacttctgacaggatgcagcaccagttgcttcactttgtattatttacattttctactggaaacaactgctggatactgtcagaagtcgaagcaaatctcaatcagctgaactgtacaaagattaaaaaaagagcacaacctagtctaagcatggtacattactacatctacagattatgtaactgttaccagaataagaatagagcaatgtttccatttggtttgttattttcccctttatattctattactgtag

SEQ ID NO: 352777 - DNA, 195 bp, Zea mays
acaaagactacaggggggagacacatctctccccacctcgcttcgcacctctccagccgccgcctcctccttcgccggcgtcgacgatgggtgactatggccacggcggggggcagatgcggggcaacccggactcccgccccaggggccagggccagcgccctaacgtccagcatctcaagctcatggggcaga

SEQ ID NO: 352778 - DNA, 274 bp, Zea mays
cctgctcaccgcccagctccaggtacgcgcgagtcattagagaaataagggtcggcttggttgcccgaggcctacccagcgcctgcgatggaggagaaggctatggcaaatggagcagcgactgctgatgttgctgctcctgataataaggataacaccaaggaagaggctagcgagagcaaggaaccagcagccaatcaggatgccgatgaccagaacaaaggcttggaaaatggcgccgagggccagtcaggtggagatgtcaatatggcag

SEQ ID NO: 352779 - DNA, 281 bp, Zea mays
gtggcgcgatccgcgggagagcagcaatgacggcggaggggacggcgtgcaacggcgccggcgaggcgctgaaggcggaattcgcgccggagaaggtggtggccgtgtccctggaggagaagccggtcggggagcgcgagggcgaggacgtcggcgggccgttcttgatcgtgaacggcggcgattccgacgggcactccgagcctggctcagatctgggcaaggcgcccgacgaggaccctgcatccgaggaggacgacgtgcccaccttcaatgcagct

SEQ ID NO: 352780 - DNA, 284 bp, Zea mays
aaggcacaagaagtgcttttagagacaaatgccttgaactagcacgtgaccaagggcgagtatgatgagacggggccgtccattgtgcacaagaagtgcttttagagacaaatgccttgaactagcacggttggtgcaccatttgctgctgttcatgtcgcagttgtgctcgtacctgaacgttgcggccttgcgggtgctgatgcagcgatgcttgtgtctacaccttactccagccacagttcatacctgacggttgctaagtggtgatgcatctagctagc

SEQ ID NO: 352781 - DNA, 244 bp, Zea mays
ctgagcaacgccgcggacagatgcaggtcacgctggctccacactccttcaccgccttcgatctggcgctggctgagcccaagcttgtggcggagatatgatgtgtgtgctgttagcgatcttgatcgataaaaaggctttgtactggtgtaccatgatacaggataacgtactacgtactgttgcttcatgaaataaaaaccacatcaggtttttgcttggtgttggttggtttcctttctcc

SEQ ID NO: 352782 - DNA, 166 bp, Zea mays
ctcgaatattgagctccttttatttcaaaaactacactttactgacaaaaatacagcactggacatacacctattgttccattcgatgcgctgtatttttgtcagtaaagtgtagtcttgaaatgaaaaaataagggtatgtccagcgctcatgcaatttttatca

SEQ ID NO: 352783 - DNA, 300 bp, Zea mays
cccacttgccacttgggatacgctgacctctgagcagcctcgatccggctcgttcaaacttgaccgaacggcagccattagctggtggcgcctcctccttgccggagccgcctcgccggcgggtggcgacgctgccgccgctgtcacagggctgctcgcaccactcgctgcacgtacgctacccagtacccacactccgctccagtacacccaccgagacatctaacccaaccttgatctcatctcgtgcactcctctcccttcccctcctctcctagggttagcaagcttgatcccgtg

SEQ ID NO: 352784 - DNA, 281 bp, Zea mays
accacgcagccgccctcagccaggtgcgcgcgtcttctttgggcccttcgctggtgacgagcgcccactaggatcgaggcgtggtgctagccgttgggtacttccatttggtgataatctgtgtgggaggtggaattcatggacgttgttaccgggcccaagtttaatcctagcaatttcagggtttctggtgcctgctcattctgaatggcagaccttacggacatcggttgctgcagttgctttagctttttaaggaagcccagtgtacctgtacgtca

SEQ ID NO: 352785 - DNA, 179 bp, Zea mays
gaaagccattgtacagcatcatattcaaacgctgttcaatggctttctagtgttacacaatcaaccattgaacagcgtttggctatgatgctgtaccatctggatttacatagctccttttgttttagcgatgtcattgtcatgcatcatgagtgacgtctacaaacatttgtaagaaa

SEQ ID NO: 352786 - DNA, 283 bp, Zea mays
aattgtgagccttggctgtatttgattttaagtttgaataatccacctgctgtaggtagtttggttaaaagacattgctatttttctgcttagtgatactgatattagttattcatttctcgtccatctatttttgaagtgtcagtagtggtttgttaaacttgttttcctgagcttgcttctgattctggcaagtttttgggctcctggcacttcacttttatgatcttaatttgatttggttataacgggaaagtggtctggactggagtatgtcctacat

SEQ ID NO: 352787 - DNA, 166 bp, Zea mays
caaaggtggaaagatacaggaagcaaagattatatttaatgaaatgaaagagaaagaagtcaaatctgttatccagctacatcccataccagccttgacttctttttctttcatttcattagatataaagaagtcaaatctggtatgggatgtagctggttaacag

SEQ ID NO: 352788 - DNA, 165 bp, Zea mays
gcctgcctgcgcgggggtcccgccctccgtcctcgtggaccccgccacccatcgatactaccgatgcctccggtcgcgtcgccatcccgccgtgtataaagcgccctcgctccggccaggtcacggctcccgttccaactcctacctacgcagcagaggccagcc

SEQ ID NO: 352789 - DNA, 240 bp, Zea mays
cagcagcagtagcagcacctaccagcttgttagaaatgcagagtctcaagcccaacttcagacccactgaaagagaatcagcagtttaacaagatctccggaggctgtggggtcgactcacaggcagcttaaagtttcaggagctctgctttaagaaacattcctttcagagagggaacttaaactgagccaagatctaaaaccatgtgaatccaaattcagagaatcagggtcatggtc

SEQ ID NO: 352790 - DNA, 305 bp, Zea mays
ctattttctgctcatcagcttgtcctctcggctcgtttggcccgaatttccatcgcgtcgtcgatctggccgattatcgtcgttcgtcgtcgtactgtgcattcaacagccccgagtctatgtcgccccggccttgttgtccatatcgctcgccgtagctcagcttgctagttcgtcgtgccgcgtcatgtgctgatattctcttccggcaggtctcgccgtcgaccatgtttaagtgattgttcggctcctcgcatcccacctattcaataaaacaccctaatccatagactgtcgacgcactg

SEQ ID NO: 352791 - DNA, 293 bp, Zea mays
gactaataagggaactactccataccctctacacatccttatgtacactgggtcaaagagtcggcaagtctgtgctggtcgggaacattaacatgtgggtgtataggatggacactctctccactggcagcagcagctgaacaacattcagatcaccagggtaagcgggcaggcccagcctcctcccggcagtcggtccctccacagggatactggacagactcgccaagactttgaattcactcctgtgacggaagagtctggtcttttctgatctgctgctttgttctggt

SEQ ID NO: 352792 - DNA, 303 bp, Zea mays
cgagaaggaacgcgagctagccatccttgttgctgcagggaggaaggagagacaggtggatcgggggcgccagtcaagatgggctcggtgatgtaaggattttcatggtataatgtccaagaatactaaggaattaaggataagtcatcgaaccgggcatggcctgactaccttaccatgcagatgcatgtggctgcaaaaattacaccgttcagttgccaaaggatagttgtgagcagtccaagagcatcatgatatcagtaacaagaagattgtatcatttgttggaaatcaatttatttg

SEQ ID NO: 352793 - DNA, 293 bp, Zea mays
gggagcatcagtggcgcacaatgagcctcctaatggcagccccagtgtaaatggcttggttgaggagcctgaatctctgaagaacagactagaaatgctgcctggtacctttgagccgctgcggaaggaagttgagagtactgttactacgatgtgtaagatatactgtcggacctttacaacaaatgtagcatcccagaactggtccaggtggtctacgttgctgtaggtgctagagagcaactatcgcttccactgttggcagatcttagctctacgggattatcagaagc

SEQ ID NO: 352794 - DNA, 283 bp, Zea mays
ggagccatgcaggccttgtgctgaccaagctgctcacctcggaggagctggctctgttgtgctccaggctgctggtcttgggctccttcctgcttctcttctgtggccttctctgctgtgtcactgctatgtgcttcctcccgcgccgggagttccactggtctagaacccggctctgagggcactggcctagttcccgacttgtttctcaggtgtgaatcaacttcttgggccttggctctgagttggcagaggttttagagtatgcgaacatctggaatct

SEQ ID NO: 352795 - DNA, 289 bp, Zea mays
ggaagttttaccacatgtaacagattcctttatatgtagtgtgaatcactatttgtagaaactgtcatgtcaaaatatttaactgactgttgacatgtattatctttattccttgtatttgtttattggggatatctgctttaagatatatactactatgtatatccagttaactgagagatttttgactctcttaatagaactgcattaagtttatgattttgtagaaattagcttttgtctaggcaactagtgggtatactctgcaaatattgtaatgaactcttac

SEQ ID NO: 352796 - DNA, 305 bp, Zea mays
cgaaggtctcagctgtagacaagtcaccgagcgacaccgcgcttggccggaaccaggtcgccgatcatgagccaggggcgtcgttggagttggagaagccaccggtgtcccgagagtcagctgcgccggcaaagcggctggacgagcagctgcagtctttctcgttccttgagagcgtcgtccctggggttgcttttcatgccggggctaacacgggcggcgaacggggtccaggacctcgccgcagctgaccaggtcgctgtcccagagggctggtgtgggcaaggcaaaagccggcgctgcca

SEQ ID NO: 352797 - DNA, 299 bp, Zea mays
ccaaattctccttagagacagtgattaatagaaggaatgagtggaagattagtatacacacaaggctattcaggagtgggggtacaatgttaatgcggtgacctttaaatcttcatttgtctctatttccctgaatgctaattagaggacatgttcatcaccaggaggaatttgcatccaagtccgtctccctgctaagtggtattttgagaattccgaagcttagtctcagagaagagctgacctgaacttgccgaggctctcactgcattgtagcttttctctggagaacaaaaact

SEQ ID NO: 352798 - DNA, 102 bp, Zea mays
ccgcaactggcgccgccactcccaggctcgaagccatgccgcccaagctcgacccgtcgaaggtggtggagttgtccgtccgtgtaaccggcggcgagttcg

SEQ ID NO: 352799 - DNA, 263 bp, Zea mays
ctcgagcgtttgactctgccttttttcagcgacattccactgttgttggcgtccacgcgttcggtggcccgtcgtcccgatgcgccgtcaacgatgtcacccataggtgcagaccatcgacgatgtcacccataggtgctgacgagccatctcctattctcctacacatgctgcccctcccctccatcctttgatccaacttctcggtcgtcgacgacctgccagcttcgccggagatgagatcccaagctcttcccaacatg

SEQ ID NO: 352800 - DNA, 286 bp, Zea mays
ttcgagcgattcggctcgggttttagcggcgcacagagggcaagagaaccagcgagagagagagagacggaaagaggaagatgagtcaggagcctgaggatcctggtgaagttcctccgtgagacagcgggtcacgtggtgacggtggagttgaagaccggcgaggtgtaccgacggtcaactcaagtgcgaggataactagaattgccagctcaagaacattaccttcaccgctaaggtatactctctctgcctgcgctaccttcggatccgagatagaacccca

SEQ ID NO: 352801 - DNA, 224 bp, Zea mays
caaagtgctctcacaccttccatcagccttgtgtggacagatggttcattgaccatggttcatgcccagtatgtagacaggatgtgtaggtagatcatgatcgattctgggttatcatgcctttgtaaagttgctaccctcgtcatatagaagaaagatacagtacgtagcatgtaaaaagtcctgcacttgttcctattatgaaaaatggtttacacatcagt

SEQ ID NO: 352802 - DNA, 258 bp, Zea mays
ctcgcagctgcttaacttccaaatcagatcgactgattgttcgacgcatattttgatcgcacactagatggactcatcagattatgcactaatgttatcctcctatgtcacatcactgattgttgcaggaatttcacataacacttctggaatcatattcgcgtccgatcgttctctagaaccggaggcgactagatcacctacagatcaggctatattctcgtgggggcaataactggggatgattttcaatgaacc

SEQ ID NO: 352803 - DNA, 301 bp, Zea mays
ccgaatcagaacccgaccatctcgtttacgatttcctcaacctcgtgaccgctcaggttctccctgtcgtggaggccagggccgcgatgggcgcggtcgtggacgtggacgtgagggactctgcgatgttccattcccttctcgccgcgggaaatttgctgccgcccttcctcacgctgcctcagctccacgacgatgcagatacgaacttcggttccagccaggacaaggagctgctcgaccttctcgaaggtatgctggccaccgaatccgtggtggtgaagagagaccagcgcatcgt

SEQ ID NO: 352804 - DNA, 296 bp, Zea mays
tatttttataatatttgttttaaggcaaaacctagattgaattaaatgacagtttattacagcccctttggcagggctccagtttctctgaaaacaatttcgactctcgctctttggcttctctaaaggagccggagttgttttataattcgtttgaaaaaacagtttttcttatgtttatttcgaatgatgtattagggaaacgaaggaggagccgttagaagccacgtttttggtgctctggctcccaacacaaaaatagctcaacctcttcgaggtctctcaacgaaaagccg

SEQ ID NO: 352805 - DNA, 302 bp, Zea mays
tgaaagtagaaatttgactgaagctcctacttccttatacagcctttccttctgtgggcttgtcacttttcagtacatttctagtggggtagagcagggcgacccctctgctgggtatctccttaaatgcgaagcaacataaatttatataatggaatttggtggcagtgtctgatgtatgtgcatagctaaaaccaactgtttagttgactgcttagttataggacaagttggaagtccttgtttactggaatatattatgcttgtgttaacacactagagtaaatagaatttggtattct

SEQ ID NO: 352806 - DNA, 265 bp, Zea mays
  unsure (1)..(265): unsure at all n locations
atcttttatagactttatatatttccttttgataaagggatgctgcatagtagagttggtgtaattaaactatctcagccgtttccctgctttcccttctgctcaatatgcctcattgtccttccagggagctcttttaatcttaaagttctacatttcatgctcttagtcaaattctgctccctntttaataactcttcccactgcatatttccatcttgaattggtggatctaaattctgatactgtagttgagatacagcta

SEQ ID NO: 352807 - DNA, 293 bp, Zea mays
gctggggggacaagttagtttcactgagattgctacatctttttttggcatttatgagattattcattttagaaagtatatataactaggctcctctgaaatgcagaccagtttagctagggcggaaaaatacagaccctgtttattggcagtaaacaagcatttatagcttgttatatataaggctcatcaaatgcagctttggggaatatgtagatattgttccttccctcaagacctgtattaatggaatgttgtatccttacctgggatacaaggtgcaggtgtagaga

SEQ ID NO: 352808 - DNA, 294 bp, Zea mays
gcttcattaaccaaagctatcgaaattaagatgagtgacctcattggcctggagttcaagccagagaaacttcgcaagtaccatgagcacgtgattagcagcctctttgacgacgaccaaagccatcagtgtaaaacatgtggcaataggttcaggcttgaagaactgagcttgcacacatcaagctgtgggcaaaggaagtctgagactatatatactggtatcgcacctaaaagatggtaccctagcaagaacatttacattgatggatcacatgaaattgaggaccgcact

SEQ ID NO: 352809 - DNA, 193 bp, Zea mays
ctggccatacttcggcttcccgccgtcgctgtccttgcccactgtgtgagaagcttgatgttactgagacaaaatgaattatgttacagcttcagagccgtccgtctgtatgtaacatgtataagcaacacttgtactcgtccagtttgtttaaaatgcaacgcatacatacatacagatagagtttgtacaa

SEQ ID NO: 352810 - DNA, 280 bp, Zea mays
tttgagtttgtggtaaaggtttgaggctgttcagaatccatttgctctgaaaactttgtaagccccaaaataaaatggttaatccctaatcaagtgtgagttagtgctttggaaaggggataagtttatctaaggaagagatgcagtttctaagaagttttaagcttttggatgagatataagttggattagttccctggtttacctaagcgaattcaaattggtcacttttattaagtgctaggttgtctagatgtgtatgcctatcatatacttattt

SEQ ID NO: 352811 - DNA, 280 bp, Zea mays
atcttggcaatgggttatctatggaagtaaagcttatgaaaaggagggaggaaatgcttgtaagataggagcaagagataagaaaagctcttatatccaagaatggtaaaagcgaggaactcaccactcttcagcaacagctacagtctgcagagaagaagcatcggctgctgtgaagaaactcaaagaagctgaatccgaaacacaagagttacatacaatgacacgcaggatgatcttaagcaaagaagaaatggaagacgttgtcatgaagaggtgt

SEQ ID NO: 352812 - DNA, 242 bp, Zea mays
gaatgatgtgctggtcagtgtcaagtcaaggagggtcacaggaacgatgacggatgaggaatactacacatctagcaacgacaatgatacagagagcgaggggtttgacgatgttctgacagaggaggagaaggaaacagctggaggtacgctagaaatggattctccagataccagtggagaagaccaatcagactcatttgctaaccctcaacatagttgcgttgaaccaagggagaggg

SEQ ID NO: 352813 - DNA, 261 bp, Zea mays
ggaaaaatgtgcccattcagacatcacaatgtccattgttgggcctccccagctgccaaaaagtgtctttgatctctcagtgtactctgaaaagctgccacaacatatgatggggcaccaactaatgaagcagaactacaatgcagcagttaggctcagctgtcatattgcgtgcgagcttcatatgtgcatatcacaacagccagaagctgctgttgaagtcgttttccaccatcagtttgaattttgtactgccctttt

SEQ ID NO: 352814 - DNA, 265 bp, Zea mays
gcgagcggccgcccttttttttttttttttttttttgactacagtttctagatgtcagatttatataatatttgtatagatagacctagctcatgaattacatatagttaccgaaattacaacaccctgagatttctcaagttgtcacaaatgtttccccgacggacgacccggctctgacgaatacggccgggtacccgatcccgggcttcgacctgggacctcgaaccgctctgcaccccagcccggtactcgtcgggtagtg

SEQ ID NO: 352815 - DNA, 180 bp, Zea mays
ggcgagcaaatacaattactactactcgtagtacatgctattattgtctgtatgtgtgtgcatggttcagacttcagagcaagtacatggtattattgtcagtatgctactcgttttttttaaaaaaaatgtcagtatgcgacacagcagcaaggcatatatgatcaatactccggtttt

SEQ ID NO: 352816 - DNA, 107 bp, Zea mays
agtgggaagcctgcgaagatcggatagtggggtggatactccagcgatcggcgggatctgatggctactcctgaccggcttatctacgttaaggtcacggcggacaa

SEQ ID NO: 352817 - DNA, 112 bp, Zea mays
aagctgcaaagcggagaaaggagtttactatatgaggtcggctgtgctggctgcatgtgtttgggactgcagctggaatctatagaaacaggatactacataaaccacagtg

SEQ ID NO: 352818 - DNA, 216 bp, Zea mays
aaataattcatccatgtcacaaaatgaccatcaagatatcaaacattaagagtgtctcacgtgatgattgctcctcagttgacccaaaaggcaataatgctaaggagtcaagtgattcaactggtattggggatatgagtgcaatcggcactacaaaagatgttgttgcaggcaattctaaacaagtgaacgactcacctagtgttgaggtggagg

SEQ ID NO: 352819 - DNA, 142 bp, Zea mays
gtcgcggctaaaacccgccgagccggaccaaatcgccgccaccatcggaggatgcgtcgcaggggcaacggtcctactgtcggcattgatgcagccgtcgcggcagctcgagtttctcctccgtagcttcgagcgcgcctct

SEQ ID NO: 352820 - DNA, 113 bp, Zea mays
cagcaggatgatccgtagagttctacgcgatgagcgagcgattgattagctcgtgcgtgctgtgcaaggagagtaacccagcagatcgatgcgtctatgcgggtagtacagga

SEQ ID NO: 352821 - DNA, 106 bp, Zea mays
aacgaggtgtatgtatttgatgttgaaacgaaacaactaggtgaatggtccaagcgatatacgcaccagttgcccagaaggttccaggaatttcctggagaggtca

SEQ ID NO: 352822 - DNA, 314 bp, Zea mays
agtgtcaatgcaacagcaggtcgctgaaattggaattgatgtctacaaagtgcttcccatgtcattattagattactgagataactatggcctagagagtgaagctaagtggaggtggcaccacgaattccttgatgtaccaggaatgtttggattgttgtattctgacattgtttggttcaacatattcaagttggagcgtcaggtctccaacaattaaactaaatggaggagtggagcttcatgttgggatgatgcatgcacctttcaagtttcggaatgttgtgctcaactgcaacttgtggccgttgaac

SEQ ID NO: 352823 - DNA, 298 bp, Zea mays
cgagtgagaccgttagcactcgtctgctggaccgcaggatgagtcgaggcagctgcggatcgctcgagcaagtggatcctccgtccagggctgggatgccaagtgcatgcaagttggcggaggccacacgctgttgctgtcgtacgttcgcttcacttgccgaggtcttcgttcaacgccgcagccgtgaaacgcttgtgattttctttacacaagccgggaaggttgctcagtgcgtagtgggaggcggggaaggtggctccgtggtgggagggcgtggtgacttttcttcatccgc

SEQ ID NO: 352824 - DNA, 290 bp, Zea mays
agaagacgacggtggacgtgtgggcgagcctcaagactcgtttcgtcggggcggattgggtcatgacggcgcgcctccccacgctcaagggggagttcgacaagctatgcatggaagatagagagcagttggacgactacgctgacaaaataagcggcatgtcgcgcgttacgtcgggcttggcacgatgctcgacgacgacgccatggtgaagaagctcctcaacaccatcctggatcggctcttcccagccgttgcgggcatcgagcagttctgcaacgtcgagatga

SEQ ID NO: 352825 - DNA, 302 bp, Zea mays
cagatcggctcttccccgtcgtcgcgggcatcgagcagttctgcgacgtcgagacgatgccgttcgaggaggcgctcggacgtctcaaggcgttcgatgagcgttctcggcggcgtactcatgccggtggtgaacggcgcgacgatcagctcctcctcacggaggccgagtggaaagctcgaaaaaagaagaagtcgacgatcggcaaatgcttcaactgtggcaaccgcggccactttgcacgggactgccccaagccgaagaaggaagaggcactattcgccaatgccgaagaggaggcg

SEQ ID NO: 352826 - DNA, 291 bp, Zea mays
ttttacctaggtgactcggtgctagccacactattacaagatgcctcctagtcgtttgcaggttggaacaaaaacaacagaaggacataaccaagcaggaaacacattacatccatatgaagtgcagcgccttagacaagttatgagaaacaatgcaaggctgcaacaactgggaattcctggtttatgcgacacactgccaaaggcatattcctttcatcacaacaaaaataagccaaattttacaaataatgaagattcagaatctgattataatccttcatcaaatga

SEQ ID NO: 352827 - DNA, 295 bp, Zea mays
agagaggggcgttgtggcgctggctagctatagctcgatccatcggaagaagttgaaccacacatcaactaacctctctgtcgtctcgcggcgatgtgtgaatctccatcatcctcgagaggccggtggcgccatagatatgatcagaagacaccgtcgactcagaaacgcggtgatgtgtgaatcgtcaatgttcctgatgtcgccgtctccgtcaccgtcaccgccgcagccgtctaggccgccaccggagtacaagcacttctgtcgagtatgcaacaagggattcacgtgc

SEQ ID NO: 352828 - DNA, 278 bp, Zea mays
aaggggcgtccgagtctggaatcctatctgatcggaaaatggttaaggtcgaagaccaggccgaggacggcggcgcagatgctgatgccagggcgtctcagggagtctgctctggattcgctgcctgtctcggtgcatgccagcttgaaggaggaggaaggtcaagcaagttcttcgtctggtaaactaagatcgcagtttattggaatggggttttcatccaagctggtagacaaggttctccagagacatggtgatgatgattctaacacaatttt

SEQ ID NO: 352829 - DNA, 270 bp, Zea mays
ctcatatccgggtagcagtatctctcgcttctctagccatgacgctggtgaggatgccttgccgcctctgctgcttcctgctcgtcgtcgccgcctccgccgccgtctccgggcgggggcgggtggtcaccaccctcccgggctacgagggccgcctccccttccacctcgaaacagggtatgtggaggtggacgaggacgccggcgcggagctcttctactacttcgtcagggccgagtccggcgccgacgacaaagtacccgttcgtc

SEQ ID NO: 352830 - DNA, 265 bp, Zea mays
cgcgctccatcaccaaccttcggcacaccgcgatcgggatcgcctcagcaagaaggacgccaggaaggcggagaaggctgagaaggtggcacaacgccaacagcagcatctgttcaacaccgaagacctattcgcggccaactacagtgatgtcgtcgtcgaggagattcagttaaaggccatctccgtgatgtttgatacatcctaaagtgcttcatagacaataatgcagggatagggaagaatgtgataatctccaactctg

SEQ ID NO: 352831 - DNA, 244 bp, Zea mays
gaaggcctagagaaatttctatggaaccaacaatggtttaccagtgtcactcaaaaagggtcaagaaactagctgttgaacttggcaatcctaacgtagtgtggagtgcaagcgaggatggtactctgagacaacatgattttcgggagtgtagttcctgtcctcgtgcaggatccgctaatcaggaatgtcacaatgtgcttcttgatctacggtgcggacaaagaagtctttagccgattta

SEQ ID NO: 352832 - DNA, 245 bp, Zea mays
cttcaatcatctatatatgacatgaagcaagagacaataattcttactatttttttcgacattatccatatcagtagatgtttgtagtaatgtgatagctcatattctattcattcaatgaaaagctacccattacatttttcttaagaaaaaaacagagaggaacaatcttttgttgctagagaaccaatttccctttctagaaacatgcacaccatattttatgggatggagagaatatacat

SEQ ID NO: 352833 - DNA, 178 bp, Zea mays
tggacgtgctggaggattaccacctgacgagcatcacgctagactaccgccgggagtgccgtcagtcgcagctgctcgagtcgctcaccagcatgacgacctcgtcgtcggcgccggccgagccgccgctgacgtcgagactgtgcggctctgacctgtacagcacacacctgatacg

SEQ ID NO: 352834 - DNA, 274 bp, Zea mays
  unsure (1)..(274): unsure at all n locations
gaagaaacacatatccatctctattctcatttccctgtgttctagtgttcctcttctctgtctagaaatatatatttctcttttcccttcatcttacatgtacccagattctcttatattctagtactttgctgctgatggttgaattgaggtattagtgttggtaacatgtggtatcagatgaggtcatgctggaatcgntctctgctgtggcgtccacgatggactccgtggaggcggcgatgaagtgtattctctacgcgctggcgcaaac

SEQ ID NO: 352835 - DNA, 288 bp, Zea mays
  unsure (1)..(288): unsure at all n locations
gactagttctagatcccgtgcttgtcggtggcgcacnaaggactggagtaaatgctacattcttctgtagagggtatcctcggatcaatggaatcatctcaatattattcaaagaatagtattgatgtggctcgagggagagggtacaagattgtgatgacaatcagcctttcttcacacgtcccagttggctactcttcatgggctgaatatgattgtaccaccctcaatttggggtataaaatttcttttctaatatccaccagatttaggtgttactctctcaaa

SEQ ID NO: 352836 - DNA, 290 bp, Zea mays
aggaagcagaataattgtcaccacaaggtttcaagctgttgccacgacatgctctgcacataaagatcaagatcatattcatttggttgatgttctttccggtgaagaggacatcagtttattcatcaaaaccttttccgagtgtatacgtaatagtgccagacaatcataccagaccatggtgccagacagactttggcagatgtctggtggcttgccgttggccatagttaccatggcaggtgtggtggcatccaagctactgatgatcagagatgattggcttgccg

SEQ ID NO: 352837 - DNA, 290 bp, Zea mays
  unsure (1)..(290): unsure at all n locations
agagtgcctggagcagagctgaacagaaacgtctgaacgaggagttggctagtgttgttgccaagttggaagaaagcaaacaaaaactggcagtactgaaagcacagggagacaataagcaagcaacaccgatccttgttcctatgctgggaaagaaaactgcagaaaaggtgggagataaacaaacagaactgcaagatcttgaagctacccacaaggagttaatcccaacaacttcgnngcgcctgnagganattagangactgcatacagagagaattggaattttg

SEQ ID NO: 352838 - DNA, 285 bp, Zea mays
agacgtgaaagggtatttttatcactggatatgataaataagaaacagatgcattaacctgactctttctctgaaaaaatgaataatgatcatggatggtttagcccactttggattgcatttgcaatcctgattggtggtctcttattggatgtgctgatatctgtttctcttggtgtttccgcacttcctgtcaatataataattggcgttcttatagttctcggattgggcaccgcccttcgtcttgctctcgagtgctgccaggaatggggctcaaggagg

SEQ ID NO: 352839 - DNA, 257 bp, Zea mays
tgccagttccccgcgccaatgccggatccggccggcgggcgggctggcatgttccctctaactgcccctgtccgccgccgcggctcccgatgctcgtgtggtcttcgggagcaggagagggagcagcggccgtcgtgggcggccgctaggagcgaagatgcagatccggctgtcgccgagcatgaggagcatcaccatctccactagccatggcctgctagacttgatgaggctcaaggtcgacgcgcgacactttt

SEQ ID NO: 352840 - DNA, 282 bp, Zea mays
  unsure (1)..(282): unsure at all n locations
acaccatcatgaaaatatcataacatcaaccctgaataggtaacaactcattgataagatacacgactaccttgcaaacaagaggtaataggtcatcactgatgacataatggggtatatcaacatggaaaccgattagatgtgctctggtggacagtaacactggaagtaggatactcataactactcgcgtacgtgaagtagcaagaaaggcacgtggtgaccaatattgannaccactctctcttgatgactccaagacattattctatactagagtat

SEQ ID NO: 352841 - DNA, 279 bp, Zea mays
ccgcaaatgacgttggagacgcataaggatggcaccaaacccactgaaagcagaaagttaaataaggaaagggaaattactgaaaatggtagtccaattgtcgataaacacattgttgctgctccagcagaagaggcagtcacaagcctaaataagaaagcctctcagaacatgcccttgcttccacatggtttgaggaacacaggaaatatttgctttctgaatgcaactttgcaggcattgctttcatgctcgccttttgtctaccttttacaggat

SEQ ID NO: 352842 - DNA, 141 bp, Zea mays
catgctatccttggatcgatctcgtctttgtcgttgacttgcgcaggttgtcgatggccaggacatctttcaaaatggatcacgacctcgagaaaaggcagtccgaatctgccaggatcagggataagtatccgacagaat

SEQ ID NO: 352843 - DNA, 289 bp, Zea mays
ggacaacaaaaggactctacattttattcttaactaggacttgggcagcaaactccagggtaaaagactggaatgagcccagctgattcaggtggagatgctgtttttttggaatctagtgtagctgaaatgtttcaaactaaagcaggccatgagatgaacccttttcatcttcccagttctcaaacacactgagatcttccccacatttcactcctttctggcaattgctcgaggtcatgtaaccagagtgagcccatttgcccgggctgactgctgatctggcctt

SEQ ID NO: 352844 - DNA, 116 bp, Zea mays
aagggattgtttgggactatcatctcacttctaagtaagttaactggaaagaagattacatgagaacaccatagttagttttcacagcacttcctaagggtggtgtcagtagccat

SEQ ID NO: 352845 - DNA, 127 bp, Zea mays
gggaaattaagaggcgatggtcagctgcaaatgcattcatgcgtaaacacatcgagacgccgtctcgaaccattgtaggagttaagtatatgatgatatataatcctgtctatctaataagtccaaa

SEQ ID NO: 352846 - DNA, 292 bp, Zea mays
gcttaggcaccatgctccggacgaagcagtaatatcaccaatagagcaacaagagcatagaaaagtcttgatgctctattggtgatattactgcttaggcaccatgctccggacgaagcagctagagccaggtaccaaaagaaggtttctaacataattgatgatgttctagaatggtccccgaagttagctatttctggactgattgacaaacacactggggctaacattacagaagacagcaattacactagcagggctgcgagtagtcatgtgcctccttccaccaaag

SEQ ID NO: 352847 - DNA, 259 bp, Zea mays
gtcatttcttcagaccaagtctgggttggagttgtgcctgtcggcccttcgggacatgctcttaattcttcttatcgtacgcgtaatactatacaatataaacaagagttgggcactgcatagtaaatttcgcacgcattgtgccacactgactccttgttttcttcccttcatattctatgatggacatgtgtgttgacttctggagaaataggaaccattccaattcagcgtctgagaaccaatttggcagcggatc

SEQ ID NO: 352848 - DNA, 104 bp, Zea mays
agcatttttgcatctgacagtttacctagaagaaaagacaccagacttggcagagaggtggcaaatcagtcatgattacaaacctacagaggtggcgaatatgt

SEQ ID NO: 352849 - DNA, 183 bp, Zea mays
atggaattagattgagcaataatttcttcaacacatggagagggacgcaaacatcatgtactatctacagctcatcatgggtttgcgtccctgtccctgtgttgatggaattagattgagcaataatttcttcgccaagtttattcagcggctgtacatatcctggtatctccatgctttggt

SEQ ID NO: 352850 - DNA, 101 bp, Zea mays
cgtttgtcttatgagacagacatctgtccatgcatccatgtgtgcatgtactacaaataaacagcctattatttaggttacttaggtgcacaatcatttgg

SEQ ID NO: 352851 - DNA, 164 bp, Zea mays
gggaggctctgcagccctgctgaagggccctaactagagttctagagattctgattctgtttctcagtagtccttttagaggcttgctatacctggtctgcttcaaggaggtcgaccttctaatgtatgaagaatgggatgcatttgatctcaagaccaaagac

SEQ ID NO: 352852 - DNA, 296 bp, Zea mays
ctttgcacaagcacaaagtccatgaaaatagaagtcggaacattgaagctttggaggcccgtctgattgattcaaatgaaaaggttgaagaaagtggtagtttagatagtaagaagagcctattcaggaattggccattgatgtcatcaataattgtctattgtgtcttctccttccatgacatggcttacacagaggtgttctctctatgggctgaaacgacaagaagtatggtgggctgagtttatcatctgaggatgttggtcaagtgcttgcagtacaggtgccagtcttct

SEQ ID NO: 352853 - DNA, 289 bp, Zea mays
accgccgcgtgctctccggattgttgtgcttgcggagtcggacgcggcctcggcacgacggcgccggcctccgatccacaccccgccgagcagtggcggaaccatagggtatgccgtatatgccacggcataccggcataccctgcccggcaatccgatcgagccaacgcttggagacgccgtctccgattgaagtaggggagagcggggtgccgggggtcagtttgttgccggtcatcctcctcgtcgtccaaccaggtcatcgcatcgttcagttcactctctgaga

SEQ ID NO: 352854 - DNA, 297 bp, Zea mays
aatagttctagatcgcgagcagccgctcgcgatctagactagagatgcactacccgtccgcggagtgcgcgtccgcgtttctctgctccccgatcaagaagcacttgttagaccacttccacaaggcacccctgccggtgccggagtaccacccggtgcctgagcacagcaagccggtgccggagtaccacccggtgcctgagcatagcaagccggcgccggagtaccaccctcccacgccggaataccaccctcccactccggtgtacgggcagccaaagcaactccgatctacca

SEQ ID NO: 352855 - DNA, 289 bp, Zea mays
tatatatgcaggcaattatattaatggtggagacgacacatatatctgggcgtttgtctgccttcccagctggtttagagcactgtaatattattagatataacagggcgttatgttgtatttttacatcactataccttaccatgaggtcctttctcctctgtgaggggtcaggcattgtattggaaccttgtacggcgtttgcatttttaatgcaatgacatacactactcgcaccagataaaaaacaaaaagggtggccgccatctaggggcctctttggccggga

SEQ ID NO: 352856 - DNA, 287 bp, Zea mays
agacactgcattgattgacatcgcgtgtctatcggctaacagggcgtaggctctgcgacggaatggcgcccctgggggcgattgccgccgccgccagcactggtcgcctgcctccggttacgagggttctccattcttcctacgcgtgctggactagcgctcctctccgtggtggcctcgggtcggccctccccacggcggactcggtgtccggcccccaaaccaaaccttttctggaggcggtggatttggttgagcagctggcgaggcattctctaggcctttga

SEQ ID NO: 352857 - DNA, 115 bp, Zea mays
ctattttgttgttacatgttaatattgctttgttcatccttatccacctactatagctatttgcaatcacaaaatcacttgatggcggtcagcctagagttatcaagctgatatt

SEQ ID NO: 352858 - DNA, 253 bp, Zea mays
ggagtctaattcatgttccaattgagctcgggaacgaccggttgatggccatggcatcggggaacgcgagagaaaggggcagagagagagagaagctccgccgctagggagcgtgatggccatcaccgtcgccctgtgccttggatgttgcccggcacccacggatgggtcaggaccactcgccggtgcgtgtgggtgctcattggggcttcggcgggctaggagcgctcgctgggggtggtggaattcctcg

SEQ ID NO: 352859 - DNA, 230 bp, Zea mays
cttgtacttataatcatgcttaaatggttgattctccaatttctttttttagaaataagttaattgcttttgcaggttgacactctcacctgacagatgatgtaattcttcaatttctataatcttaaaatttatatattttatatttgtaaatacagtacacattttattgcttggattttgagagacattgttaattttgggggaattggcattgcgaaagacttcat

SEQ ID NO: 352860 - DNA, 197 bp, Zea mays
atttctgggaagttctgaatttattttgaaaccttttttccttcaagcattttgcagtgagcttcttttatatatagcaaacaatttgaaagaatacaaaaatatgtgaagtatatttaaaaaaataactacagtatagcgctggtacagtacactaaaagactttgataaaaagaaacaataataaaaagcctcca

SEQ ID NO: 352861 - DNA, 284 bp, Zea mays
ctcaaacaatataatctatagttctgtgttctctattttacacgattcactgaatacaactttatcactatccaagaagtactgtgcaaggactgcaccttcacagaaaaattgtgggacaagataatgaactgggccaacctctcattcttacaaggaactcagaattcaggatcgctatatacatggtggaaaagtctgaggactcgctgcagtaaagatacaagaacattttttgatggcctatgatattttttggtggcactttggttggagagaatcgt

SEQ ID NO: 352862 - DNA, 189 bp, Zea mays
gaggatctatggatatctgcattcctgttggtactaaggaagccaacaggaaattttggactgctacttggattaatcgctcgagaaaaaagcttttcattcactacactaaaccagttaacttcactttcacaccggtgcacccaagacatggtatgcagtccctagggaccgagcctcagagctaga

SEQ ID NO: 352863 - DNA, 227 bp, Zea mays
cagtgttgtttgagatccatggaaattacgaacccgaggaggcgtcctttgatattgaatcaccagctatcgctccgttcttgtacgatggttcctgaggatgcaaaatggtgagttgaatttgattaccctgcgagctgtactgctgcatggtggtcgtggagaggaagatgcagccattgccgccgcctgagcgccggaaggtcgttcgttatcgtcgtcttcat

SEQ ID NO: 352864 - DNA, 147 bp, Zea mays
gtcatgaagtggaaaatgccatgcgatgatggctactttctgcagcagcgcctgttgttccatgggaaaaaaaaaaaaaaaaaaaaaaaaaggggggccccccacttagtgaccccgccacccgggaatttattccgggccgggacc

SEQ ID NO: 352865 - DNA, 208 bp, Zea mays
gttgatggcattctagatgagagcattgagaggacaagaggagacataccacatcgtgttgtttacttgctaaggaatgttgttcaagagattgagcaccgcattgctatccaagcggatcacataagaaatcaaaatagcatcatcaagacccgggaagacaagtaccgttcaaaaattaaagcactcgagaccttagtacatggca

SEQ ID NO: 352866 - DNA, 234 bp, Zea mays
gggggaagaacgctacagcgatcccaaactggaaggttgatccgaggtgccctaacgcgtccaatccgttccacatgtgcgcccagtactgcttcgaccatctgagtgaaacagcgcagacaagtgcagcaaagtcagacaagagacgaggcaagggcgtttctgaagacgagggaagaggagaaaccaaaaccaaccctggttgcgccagcgcgtccaccccctaccacaagt

SEQ ID NO: 352867 - DNA, 213 bp, Zea mays
catcagtgctacactcccacagtccccacatacacgcagatatttgaaaatatccaataaaatcaacaacactgcaaatttactagctcaactacaagaggcatggagttattattaaaaactgaagtactcatgatgacttccaaacaaaaaatctgacgctataatcaacatactatcaattgtggtaactcagtcctatagtcatactga

SEQ ID NO: 352868 - DNA, 191 bp, Zea mays
aataaaagtggcaagaaacaggcgttcgtcgccggagggaaaaactactgctcatcttctttgcatctgtgagtgttgttgggtgaaggccggttccaacagtagaggcgtgtctccacgagcccgttctccctgacaatctccgcccacaccgcctccttcccggccatggcctccgacaccttgaactg

SEQ ID NO: 352869 - DNA, 231 bp, Zea mays
cagagacgtggtctttttataaaacttgtgaatctttgccttttgaagaatttaacatggaccttttcgagaggctcctctgtgttcataatttgccaaaaaattacaaaagcctgtgatttttaacatccctgttatgctgatttctctttaagtaggtcctatttgcataacgagagagtggagaactgaatgcttatgcccaaggagcattctggagggttacacaga

SEQ ID NO: 352870 - DNA, 275 bp, Zea mays
cgaccaaggtcatatccccttaccccagcctaagccgcggtggtgcacatgcatcccatggcggtgcgcgccggtgagcaggcgaactgcccacaccggtgcccgattttaaacgaggatgggtcctacgcatggaggcgacctaagtgcatgtagcagaggtctacttaccacgaattacaaagataattcttcccatggtgtggtgcagtacattggtgggtttaaccttctagcgaaccatcttggtgactccacagggcttcactcacgga

SEQ ID NO: 352871 - DNA, 291 bp, Zea mays
gtatggtcaaagatctccggacgaactatgaagtatctgacccggattcagttctagaaggagatctagacgatttcatcttgaactatttgtcttcgtcactggatgaagctgatgtaagtacctgaacaaagaaccatgctcgccatttctcatgagctacctgcacaatcacttggacttgaaacaaaccaactgagacactgctgaagcgctaacagctggcggtgctgctccagtcttttctttggtagccaataccagtcgaggtcaatgatgagatttaaggta

SEQ ID NO: 352872 - DNA, 248 bp, Zea mays
cggctcgagcaaggagtaccgcatgcacgtgaggctcgtgactggtgaaaccgctgggtgcacggagttatagtggcgcctgatgtgcttatcatcgatcgtttactgccgtgatgccgctatcatcgtcgtaggtcgccgcacccggaccttgcatgaccgggcctctgctctcgttgggtggtcgtagggattcgttaatgcatgtggaggctggtcgtagtatcatcgaagagacgggccttctg

SEQ ID NO: 352873 - DNA, 287 bp, Zea mays
ctgacggcgcttttgtctccggtgaattttgtggcgggaagcttctgcgctggtgcttagtaaccgactttcctccggactcctgcacgacctgctcctacagccggcgatccactcccggctgttcccccggagggtccagaggcctttcagaaggagaaggcagctctgtttctctgcagcggagtagggtcctttcagccatgaagcatgtgttgaacctctacctgttaggtgtggtactgaccctactctccatcttcgtcagagtgatgaagtcctagagg

SEQ ID NO: 352874 - DNA, 298 bp, Zea mays
gccaactgaactcaacatcaacggtgaatagtgggtaggacttgacacccgcaacctgaagattgtcacactactgcgacgccaggtggtgtacggtgctgtcgataatcggatatctagaagctgaaagctgccgccgcgacttcgacgtcttgtacgggaccacttcgacggtatggagtcagatgatgaattcaatcagtttgtaatgaacgacctgattgatccgtcatcttcggatgatgagaatgatctgttttttgatgccgcgcacgtgatcgttgatgatttagttaat

SEQ ID NO: 352875 - DNA, 292 bp, Zea mays
gtgcagctgctcgcgcctctgttcctggccatggtggtgttgtggcgtacaatgtcgtgtgtgtcgcggtagcatcctggcccatagcagtccgcgtagtagagttcgcccggccgcgacctcgctttactcctcgcgccgttgctcgtcgagtcctaggcatctgcgcgcacgtcttatttggcgccaaacatcttcgtgccacacatactcatctttgctagctggccgtgcacctcactccgttgttctgagtccgccagttaccattgctcatccgcatcaagacatc

SEQ ID NO: 352876 - DNA, 268 bp, Zea mays
aggcaagggcgcaaccaataatagcaagtgtgatcatccgttgatccatcttgctaataaccctgcgtgcccttcgttctcgtctcgatcccgacgacgctcccttcggctccggcaaaccacatcaagtcgcgatggagatgaagaaggtcaccagcgcctcctcggccgcgttctcggccgtcggcgccgtgctgggcgcctccgtgctctccttcttcgcctactacctgcagtaaaattaaaggagggtcggagggagatgctg

SEQ ID NO: 352877 - DNA, 280 bp, Zea mays
gataaaataaaatctttcaattacctgcttccggcagcggtacgatggccgcttcgagaatggcgctcgtctcttgcgcccgccgcctcccgtccttaccctctccgctcaccctctcgaggcctcgcgccggcgccgtctcatttctggctgcccaaccgtcgccggcgacggaaccgagatccggcaggaatcttgctctcttctgttctttatcaccgacgtcgccatcgctaactgaggccgccgtagcactgccgccaccgaaggctgcggtgga

SEQ ID NO: 352878 - DNA, 285 bp, Zea mays
caagcatccttagaggagaaggaagatgaaatctctctgttgaggaggaactataatagtggtggttatggaaacaagaatgtagttggtactagtacagctggttcccctcatgaagagatgtcagaaaactatgaagaatcctcggcctcgagtagcatgatacagggttttgattctcggtcctcaagttcagtgaaatcttatcacagaggtggaaaattccatgaatcttctgagatcaaccatacagaggatcaggaggttttggtgactgaggaagag

SEQ ID NO: 352879 - DNA, 287 bp, Zea mays
ccttctccgtcctgccctgcagcagcaagccgtgccaggagggcacgttcaccaacaagacctgcaccgacagcaggtgcgcgtacgagaacgactacggcatcatgacgtccaccggcgtgctcgcgaccgagacgttcaccttcggggcccaccaaaacttctccgccaacctcaccttcgagctgcggcaagctcaccaacggcaccatagccggggcgtcgggcatcatgggcgtctctccgggacccctgtccgtgctgaagcagctgtccatcaccaagtt

SEQ ID NO: 352880 - DNA, 283 bp, Zea mays
cttcggcttctcccaaatcccggcacggcggcccgggacctctccctctctctcccgctggcgggcgatggcctcctcctcctcttcctcacctgcgcccgccttggccggggaggcgctacgccagaaacgcatcctctccagcaagctctacctcgaggtcccgtcctccaaggtcggtcgcgggcatcgtcccatctctagcttccaagatacgcgcgagctgtccttgtttcgatcccaatgttttcttgcaggcgccggtggtttactcgccggcata

SEQ ID NO: 352881 - DNA, 281 bp, Zea mays
caggtgccatgcactcttctttctagcacttttctcaacaatggttttacatgtatgtctttattttcctactgtacgccttacttcacagcagaaacacatgagggacatgattaggtcaatgtcaatacctggtacacattagttgcttctacatatttgatgaatgactgagttagtggatggatcacgaggcagtcacctaagagcagggatttccatgacctggggtctatggatcagctactaaataccctaacctctgagatcgtctgcactag

SEQ ID NO: 352882 - DNA, 243 bp, Zea mays
gctgaagtgaagatcgtattcgttatgcatctgcagactgcagccggtctgagcgcctccgttccaaatcccccgccccgtgtacagttacggagagctctctgcacacgcgtctgacataactccggaacccttgtggttgtggggggtctgaaggatctattttttgctaggattcatggtgcacaagttttgctctgtccaagtttggtttagaagaacaggctgctacggatgatgtac

SEQ ID NO: 352883 - DNA, 240 bp, Zea mays
gaaaaaatggtggtccaaggaagcaagctaatccgaaagatagcaagtgaagcgtttggccgggcgtttgggtggtgcgaatttctggatcatcagtgtcgatctcagtgtgatggcatcctgtccagtgaaaggactgcttggcagtaaacactactgcccttggttactctaaagacggacatgttcttaggttcatcgcagtttgtaatccagtacatgattaattgaagactagaa

SEQ ID NO: 352884 - DNA, 220 bp, Zea mays
gtaaggtcttggacgcagcaagagccatccctaacgacttggagccgatcaactcggcaactccgatgctctgccgagatcgcggtgcacgtcggggatctgttagccatccacaagctgctcatggctaacggccagcccccacaggcagctgatccttaagagtttggacctaatcgtatttcttatagccctttaggacttcgttgactgaacctgt

SEQ ID NO: 352885 - DNA, 158 bp, Zea mays
gcctgttgtagcagcttcgctttatactgtgcgtagaagttgatctgtgtaggaatataaaataatccagtggccaccaggcggacaggaacagcttgttgctccataacaccatgattattagctaccttgctttcaagcgtttcctctgtggatcc

SEQ ID NO: 352886 - DNA, 228 bp, Zea mays
agaaactgttcctgtggatggagtgtggaggatgaatgccagtaagaactttatattccgtcttttcagattctctactagtgaacaataattgcacttagcttttgtgtactggcattctgatctgccggattaggattgacctttggttgtaaggtgcaatgtgtttagtatgaactgacgcttgaactgtggtggtctttttaatggatctggcacctggcttcc

SEQ ID NO: 352887 - DNA, 221 bp, Zea mays
gcaacacttttcatttgttattcatgtatggtcaatgacaatgttgttttattaagtgaatttggtctgtttttcaaatgtgcataaacaaatagactaaatgttttagctgacctagagtttatctaaaagactctgataggctgtatgtatgggttctttcttgctgtaaatatggattggtaatgaattgagaaattaggtttgctctgtattatttc

SEQ ID NO: 352888 - DNA, 241 bp, Zea mays
agagcttggcgtttcataagactatttctcagagtgtgtagactgcaactgcgcctgggactgaagacctgcagaaaccaacgcatcagccgcatctttcattcgtcagtagcttccgggcttgtctgtgacatctgctgtgatgagaagccattctttttttttcttttatttcttcatgggttttgtactctggtatctacatcccactcggacaaaacgtgaaggttgacttggttgg

SEQ ID NO: 352889 - DNA, 226 bp, Zea mays
ggacgccaggggcgattctctgcatgactttgggcgtcgtcgccgatttgtcgcgggccgtgtgggggcgcgaccggacaaccagcgtgagtcgaccggcgacatgactcgcggcaaccatcgttacgtcgatcgtgagcgcgcggcggtgctgaagctcgacgccaagaagtcccaggactggctcaccccggagtagcgccgcgagatggacaagtaagctctg

SEQ ID NO: 352890 - DNA, 219 bp, Zea mays
ttcaaacgaaaagaaagagaaaatggtcactccgccgccctgctgaccgctgtccactccactccctcggcaagtccaggctcttctcacggcatgtgcttcagcggccgctcgggatttcctcttcctctgtgattgctcgttttggggtaagtagtgtggagcaatggccaacggaaatccgcggctcgctgctgcttcccgatctggaaacccggc

SEQ ID NO: 352891 - DNA, 208 bp, Zea mays
agcaagagaagcagaaggaataaagatgcagggttatgacatgtagatagtactgttactaggaaaaggtcccccttcagacatgttggagggctagttggttgtgttgttgttgagaatagcgtttttagtagcctttgttggcgtttatataacgagtaaggggtctggcaggatctcgcaacaaataaattatctcgcaagtcaa

SEQ ID NO: 352892 - DNA, 121 bp, Zea mays
aagatccttaggctatctgcactgccacatggtatctattgctccaaaagtgcgctgtaacaaatagagcaaaattgctccaggacgccaatcactacggcaccgtttgtttgggcttttt

SEQ ID NO: 352893 - DNA, 231 bp, Zea mays
ggagaggcgcctgttccggtgcctccgtcgccggcgatggcggcggcggaggaggaagtgaggaggggcgggtcatactgggcaaggttttttggtggagtgtaggctggctgtgtagcgaggaggctcaggagggtagctgggtactagaatggctatagtctactgctgtgccgtactagcagtatcctgtacatgtattttgtgatgtgtataccaaagtgccatgtt

SEQ ID NO: 352894 - DNA, 232 bp, Zea mays
gtgacgcgaagaacaccggattatttcctttgagctgtcgatgttaccgtttcccagcctgtgtcgtgataatcgatgtcaacgtctgctggatcaagggccagacagaaataacaggggaatgccgaagcactatgcccagagtttcacccttttcaggcgacagagaagggcggccatccacctacaactctggccgccctctgttttatgcagtttttacagagtcgtg

SEQ ID NO: 352895 - DNA, 224 bp, Zea mays
gcaagatgttcctccgcggggattcggtcatcattgtcctcaggaacccgaaatgagtaccctgtacacgtagagagtctgtttgctagcagtacgttgtgctattgggtgtaaggtgtatgccaaatgctcaaagcatgggagtgtaagtcgcggcagaattcgctatgtgtgttgatggtgggggattcagcttaaggcaggatgctagggctggattttgc

SEQ ID NO: 352896 - DNA, 220 bp, Zea mays
aggcctaggcagctcaagaccaatgtatatgtaagccatgcgaactgttcttgctcgccccttggcctctctccagctgtaggcctgtgtaaatgtatgtgccggccgcagtgcatctgccctgctgccgctgtgctggttgcttgatgcgggcctgatctttctgtttctctcccctgtatgttgtgcattataggtgttcatatgtattgtagcctgt

SEQ ID NO: 352897 - DNA, 163 bp, Zea mays
attttattgagaatactgtagtccaatttcatgtgtacatttataaattcctgtgaagttccatgtagctgttaaagagttccccatagctcctgaatctttggtactattgtgtatttttttttactttttacaatagtgataacgtggcccatttcgaagc

SEQ ID NO: 352898 - DNA, 201 bp, Zea mays
gaattttagttcagtaattgctatatttctgccataatagttcagtagtgcctttggattcttggaaatggaaccactttactggctagcaattcaatatgggctgatttagtctgtgtcgttagcactatcttcttgaatatgacaagtggaagtgtgtttttcttcttctaaaagatagaatgcagatgcattttagcc

SEQ ID NO: 352899 - DNA, 164 bp, Zea mays
gttggagggcgtggcgtggtggagctttgttgataacatgtattttgtacgtagtagttgttgttagcagggaagggagtagcttattttgcatagccggggatttggcaaatactatggcggattgacggcgtggctgtgaatgcgatcgtggtgttgcttgc

SEQ ID NO: 352900 - DNA, 155 bp, Zea mays
gagaactagtctcgagtttttttttttttttttttttgtgaaatctttaatcttcatttctctcctcgctctttacctctcctcgcattacatgtacagtacaacaacatatgtcgaaacgaaccacacaaacagtataccctacagcagcggca

SEQ ID NO: 352901 - DNA, 230 bp, Zea mays
gtttgtgcaaaaacacagaagttgccaatgaacacgaggaagatgatgtacacatagaatatccaactactggcgggtctacttatcaaacagaagtttcttctcatgatttggagggcagcttgacagaagaattggtcagtgaaccaggtaggcatgcggctccagatgatatctataggacttcacatgcagctgaggatagcattcaacatctagaagtggtcaaa

SEQ ID NO: 352902 - DNA, 224 bp, Zea mays
atagatctggagtttttcaggattcaaacagtcaggcacaggacacttgtaagaggtctacgtttctgaacatgttagtttagcaattgatagattgctttattcttgtaatttccccggtcaaatgtgcaaggttatttgattgtttgattacatgtcatgccatatctgacaaaagctggaggacagatcaactgtacagattgtaactagttgagtgcttt

SEQ ID NO: 352903 - DNA, 223 bp, Zea mays
gcgacgtcgcgcggatcagggctcgtcggtgcctgcgccacctcctcctttgcggaaagcaaaacttcagccggttgtcatcttcgcccacggcgccggtgccccttcctcctccgactggatggtccattggaagaagatggtgcaggacgcattagatgctgtagccgtggtgacctttgactacccatatatgtcgggtgggaagcgcagggcgccgcca

SEQ ID NO: 352904 - DNA, 216 bp, Zea mays
gggactgggtggcactggcaccggcggcggcctcgtggtcgtggggcggcacacgcgcacagctgccagacgtgggtctgtggggccagcagccgacgcccgctcacgttcgcggaccggtccacgctctgccccgtttctagaggcagttggcagctgcatggcgtccttgtgcttggcgcgtgacgctcttttgcccggacaccgagacggctc

SEQ ID NO: 352905 - DNA, 228 bp, Zea mays
ggccaagggggtgttcgacgtcgaggcgaactctccggcgaggtcaagtaccaactgcacaccacgtggtgcaggctggaggccaagtgcccactcagtctgcagctcgggtcgccggacggtggcgccgccgtcgtcttccagaagacaacctgcgaggtgctccgatcatcgcagaagggatgctaagctgttcgccgctagccgtcgctgtgattttcttttgtt

SEQ ID NO: 352906 - DNA, 211 bp, Zea mays
cgccagaaggagctcatcctcatccgcggaagccaccgcgacgccgccgcaggatccgccgccggcgggccgaggccggagctcatgttccgtgactacggcgtgtgttagcccgctgcccggcaaaccggcaccgaggaggctcgcgtcgtgcgttgcatgcatggagctttagatccttttgcgaaattctgccgtttctgcctttttt

SEQ ID NO: 352907 - DNA, 226 bp, Zea mays
gagagtccggtggtctctgcttcggattgaaggcactcacggaccactccaggaaagcgggagctgctggtacctgcctccttgtacatatgtatctcaatgattctatggcggtcgcgctgcctgatttgcccttgtatccatcctaccacacggggagctgaattgtagggataggggtgtcttagattgtacttactatttgttggtgccagtctccgattcc

SEQ ID NO: 352908 - DNA, 217 bp, Zea mays
tagtctcagtttttatttttttttgttttttttagttgaaccatatatcattaaaagatggatcatttgttaaaagtacccaataccaaggctacttaaaaacataaagctagctagcataccaacctaagggttcatcataatctcaccaactattgcttgcttgaacccaatctataagcggaggcactctcaaattttattgatcccaacagtt

SEQ ID NO: 352909 - DNA, 224 bp, Zea mays
gagcaacatccactatatatttctgaaatttggagatctatggtctgtcctgtatttgtatatctaatatctcattagttgtcaccactttcttagaatcatggacatgaaaatgcggtccgagtcttttcagtagaaattttagtacaagaagaggttctcttctgctttccttttattggtcttacaggttagtatgggtgtaatgccatatcaggcaagga

SEQ ID NO: 352910 - DNA, 223 bp, Zea mays
gagaagttgagtgagatgaaagtcgctgctgccatggctcaagtggaagccatcagagccagcgagaacgaggcgatcaagaaactagaagctgctcgcaaggagatggaggacatggagttggcaacagaagacgccctaaagagggcagagatggccgaggcagccaaaaaggccgtggaaggtgagctcaagagatggcacgagaaagaacagaagaaaa

SEQ ID NO: 352911 - DNA, 216 bp, Zea mays
gaagcggttgaagatagtaccctgttttgttctattcagtcattagtgaatgctactacttaaagtgcttgttctatgttttttttgcggtaatggaaatagagcccagacaaacattttggtgtcctactgtttgatgccttgtacttgtttgcgaactcagctatctaatgggttattggattcttgctcaaaaaaaaaaaaaaaaaactcgag

SEQ ID NO: 352912 - DNA, 222 bp, Zea mays
aggaacccgccgcggccgctgacgcggacgcagagtgcagccagctacgacaaggcgtcgccgagcgtggccgcgccagctgccgggtgccgaaacaacgtggagggcgccggctaggaagggaacccgccgcaggtgctcttagggctccggaccttcttctccaagaaggtgtactgatcagcagcaagccatggcattgtactttgtacatacaaattc

SEQ ID NO: 352913 - DNA, 222 bp, Zea mays
cccaacggaagtaaaaccaagtcgcgagattccgaccggcgccgcgccgccgcaaggtcaagaagaacaagtccgccgctgaggccggtgcccagaacgacggcgggggagcttctagctccgacgccaaggagaacgcagatcctaaccccgagcccatggtggaggtggagatagagtatgtactggagaaggccgagctggacgatcctctcctcgatg

SEQ ID NO: 352914 - DNA, 219 bp, Zea mays
gatgcggctgatggcatgtggacagtgctgccacgattgtccgcgttggatgcatgcgagagcttcaggtggtttggacatgtcttggagccaggagttgaaatcttgatgggactacgttggtgaggctttgctcttaacttgtagtatttcagttgagtcctggcagattcagctttatgctccttgagtcttaatacatcccgatgaagatttcat

SEQ ID NO: 352915 - DNA, 216 bp, Zea mays
tctcaactacacggcctgcgacccgctggccaacgcgggcgccgcgcacgacaacgcggcgctccagtccgtgctcgccgcgctcgacccggccaaccgtaccttcctcctcctcgacctcaacacgcccttcgccgccttagtcgacggcgcggcggcggcgaccgcggaggagaggttcgcggagccgaggcggccgtgctgcgagatcttcag

SEQ ID NO: 352916 - DNA, 230 bp, Zea mays
gctcccgcgccgcattccccctcaatccacttcatagagccgatggccatgcaccgcgccgccgcgctcgcactccgccgcctcgccgctgcagcgacggtggcggctccgagacccgtgtccctcctcgcccctttccgtccggtggctgcggcggccgccaccaacaccggatttcttctgctgcctacgaccgctgcagcagctgctgctttgttcacccggcgcgg

SEQ ID NO: 352917 - DNA, 226 bp, Zea mays
gttgcccctcaagccgttctacaggtttcatctctcgtttacgtggcctgagcgtttcagctcgtgcgccgccatggagctaaatcatctccatcagattggagacgccggacagggcaccaccaccaccaccacgctgggcacagtcgtccccgttccatcgagcaggcttgaggcgcagggcataactgatgcttcagttacctgaataatggggcaacctatt

SEQ ID NO: 352918 - DNA, 208 bp, Zea mays
gtttagttgtgcttttgttccttgtacttgagggtctaggggacaccaggctgctgtacgcttgcatcacggacaagttcataaattgtgtttttgttaccatgcattcttttattccatctatgtgcagctatatgaagcatgttcttctgtcagtatgttcagagtcctgataaggcctcgttcgtttgaagaaggaccaagggaa

SEQ ID NO: 352919 - DNA, 224 bp, Zea mays
gcacggtggcgtccctcctcctccgccccttcgggccccacgatctcctccccggagatgtgcccctcgtcctcgaggctcacgacaacgccctgggtgatcccgtcgccaatggcctcgcccgcagcgacctggacgcgcgcctgaggcaggccgcggaggcggcggcgcgggcggcgcacgcgccgtacagcaagtgtccgtcggggttcgcggtggcagac

SEQ ID NO: 352920 - DNA, 221 bp, Zea mays
ccagtcgatccacgcgtgcccgctgtgcagtgcagcccgcccgccttatcattaattaacatggagggaacattgcatcatgatttctctttttttcggattatgtggatgttttcttctttctttcgttcttcttccattgacacgtgtgcgttaattctttgtatgttgattttgggatttggttcactgtgcaaattgtggtaaagtcatcagggaaa

SEQ ID NO: 352921 - DNA, 222 bp, Zea mays
accaaccatggcctcgccaccaaggaccttgccaatcactaacgaggatgttcccaagttcacctttggttcatccagcatggccaacaaactcgttttctccttcaactccacaagcagttctcctggtgctggtggaacagacccaaccttcaaatttggatctgataataagcgagagcttgtgttttgatacagtttttttttgatagacaccatgcc

SEQ ID NO: 352922 - DNA, 172 bp, Zea mays
gatgccatggacatatataataatcgttctattatataaaaaaaaaaaaaaaaaaaaaaaaaaaaaaaaactggacggaagcaatggggacactggagccaattcctatcatatgtaccctgtaagaactgggatgccatggacatatataataatcgttctattatagcag

SEQ ID NO: 352923 - DNA, 99 bp, Zea mays
aaattcagttttgttgtagcacccctgcttcgtgtaggttcatctcacagttaagattgtgatggccaaggctagaaaactagccatcatatttgtttg

SEQ ID NO: 352924 - DNA, 229 bp, Zea mays
aagaaacaaagcacactttttaagtaccaaaactcagtttaaaacaaacatgcttttacaacacctattggttcttggcaactcatgtcaagtgatctgcagtatatgacacctccacaacactggacgacacaagtgtcatcgctgttcctatgaattaatcctgcaacaacctagctaccacatacagtagagtatacctttttctctaactccctcatctggtttc

SEQ ID NO: 352925 - DNA, 224 bp, Zea mays
gcggttcgggtgggaacgccttcgagtggttccacaggatgaagatgaagggcattgagccgaatgagatcacgtaccaggtgttgattgaggctcttgtgcaggatgggaagccaagacttgcctatgagatgtacatgaaggcttgcggccagggtcttcagcttcctgcaaagtcgtatgacaccgtgctggaggcgtgtagggcttatggttccgtagta

SEQ ID NO: 352926 - DNA, 230 bp, Zea mays
gattggaaaagatgaaaatatatagatctcttttgggttcattcatctcgcacgacggagatgatacgagtagatgacaccgaaaaaacaggtccacatacaggtagagagattttgcaacagaagaaacacgcggagaccgacacaacccagccaggcacgacgacgccagaatcacgccccctgcatcatcatgcgcgagaagtcgtggaagcagacgaagccgtcgc

SEQ ID NO: 352927 - DNA, 236 bp, Zea mays
ggcacgagcgttaatgtcgagctcaaattcaaagctcgttgattacaatccagttcatactcccactagtccaatccaatgtaaatgcagagttactgatactcggtcatcacgggctagtgctcatgccaaactgccagcaccttaattggatggtctggctacccattcagcatgacagggctaggttccttcttccctccttgtacggtttactctgacaagtcacttgttgt

SEQ ID NO: 352928 - DNA, 217 bp, Zea mays
ttgtgagagagagagaactagtctcgagttttttttttttttttttttttttttttttttttaaaatcaaatgaagattaactgtcggcaacccagtttaacaaacaaatcgcaagtacataatcgtgcaatctagtcgcctaacccaccccggtcacacctttgtccgggccgtgccccgcaaaatggaatctgatgataaacatgtaaaagcgca

SEQ ID NO: 352929 - DNA, 223 bp, Zea mays
gttgcgatgtccttgctgagccgccgatgagctctcgaggacgtacggccgagccatggccgccgccgccaccaccttgcatttgtggcgtggggtgcggggagagaatcaatcattcgagatgcagaacagcagaaggaaggaatccccggtcgcttcgagaaggtaaaaaaaaaggagaggatttctgttagggtttggtgtccgccgcctgccaccttgc

SEQ ID NO: 352930 - DNA, 225 bp, Zea mays
ggcaatacagcataggccagccggatcgttatcttccctaggcgactaggcaccctctccaagcatcggttttgcaggtctgaaggtaaccagctccgccggcctcggagacatcgtccacatcgacccaaatttcttcagataccttcgcttcgacttcgtatcgatggggtggcttcagctagaggggcgaacaagcgggagccgtcagccatgtgctaccaa

SEQ ID NO: 352931 - DNA, 221 bp, Zea mays
gaaacaaggagagaaagagagagagaagggtgcaagtgcaaggattccacccatccatcacactccatatcagtagcagcaagctgcagcctgcaggtctagcaaaggtagctacgtaccctcttgtttgcaaggttccatggctatagcaaagccatgcatccgggccggatggatggaaggcccccattacagtggctagctgcctctctcaaccagtc

SEQ ID NO: 352932 - DNA, 218 bp, Zea mays
agagaactagtcgagtttttttttttttttttttttttttttttttttttttagcagcaaataaagctccatcataataggttcacaaaacgactgactgatttgtcttagcacaaaactctggatatagctagaaaccacgatagatggcctactgaagtgcaggtttccaagacgagccattggacccatggcaaacggtgacgacgaactaggat

SEQ ID NO: 352933 - DNA, 228 bp, Zea mays
gtttcttgtaacgtttgtttcagacgcagcaagcagacacaagaaaacctgcattccggtggctaggccaggcaaagcgaaagcaagataacaatgtcatggtttctgtacctccatcgatgaaggcaatgcccaataagagagcatttggtactgatcttacaaacattgacaataagcgaggcaagttagactcagcagcggagaacaaagtcaagctcatgcagg

SEQ ID NO: 352934 - DNA, 224 bp, Zea mays
ggatccgcagcatcgcatggagccgtcgtcggagtcgccggaccagcatccgtggcccatataccggcctacgcccgtgtaccattcgatgcggccctgcaacgggcctgaccagggcgccgggtccgaccaagacgggtccaactccaggtgattgggcccaccgcaccttgtagaagcttctagttctaattaatcaattgccatatcggcaactaattatt

SEQ ID NO: 352935 - DNA, 225 bp, Zea mays
atcactggctcccacttcatctccatcctgtagtaactctttgatattaaattcatggtgaagaaattacccttctaggtgaatattgtccgggatgtaaaatgctacttctatatccatgtccacatgcagctgctgaacctcctcctcggaaacatgaccaaagcttccttcttcatcgaagatctaaatatcatcattatcttcaggaaaaggagggttata

SEQ ID NO: 352936 - DNA, 217 bp, Zea mays
caaggccgacgtcacggtggtcgccaagggcgacgacgtctcgctcgacaccggcaagagcaggtcccgcgtcgcgtccaccgtcgtcgacagcgtcccgttctgcctgctcaccatggacaccctcctggtgccgccggagctctacgtcggcgccccggaggcggcaccggcgccggcgccacgtgacgcgccacaggggtccccgctcgctgcg

SEQ ID NO: 352937 - DNA, 231 bp, Zea mays
gcggaggcgccgcctgggcgaggaggagcgcgcggccatcctgctcatggcgctctcctccggcgtcgtgtacgcctgacttggctagcaaccgcgccggcccccgagacgccgcgcccaaaggcggcgaaatgagaggagggcccgattcgctggacgtgcggcatgatctgagccccagacagatccgtccgtctggatctatgctaagttttcccggctaagtagtag

SEQ ID NO: 352938 - DNA, 240 bp, Zea mays
tgaagatgaatcttgatacggcggaggcagaggtcgtgacactgagtgaggacaacagggctcttgatgaagagatcaaaaggctgctgagtttgttggagaaggagcgacagtgccggtctgaaagaaagaaatctgccagtacatccaccaagaacaagcgcaagtcgtctagcttgagggatggcaacacaactggcagggctcttgatttcggctgtgcagattcttcaaggcatc

SEQ ID NO: 352939 - DNA, 237 bp, Zea mays
accaaccatggcctcgccaccaaggaccttgccaatcactaacgaggatgttcccaagttcacctttggttcatccagcatggccaacaaactcgttttctccttcaactccacaagcagttctcctggtgctggtggaacagacccaaccttcaaatttggatctgataataagcgagagcttgtgttttgatacagtttttttttgatagacaccatgcccgcggatctgaactg

SEQ ID NO: 352940 - DNA, 235 bp, Zea mays
ttacaggctgaagaagagtcacgagcaaagagagcatttactatcctttgtgatcttcaccgtcggagggtctggtttgatgaacgcacaacaaatgcaatatgtgatgcttgtttccacccttcctctaggattatgatagctgctatttcatttcttcttggatatgaaaatgctccacaagaggatgatagcgacgcatcaagcagtgaagatgaagcagatcaaaacccac

SEQ ID NO: 352941 - DNA, 232 bp, Zea mays
gatacttgctgtacaaagatgtcaataggaatccattgatatgatcaagaaaccagaacaaggagggaataaatcaaatgtcgagctgtgccaggtataaagaatttcaatgggagatgatcacaggaatgagaaaaggagatcttattgtatgctgaaaaatcttgaaaccaaaaataacgtgggaagttgaatgtgtacttgtgatgtccataactgtcaatctttggtg

SEQ ID NO: 352942 - DNA, 228 bp, Zea mays
cgcgcttcctgtgccgccgccgccgccggggaccgacccaaaggtcttggcctccttcaagcaagcgcaggttttagcgggtggacccctggtgcaagcacgaaactttgcggtcatgactggtgcgaatgctggcatatcttgtgtcatgagaaggataagaggagtggaggatgtccagggcagcatggcagcagcttttggttctggggctctattctccatcgt

SEQ ID NO: 352943 - DNA, 220 bp, Zea mays
gcgagaggctcacacgggctgtgcattcccctccgcgtgttactccgcgccgccgcctgctgccctctctcttctcagctcgggttctctcctatcggtcggcgatttgggtgggagagcagtgcggtgggtgggtcggcgagcggttctctccagagagtgctccgcccgcgcacgtcgcatgaccgacgctgcggctcgtacgcctcgtcgcacgacc

SEQ ID NO: 352944 - DNA, 134 bp, Zea mays
gaatagtggagtaataataatggtggtggtgcagtggcggtggttgagggcccgaaacgatgaacagatgggttggattgggttgggtgtatgtatgtgtcacacgcaactttggacagaactattatactagt

SEQ ID NO: 352945 - DNA, 214 bp, Zea mays
tggaaactgacaccacaaattatcgacctcaaacaacggcatctccgctatttcggcacctactccggtggagtccacctccactcctccagcgagtcaccactgggcactggccaccgccacctcggccccgctcctcacgttgtcatccgtccacactgcacccgctcctctccgtctccccaacagtttcattcctcgagggggatcgctt

SEQ ID NO: 352946 - DNA, 237 bp, Zea mays
gagtgatacattctgctgcatgtggtcttttgcatctggagtcaatgtgaacaagcagattgtcgtattgtctttctcgtaataaatttgtcaatgttgagcccttaggcttgaattgtgggaccctttgttcgttttcctagactctgatgctgtatgcaactgaaacgagtaaatctatgatcttaaggctgcagtatgttcttgtgttaaaaaaaaaaaaaaaaaactcgaggg

SEQ ID NO: 352947 - DNA, 249 bp, Zea mays
gggcacgaggagacgcgcaggccgaccagtcgttgaccaacgacgacagtcagctccaggacgcaggcgcggggaagtacaccttccctcccggttggtgcgacgtttcgagcatcccggcaacgggctggggcgactgatcagacccgcaaccgcaaccgcccctggcaggggggtacgttgggagaataactgaggctgatggcctttcaccctccttccatcaagcctccactcagctcactgctg

SEQ ID NO: 352948 - DNA, 234 bp, Zea mays
aatagttgatataatatacatgaatagttcttgtatgagcatgttcagatgtgtctttgagatgttggaggaacacaaaggagaaaatcgctttagtcacattatgatcaacatgtcgtgttagtatattttttatatttgaaagtataatgtgttatctaactataaggtgatcttcgtctctattggcattatgataaaaaactagcaaaaaatgtcgtgagtctaatgtta

SEQ ID NO: 352949 - DNA, 229 bp, Zea mays
cggcaggccccgcgccgccgccgccgccggtgccgccgagtctgcatgcttctggtaggactgcactgcacaaggtttcgaagcgttctttgcttcgtctcccttggttggcgtgcgtgcgtgcgtgtgtgtgaaagtgagaaggtgagcttactttagacatggattagccggtgcgtgtgttgtttgtttgtttgtttgataacttggactgctgctccgtggagtg

SEQ ID NO: 352950 - DNA, 229 bp, Zea mays
atttgaggaagttggcaccattaactctcactgacgtgggacaaatgcagggagcaaatgacttatccagcggacatgggtaatgtaaatgcaacaaaagagctcaggcgtccagcgtaaatgcaatcttgaagtaacttgaataactaccttcctcgtgcattctgctacatggttggcttctgtagatgcgtccgtttacactttacacagcgtagaacctgttgag

SEQ ID NO: 352951 - DNA, 215 bp, Zea mays
gaggaatccatccctggtcttgccgatgcttatgagtctgcttgtatggggaaagtgacccggggcctatgactggaatgtcgaggagaatttcgaaggtttgtgttccctccattgtgcatttgtgtaacctcattctactgatctcgcttcaacagaaaaattattccactgatgaactatcgaagacgaaggcagtttcatggacattagct

SEQ ID NO: 352952 - DNA, 206 bp, Zea mays
gacaagtttaagcttggagagattacagagtccatgcaagaattcattcgcaaaatgtccagctttgagggagccgagattcctgcagacaggagagatactgaatcagtggacctagatgtcaaccagttcttcaaggccataaaatcagttttaggtggaggttcacaagagcaagctgacagtgatgatggatttgatagaaa

SEQ ID NO: 352953 - DNA, 186 bp, Zea mays
aattatagccacgtatcatagtttcatgagagcacgcaaatcctacatagcttttgtctttaccatcgtataacaaatatgtacttatacatacagtcttcgaaatttaccgtgggatacatggatggtgtgtatgtatggacgcctttgtaagttacaatcacctaatctaaacacacggcaccg

SEQ ID NO: 352954 - DNA, 222 bp, Zea mays
cctgttccaagtaaaccatctcaaggagctcaatgtcaccgctgatcaccgacagacatcgccatggttgaagcgccgtgaatcaatcaccaatcagtatgcttgccgatgagtcctagctagaaccctgtccacggctgtgccggtccctggacgccgcgacccgcgggtgccacccggcctgcagggactgcgtcaagtacagcctcagcgccgacacgc

SEQ ID NO: 352955 - DNA, 222 bp, Zea mays
aattgggcagcctatggtcgaaattgtggagcagtgaagcactgggcgtaaaaatgggttgtcctgtgctcctagtggagtagtggttttgaaattgcctttttgtgtctcagggtgtaacacgaacacgaccatggtgttcgggcaggattctcataggtttgcctgtgttattaggtatctttaaattgccgtcagtggcggaggacaaaagaaaattaa

SEQ ID NO: 352956 - DNA, 220 bp, Zea mays
ctaactgtagcagcctgcaatacgtgaatatgtgtgaggactaaggagatgacgtcccctgccgctgccatagcaatcaccacacctgttaattgtcattccagccacgtgtatgtaattctgccaccatttgttagtagagtctagctctgtacataaattagactctttttgtctacatcatatcgccggcctaagttatcgagacgtattttgccaa

SEQ ID NO: 352957 - DNA, 136 bp, Zea mays
tgacaatcaaggtggagataatggctatgataatcaagacagatatagtggctatgataatcatagtgggtatggtggtgggtatggctataaccaaggcagatatgggaactatcaagaaaatggtggatataac

SEQ ID NO: 352958 - DNA, 223 bp, Zea mays
gccacgtgtgggccgacgtccggagcgccggcgagcccgtggcgcctgccgcggacgccgacctgaacgacgtcacctgccgcgcgatccggcgcgacctcgccgcggacggcggcagcacgtgggggtacctgcggcagcgtccgcggcacggcgcggatgtagccgacgcggtcatgcagatcgagcggctgctgttcgtggacctcgtcgcggacaccat

SEQ ID NO: 352959 - DNA, 217 bp, Zea mays
catcctcatgaatcgctgaaaaatattccatgtaacagcaagcgagcaacttgctttttagtcagtttggttcccacggacacagaagaagcacgtgtagagtgcctcgacaacttttggcttcgtactctggagaactcgcttttatcagtctttctttctttcttacacacaagtagaagcttctaggccactttatccaatcacacattaatac

SEQ ID NO: 352960 - DNA, 221 bp, Zea mays
tggggctcccccgccacgatgcccgacgacggcgacgacgagggcttcggtggcaagcggaagggcgccggcatccgggtgctcggcgacctgtggaagaggaaggggagcaagtgaaggcctgccgcctgccgcggaatgggacccgtgtcccaaatttcgcaacggtgagctcgctcagcccgcccgcttgccagcttgaacaactccatcccttgcac

SEQ ID NO: 352961 - DNA, 185 bp, Zea mays
gttccaggtctgaagtggaccatgagtttttggaagggaaatcaagcgtcgagtgttatagaactatgtggggggacgggatgcacaatgttgtgattcgtttatttgtttattatgtggttttgtaatgtcatatttgtaacgctgttatatttatataattatatatgtgaaatttgcactgt

SEQ ID NO: 352962 - DNA, 227 bp, Zea mays
gaaacatatgcgtgggatccaaaccactatgcgcaacacggtgcttatggttgggatcctagtgccagtgcgaattatgaggatggaacacagtatgccgcatatgaaagagggcaaagtgcagggtatgttcatgcgcatggaggggagcatgccagtggatatgaccatgttgcggcagtgccatatggagtagattatactgctggaggttatggtcatgaggt

SEQ ID NO: 352963 - DNA, 239 bp, Zea mays
gtgctccacctgctggccttctccttcagcccgccgctggcgatcctgcgcgtcgaggagggcagggcgttcgagcagacgtacatggaggacgtgctgctcgacatgcagcggtcgcaggaccatgagccgccgccatcgggcggcgtgaaactcatggtggtgcctgggttctacgtccaggacaggctgctcaagtgcagggtgctctgcagttacatcagcggctagatctttgt

SEQ ID NO: 352964 - DNA, 170 bp, Zea mays
gttctctctctctctcttttttttgttaggaagatgctcatccggttaatgtaggataactgacacaagataatgtaactcaaaaactcatcgctggtttgtaacatggatgaactcggaaaatgtgtacatattttggatggatttgttcaatctttcatttttttaac

SEQ ID NO: 352965 - DNA, 127 bp, Zea mays
gcactgtgactcgtttggtgccgttttgtggtgcggatcagaatccccactttttccatggtgtcgattgacaaagttaggagcagtaatcctggtgccacacgggtcattcttttgtagcttcttg

SEQ ID NO: 352966 - DNA, 225 bp, Zea mays
ctgtgtacctaatccattttcaagcagctaaagtagcttcaaactttggggcctttcaacaccaaggcctccccccctctaaatgcaaacagggagctacaactctatcctcgttacacgtggacatggacgacaaaatccagttctccaatcaccctgaggtcaatcaaaacaacaaaactagctagctagctagatctatctttcaccagcaccatctgttcc

SEQ ID NO: 352967 - DNA, 232 bp, Zea mays
gcacttggctcgaccctctggccgcgatccaccagcagccgtcggcgatggctgggcaggtcggcttcagccatctggttggggccggcggcggttcatggggttcctcgcgccgccggccgcggcccagcggctccagggccaggaggagcaaggaagcgaacactgagagagtgatgaacgtacgtgcttaactacgactacgaggtaaggtgtgcgagcttaacacaca

SEQ ID NO: 352968 - DNA, 228 bp, Zea mays
gcgaagtgtgccgtggtgacgatggcggccgtggtggtggcggcgacctcgtgctctgtaccggcggctgcggaggaggccgctttggccgcgagcggggcgaagtggctgctctcgaggaatggcacgaagacgaggtggagaggcgagcggggcgaggtggctgcgctttgtggtttctgtagttctatatgcattaggtggcactagggtccagattcagaatat

SEQ ID NO: 352969 - DNA, 243 bp, Zea mays
ggtcaatgctagatgatctgttggttgaaagactagcaagctgtccaagtggaactacgacggatcgagcaccggccaaatcccagctgacacggtgtggacacgagttctgcgctactcctgtggtcattgtttggagaagttttcctaaagcttctttatgttttcatagtgggcattgctggagtgatctcatttgagatgattttggcataactcctaaaagaggaggcgcttctgctc

SEQ ID NO: 352970 - DNA, 242 bp, Zea mays
ggtcaacccgtcacagtccgttcgttaacctcaaggtcaagcagctagcaatgctctcctccgaccaccctcagctggcaaacttcaaactggagtcaacgctcatcagtagtgctgattattatcctcccctgatgtcgtacgttatttttttgtagactgtcactcatccatcactaccccttaattagatttattattagcgtatatgcagctgatggtgcatgcacgtactctgtgat

SEQ ID NO: 352971 - DNA, 260 bp, Zea mays
gctgcgcttgaagggcgccgcgttcgacctgtccaaggagccgcagtacggggtgacgagggccaagtgcgccacgtggagggcgcgggcctgtgggcgccgctccggtggttccggcagaacgtcgtcacagcctgcctgctcgccgtcgccgccgcggccttgccctccggcaagttcatcctctgcgcctaggatgcatggatgcggggtcgccagcttctttaaggctcgttcggttcctccggaatgagcgcctg

SEQ ID NO: 352972 - DNA, 183 bp, Zea mays
attgcaggaggctctagctagggcatgtgaactcagaaggtgtcttgtactcacatctagttcatgtctactggatcggtcatacaatgagcttaatggatctattctgagagagcctcggcgagctgacatcattacagatactgaacctgaatggcaatcatcattcgggtcatgttccaa

SEQ ID NO: 352973 - DNA, 232 bp, Zea mays
gtttgtattcttgggcagctgtgcataatgcatggtcagaagttgcagtctgtaatccgtagtctctgctagggcatgtgaactcagaaggtgtcttgtactcacatctagttcatgtcagctcttgagcagtcatgaatctacatcttgtaatttcagagtagcttcagcagttgtcacatgtaactctataattgctgaatctacatcttataatttgcactcttatggt

SEQ ID NO: 352974 - DNA, 232 bp, Zea mays
tagtctcgacttttttttttttttttttttttttaacaagcacgatttccgattccattgtcaaagcaaattggactccgaagtctgggtactgggaattgggatgcagtataatctaccagatccctgcccggaagcatacaaagcagagaacttgctgacttgtaaaatgatcccctgcccgtaagcacgcagagcagaaaacttgctgacttgtacaataatcacccag

SEQ ID NO: 352975 - DNA, 201 bp, Zea mays
gagacaggcgcaagaagcggaaggccccagacatccagcagatcatggagacctatatgaatttcagaatgaagcaacctcgcgtcaaacaacgaagagcaaaggacgctgaccagttcacgatttcaaggtattagcctctgatgttttcaaggaccctgagaacagggagacctttctttcgtatgaacccaggctgcg

SEQ ID NO: 352976 - DNA, 199 bp, Zea mays
gggatcggatacagatccacgaccacgacgctgagacgaatgcacctgcatgcgtgccaccgacacaacacaatgcgtgttttcgtcctccaagtttttacttaattttccacgagcccacgatcgatcgaataaatatagcatgtatcgctatactatcttgcaaattaacctatcttgggtggaataaatgaaattg

SEQ ID NO: 352977 - DNA, 200 bp, Zea mays
ggttcatgcactctgatacccatctctgattctgagggcacaaaggaagagtgatcaagacttgatttaggttgctgtgtgaaatcccgtgcttgttgactagggcgtgagcagcgataaggacgagccctgtcgccgccgttgtacttaactgtaattgtagtgccagtgttcttctagctgcctttctttgagggtgt

SEQ ID NO: 352978 - DNA, 215 bp, Zea mays
ggctgaaccaggagattgcctgcgcgcaggacgccctgagacacaagtcctcctcctatccgacggtgaccgtggaaaccctaggagtgcaggggttcctcgtcaacgtgttctccgacaagagctgcccggggctgctcgtctccgtcctggaagccttcgacgagctggggctcagcgtcctccaggccaccgcgtcctgcgcggccgactcc

SEQ ID NO: 352979 - DNA, 127 bp, Zea mays
cacaacttgctcagcgacttccacttcccttatgtctcctacgttttaggaacaaatacaatagctgtgcaggctgtaatgcgaaccactggatgggtggatgttttgatagttgcattgaatacct

SEQ ID NO: 352980 - DNA, 108 bp, Zea mays
gtgaaaatggattagtaggcacctaggtgtagctgttagcacttctagggggtgtttgataaagtggctaagtcccttcctttcacatccaatgtttgatgctagatt

SEQ ID NO: 352981 - DNA, 235 bp, Zea mays
ggacacttgcgatgtgtgtggccaggaacgcgaaactgctgatcacattgttctccgctgccactttgccaagaccttctggcttgcgattggctttcacatccccaatgacatgactgtgcaaaatttgcaccagattgaacggccctcaaacctcccgcaaaatgagttcagctcctttgtcatcctatgttgctggcagttgtggaaacgcagaaatggttttgttttcagg

SEQ ID NO: 352982 - DNA, 99 bp, Zea mays
gttttaacgtggcgcaagaataattctggttctggatgtattctccgtacacaaaggcgtgtctgatgcaatggtgaccatcttgcggttgcgtgtttg

SEQ ID NO: 352983 - DNA, 234 bp, Zea mays
gttacatcactaattacaatgcttcttactggagggagcctttctgctggtggtctgagacaggagccacaactgacggcgtgcgagccatttgatgtctatgcgaacccttctccctatgacgtgttcatagtattgcccaatgtactatatatctcctcccatttcacgttatcattatgtacatttcggtattaaaccttgttcgtttgtgtcggattgcacctgtaatcg

SEQ ID NO: 352984 - DNA, 245 bp, Zea mays
gcgagtttgggttgaatccctttggagtaaataaacgaaagatggttgcacggaggaatccatccattattgaagaaggtagtggatctgaagaaatccaggtggagcgtcctcgccgctcccagaccggtcatggtagaagccaagctcggggagatgttggtgggagtagttctcaacaacctgaaatcgtccatgccgctcgagaagaacctgtccctcagccacctctccatccatcttca

SEQ ID NO: 352985 - DNA, 202 bp, Zea mays
ggggctgatcgatgcatgcatggtttcacattccattctccggcagcagggtaaatcggttgctgctagcttcattcatgcatgtgtgtggtgcttgattttcttttttggggtctttaattgtcgtccgtcgattattgtggtgcagtggagatgtgtctgtgctgttgctagcatccttttcaggatgaatctaaaaggt

SEQ ID NO: 352986 - DNA, 246 bp, Zea mays
gaacattgtggaggagctcaaacttgcaagggacatttatgagcatgctgttgttttgagtgtgaaacttgaggaccaagatgcgtctgaacgcgatttctgccagctgaagccttattacatggatacatgtggcataattcccgcctcgccagaggagtacccaattttgggactcaatcttctgaggctgttggttcagaatagaattgccgaattccacactgagctggagcttttacctgc

SEQ ID NO: 352987 - DNA, 248 bp, Zea mays
gtggagctccatggagagaaagggcattgccagggatgttctgtcctatgggagcatgatctcctgcttctcaaaggccgggagcctcgactcagtcatgaaactcttcaaccgcatgaacgaggctggcgttgctccagatcggaaagtgtacaatgctattgtgttcgccctggccaagggacggtgcgtgaaggaggcgaagatgcttgtcaggagtatggaggagaagcaggttgccccagaca

SEQ ID NO: 352988 - DNA, 128 bp, Zea mays
gtgtttgcgaactttaagttgtgctgcaggtcgtatcatgttcagctcatctgagagaactctgctgaattttgtgttgtgctaggggaaccttctctgccgtgtaaccattaagccagagttatctt

SEQ ID NO: 352989 - DNA, 218 bp, Zea mays
gtgtaccataggtcccatatgacaacatgacacccttgcaagctgcattaggagtaagacaggtacggatttctgtcccagatacttgccaggccaattttctaggtaaatgcctttattgatgatgcttgttttagaaacgtagcgttaatctatatactattgccatttttgtatgacaatgaagccaacaccaccgtgtaaaatgtagcagtcgg

SEQ ID NO: 352990 - DNA, 157 bp, Zea mays
actaagttagcctagtcccccccaccctggattatcatgtactcaaatgttggatggattgtatgtctgtcactgagccagaccttattgctatgaacgatgaatcaatcctctttctcgaggcaaaaaaaaaaaaaaaaaaaaaaaaaaaaaaaga

SEQ ID NO: 352991 - DNA, 214 bp, Zea mays
gaactagtcttgagttttttttttttttttttgctgtgaacttttaaaacattttcatgttgtagtttttgctaatacaacagaccaacaaacagtcaaatcattgtaaggatagccagaagtcatgacaacttatattgagaacatagggaaacaatcagattatgatgataacagaagaaactttaccgaaacaggcaaggtcagcagccga

SEQ ID NO: 352992 - DNA, 211 bp, Zea mays
aaattattcttgcttactacacgaactgcagattgagtgctcaattggatctatccctgagcagaggagaaaacgtatcaacttgtcccgtggatccaagtattacataaagcagctgtagccaaagcctgctgggattatcgccaacaattttgtcatcaggtgactcagcagcatgcacagagtttggttccacacttccacttaatta

SEQ ID NO: 352993 - DNA, 226 bp, Zea mays
gtctcgagtttttttttttttttttttaaccacaacaaagaactgtagccattggatgttacagagcttttttatttgctggcagctatttccaaactactcacgatgaatctctccgattgtgtgcataacagaatgcagcgaaaattataccagctacatttgcagaaaacaaaaggctcctcaccagtgtctgaacagacgagataatgcatcatgtgacaaa

SEQ ID NO: 352994 - DNA, 210 bp, Zea mays
tggatgggtccgttgaaggttgtgtggtttatgtatgcttgtttgctccaaatataggtgttatgcatgaataaagttcccgtgggatctgaagctttgttggcttaaaatggttttttttgtatttttcacatgagataatttatgacgagctgagcaattgtcgattatcttagtgcaattgatgttggagcagaagttagtgtctgt

SEQ ID NO: 352995 - DNA, 229 bp, Zea mays
gcctaatgtgtgatgtatatatgctatgctagtttagatgtgtccatgtcaaaacccatccgatatgcttcagtttatccatccatgtagctgtttatgaaccaatcggaacaggtttggtcatggattggtgactgacgctgctggcacgatgaagcagatcgacggggggtcctgttctcgccattttcctggagcatttggaaatgtccgtgttccccacttgttt

SEQ ID NO: 352996 - DNA, 193 bp, Zea mays
gaggcgatttgtagcgtagatgcgtaattgtgccaaatgcaagaaagagatatgttattattcaggtgttgtccacttgtacctttgccagattgcctagtcccatgctcgtttggacattggagtactagaacatgaggcgttcatacggacgccctatcaagagaacacaagtgatagtaccagatggaat

SEQ ID NO: 352997 - DNA, 192 bp, Zea mays
agatgcagccatttatattggttatagtagggtgtatgtatatagtatgatgtaccatcacaatccaatgtatcatgtatagtggttaagcgatactccgcaatcacgtgcgtgcaattgagtaataggccatgacgtactcctagcggagccctatcgtgatattacgagtgatagtttcacatgcccttg

SEQ ID NO: 352998 - DNA, 232 bp, Zea mays
gctgaatgctactggttttcagacagatcctgaaaataattgggaaagaacgtcccttgggaaatccatcagttttttcagaacttccttcctgcacccattgctgaaacatgcaaggaggaactggaaagtgcatatagcgcgaacttcagcagtccaagaattccttggactggtaaaatctacgcatgtttctgcctctgttttatcatcagcccccgttcggccctcc

SEQ ID NO: 352999 - DNA, 216 bp, Zea mays
accaagtaactgtcacccggtggtccaagcgacatgtaacacgaggctctgataagaggtcaacaaatattattgaatggaggaagaagaccactgaaacccgaactccatcttttgatgaaaaagaaagagaaagatgcatgtcacagtgcaaaagggaggaagcaaagatcacagcttgggaaaatctacagaaagcaaaagcagaggcagcta

SEQ ID NO: 353000 - DNA, 229 bp, Zea mays
gcagctgccgtgccggcacatgtgcctgtgcaaggcgtgcgagccccggacggacgcctgctcggtctgctccggcgccaagaacgcgtccatccacatcgcgcccagctgatgcccaccgcgccaagtcgtttgtttgcggggcctagcatggcgcgtcgattggattcaatttgctccgtagggttcgtcaagtaacctagatgagtagttaggagtttgatagatt

SEQ ID NO: 353001 - DNA, 226 bp, Zea mays
gcgcactgcccatgggcggagaagaccaacgtcatccaggaacgcctacaaggacaagggtaagggcaccatgaactccaagatgcagaggcaggcgtgcaactggtgatggttgagtgcctcttgcggcagtaaatagattaggcgcagggttttgtgtggttgtataaccgtgggaccctttactagaatcaactccggctttatatttttactaggtgagtaa

SEQ ID NO: 353002 - DNA, 212 bp, Zea mays
gagagaactagtctcgcgtttttttttttttttttttcttctgtagctacgcttttatttatcttgttttaacgtgtttaactaataaaacgaaggcaagaaaacaatagaacatactgcagtgttggactaaggctgctgcaaagcaaatgtgggatatcgagtgcctatgactgacagtgctataatgctatatcgctttgcctgacaga

SEQ ID NO: 353003 - DNA, 218 bp, Zea mays
acagagaaattgctaaaactcagccgactgaacttaagaaggactgcgttgatatcaatggagactcaactcaagaagggagtttcgtgatgaggagatacgtgatgtcaggcaattggacatcaggcacttcctgtacgcctgatcgacgctaatctttgaggcgcaacgcacctctggtatttaggggcaagttgatgggtgcaccacacctatga

SEQ ID NO: 353004 - DNA, 213 bp, Zea mays
gctttattattatgattttttttaaaaagaacaggtcatgctagtacgtgtctcttatgagcctaacggtactacacttcatagaatatactggtcatttgccagcccaaggcagcgactgcaatgcgaatacacagaacccaatctgtcaagcagttgctgaaatgttccattctaacatcttccttacaaaccaggtgcactacattagat

SEQ ID NO: 353005 - DNA, 237 bp, Zea mays
acagcctccgcctcctcggctccgccagggatcgccgggagcagttcgtgctggcgttcctcgaggagctactgctgctggccatgttcatggcgcaggccgtcgcgctagctgcaacatgcgtgctgagccggcgttgggcgagggagtaccaggaggccgagacggagaaggcggccgcggcgagaaagcgagggaggaagatggcgcgtgtgcaggccgagtcggcggcagctg

SEQ ID NO: 353006 - DNA, 252 bp, Zea mays
gtcgagtttttttttttttttttttttaccatgaaattcttgctctcgcgcatgcatgtctcctactcaaaataaatagtactagtagctagctacaccatggtctcacaaagatccaatccaacagaagaagaagaagaaagatcatcttgacgatggattatagaagggaagggcacaatataatacttatgggaagccgccattggggaagtacaagttggacgggctccctcggccgccgccgccgcc

SEQ ID NO: 353007 - DNA, 234 bp, Zea mays
aagattccaggaggcctaaaataggagaggagggcgcacttgattcaatccatgtcaagtcaaaggctgctgcgaagtttgcacatgcaagtagaatttagatgtgtacctacactcagttggaaaacttcaaccacactgcaacaaggtttataaaaggtttgctatcaggaaaaacaaatttatgggctcaaacaaagtgtgatagtgaaagtcattttgcttccagcttaa

SEQ ID NO: 353008 - DNA, 227 bp, Zea mays
gttgcccgaaacatcttggatgcaggtacatcttcgcacgcgtgtaccatcaagcgaccaaacttgaattaacatcatcgccatcatcatccgatggctactgtagtaatgtatgcatgtatgctgacgttggactgaccttaaacatttctcttgcatccagttgtcctaggctgtatataggtctagcaagtcttaagggtccgtttgtttcctcgcgggtattc

SEQ ID NO: 353009 - DNA, 225 bp, Zea mays
gcagtgcaccctcagccacagcagccccaagtgcaggtccatccgcagctgcagcaactcccacaattacaggcccactcgcagccaccgcaaccccaagtgcaaatccacccacagccgcagcagcccccacaagtgcagttgcagtcatcagtccagcagacctcccaaccccaacctcaggtacatctctacaatcacagggggggctcacaagcgcactgc

SEQ ID NO: 353010 - DNA, 230 bp, Zea mays
aacgccgccgccgtcgccgggcatcctctggacccgtccccgggaaggttctggccgcaagacgatcatcccccgctcgtcgacggacccgccacgcagattccggagctggcgcacctccggatatggtgaaaggaaacgcatgtgatgcggtgactggtgacatgccagttcgagggcctggctgggaacacatctggttggttagcctgccgctctggcttgaattt

SEQ ID NO: 353011 - DNA, 203 bp, Zea mays
  unsure (1)..(203): unsure at all n locations
gcgtgctggccgtggccagtggcggcctaccactctgaccggctgccggctgggtccgctgcctggggatgctgagactgtgcatggctttttccgtgccgcgcgctggaattcgcacggccctaccacgagcgcgtggaggcttggagcggacgttaggcatggcgggcgtacggcgcgtcagcgnntgctggatcgatgaa

SEQ ID NO: 353012 - DNA, 201 bp, Zea mays
agatggacgcggaggcgcacaggccatgaagtgggcgcgggacaactacatggtctacgattactgcgccgacaccaagcgcttctcgcagggcgcgccgcctgagtgctccatggcgtagtcggcgtatagaggtgctgggctgaaccacggtgcacttcgattgcgatgtcgatcagtgcacactatatacgacgcacg

SEQ ID NO: 353013 - DNA, 200 bp, Zea mays
caacatggtgttcgtgccgacgggcggggtggtcatccaggtggtgccgctgggcgggctggagttcgtggcgggctacttccggggtccgtccagggacatggggctgcgctacctcgagtaccggatcacgccggaagagagcaccctgatcaaccagtacccgcgcgaccaccccatcttcacggaccccaacggga

SEQ ID NO: 353014 - DNA, 202 bp, Zea mays
gtcacattcttgctggtgggggcttccttcagctggaggcctggagcaggcagcgacccgcgagatgaatttctgcagcagtgggtatctcagttgatgcctgacggcccactgacctgctttgcttccgtaatgaaattgttcgctcagtgccccgttgtaatcacgcctgtcctgtgtagaaatactttaatcaataagc

SEQ ID NO: 353015 - DNA, 173 bp, Zea mays
ctaaactgagatttcttacaagattcattgtgctacaaattacaatagttgacccctatttactaccatatagtacaaatttactacaaactttttttctggaatacgcagaagaagagttacgcacaaatttactacaaacctactgcatgaaggtagtacataaggcatat

SEQ ID NO: 353016 - DNA, 229 bp, Zea mays
gctcacgccagtagagatgatggccacgtcgtcccccgtggctggcgccgtcctcgccgccccttcctccgccgccgccgtagtcgtaaagcctctgcctcgtggcgcacgaatggcggcacacgggcacgcgcgaagtgcttgccgggaccgggctgggcgcggcgctgctgctagcgctggggcccgtgtgcggcgcggcgcgtgctgcggacgaggaatacgtgag

SEQ ID NO: 353017 - DNA, 181 bp, Zea mays
acgacgtgctgtccccgccgggcggctactgccgctgctcggcggcggcgcacgctggggtcgacgtcgccgacgtcggctgacgcgatgcgtgaggcgatcttccacatcgtcgcgctgcatccgttggagatcgacccggaggcggtgcgtcccgccgaagctgcgcaactttcgcatc

SEQ ID NO: 353018 - DNA, 240 bp, Zea mays
ggagccgcaaggagggcggcatggaggctggccacgcagcggtggctgtacattttttttccccggacgtaatagccttgtaccgtacctgaactaccctccctttctcttgctagtatcgtcgtcgtaatcccccggctgggttattaattagagtttaggagtctcgattaggtcaggtcaggtcaggtttagctttggttccggttagggttctactgcggcggcagaagcggccca

SEQ ID NO: 353019 - DNA, 214 bp, Zea mays
ttcctccacctcctcctcctcttcttcagtggccaaaccaacagccaacggaggcggcgtggcgcgtcgcctgagcatgactggcgcgtcctcattgctaggcttcagtttcatctggtggtgggcggtcatggcgtaggagtatctgccgtggcaccggcgattttcctggctggatccagaattccagacttatatgtactactgttgtgtt

SEQ ID NO: 353020 - DNA, 213 bp, Zea mays
gggataacatctttagtcgtccagagttggcaatgtttgtctgattaacgtgagtcttccttactcccaaatttgtttacaatgatattaacacatctgttttgagtttttttttctgtatccttagatcgtagagtgtaaatgttttgggctgctggtcgtacacacttgactgtttggggcacttgctaccatttcagcaagcattatcaa

SEQ ID NO: 353021 - DNA, 108 bp, Zea mays
ggtcatgtgagcccgctagagaataattgtaatcttctttgctgcgtctgtacttgtgtttttgtgcgccaggacgtatatttttactgaaatgatactccgaagagc

SEQ ID NO: 353022 - DNA, 236 bp, Zea mays
  unsure (1)..(236): unsure at all n locations
gagagatcacaaggctgcaccccgtggttcttatgtcgaaggcgcccgtgatgttgccgtgctagaagccatgttggaatctagtgcgaacaaggagccccagttcaagtgaagagattctaacagatccgaaatgtcacataaaagagactacgtttcttctagggtggatttgtccattcggatttcatatatntcttcgggtaagtaaaattganacatnntgttcccaaaat

SEQ ID NO: 353023 - DNA, 218 bp, Zea mays
gttacattaggtatgtgtagtgggttctactgtgtgagcactgagcaaagcgggaaggtaagataataagattgaatttcccggcttgcaattttggtgttcttggatgtctgcgtgtcatattaccgcaagcttcagcagtaataagaactggtgtcctgtgtgggtctttctctgcgagctctctgtaatccaggagggaagagattttttttgtt

SEQ ID NO: 353024 - DNA, 224 bp, Zea mays
cagcaccggccgctctacgccggcacgtcctcgtttctgtccgaggtcatcgcctccgcaacttcgtggccggtgaggtcgcaccaccatggcgtcgctcctagcccggcaggcagcgcaggcgctccgcgcgaggcaaacggcgcagtcgggccggccgcgtcggcgatgcaagggcacctccgtacctacatgaacgcggggattcccaagcggttcaaaga

SEQ ID NO: 353025 - DNA, 219 bp, Zea mays
gttttctctgttgcttcgttgcattgatcgtcagagactcagagtcgggttggttccttgactgtccctgagtgatgctgaaaaccacgttttatgtctgcctcttacatgtatgtaccattttgcggtctgtattttgtagagtcgaactgagctcaccaatcaatgaattccatttcatcagattatttaagctatataatataagttcgtccttgg

SEQ ID NO: 353026 - DNA, 211 bp, Zea mays
gtatcagcttgtatcgatggactccaagtgttgtcactcttgttgtctagtgtgctgaaggacccatttacttttgctaaacttttccattggtgattgttggatgcatggtgtggatttgtgctgtgttggctaaaaaaaaaaaaaaaaaaaaaaaaaaacaaaagaacaaaaaaaaaaaaataagaaaaggtaacaaaaaaagtaaaaa

SEQ ID NO: 353027 - DNA, 231 bp, Zea mays
gtcgagtttttttttttttttttttttttttttttttttttttttttttttacaaaaggctgttagtacccagaaagtcgaggtaggttaaagatacaggtaacatatataactaactgtacaaaacacattctctagatgaacgttcaaaaacagctagggcctaatttggaagcaagagggaggcaaccctaggaatgagaagtcctataaggagaactaaatggctta

SEQ ID NO: 353028 - DNA, 225 bp, Zea mays
gcgccacctgcccgctgtgccgccaccgcctcctgccccccgccgctgccgccgacgaggtgccccggattgcctgattagcgccctaggaattgagagtaggcgtacactctgcacctcgcagcagcagtgtctctgtacaggttttttttttcttttcctttttgttcggtggagagagaggacagaacggagattgaaggaagaaaatggtggcaacaaagc

SEQ ID NO: 353029 - DNA, 199 bp, Zea mays
acatatatcgttggtgtgggcattgggtgatgtcagcggcaaactaaagcaggcactaaaggacattgaaaaatatcagagcagtatgagctcattgcaaaaatgtaatgttcgatgcaagttcagtcgtgtagtttgtaaagtaggcaagaaggtgcatgatatctgtaaagttgcagattgaaacacacatgaatta

SEQ ID NO: 353030 - DNA, 201 bp, Zea mays
gttgccactaaatccaccgctttccctttcgcctttggatcagcaacgcatccgtagtacatagctaatttgaacagccatctctgcagtgctcaggttccagggcaacggcagagatcagtccaccatgttgctttttgtctaggaggtggtgttcaatgctttggtgtcatgaacctttgtaaaattgtagttgccgaa

SEQ ID NO: 353031 - DNA, 206 bp, Zea mays
gctcgccgtcgtgctctacagcgtgctggtggcgcagagcctcgggctcgccatcgggccgtgctcatggacgtcaagcagggaaccacgctggcctccgtcatcaccatggtcttcctcatcgccggcgggtactacgtgcagcacatcccgcccttcgtcgcctggctcaggtggctcaactacagcttctactgctaccgcct

SEQ ID NO: 353032 - DNA, 201 bp, Zea mays
ggcctctgtatagaaactatttctggtcctacattcttggttgccgatagttgggaggctctcgaaagttggctagacgccatacgccttgtctacactatttttgcaagagggaagagcgacgtacttgccggtattattactggttaaatgtcttgctgcaaatgcaaaactgccaccgaagagccgcaaagttttgga

SEQ ID NO: 353033 - DNA, 196 bp, Zea mays
gacgaatgaaataacaagtctactattattaagcaacatgacagagttcaaacatcacacaacagaaaattgtcaagtgcggaagtgcagaaacattaacttgttctcgaaaacaaataacagtacttcctcaaccactacaatgccttgctcaacgtttacttgcttgacgacgaggttccagtaacccttgcga

SEQ ID NO: 353034 - DNA, 179 bp, Zea mays
gtttacttgggcttgtgggatttggtggggagaggtcaagttaggctgtttaattattagtgctataacgacatgcatgtattatgccatatgtagaatataatgtactccgtaagagctgttgcacttttgtcatcaccactgttataaagctaatgatgagttaagttttttgggct

SEQ ID NO: 353035 - DNA, 179 bp, Zea mays
gacaatcctcagagaggaaggccctaaggcattctcgaaggcatcacttgtgccaacagctttagtactcttaagatgggaaacaaacactagtgaaatggaaactcttttgtaaatggtcgtactccgcttgcaaatgagatatataagcaaatggttgcaaagaaggaaagagagct

SEQ ID NO: 353036 - DNA, 175 bp, Zea mays
agagaagagagaactagttcgagttttttttttttttttttgctaacaaatgagtttctgaaagttaaggcacctaattactgtcagcaacaggctacatttaactagtcacagtcacaagccatgttttattttagtttagagtacgcatggccaagtaactgatacgaactag

SEQ ID NO: 353037 - DNA, 171 bp, Zea mays
gacacggggcgaacaagtgataaataactatggggatttgatgaacgttgatagttgtaggtcggtaaatatggttgagagtgtaatcttcgaatggtctaggttttggtggggtgttactccaacggacctaaaaccccactattgtgtgcgtgtggatgcgccgcgttg

SEQ ID NO: 353038 - DNA, 174 bp, Zea mays
gctgtttctcctcgatctcgagccaccggcagctgccgtcgtcttctcctttcccgccgccgtctcccgtgaaagagggcctcccccgttgcgttgctcatcgaggaaacccagcacggcgtctctgagatgtaggtagcctggcggctggcaccccatgtgtagcttccgaca

SEQ ID NO: 353039 - DNA, 187 bp, Zea mays
gtcgagtttttttattttttttttttttgaatcatcaagcgccccggtttcgctccattcatatacagccgcatccgaattcccaacccataaaaacaactaagacctaagaagtgctacttagaccacatgcacctaacaacttagctagagatcctttcgcacaagatttgaataaatgatgatg

SEQ ID NO: 353040 - DNA, 173 bp, Zea mays
aaaaagccccatcgactttgtgttgcttggttgcctggtcaaaaagctcttcattgttctgtcactgttgctcagaagcaggttgactggattttttttatgttttttgtcagacttctgttgtaaattaaattgtgggtcatctgttcgacccagaaatgacattcataagg

SEQ ID NO: 353041 - DNA, 154 bp, Zea mays
gagcggaatcttaatgcctcatggggcaacattggtaccccaaagagtaagtcgactggggtgtggacgacgacgaactagtgcgcttgagacctgtgaaatggaataagagacgaacaatgtgtcttggtgagtcatggtaacatgctgactg

SEQ ID NO: 353042 - DNA, 221 bp, Zea mays
acgagcggctggcgcggtgggcgcgccggatggaggccgccgggatggagcgcgtcgggcttagctacgacggcatgatggaggcgcggaagctgctgcagagctgctggtagtgcggcggcggggacgactccgcgtaccaggtggcgcacgacgccagcgggaaggccttcttcttctgctggcaccgcaagccgctctactccgtctccgcctggagg

SEQ ID NO: 353043 - DNA, 217 bp, Zea mays
gacgctcctgcaggcggtggcgtcgctcctgaccaggctgcagcgggcggcgcggaggatggccgccggaaccgctggaggtcgtggtaggaagaactcgcagcgggcccaggccgccgtggcgcagtggaagaagaccttatcgtcgcttgcgccggcgtctgggacgacgaccaacaaggaggccgccgagcccggggtgaggacaaaggagatc

SEQ ID NO: 353044 - DNA, 186 bp, Zea mays
agtgcatacagatggatggttttgcagaactgtgtgtaaagatctgttgctttgccggtagtgattaattagattcattcagcgacgtgttttcagatccctcccatctgcagctctgctcggctgccgcttaatcaatctcttcctgtaaaaaaaaaaaaaaaaaaaaaaaaaaaactcgcggca

SEQ ID NO: 353045 - DNA, 214 bp, Zea mays
gaatcactcagtgattagcgtaggtgctttgcgaagtgcttagttgtaacaccctgaatttggggatataaaattccttctctaatatccaccaaattcgggtgttaccttctcttgcctctttcttttcgttctccctttcaaagcgataagagttatctagaggtcatctaaattcctaagtgaatggttgttgttgcatcatgctgaaata

SEQ ID NO: 353046 - DNA, 214 bp, Zea mays
aacgccgaggcaggagaaggcggccgaccagcgggccccggcggccgagcgccggcgggagacgcggccgcggttcgcgcccgagttcgacgggctgcactgcttcgagtccatcgtctccgcctgaacttcgaggggcctcctcgtcacatgccgcccccgcgcttggattcgttcctgtcggcggtcaccgagtgaaaaggcgacggcgacg

SEQ ID NO: 353047 - DNA, 215 bp, Zea mays
gcaaggtgtacgcgttgctctcactacgtagcaggcagcagattgcagtcgagaaaacgtgtgcccgacactactgcttttgcattggctgatctgatctgatctggtctggtgtggtcgctgcaggatctacttgcctgagctcctggtcgcgttctacctgttgctatgcgcgtcgtacgatgtcgtgtccgaaccggcactaatacccgtac

SEQ ID NO: 353048 - DNA, 228 bp, Zea mays
ggatatgatactatacctacaaacagcttggtgatttctcctggtcatggttatttatacaactttgagatgaaggagctaaatggtcttagttatggccatgaaacaccagaaggtcctacaaaatttggagcttggaagatggtgctacgattttcaagagctgctagccaacgccaatgcatctcgtttaagatcgtgcatgtgacctttcctctcctctcctga

SEQ ID NO: 353049 - DNA, 222 bp, Zea mays
acaaaatagatagattgtaatactcaggttatctttaggaaaggtttgtaccttaagatttgttggttcagttgaagcatatactgtcaagtcaaaggttgttttgtaaggtatgttaaatgtaatcatgaaagaaagacttggttttgctgttaaaaaaaaaaaaaaaaaaaaaaaaaaaaaaaaaaaacaaaaaaaaaaaaaaaaatcgggttttttttt

SEQ ID NO: 353050 - DNA, 219 bp, Zea mays
ttcatttgaagatcaagaaagacaagagaaaagctaggaagaaggggaagttttcttttaaaaagtagacgcgtaaagcttgtagtcttataaatcatgtagttctgtttccagtttgaacaacaaatctaaaggcagtcatgcgcacctaagtccattcatggctagcttactatgtcgaaatgagtatggaaaagatggcgctgacctatcagttgt

SEQ ID NO: 353051 - DNA, 206 bp, Zea mays
gagagaattagtctgagtttttttttttttttttttttttgacaatcaacgaggtcatgattttacttgcaacgggaacacatgcaatgtagtttacacatcacgctcattctaaataacctggagtcttgaaatccataaacatgagcagagcaaatggactcacagtccagtgcattacagttgcttttacaacaataacaaga

SEQ ID NO: 353052 - DNA, 220 bp, Zea mays
gagaagcagagggacatcactggcagtgagggctgggctacctttgaggacatcgaccttgatgacaacttcaacccgagggccttctctcgccaccagccggactctgcggtgaaaggcaagaaagtcaatgaaagcctcaccagcagtttcacaaacccattctacagcgagaagaacccgttcttgaacacaaactacaactgaatgatgttgaact

SEQ ID NO: 353053 - DNA, 170 bp, Zea mays
gtttgggttaaaaaataatcggctttggcatgggaattatgataatggccatcgtttaaatagctactagtaggtgtcttgatgtactaatgtactatctacgctacgtactctgctgttcccaaataaatatttttaagacattaaatctatctaaaaaattattagtc

SEQ ID NO: 353054 - DNA, 231 bp, Zea mays
cggtgggtgggcggcccacaagagcagcagcaagctgatggtgatcgacttctcggcgtctaggtgcgctttcggccgcgtcaactcttagttcaagtgagtcttagtctcgcgtactattgaaaagcaactgcacttagttagggtatacttaaaatttgtttaccttgttatgtcattcctggccagctgactgctacactagaaatcaatctattccatttctcccaa

SEQ ID NO: 353055 - DNA, 224 bp, Zea mays
gtttgtttagggtttatggttttagggtttagggatttgtgttcacgagtactctcttcggatttgcggtgacaaagcccttgcttgtgttacattgaggtaaatctaaacgatcatgagttcatttctctttaaggccttctttgatgactacaaactcgagttttttttttttttttttttttttttttttttttgttgtatctgttctccgactcgcacga

SEQ ID NO: 353056 - DNA, 228 bp, Zea mays
ttacaccgtctagagatgtagaataatgttagaatctttgatcggataaaaatgatgcatgctggattagaaaactgttgtatcggcgatgatggtgatccttcgagttatgacaaacctttgtctgaaatcaaaacctacagtctgctccagatgaggactgtagtcaccaccagtgaaattactcctgaagaagatgacattgtcccgaaaactgtcggccccgtg

SEQ ID NO: 353057 - DNA, 223 bp, Zea mays
tcgaatccaagatcagcttccgcctcgagacgcagaggtcccgcggcttcggcttcgcgagcttctcgatggaggaggctacgcggaacgacttcggcgagatgaatgccaaggagctccgcggacttaaccggaatgtcaaccgtggacagtgccttcgcagccgtcgacgacgaagacctggtcggcggcgcggtggtaggccaagctggcgccccggtca

SEQ ID NO: 353058 - DNA, 220 bp, Zea mays
aagggagagtgggagactagcgcaacaggacagcgcacggaaagctatgggaggggagacggagagggcgcatcggacggcggcgagatgctggcggtgttcgatcccacggtggccaagtgcccggaggtctccgcagccccccggtcgccggggcggccgctggagcaggcggggccggcgcgggcgcgctgatgaagggcttctccgactcgcacga

SEQ ID NO: 353059 - DNA, 222 bp, Zea mays
ggcactccagagaaagtgctgaaagcgaccagacaacgcaagaagtcaccgccaccaagcgagttcttaataactctgccgggcaaccgccgcccttcgcctagtgacaacgcccaccagatccaccccggcctgctatggagtccgcggtgaacccgaaggcgtacccgctggctgatgcgcactgatcgatgggtatcctcgatatcatccagcaggccg

SEQ ID NO: 353060 - DNA, 227 bp, Zea mays
gattttcaacacccttaggtctggctctcggaagacacaggtggtacgcagtacatcaaccgcaaatcagaatcagcatatttccagaactatcaaaacggcgccaaacctcagcaagaacggtcaaatgagttcattgagtggatgcttcagacaagatctatagcatggatcataatctggattgtccttaagtttttattgtgctaggggaacataagaaagta

SEQ ID NO: 353061 - DNA, 213 bp, Zea mays
gcttcatgcgtgaaaccaatcgtttcttcggcccggcacatgcaagcagccatgggcgagaaagaataggaccgccgccgccgctttgtccctccgttcacaaccttgtcgcacgagtctcttattcgcaactggacctgttttgtttaacaaatttaaatatcctgcatggagatagtggaaagggtattatgcagactttggaaagggaag

SEQ ID NO: 353062 - DNA, 216 bp, Zea mays
agagcatcattgataggacactaaagcgcgattttgacaccgaggaagcactctggttgcttaagataggtcttgtgtgcatcccggtatagccctaagatcaagccctccatgtcaatggttgccaagatgctgcaaggtgagtgtgctgcgagtgacatgatcatgacgcctggcctgatcacagacgtcatggacctgaaagtcaggctggta

SEQ ID NO: 353063 - DNA, 245 bp, Zea mays
tgcagataatcttctcagtcctgattcccgagtgtttggtttctctctgtcccattcgaaaatagttatagaatagttatctcaagacatgtgaaaaatcagtgtcagcatacttgttctataattgtccaactggtccattgtgcactgtctacactctacattcttgcatcgagaatacatgatcttattatcgtagtagcccagaccttcagatttttaatttgttctgcaggaaccaccgt

SEQ ID NO: 353064 - DNA, 237 bp, Zea mays
ccaccgctcttgtggatccacacaacggatcagactaccagatcagacggtgacttttttttgggtgatgaattatgtatggggagaagcccagcttgttatgttgcctagcttttgcttgatccttactttctcaacttagatctcagctagatctgcagatggaaaccgtacatgtcatcttaatgggggccctttctgttattttcttcccttcccttaccctaagaattatta

SEQ ID NO: 353065 - DNA, 144 bp, Zea mays
gagatgttgaggtgtgtcatgacgtcatgttcttgtgttagtatatactttctttgtttcagattttctatgttcgttgattttgctatgtatggagacattgtgtatatctaagttcgtatcaagagaagttctacagcagct

SEQ ID NO: 353066 - DNA, 186 bp, Zea mays
ggttttggtggccttgaggatatcatataggcgttcaggtcatagccaaccattgtaccgggggctcacctttcggtagtcttttatctttctttcttaatgactcacagatctcctgcgttgttctaaaaaaaccacatcctttcttttctacttaataaagtttttgacttttcattgtctatg

SEQ ID NO: 353067 - DNA, 235 bp, Zea mays
taagaatgaaactccactctggaagcttacgtgctatgctcacctcaggagcggtccttgtgacatcacgggagatattagctttgaagagctgagagctaacgcgtatgagcaaggcaggcaagggcatcctctgcagtcaatagtagagggtgaaaaaaatttgaaaaatgcaaagctgacggactttaataattttctgaacacgccacgtctatcggtatcacaaactcca

SEQ ID NO: 353068 - DNA, 185 bp, Zea mays
acaagtcggtagtttatgtacaatgacatggaacatagctagtaaatcagattctcagttcctcttgtgctgtgcttttgtcgacaagttgtggacctgttgaactgttgcaaatccaaagcacgcgaagaccgagaaaaaaaaaaaaaagaagtcaaaagaaaaaaaaaaaaattagaaaagag

SEQ ID NO: 353069 - DNA, 213 bp, Zea mays
ggcagatcatccacctccatcaaatgcgcgccaattccgttctgaaccctcatcagtacttgagaaagttgagatagagaaggcaaagcaggatgatgatctgactgatctaagcaacatactgacggagctgaaagggatggccgttgacatgggctctgagatcgagaggcaaacaaaagcaatgggggatgcagagaaggattatgacga

SEQ ID NO: 353070 - DNA, 208 bp, Zea mays
gtagggatagcgcatcgtcatcgcacctccacgcgccggcgagccagaccaccagaggcagcgatggcggtggcggactgtgggagacactgaagcagtcgatcgttgcatacacggggctgtcgccggcggcctttttcacggccgtggcggtggcggccgctctgtaccatgtcgtgtcggggctcttcgcagccccgcccccgcc

SEQ ID NO: 353071 - DNA, 221 bp, Zea mays
aactactaccttttgtgtgcgcttgcaaatgtatttgcattattttcagaagacgctgctgatagcatctattcattgatcggacgattagggctagcttgtcgaactccatttttccaagggatttctatttttctaagagaaattatttttattttttcttaaaaaaataagattttttttggaaaaatggagttaccaaactagctattagggagctg

SEQ ID NO: 353072 - DNA, 224 bp, Zea mays
attcgctcgatcggtcatcatcggactgtgcaagcacgagaggggtatacaggcatacagcggattcataaaccgtcagagtgttaggacaagatggtggccaatggtgatgcacctgctagagggagcgcggcggcagcgcaagcctgcgtaggcgtaggaccacaagcggtgctgctgctggtggaggcggtgccagctcaatgctccaattctacactgat

SEQ ID NO: 353073 - DNA, 223 bp, Zea mays
gcacgactgaatttcagagactgcataagaagatctctatcgataaagtatctcactagtgatgaagtaattgaatacatcagagaacacaagctgtttatggaaggcaatggcggcgacatagcattgctgtaatagaggtatttggaggtaaaatttgagatgctgtcttcttcacctttgagcacacatcgtatttgtaaacaatccacgcaatgtgaat

SEQ ID NO: 353074 - DNA, 161 bp, Zea mays
attttgcacatgcctacgacgtgtatgttttgggcaagaaataaaacaaggtaccactacccagtccacacagagactacatgcatgagcaacgaacaaacaaaaaaaagcagtaaagtatatatagtgtatatacttatactatacaacagcaacgaacc

SEQ ID NO: 353075 - DNA, 217 bp, Zea mays
gttaagctagggattgttacataggccggccggtcggccgttcgttcgcgagattgtttcgctgctggagatgcgcatgcacgctcgcagcagcttcgctggtccgcgtggccgcgtcttgtgttcgcgcaacgaacggtgcacgttccggtacgttttcatttgtctccgacctgtcctgtgtgtgtgcgtgtgtttttgcactggatattccccc

SEQ ID NO: 353076 - DNA, 230 bp, Zea mays
tgactgcataagatgggagcacgttggcagcacctttttttctgaaagcatgcgccactggatgtgtatcacattagctttagcaggacatgcataagaatggaccgttttgtcattttttttttcttttccctcaaggaatggactgttataaattaaatatccattcatttgaatcagatgttgctgtaatttctgaacttaccttgggttttgattgataaatgcca

SEQ ID NO: 353077 - DNA, 224 bp, Zea mays
atcattctcactttcttcccacaatctcatggggtggatgatcgccatagccttctctccgacttccaggttctgtactcctaccaaggggcaacgtgaggtgtccacaggggcgaggccgtgcctccgtcccgccgcccccgacaatgatccccaccggcactttgtacgaaagcacaatattaggacttttttatgatcttttatcttttttatttgaaggc

SEQ ID NO: 353078 - DNA, 230 bp, Zea mays
gtttgtggagcctgtttcaataacataggacagatagtgagcttgcatggatcatgttattgaactcctcatgcaattagctgctattgaactttgttggtgtcttggtgactcttgtaagattcgccttgcaaggataatgttgggcgtggtaaccctatccttattaagatatgtgttataaactttctcttcctctaaataaaaaagcgtgctcagacaaagttcca

SEQ ID NO: 353079 - DNA, 216 bp, Zea mays
gcctgtcaagacgcgacagacagtggtcagaccaccgctgggcttcatcacgaggaaggggacgcctaaaactccactggtttgcctcgtcgtcctctcctctgttttttttttttttacttgctggattcaccctgtagatctgatgtgcgcacttgtgggtgacgcagctgtcgtcgtcgtttgctgtatatgtatgtacgtgtgcggtgtgcc

SEQ ID NO: 353080 - DNA, 203 bp, Zea mays
cgacctgcacgcgctggtggcggcccggtccaggggcgacaagaactccatcgtgcaggccgccgccgtgtacatccacgagctcaggggcgcgcgggaccagctgcagcgccggaacgaggagctcaaggcccgcatcctgggccacgacgccgggcagcagtgcgtcaaggtgcagttcgaggtggacgagccggcgtccg

SEQ ID NO: 353081 - DNA, 196 bp, Zea mays
gttcttgattctgtgtgtgtgctcttgtgatttccctttcaccagtccaaggcagtgtcccgtggtcgaggtttgatgaaagattgctgtggtgctaaatgtaaatacgagtccttgcttagatcttactgcattctgtgttgggttttctgcgcctttatatttggattccatggaatttgtttcggttagcatc

SEQ ID NO: 353082 - DNA, 196 bp, Zea mays
gtttgactactccagtggcaataccaactgtatctgtccttggtgctgccccagctgcagcccctcttctgcaccctacagtgcctggtcttgcaattcccggggcaactcttccaattactaccccatctattgatttggctccacctagtcaatgcctattgctcaagaatatgtttgatccagctttggagac

SEQ ID NO: 353083 - DNA, 269 bp, Zea mays
gtcgagttttttttttttttttttttttttttttttttagagcaaccactgacatgcttctcaaatccagtgaataataccagtccacacggacttaatgccaactagcggcaacacaaagcaatggggaactaattcgaacactaccagcctactaatataaaaaaagaagtgagggaacaggaaatcagctacaataatagcacggcacagcttcagcttcgacagcatagagcatctaaaacaatgggctcgaacaatatgcgctc

SEQ ID NO: 353084 - DNA, 260 bp, Zea mays
cgaagaagcagatgcagatagtcacagcgtaactcctgtgggaatcaacaaggaagacaccgacactgcgagcaaagcaaccagaaattaccccgcgggaaccaagcaggaagacactggcgtggtcatggatgtaaacaagaattctccgccgaaagttcatcagaaatcaaggaaggaatttccgttgaaagtccatcaggaatcaagaaaaaggaggcaaaataagaaatttctgtcgaaagtgcatcagaaggcaa

SEQ ID NO: 353085 - DNA, 242 bp, Zea mays
cgattaaaaagtgtcatcattgagataatcataaaacatcaccaacctacacacacagcagcggcaatgggttgctggcctgctctacaaattggtcagcgaaaaaagaatcttagtagcccgacgaacagatacataaacaacgtcgcagagatcttgaggcgaggatggtggtcatctgattaaaggacgagcggtcgttgccccgtggacgcgctgaagctgggcgtgtgcgccaactt

SEQ ID NO: 353086 - DNA, 252 bp, Zea mays
ggtgcctggggctcatcctgatcccggccgcctgccggtcgtcgtgccaggtcgattgctccgttgaagagaagatgtcgctcctgtgttttgagtgaatcgtgcttcaaagggaatacactacgcatgtactaagttactggggctcatctctgctatctgaaactgagaggcatgattggtgtttcctatttttgaaggattgtttattagaaaacttcagagttcatacataagcttttctattttcta

SEQ ID NO: 353087 - DNA, 254 bp, Zea mays
gcaaaaaaaggggaaggggggccctccattcctctaatctgggagggactactaatatggctacatgatggccggccctatcaaccgagcgtagagaagctttgacaaagaaaaaagaaatacctttggagaggtgtaatcttaaggaggggacagtgaagacagcaacagagaagaaacaagtccaggttgtttttttagctcttaggcctatgataagtatatgatagtgagtgagtagtaggcataaataa

SEQ ID NO: 353088 - DNA, 234 bp, Zea mays
gttattctggctatccagttgcaggctatgcgcaaagtgcagtgcccaattattcctatgctgcacctccacagccaataagcagtggtgcagctacagacgccgcaagcctgtatggtgccgttggtagcgccggatatcctactgcgcaagttcagccgagcagtggccctgcaaatgcagcgccaccacctccaccaccaccggcagcaccatatccaagcacatatgacc

SEQ ID NO: 353089 - DNA, 169 bp, Zea mays
gtggaatggtagaagagggtacacgtgaggggtgatgtgtggtgaggggttcgattcctagcaaccgcgtatacacaacaaatgccacgacttgtgacttcgatagagacaggcgagtggggtgggtgagccgaggcctcacctaataaaaatattttaggagaaagac

SEQ ID NO: 353090 - DNA, 223 bp, Zea mays
cgctgcctcggcgccgtcgagggaggcacgtaaggcgcgcgcgaagagcgcaggaaggtggccccggcgcccgcgcacccaagcacaagccagcccgcaccgccgcttccggtgccggcaagaaggtcaacaaggccagcgcctgattagcggcggccgtcctggtcccctcgcgcgcgcctccgtgtattatactagccggtagtagcagtaggagttgcaa

SEQ ID NO: 353091 - DNA, 250 bp, Zea mays
gtctccggccactaccacctcttcgtcacctgccccgcgttcctcgtcaccgccggcggcaacggcgcgcccggcgcttccgggttcaggttccagaccaccacctactgccacgtcgaggtttaaattaggagcgagatgaggggaaggaagcagagagccagagaccatggtggctacctctctagctgctgctccacctcctgccgttgcctggtgcggtaataactctctctctttctatctgtcc

SEQ ID NO: 353092 - DNA, 232 bp, Zea mays
ggaatatcctggatggtggcgtcaactgcttgaggaggatagatcggcatggaaagaccttgtcagatgtcatattgtgccaacaagttatcctaccgccatgattgtcaatattcttatccgtattcgaattaaaatatggtaaatagtatctgtattcgaaccaaaatatggtaaatagtgacatccgaatttgtatccgtgcgtatttgatccgaatacatctctatta

SEQ ID NO: 353093 - DNA, 227 bp, Zea mays
gtgtaaagcttgatgccgatcgatatcatcgccatgcacgtgaagtggagcctccccacgccccacatcaagagcagctgagtactcccggttccatcccctagttttcagtcctgccatccgtgtgttaatatgcacacggactgaaacacaggagagatcgagagattcttgaaccagatgagaaagctggtaaaagatgcagtcagagagcaaaagtacatgaa

SEQ ID NO: 353094 - DNA, 227 bp, Zea mays
gattgctagcaagtggaagcacaataaatccacgagcatctgtggcaaactgcagatgcttgtcttacagttacaggaaagcagttgctgacttaccaatcctctacatggggtcatatgtaactttattttattttattttatttttgtgcccgtaaatgcccccatccgttgtatataaatgtttttttttttggcaatggggcactatcgtcaccagttttgat

SEQ ID NO: 353095 - DNA, 222 bp, Zea mays
gggagagctagtctcgactttttttttttttttttttggcagggtcggtgcgcgcaggcgagagcggatatagttcatgcggtcataagcgctgcagatcacatggccgagacatttttgatccgatgtatagaagacatccgccgctgcgagattattgggccaaatccttcaaattcgcccagaaagcgtgatccgccttcttcaactcgatctcggaca

SEQ ID NO: 353096 - DNA, 218 bp, Zea mays
gcgcaacgtgagatccagcgaggtggcgggaacgcggtgatgtgtttgagttgtttggtcgtccagctcgctgtggtactgtgcagcggggggggaagtgaacaggtggtattggcatttggtattgggtgggagtgggactgacggcggggagacaggcaaatggcgagttttaagaggacggtaattttggctgcgtcttcatgaatgagttgtta

SEQ ID NO: 353097 - DNA, 229 bp, Zea mays
tggcacggggggagagggacaccttcgtctgctgctgccgctccccctgctgcggcgccccctaatttgattgtgatgaagacgagtggtctccgcccgcgacgagcggagattcctatgcgggctctctccgctcctggtcgccgatcccagagttctctaagcgtgagttcatcggggatggctcctgtgactgacctttctgctggaggaggggatctatctcgat

SEQ ID NO: 353098 - DNA, 229 bp, Zea mays
gcttgccccatgcgatgaggctgttgcctgcgatcgtgatgtaatgtgctggtattctcgaatgccatggcccatagtcggccatggcttgggatagcgtagtggctgactgatatgccagtgggcgcctgtctagtgcttgcggagctgcggggggtttgtgctatacatgtatgggcggccttatgagtggctatgtgtgtacctgtcctaacgcttaagaggggga

SEQ ID NO: 353099 - DNA, 218 bp, Zea mays
agccaacgatttgtgccattccagcgagattgattgatacatacaggaagccctcgatcgccaaactttcgtctgataaaccatccatcagacaatctaggcctaaccagagatagaggacgccctaacactgctaatcgacgaagcttgagcgacggggggacttcatgcatgttggagctccagttcgagcaagtcagagaaacctgcgaccgccg

SEQ ID NO: 353100 - DNA, 273 bp, Zea mays
gcggtggcggccgctctggggctggtgggtccccgggctgcgggggttcggcgcggggggcgggctggggggggcgggtggggggttccccggcggtgctcgggagagcgaggtggagagcctgagggagctgatgggtgctggaggtggtgccggcctgcctgagggctctcctcgtgattggctcggtccgcgctgccgtgagtctgagttcgacggagggccggctggatgaccggcgagcgatgcagcgtgcgtttgcctgaaggttga

SEQ ID NO: 353101 - DNA, 213 bp, Zea mays
tggaattggggaatgcaggctttcgcaaactttttacctgttgagttcttgagggatagagataaagttcagaagttggttcagtctgttgatcctttggttcgagccgttgatggtattgcaggagagcatgtctctatgagagtagatttggactgctcaaatggtcggaatactattggattatttactcataaaggactatctgtatcg

SEQ ID NO: 353102 - DNA, 251 bp, Zea mays
gcgaaagaggcccacgtccaagctagtcgcggcatagacgtggatatgtcgggtctgtttgttcccgtgcccgacatcctaactaaaacgacggggatatctcggcatgaaaacgccggattttcctcgagatagtaaaagatgtttgctactaattagaagataagtaggaagactgcgatcgatacttgtgcgggaagacgcccatggttgtgtatataaggccaagggggaccccatctatttttatc

SEQ ID NO: 353103 - DNA, 243 bp, Zea mays
agagatgaactggaagatcttgtatcgagttcaaaaattgagccgctttcgaggaacgggtaacgctagcagtgatgttctactgacctatctgacagcgtgatacctctttacttgctccattcttcaagcttcggcgatagccgttatgaacatcatgacttctgaaatgttgcgttttatctggagttttaaagcctttacaacattcttcaaccttctatgatctaacattcattgtgg

SEQ ID NO: 353104 - DNA, 201 bp, Zea mays
gtttgtagcaatgcagtatgtagcatgttcccattatttgagctctggaacatggacataggtaggctcgttgcttgttgccggtgtattgctaattttgctattcaacttgtattgtcaaaagctatggcctccccctgtaacctgccttcttattgtgcgactttgtgattaccaagttagctcttaagatattttaac

SEQ ID NO: 353105 - DNA, 221 bp, Zea mays
aaatgcatagaggaggtttagtgtttccttcacagcaaagaccagttgctgttaaacaaaatgctgatttcgattgaattttccattttatatacaagatagctacaattttaatatcattggatcgattgcacatttttatgttacatgtattcactatttgtgatgctaagacaagttgcagcttaacatgcaatgtttttcatattcagaaagaattg

SEQ ID NO: 353106 - DNA, 227 bp, Zea mays
gccagatgaagtcacagtgactggcgatgaaggtgttgagagaaaagcagctgtgattactgaggccataccagatcacgggactgccccaagtatcgcacatacaatgaatgggtgtgtcaaggaaacccattttggtgatggcaatgagcagaagaaagtaatcactgctgacataatctcgataccacaagatgattgtgtccggaaggagaatgcatccagca

SEQ ID NO: 353107 - DNA, 221 bp, Zea mays
tctctctctctctcctgagaggcggatcggcgacagaggggagacgctcagtctacacacatcggcaaagggcactcgagtgggtggagtgtggcgaggagggggacgacggcgccattgcgacggagcgaggggacaggtcacagtccagggacctgaccctctgcactggtggacaagcccatgaaatcccaggaatgggtggtgcgcagtcgcctctt

SEQ ID NO: 353108 - DNA, 219 bp, Zea mays
ctcgctgagctcaatgaaattggtgggaagcatgggaggagacttcctcgtttgatgacggggaaatctataaccaggctgacgccgagggggggtcatcaggctctggtctcccgaccggggtccgggcgatgctggagaagggtatctgaatctttctttgtttgattcagagacaaaatccgttcttgggaaatcgttgttgggtcggtgatcaca

SEQ ID NO: 353109 - DNA, 211 bp, Zea mays
acaagctcgaggaggagatcagggccctgaaggcttctgccaccgccgcggtcgctgccgagaagcccactcctatcagcagcgtcgcgaacggtgagggggtccccggcgcccacactgccggcaagtcctacgctgccgtcgccgtcctcgcggagatcgccgccctccgcgccgccaagctcgacctggaagcgaacgtcgacgaggc

SEQ ID NO: 353110 - DNA, 245 bp, Zea mays
tctgcaagtatcacgcagcacatggggagagatgaagtatcatacacaacaatatgtctgcagtcagaaacgatcgatgaggggtccaatatttttttcactacacatgttgtatacgtacactggtagtatcctagttgaaggaaacgcaatatatatatattcactacacatgttgctcaaccaatgatctgtttggttcgggatttttggtccgtgatcaattcgcaacgtgaacagatttc

SEQ ID NO: 353111 - DNA, 261 bp, Zea mays
gcaaggagattgccgcagagctggctcgctcaccgaatgtggcatacattccttctggggaaaacggaaagatgctgcttggtctcaatgctactggatttggccggtgattcactgtttttttagtctgcttgtgctatgtgctgatgcatgactaaaacggaggttcgaactttgaaggacagtgatatctgctatccttgcttaaaaaaaaaaaaaaaaaaccacagcgatgcaacaaaccagatgcagccctcagtt

SEQ ID NO: 353112 - DNA, 243 bp, Zea mays
agtggcccggctggaggaggagaacaagcgtctcattgagctcaaggtgctgaaaccactggagccactggagccgccaccggggagcagaacaagaagcagccgccgccgcaaccgaacaggaagcagccgcagccaccgccaccgcctccgccgccgattcagcagctgccgccgaagcaccgccacgacctccggcgaacgaattccgccactttctgatgacgagggcacggggggggg

SEQ ID NO: 353113 - DNA, 180 bp, Zea mays
gtttcgctgcttagatggcaaatgctctatcaccaggcactacagaatggacagagaactgtgtggttctatttgttgtattcttgctcttgtttgtctgttgtagtttctccaaggttgtactgcttgaccttacttgttggatcttaatcttacatatccagtcaccagggtattttc

SEQ ID NO: 353114 - DNA, 225 bp, Zea mays
gattggtggaggctacgaatggcaacctaaacagccgtttaaaaggtactggaacgttgatctgtggcagaagctcttctcgacgctgctgaacccgccctcgaacgacagcgacgtggccgcgctccagagcctgcgagcgtcattccggcagtacatgtgcagcaaccggcagctggtcggcaagctgaaccagctgctggcgaaacaaaaggcctcgctgtg

SEQ ID NO: 353115 - DNA, 139 bp, Zea mays
gcaagggtcagtagggtagcgagtgagtagtgactgagctcgggcttgcttgctagcgcctctgggttctgattcttgacaacgcaaatgcgtactacgtggttaacagtaacatccaatccagcctccagtttctggc

SEQ ID NO: 353116 - DNA, 236 bp, Zea mays
ggactcgtcatgccgccgccggtggagctctacgacccctacgcccagtcagcggccgcggcggcgcagatgcacatcgtaccgtcgatgagcagcctggaggcgctgctgtcgaagctgccgtcggtcgaccctgcggcggccgcgatggccagcaaagaggagatggacgccgtggagcacggcgagcgccacggcatggccgacgtagtggccgcacggagccgcggcgagag

SEQ ID NO: 353117 - DNA, 225 bp, Zea mays
gaccacaaggatattccagatatatgggtagttttgtgtacagctgaacaaagggtaggctcgtgaatcattatcaatgaaaatgttgcccgtcctgtagcatatccacatccaccgtatgctgttactgtcttggctattgatctgacagactgacataatggattctgctgttggaaatttggattttcctgaggagttagagactatagtttcccacactgg

SEQ ID NO: 353118 - DNA, 233 bp, Zea mays
gacctcgccgccgacaacgccgacctcctccgccagcgcgacggcctctcccaccgcatgcgggacctccaggacgcgctccgcacggaggcgggcgccgactcgtccggcgctctcgcgtcccacctccgccgcatcttcaccgcccaccctgcgcctgccgtcgccgccgaggaccagtagcgtgctctctcgaggaatcttcttctccgcggtttggttctacggtcctg

SEQ ID NO: 353119 - DNA, 117 bp, Zea mays
gtggaaccatctgatgaccagagtgataagctaagcatgaactgttaacgaaacaaataggtcatatctgtcattacacacacatatatattctgacccatggtatttccttttcag

SEQ ID NO: 353120 - DNA, 223 bp, Zea mays
gctgctgcggcgatggcgagatgctgctggagcgcgtggtggcggaggcctgccgcgcgagctcggccggacggtcggtggcaccggacagcggcgaagacgccggggtggacgtcaaggcggacgagttcatcgccaggttctacgcgcagatgaagctgcagtgccagatctcgtggctacagtacaacgagatgatggagaggagcatcagctagattta

SEQ ID NO: 353121 - DNA, 202 bp, Zea mays
tagagtttgattttaatccaattcgattcttcaattttatagtgtaaaatttagagttcattaccacctttactggtaatagaacagaaaaatgtgcgcaacggttgtgccctaaaacgagctagcagattgtgctctgtaacttgaaacatgcattgtatggaaatctcgatattgtgtagcaatggagtatggttcttac

SEQ ID NO: 353122 - DNA, 114 bp, Zea mays
tgaactttgcatttccttggatgatccgtagcagttgcaatttttcatttcaagtgatggatatgaactttgatgttttctggcacaatgttttgtaccctcgagttttctggc

SEQ ID NO: 353123 - DNA, 217 bp, Zea mays
gttcctctgaaagcagaggcactgatgacagcacaaagcgacgaaagttgtctttagcaaaacatggacctgagagttcgacatccagtgatgaaagtctttcagcacccccttgtgttgtgacatttagtacaggagtgagaatagtggctgtagccgctggtggtcgtcatacattagcactatcagatttaggtcaggtgtggggctggggata

SEQ ID NO: 353124 - DNA, 228 bp, Zea mays
taacagtgtcactagatcagacgcatactttagggacctatttaaaaggagtggattatatatccttagtgttaaggaccaaaaggaactcccgaaggaactatttgctgtcaaaatgtatgcactggtgaccagtcaaccaaaaatccagaatagtggaaagagaagacggcctagaaattcacctcgtatgatccggtcttgaagaatgcccggtactaggtggcc

SEQ ID NO: 353125 - DNA, 219 bp, Zea mays
ctgcaggtgcggatatgagttttgctatggatgcggtcagcaatggcagctgatacatgacggctgtcctggagcatgaaacagggcttcgagctctcctgtggcttcgttaagcaatgggagctgatacgtgaatcacgtgatgagggtttcaaggatggagtaggtattgatgttgctatcagtatggtttctgtagtcccatggaacaatggtcca

SEQ ID NO: 353126 - DNA, 218 bp, Zea mays
gcccccgtcgctgcagccggcgtcccactcccacgcgtcaaggccagtgcgcgtgtgcggccggcggcgggctttggtgtgcggctctctctaccttgctgggctgggcggtgctcacgccgccgctgtcgtttcgggtctggagttctggacgtccaggcgcgcacacgagtctaaactctaaagctgtttgctaatgaactacccatttcttcttt

SEQ ID NO: 353127 - DNA, 220 bp, Zea mays
aactctccctctctccttcgcctggcacatcctcggcggcgcggcagcctgcttcttcaccggcgcggcggcctgcttcttcaccggcgtggatctccagcgctcctcgagctggagcaggcaggcgtgccggtcttctccaggcgggtggatcttcaccggcccggtagcctcttcttcaccggcgtggcggcctaccgggcggacggatccgcggtcg

SEQ ID NO: 353128 - DNA, 167 bp, Zea mays
gcttgaagataccaccacagctttatgtatatggaattctggagttgtcggtctgcgccaacttccttcctgcggtcgtcaccgcatgtttgtacattcgtcgcttggacagttttatgtatcccgagatttgttaatattgtatcagttggttcgtgattgttgat

SEQ ID NO: 353129 - DNA, 209 bp, Zea mays
tttctagctcgctttgttacagttcagatttgagtgcgcgtaagataaacattagcagccatcttttcttatcatgttacatcttgattcctgtaaaacaaaaggtgttagaaaataccgcatagttaattagagaaagtgcaaaaaaaaaaaagaatgaccatctatttttgcagattcccatctgttcatcacctggaggacttgtt

SEQ ID NO: 353130 - DNA, 209 bp, Zea mays
gagaactagtctcgagttttatttttttttttttttttttaatatacaagtaaatagtatagtaatatatgtacaataatacatacaaatgaacagcaataatagttcttgaattgcttcaatcttttgcaaagagagtagttctttccttcatctttataaactatgatttcaaaaaaaagtattcttatattaaattcaaagctgaa

SEQ ID NO: 353131 - DNA, 234 bp, Zea mays
atatataatttggaccggagtagatgcttgtttactttctaaggttgacatgtgcataatttgattgttcaatgggccatgggcttcatcccgttgccacggcccgacggcaagcgagcccagaccaaaaccctacacgacggcggatggctccgacgcctacaaatacacgaggctggatggcggaccctctgccctccactcaaattactctgccgccgccaccttcgccac

SEQ ID NO: 353132 - DNA, 240 bp, Zea mays
tcactttaatttacacagccagcggatgccgaccctcacctccgatgccatcatcgcgtccccgaggtggggcgtcctccccttatgcggcggcggccgctcgggcggaccgcgcactcgccgcccgtcgtcgtccggcggccacggctgcgggtggccgccgctggaccgcgtggccgtctgggtcggcggcggcatcgccgcggtgttcttcgcgtccctggagcggtgctcgtgcgt

SEQ ID NO: 353133 - DNA, 244 bp, Zea mays
gcacgttggagtccgagatcgagaagatgaaaaaggagcacctattgcagctgaagcggaaggacgagttcatccgtgacttgatcaacaggaaggatcctaataacaacagtgaagaaacagcaacagttgatagaagagttgtcacgagggcgagcgtgcgaaaggcacagagagacgcatcagccgcagtcgagctgaaaagccccagccgggtgttcacatcaccggcgccaactgcaaa

SEQ ID NO: 353134 - DNA, 228 bp, Zea mays
attgtggcaaaggctcgagaatatgacaataacagttgttcaaaaactgttggtaggaacatttatagcagcaaaagaacaaaagggaatgcgtggtttcttatctgccttagatgagataagatttcggacatgtgtattcatgtttttgagtgatttggcactatgaatgcactagattgttggttgcttttttttgttaattgctcaggttgtatttctagtcac

SEQ ID NO: 353135 - DNA, 227 bp, Zea mays
gtatctttcagcaagagataaaccatctgaaagagttcagagtggaatggactgataagatttccactgtcattttgcgtggattcgatgctcgttctcgggattatctaaaaaacaagaggcagtggctggagaaatcagatggacctgctgtatccagaaccttcatagaatctttagactacatgcaagagcaactatccaagctgcaaggtggcctaaatacg

SEQ ID NO: 353136 - DNA, 226 bp, Zea mays
gtgcaaggcctgagctcgttatgaaaatgaccttattctgtgaggggctattgttggggtggccttcatgcctaaaggtcctcaaaagatcaacattgtcaattgagcaagcttcgggtagccagactcatctttgtccaagccagcgctaggtgaagggacgaagccaagaagctttggatctatgaaaacattaagtcaaacaaagccgaaggaaggagcttcg

SEQ ID NO: 353137 - DNA, 220 bp, Zea mays
agtccagaagtgcggcagagtttgcgcaagttggcatgactcccgaggaagtggtatcgaaaataatggcaaacccagatgtagctgtcgcattccagaacccaaaaatacagacagccatcatggactgctaaggtcaaagttcttcaggtgatcaagcatacggttatcccattgatcaggagatccacccatgttctttagcatatcctgtagttgt

SEQ ID NO: 353138 - DNA, 191 bp, Zea mays
agcaaccaaaaatagccgactaatagcagctgcatggcttggtcacttcatgacatgaagtatgtttctctaaacagacccctcaattgctgaatcatgcatcttgtatttttttctaacaaaaagatacggaataactttctctcttttccccccttctctgagaaacggcacggacccaaacacgcacc

SEQ ID NO: 353139 - DNA, 225 bp, Zea mays
aaagcggcagtccttgtccttttgctctctctgcccctcctgctaatcacaaatcgtctccttgggaaacaccgatgcgagcactgaagtcaggtggcaggcaccggcatgacactgaccagccgaacactgatgagtggcaagttgggggatgaggagtgaggatatcagccgttgcggtgaaggtcgtgggaaatgagcctcacttagtcacttagaagggtg

SEQ ID NO: 353140 - DNA, 221 bp, Zea mays
gtcagctgaaaacacgaattcctgtggtagcgtctccttgtctgctgaccccttcatttgacttccaaaccaggatggtttgtgtctacttggttgtacaatatctcagctcgtttcctgagttgaaaaaaagaagcaactgcagaaatgggcattttatttttgtctctctctttctcaatctctgtaagaagacactctgattcttgcttaggtcatac

SEQ ID NO: 353141 - DNA, 233 bp, Zea mays
gtgatgctgcaaaaccaatccccgaggtgtttgaagacgtcaaagccatttttgccccatattctctaaaggtaattaggtttcacttgttgtttgtgtattcttttctccagatggatctttaatctcatgtttgccttagcatcgcattgaatatgttccatctttgaatatatgtctacaaacattatgtgcctttgaatatgttccggcacctttaaaaacttcatttc

SEQ ID NO: 353142 - DNA, 220 bp, Zea mays
tgcctctcacctcctctgccgccccaacacgcctcacgccgccgcgtccgtgctccggcctgtgctccgccgcgcccgtgctccgaagtgcagcacttgaacaaagcaaggccaaatcaattatggacgctaggcaggtatccaagatggtgaagttcccaggaggtttatttgcgtcttggataccagtattaagctcctcttgtatgctactgtcaac

SEQ ID NO: 353143 - DNA, 143 bp, Zea mays
aagcactctagaacagcaaagtaggctttatgtgtgtttgtatcacttgatgcatggtaatttgaatttacctttgtgaatcagtactcccagaatcctggtttcttgtccagatgttaaaagcgttcacctcgtaatttatg

SEQ ID NO: 353144 - DNA, 213 bp, Zea mays
gtgatgcaggaacccccaccaccaccgttgcgccgccgccgatgtgtacatacggccggctggtgtaggagagatctggcgatgcggcgggcggcgaccgcagaaggaagcaggcagcaacaccttcacattctgttagctccatcactctctctcaaaatttctctcctttctcctagcgtgctccacacctgccttgatattttgttggtg

SEQ ID NO: 353145 - DNA, 231 bp, Zea mays
ggaaattatgcgtttcgatttcataggagttgggagaacagaattgtatcatagtgcactaactcttggttgtaggattgagttatcctgcatgccatggatgaggcgcttcgtcatcgaccgaatgctgtaatgcggttacgattctctgatctccttttcaaccattaattccagttgtaaagcctgtatagcttcatcttttatccattaacagtcacgttatcttca

SEQ ID NO: 353146 - DNA, 241 bp, Zea mays
gatcaccaggggcccaagaagacaagcctgctacctcaggatcaccagagaagcgacggcggcgggctactaaaggaagggctgtacgctgcggcagccaacatgggggttgctccatactaatattagagtagcaaagctgctacgtactgttagggctctatggactactacgaagctatggacgtgtttggtaggctgcatatgggccggccaggctggtaagatacagcgtacgctt

SEQ ID NO: 353147 - DNA, 202 bp, Zea mays
gaatcgcaggtaaacactaaacattttgattctgatacctataattttcttaaataaaatagtctgaaattgtttttattattatctaaaaaagtatccacaatgaagcgagatatgtagaaccaggtctgtctagttacttaaacatccttctctaacaatatccttattatctgcctagttacttaaccatccttctttt

SEQ ID NO: 353148 - DNA, 243 bp, Zea mays
gctctgcgtcctggctcgggctccgcagcacggaagccgaccgcctcaccatcgcgctgtgatttactggatcgacctcgaccagtggcgatttaattggctaatgatgggttcatgatcatgcctgcctttggggctggaatgctggatggagatgggagacagagacaggattgtagagatgttttttttttcatttcttacgagagtttcgctgctgtcgtgagatctgattcgataata

SEQ ID NO: 353149 - DNA, 223 bp, Zea mays
tgggtactgcgcccccaatggacgcatgatttctgctttgaaggcagcttgttgtccccactttagaattgtgtattagcgccatattaccacataggttattacttatcagatgtatttaggtagtgtttggtttcagaatatggtaggatggagtcactttgctcctaatttattgttgtttgaattgatttcatgtaggacatagtaactctaaaaatgg

SEQ ID NO: 353150 - DNA, 223 bp, Zea mays
gaggaagctagtgccgctgttaagaacactgacaagagcaccatattggacagggtagtgaccgttgaatatgccttccgggatgatgacggcgatagagatgaccgatacgacatccccaaacaaggtgcttatgacaggcgtggtggtagcccctacatgcgctcacctagcccaaggtaccgaaggactacgttccagattatggtcggcgtggacgtta

SEQ ID NO: 353151 - DNA, 220 bp, Zea mays
gccgccgttcacgccacgggcccgcgccgcaccacctactactgcgcacccagcagcgatatgccttctctcctcttctcctcctttatagctcggattactggcccattagagccagccgtttcctccatcaatggtgttcaaatcctccgtttctcatcttcaatccctattaatttggccacgaatcttcctctcctatcggctataaaatctgagc

SEQ ID NO: 353152 - DNA, 237 bp, Zea mays
aattaatggtgagatagtaattaagatgaaagatggggaatgcccttcacccaaagcaatggccaagcaagttctatgctaccttgaagagaacggatatttgcaagcttagcatatgtattttgagaagattgatctgattcttgtgtgtccattacttgtggacacaataagatctgttgttggtcacatgaataaaaggcatcaacacgtaggaagtaacagaaggtaccgttc

SEQ ID NO: 353153 - DNA, 235 bp, Zea mays
tcgtgcgcaatacacttactgttgtaatacattacagtattagtttattgacattatcaagtaccagcaatttcaacccctggatgtgctgctcaggtggtttcattcaacatggtcaaacgtaccttggttacatcatgaagctctttcttgcagtgcagggataagtacgtgggacgagttatgatagtattatgtgacacaattctcccaaagatggctgagtgttgttatg

SEQ ID NO: 353154 - DNA, 235 bp, Zea mays
gggagacgctcagtctacacacatcggcaaagggcactcgagtgggtggagtgtggcgacgagggggacgacggcgccattgcgacggagcgaggggacaggtcacaggttctccatattgcaactactgctcaggagaagatgaagtcgtggtggaggatttccaaactttccaagagtacgatgagttctaggcgtggattagcggtaaacccccagtcggctgcctgtgaag

SEQ ID NO: 353155 - DNA, 241 bp, Zea mays
gctactgctacctaaccttttgcttggccgatagataagaataccggactgatggatggaagtggatgtgaacaaacagctggttggctcagggcaggctccacaccaccaacggccggagcagatggacatggacgtctcacttaggaggagaaggcagatgcggcagaagcaccagcacactgaatgcaatcattcaatactcatctacagctagccaagatgtgagaagagagcaagg

SEQ ID NO: 353156 - DNA, 236 bp, Zea mays
gtcggaagcaaattccagagataaagaatgagctgaaggggtccatgttctactgctagtcctttgcctgctgaacggacgatgcattgttctatagtgaaagacttgagtgtgctctgagtctctgactgacatctggagaaggatggcatctgcaatagtcgccgtgttctttttagtacactagaataaatggatgttttttgtggacgcccatgttgaactagttttctttt

SEQ ID NO: 353157 - DNA, 213 bp, Zea mays
ccagtctttgattcgtggtcttagcgtcatgttcgtatgcgtggggttgcgttctttccgatttgtatagtcggtctgcagcatgttatatgatatgcttgaagtttgcactcctcccttgtcatcgctggatgcctggataaacaaaaccagctgttgactgactttgtaagttgtacctctgttgcttacgaaatattacttcccttctcg

SEQ ID NO: 353158 - DNA, 224 bp, Zea mays
gagagagagaactagtctcgaatttttttttttttttttttttttttttttttttttttttagaagaaacaacatctttgctttgtaagtttaggtattgtgccagtctcagtgaattcaactacacattgtcctccccatcgtccaggtacatcatatatatgtctgttacccataagccaaccgtatgagacgcagggcacgctcagttacctcctagctac

SEQ ID NO: 353159 - DNA, 230 bp, Zea mays
aagaagaggcccccagtccccagccagtccacagctctccactcgagaaacctccagtccagctccacccttcgtccagaggcacaacacacacaccatggctcccagcaagcttgcggtggtcgtcgccttggtagcgtcgctcctcctgctcaccaccagcaacaccaagcttggcctgttcgtgctcggccaggctgctccgggcgcctacccaccacgggctcctc

SEQ ID NO: 353160 - DNA, 227 bp, Zea mays
gtcggccgagcgtcctccgtctcaggccgggaatcgggcggcgggcaggccaccagcgcccagaacgaccgcccgctaccaccgccgctcgccatcggcgtggcgcgtgtagtgggtagtaagggtaactcgtcgtacgcgtgcgttgtctttctcatttgctaccccggggtggcaatgtacgtgcgtgcgtgcgctgctgaaaaggcaaatactatacactaccg

SEQ ID NO: 353161 - DNA, 240 bp, Zea mays
gccagcaccagcggcggcggtaacaacgtcgtcagcggcggcctcctcagctactactagctagcttgcttgctggtgtcgttgttgttgttttctttgaggtctgcgaacggagagattggtcggcacggcagtgcagctgtgccgcgcacttgagaatcagtgttctaacccaagctccagacctgatctaactattatgcaattcgtatttaaaaaaaaaaaaaaaaaaactcgagg

SEQ ID NO: 353162 - DNA, 221 bp, Zea mays
gcgaatctgaagcggcgacggcgaatctaaggcggcggcggctcaatcgggggcagcggcactgaatggcgggggagagaggcaacctagggttgccagaggaaggattatatgggctggctggtgggctgggtctcctaccccttccttctccttttttctttttttttctttttcttcctcctccatggggctgttttgctgattctcaggttgataag

SEQ ID NO: 353163 - DNA, 248 bp, Zea mays
aaaatatttgtcatatcttttcaattttctttcttgtgtaatcatggcctagatgtttagattactgattagcagtttttctatgcattattttgagtttgtagacaacagacattgagtgtcttttgatattaattttcaggtcaaaggtcagttttgtggaaaacatacaatatgttggtatcttcaatagtataagatcatgtaccacacgtcaacatcaatattgactaatttctttcagtagg

SEQ ID NO: 353164 - DNA, 236 bp, Zea mays
accgcgctcgagctccgtgtccgccacagcggtggaggccaagaacgcggccgcggcggcgcgggcgcggtgggggtggcacttcccgagcccgctgaaggcgttccgccaccgcaggttgtcggcgagcgtggcggggcgggcgtgagcgaggtgcctcacctccagatgcccggaaaatggttagtgtgggggtcagtggccgggatcattacctattaatcactagttaacta

SEQ ID NO: 353165 - DNA, 159 bp, Zea mays
attatgttgtagtatgtgcttgtgcttctagttgtggtgacttctattatgttgtactacctccggtttcggatagttatcgtccgctattttatttttaaactaaaccgtgacaaataaaaaaactgagggagtagtatgtgaaaaaaaaaaaaataa

SEQ ID NO: 353166 - DNA, 219 bp, Zea mays
aaggaaaaaggaaagatgctattcgctacagtactagaccatttggcagctctgtttttgcttcgcgagcatcatggtatcttcttcggtaggttctaaatcaacactactttattgtctcagtggcaatcttgattccttcttttctaatcacgcatccatctgtacatcctcagtgtaccattggaaaaacatcgcacaaaaaccgtgctccaaggt

SEQ ID NO: 353167 - DNA, 224 bp, Zea mays
tgacaactcagtgccatctgaatcataggacaactgaagcaaagcgagatagtaatgggagtggacttgtgaagatcaggctgcttgccatcatatatatatacatcggaggaggaggaatagtaagtacatcactccgcttttctgttttttggtgctctgctggatgaacaagaactgagctggaacaggagaagctggctacgtgagagcactggctgcct

SEQ ID NO: 353168 - DNA, 244 bp, Zea mays
gcgccactaggtagtcaccgagcgttcggtaagactggctgtaggttgtgccctcacatgactgcaaacgacgtgtttcagcgttttgggagacaagactaataaagggcgtacgtagctagcttgacattacacagagtgacagagacgttgcacaggcgtcagcaggcgtcggcggtaagcagctagtcaagtaggacgcatttgtcctcgattttttcgtgttttttttttgacgaagggg

SEQ ID NO: 353169 - DNA, 239 bp, Zea mays
ggctgctgaaaaacccatgcctggtatgttaaatcaaggtagacctgagagaaatcaaattcttccacaaaatggtggtcagcatcatggtaggtcctcaatggccaccgttgttccgtcaaggcatgttgacaaggatctatctaatgaactgaaagccttaaagatcagtgacagtcatggaccccataatggtcaagatgtacagatggagagtggttatgccatttcaccaagcc

SEQ ID NO: 353170 - DNA, 223 bp, Zea mays
tccaatcgatcttagaccgagtcgactctttttttcatcttttagcgtacatgatttaacgggtaacttgattgtcaaaagtagcacgggtgcacggcatccggtgctgctgagtttgaccggtggcggtgtgcttagggaccagttctaaagtgattgctaaattgctgtgctcattctagccttgattagtgctgctgctgctgtcattcagctacccatg

SEQ ID NO: 353171 - DNA, 221 bp, Zea mays
ctgccttgctagggtttaagccaccacccgccgccgccacctcttctagcgctcgcgcttcgccttgtgacgacgatgcatccggtctcgttgcgagctcctcgcgtccgtcgtcatggtttcctgaatgcctgcgattcgttctgtgttttgttttgttcattcattcatattgatcatacagggatatggtagctgtgacgagcaccgctttcttctga

SEQ ID NO: 353172 - DNA, 222 bp, Zea mays
gaaactgaggagcttgtgaatcaagtacttgatgaaattggcattgatatcaaccaagaggtgattactgtgataattatacatttttaagctttcaaaaaaattgtccagtgcctttttagtttcttaaacatgctttcgttattggttgtgttttatacaaatgccactgagtcaccaggtcgtggattcgaagcaacctctccgcatatacaaggggaa

SEQ ID NO: 353173 - DNA, 220 bp, Zea mays
gagccatgatgcatacagctcacaggggcatcgagtttaaaagatcgtcaagcgatggttatgaagcatcaggaggtgaagatagcgaccgcatcccttcaaggatcgtgcacaggtcgtcaaactgggccagtgtctttctgcattctggtcagggagaccctccagctgatctgctgacgacatcagctgaaggttttgtagctaacgactctggttc

SEQ ID NO: 353174 - DNA, 235 bp, Zea mays
gctcggaagacacaggtggtacgcagtacatcaaccgcaaatcagaatcagcatatttccagaactatcaaaacggcgccaaacctcagcaagaacggtcaaatgagttcattgagtggatgcttcagacaagatctatagcatggatcataatctggattgtccttaagtttttattgtgctaggggaacataagaaagtatgtagagcaaaatgagaggagctgttgttaccc

SEQ ID NO: 353175 - DNA, 239 bp, Zea mays
gtcaggttctcgtaacaatgaggcaacttggaatgggagcagtcactctaccaagaaaattgttgacaggaacaatgattctgcacgcttgaataaccctggtaagggaactataagatggcctgtccctgttgaagacaatgcttctcctgtcaggtccgagcggggtcttatggtcgacatgaggcagccccatggaaatggcggaaggcatctggtccaggtgtcatcacagacac

SEQ ID NO: 353176 - DNA, 181 bp, Zea mays
gcgaccgtcctcgagctcgcgcgtttcctggcacacaagtacccgcagtacggcgtgaaaacaaacctcgacggcgatgaacagcagctactcgagaagccgagggtgagggtgtcgtcggagaagctcgtccgggaagggtttgagtacaggcacaacacgctggacgagatctacgaca

SEQ ID NO: 353177 - DNA, 243 bp, Zea mays
gagaactagtcttcagtttttttttttttttttttttttttttaatcaaaacggcacgaggttccattacttctcaaaatagctgtggcctgtagcttctttcattgtttcaaagcattacaacataagcagcaaaaccagaaacagtcctcataagcaccacttattagggcagtacaacacaaacgataagcgcggtgcagatcaagaaagaaccacaacatgtagaagccatataaaagc

SEQ ID NO: 353178 - DNA, 250 bp, Zea mays
gggtttgcacgttgtgcctaacatggatatctccttgactaacaccttccacagttgaaatgggagctgatcggatgttcaaactggagcaaaactctttcgagacaattgtcggagtctgcttggtagttggaacatggagaacctgcacttcgccaagtgcaacacgttcgaagataaagtgcaggactgcatgctaatctccatgtgcttcgttcgttgatgctaaacgagagtcatggaaagatag

SEQ ID NO: 353179 - DNA, 245 bp, Zea mays
ggcaacctcgtgaggagcgaacctgtacaacctcggcctcattaagtcgtgctcgtgactcgtcaaggccggccgggtgctcgggtcgagacgcgcgtcgtgcaggggacggacggacggacacgcgccattgctctgtgtacgtactgtattgtacatacagggcaccgacgccgtggcgtggcctggagcaggatggctagccgtacgtagggaaactctgtagccgtgtactgtagatagac

SEQ ID NO: 353180 - DNA, 238 bp, Zea mays
  unsure (1)..(238): unsure at all n locations
gatccatcggtcgtcgtgaaccaaacagaatgccgttgctgacttgctgcggtgtcgtcaagccccctctgcatgatgccgcgtacgtactaatacggtgtgcagactgcactgcagagggagcgtacantgcaagaggacgccatgtactgttaagtatgcgtgaacagcgtgtagcaagaagctctggacgaggcctccagcctcctgtgtgtaaattgtaagggacgccgcgcta

SEQ ID NO: 353181 - DNA, 122 bp, Zea mays
tgaaactatagcttcttcttcttgactttggttgtaagaaatactaagtttcgatagcatgcgtggtgggtgtttgggactgtgattgaacgcgagaggttcaggtgctgctatatttgagt

SEQ ID NO: 353182 - DNA, 220 bp, Zea mays
aataaaacgaggtttgctgtttattataagtaacatttaggagctcctactgtagttccaaggcaggtgtaatccttagaaacatttgatggtgtgcttctagccttgtagtactcgatatgtgcaattctgtaaagtatcgcagatttttcacctgagcatgatattgctgcaaatatgatctggtctctaaattggctaatgtgtggccaattttcaa

SEQ ID NO: 353183 - DNA, 189 bp, Zea mays
gaagaagttccaccaggacgaggccgcccggagccggagactgatagagctgcagccggagctgtcgctcggcccagtgtggccgggcttggcaaccggtggtggcctggcagccaagagctcctcgatcgagtctcatggaagcccccggaagaagaggaagaactatacggcggccagctgggactg

SEQ ID NO: 353184 - DNA, 187 bp, Zea mays
gcacattttgatgggaacaaggttccttttgccggcatagctacctagcttgtggggagctgggattccatcgcaggtgattgattactacttgtcctgattctaggtgcagagtaagttatgtagattgcaaattgatcctataataccagttgtctttttgtgtgtgtgtgtgtgttggtgaaaa

SEQ ID NO: 353185 - DNA, 200 bp, Zea mays
gtcgagttcggatcggaaggtagtttgccgatggtcacgtcaagcagaacatctgagagagaagcaatgcaatcgatgaatatggcgcgaaaacagtcgctggcgccttttctgtgtgcgtggtagtgtgtgtgtgccaagtataaaagcgtgtgatgttgcagtatcctgtgaaagcagtctcgctgcaccagatctgt

SEQ ID NO: 353186 - DNA, 245 bp, Zea mays
gtcgtgtcggtcggtacgtatagatgcgtgttgttagcatgtgtgtcattacctagtcgtgtgtagtgtatgtatgtgcttgccgggcaaaagttgcatctagctaaacagtagtattacttttgtatgtcttaaaaaaaaaaaagaaagccgtgccacgctttaatccagcacggtcacatgacgcgtggtccccgttcgtccgtgtatgcgggtatgccgcactagtccggcggggcacggtg

SEQ ID NO: 353187 - DNA, 230 bp, Zea mays
tgccgttcccaccggtgtacggcgtggcgtacgcgtcgccgccgccgccggtggaagccgtactagtaaaccacgcgttggccgctcgctcgcggtgcctcgccgtcgccgtcgccggagtatactacttttccagccgccagtatagtacttgtccatgcatccatatccatctagtattttttctctgatggtttcgtttttttttctttctttctttgtatctcatg

SEQ ID NO: 353188 - DNA, 228 bp, Zea mays
aagagaggagctgcatgcacggaaaatgggcgcaaatgtgggagatttgtgtgcgaaggagaccaactggatccgcgcacccacaggctccacaaggccataacccacctctccatacgccaattgacagggcatggaaacggaagagggtgcacacctggttcttggcattgcgccactagaatcttgccactctgcctcttctgttccatcaattaatgcctcttt

SEQ ID NO: 353189 - DNA, 242 bp, Zea mays
ataaaaaaaaattggcaatggcggacaggatggcaacgtcccccacagaacttcgcagggctccccaatattcagatattataagtgtaacttgctaaattcttcgaacagccttttgcattgaacatggatatggtatcttttacatatggttccgtttattttcactgcaaatatgtgaactttgtgtgtgtattatccagtgaatagattacaaaagcttctgtttgtaatcttctcgt

SEQ ID NO: 353190 - DNA, 210 bp, Zea mays
gtttcgcgtccgcctcagcccgccgcaaggagaggtaagttcaggagacatcttcgagaagctgaaatggctcctaaagctgctcctgccaagaagggtgatgccaagacccaggccttgaaggttgccaaggctgtgaagtctggggcagccaagaagaagaccaagaagatccgcacgtctgtgacatttcatcgccccacgaccctg

SEQ ID NO: 353191 - DNA, 215 bp, Zea mays
gtccaagcaggcggctggagctggggtggaaaaaccttggctggggctgggccaagaagcgacaacagcgaactggagatgtgatgaatcttgcccgacaagaaggtgcagtgcacgagattcacggatggaccaggtcgtagcttcaggttaaggtgaaggataacttaccgtcgggtactctactcactttactgctctactactactactgc

SEQ ID NO: 353192 - DNA, 202 bp, Zea mays
gcggaatcatggcggccgcgctgggcctcgtggccctgctcgcctaggcacgggcgcggcagcgggtagcggctgcagggccggagcggaccgccgggacggacgacgacaggaattggtgacgcggatgctagcggtaggcggcgcgcggtggtattcttggccggtgtagttgtagtggagtaggagtcacgttcggtgg

SEQ ID NO: 353193 - DNA, 199 bp, Zea mays
tcaccacgttggtgactcagtaaccagtggtgttgaacaccatgtggttgaatctcaatctgccgtatcatcaaatactgtctgccaggagccaccacaagatggaaagcaaaagagaatgcctcaacggagaaggtcttcaagactgaaccaaggttcctgtgagatcaggggagtatctcagaacacactgcatgag

SEQ ID NO: 353194 - DNA, 226 bp, Zea mays
gcctcttatttacaatgaatgaataatattagtacgtaaagttttccattgcttggtggatgtatacactattgcaacatttttagactgcattgcacatcgtcataccgattaccttacatatatacatcagcattttattaaatgttgtacgcaaatgacaatgcatacatttaattgtgatcttgcaggttgctcgaccacttcataatctatgtggtttgtt

SEQ ID NO: 353195 - DNA, 235 bp, Zea mays
gtcaacctgggaggatgaagaggccattaagcagaaatttccacaagcaccagcttggggtcaagctgtcgttaaagaagggggaaatgtcagcagagcagatcacatggaccatgcagaggagcggactcaagcagtgcaacagaaggcacagacagagggagtcaaggaagacaatcagagcccgcgcacctgtcgtgtaccatagccagataccacttacatcggtgcagag

SEQ ID NO: 353196 - DNA, 221 bp, Zea mays
tcaaggtatgtgtctcaattactgtagcttatcgtttcagctttcatactttggttgtgaaatttgagcagggcactaaatagtgattgagccagtgttccaaatccaatttcaaatggagatttccttggattgcattagactaaactgtaaaagaagcagtatgagcctgagcttcagctttcaggcatagcccgcgaatacttctagttggaacacat

SEQ ID NO: 353197 - DNA, 233 bp, Zea mays
gttttcttacaacaacaacaacaacaaagccttttagtcgcaagacaaggggattgcagacagtataatatgatatctcagatttacaaattagtgtcacacttacagatactggctacgacacacattacttcaaattcttgagatctttgggcagatgtttgaccgataagtttttttctgaatgttatcggtgttgtgagattagcttcgataaatttttttctgaatgt

SEQ ID NO: 353198 - DNA, 223 bp, Zea mays
  unsure (1)..(223): unsure at all n locations
ttcggccgcggcacacgggtggccgccgggagcgccggggacgggtcgtccgccagtggcagcgcggcggcgaaagctgcaccgaccaccgcccagggaagcgccgctacccnatgcagcgaccaacacaccccgagtacagtagaggacctcgagctgtagtttgcagcacttgagctagctatatttcttctctgccattcgggttcagcatcgttcttgc

SEQ ID NO: 353199 - DNA, 223 bp, Zea mays
gacaaggacaaggacaggaagaaggcccccgtgtcgcgctcttcccgcgccggcctccaggtaccctctcgcttctttttctttcgaatttcatctcgatctgtgcacgccatatgttactcagatgctaacttaaactggcgcttcttgtttgcagttcccggtgggtcgcatccaccgccagctcaagtcgcgtgcctctgcgcacggccgcgtcggcgcc

SEQ ID NO: 353200 - DNA, 145 bp, Zea mays
gtttatttgcctttcctctctggattctagttcctctctctctctctctctagattctggacaagtgtagtgcttattttaagttggttggtttaagaacctgaaatgaacatgggaattctatcaagcatttacaaacttaaaa

SEQ ID NO: 353201 - DNA, 246 bp, Zea mays
gtcagcttgctggaaggaactctcatgcaggttaaaggacatgctgagtcagtggtctgtaaatgggctgacaaattggatgagctagaaacaatctgcagtcagaattttgtgctcttcattgaccgctcatctgcatgtagtgacgagcttaaaatcctgaggaagaaggtacatgatcatcttaatgaacagaaggaacttgccaatgcgaacaacgagctggctattaggttcaaagagaaa

SEQ ID NO: 353202 - DNA, 234 bp, Zea mays
atgtataatacgtacgtgcatgtgtatctagctaatatataggggtagacacggcatcttgcggtgctgccatgcatgcatggaaatactacgtgctgatcgatctcaagcattactcagggtgctcgcgtcgtgttgtatttgtatatgaggtattgtataaagcatcggttcccacggtttctaacatcgtcgtgggagttatgcataaatgagcacactacctcactggta

SEQ ID NO: 353203 - DNA, 235 bp, Zea mays
gggaaaagctcctcggacatctccggcggcagcagggccgaccgcgtgacgccgaagatgcctgctgcaagcccaggagggtctcccggaggaacacgttcgactcgccgatgctgcgctcggacggcgcgctcgtggacgtccggaccccgagtggaggcagggcgaagaagaaggggggcgtgtacggcgtcgagttggtggacgtcaagtgcggtaaccccatgaccagcag

SEQ ID NO: 353204 - DNA, 239 bp, Zea mays
gaattgtattttttttttttttttttgactctggtaattttgcgctgttgggacttcagacagaaccatgtctttgaacgattacaagaatatacacaagaatccgccacaggaccaacttattaccacgattacacgaccgacaaagcttcctcctttataacgaaagggaccacatagcaactttcacaggcgtgggggtcgctcgacgcgctcatcggccgcctgcgcgcggcgta

SEQ ID NO: 353205 - DNA, 170 bp, Zea mays
ttttcctggtcatcgctgtggcgcttttgtattttatttgttggacccgtaacactatcagggctctgctattagcgcttgaagcctgtaatggcattggcatcgtatgataatgtgatcgagggtgctagttcccctaaaaaaaaaaaaaaagaaaaactcgagcggca

SEQ ID NO: 353206 - DNA, 252 bp, Zea mays
gcttaggtgaagttcgaactgggcagccatctgtgctcacagctgctgcgaatggagcaagacatgacaaaggtacaaataatgtcatacagggttatggtggaaagcaacaagggaggtcaactgggatggcttacctttccagaagatgaagtagttttcactcgctttgcgctgcagacgaggggcggtggctctgcagggggagaacggtggctgctgcagcatgcggagaccggaggctgctgtagc

SEQ ID NO: 353207 - DNA, 179 bp, Zea mays
attttttttgaataataggagaagaggaaacttactccatagtttagtgcgttatgcagaagtaatggttttcttgtaaaaatcgatttgttggtttccaccggcgttttgatgatgagccggtactatgtaacttacgatagctgtaagcactaagcagcccattcttgcttgggacc

SEQ ID NO: 353208 - DNA, 169 bp, Zea mays
gaagaaagcctgttattgattgtatatgaggtaaaattgcatcaaaatcacgcatcatgcggtttccttaatcatcctgcagcatttctgaatgaagatgcatacatgtagtgctgcagtatttgtagttgtatcggtggaatggcaccttgccgaccaaggaaccgaa

SEQ ID NO: 353209 - DNA, 210 bp, Zea mays
gaatcctaaaatatagtgatttcactagatcacctaagcaagcgcttccaacacatttacctccctgaactcaactacaagaaaacactatagtttggcacaaaactacacgacacagaagtagtttccacactggagaccagattacagacacctgtctataggctatggcctatcgtcatgatccaccagaatgaattgcaatttgca

SEQ ID NO: 353210 - DNA, 181 bp, Zea mays
gtagtattctttcgttgctgctgctgctcgtgctatttgttttgcagtatttatgttttggtagcatatattgtgccgatccattcctgtaaaaaaaatggcaggaacgaggattggtcctactgcttgtactcgtactatgccccaagtaagctgctgtatggtggtaagatgcattctg

SEQ ID NO: 353211 - DNA, 241 bp, Zea mays
gccgtgccggcgacgacgacgcagcactcggcgacgccatcgtcgttctgagctgccagagccttgacgcgtggtcgacaaccacctcgccactaacgaccaagaaggcgaaggcggagagcaaggaggatccggaagaggaagagagcgcaggtgaccaccgccgcaaagaagccataactgctgccgctgcgtcgccgtcatcttcactttgctttgatctgaacatggacgttgagaa

SEQ ID NO: 353212 - DNA, 138 bp, Zea mays
taaggaggcgcacggccaccgaagatcctgctgggaattagctgtaggccattgtttttcctttccctgcacattgtgttgatctttttttgggttttaggctgtcatgttgtttggtggaatggagatgtgttgttg

SEQ ID NO: 353213 - DNA, 227 bp, Zea mays
gtgttgtggccctctctcctctcttgtttcgctgtggttggcgccatgcgaggtgaatgcgatctcttgcctggtgctgctccagtgcttccatctgcttctgctgtggatgggtcactctgctttctcctctgtgatgtaagactgtaattaacataagaatgggatttcattgctgtcagaaaaaagaaacaaaaaaaacaaaacaagcaaaaaggaaggaaacc

SEQ ID NO: 353214 - DNA, 221 bp, Zea mays
atgagatgcagtctacccaggacaagtgatcagggaggctagcatggtaaacttgacaattctcctcataaattatcataagtcgcacataactccatcctacaaaataaatatgttcatcctataactaacatcaccgctgcatgacagcaatgatggtgagctgtaattttccatgaaaatgctgcaggtgaagggagcaatactccaacatgtccagt

SEQ ID NO: 353215 - DNA, 234 bp, Zea mays
gctctggaaccaaacactatattagttcacccttaggtcgcccgatgctagctactgatgtaaaataggatgcttccccttgtgtaaattatgatcttagcgctagttccacgttttgcagcactagcatcagcctttatcaggccagatcggacgacaggtctaatctgtgttgtagtttctttgcttgaatcattctgtggaacatatttgtgtagcgcgtgtgctgcgtcg

SEQ ID NO: 353216 - DNA, 223 bp, Zea mays
gagagaactagtctgagtttttttttttttttttttttttttttttagcgctggaccatataaactagatatcacactccagttgtagtttgacccatatgccatcacaggcaaaccgctcaagagttcagatgcttcaaccacactacgactgagagatacttactacacacgcggcaaccacagggggcaccatgttttcgcaacatctacagactgtcca

SEQ ID NO: 353217 - DNA, 221 bp, Zea mays
agaagagctcgagaaaggggatatggggagctaaatgaatgaacagggtagttttgtgtgtgtgtgtgtttttttctctcaaagtttcttttggccgcgttctttctttttttatctgggggtgatgtggagggtgggttgcttggaattgtgtatatgcctgtggtggttgctttgaggccgaaggtgcctggtttgcagtggctgctgcgatagatgtg

SEQ ID NO: 353218 - DNA, 222 bp, Zea mays
gattggttggttggctaacggacccagcgcattgtccaaagctcaaccgcagcatggcgggaggcagctcatgcacatcagccagtcaccgatcgagcatcggcttgcggtaccggatagagcaagtgatacatttggcggatagatagctagcttttgtctaatactatagtttacaatgttgtatctaaacactatttatcaaaaccatggtatgtttgg

SEQ ID NO: 353219 - DNA, 224 bp, Zea mays
gacaaggttaaactgaacctagtttatgcatgcacgcttcccagatgctggcaagggtcccgtgctcttttcatcaaggagtacaacaacaagctcttcaactggctcgccatattctccctggccatggttgtcgttgggcgcttcttggtcaagttcttcctgctcgaagttgctgcgtgggtgatgtttgccttcctagagacatacacgaggctgttctg

SEQ ID NO: 353220 - DNA, 111 bp, Zea mays
acgaagacttgtataagtcagttattgccatccatgaatttagacaacattcttattagagaatctatggcgaatgtcagaaactttgacaggcagatatatgaaacttga

SEQ ID NO: 353221 - DNA, 156 bp, Zea mays
acttgcttagccaatgccgactaagaggcaaaatagactcaaatggtgttatataccgcatacttggcagagaggttgaacatgggagtacacttaccaatatctgactgaaattgaacattgtaagaagaactacaaatttagttttggaatgac

SEQ ID NO: 353222 - DNA, 164 bp, Zea mays
gaaatcggacacaggcagaaagtgcatggccctaactaatcgatgagtttgtggaactattgacagaagacggtcttgactagcatagaaggtgtaacagaattgagatgacagagggaaaatttaacaaccaaaaagccaacatcattgtataacttaatgga

SEQ ID NO: 353223 - DNA, 232 bp, Zea mays
gccgcctcgccccccgctagcaccagctagtctgcttactcacctccatcacctggctggctggctggcgcgcatgcatgcatgcaaactgcggggggcggccgttttgttgttctagggtctagttcgatcgacgtgtcctgtttcgactgggtacatcttctttcgttgatggtgtctagtgtctttcggttagggctctgctgctagacttcccactaattgcactgcc

SEQ ID NO: 353224 - DNA, 236 bp, Zea mays
atccttccccagcaaacacaacacaagcagacggggagagattcagatccactcgtcacacatccgcgtgaccccctctcccttggtttcctctcccaccaccaacccccatcccggttatctccgccgccgcccgctttgggaaggcgcgacgaaggcaggcgagaggctccagccggacgaggaggaaagaggagcagcagggccggaggagagatgttcctgtgggactggtt

SEQ ID NO: 353225 - DNA, 215 bp, Zea mays
gttcttcccaaaccatccgccctcgcggaacccgtgaggtcccgctcgcgcgtccggacacgcacggcagcggcaggtgtttccggcgatcggttggctcccgggcggtcgcccacacgtaaacgagctgcgctggctgccaggatccggcgccggctgcagggcaggatgccaatgtcatgggcgctgaccgtgtccgtcgtcgacacggtgtt

SEQ ID NO: 353226 - DNA, 236 bp, Zea mays
gcatgaccgacctcgccgccgggatggacacggtcaagtctttcgagtggggccaggacgtgctgaaccaggagatgctgacgcagggcttcacgcacgtcttctcgctcaccttcgcctccgccgccgacctcgccgcctacatggcccacgacagccacaccgccttcgccgccaccttcatggccgccatcgacaaggtgctcgtcgtcgacttccccgtcgtcgtcgccaag

SEQ ID NO: 353227 - DNA, 100 bp, Zea mays
gcaagaatcaaagtttggtggccagatgacaaaatgttctatgcgggtgttgttgaatcattcgatgcctcttcaaaggaagcacaaggtttcgtatgat

SEQ ID NO: 353228 - DNA, 240 bp, Zea mays
gcgggaactgtgagctcgcgctggcggtacctgccattacggtgtacgggtatcgtcgccatcatcatccagatccagtcaaatggccaaccttggtggttatccggtgtctatgggcttcgggacattgatgacaagattccattcctccaaaagcaattgctatggtaaaaaaggtttcattttgagtatttttggccaaaattggagggattccaggaagcgtgggcatcgggtggt

SEQ ID NO: 353229 - DNA, 248 bp, Zea mays
gaaagaacaagaatacactttgataatcttgtcaagagatggagggcagctgttctcatacagaaacacactaggcgtcgacttgcagctaacatgttcaatgatcaactgaatcatgtcattcttcttcagtccgtgacgcgtgggttcctggccagaaggaaatacaagtgtctgcagaatgaaaaggagtcaaaggccagtcacagcatagttcaagggaacacaaggaagaataactcagagtc

SEQ ID NO: 353230 - DNA, 243 bp, Zea mays
ctacagctacaagaagtgcgttgttcgagtgaagggggagaaaggaactgctgtgcctccggcggcgaggtagggaggaaggaggcgccgcgtgaacgagcaacagaagtggaagcccaagggagctgtggacgaggacctctacaagatatccccgcagcttctctgcaaggtgaagaagaagaagctcctgaggaatctgctgggagggtgcctgggcctgagctgcatcgcatgaccgag

SEQ ID NO: 353231 - DNA, 237 bp, Zea mays
atcgccttcgcgttcgctttatcggctctggcatcttctcgcccagctcttccgccagctccatcgcagtccccattactgcactgcgctctgtcgcctcctctcttccccacctcgctgctccgatccagcaagagctccatccgcgcgcagggaggtcgtcagatggagttcgtgctcatcatctcgctgccgctgctcatactcatcatcatcgtcgccgttgtcctctgcatc

SEQ ID NO: 353232 - DNA, 220 bp, Zea mays
gctcgatgagccacccactctctacagatctgggcttcggcgacttccctgcctacgcaccgccgccctccatggatccgctaggggcccccgctgtctcgtcggcgactcggatccagcctccactctacggcggctcaagctccagcttgctggtgctcgaactcgacgatcgcttcttgctgtgcctacgacgagctcgacgagccgcacgccctac

SEQ ID NO: 353233 - DNA, 253 bp, Zea mays
ggtttttgtttttttttttttttaagttctcaaagcaaatcaccgttacatataatagaaccaagaacagaagaacttggcgatgcgttccaattaccaaacatttttttagtcccacaggtgaatgttttctaccactgatgcgatgagaaactgaccacaaaaaaaaaaaaaaaaaaaaaaaaaaaaaaaaaaaaaaaaaaaaaaaaaaaaaaagatacggggaaaaaaccgaacatgagcaataaaccag

SEQ ID NO: 353234 - DNA, 225 bp, Zea mays
agagaaggcgatcttggtgccagatttcgactgaacagctcaatttctgatcgctgaatctggcatctcgctgtagcttgggccaaggtgtgaatttcagtttagctctttgttcttactagaggtaactccgagggtgagcagatctttcggtgcatgttttcttggcagtaatgtagtgttgttttaagacaagatgatattttctcatatgtttaaacttag

SEQ ID NO: 353235 - DNA, 225 bp, Zea mays
ggaacctgtctacattgcacatatgatctatcatttcccttggcaccatccccagagaagattcgttcacgagcagctcgataagcagcttccctctccttcaatgacgccgctggaagtactgctggctgcttcagaggtttcaagtctgaaagataagggctaaatggttactggttgtatttttcattttctttaaacccgtgtgtttctatgtaaatttag

SEQ ID NO: 353236 - DNA, 214 bp, Zea mays
attcaataggaggcgggagctaactgacaccatgccgccctagttttgttgaactgatagtggtgctagccttgtgcatagtaggggccaggggagtaataatatttcccttgtctaaggaagtaattaaggatgtaggagcgcagagcaaatgattagcaaaacgatcacgttcgcagtgcggcaggcattgtgcagctgattcgtttgttca

SEQ ID NO: 353237 - DNA, 237 bp, Zea mays
tggtattcgaacagtatgatgattgttctaagcagtgggaaattatcgacttgcctggttcctgtcgctggacttctgaaccactcggtctgtagttctgcccccctggaagttttcttttattagtcttcaggtttgtctctcatgttttctgtttcctatttttttctcaaggtatcccctcatatcttgaactatggtcgagtagatgaagctacaaaatcgttgaagtttccc

SEQ ID NO: 353238 - DNA, 239 bp, Zea mays
atttgatcaggatgatatggagcaatggtggcagcactagttgaagatgatcagcttgtgaagtcttttacacaagttgttttccacgttttgtcgagctcaagtaaattccttcacaatgttggccttcagtatgtctccaagacaagcttagtttcatcaaaagtgcaagaactctaatctcaactagagactaagacaagaaaaacgatagactttggcgaaaatggaaaccttga

SEQ ID NO: 353239 - DNA, 240 bp, Zea mays
tgtactgtaactagaaacgggaaaatgttgtgtaaggatcagggaatgaatggctgcacagtgcacatttgctatggcttgtttttttttttcaaagttgaatttattagccggcctgactattgctgatacggtatgatctgccctaataaaacaccaaaaaaaaaactcgagtttttttttttttttttgctacaattgccaaaattaccatatatcttgaatttgtgatatatgtga

SEQ ID NO: 353240 - DNA, 233 bp, Zea mays
gctgaaagaattttgtcagagatcccatgttcttgagagtgggcatcaatccccagagttaggggccctattaaaacgctagcaacgctgggatgtggcctccagttaggtggaaaacactttaggctggagatggaaccacctatgttcggttccttggtacatctgaccaagctgcaaaactaaatgtgcaatgtcttgaaatcaaggtgcatgtggagctatttactcga

SEQ ID NO: 353241 - DNA, 146 bp, Zea mays
gatcaagctccccaccttccgagacttactgttctaggcaatcggcaaatgaaatgatttattatccatatcaaaatcagtgctctatcaaagcaatgatggtcgattagcaatatttgggtttctatataactgttcagggattt

SEQ ID NO: 353242 - DNA, 107 bp, Zea mays
gctagggctactgttgttttggctggttgcccgtgctggattgcatctgataaattgcaatttgacatcacctctttaatacaaaagaaagaattgctttttacgtg

SEQ ID NO: 353243 - DNA, 229 bp, Zea mays
gttagaccacctgcagggccagctgatcttctcccaaggggaaccccttcagtccagtggcggcggctggccgtcgtcgtctgcccgcgcttggctcgaccccctcgtcgcgatccaccagcaccagccgtcgacgatgtccgggcaggtcggcttcggtcatctggttggcggcgccggaagcgggtttatggggttcctcgcgccgccggcccagcggctgcagctg

SEQ ID NO: 353244 - DNA, 229 bp, Zea mays
gccacctccaattgatgaagaaggaagagaaagatttgcacggtcactttatggacagaatgcgaggaagctacctgaaaggacaaatgaaatggctggggtctatgctggttattgcgtcgaactagctagagaaatgtgtataccctgtgttaatatctggtcaaagatgcaggagacagaaggatggcagaaactttacctaagtgacggtctgcatctgacacag

SEQ ID NO: 353245 - DNA, 223 bp, Zea mays
gtcgacagataaatctcaacataaattagtgaaccaccatactcaatcatcccatcaattaaattacaaatcgtcgaactctagagccgatctatgctgcaactgcaactgcaactacttcgttcgccgattcgaacgcttgttgaatccatcgcactggcacattgaagctctggatgatcaaacacctcagctggcttgctgcagaagccaggagcagcaa

SEQ ID NO: 353246 - DNA, 226 bp, Zea mays
aacatcgactgatccaagccatggttcatgcattttcagtggaagcgctggcgccaacggcagcaacggtggaacagcatccgggcctgtaagcccggacagttttgcttcaaaatcccagtcgtgctggctgactcacctagtagccacattgctgccaattctatttgtagtgatgtaaatcattgtaatcatgtcgcattttggatgagatgcccgcaattta

SEQ ID NO: 353247 - DNA, 226 bp, Zea mays
gctgggctcaccggcctgtgagctcacctcctcagcattccagtactgagctgacgtggattcgacacagatttggaagtgcacgaaacatttctcgcgagtagccagcatgcaggaaaaataaatgtgtgggtggggactggggtgggttcgctccgtaggaagaacaggcttggggctctttgcaatgtgggaatatttctcatttccagtgtttttcttataa

SEQ ID NO: 353248 - DNA, 217 bp, Zea mays
gtaatagtgggataatttgccttcttctgatgagctacatttggaataagtctggaccatactgtatcctcacagatacagtattttgtacagtcgtttctttagtcttttggttgagaatgtgtttgatgtcctctccctccattgtagactcttcacgtagtatcacccgttctcgagtttactgtaatgaattgtcagctgtgttcatgtgcgc

SEQ ID NO: 353249 - DNA, 221 bp, Zea mays
gttgttgccattgccgtggccgccggtcagaagcaggctctggttgcccgtcatatgatgcaccgctgcagacgcggcgaaccaggtcgatgactcacgcggcggactgcatttgacccgtctgcttgcatcgtcctcgcctctcgctcctttattatgtccaaggaaacaagtctcgaatctggccacttggagcaggaagcagaatggaactagaacgg

SEQ ID NO: 353250 - DNA, 217 bp, Zea mays
gccgccgattaagcaggaggccgccgacgccgtgttcttccagaaaagaagcgcgccggccgccgccgtggagccggagctgatgctgggcggcagcttccgccgcgcctacacatgcggcaacgtgcagtgctcgcacagcagcagcgcgcatgggttcctggaccgcaacacgcgtaacgcgcaccagtactcgtgcatgttcaacaacagcgtc

SEQ ID NO: 353251 - DNA, 229 bp, Zea mays
gctgctgctgcaggtggattagttggtgatggttagtactcctacgctatttggcagtctggatggggatgctgtgttttagtatctgttggtgcggtgtgtcacgtgttaggctcttctcttgtgtactgtacatacacgcaggcatggagtgtgtggtttggttggtgtaaattatcattgtaatgtaatgtactcctactaatgtaaatgcggcagtagttgtgat

SEQ ID NO: 353252 - DNA, 110 bp, Zea mays
gttcctggatgtaatccatttatttttctgcaatgaagagatgctggcaagcatgctacctgcatatgtcagaaatggtagtaacagtgaatctttgttcacgaaccaac

SEQ ID NO: 353253 - DNA, 227 bp, Zea mays
agtagttcgagtttttttttattgttttttttttttttttttgttttttttttttttacaaaactcccagagaactgggaaccaaagaactcatacggcatgaatacaatagggattccaaaatgtacaacaaagtgaaaacacatgacgttccctgacaaaagattcatcaggctttcttgtcggacctattaaggtttagattaaaccacttctttttgccagat

SEQ ID NO: 353254 - DNA, 240 bp, Zea mays
gcgtccggccgttgctgctgctgcatgaagaggctgctggaggaccgggacatcttcatctacctgggcgagaaggccttctgcagcgacgagtgcaggaacgggttcatcgaggaggcggcggaggaggagctcatgattctggatcctgctcgaaatctttgatcaagatttgttagctgccgtggcaaaagtagagagtgtaatatttgcccgcaatattttgcttctgccttcaac

SEQ ID NO: 353255 - DNA, 173 bp, Zea mays
gaacgatccttcttctttttctttctcattagtttgactctcttttttttttttttttgcccccttgctccgtttccttgtgtcgacggtcgattgaccatgtgcatgagatgcgaggaggcatagttgtattttgagagatcagagatgaacaaggctattctagggtcagc

SEQ ID NO: 353256 - DNA, 238 bp, Zea mays
ggaaggtggacgagggggcaagggtcgtcatgggccgcgacgtcttcgtcctgcgggtgagccccggcttcgacgccgcgttcgccatggggatcgtgctcgtgctggaccagatcgtgggcgacgagtccggcggcgtcgacgctggggcggacgtcatcgacgccaagcccaaggtttggtgacccatgctatgggttgccccccggccgtatcgcgcgcttcttggtttcgctgt

SEQ ID NO: 353257 - DNA, 232 bp, Zea mays
ggtttggcgggtgtctgtacactaccggtacctacagaaggtgtacagaaagagactaggccaaacaagaaatcaaaatgggataaggttgatgatgatgttaagaatcatgtagttcctagtggacacgacaacttatcagcaactgcttctgtggcactcctgacttcagctaatgttggtgctggatatgctgcttttgcgcaacaaaagagaaaagaagctgaagaaa

SEQ ID NO: 353258 - DNA, 235 bp, Zea mays
tccgaaccaacctccagaaactgctcggcttcgccccgccgcgcgcggttgctgcggccggcgggggtctcttccccatgcccgatccgaaagttaactgaggagaaaaatggaagacttattactgttgatgacaaatccttagcactagctcggactctgatcttctggggacttgagaagtgtctctgatgcatggaaatatgcacactttgaatggttatatctagattaa

SEQ ID NO: 353259 - DNA, 235 bp, Zea mays
gtggcctgagccgctgctgcaggccttcttcctcgccgccaagggcgtgtggggcgtccgcctcctggcgcgctccgtccacccgccgctccccgttgtgcgcgccgagcgaggcgcgcgcttcgacccgcggttcatggaggacgccgcggccagccgggcggggacgctggaaccggccagcgtgaagatgatgatggcgccagggttccacgtctacctggccggcgcgggc

SEQ ID NO: 353260 - DNA, 249 bp, Zea mays
gccaaacacaacagtcatcagcaggacggcagacagctcatcacaaaactaaagttaaagctcaagtggtgaccaaaaaaagggcgctaaaatgacaccaacgggcaacggtagagttcagacagcgttaaaacaggtctggatacaagcaacctgggcgggcggcaactaaaagaatgtgaagcaagcacagcatgaggaaccggagcaacggacagaaagatgaggagggagcaggggggagaataa

SEQ ID NO: 353261 - DNA, 243 bp, Zea mays
ctacgcggttagtttcggtcccatctggtcttatcgtatactggtgcggacctagttgccctctccgcatccaaccagctagcgcgtccgtccccatggcggccgccgccgcggggtttacgccggcgactgcaaggaaggccctcttcactactacagtcactctcctctcatcgtcactctcacgtagggccagcagcatccgcagccgcaacctctcctgctctgccgcgttcaccgccg

SEQ ID NO: 353262 - DNA, 242 bp, Zea mays
catggatgacatgctcctctccatgtgatggtggtattcgatatcgtgatgttgcttgttatggaaatctggacgatgacacaatcaaacactaccctgtagatgatgctagctgttcagcagacaaaatgcctgcaagacaggaggcctgtaatcagcagagctgtagtgatcctgagatgacacagtcagtgaatcctaaggaaagtggaatgtctggttggttggtagtattggttgtt

SEQ ID NO: 353263 - DNA, 240 bp, Zea mays
gaaccaagaagcatatttcaatctggtggagcctcattcaatcatgggttatgcatgagttttgctgatccggaggttgtaattggttgtgaggatggtcgagcctttgtatatgatatgtacagcaggagttgctcacgtatttatcggcttcactcctctcctgtgacatgtttgatgataacggatgaccagctgattgttggtggatcaacttttggaaatgtagctattgcagat

SEQ ID NO: 353264 - DNA, 254 bp, Zea mays
ggtttttattttttttttttttttttttttgaaggaaactacgaagcatgcctcaacatagcaatcacagttgagcaccacttgttcatagacataacatagtgcatatatatatgatataactcgaagaaaacatgccatggggccatcaaaatcaggagattttcgaaaccacctctattttcagtttccttctccttgctaaccactgatctcatcaagcttggtttttctcattgctatgtttccctctc

SEQ ID NO: 353265 - DNA, 230 bp, Zea mays
acgacgagcctctcctccctctgatgataaaaatcttcggtttggaggcctgggcgaggtggcgggttcttcttcggtttcttgggttggttgggcggtggtcctgtcgtgcggatgtagatactaggccaaaccgtgctgtgttcttatgcataaacttggaacatgtgtgatctgtatcttctccctgggatgggatgtactaccatgaaatgcaactcttttggtcc

SEQ ID NO: 353266 - DNA, 252 bp, Zea mays
gtgccctgccgcgcttagagtctgagactattttgttatctgctgtgatgtttcagatgaaacagagttgatgtctggtttagtaaatggttatattcttagtgtaaaaaaaaaaaaaaaaaaaaaggctgccgactctcacgcgacacccggcggaggggacatcgcggccgcggccgctgcggtgggtgacggcgacgtgaatgcggaggaactggagatgatgaagatgatgggcattcccgtcggttt

SEQ ID NO: 353267 - DNA, 189 bp, Zea mays
gttgtttacgttgccgggagagaaaaacaaagtgtctcagcaactgcatgcatgtgttcctggtccctcactgctatgacttacagagtattatatattagtactatgtatactggtcctcatttacaaatcaaatggtatagggttttctaaaaaaaaaaaaaaaaaaaaaaaaaaaattcaaggcct

SEQ ID NO: 353268 - DNA, 130 bp, Zea mays
ggagttcagaaccggtagaggagtacgagcgtagggataggtgaaggcagaatcagggcagggttttccttttgttttcatcctgtccccctattttccgttccgagtaaaacttatggatgttgttgtc

SEQ ID NO: 353269 - DNA, 256 bp, Zea mays
gagaggatggagatcaacagcagcagcaacagcaagaggatggagatcaacagcagcagcaagaggatggcaggaaccggttctgagtccggggggaagttcctagacttcgaattcttttagctagttttgagttaacgatacttgttgcagttcaagacgaattgtaggtgtagttccatactggagtgctagcgtttggcatgtctgaccggtcccaagtctgtgttggttgttgagacttgagagttgcggc

SEQ ID NO: 353270 - DNA, 222 bp, Zea mays
gcaaaacataaatgatgttttggataaaggactgaaaaaaaaaatcggtacatttcctctgtaattggcaattaagcttacaacttatattagtcgtaaccgaaagaagtgtttcctcacgtaacccattctgctcaaaattgaagctacaacacccagacaatcctggagacaacactgggaaaccaaactccaaatgagaggcacacaaccacccaatgc

SEQ ID NO: 353271 - DNA, 221 bp, Zea mays
gcgacgcggccgtcccgctggtggcttcggctcggttattggtggcgccactggcaacgttgctctgcggcctccatttgctgtagtagtggtgatggagggagcagaggaatctgttggcgattcgcacggtggcgcctttgtattgccgtgtctgtagatgattttactgtccattgatcatgttgcgttaccccggtcccaggattagatacttgtgg

SEQ ID NO: 353272 - DNA, 145 bp, Zea mays
gtttcagatggcgtcgctggattagaagtacggtcggcacgggttggtgctgggccctacatgcccctgtgtatggactatggagtatgtatggtaatggagtgggaacaactgaatggggcctgctcggagattcttgatgtgc

SEQ ID NO: 353273 - DNA, 219 bp, Zea mays
ggaaggttgctgaactctccgcaaagatccgtcacgccagcgccaggaccgaggccgccgccaccatctgcccggccgtcgtcttcgtgtcaccgtgggggcttcctgtgctctcccggccactcttggtcggccacaagagcaggtaccagtatcaccatggaaaggacacctgatgatgagctgagcaggtagtacccaatctgtattcctggcgat

SEQ ID NO: 353274 - DNA, 243 bp, Zea mays
gatggtcgggggcatcggcaccgccatcttcgtcctcgagtgggccgcgctcgcgctcgccttctccctccgcctcgatgacgacgacgacgacgaccttcaggccaagaaccggcagccgtaccatgtctgatcgtccgctggtgttagctccttcagaatgatatatgaacaagattcgttgattctttgccgtctgttagtatgtactattgcttttttttggtactactgtgcctgttc

SEQ ID NO: 353275 - DNA, 233 bp, Zea mays
gtgagaagaagaaggagcggatgaagaagatggtgcggacgctcaaggggatcatccccggtggcgaccggatggacacgccggccgtgctcgacgaggccgtgaggtacctcaagtcgctcaaggtggaggtcaagaaggccggcgcgcgtgggtcaagcagctagctttccagctgcaactggtagtctggctttgggctttggcagtcgaaataggagttatctccccgc

SEQ ID NO: 353276 - DNA, 246 bp, Zea mays
gcggctgcagagtttgtgtctttctaaaaattgatatgcctgctaaattgttgtcctgtcttttgggcagatttacagagaagtaaagagaagttgtttacatttagtcatcctctgtatctgaaacaagactatgtttctaccttgtctttctcatggttcttagcctatggccgaagcttccatgcttgattcttcaaacatccaatgcagatcccttttctctgatggatatgctgatattca

SEQ ID NO: 353277 - DNA, 205 bp, Zea mays
gcatcaacgctgatgtatggaactgggtgttcagggaatgttgttcttgtgtcgatataataatgtaggctccttgttgctgtagctgtactggtgactgtaatgagaaactaacgctgctcatgttcaggctgtagttattgatgtaaccttttcatctggacccaagcaagcacttatgatatggcagggatcgtttaagcac

SEQ ID NO: 353278 - DNA, 99 bp, Zea mays
gcctatctcgccagcaccgccgcatcaccgaagttcgcaaagatggcggtgccgctgctgacgcagaagatcgtgaagaagagggtcaagcagttcaag

SEQ ID NO: 353279 - DNA, 236 bp, Zea mays
gttccaccacccttgtagtagtgcgcgctgttcgcttgcactagctagccagcagcgtgcgcaccacctctcgccgcggcacgacgacgacgggaggcttgttgagagctagctagctagctcagcgagttcgagagcctgtgtgctagagagacagacagagagagagaaaacatactcctcctctgcacacaggggagctagaagctagcgttaattatagcacagctggccgc

SEQ ID NO: 353280 - DNA, 180 bp, Zea mays
gcaacaggatgctacaacctgctgtgctcggggttcatccagataaacaaccagatcgccatgggcgccacatcttccctatctccaactacggcggctcccagtatgacatcaacatcttggtctggaaggtaaactccaaatagagctctcacatgccgagcaagcatgctagaaatc

SEQ ID NO: 353281 - DNA, 133 bp, Zea mays
agtactcgtttgtgcagtttgctcggccgattcgtttgtgccagcgtttgtttgatcacttgattgtggacaccataaggaaatcgactgtggtccacaaagggagggcaaagttgagaccttccttccgttg

SEQ ID NO: 353282 - DNA, 234 bp, Zea mays
aagacggagaaatagtgaaagatttcatcgacagattctttgggtttacccatgaccacttgggctatgcagccactgccgtagttggtttcacgggtctcttcagtttcatgattgccttctccatcaaagtgttcaacttccagataagataagaacacatctcaaacggattcagctgtgattactgattacgctcacctttgtaataccaggatacaatgaggtgctgtt

SEQ ID NO: 353283 - DNA, 233 bp, Zea mays
tgcaggtggaggccgtggtgacttgacggtgctgatgccggggcagcggtacccgacgttcctggcgcacgagcgccgctcgcgccgtgccacagggaaggcgtgctctggccttcccacgaccgtcgccgctcgtttgtgccaccgtgattttttccccccaccacatcgttctttctgtacagaggttattgtaaatggcagcgccctggcttattcgaggctgatatatc

SEQ ID NO: 353284 - DNA, 226 bp, Zea mays
agaaaccactctcttgtgtgatcatcgtcgccgtccatgcgctactggcaaacaatgtttgcaaaacatgcaagcagggatagggacacggagtcgtagagatccttggtatatggtgacatcactattttcacacggctatatatgagtatatgacatcgtcgttgattgttagtttatttctttggacggatgcaccgtgtaaggttcttggatgcaaggctca

SEQ ID NO: 353285 - DNA, 246 bp, Zea mays
ctcgtggccctcatcaacggcaagagggaggcgagcaggctgcctgcgctgcgcaacagcagaggcctcgggtgcatggcgctgcagtacatctccgagtgcatggcggccaccacgggcggcgccgcctgcagcagcggcaacacgatggcgtgccagacccccgaggcccacatcacggaggtctacgccgccaactgcggcgtggagctccccacggtggacgtcatctccggccgcctcttc

SEQ ID NO: 353286 - DNA, 255 bp, Zea mays
gctgtcacgacgtctgcctcaagaggtgtcagagcgagtgcctcaaactctcttcaacgctaatgtaatgggcatctcgctattgtgctgcgctccttagatgccaaccgtgaggttcttctctgttccgttctgcttagatgccatctcgctattcatcatgcttgaggacagtgaatgtttctggtcaaggccgttatgtcttccattccattcgttcttgcacatttctttaatttaacaacaaaactcttt

SEQ ID NO: 353287 - DNA, 198 bp, Zea mays
gttccagtgtttttttttccttctccctctcttgttgttttgaataaaatatatataagtgtccaaaagaacctggcgaaaacgaagagctcgtcgtcatttgtgtagccatctgtatatttgatgtgatttgatctcatggatgtcattcaggttgaggtgcaaaaaaaaaaaaaataaaaaaaaactcgagcggca

SEQ ID NO: 353288 - DNA, 237 bp, Zea mays
gcccaaggccgccaccaagcccaagccgaagcccaaagccaagtcccccgccaaggcgaacccgccgcaaagcccaaggcagccgtgaagcccgccgctaagccgaaacccgcagcggccaagccaaaggcggccgccaagccgaaggacaggccagctgccaaggctaagccgaagctgcgcgcggccaagccgaagccagcagccaagaaggccggcagctccgccaaggacgcc

SEQ ID NO: 353289 - DNA, 221 bp, Zea mays
agacgaggatgaggacgacgacgatgaagacgacgacgatgacgatgatgatgacgacgacgatgaagacgaccaccgcgcctatagggactgctgccggtggctgaaggaggtggagccggactgcgtgtgcgaggcgctgctccgcctgccacccttcctcgtcaagccgcagcacaagtacaccgtcaaggtgggcaactcctgcaagttcacctaca

SEQ ID NO: 353290 - DNA, 241 bp, Zea mays
gtctgcacccgccgctgggtcgtcgccgaagagaaagcaggcttctgcacccgccgctggggcgccggcgatggtgtcgccaaagaggaaggccgccgcaccggccgctgcgccctcgtcggcggctggggcaaggaggacctcgccgaggaacaagcactgagcgtaggtcgctgtatgtgctgttttgtttattgatgtgaatcttgcgatcgtggggtgctactcctgaaaatgtgta

SEQ ID NO: 353291 - DNA, 219 bp, Zea mays
ggtcgtgacggttgggctggagagcacgctggtaggggaggacctcaacgaccgtgcctttgtctatggcttccttagcttcctggacaagatctcttgcgtaatcgtcctatttgtcttggaattgtacgaagacacgaatgagatgtagcgagatgaggggacacggtgagcaggtacgagatgggcctgatctcctcatacttcaccgtcctctcc

SEQ ID NO: 353292 - DNA, 219 bp, Zea mays
ggacttctttttcgtgggtttaggcgtggggaaagagagctccttttattaggctcctttaaccaccttttttttgggggttcagttttttttctatcttttcagttcgacgctttttgtacaagaggcttgcaacaggacctgtaattagtagtagctgttaggtaggtggtcagcctcatgcaaatctttcaacatgttcgttcgttgtctcaaaaa

SEQ ID NO: 353293 - DNA, 233 bp, Zea mays
gcgcccgtccatggccgacgtggtgcgcgtgctccaggagaagacctccgccgctggatcgagagtcgaccgcaagcaagatggtgtcctaagttagatgccgatggagtagagtgtaaatatgtccttgatggtgctataattgtgttgagggtagttagccacaagaattggcgcagtgagatgaggttttagaatcactagatctctgatagaaaattttgtcatgccat

SEQ ID NO: 353294 - DNA, 242 bp, Zea mays
ctggagccggcccaaggtggaggtggaattcttgatggggcagtttgagcgagcgatccgcgaaagctactgaatttttgagagaaggaattcggctacgcgtaatcggcgactcctcaaggctgccggtttctcttcagaggaccgcgagataagccgagaaggccacgcggaacaactcgcagctcgatatagcactggcaatcagctacagcaggcgggatggacgtagtgcaggcgtg

SEQ ID NO: 353295 - DNA, 247 bp, Zea mays
ctagcatataggagcaacgagcaaggacctgagaaggtaggcgcattctgcaggatgaaatgaagtaatagaataggtaaattaggcctgaatagatagaacatgtcaagtgtcgcctcagaatgactagactaaactggtcaccattgatttacagcttgttcgctgcggcttgtctgcggctgaatccggctgcggctggggcttatagagtatgtctccccctatggattgaagctgcagcagt

SEQ ID NO: 353296 - DNA, 224 bp, Zea mays
ttttgcaaaaaaaaacatcgggtgtacatgtgtacacccgtgccgtttactgggtcggcagtcagccggcagcccggcacctggcccaagggttgagcatggagatcacgaacgagacgcttaagagactgccgagactacaatggcagaatttgttctatggactttcacagcaaggctaccaactatctcgtgacatctggcgatgatgaatcaatccgttt

SEQ ID NO: 353297 - DNA, 250 bp, Zea mays
ggcagccgagtcatgtgggggaaagaacaggaggaaggccggatccggaatctcatgcagcagatcggggaagaaaggaggaagctttcttactttgaggggaatgttgtctggctcgaggtgcagaaacatgcagatctcatcggtctaggttcttgtcgatctcggaccaggcttcattcccctcaagtggagctcccgagctgttccgcgctcgtaaatgcaaccaaataaaggagtagccgtatat

SEQ ID NO: 353298 - DNA, 295 bp, Zea mays
gttgcgtcgtctctccgttgctctcgctcaaggaggccgcgggggcgggccaactacttttcggattccagcgtcgtttggagttgtcctgtcgtgtcttccggtaaacaacaagctagcgagctgaaaaggtgagcagagacgctcccacccccaattttgtcttgctcgttttcttcgtcgtcttcatcctgcctgtctcccttgaccttcttttgttggctgtgagctcaattcggagcacgtcggcctaattttagctcacccggagatcacccccggaacaaatttcttg

SEQ ID NO: 353299 - DNA, 111 bp, Zea mays
ccaatactctggtatctgccaactcggcgtaacctgcacgtccggcgtctgaacaaacagctgagaagcaagatcatgtccatcatgcaggcgcggctggccgccgacgga

SEQ ID NO: 353300 - DNA, 224 bp, Zea mays
cattgttgttataactgtagcataattttggtcgcaaatgtgagtgcgccattgttattttgatcaaagagtatacaccgctgtcatgcgttttgcataggctggtggggagaattctgaggagcaggaattggagacaacactgtcttacgtggttgagctggagcccaagctctgggttccagtgagactccttgaaggaaggatatgtagcgagatcaaga

SEQ ID NO: 353301 - DNA, 291 bp, Zea mays
gtggaagtaaatccgttcgcgctggatcacaagtcctcagaagcctttcttcagcctgaagccctgaacttgcacggattgttatgatcatgcaacagatattagtgtaaaaacaagtccaggcgccgctatgtgagtcccgtgtgacatcgactgtacagatttggctgtgtacatgttaaaggaaaacacaactgaggcacaaacctcttctgtttacgggtcatgagcagggtgtgtatttggactgtatatcattataccttggattggatgtcatgttgctctata

SEQ ID NO: 353302 - DNA, 291 bp, Zea mays
cacagcaggacctgaggatgggaaaggctcttcttcagaccctgggttcttgtcggcaccagagtctctcctgtgcagaggcagctatggatgatggctgttgcctgccgtgcctggacactggccctgggtgacacacaggctgtgggaggtgtcaggacaggccctgtgaggaaagtgggtgccagatgccacacgtgagatgacgggcgccctgctccaggtggtgggtgtgcagtgaggatggcctgccccacgcgcgcagagcgtcagaaagaggaaagaaaacgc

SEQ ID NO: 353303 - DNA, 225 bp, Zea mays
cataagttacgcccgtatcatctgacctcccggacgaccagcgcagaggaccagcgcgccacggtccagtcattcttggtgattgatgataaccgatgctgacacgcagatgtcgaaagcttgtgggcacgtgcacggtgcagtacctgtaccattgtattgtgacagtggtgctggtgcgataaatttctcactatggacactggagaagctactggtagctgg

SEQ ID NO: 353304 - DNA, 289 bp, Zea mays
catccttgcccacctcgcgttgccccgccgccgctaccactgcatgcaacatgctcctggcaccaactcatcctcgcctcttccgctcactctcacgctccgcatcagacattcagactgccacagccgtctcgcctcgctaatcccagccgcccctgccccaccgacacacacatgcccttatgatcgctccaccacctcgtcggactctggcgtcgcctccccttcggcttcggctactcttcctcgtcgctcgtcgattccttctgaacatggatgcatacagatg

SEQ ID NO: 353305 - DNA, 241 bp, Zea mays
ctaaatagagatggaaggcacacaaagctggttgatagaggtttttaccctttggctgaaaaggtagatgctgttgattccccatgcttaatgctgcgtgggaaatacatgcatgctagtcataaagggcatactagaacaactgaagaatttagtgacaccgagagtacctcatctcctgtgggtagtcaaagccataatagccccctcaatcgcagtgtgtataaattgtgtggacaac

SEQ ID NO: 353306 - DNA, 196 bp, Zea mays
ggacggaatttctgctgcctgtgcttgcgttgcgttgatgcccattttttctttctctccagggtgttcctcgtccctccgttccaagacaaaacaaacctcgccgtgtggacttgtactactctagctggtgcatccgtccaggtaactatacgttagtttcacagcagtgatctctgcaagccttggtagcagg

SEQ ID NO: 353307 - DNA, 157 bp, Zea mays
cggcagggtgctctaggccaacaacgtgataattgataaggacccccatttttgccgtgcctagtttagctagatgtaaccggtgcttataaggatgttttacttgcttgtccataagcagagttgaaattgagaaattaagcactacttctatagt

SEQ ID NO: 353308 - DNA, 290 bp, Zea mays
ccgagcgcgcgctccagacactgtgctgggcccagaggcagaaagctgtgccgttgttccctgacgatcgtgttcttgcttcggccatcgaggttttggcacgctttgaacggctcagagtggagtctgcgctggagcaatgtgtgcccacggcagccgtgccgttctcgaggccatggcgagcgggttcatcagggcggggaaagtagaccgcgtgcgcaagctcctggaacttgcaaggatcaataacaggacgctgcaccccagcatctacgtgaagttgatgttgg

SEQ ID NO: 353309 - DNA, 102 bp, Zea mays
cgacgattatgtggtctaattttatgttgagcatcctagatacgttaatgtttcatctgtaactgtggattgccttgaactggttgcaaattgttgatttct

SEQ ID NO: 353310 - DNA, 291 bp, Zea mays
gcgttcctgtttaacaccctcgcgggatatgtctacgatctcgaggtggaaaagcagcacgccacagcatcagggtcggacgttgcatgtcatggccctaattgcttcagactaacattctttgtcctctccggcgtggcatgcttgggcacactctgagcacggttctcacggtgagggtccggccagtgtatcagatgctctatgcaggcgggtccttcagccagcccaggaaccctgcacattgacccatggcgataaagctgttttctgcatctattctctacaata

SEQ ID NO: 353311 - DNA, 167 bp, Zea mays
attatatataaaagcaaggcggaccggtgcccttctcttgttttgaccacaactgtttgatcccattattctatggaccatggatacttcaatgtttgtactaagaccgtgaacgtgggattcttttactaaaaaaaaaaaaaaagatcaataaaaaaatctaaaaa

SEQ ID NO: 353312 - DNA, 197 bp, Zea mays
  unsure (1)..(197): unsure at all n locations
agcggcgcaacggctgcggcggctcgggcgagccggatcctgcggagaagaggtcgtcctcgtcaagctcgaaggccgtagaacccgnctgttctacaagcaggcagccaccaaaactgatcatagggttctgatctgctcgatgcccatcgtagctgtagaggttgcttcgtagcagttgtctcgcgtccataggc

SEQ ID NO: 353313 - DNA, 278 bp, Zea mays
  unsure (1)..(278): unsure at all n locations
aattcgtggaagatggacatcttgagaacagctgcatcttgaggttcctcatgctcaacaacctgcgtccttttcaaagcttccttccacaaggctcatgtctgagcatgattcaagtactggtcatcaggaggataattaatgtacgacgtgtttgatgctggcctgtgccaggggaaggatgcacggtgaaggtggggcaaatgggtgaggcaactagactcattcaagctgattgatggggtgacacaagaacagatcaagaagtgngctgggtc

SEQ ID NO: 353314 - DNA, 273 bp, Zea mays
ggctaaccaaacaaatggtggagacatggattagtgcttatgggaaaatcatccccaacagggattgaagtgacagccagggatccactcatcccctgggtggaaaaattcaggttgtggattggattgctagctaccgaacaagccctcagcgtgctaatttcagtggaatcttggtagacaccactgaacttcttggttttcaattaagttcgagcatagagatcgtcttctctcacactgagttgccagtttattccgaagtccttcaag

SEQ ID NO: 353315 - DNA, 189 bp, Zea mays
agcactccatctccaggtagtgggaaaaggttggctaggccagttcaaggaaaaggaaagaaagctaagacaggaaatgcactcctcatccaagaagcagtctcaagcatggctagctcggccaatgaatttgttgccaagaaagatggaaaatattctattgatcaggtgatggaaattgttatggct

SEQ ID NO: 353316 - DNA, 268 bp, Zea mays
ggcccctcaagcttatacaccatggacagggtcaagatggtgaatttcacgttaatgcatttttgaccacaattttaaaaaacccatctgggtctgtcctctgtccttgttctggcctccactgccccatctgtccagttccatggccaccacgtgtgatgggagaagctggtgggcccaccgtcctccgtcactcacccacctcacagccacatttccaacctccggtgggatcacaccccggacgagcagggagctgcctccgtgc

SEQ ID NO: 353317 - DNA, 264 bp, Zea mays
gttcaattgtttcatgatacacatgtgttggttattggaggggaacggtggtgttctgtgttaggtttcacgacatatctctgtggagcagattggcatatgtgaaattgataagacggtggtagatgtaagatctcgcttcctgtatgtgcataatactgtgcagtgaccactgatattatgttttattgacttttagatgtttgagagcattgctttctgttagatttctctgaacaccaataatttggtctatgtgtcttt

SEQ ID NO: 353318 - DNA, 273 bp, Zea mays
gacagatagttcatttctgtgatatatcaaattgtaaatttgattcttttttggataattttatcctagcaatttccacatccatagtttggatgtacactcttttaaacgttcaaaaccacaactttcttatgtttccgttcttttgtgtaatgccagattttcagcctccatttcagggatcagattgttccatttgtcataggaatgccacatcacattttcttttcaagtgcaaggttacacattacagacacccaagtgggtgggtta

SEQ ID NO: 353319 - DNA, 266 bp, Zea mays
acttcactttcgggccctacctacctcgcgtgccctgccgtccgtcgagccggacgatggccgacagcgacggctgcggcgtggacaagcccgagcacgacccgtgatcggcattggatcctgcgcatgtggagccgagcgcggggccatttgcggacatccaatcgaatccaagccaagcgtgactgcttgctgcgaaaataaccgcatccttttcttcttcttctccccatgtccctgtctgtcaatcctattcttgggcgtgc

SEQ ID NO: 353320 - DNA, 119 bp, Zea mays
cttcgcatccctctccgcagccgcatcgctcgcccgccccatcaccgtcaccgccttcaagaagctctccgaggcgtcccccgtgcccatacctcaggagcataacgagcccctcctgg

SEQ ID NO: 353321 - DNA, 263 bp, Zea mays
cgtacgcgcacgtctggacgtcgtcgtggagcttcaccaggacgccgtggccgccgtctgcatgcacacacaggcaagcacgtaacgtatgatcagcttcagctagctgtttgttttcttccgaaaaggaaaaaaaaagtaaaggtgtattacgttacgtatttatttataagaaaaaaatatatgtaattccttgcacacagctggagctatattgtacacctctctttcgtgtgagcgtgacaggggaacggaaagatgcg

SEQ ID NO: 353322 - DNA, 266 bp, Zea mays
cgtcttatcaccggtgaggtactgaggtgagacgatctccgccaccatggcctccagcacctccctctccctatcgcttgcacgcctcgtcgccctcgtcctcgtctcctggactccgccgaccctccctcgcctacctcctcgtcctccaggtccgagagaacgcgcaagatcagggccaaggcggtcagggaggactggaggcagaaatccaagcccatccctcctggcaatgtctaacctgcacaggaccactgcagccgttg

SEQ ID NO: 353323 - DNA, 186 bp, Zea mays
cagggccgggtacactatcgacaaggtcaaggatatcatcaagaccatggtgctcgaagaggtcaagagcaccggcacgcgggattttagcgccgttatggccggcacaatgtgctatcggctggtgactggggctccgcagggagggatgatggagggaatccattgtgggatttgccccaggac

SEQ ID NO: 353324 - DNA, 129 bp, Zea mays
caccgtccgaagcccaaaccaagcccagaccgatcgaccctgtccaaagcttatctaggttttcggttcctccacaggatggccgatcccgccgccggaggccaactggtccccgctgccggagggaca

SEQ ID NO: 353325 - DNA, 129 bp, Zea mays
atacgctgatgcttgactacagcttgagtcgtctgctgataacctgataccgcatactgtttgatcaaactagcctcctgttgctaggtgatccaatttccgagtcaaaaaaaaaaaaaaaggggggcc

SEQ ID NO: 353326 - DNA, 192 bp, Zea mays
ggagaacaggtgaccaattatttggggagtcttgggtagaatttccgccacacattctccccagggctgcaggggtcttccgaggcaaggcggtggagcatgattcaggatgtggtgggaatagagtgaggggcagtgggtaggcagacctaggcgtcagaggtcctgatgggaaaggaggcaggggctacc

SEQ ID NO: 353327 - DNA, 160 bp, Zea mays
aagaaactgtgaagtatgaatggtggccatgacttcatacagaatttcactgccgttgaccagtcgccagtgttaccccatgctgtcaacttggcataattgttgacctggaagttttatggttgaaccagggattgatgcaggcttgcggctccatttc

SEQ ID NO: 353328 - DNA, 241 bp, Zea mays
cattaatcccctcgccttcgtaaccgccagtcctccgccacctctccacccaacaacaaaacaagcctaatgggacaagtggcgcaacttgagtgtcaccgcaggaggttatgggtctagagagaaggcaaggatggcgttgaagaaaggtagacgtgtggtgcctaagcttactgctgagccaatggatgtagatgtgaaggatatggacgatgctcatgacacagccattgatgtggac

SEQ ID NO: 353329 - DNA, 156 bp, Zea mays
ctagcaggccaccaggtcggcccgaggctttgccggcaggaacggacctcttatcataggccggaacgaagcccacatcctatccgacgggcagaagcagagcaccaccaccatacgccgccaccgcaagcagacgtccccatggccatggcttcc

SEQ ID NO: 353330 - DNA, 99 bp, Zea mays
cattcgcattgtcgtgtttaacttgcaagagcctggaaacattgcaaaggctattgtcggtgagaaggttggtaccttcatcggatgcacaagagatca

SEQ ID NO: 353331 - DNA, 275 bp, Zea mays
agcccctgagtacctcaaggtcgttcctagtgttggaatcgccttcatgacatacgagacactgaagggcttgctctccagcattgacatagacgatgagagctgaggtttcccattatacgaagaggttaaacttcaccggattttttggccataggttaccatcagaatgtatgtaagtgcatcagagtggttacacgaacggcattgtggcagttttgtagttgacggtaggtgaaagcttacctgaggtgtacaactagtcttgtgttgta

SEQ ID NO: 353332 - DNA, 265 bp, Zea mays
ctcggaagcgttcatgagaatatgtcagaaggaggaagtagacggaatagtttcttcccagtcttcaacagtttttcttttccagagcatgaacatatgaatgaacacagggatggtaacagtgatcaacagactagggagacttattatgctggagaagctaataatggagatggtttaagggcttctctgctttctcaggcagcaagtgttgaagtaaatgatacaaatacctcttttacttctgaagggagctcttcatatt

SEQ ID NO: 353333 - DNA, 265 bp, Zea mays
gcaaagcaaagcaaaacaaaacaaagcagatcaaaaggacttccggcggagcagaggttcgtgacgatgcttacaggggcgtgtgtccaggccctgctgttggtcaccatctgtgcaggaggacacggagcgcgaggcccaggcggagcacgacgaacctggctgcggcggcccaccgcgtggcgacggtgttgttgcctgttgcctttcggcactcgtcacacgagggttcagatctcaagagtggctccgcactgcgcaagtg

SEQ ID NO: 353334 - DNA, 255 bp, Zea mays
gggaattgaagacaacattttttttgtgggcacagccaatgagtttgcatactaatgtagctacccaccaagtccattctgttccttcgaccgagtcattccatggcccgagggggctccattaccattcatctgctcggtcgaagagattttcgcaattggacttgcacagcagaactgttcatactcgcctacatccattctttcttttcccccctttttggcctttgaagaacatagctggtggtgcgggga

SEQ ID NO: 353335 - DNA, 258 bp, Zea mays
ctggataggaatgtttggtactataagttactacgtacagtacatacacagttcctccaagagaccaagatacatctttgaccagactttggctgtgaagaactgcacatgagaacaggggaaaggtcctcaaaatacaaaacaattcccgaaataatacccggaataggtgagaccgtgagagcagactctgaccacacaagggagagcatactcctaccacaccccataccactaggacagcagcttatttggtca

SEQ ID NO: 353336 - DNA, 259 bp, Zea mays
gttcaaggccgtgcagacggcgaacagagaggccgaggagcaagaccgcagagacggattcctgtgagaggctgtgggtgactccggcgcactcgccggtgccgtcgccgtgcagaagaacgcgcaccgcaccaccgtggtgttcgcagcgacgggtgacgggtcatgtactcaagttatgtatgtcagtgtactgtattctagaattggagagagcagatggatttgcgaaccaaatcagagaaaatatcataatcat

SEQ ID NO: 353337 - DNA, 254 bp, Zea mays
gttctccctagccatatacccctgttcttttccacttatttcttcttcataacagttctagttcagattaactagtcgggatagtaatatgttagtcagtacgtttttttaactactgtcgattaggaaatgatttttcaactttatattattatactttgacaagctttctacaagtaaaaaaaaaaaaaaaaacaaaaaaaaaaaaaaaaaaaaaaccaaaaaaggtaaagaaaagagcaaaaaaaataagg

SEQ ID NO: 353338 - DNA, 255 bp, Zea mays
tgttgatgtgcttggccttaagactgcttttgcaaccttcatgggtaaggcaagtaaccttcctcctttgcctctctgatgctatgtgttatgtaataatggcctaaccccatcggtcgcttagtaagttgtcttgtctgttattaacttacattaaaattctgccacaaattcccatcaacaagaaaaacaagaaagatagctactaggagaagctttaatacgctcgatacctggcatgatgagttcctcaat

SEQ ID NO: 353339 - DNA, 240 bp, Zea mays
gaccggaagcacatcgcccacccacccgctgcgtcccgctcaccaagtcaccactcaccagccttgctgcgcgcgtcctcccacccgccgcccgtagccatgtcggtgacgctgcacacgaacctgggcgacacaagtgcgaggtgttctgcgaccaggtgccccgcacggcgaagaacttcctggccctctgcgcaacggctactacgacggcaccgtgttccaccgaaacatcaaggg

SEQ ID NO: 353340 - DNA, 99 bp, Zea mays
cagaccccaggcacagaacagacgttaacaaagcccactttcctggacgagtactacatgctggatttggaggagacgatgagaaaagtgggctttgtt

SEQ ID NO: 353341 - DNA, 261 bp, Zea mays
cagcaagcggccttgggattggattggagctctcatcagctcctatcttatcaccagagccagacagacagtcgtcatcgtctccgatccatctccgtcttcgtcctcctcgctcgacaacccaccaaggagcaagagaagaagatcgacgacgacgacgacggctgccctctgcgttcctcaagaaattaagaagacattggaacttctgtatggcatgaaatgtatgtaaggtgcctgcttcaacaataatttcttcaa

SEQ ID NO: 353342 - DNA, 215 bp, Zea mays
cggaggtgcacgtcggccgcgtcggcacgagatcaggacgtgcgaggggcgtaacagtggcgcgaggaactccctgcacgtgtggcggccggggaccgtgcgggatgtcgtcggcttcccctactgctaccacctgttcgaccgcgtcgggaagcccagagtcgtgcacaaggagaagtacgacgtgccgaggctcccagcggtcctggagctct

SEQ ID NO: 353343 - DNA, 139 bp, Zea mays
gcggcgaggacccgggtctggcgctgtgggccgggagccgtggggcggcatggatgggctggttgtcgccgccggcggggacgtctccctgcacaacttcagcgcgaggctgtgggagcagctggtccacttccgcgtc

SEQ ID NO: 353344 - DNA, 232 bp, Zea mays
cggagaacctcccgaggcagaagtccgtgcggttcgacgacggcgacggctcctccatctccgagcagaccaagaagctgttcggcggcggcgagagcaggaagaagtcggtacaccacgtgctgggcggcggaaatccgccgacgtgcttctgtggcggaacaagaagatctcgtccagcgtgctgggcgtggcgacgctggtgtgggtcttcttcgagtggctggactac

SEQ ID NO: 353345 - DNA, 130 bp, Zea mays
gtgccaaccaagcaaacttatacctcgatgattgcaggatactgtagacttggcaaattgacctcggctctcaaggtctttgagaggatggttcaacatggatgcctacctgactctataactggtgggg

SEQ ID NO: 353346 - DNA, 261 bp, Zea mays
cagcgcgccgactacgaccgccgcctcctcctttccggcgccacagtacggcgcaccgtcgctctaggacgctcgccctcgttcccagcgcaccgttcccgccggacatgggagactgaccagtgctggtgatatgtcagaaagatcttcgacttcgacgtctacgactggtgcggcctccgcagtctccgtcgggccgcagaaccttccaatgaatgggaacgcgaagatccccgcaaacctctggactcacacaaagcg

SEQ ID NO: 353347 - DNA, 255 bp, Zea mays
tctcggagcaaaggcaatccagcaagagtcgctcctttcccttttcgggatacagccagcagaagcaatccggctaacaagtttcttcttcttcttctttcctggtgacggtcgcagggctcaccgaagtgacgatggcgtttgcggtctccgacgagctgctgggcaccttcgtgccgattgcggtgtactggctctactcggggctctagtcttccggaacgggctggggatggacgactacaggctccaccc

SEQ ID NO: 353348 - DNA, 260 bp, Zea mays
acagcttctcacaaggacagcttgattgagggaactgacttaactcagacaatatcttcttataataataacttgaaattgcaatttaaggaaggaacacaggtatgcgatattgatatgctgccacaagatgtgaacctcattgagttgcccgatcaaaggaaaatcattggtcgtgatgttggtgctaaagctgtcaccggaatggaagaaggaaagctggatcaatctagctcactaaatctatcggatgttgacct

SEQ ID NO: 353349 - DNA, 256 bp, Zea mays
gtaacatgcatgcgtgttacatttgtgttcacaatcatgagagtgcatgagcacaacctccaaacgagtaagacaccaacttattcagggtcacttagtacaatctacaagttcacaaagcttgataaaataacaaacaaggaattgcttttatgaacaacttcagcaatctttcaacatctcaatgtacctgctgggagatctacctttacgcttttcactaccccctagttgtgcttattgcatttatgatctt

SEQ ID NO: 353350 - DNA, 246 bp, Zea mays
ggtgcactagttatgcacgtgatgcggaagacgagccaagttgaccccaagatgacgtaatgggtggactactccgcatggtgatgctgatggacgaatttaaggacggatgacctgatcaagtgccaggacaaggatgatcatcaagagatcgtcgtcttacccacactaacgcaatggtattccaagcaagccccggtggaattacccttttccttgctatttcaaactctttatcacttggaa

SEQ ID NO: 353351 - DNA, 252 bp, Zea mays
tgctcttggttctggtttgacgcctactgctgcaaaggagttaggcttacttcctggtactcctgttggaacctcacttattgatgctcatgctggtggagttggagtcatggaaagcattcctgatgcaggatctaaagctgtgtctgatgaacatgcatactctaccggaaggggtgggaagtggggacctcaacttgcaaaaggcctgtttcaaaggacagattgtttatacctggtgtctgggggcct

SEQ ID NO: 353352 - DNA, 253 bp, Zea mays
gctaaggatacaagctttattcagatatactcaagaacacccaaccccgggccagaattcattgacaagtacaagtcttatgttgccaacttcggctatgacccaagcaagatcaaggacactcctcaagactgcgagtacatgtcctcagaccagattgcgctgatgatgtcgatgcccgggatgaatgaggccttgacgaatcagttcccagacctcaagctaaaggcaccggtcgaacttaacccattca

SEQ ID NO: 353353 - DNA, 192 bp, Zea mays
gcccccgtggcggaggatgagcagggggagaagcggcggaactatacgttgccaacctgccctggtcgttcccggcgccggagatcgagaagctcttcgcgcacacggcactgtcaaggacgtcggggtcatcaaggggaaggatggaagaaacagggggttcgcgttcgtgacgatgtcgacagcggagga

SEQ ID NO: 353354 - DNA, 136 bp, Zea mays
gtagttcgttaattagttttagaaaaagaccttgttagatatataggatcggaataggagtcgatctgtatccgattctctgcaacacacacaacaatgcaaggacacgtgtggccggtcgagggcaccaaccagt

SEQ ID NO: 353355 - DNA, 122 bp, Zea mays
ggacacgtcgccgaccaccgtcaccttctacgccgcgaaatcgatgttgaacgacgtcacgcctgcgcaggagaatggttataacagaaacagaaccagtaaaagggttaattattcgtggt

SEQ ID NO: 353356 - DNA, 122 bp, Zea mays
gtcaaggcgtcgttgtaattcggaatccaggaatcccaaggtaatcaaggttatcaccctgattaccttgggattcctggattccgaattgctggtggtcaaggcatcatagtaattgcaat

SEQ ID NO: 353357 - DNA, 258 bp, Zea mays
gctgtgctcagaccaggaatgactacatcagggagccccagggctccggtctgttcaggtgggtttacgcgcggcgaccagtggtgcccagaggcttactttgaaacctgacttgcctggactcagattgtgaggcctcgacccagtccgggtcctgcgcctaccggactgggtctggagaagtgcaatgagccaagaagggtaactttgcctcgatttagagccagtgggttagcggggatccacctactccagctc

SEQ ID NO: 353358 - DNA, 172 bp, Zea mays
ctgtgtcatagtagcatgcaggttgctaaagcacagttacagtgaaataatgggacaatgtctaagaacaccgccctttggtttttgtgacaatataataagaactgaatagactgatgtttccatgtctgggcgattgggccggcgttcctcaacaaaaaggaaagagggg

SEQ ID NO: 353359 - DNA, 128 bp, Zea mays
cgccgcttggaggctgtaattctgaatgccaaaaaactggtgattggcaccattttgcgttggatgctgctgcagacgaggccatgtttgcgtccgtcgtattggaagaaagggcgatccggagcagg

SEQ ID NO: 353360 - DNA, 126 bp, Zea mays
cttagatgcgcatggaggcgattcttgcgacgcgttcccctcacccgtcagtggttcagacgacgacaggagggcctcccggatcggacactcggcttccggcgtcagcgtcaaggccacagggac

SEQ ID NO: 353361 - DNA, 143 bp, Zea mays
atccaggacaagctggccgcgctgcacgcggagggctgcagagcggagaagggcgctccggtcgccgccggagacgtcagcctgtggtcgctcaggctgtactcccacacgtactaccgctacgtcgggtcgttcaccacgcc

SEQ ID NO: 353362 - DNA, 144 bp, Zea mays
ggccaaagctctcaaaaccatgaaaaggcaaagaaggtgctccttatagtaaagccacattatggatttggtgagaagggtagaccaacagttggagaggaaggtgttgtgatgagcatcatcttgttctacatcatcactaat

SEQ ID NO: 353363 - DNA, 223 bp, Zea mays
cccgcgtggatggtcggttatgcccctggctcccgcgcggcgcaacgcaccccgcctgagggctatctggtgcggtgcggctcgatccggcccgacacttccgatcccttcgcgtccaccatcccgtctcgctctcggtctcgcgctccacgccggcgaccggagaaggggccgcgcatgtgacgcccacggcgaatccctcccctcctctccggtgccgcct

SEQ ID NO: 353364 - DNA, 263 bp, Zea mays
  unsure (1)..(263): unsure at all n locations
gtgagctcctgcacgacggcgcggaactcctcggcgctggcggtgagcttcatggggctggagatgtacaccaccttgatccccttaccgccgccgccgccgttctgcctcccctgcttcctccgtgcgtggtggtagtggtgcgccggcggcgcttagcgatggtgccgttatggctgtagtgcccgtactgcacgcccaggcccagccgcttattgctgtccatgttctcagctagcttgtgngaccgttgaacgtatagt

SEQ ID NO: 353365 - DNA, 270 bp, Zea mays
gaaaaagagaaaaaatgtacgtactacacctatcttgtatttacagttgatcaattactcactaccacggcccaaagaatcgggaaggccttaacggccaagaacaaatttggtacaacattcgtggtgggaagaaaaaaatgcttcggcttgttcttaaagcttctactactgatcgcccatagttgagtagtggatttcacttcacgccgccgacgtgagcgccgacgcatcggcggcggcagggcactctgtgctctgctccgcgtt

SEQ ID NO: 353366 - DNA, 269 bp, Zea mays
cggcaacaagacgctgaccgagcactgagtctcttgctaataaggcaacatataattaaggaagttgtggtcacaactgtactcagcgacaatatattttgaagtattttgccaaaacaatccacacaaatctatgtgcagtagcattttttctagatctttgtttccttgtttgtcctgtttgcttcaataaaaaagttgttgatgcaccagatttcacctttaatcccagagcagtagctttcaagatccagaaggtattatctaaa

SEQ ID NO: 353367 - DNA, 269 bp, Zea mays
cccgtcctcctgtccttcttcccctcacccaccgcgggaaattcggcgcgattcgggcggtattagttggaattcccctgagaatcggagcgtttttttggacttggtagattcgtatatcgatcgattgatgcgtggcggagggaggggaggagggcggcagatggcggcgtgccggggcttcttcgagtgcctgctcaggctgctcaacttcatcctcaccgtcgccggcctcgccatggtcggctacgggatctacctgatcgtcg

SEQ ID NO: 353368 - DNA, 285 bp, Zea mays
ggaggaactacaccgccggcacacccgaggagcgacgcgcgggaaagttccagtggaagctaccgggcatctgcatccactgatatccattctttctcagccggcctctcgcctccttggtagtaaaagatccattcttttgattccatcatcaacaaattaaaggttatatatatactagtaacagatagttagaatttcatagctataagtacgggcagggcttcttccacgtgagaacagtgatcgatatggtccagaaatagacctaccatacactatttt

SEQ ID NO: 353369 - DNA, 99 bp, Zea mays
cagcaattttcttggagcgaaatctggacataaatggaatcctgagtcaaatgctgcttcccttgagatacttggggtagcatcagtaatagcagccca

SEQ ID NO: 353370 - DNA, 210 bp, Zea mays
gtcagattgttttggccgcaattgctattcgaaacttagatgtcagtctcatgaacagcgtacacattactgcttatgttctggtcttgtagttttgtatccatgcactgtggcttttggatggcttggttattcacttggtagtaatgaaactgtcagctgtgtctgtgtcagctattgctttcggaactgatacctgtcattctattc

SEQ ID NO: 353371 - DNA, 276 bp, Zea mays
cccttgccacttcgcagccccaataaacgcgagccggtcagactttctggctgcctttgccttcctcgacgagttcctccccgaacacgccgccgcggctcccggcctctcgctgctcctcgcctccttcatggggaaggcggccagctacttccctccggatgacatgaagacgctctcgtctctggacgagttcctggtctccgttggcgctgtcaagaaaaccgtctctgggaggaagaggtgacgccggtggattggatgtgcatgggtttt

SEQ ID NO: 353372 - DNA, 190 bp, Zea mays
gggacgaatatcattcacccctgctgttggcgttgggctccggggaggctgttccaacagctcatcgcagaaagaggaagagacatcaggtgaagcggcgtcagggggcggcaatgcaacagttatcaccaacttctgtatcttccgacgatgtcgttgctctgacagctttggaggagattacaacggt

SEQ ID NO: 353373 - DNA, 271 bp, Zea mays
gaacagagcctgtgtgtgtgcccgcgctgacgtgcacgggcggcggccatggcgaggattctgctccagcccaacaaagacgatcacgcaaccgcgttccactcccacaccggggcgccggcgacctccctcctcctcctcctacctcgttgccgccactgccgtagccgctgtcgtcgtgtctctgtgcaccagcggcaagaacgccaggccatggaagcagcgccggtcgtccctcgcgccacgccgcagcaggaacacgagcaggagc

SEQ ID NO: 353374 - DNA, 118 bp, Zea mays
gttccaatggttgagccgagtttgagtcacagacatgtaaaacaccatcggtggtgtgtatgtgtaaaagactgtcggcctggagagagctgtggtgaactgtggctccgttcatggc

SEQ ID NO: 353375 - DNA, 283 bp, Zea mays
attttaaatcaaatcatgattatcatataagaatgagatggctcatgtgtggatgctactccacagtgagaactgagcatacatcaaaattaatcgacatagaattgagggaaacaagaactacaggttcacgtttcctcggcagagcactgcttaattcaatttcctattatctttaccaagtactacccctttcccctcgctccgccttcttctagttctggtacatcttgccctgtgtggtgagcccgaacccgagcgggaacagcgggtcgtagtgcgc

SEQ ID NO: 353376 - DNA, 280 bp, Zea mays
acaacgcaactgctcagctccactccctcacgctccctccccacgacctccacttcgccccattcatcgcacaaccgaggatgataaatggtgaccatgcgacctccacttcgccccgttcacttcgctccctacctctgtgttcgagttcgcgtggacgccggagccacccgaagagagaggaggaagcagcgcgcggacgccagatccgaagacggctcgccgctaggacgttccttttctgcctctatgttagagcgcacgcgtacaccggagccgg

SEQ ID NO: 353377 - DNA, 266 bp, Zea mays
aatagcatgtatttctatcctggtagagtgtggctagacactgatggaaacaccattcaagcccatggtggggggattatgtatgatcacaagactgccagattctattggtatggagaaaacaaggatggaccaacataccaagctcgccccaaaggaaaacagagggttgacatacttggggtaagctgctactcatcaaaagacctgtggtcgtggactcatgaaagaattgtgcttcgtggtgagcttctaatgtcatcatg

SEQ ID NO: 353378 - DNA, 178 bp, Zea mays
atggcttccctcctctggcccgcctcgtcctgcccctctgcttcactgcgccgcacatccgcctcccccgctgcaccatccttggcctcaagtcggcactacggagccccgcttacgttccgagtcgcctctcagccgccgcaggccttgtcgcggccccttacggctacggcagcga

SEQ ID NO: 353379 - DNA, 180 bp, Zea mays
ggcgtgaccctaatcagatgccagcaccttcgactgtagctgcacctcaggaataggtgtggaactgtttcttctctttgaaaatacagtttttgaatgtatatgagtccaaatccatacctgtcttcggagcagggatctagtgttgagcttgtctttgagcaggagccagaagaagac

SEQ ID NO: 353380 - DNA, 180 bp, Zea mays
ggccaacagctgcaaataaaatacatggcgcgggtgcggctttgcagagcgcaatgcaaacaccatgcttagcccaaaagaacacatcttaccatcccggttcatcgtcatctcgtcatcttcctcttgttaggcctcgcaattgcgtctttggccaccggagacgaccagtttgtcgtc

SEQ ID NO: 353381 - DNA, 172 bp, Zea mays
accaaagccagcctccgctccctccccttccagcttcgtctagacagagtccagcagacacggccaacagttaaaaccattgctattagtacgcgccaccacgctcgctgctcgcgcgcgcgcacacacacacacacactcaacagcaacagctaagcctctcccaccagac

SEQ ID NO: 353382 - DNA, 176 bp, Zea mays
cgaaagatggagtgtcaggagtgcttctacatcacaactacgaataatccacctatgacttttgctgttgctgcctgtaaactcaagatgtgaatgtgacagtcttgcaagtgcttggtctttatggagaaaaccatgtttgtgcaaaataaatgtgaaatgccatgctacagcta

SEQ ID NO: 353383 - DNA, 168 bp, Zea mays
cgcgaactcgcgcaggcaggttgccggtcaggcaccgccgcgcccgcccgcccgccggagacccggtccgcagccaagcgtgacgtaggggggacagcgccatggccacttcctctcgtcgctcacaacgctccactccgcttctctctcccaccccttctcgcctaa

SEQ ID NO: 353384 - DNA, 118 bp, Zea mays
cggctctgagttccaaaagctgcacaccctgtttggctgcgcgtggtatgttatggtgtgattaccatttacgccaattgttgtaaatgcaataagcggttccccggaggttttatat

SEQ ID NO: 353385 - DNA, 173 bp, Zea mays
cgcggacgctacaggagctggcgctgggagcaggaggccgagggcagcgcggcgtgttcgagggggttctgtacacccggtcaccggacggaagtgtccgcgtggcgcccagctggtactggcggcggcggcggcactggagcgacagacccgaggaacggcatgagaaggcg

SEQ ID NO: 353386 - DNA, 173 bp, Zea mays
ggaataccaaaacgtattggcgcgggagactgaagctgaagggtaaagcgctggacgtaaaggatggtggggtgagaaaaagaagaagaagtaccagcgtgaggagtcgtctcagattgcgcacgatgagctccacaaaggggggagatctgaattaccaattgatcccaaca

SEQ ID NO: 353387 - DNA, 269 bp, Zea mays
tgcgcgctcagctccgaggcctcccgctcgccgcggcatcatctccggctcctcccgccgccgtgggcgtcatgaaatgaacctgacttgcttgagttgcttcttgacaccataagaaggcgatccatctgtttccagttgcacacagaaagctagtgccttgaaagataagaatggtaaggggggcggtaggtgtcctaagatgaaactgcggttgcatctgttggtcctgttgttggtcatcatattcctggtgtacaacatggcta

SEQ ID NO: 353388 - DNA, 270 bp, Zea mays
tcacggtgctgttcgcgtacctgatcgtgcggcacggctgacgatggtgacggtgaacgccgtggcgctgctgacggtgggcgccgtcgtgctgggcctgcatgtctcctctgaccgccccgcgggcgtcaccaggagtcagtactggctgggcttcacgctcaccctgggcgccgcggtgctgtacgggctgttcctgccgctggtcgagctcacctacttgtgcgccgcggggggcggacgcccgtgacgtacgcgctagtggtggag

SEQ ID NO: 353389 - DNA, 227 bp, Zea mays
agcttggcaaggaagccattgccaagggattgctcaaggaggatgctctggttttaacaaggacgaatacctacagcagcattggagactttctggactccatgaacaggagaatcatggaaactgcttcaaagtctcagaccctgtgctcagaaaatgtcgtcaggaatgaactggcacataccctgtccaatgttatcctgaggcattccattgatgaagttcca

SEQ ID NO: 353390 - DNA, 196 bp, Zea mays
gcgtctctctccccatctccatcttcaatcctcgctcgctcagtctcggcagccatggcgtcgtcgcgcagcgtagcctgagcctgatccgtcggccgtgtggtggtcttcccgttcccgttcctgggccacttcaacgcgggtgatgtcggctggtccgcgcgacgctggcatcgctgccgggtgcgctcgcgat

SEQ ID NO: 353391 - DNA, 130 bp, Zea mays
cgcgtcgcagcattgctacatgtggatcccctgtctgtcatgatcatggtttgcctataacaaagggcactgacatacctttaccggatgtcatgaattgctcacgctcggactggattcgatatgcgtg

SEQ ID NO: 353392 - DNA, 265 bp, Zea mays
ggcgcaccgcacaggccctctctgccccctcgccaatcgccatggccatgaccgtggcggtcacctggctcccgtcgaccgcctcccgcgggagaaccttagccgctccgctccctccgttcgcggcccctatctccatgcacatgccactgcgggcgccgcctcctattcccatcccccacaagccgcgcctcgtcgtcgcctccgcacagttcgatttctccagagctgttcaaacggtatggcgggtcggtaacgatgccgt

SEQ ID NO: 353393 - DNA, 253 bp, Zea mays
ccgtgattgagtgtccatcactggcgtcaaatctcaatcatgcatgaattctgccaagagggcatcctgtaattttgttgttcaaattgtaagaccggtcccaacggtcgtcggtactgtcgacggccctgcgatcggcacgtctgcccccgagttctagccacggtcggtcgagctagcggtcggtgacgctgatgaccacccagaccgacctagcggtcggtgacgctgatgaccacccatgaaccgtaga

SEQ ID NO: 353394 - DNA, 259 bp, Zea mays
agccaatgtgctgaatctgatggtgcttgcagtcaagtgcctggaacaagctccaagagcagcaacgatgagtgcggtgctgaagtgcctcaaaccggatccaagagcagtaatgatgaagatgacgggtgtgctgatgaaatgccaggagccctctccaagagcagtagcaatgacagcagtgagtgcgctgaccggagctctccgcgagctgtcctagatatctcagtatctggcagcatggactcggatgacagtg

SEQ ID NO: 353395 - DNA, 264 bp, Zea mays
cccggggcgatctggtcctaggcttcgtctgctccgcctggcacggcgaactcgcggtccgccacgtgcgctggattgttacagacctattgctactacagctatctagaagaagagagaaagatgcgaggtagaagaaagagagacgggaaactgggggctgtggagagggaagcgctgaccaagttcttgacggacagggaggtggaagacgagctcgccggattcttgcactactacgtggcaaacaagcaaggagaagat

SEQ ID NO: 353396 - DNA, 258 bp, Zea mays
gcaactgccatggctgcggtgcaggctagatatgggatccggttcttctgccaggcctccagaagcagaacttcagaggcgacaagggtaataaggtacagtagaccagtcagtaacatataggatccagagacatttgctagcaacaaaatccgagaaaagctgttaagagtgatgcgtagtggtcttgataaccgttaatgcgatgaacgtcaggaccatgatgaacagatacaatgcataaatagcaccatgatg

SEQ ID NO: 353397 - DNA, 250 bp, Zea mays
ggttgcttgtgccattggcttggctgtgagtaggtctaatataactccttaccttgtcgcttttattgcgggagaggtaatgctagctcagaagacatctgcagatggagaatactacccaatacgtgcgcgcctcaggatggccgtatttacgttacctctctaatatattcggcagtagaattggtaattataatcttcagatcaatatatttggcattgctgttcactccaagtatactgatggccc

SEQ ID NO: 353398 - DNA, 251 bp, Zea mays
cgtccgggtcttcgtcgacaacgccgacaacgtcgccaaagtccccaagatcggctagctagctagctaggcccaatcgttttaatcagctagtttctttctttcataaataaaagtcctctctcgtacccggactgtgatgtttccctagttgtctcgtacgtgttgttttctgtcttaatggatgccatggcgcccgcgcgcgcctccatcatgaaaaggttgaaataatataaaactacatttgaaac

SEQ ID NO: 353399 - DNA, 251 bp, Zea mays
ctagaatgcaggcctctggttgaaaagctatacaataggcctatggtccagctcggttacgtacctcagctgctcttcatagggccggccgggtgtgctcctaataatccagtaacaccatgatactatcaaataatgaacacagatcagatacagtccaactgcttatacatgctaattgtaagctatttgtactcaaaagtttatcgttgtgtttacatgcatgtttggtctagctacacttttagagt

SEQ ID NO: 353400 - DNA, 246 bp, Zea mays
gaaaagggttgcggggcggggcaagaaatatcatttctacttggcggtttcttctggcgccacttcaaccctctccgtctccctcctcctgacgtcgttatccggacgagcagcgaggaggagaaagatcccctcccccactccctccttttcctcccctcccctgcgtccccgtccccgtcccgtctcctcccccgccgcggtgcggaatacgggctagattaatcagtcagcgctcatgatccg

SEQ ID NO: 353401 - DNA, 280 bp, Zea mays
tgttttgatggggatgaatctgtaatccaggtgagctcccatggcggtggcgcggcggtggccgactgggtggtctgtcgcattttcaggagggccaggccagcccaccgcgcccgccttggtgacaggcaagaagaagaagaggaagaggaagaagagcagcacgcggcggtggagagcgcgtcgtccacgtcgtcgtgcgtcaccgacgcctccgggaccatcgggcaggacgacgatggcgacgaagggatcagtggcagcgcagcgtcgcctcctc

SEQ ID NO: 353402 - DNA, 285 bp, Zea mays
agagagcttggataatgagctccatacacaggctaaaaagtttgaggctgacatagcagaaataacgagcgcaaaggtggaacaagagcagcgggccattaaggctgaggattctctgaggaagataagatggaacaatgcagctaccgcagaacgacttcaggaggaattcaaggtgttgtcttcacaggtatcttccgctttcagtgcgaatgaacggcaccttgtgcaagcaaggaaagaggtcgtggagctgcagctgcagaagaccagttagaagagttg

SEQ ID NO: 353403 - DNA, 276 bp, Zea mays
ctcatatatgtcaatctagatcaagccaagctgatttgatggtttggagtccaacatcgaccccaaactggccaaaataggtaaacgatgaaaaatgttaagtatgcaaggtttgagtgttcaacgatgctgcaaacaccttttactacatgtttggtactttggtttgctctctaactctttctgtagagaaagtgtcatttcaggctctgtttgaggaaaaacagaaaagagaggagactaatgggaaagaggtaacttttaggactaagtcaa

SEQ ID NO: 353404 - DNA, 277 bp, Zea mays
ggaattatacaggaagcaaaaacaagagctcatggattatgtcactcaaccagcagtgacacatacgtcacgtgattcgccagcaactcattcacccgcaactcctgggagtaatctgttgggagcaacgctctacaaaggggggggaaaattttgggggggttaaggcccaatgttgttgggggcttattgcttgttctggcatcagcacgacgtaactagcttttgccacaagcttgggtgttagttgtggaggggagaggccagtgagattgtt

SEQ ID NO: 353405 - DNA, 124 bp, Zea mays
acgacgccgagcagaagaacgagaggaaggccatgaaggagctgggcctcgccagggcccgggagttgggctggcccaacacgtacgtcttcaccaaggcgctaggggagatgatgctggcccg

SEQ ID NO: 353406 - DNA, 280 bp, Zea mays
ctttgcgaagcttgtttgctttgaagaggacaagctaagagggacatctacagatagagtttacgcataccattttgttagtcaagttgaactacgcagcaatagctattagcatggtctgctccttttgtcctaagctaaaattgagttcaaggcattggactaagatcatctatttatgataataataaccggatcacctacattcaccaggtggtcattggaaaagtcttggtgtccgagcgttctagtctaaggggggggtgtacaacgtccacgg

SEQ ID NO: 353407 - DNA, 148 bp, Zea mays
aggtacccctttctgtttggataacccggatcgacaagatagtatttacctgcacaaactcaaaatacaaatgtcacgtacatgtgacataaaatagtactgtattctacaaatgtacaaaatatttatataccttctggtggagggg

SEQ ID NO: 353408 - DNA, 268 bp, Zea mays
aaaaaaacaacaacactgcttgatctttctgcatgaggataaaaagcgcatagtttccccggttggatatatccatcagatatttattatgttgttgccttctacacaaatttaacgtgctttcgtgattccttaatgcaactttggattcatgtacggagggagtttatgtgaagacatataacttggtgcaaaaaaaaaaaaaaaaaaaaaaaaaaaaaggggggccccccaattaggggcctcgtcccccgggatttattccggg

SEQ ID NO: 353409 - DNA, 177 bp, Zea mays
ggaagaacacacaccgcttctagtagctatagctaggatccaacgatcgatcgatccatcgacgacatggacaggccagatcaccagcagcagcagttcttcatgccgacgacggtgcaggtgccacagccacagcagcagcagcagcagctctggtgcccgatgctcgacagccgc

SEQ ID NO: 353410 - DNA, 179 bp, Zea mays
atggacatccaatcagagtgcgcgtttacagttggggcgttctggtcgcttctctaagaagaagctagtgtctattctgaaatcctggcgagcaagattaaaggtatcatcccataagaaactcgagactccaaagcatgactgtgagattcctgaagctgtagagcatgaagaagttg

SEQ ID NO: 353411 - DNA, 176 bp, Zea mays
attgtttagtacagtatctaactcggtccggcattgttgtctcgatcgagtaataaacaaaaatacaattcttattgttattgttgtaagatattcttgaaagaaaattgtacattgtataaattagatatatatatcgtcgcattggaaataatctaataaaaagctgatagaat

SEQ ID NO: 353412 - DNA, 176 bp, Zea mays
agatgaaaatattcgtcttcgagaggacatggaaatggagcaaacaaatttcaccaatgaaaagattgcactaaaccaacggctaactgaattggaggcaactattggcagtctaaggtctgagctaaaagctgagagggatcgttttgctcgtgagaagaaggcattatctgatc

SEQ ID NO: 353413 - DNA, 172 bp, Zea mays
ggtgcatcaacttcagcctggatggacgataccttgccactgctggagaggatcgtgtgatccatgtttgggaggtgtctgagggagacagaaagggtgagttgctcggggaaggttcgctggcaaaggagaatggtggtggctgcagcccgtttgacacgtttcttgggaa

SEQ ID NO: 353414 - DNA, 170 bp, Zea mays
cgcgtgttgagcgaattcctccgtggatctctccggtcattccgccaccgccttggttgttggatcgaccgagtttcttgccaccaaattctgtgaaatccactgctccagtgaataactaccgtgtcggctgccttccccagttcccctcctctccatttctccccttc

SEQ ID NO: 353415 - DNA, 171 bp, Zea mays
catacagcttggtgtaccgttatttcaacctaccacagaggatgctaattgtcacacagaaccaatcccccttgtttcctttgatctgcttgttgaagaatatgaaagtctcacctgaaagttctccatttctgccagcctgacgaatttcgttgatgaaatctgcaactt

SEQ ID NO: 353416 - DNA, 207 bp, Zea mays
acgtctgctattaacacaccgtgctcgagagctggcttcctatgactatgctctcttggcgaggtctctcacagatgttcaggttgcccctcctagatctcgtttgccaccaagagctgctcgctctgcaggtaagatgtctgttgtacgctcagttctgcattatgctcctatatacagacgatgagccctcggaaatatcctgga

SEQ ID NO: 353417 - DNA, 277 bp, Zea mays
ccagaatctcagttgcaaatttctgacaagaaactaggtggttgtctgattccagtgaacttgctttggcttgagaaactgcaatcttttatgtaacaaggcaacaaattaatacactttactttgttatttgaagtgccttattttgtttctgacccatccttcgacaggatcatcttaaacatcagtgatacatctagcatatttgtgaacaattcactgaatggaaaccaaattggaaagacatttccaaatttggatgcatctttggcattca

SEQ ID NO: 353418 - DNA, 273 bp, Zea mays
gtggcttcaaaggggacaagattgtgcacaattttccaaatggattggtatgtactgatgagcatcagcgcgttccatagttccgactccctcttcagtgtattcaagtcgaccatgaacccacgacccacaaagatcaagaacaaactactgaaaatatttagatagttcgactccttcacgataagcaaattagtagtactctggagcaaggttttaaataaccggctatagcggtcgatatatccagatatatccattttagcagcgaaa

SEQ ID NO: 353419 - DNA, 270 bp, Zea mays
ccggattgcattatccgctcgctgtgcctgcactgcttcttccgccattctttccgtctctgctctactttcttggacgcctgtccggaggctcctccccgcggcccctgagcaaactgtaccatagccgcgtgattgattggttcacgggagggacagggagcggcgtcaagatggttttggtagtaaaaaatcacttcaattgtcgcctcattcccatactaaagcaggctgcccaaaatttctcaatattgtctcagaattgttgct

SEQ ID NO: 353420 - DNA, 271 bp, Zea mays
caaggatttacatgtgtcctattagttgtagacacatcctggaattcataccccacaaatactttgtatacacactgtacttgtggggtatgaattccaggatgtgtacttcaaggacagtgtgtatacaaagtatttgcagagcatgacttttatatgtgtgggatatcaatgtgtatatttatatttaaagtgtatttattgttacaagtctattctctattatattttatttactctgcggttataaaaatcacccttgcatacaagt

SEQ ID NO: 353421 - DNA, 141 bp, Zea mays
aggctctaatggccaattgattcaggccaactgctggaaagggcctccgaacctgaatagggatttcaagaaccgaagtggcgccaaaggacgacgcatatcatacatgcaaccggtctggtcaagccgatgcctttttta

SEQ ID NO: 353422 - DNA, 266 bp, Zea mays
atcatgcaatacaaggagccactttgggtagctaaaatggccaatcaccgtacgttgcataaatttgggccagtcgtacatagaacatgcacaatggagtcgcccccccgaatggacagtcatctagatccttgagcccaactgatagacagatgagtgcttatttggatatgctggatacagggcaatcacctctgcactgtctgatcttcatagttctgttccaatccgatgatctagtgtaatcacattttgcaggcttgtgg

SEQ ID NO: 353423 - DNA, 109 bp, Zea mays
ccctttcccaagataccaagaggccagcccctcaccatgacgagctcctcctctacttccagaaaggtgctgatctagatcgcttgctatcggctgcagaaagagctcg

SEQ ID NO: 353424 - DNA, 287 bp, Zea mays
agtttcttctacggccgcctcgagcagcgcgtgccgacttgataccctgggaaagagtccatggcgtcctctgcccccggcagaggaggaagacagctgatcctactaccggccgcggcggcggctgtggcggtaatggtactaattggggtggaaccggcgtcggcgtgttacccgcgctgttcagcttcggggactacgcttgccgataccggcaacttcaggttctactacggcaacaactccggcgagcccgcactccggcaaccctacggcgagaccttctt

SEQ ID NO: 353425 - DNA, 286 bp, Zea mays
cgcgtgatactcggcggcggccggcacggtgcatcctccgctcttgcctcacctcgacagcagccttccctcgcgacagggataaggacttaaggaggcgtcgctcggtgcaaagaatccatggcatggggaggtctgttcttgtgcatgggccgccccacgcaggagcaacagaagtccgccttgcagccgctgttggcttcaactacgacacagctctccaaggcgccacacgcccaaagtcagtgtctaccttgacctctgacgaagctggtggcgaaatagg

SEQ ID NO: 353426 - DNA, 237 bp, Zea mays
gcggccacgacgccgcccgtcgccgccgatccctttcgaccgctcgggtctccctgctccttcgcctttcctcgtgaaatccagcgaccgaatccgatcgccttggcgcaggcgttcgatgggcaaccactaccagacgctgggtgtccggcaggacgccaccaaggctgaggcaaggctgccttccgtcgcagcgcgctacgcgaccaccctgaccgccacgccggctccaccgac

SEQ ID NO: 353427 - DNA, 183 bp, Zea mays
  unsure (1)..(183): unsure at all n locations
ctaggcatgaggagaaagcgggggtggcgctgctgggtcaagcgagggaacgcaggntngcggcgacaggtcgaacaggtcggatgtgttctcagagaagtgcgaggaggcggaaggagcaagtcgcaggtacatcggaaccaccttcgcggggagcagctatggcaaatgggccggttgtcg

SEQ ID NO: 353428 - DNA, 161 bp, Zea mays
cggaaatgaccgtgtgtgggcatttggtagctatagaggcactgcgcattagagcgagctgtcgagagatatgagtagcctgccattttttttttagcttgggctaattgtattctgaaagcgtttatacatagcatagtagcacactggacttttttttt

SEQ ID NO: 353429 - DNA, 296 bp, Zea mays
cgacaaagaagaaacgaaaccgaaatctctccaagaatccatcgcagccgccatcatgggcgccgccgatgagcgagaccttggtccggggcagtttctcccgcgccacatctaacctggtagcggcagcatccggcgctgctggtgttaagattggcccgaacggtgcttctttcgtctcctcgggcattcccgacctcgacatcagtgaatcaatgttatttggtgctctctggcagggattttgggtggtggattccttcttggctcagttgtaatgatcatggaggacactg

SEQ ID NO: 353430 - DNA, 251 bp, Zea mays
agttgtttgtcttttgttggcctttctggtcaggtcttttgtggcttctgcctgtcttgatgggttgtatataagaaagtcttatgtagctcttcgtatgccaaaacttcctctgttatcgtagtctcttcactgatcttgcgttagtgtttagagtctagataactctctggccgtggctgttctgtttggaagtcctaccgcgtaggtgcagttgtttcatacattcctatttcttaatgaaatagggg

SEQ ID NO: 353431 - DNA, 289 bp, Zea mays
cagcagcgttgcagcgacgagcacaaaaagacaaaggaaattcctctcgacatcaccagaccacgacctccctgccgagctccctcccctgccgagctccctccctctccgttggtgatggcatctcagagctccaagaccgcggacaccgccgcgcctccgccggaggttgcagacaccggagaggcggctccgggcgcggcttcttcaacaccggcacaaaaccctaacgctgctgcaaccgcagtggccggggccacggatctagagaagaagatgcgccgcgcgg

SEQ ID NO: 353432 - DNA, 290 bp, Zea mays
ctcagatgctgagagaattgaaaaacttgatatggaatggaatctgaaaaaaaatcatggaagaagagatttgtaaaaaaaacaaactgctagagagaaattcatcaatgagggtgatgaaaacaccaagttcttgcatcttttggctaaaggccggaggaggagggttagaattcctttcttaaatgagggatgatgtccctgtgagtgatgccgatggtattaataaaattgctacttcttattataaagatctttttggtcattcggtgatatctatatcaatatgg

SEQ ID NO: 353433 - DNA, 264 bp, Zea mays
atgatttctgcgaggacttactggagtcggcaattgggagtaatgtttcagaccagaacctgaaagtctcacagtttatctgtagatcaaagagcattcgcccttgaagaacctagaagaccagaccgctagattaaatggttacgcctattgtcttatggtttgtggttaaaaatttgtgccgtgttttccacacgagttctgtaccctccatttctgaggattttgagttgataatgaaagaaaccagtatcatcttacatg

SEQ ID NO: 353434 - DNA, 288 bp, Zea mays
cctccgcgctccttccatagaagccgccgcagacccacctcggcctaatgagtcgtaccccttctcctccctgtgtggcgaccattcgtcctcttctcaccctcctctcctgcctgtcagccatcgtcctcttcttctcccctgcgcggcgggcgggattcctaccccttcccttctccctagcttgcctcgtaccaatcggatccaacaccatcggttgccatgtcaaagcgagttcggctgcttcaaggtgctcggaaaggggctgatgctgtccaaccccatcgt

SEQ ID NO: 353435 - DNA, 146 bp, Zea mays
gtttgtcctcccgagtgcaaatggcgacggcagcctgtccattgctatctcgttgcaggctgagcacatggagaagttccggaagctaattggcgaagtttaaacggtgccaactgttgaaggaggatgttatagggcgaaaagga

SEQ ID NO: 353436 - DNA, 112 bp, Zea mays
ggaaacactctttgtagccatgatattggcttttgatgagttgttcattgtttttaagaatatacctgccatgtaagtgcttttgtttacatcttaatatgacggtttccat

SEQ ID NO: 353437 - DNA, 230 bp, Zea mays
attgggccttcttccaacaaatccatcagattgggtgtcttctctggctcctgctcgggtatgcttttgataacctgatactatatgaactaaattccctgactctgtgttcagtttttgacattgttcagtcatctttaggtttttttatgatagtttcaaagtattgttcgctttagtaattgttagctgtgtgctgtaagtagaagtgtggaactctgtattactta

SEQ ID NO: 353438 - DNA, 127 bp, Zea mays
gccacaagtgaggccccatcggcggtggtcccctcatgaactgttgtggcggtgccccagggaacggagcaggcggcgctccaggcgggcggaacggcatctgcatctgcggcggcattccaggacg

SEQ ID NO: 353439 - DNA, 257 bp, Zea mays
tgggccgcagccgcgagcaccaatcaaatccagggaggaagggagcaccgccatcgccatgggagggcgccgctggctgtcgtgacctcaccttgccgctgcagctctgtaagtaggtacctagtattccaggggtgctttctacttatgagaagaaaccagatctgaagcaagatcccgagtaccagagagggacacggttttcctatcgatgtgttagagtcaagtactcaagcttttgtggttccaatggagtc

SEQ ID NO: 353440 - DNA, 191 bp, Zea mays
ctactgtttacggccatcactctaccattcgatctcataatgtttccattttttgtggataatcatcctgccatgatcatgtcatatttctcaacactgttatttatttcagttattgcacaaagaagctggcagccgcttgggaagcggaccaggcggcagtgacgaaatcaagaaccacaagtggttca

SEQ ID NO: 353441 - DNA, 261 bp, Zea mays
acgccgtgtcggtcaggacgtggttgccaagggcgtagtgctgcagcgtgagcaggatgaggtcgtgccagcaggcgtacgtgaaggaagtcggatcgaggagaacggggactagggatcggttgttctgaacactcagcacctgggcgtatgtttggttcacgctctcgcaggcatttgctatgcctgccaggcagacgacgtagccccagcgatcgaaatcgaacttctgggagcactggctgggctatgcaagtctgg

SEQ ID NO: 353442 - DNA, 261 bp, Zea mays
gaaatgcagcttctgccctggggtggcaagattacaagtgagtcgctgagattcttctctcccattgttatctggacggtattcgagccaagcgaagccaaccaccaagctctatactcggccttcgtggattactatatggtctggcttgagttcatggacggagcagttcgcgaaagtagcaaagaaaaaatcgaccgcaatagagaagcgcaacataaatatctcacatggagagcagagaaggatcctgggtacccg

SEQ ID NO: 353443 - DNA, 259 bp, Zea mays
caccccgcgcgtcctctacctggtgaacacgctcgccccagcccccagcgccaaccgcccctgctccctcctgcagctcgccctcaactccctcacggctgctcccatggccgcctccagccatcttcctcatggcgtccacctcttttccccatggctgccaagccccttccatggcgctcgccaccgtctcctgtctggtcgccccatctccaggccgatctgctctggctgtcagccgtgtcaccatggctgtcct

SEQ ID NO: 353444 - DNA, 257 bp, Zea mays
ctaccaaagactggcaaaaacaattggccgagaaacttgccaaccatctcacctcttgcgggttccagtctcatctgcaagacgaaggcgaggctgaacaaactgatgcttaacctcagcagtgcattacgtatgtatgactacgagtggccaggaagttttagcatggagggtccttgcatgaagcaatgtctcttgtctcccacttcagaattgttacatgtgggtctatgatttactccctccgttctttttct

SEQ ID NO: 353445 - DNA, 280 bp, Zea mays
tgcgaggatacaaggtaatcatgagatagaggcagaacaacggctggcagtagagctggctgctgtgtgattgaggcattgccttctcgtgttttatcagccttagctgttgtatagctgcgtgtgtcttcttctcactaggctgcatgattacaggcaccctgttttcaactggtgctttcttctgcttcgctgtgtccttaggcttagattaaaaggaagtaactgttgcagctttgcggggatctcgacgggattgaacttgcgtggtttccgctcg

SEQ ID NO: 353446 - DNA, 266 bp, Zea mays
aaacaccctgaacacatctgccactgcaactgacggcataactgatggcacaaatgttcagcagaatcctgtaaatgagggatggcagctagcgtcgactagtgctcccgaaactttctcttatggagtggagaacatttcgtttgatttgtcacaatacaacaatgccccaagcttccactggcctgaaagcagcagcaggtctcagctcactgagtcggcagcaatgcaatcgtggatgccttccaaatagactaagttctgac

SEQ ID NO: 353447 - DNA, 129 bp, Zea mays
cagcgtcccctccacccgcactccattggcgccgctcacctcccctcgcagccgccggagatatgatccgatccgatcagatccgtttgtgattgtgctgcaggagtgagaagtaaaaacatatggctg

SEQ ID NO: 353448 - DNA, 146 bp, Zea mays
caaggcttgaagcttgcaaggtgtgggaagggcctttaacacctaccatggaatacaaagtgcaggatgagatgctgaaggctggtaaaatgactgtgctgtgttcctccgagactgtatttgaagtgaggggcaacgcagttttc

SEQ ID NO: 353449 - DNA, 145 bp, Zea mays
gtggtgctaaaatctagacctaataccttgtagtactagttctggaggctcttttggttgtaggtcgaagtggatagagctgttccttgtactttatctgtttcatgtaatatgaatatttagatatggtctaaatatttgaata

SEQ ID NO: 353450 - DNA, 168 bp, Zea mays
ccttagagctggaggagtcgcgggcactttgaaaaggtggacttctatgtctcagtctcaagagatagcgggtatgccaaccttgccaggagagagtcatgttgtcatgcaagacgagcctggcggatattatgataccatgggagatgccactgaaagggtgaatgc

SEQ ID NO: 353451 - DNA, 250 bp, Zea mays
agctctgaagcatctatctcatgaagcatactggtatttcttcaagacacttgcgtttggaagcatggatcctgagacacacccaaggcttgcacaggtagccatggagatagccagaacgcagaatcgttcaatcaacgccgcgtacatcatctgttatttgatgaggaacaattttaacatccacttttggtagcaggtttgaggttcttcagagtgttcgtccagaagcatgtctccagattcggca

SEQ ID NO: 353452 - DNA, 196 bp, Zea mays
gtagttttagatcgcgctgcggccaaccattctcaggtgatgaaactgctgagttctgttgtttctactcagaggttgttccaaagcaggaggaatcaaactaagaactacctttggaaggtgttttgccatcctgtgatgtaataagtttaagcacttagaaccaggttatgtaataatcgactctttctatatt

SEQ ID NO: 353453 - DNA, 281 bp, Zea mays
cgagtttgatgacaagtattttgtaagggagaagaaggcaacgaagactgagggtgaactttttatacacaggaggcaaccaaggacctgccacagctcaagaaggacgaccagaaggcggtggacgcttagttgatcaaagctattgaggaaggagataatgcgtataatgtgtgggatgatatattgctctgagccctcatgctgtttatataagagtacatggcttggaggacccaacaggtgttgacgatgaacgggctcgccaaggacgtgccgac

SEQ ID NO: 353454 - DNA, 268 bp, Zea mays
attctctctcgctcggcgcgcgtagaagagaagaggcacttcttcctcctcgccggcttcccctcgcgtgtcgcaagtgctttaccctacaacgtggcccgtggatcgtcgccggacgccaggcatcggcaagcggcagcgaagccgtgccaccctgagtccctgattttgacaaggttattagccctacctcctccgcagtatctatgtaacaccaattcattctagcttacttctcatgagatgagagggacgcatccagcaccgg

SEQ ID NO: 353455 - DNA, 273 bp, Zea mays
gccgctacagcctcacgcccggctcgtccctgatagctgctcctgtgacacaagggaagctatgcaagcagcccctctcaggatccgctcgtgctgcaagccacagggaggagatgggagcaaagctcactgagccgtctaacgacgagttgtctcctgaatcacttgccaaggttgcagagctgctcccaaggatcaggaccatgccgccttctgacgagagcccgcgtgactcggggtgtgctgctaggcgtgttgcagatttggccggga

SEQ ID NO: 353456 - DNA, 274 bp, Zea mays
gacagcgggaatcacggtgcaatctctgcacctcttaataaagttaagatcttgaaagatgcacacagttgggccgacattcacttaattgaggatgtactagctgctgtgaataatgatgtcggacaagcatctgatttgttgaaagttatggactctcctgccttgcagactggagagggcagaacatctggccaactggctgatgtgatgaataaaacacacggatcaccatcagaaagtgctgcagcaggcaaagcaaatccagatagct

SEQ ID NO: 353457 - DNA, 270 bp, Zea mays
aggagattaaggatgcttcttaacaacaggaatgtggtccttggacaggatgggcagacaaatagcggcggtgatgttatcccaaatattggttcgccagggcaaagtggtggatcgcgtaatgatatagatatactaataaagtagaagaaatttgctcttctacagcagcagcagcagcagcaaagtcatagccagcagcagcagcttcagcaacctgcgctctctggacatcacttgcaagttcagaacagttctccatcagcatgg

SEQ ID NO: 353458 - DNA, 270 bp, Zea mays
tctgcactctgcaaagagagtactatacgaagcatgcatttcctcagttacgtagtggccgatcgacgcgggggataaggccagcagcggcagagagagggcgcgggggataacgaagcaagcaagaagaagagagtggctggctggctgacctcgccgatgccggaggacgcgccggtgacgaggatgaccttgccgcggaggtcctcgcccctggcgaaggggcggacgaggaggcggtggaggaggcggcacacaaaggccacgggg

SEQ ID NO: 353459 - DNA, 274 bp, Zea mays
ctgccccttcgcccttcccctccggccgcagccgcttccctgcagctccggcctcctccgtcgggaccgccgacgacgcgccgcgcggaagcctgcggggatattgggtaagcagttgtgatcctgttctcttgctcggatgccgggttactatgacatcgatgacatcctcatggaggatgagcctatttcagttgttttccaagtaactgcaaatggtgttggcctgctagatcctggtgctgaaagtaactgtgtagagaagggcgccaag

SEQ ID NO: 353460 - DNA, 270 bp, Zea mays
gctagagctgtcagaattgtgtgcaaaccagaacttagaggtatggtatctagaagatgaattaatcagcccttgcttgttcgaagaagtacatggaggcaatcaaattgatggtacgaagcttttattagactgcatttgtgaagctgtgacagaaatccaggacatatactttagcaactctgcatgcctatcttctctcacacacagcataagggcacctcctccagcgggacaaaaccttatctcagaaatcaataagcgtgttga

SEQ ID NO: 353461 - DNA, 245 bp, Zea mays
ggcattccgagcctactgtccaagttctccttcaacgtcatcagcgactgaattgtgcaaaccaaccagaatgttgaggggtcagtagacgcatgcatacttggctagttgaagtcatagaacagtgtgcgataccgatgggagcttgtattgagaagtagctcatctgttttgttttgtgtgtataacgtatccccctcctgggctcttgctgataatgatatgtatgtactgtatgtgtttct

SEQ ID NO: 353462 - DNA, 273 bp, Zea mays
ggagaaacaaaattgtgtaaccctaaaaaccaatggccttttttatgaccttcagggagtttcaaacttatgcttggaagttgaaacaacaagtggcccgacatcctcagacggagttatgaacaataaagtgaccgagttctaggaatcaggagtttcatctagtatgaataattcgactacctgaaaatatcgagctatgtttgtgctcaacctactcaagaagacaactcagctatgttaagctcaggggcaactgtacaggagatgtgt

SEQ ID NO: 353463 - DNA, 273 bp, Zea mays
ctagttctagatcgcgagcggccgccctttttttttttttttaaacgtaattaatactatatttaacccatattgatattcaaccaatttacgtgacacgggctaaactttagttaaactcaggacagaaagtgtacataatccagtttcaaccggctcaaatcacacttcaacacgttgcccaacgaggcagtagatacaatatggaaagtacattaaactctgttgaatcgttcgaagtgctcaatggaacctcaaatcaaagggttaaaa

SEQ ID NO: 353464 - DNA, 271 bp, Zea mays
ttccactataaagttctctgcctcggcaatgcccggcctactggtgcttgcgctgtgaagaattgcactcagtaagttcctgtcttctccactttcctttacgatttcaagaattagtttgcggacttgtttgtgaagctcccaggcctgtctgttcctcattgaaggaaagaacctgcaagcatttatagctttaattttacaatttacaggtctgttcaatcaatgtgttgccttgggtcagtaatagttctttcattttgtttattca

SEQ ID NO: 353465 - DNA, 267 bp, Zea mays
cttgggcatacaaatcagatgatcaacctgttgaggagaagacgcgtggcatgaatttaaacatgaattcagccgatgacagtgacgacttgtttggtgactagtgattcagaattgtcagtggatacaaaaaaatatatattcttcagaattttgtggcagggttgtttcatttgctagatgctttttttttcttagtttatacatgattgtaccctgctgcaaatcaaggtatgttcttttgcctaatgttagcaacctaaggac

SEQ ID NO: 353466 - DNA, 268 bp, Zea mays
gtgcaatgcaccaagcggaggcaggcaccgggaggtaagaggcgactggggtgataccaagagcgtgagatgtgacgagctggccgagcagtggaacctagtgccgtcacacactcaccatcaggcatccaggaaggatgagtctactacgtacacgactatattgctgattgccgcgcgtagtgccgctgctgtggtttgcgtgggtggagaagtacccaagcgcaacacctgttacgtgtgttgtttgctctttttgaggttgtgt

SEQ ID NO: 353467 - DNA, 124 bp, Zea mays
gctacagttgttgtctatattcgcggaattaactcgggcgatttgtatgtaacgggttcagccctcgtcatcgataaatatagaggaatacgactgattaaacattatcaatcgcattaataat

SEQ ID NO: 353468 - DNA, 264 bp, Zea mays
tgggccgcagccgcgagcaccaatcaaatccagggaggaagggagcaccgccatcgccatgggagggcgccgctggctgtcgtgacctcaccttgccgctgcagctctgtaagtaggtacctagtattccagaggtgatttctcttcattgacagagagcaaatctggttcgtgatccctagtaccagagagggacacggttttcctatcgatgtgttagagtcaagtactcaagcttttgtggttccaatggagtctaagcgt

SEQ ID NO: 353469 - DNA, 262 bp, Zea mays
gaacacacaccgcttctagtagctatagctaggatccaacgatcgatcgatccatcgacgacatggacaggccagatcaccagcagcagcagttcttcatgccgacgacggtgccggtgccacagccacagcagcagcagcagcagctctgcgtcccgatgctcgacgagccgccgtcctcgtttttggcggggagaggcggaggcggggcgtcgaggaggggggagaggaagcggcggttcacggaggagcagatacggtc

SEQ ID NO: 353470 - DNA, 256 bp, Zea mays
gcagtaggtacggagaaaaatctgttaatcgagatcagaggagtataaatgaaggaaagcaggagtcccctcgtggctatcaaaagaatgatggcggagaatacaataaacatatggatgcaagaaagcaagagtacaaaggttatggagatgatagagatcattacagggttgttcgtaagaacaaggaaaccatcaaagaggaggaggactcgaagaggagaaatggaaaggaaattgagaaagaagctttggt

SEQ ID NO: 353471 - DNA, 255 bp, Zea mays
cccggagctgtgtttcacttttcggggtgtattcatatggttttcccatatagatcaattgatcctatctgggaaaaccatatgaaatctccccggagctgtgtttcacttttcggctttctgaactgctcggtctacacgaccctgtgtagtatcataaattcataatattgaaatgcgagatttactgtggacgcaacgctctcttcagtatgaatagatactgaataattaagagcatgatatatattgttt

SEQ ID NO: 353472 - DNA, 257 bp, Zea mays
tttatctccacgttactggaaaacatgaggagtaatactaatgatcataatagtgataatgataactatgtattaaaccctcaatgattctttgccaagaactttaaatggattcaataatttaacccttacaaaaccttatacattaaaattgttatctccattttatagatgagaaaactggtttagatgagtaagaggcttattcttaggtgctgcaaattcaatcctaggtttaaatctagagaccacatcct

SEQ ID NO: 353473 - DNA, 258 bp, Zea mays
ctgatagctttcgtaggtgctagctactaccatataccatatactctcacacaaagattagtacagctagcatggctaatgactccttgaccaggggccacttattcggggatgccttaaaccggttactaactcaatgtctctaagtgtcctgtatgatggcagaccagtgtttgatgggatagagtttacgggcgtcggcggtgtcggtgaaacctagagttgagattggaggtgatgattttcgagtggcctata

SEQ ID NO: 353474 - DNA, 269 bp, Zea mays
cgtaaaccctgccacaatcctcgacagacaccgcccgctcgcctccgcaaaccacgccgcgaacgccgcaatccccaacggaaactgcccgcctgcccgtgcaaaccacgccgcgagctcaccgcaatctgcccgcctccgcaatccaccccgacgaaagccacaatccccaacggaaaccgctcgcctcgctgtgatgccagcccgcgcaaaccacgccgcgagctctctgcaatccgcccgactcaccttcagcttcagggtggagc

SEQ ID NO: 353475 - DNA, 258 bp, Zea mays
ggatcgaagggctgactatgtttctgcgattctggagaagcttgtgtcgtgggaaacagtcgagtccaggctacgcgaaagccgttgcacgggcggtagaaagagatgagcatctccgcagaaggattctaaggaaacagcgtttagctacaggcaaacggacagagcagagctaggtctcgcgctcggcaagggaggcaaggagaccaggaagtcgccaggagccgtcccgtggaggcatgacaacgcgctggtaaa

SEQ ID NO: 353476 - DNA, 259 bp, Zea mays
cgcaaccagaggtaggttacaaggtatggcctcccatactaaagagagctgctggtagccaaggacaagaaggttcattggagtagaatgagggtcggggaaaaagaggcacaaatgcaagagatgtggtcagtttggtcaccaaatgaggacatgtaatgaaccagtatatgactacagatgcaccaccaccaactgctccaaagcctaagagggtgagacagaagaaaaagaaggtggtggtggtagaagatgatcc

SEQ ID NO: 353477 - DNA, 254 bp, Zea mays
cactgctgtagtatctctgacctagttatggagctcttatcagaccaagaccgtggagcacctacttttgagcatagtactagcatattgtcatgatgtattgatgtactagggacatcaatggagcaccttttccatttggtgatttcagaaagagtttggttggggctaccattttgtctgtgtaatagcaccattactatttttgggcaagactgtaaattacgggggaggaactgtaataatatcgttcg

SEQ ID NO: 353478 - DNA, 255 bp, Zea mays
gtttcttccatgactttctgattggtaattgcatagattcgcttttaatgaagctgtggtcctgattttgcgaaggaggcttggggtgtttgctttcaacaatccctgtaggccagtcgaaatggaaggtgttatgaggcgggtgatcacttcggacaacatctgcttcgtaaatgctgcggtgcgattgccaagaagctggctgagcttacaacgactaacggatgtcacaaccatcgtcggcggcggtaacta

SEQ ID NO: 353479 - DNA, 258 bp, Zea mays
cacccttttgaccggtctgcacctcattccaaagaaaacgaggatacacagcagcctgtggcacttactacttgctggccttccaaggagagaggatgctgaggcctgtgccttctacatgaggtctggcacgtgcgggttcggtgcgcgctgcaagttcgaccaccctcctcgaccagcgacaactaaaaaaacggaggaagtatcctgtctcaggatgtggtaccatgcgaatcgcactgttaatgcttgatgctg

SEQ ID NO: 353480 - DNA, 252 bp, Zea mays
gggcaccacgcgccacgaggatcagccacctctatcgaacgaacaaagaccaaagggaatccgccgtagtggatcctacccacatggccgctcagggaccaacaaagtgccctaggagcttcgccatgacacgacgaaggtgtccatggtagaggtggtggacattcattgccgagatcgctacaattgctcgtcgaagtggattgatgcctcggttccacgcctcaccacgggaagtagatcctcactgtg

SEQ ID NO: 353481 - DNA, 255 bp, Zea mays
cgcgcggcgccactggggcatgattgcttggtgtaatggcggtacgtggccagtcggcctcgccctgtcctggtcgtccgagcctaagtgacggaaccgcaaagtgcgacgacgacgaggcacccacaccacccaccaacggcgcaccggcgagaaaggggcgctctgttgatgttgatgggaacggggaaccggaaacagcaattgccattcagtttggatggatgggtgtgggtctgtttcttgctgcggatc

SEQ ID NO: 353482 - DNA, 269 bp, Zea mays
taacaggctccccagagcttccagacgctgatcgacgttggtggcagtaatggcaactctatgctcatacctaacgcaggcgcatcggttggtcccgccaccgtggcggcgaaggaaaccgcgcctccagagagcaagaaaggagagaagaaaaatgcagacgcagaaaagaaaaatggcgacgcggagaggagaaatgccgaagcagaggcacaggaagacggcgacaagggtaagaagggcaaggactccaagcagctgaagatgtt

SEQ ID NO: 353483 - DNA, 269 bp, Zea mays
  unsure (1)..(269): unsure at all n locations
tagcttcactggagcctgctgggaacgtgtcgtgtgactcctgatgctttcgggatcacatgaccatcgtgctccgcaacaggntctcttctgaaaattgtgcctgtccacagcttctgggtagggacacagcttccccttcgcatgaattgagttggccgagcgcctccccccttttctccatttgagaggagagtgcttagggcttgaagcccttaccccactgctgctgactgggcgaggcctggagccctttatttgcaggtcag

SEQ ID NO: 353484 - DNA, 266 bp, Zea mays
cgtgctctcgaccaaatttccccgccgcgtcgcttggtgggagatcagtgtgtgagagagccaccgccgccgtcccttgcatccaccaccgttcggagcatgcggcttagttggggacgttctgccaggcgaatggatcgggcaaggatgagaatcagtgcgtatggggcatcgagagttcctcgcccaacgtcgttcgataccgtggaattgctcctccccgagtgatgggctcaccgtcgccaaataaatttgtggtcgggccc

SEQ ID NO: 353485 - DNA, 268 bp, Zea mays
aggattgacatatttgacttttcttcttccccatatttgtgtgtgaacatattgcttgccttcttggcttatttgtatctgacatttaaattttcatgttttacgattgtgtgatattaaccattctacttggacgttaccctctgtagaacaacctttggctgaactgtaataacttagagcctgtaaccactttgaacacccgcatgtcctggttgcaatgcatgatggacaggggtcttgttggctctggaactctaaaagatct

SEQ ID NO: 353486 - DNA, 260 bp, Zea mays
actctactttgtatcaggaaagatggaagttcattctgtgatcatctacatgtatctcctatccgagatgcttcgggcaagggtcgcttacatctttctcaggtcttccctgaaagagactgtctctcaaatgcattaaacaatcactacacaattgctatgtttgtgtgctatgaagctctaaactacggaacagaatagatttgcagtttgctatcagtcagatattccgctcttgtacaaccatcatggggattttt

SEQ ID NO: 353487 - DNA, 263 bp, Zea mays
agcgactatttatcttgcatcggactgggcccatgtatcagtagccaccatgcttgtcaaggaaacactggtacgagaccagcgcatccacctttagagcagtcatcgcttttcttagaagggctacgctttctggacaacagctgatgagaagaaacaggatggagcagtattcggtggtcctccggaaaaaagcaaggtctagctttacagtgtttcctggcagcgctctggcatctgaattttgaactttgttaatcgaa

SEQ ID NO: 353488 - DNA, 262 bp, Zea mays
gttcaccctcccactgggcaagaggctgaaggaaggtctgaagaggctcaactccctcaccgtgtcgcagaggaggaacatcaagaggcaggccctgctcacccaggtcagcgggcggaacgactcggtgttcttcgcgaccgttggcgcgttcgtgctcgtcccgcctctcgccattctagctatcggtgtcctcactgggtatatccagctcttcccatgaccaccaagatgctgcatgctatttaactagctatctcca

SEQ ID NO: 353489 - DNA, 145 bp, Zea mays
actcgtgcgcgccgtgggcaactccgtcccgtcgtctatggggactgaggcctgcagcgcgggtggttgcaggcttagccgccacaggtaatcttgttaatgactcattctcgagcaaagtcaccagtcatcagtcagctgctgg

SEQ ID NO: 353490 - DNA, 115 bp, Zea mays
caacgagatggctgtggtatattctataaacctagaagtgcagaactggtgcagcaagaagtaatactggtacaatggatttagtaggaaaaatatgtccctagtggtaatgtaa

SEQ ID NO: 353491 - DNA, 110 bp, Zea mays
gcggcagcagctccggggcacaggcggcaacagtgaagtccgtcctcgtgtaccccatcaagtcctgcaggggaatctccgtgtcccaagcccccatcaccgccacgggg

SEQ ID NO: 353492 - DNA, 108 bp, Zea mays
gggaggagtcgggactatttttggactgaggaggaggaatgttctaattacgagtgataccgatgggaaaagggtcaatcacccccacagagctctgaagtagctcag

SEQ ID NO: 353493 - DNA, 198 bp, Zea mays
gttctagatcgcactcgccgcctccggttttctgccagaggaatatgacagcttctttgttaagtacctttatccatcgttcactccaacagttgttctgtttttggctggtacggttaggtatgggagtctcaaatactttgaaagcgagctaagcaaaagctagatgacagcacgaagcatgtttggagcaatgat

SEQ ID NO: 353494 - DNA, 164 bp, Zea mays
gggtttcctgatattaatttgaataagcaatccactgcaaagtgccaatctgaagttcttgctgataaatcttgtggcggaggaagtatctcagctgctaataccatggagccgaacacaaaagtttacagggacagaactgctaagagaaggatcctacatcg

SEQ ID NO: 353495 - DNA, 270 bp, Zea mays
tggtgcatccagatgaagccgcaagatcgccaacgataagcgaggtcatagagatgcttgaagctgatatcgatggcatccaaatgacttcaagaccattcttttatgatgacgagggtgataattcttactctacaatctctgaactggatacaatagaagaatagtagtagtaatagtaaaatacacttgtatatatttgatcttaatgtattagactactaagaatacagagttatcataagctaaattactagttatatactttta

SEQ ID NO: 353496 - DNA, 130 bp, Zea mays
cgatggccgtgcaacgaagatatacgatgctgctgcaggtgcaccagagggacattctgttatattgcttgcacataatggaccaacaggtctaggttcacgaatggatgatatctgtgggcgggattgg

SEQ ID NO: 353497 - DNA, 236 bp, Zea mays
gcagtttatgtcgagtgtttactggagagggcagtcaaacatggtagtggctgccaactccagtggcagcatcaaagtgcttaagcttgtgtgaatgatccaacgagagtgtccatattgaagagaaaaaggtccaaagggccccctgaaaccctgaacaactatagcactcggggagatgccccaatggccctagctatccggtatctgcatcctcaatggaagcactaagcgaa

SEQ ID NO: 353498 - DNA, 274 bp, Zea mays
ggcgaacttgatcagagaaaaagcagcaaagatgatttctgaaggggaggttcaggcaaggtttgcatgcagggtgtcatgataatcacggttaggaatggttaaggtttcaagatttgcacaggggatatggagcctaatgtcaggcataagaaggtggttaatcttggttcactgggcctatacctgaataatttgcacagcacagagagctcgcatttcgctttcctttgtggtcaaagatccacatccgacaagaggggggggggggagg

SEQ ID NO: 353499 - DNA, 132 bp, Zea mays
cagggacctccacggcgacatgatacagtctttgcaaatcattgcagtaatctacctgagaagagcctgcagatctttaaactattatgcagctcacttctaaccagagggcgggacctagtttagtattta

SEQ ID NO: 353500 - DNA, 151 bp, Zea mays
ggctctcgcagcgctatattcctcatatctttggcttcaagctccacaagccataaacctcatatatttatcttttaaactcctcaagacgtagcactgggggcatacgagaattttacaatccttgaaaacttacatataagagcgccct

SEQ ID NO: 353501 - DNA, 165 bp, Zea mays
gatatgtttaggcgtgataaaagctattcacggtctccatccccacgtggtggacgtggccgcagccggagctacagcagaagccggagctataggtatgctgaggaaaggaaacccctagtattaattctctatagagtctttcaaatgtgttaattgtttttt

SEQ ID NO: 353502 - DNA, 116 bp, Zea mays
ttcaggttcaacttatgattttttagaattgaatattcggaaagggatcttggtaaattcacctgattttttagaattgtgcctgagcatcgataacttgaccgcctatgactcca

SEQ ID NO: 353503 - DNA, 123 bp, Zea mays
agtttgatatgtaactcacaggaagctgtgcttttgttaatgaattagttgttcatatgattgtgacatggtagtccattgttgggggatgtcatgggtggcatcctccttttcctttgtggt

SEQ ID NO: 353504 - DNA, 273 bp, Zea mays
catggtggcgatgcaggctctccagggcttcaagatcaccccggagaaccccatggctatatcctatgccaaaagatgagaaccctcgcggaatccctgtacccaatacccataatatattccgttccgccttccggaatcgagccacagtatctagtctactttccggccatgtatttttggaaagcacttgcttaatttagaagttagactcttgccacttttaaccgtgtttggtgctcagtctttatgttgagcctgcttttgctcttg

SEQ ID NO: 353505 - DNA, 132 bp, Zea mays
tgggagggtgtctgcactaaggatttagaaacactttggaagctcataacctcatcagagactgcctttagccacactcctgaccttctagatgagtaacaaatacatgtgataagttcttggaaattaagc

SEQ ID NO: 353506 - DNA, 270 bp, Zea mays
ttaattcacggccttcgaggatttttgaaataggccatggcagcaaattccagtacaatcgtcccgacgtccaaccagaacacagatctgatgaatccgtatccgtggagcagacagaaaccatcgaggaaacacaaagcaacaggttgtatgaagcaatgcgaagagccttgcagcttgggagtgttttcgaggaaccacagttgcccaatattgatcctccgctggtaaagatgcaagagaagttgaagaagtcgaaatgacgatgag

SEQ ID NO: 353507 - DNA, 252 bp, Zea mays
gtactatgatgaattttcaagtaagagccttgtctgcaaaacatgcttgttagttgttacatgtgcaatttctatggacctagcatatgggcatacacacaaacaggacgtggttcaattaaaataactttcctgcaatttttgatgtgttgtgtcctagtgctgtgcaatataaggcgttgcacttatacatgtgtttcaggaaatgctatgtttccactaacctgtcaaggtactagggaagcttcatgt

SEQ ID NO: 353508 - DNA, 141 bp, Zea mays
gttgaagggaatagagggttcttttaccctttgcaagatattcctttttttgattaattatttgtgtcgtggaagagctgatccactggtattgatacatgtcttcttatggtttatgcgaaaactatcacattcgtgttt

SEQ ID NO: 353509 - DNA, 99 bp, Zea mays
ttggccaggtgttcctcgccgttcgatgcttctcgcttccgttcgtcacgccacatggcctactaccgttgatggtttcccaactcgtactacaccatt

SEQ ID NO: 353510 - DNA, 184 bp, Zea mays
tgtttctcctccggtcccgtccgtctgccccggtgtagcgtcgcaccgtgctcgcttggttggggatggccgcgggtgggtggttggttgggtcgctccggtttctctggctggagacgttgccccccgccacggtttggttggcgcgctgttcccccggcaggtcggggtcgccgtcggctcg

SEQ ID NO: 353511 - DNA, 186 bp, Zea mays
gttacatccgcttcgaggaggcgcccagcacaaggacatgtcgcagaagctctcctccttcaagctccgctgcctgcagagccagtccgtcgcggtcgagacgacgagctcgaccacatccagtgtgattcatgctccatcgatcagagagtgcgcacttgtttactcctcagtcctctcactcta

SEQ ID NO: 353512 - DNA, 174 bp, Zea mays
cttctctctgagtcccgtgcatctgccttcccagactctgggcagcagctgtgaaaaaacggtagctcatgaagagagcagcaattgtgactcatcccctgatggtcagactaaaatgttacctgcacgcttctctcccccgtagtctaacattttactgccatctatgcaggt

SEQ ID NO: 353513 - DNA, 181 bp, Zea mays
gtgagatccgacgagtctagccactgtaccacggcgagcagggagagatagaatcgggcggcgccattgctgtcgtcaaacctcacctccatcgccgctcagtgccggatgacccgatcccgggcgttcgagtgtgggcgtggatcattctcggggaagaatccaagtgtgtgggtactcg

SEQ ID NO: 353514 - DNA, 179 bp, Zea mays
gatgtgaaaagataagcgaggtcattagtcagagattggttggtttgccttgcaaaacagcaaaatggaattttagctcaaaaagtagatctaaaatcaacacagatgtacaactagattctcaagcgctaattggagttcacggtgagctgtttcaagaggatgacccatgcagaatc

SEQ ID NO: 353515 - DNA, 181 bp, Zea mays
cacggtagagcatggggtaatgacacaccgaactcataaacacagaagagaaccacacatagaacaattaactactaatatacgcatgattcagcgatatctgtacagctaattaatcgattaactgaattcacgaaacatttttttttttgcaggaaagccttgcctattgccatcgtcg

SEQ ID NO: 353516 - DNA, 164 bp, Zea mays
gtttattgcctctatggtattgtttgattatattgtgttatattacatggtgtcacatagtttttcctgttaaaatatctgaaagtttcactgctagatattaaaaacttttgtattctctagtcacctaatgaaatacagatatctctgggagttgagataat

SEQ ID NO: 353517 - DNA, 176 bp, Zea mays
gtttcaagggctttgcattaacgagttcaagggtctgcaatttgagcaacaacattcatatgacattcaaacgggtgaaaggccttggaaaggttttcattgggaggaattcgaattgcagatactctggttgcacagggtaggattctgatgttctggtactggtcaacctacct

SEQ ID NO: 353518 - DNA, 179 bp, Zea mays
gtggtgggagtgtgtgacagagtcgcgtgttcggcttcgggaagtcttccgacgccaagcaccattaccacagcaaccaaaggcggagtggcacctccacgactacgaagcggagtacgctttctaccacgacctctccgagcatccgcaggttgtcccgttcctcaacgattccgggt

SEQ ID NO: 353519 - DNA, 239 bp, Zea mays
ccgcccccgcctcatccacgggcgagtataaggacaaggccatctcctcgatctcgtttgttacaaccgccgccgccgccaccaggctcgtaggtgtaggctgtgtacgtctaggcggccggcaggctctagtcctctaggtctacagacgtgagaaaatggtttgttggcgttggcatccctccaatttcctgtgaacctgttgtagtgttcctcagttgtgagttttcaacgaactt

SEQ ID NO: 353520 - DNA, 272 bp, Zea mays
agaagagctgcttcctcaggaagaggaggaaccggtggaggccgaggagtctgaggaggaatctgagtacgagacagactctgaggatgagcagatgggcatggacatggtgaagcccgttttcataccaaagtcacagagagagaccatcgcggaggcgaacggctggaggaggaggaacggcagcttgaggagctggtcaagaagaggctggaggctaggaagatcgagactagacagattgtggtcgaagagattagaaaggaggagca

SEQ ID NO: 353521 - DNA, 271 bp, Zea mays
ctgaaagggaaggtttaattgtggtagcaatgttcaggttcttcagcagaaattgcaggaacttaatcatgtcctcagatttattttcaaacctgaaggaagtgaaacaattttggcatttgccattagcatgctgcagtagaagatatggggccgcctggtttatgcataaatatggacaattgcggaattgccagatagtttgcatattatctgttgccatgtcaattactcaattattctgatagtttgcatattattctggagtatt

SEQ ID NO: 353522 - DNA, 269 bp, Zea mays
gtagccagcgtcgtacgagaaaatttagagctagggtcaccagatcagagcaactccttcgttcgtcgtcaacagcatgccggccatgggggaaagctctggcatggccgccgtctgggaatatgcggggcggatggcgctctaggatccggcgctggctgttgacgctggggctcaccgctcgtcccaccgtgccgtgttcgcgcagggagaagaagcaagtcgctggggcggctgacggtgtttttgcggggtgcagtcgtcgtcgt

SEQ ID NO: 353523 - DNA, 155 bp, Zea mays
agcatcaactggccactctacaacagcccaaccggcaggacatcgtaacccgagagtagatgggacacagcgagaagattttttgaaccaagcctggaaatacgctctcgagggaaatcaaacctaggacttggagacagtgaaaactttcttgg

SEQ ID NO: 353524 - DNA, 137 bp, Zea mays
attaaggaatgctatgaagcactggtgggtcaaccatatgattataagcctaaatgaatcttgctgtttcactaacacttcaatttccttacaattacgaaggtgattgctaagtgtatggcattgatgtacagcta

SEQ ID NO: 353525 - DNA, 154 bp, Zea mays
ctgatttcttggacggtgttcttactgctcagtacaatgaaaatgatcttaatctaagatattgttataaggtgagctatttgatgattttctttgttctgtctttttggatttcctgttaagtttgattacattcatacatttcctgtggcag

SEQ ID NO: 353526 - DNA, 139 bp, Zea mays
aacatcttgattctggaaaacattgaattaaagtccacaatactgttattgtagtgtaacaagtctccttttttgtagggtgatttggtgacagaatttgctaacaatgggaataagataacctgtgatccagagatgc

SEQ ID NO: 353527 - DNA, 268 bp, Zea mays
atcgactcgagctctgctgccgtggaggcagccaaggccaacaattcaagggtattttatacatgacgaaggcagcaactatttatgggagcaagacacagagcgatgctttgcggccagggccattgcgtccagaaaatattttcagaaataaatttcccacatacaagaatggttcaaatggtataataatcaagctggctgatggtcccgaaataccacctctcaaggagatagttgcaaaggagactgcatatctacttgatcg

SEQ ID NO: 353528 - DNA, 151 bp, Zea mays
aagaggatggcgtggccgtagctatagcgaaagctcgtgtactccttcctctactggcatgcagtgcagtgcactgcttcttcctgcactggataagatccccgtccactaatacgaattatcgctactactaatactatcgagggtggtt

SEQ ID NO: 353529 - DNA, 268 bp, Zea mays
atgaaagcctgaaaccgattcattcgttcgcctgcagatcgacagcggaagctacaaccagtgccatggcttcttccaaggtggtggtcatggctgcaactgatgccctactactgatcatgttctccttccttattttgccgtcaccctcagacggcaagggcatgtgcccgctgttccgcagcatcgtcccggagtgcagcgacgcgccactgctctgcatcgcccgctgccaggacaagggctacgtcggcggcttctgcaccac

SEQ ID NO: 353530 - DNA, 169 bp, Zea mays
cacctcacctcatcactacctcacccacccagccccccaagaactacccatcaaccatggcgccgccgtcggtgtccgcctcccacctcctaatcaccgcctcgctcccaaagcccaagccttcctccctccgcccgccgcggcgcaacatggcgaagatcaagccgaa

SEQ ID NO: 353531 - DNA, 288 bp, Zea mays
tagaggaggaggcccccaggaacctgcaggaagcggcggctgctggtcaccatcctcctccgcgtctccaagtccaacagagctgctgctcacaagagccggcgctggagcagaagaagcacccaccatctgatggagtacaggaacataatcgcgtcgtcgtggagaaggagaagaggaagcaggacccaccatcggcgtcggcgtcggctgatggacaggaacagcgcgtcgtggagaagaaggagaagaggaaggacccgccgtctgatggacaggaacggcgcg

SEQ ID NO: 353532 - DNA, 277 bp, Zea mays
attcctcggatcatttcgaatatgatgtaaaaaatccaatcacaagtgctggtctttgttgataaaaaaaaaagaaaaaaaaaaaaaaacaaaaaaaaaaaaaaaaaaaaaaaaaaaaaagggggcgcccccgacagagcgccccccccccgggggttattatcccggccggtacccaggcggcgaaacgccccccccaaagggcgccgttataaacggtgcggaaaaagaccgtaatacttatccccgggaaaaattgtagcccgccccaaacccc

SEQ ID NO: 353533 - DNA, 153 bp, Zea mays
agacctgtagtatggtatccactgctgtgttattgtgtatgctcttttttacaaaaaaaagaagaagttattgttgtgtatttgtgtttgtcagatgagtgagcaccaccgttactgatcagtgtgtgtcgagtactgattagtgtatttgtg

SEQ ID NO: 353534 - DNA, 180 bp, Zea mays
ggccgacgaccgctgttgctgatggaggaggaaggggggcggcgctttcagaggcctcctgatccaggactggcaggattgatccacctccaagtctccgggccaccttctcctgggaggacgaccatctctacccctagaggactgtcactctagcatctttgaggactgcgacaggac

SEQ ID NO: 353535 - DNA, 182 bp, Zea mays
agtcgaaggcccattgacacgagagtaaaattgtactaattatttttgggtggaactaggtttaactgaagcacatgccaggagtgaatccactaaaataaatctctatttgactgttaacgatgtagtgtgaattaatttaataaatcagacgtagagaaaaggaggatacttgttctttg

SEQ ID NO: 353536 - DNA, 169 bp, Zea mays
agcacaatgataccaaacagaggccaggcggcgctgctaaccttctgcactgattagcctcggagtgtcgggctgtcatatcgctgtccaatagtgacaatggttcggctcatgaccctgagccccttgcagacgtactactggacgaaagcgtcaaggaaagaagaga

SEQ ID NO: 353537 - DNA, 183 bp, Zea mays
ctcaccaacaaccaacgactcggatgatggaaattcttcaaaatcagatgatgaccgagacagcgacggtgaacaataacatgagcacttgatcgcagcaaccggcggacgaaaagatctcagagatacacacaggactttgctgaggctgtctcggatattgatcctaactttgacagtgac

SEQ ID NO: 353538 - DNA, 178 bp, Zea mays
agttactgaactttatgcatgttgatctatattgatctgcatgcagttgaatgaacaaattatttcagtgtgacagccatgatcaagttccaattagtctgaacagggtactttggaattgtcccatattaatcagagatggcaaaagagaaagttctcatattaccaggttgatttt

SEQ ID NO: 353539 - DNA, 178 bp, Zea mays
aggaaacctcaccggccgtcctatacttttctctgacatgacgacaggacaaccactccaccaccgtgaactgatacaatacaataaagtcctttagtcccagtaaattagaataggctagaaactaaaatccaacagagagacgaaatcatggctttggtttgataataactgatac

SEQ ID NO: 353540 - DNA, 178 bp, Zea mays
agtatcgtctcccccgtgtgaactccctcgcattcctctcctcacgccgcctccactcgtgcagtcgcctcccttcgcgcgccgcctctcctcgcgtcgtcgaccgcctctcaccggtgaggatgtatcctcctctctatccctccctctccctcttgcatccagctttatccccaag

SEQ ID NO: 353541 - DNA, 176 bp, Zea mays
ccgctcgctgccgttctgacaagagcaggtgccatcatgctgacctcgaattctcgaagcactcggtgatcgacaaccgactcctcaaggcatcctttgacaaggagtggctcctcatcaagcgcaatcgcttcgtgtacatactcaagaccatacagagcaattccagagagaga

SEQ ID NO: 353542 - DNA, 166 bp, Zea mays
attttactcatgctgtgttttttaatataagctttacaaaaaaagatgcattcccttcctgttcacactcttacctgtttttgttcttccttaagaatgattttgtgtgtgtgtgtgtgtgtgtgtgtaagtgtgtgagtgtaaaaacatgggttttctatcttca

SEQ ID NO: 353543 - DNA, 169 bp, Zea mays
ctctgcagccacaactaccattcgttccatttggagtgctacttggaccgtatcttttactcctatctgtacgatgttgactgaaatgcttacatggcactggaaatcgccggtatggttggtagctcctgtggtttatgatggctatcgggtactacagttgatgagg

SEQ ID NO: 353544 - DNA, 169 bp, Zea mays
ctgaaatatattctttgggcaggtttatatgtgaccacatcaggatttgactcagaaattcttagtttgcaagaaaatttggtcaatggcgggatgatggttcatctgaggagcatagtgacctattgttctatgagcatgttgaagctgtaaaattaacaggggacaa

SEQ ID NO: 353545 - DNA, 100 bp, Zea mays
ctcaagcacattctcaagaacctgcgcatccgcaaactcatattcaccaacggtacaatggtccaaggcgtgagagcccctcaagaggctgggcctggag

SEQ ID NO: 353546 - DNA, 190 bp, Zea mays
agatccttccattctttcagtcttttcccccctgaccaagagggtagacacctcggcagcagacgtagacacgtcgttgcagtcttccagatgcatgatgatgggtgttgactgctcctgggctgcttgctggtgcagatgatagggtgtgctcagttctgtagatattgggcaagtggataactgagca

SEQ ID NO: 353547 - DNA, 198 bp, Zea mays
caaatctccagaagcacgtggctggacattttttggttgggacattatgaaggcataaaatgaggcaaaaaggttacaggtacaaggtgctacagaggtccgcagctgttctgggatatgcagcacatgcagtcttgctcatagcttgctatctagatgtccccctccgatatcccttgcgctttggagggtcccgat

SEQ ID NO: 353548 - DNA, 194 bp, Zea mays
gttgcaaaggctgacagtgaagttgaagctgtaaatattgaaggagcatgcggttgatgatgcaagcacggatggaggtgaagataaacaggaatagtaaaaaaaaatattatagtggcctacggaagaaagtttcatctgccttattggtatgcacacagatgtggagccttgttgtacagttacagtttttt

SEQ ID NO: 353549 - DNA, 192 bp, Zea mays
agctaggacagctcctctcctgccagagctaggcaggcgctgaagtagccgcatggccccgtcagaagaccccagggactggagagccaacctcaaaggcaccatccgtgagacaggcctggagaccagctccggtgggaagctggctggcatcagaagaccgtccccacggctcacctgatctttgttatt

SEQ ID NO: 353550 - DNA, 186 bp, Zea mays
ctgggatatttgttgaggttgaaggtgttcctgcattgattcagcagtgggaaattgtcgtggggatgacaccttagatccagcagtttcttacaaaattggtcaggttgtggatgctaaagttatccaacttgactataataatatccgcatatttttgtcacttaaagatgtaaagccaaatac

SEQ ID NO: 353551 - DNA, 187 bp, Zea mays
atttatctttgggctcactcgtcggaatcttcattggtgccttcatggggatgtcctacagaaagcggcatgttccgcggggctggtgtcggagcagtctcgggagcagtcttctccattgaggctgttgagtcctgcatcgagatttggaggtccagccattcgggaaaatacagcattctctatg

SEQ ID NO: 353552 - DNA, 155 bp, Zea mays
agcgaatcgtaccgcgtggctatggttccggtgcgcctctgcaatcggacgcgcagctaggctgggcatgaagggaaccttagcggcccggaataggtaccggacggagatggcgcacggggctcccgaccccgggaagctcaccaaagtacgat

SEQ ID NO: 353553 - DNA, 266 bp, Zea mays
ctctatatagctgcgtcgatctggccggtggctggaaggaaggatctggcgtttcatccgagcgctgatgccggctggcgtttcttggctactagggagactctgatggtgctggatactcagtggcaaagagtagagaaagatacaaatggcagaactgttcactgtattgcaggaactatagtttatatacaagaatataagtgatttttaataatgtgtccgttggaaataactgttagtagttgatcacatgagataacatg

SEQ ID NO: 353554 - DNA, 277 bp, Zea mays
accgagtgctcagagataatgcagcagttcttccagctgaggaggaagaagataccacagtcaccaccccaggcccaccgccatgggcaccatcttcctgtcaagttcttcagcaagatgcaccacatgttcggcacgatattctgtgtataacttcgcctctctgttttcttttagcttcctaaatttcgtattatggaagtgtgacttgtgcatttctatctgtgcatctagtgttttcatacaggtaccagtttgtattgagatgtcatcgata

SEQ ID NO: 353555 - DNA, 273 bp, Zea mays
ctattgagatgtttcttgtttgatgtcagggtgctggttgggactagttagtattatttcatcaaacttttaggttggactgctgttttcacagctgtatactattacagatgaggtgccaacttacaacaacagtgccactattagattagatgccttggctttaagccatgcatttggaatatgctgttctagcttgatattctaaggtattaatgttcatttttcttttttttgtggtttaatgtgattattttacatggattttcagta

SEQ ID NO: 353556 - DNA, 280 bp, Zea mays
cctgaagcttcctcatcagatgaacttcctcgaggagttgcgccgtgcagtggacgctcatacagaatttgcgtcgcctgtcgtcacctggaactaatcgaagtcagcatctgcatcattatgcgttatttctaattttcgaagtcagcatctgcatcattatgcgttatgactaatttatggaaggcaggctgttcgccaggtctatgtatgatgtatcccatacacggatgatgtgccaaaaggctttcgtctgacctgcagctgcttctggaatctg

SEQ ID NO: 353557 - DNA, 152 bp, Zea mays
gcagattccaggggtacttgtcagtggaactcgttgttttgtagaaaagtataggagcacctagattgcttccttctcccgtcttatctcgcttctagcatctaacgtctgtcagtggtacagtcattttgaagttatcaaggagtaatatg

SEQ ID NO: 353558 - DNA, 270 bp, Zea mays
caataatctgcgctgcgcggaagaagggaaggggaaaagcagttaagcttgagcgcgcgcgacagggtcaagtcgagggccggggaatcgccggagaatggaggtgggcagggctccgcgacgacgggtgtccccagcggcggcggcggcggctgtgccttcgctgcttctgttcgccgttctattcggttagtcgctctgcctccgccggtggcgtgcatctgctttgcgctgtcgcatctgaccatcttggctttactccgcgactct

SEQ ID NO: 353559 - DNA, 275 bp, Zea mays
aaaccaactattatctcgttagagatcaattagttcatcgaggaactaaactctaacaaggctaaagcctacgattgatggcctcaccttcaccaaccgaagagttcagcagggaagcagctcgtcagtctctgatcgcgatctccgagtccactccggagacaccttcaccgcagacggtgaggacaccgccgatctccagcgcagagaacgggaagccgggcgatggggcggacaagttcagatcgaagctgatgtccatcacagacctgtct

SEQ ID NO: 353560 - DNA, 263 bp, Zea mays
gaaaaagaaaagccaaaggcaaagtcaaaggaatcccaatcaggcaagcaaaagcaagaggcagctgctgctgccggatatgtcgtcgcagctgatcgaggagcacctgtcgggcgctgatttgcacgtcgggcaggagctgttctagcgctagtcgcgcgagtgcatggtggagctggtcgcgtccgacgggctcctcccgctgaccagcctggactaggtgggctacaagctgtcgacgggtgtcgtgtgtctgcggcagg

SEQ ID NO: 353561 - DNA, 269 bp, Zea mays
gagaactcagagctcttcgtgccctcctgcaagcgccaaggaggaagagaagtgtgcgtagttccatagacccctgacaaatcagcgccatcatacaacaccagcaactgttagtttagttgtaaatctgccttgcagccgtattacctgtatcaccgtttttgtgtcgcgatggctggcctatctttgatacatccttgggcgttcgccttcggtctcctaggtatacacatgttacattctcacttagggctggtttgatgaacagg

SEQ ID NO: 353562 - DNA, 283 bp, Zea mays
ccctattggcattgctactgcaattgctgctcctgcaagtcttaaggtggactttgaaaggaatggcggtcatgctggagcagtgctgatgcctgcaaggtattctgcagttacatccaggagcaatcaatagcatcccaagcaaatcacacctagaaattgatgtaagagatattgatgagaagagaaggaataatgtcattgagaagattcgccagtctgcagcacatatttcaaagaaccgtggagtagagctttcagaatttaagatcatcaaccagga

SEQ ID NO: 353563 - DNA, 280 bp, Zea mays
catgtttccaaatgcctgcctagttacaccaaggtgggtatgaagtagctgtgtgtgtgcctaggctagagttgtaagaaatctccgtcaagtgtaagtagaaaatgggaagttagtagccagaaagctggataactcccaaacttcatgtatgatagtatggcaatagctaaagaaatggctggccttctgtcaatcatgataattttccaaactcgtgcatctccatgaagaatgtcattctaacaagatttccaagagccagatagagatgcgtggg

SEQ ID NO: 353564 - DNA, 274 bp, Zea mays
gcagtttcaatttcgtaacatgcagatgtaatttaggttttctttattaaatgtgtggttgcagacattactgatccatctcaactactgacagcctgactacttgtgaaagatggcttttgtgccaccagaattttaggcttaggggaaattagtgaaaatgcaaccccatgggaagccaaggtaacctggaaaaacaaaactaacagctgatgccagtgaaagaaggtaaagtaaggaatgcagcagaacctctgtccttgctgctgatggc

SEQ ID NO: 353565 - DNA, 254 bp, Zea mays
gccgccgctacttttacgctccttgctgccgtctccctaccagggggggcgtcagcagcagcagcacgctctgcgacgaaacagagctactcgaggaggaagactacggccgtgcgatccgtcatggcgaggccgcatcaggtgccgccgcctgccattaccactgccaccgccacgacgtaccgcgacaactggttcgacaagctggctatcgggtacctgtcccggaaccttcaagaagcttctgggatgaa

SEQ ID NO: 353566 - DNA, 250 bp, Zea mays
ggatcagttcagttcctcgccgccggtctcctactgcgtgcacttctgctgcctgctgtcctagccctgtaccgccgactctactgtacctcatcattcgccttgctgcatccgccgcctcggtcgcgcaggtacggtacaactccggcgtttgcttgctcgcagtcgcatcgcctattcgcctgcgccgcgttgtttctctctctcgataggtgtgtgtatacagaatatacatatacttactcacgta

SEQ ID NO: 353567 - DNA, 264 bp, Zea mays
cttatgttcaatctatttttcaggaaaacccagaagaataccttgtatttcggttgacattttgttttctacaaccagacataggcggggtggactgcctcgttcccggtttataagctttcggcgctgagtattggtctgtcccccaagtgtatacccatttgtcatgatggtcagatacttgttgtctttataaggattcaaacaggatttagtattgctcataagctatttctgacattggggtgtgaaacaaattgtgag

SEQ ID NO: 353568 - DNA, 139 bp, Zea mays
tagagagacagagagagcgtgtggatttgggggagcttcttcactggagagtggagagctccggtagcgaggcgaaggaaggaagagggaggaggggaatcagagaggtctccccgatggcggactggggccccgtgat

SEQ ID NO: 353569 - DNA, 190 bp, Zea mays
agatagacaaatatgtagtggcataactgcaaattttcatggtcaacctatattagcccatccaacaaagtttaatacatataattcatagcgatttctttccatatataaataaactatttaaccctggttccaggatatcattgacttgatttgttgtgggatgcagcttccatggctcataaggttt

SEQ ID NO: 353570 - DNA, 263 bp, Zea mays
tctgaacagaagtttcagcagctgccagtgccagccaggggctcaccttccatcttggagaggtgcttcttcactttcccggcgcacgctttgcagtgcagggataccttgagcacaaccaccacctggtaaaagagatgccaatgcagacggcgctgcagctcagcgcaagggacacacatgcgtttgcagtttgcactacagaatctttaaccaaacttttacaagaaacctatatatccgcatgtcatcatggtatttgg

SEQ ID NO: 353571 - DNA, 131 bp, Zea mays
gcacgggcagtggtcttcagtcgtcttgggacctgggaaggtttgcagccctttgtcatcattcttcatggactcctttcactcctgtaacaaaagcgctgcttcctgatcccacctgatcccagtctgaa

SEQ ID NO: 353572 - DNA, 132 bp, Zea mays
gcagcgcagagcacccaacgcagtgagtaccttgatctcctgcgtggcctcgtccctggtcttagttccaccgggcagcgggagtcaggaccgcctgtcctcagacccctccgcagcgacactggcggccgc

SEQ ID NO: 353573 - DNA, 168 bp, Zea mays
acctggtaaaactgtgcagcacaggtgtccaacgctgagactctgcccacggagtagtgggagtctcatgcgcggtaagtctcacggatagggggagtaatgggcctttaaattttgcactgtgaaatttcagaattagatcagattaggatataatgatcaaactct

SEQ ID NO: 353574 - DNA, 172 bp, Zea mays
aagattacgaccgagatgcaggtgtcttgttggccgctcattatgtgatcctaggcagcgagcacctctacgaagttgaccatctattggttcacctcgacaggttttgcgagagtgaaatgcaagccacaggtaacggatttcggagtggccgcttcactgtagattggcc

SEQ ID NO: 353575 - DNA, 105 bp, Zea mays
cttgccctcaaattctagccaaagttcactgcttgagtgtgcagtccttatgtactgctggtataagcccctccctagcccaggtttgcccccttctccccatgg

SEQ ID NO: 353576 - DNA, 127 bp, Zea mays
gttgttgtgcgtgctaatccaacgacaggtagtgtgaccggatgaaatctcaagctgttgagcgtcatcgacgtactgttcatcgaattgaaaactatactagttgcctagttcacaatctattcct

SEQ ID NO: 353577 - DNA, 245 bp, Zea mays
cgcagttgttggtgtcctcggagctaaaaaaaaggccccccgccttttggctcattgtcagactttgcgacctgctccaagaaagctgtctggagatggtgcgcgccgagaagcgcgccggcgatggctgctccggcggcggcgaaggccaagtggaggtggaggtcggcatggggatggacgggaagggggtcacagagtgccggatatgccaggaggagggccaggaggccgctatggactca

SEQ ID NO: 353578 - DNA, 282 bp, Zea mays
gtctaaccaaagggcattggcctcaaaccctgcatttggtttaggggctaacagagcgggtcagataatcttcacacacatgtaactgctggagatcttattctattatgaataagacacgagaagtttttccaaagtgttagtcaggatctgaaggctgtcattcagatagcccagcttttccttttggcttttagcccattcagactttgccagagtcaagccaaggattgcttttttgctacagttttcagccaaatggcctagtcctgagtactggaa

SEQ ID NO: 353579 - DNA, 263 bp, Zea mays
tggagtgcaggccggggagagaagaggatgaggcctcccccggcccaagtctcacccacatggtctgccttggatgctatcagatcactgttctagaacctgcctcatcacggttcagccggttcacatgcaggccatcaggcatgggctgctatcacgtcaccatcgggcaaacaagacagccacaccctctccatgacggcctggggccaaagcgggctgcatgaactcggctggggcacctgaggttgcccagtctgagg

SEQ ID NO: 353580 - DNA, 270 bp, Zea mays
tccagtagccgagctcccttgactcctatggcgtgtgccccattttcctcccgcgcccagcctctagctcagtccctgcgcgcatcgagcttcctcgccgaacttctccctacgcgcgccgcagtttccgttcccccgagctccttcagccatggcgcgcctgctctcggcgctcgatgtttctgcggcctctgctctgctccatcgtccccagctcggtcgctcctccctgctcgcccatgtgctcgccccaacgccgagctccccatg

SEQ ID NO: 353581 - DNA, 215 bp, Zea mays
acggctctatgcggagtggcgcataaattcaggtcacgagtgtatgctttcatataggagaaaagctttacaaacgacggtaccaatctgggcgcttctaataagagatgatatacccaggactggccgcacttcatgtagcttgggtagtaatatggagagcatattgctaacggctcgacaaatttagattctttttttcccttacttacact

SEQ ID NO: 353582 - DNA, 149 bp, Zea mays
gcacaaacggaactgtctatgtcactgactttgtcatcccatacgaagagaagtcggcggagttccaggtggcttcgaagtcgaacttcgctgagctccacgttgggtgggatcctctgccaagcaagcacgtcgtggcaacagagctg

SEQ ID NO: 353583 - DNA, 290 bp, Zea mays
aataaatcggctcattaatcggctcctaggctgattaaccggcgtcatagaagcagaaaccgatccatatgtatttttgcaaataaagcacattgagatctcataattacaataaaagatgaccacaaatattatcacaagtctaatgacaacatttagtagttcaaatacattatatgacattgtttcatgattcgcaaacaacatcaaaaatataaatacatgtttcattgttcacagttgttactgttcctatggcgaagatcttcccacgagggtgcatgtcactg

SEQ ID NO: 353584 - DNA, 137 bp, Zea mays
ccaagaataggggaccaccgctcttttatctttgttccatttatcattagcattgtgcaaggagtaagagagaccatcccagctctgtttgtcattatcgtgttataaggtagacattcggagctactattttataa

SEQ ID NO: 353585 - DNA, 287 bp, Zea mays
aaaagcttggtctcagggcaaataaattccaagaacttattgcaaccaaagcctagatctccatcatgtgttaaataatctcaagttcaagatatgtatcatattttgcaagaattcattgtttaattaagtagaacttaattaaaaaaactctttgagttgcaagcatgatcacagcgtccagcctggctccatagcccgcgacacctgcgtggtccatgatctttttgggttagcacatatagataatcatctcgaaagatgtagacctcataatgatagcattt

SEQ ID NO: 353586 - DNA, 279 bp, Zea mays
acattattcacagcaattaatactctttagtccggtttagtcactggaaccaaacgggttactttagcgcctaatctttagtcactaaaatttagtttagtgactaaaggaaccaaacagggcctaaagatacaatagatggacatcaccgtgctttaaatgcctactcactagaccataaatgcagcaatatgccgtagtccgtagacatgtagaattactcatgcatgttgtattttacaaaaggcatcttacataaactatattttgccccttaat

SEQ ID NO: 353587 - DNA, 285 bp, Zea mays
attgtattgtatgaattgcgatgttcagaagcacaaagatattagtaaagtcgagaaggacatcgttctcaggtgtgttcttatgtttagtttacattcgagaaggacattctatttgaagctcaacttatcgtgtaaattggtttcaaagctcaacgagtattgtgatgcttggtatttttgttcttcacacccccttcgccaaggccatcaatggcgccgtgctgcacctcttcagcttcgccgaggccatcagcatcggtcgctcccctagaaactcttcat

SEQ ID NO: 353588 - DNA, 280 bp, Zea mays
cggcgcttatgcttatcccttaaggttaaggctgaagatgtgaacagtagagtagaaacaattcttgaagagctaagagcaaccagaaacgaagcatcatctctacgcagcaaaattgcagtgctaaaagcagcttctcttgcaagtagagctacaactgtggagccccagaatgtcaggattgtggtcgagaacatgggtgatgtagacgcagatgggctgaaaagcgctgcggacatctcatagacaccctcaaagaccctgctgcggtgattttagg

SEQ ID NO: 353589 - DNA, 247 bp, Zea mays
ctcggcatccaggggctactgttggtgtggtggaaaagaattaccgatctgacgttgcgagcctgatagctgaattagcatcggctgcggctgcagaggagcagctcacattcgccgaaggataggaggatcggctctgtgcttactccagggctgtggcacacttccctacagctgtgatagagttcaagtggaggaatggctggttttactccctcaccgagaaggcgcttgcagcaggaaagcc

SEQ ID NO: 353590 - DNA, 250 bp, Zea mays
  unsure (1)..(250): unsure at all n locations
ctcaaggttaatagctgactactgctttcacatctgttggggttttctgccaacttctaccgagttacactggttagactgttggagaaactcccatcatcagtctgtacaaaaacgggtacgctatggactgcatatctaccacgttcaaccaagataacatataagtacaaaatcattgatcgctaccatttgacttgtagcgcagagnaagaagagcacaacgtatgttctcgtataccaggagtag

SEQ ID NO: 353591 - DNA, 249 bp, Zea mays
catatactatgctgatgtatgttgcgatatactatcttagattaaatctggtcactttgttgcctgtttaaaaagtgtggtatttcaagtagagttattttcctgaaatatatttgcaaactcaagctgcttataatcaaggaatatttttattgattgaagaaaatgactgctgcaattcaaaagtgaacttattttattatatagatgatttcttaaaagctatgtataccatgatacaaaatcatg

SEQ ID NO: 353592 - DNA, 241 bp, Zea mays
caacatcagcgggggccacaacgacgacctcgccaggtcgctgttcccgggcatggatcaccagaaggcgatgcggttcatggatgacaaagaagctatgttcagaaagttggcgcctgggcagctgagcccgtggatgggctgcaggagctgtgcgtatggatggaaggccgcgacctgaagcgcgcggcggtgacgaacgccccgagggcgaacgccgagctgatgctgtcgctgttgg

SEQ ID NO: 353593 - DNA, 109 bp, Zea mays
gttaattgtagcagtgtgtatcttatatgattaacgttctcggttattacaggcacttgaacagcaaataaaggcgaagggaacattatttgctcttcaagtccctgta

SEQ ID NO: 353594 - DNA, 132 bp, Zea mays
ccggggttccggttccgacacacggccgaggacgtcgtggtgcagtacctccggacgcaggccatcggcgtgccgctccccgccgaacgtcatccccgtcttccgcgacctctacaaacgagacacctggga

SEQ ID NO: 353595 - DNA, 129 bp, Zea mays
gctacagagggcttcaatgtcacaggctgcatttgagtgtctaagcgcggaatgctgtcaaacacatgagcacgacgcagctatgtctcttcctgctacgattgctgttgggggcgctggaggcaacaa

SEQ ID NO: 353596 - DNA, 103 bp, Zea mays
ctagacacgctcgttaccgtgctgggaaagacgttgatgagggaataacatacctgggcacaggctcagcagcagcatgcctcgtcttgatgcgattggaggt

SEQ ID NO: 353597 - DNA, 157 bp, Zea mays
gctcgggattcggctcacagtcagatgaacactgccatgcctagcggtaccagccacaggtcgtgcatgtgccatgcgctaacgatagccgacgtcagttacgcaagcatccatcgacgagcgcttgattcctgctttcacactcttttacacaatg

SEQ ID NO: 353598 - DNA, 102 bp, Zea mays
gtagattgctcctcctacgacaaccctttcccactccagctgtacaactacatgacgcagcagacatctctgcctcagggatacgttggtcccagaaagaca

SEQ ID NO: 353599 - DNA, 101 bp, Zea mays
gctttggaatgcttggtccacatggagccgggaccacatctttcattaatatgctgattggactccttaaacctacatctggtactgcttatgtccacgga

SEQ ID NO: 353600 - DNA, 100 bp, Zea mays
gttcttcaagaatcacttcccaagggccgggtatctcagacattatcttcaagagggcaatatgtttctgtacacattgggccaattcgtgttgtttcta

SEQ ID NO: 353601 - DNA, 121 bp, Zea mays
agcgttcgtgtcgaggctcgtacgtcgacctgctgctgctctatcctactgccttcacctagttcgagcggaagaagactgactcgccgcgaagagggtagatcacaagataagtctgggg

SEQ ID NO: 353602 - DNA, 112 bp, Zea mays
ctttttccgaaacctagctcgcccgcccgacctccgaccatctagaaccttgcctccgaggtgacgccctcagcgccccgcctgcgccgattgatcatcgcttctctccccg

SEQ ID NO: 353603 - DNA, 127 bp, Zea mays
cgagattgagaacctcatcgccttcgcccagaaggatctcggcatgaagatatccacctggtagaagtagaagtgtcttctcttttttctcttaataaagcttggacgtgacaattctcttgccgcg

SEQ ID NO: 353604 - DNA, 125 bp, Zea mays
cctcaagcaagtgattgactgggctcacaaacttgcaaatggatggtctttcaatgggcctccacagttgaaatcaggccggacaccactatcttgtgcagcatccatggcgcatcaggtcgcga

SEQ ID NO: 353605 - DNA, 114 bp, Zea mays
atttaacgtggatatgttgctgaccctacgttgtctcaatggcatgttatcaacaacaaatcaaggcttgtcaatccaaaagaggatttgagtattaaatccactcttaaggct

SEQ ID NO: 353606 - DNA, 266 bp, Zea mays
gcagcactacaaaccagaccaaagttattcgtaacaagaagcgggttgttggtattacatcgtctctgaggtctaataagaaggtttcaagtttggtagataagtggaaagctgcaaaagaggagcttcgtgatgaagaggaagatgagcctgaacctactctagaggcattagaaaggaagcgacaaaaggaaatagaggagtggcggaaacaacagatagcttttggacatgctcaggaaaatgccattttgttcctgttcgtg

SEQ ID NO: 353607 - DNA, 179 bp, Zea mays
atgggtgcgagcaagaagaggagtcgaaaaatggtcagtgaggatgtacctttgtaatttaagcattgatgtggcatggcgatgcaagctgaatttgctctacttctttgatggcctgatacaacagaattgcctgtgcaattggaattctctcgtactttagtaatatgatggtttat

SEQ ID NO: 353608 - DNA, 260 bp, Zea mays
gcttgattgtagggcacaactgtcagctacaggtggccgtgtggcacggccgggatccagctcgtcgtctcaccctcttctcctcttccaccgacggcgaccgcccccaattttctcctacccctccgccttcactgaggtccccgagatccgagtttccttgccctcgctcaaccataatatcatcacgcctcgtgcccaaatcggacgcacgcactcccggtcgaattccctcgagcggacagatttggatccggctc

SEQ ID NO: 353609 - DNA, 100 bp, Zea mays
ggagaacaaataggtcaaggctcttgtgggacagtatatcatgctttgtggtatggttcggatgtggctgttaaagttttctccaagcaagaatattcag

SEQ ID NO: 353610 - DNA, 136 bp, Zea mays
gaagcagagaggctcaaagaagcaatctgctcttctaggataaatggtatcaaggagttttcgtacaaggctcctccttcttcagaagacatttttgctgtatttgaagaactcaagcaacgagaagatactgctg

SEQ ID NO: 353611 - DNA, 225 bp, Zea mays
cggcacaggccctcacttgacttcaattctgcgcagaagagcagaagtctgcggcccctccgttcctccagctccagtcccagtcccagtcccagaccatgccttgcgccgccaccgagctcgaccaaggcgagggagactcgtcaaggtaggcacaacgggcaccatcggctcgctcatgacaagggagctggactccaccaaggtggcggcgccgcaggagcc

SEQ ID NO: 353612 - DNA, 141 bp, Zea mays
cgcgcggcttgttgaggcccttttttttagttgtgtttcgaggttaaacaatctaatggcgtgtacgtatgtatggctgcttgcaaagaggacactttgtgattctgtacgattcttaatgtagtatagatagtctttttg

SEQ ID NO: 353613 - DNA, 267 bp, Zea mays
agagaccacccctagctagggatggccgcagtgatgaaggctcttgctgtcgcctcgccggtgtcggcacgggcagcacagcatccccgtcggtaccacgtcgcaggtgtccctagccagcagcatcaacagcagaacttgagcctgcacctgcagtcgttgttccacggcgtatcgtcggttcagtcccctgggcgctggcggcgggcgcaggtggtggcgatggcgggccggcctgcgatccagttcatccagggcacggacgag

SEQ ID NO: 353614 - DNA, 264 bp, Zea mays
cgccgctctcgccccgcctctgcctccgcctccgcctcctccatcgcacccagctttcctccccaacccaccgccactcctaccccgccacgtcgtgtagtcgcggcggcggatatgcaagccgccgccgccttcaaccaggcagccttcaccgtccgctcgctgcatcgtcccccgaggcccctccatctagctgttgcggaggatgcttttgcggggataagaggcgcgccccttacacggccccggtgctgcgggagcctc

SEQ ID NO: 353615 - DNA, 241 bp, Zea mays
tgaacactgtgaaccagttccaaaacggtcacctcagggaggcaagtaaccacttccttcacctagatgatggtcgagcagcggtacctcgggtacaatagtatattatgatgatccagatgtcgtggaatttacggacatttcaacctttttatgtctgctcatcacctagctgattaaccaaataaactgtcaaatgttctacaggtaccacgacctggaccccatgtttatggccacc

SEQ ID NO: 353616 - DNA, 99 bp, Zea mays
gtcgtgcacgatgccaagatgactcctgaggactacgaaaagcttggctttcgcggtgcccgggacctggccaacatattccgattctatagactgaga

SEQ ID NO: 353617 - DNA, 261 bp, Zea mays
aagagaccttacgcaagttccgtgggaacgtgttgatgtgagcttccagaaaagcacccaaagattagttgcgcataacacaattcagggcgatgctgatgaagattgacaagccgaagcttatccaataacctaaagaattctttcgaagttgtcttgcaatttcgccagtagtcctaaaagatgctcttaaagctcttttttgtaaaaaaatcattatattcggcaaaaaattgtcgaagaatgtaatattttgtaaac

SEQ ID NO: 353618 - DNA, 167 bp, Zea mays
ggtcttttcatcttgtgtagtttttacagtgtgaataaaacattggctcaggatgctaatgtgaaggtcagcaattatctaaagcaggtgagctctgttgaacaaatgtgtattttcagtgagtctgagtcgggtgtgtgtgggtgttttgtttcttggcttggggt

SEQ ID NO: 353619 - DNA, 194 bp, Zea mays
tctctgctttgaaggagttgcttgctttgggagagcggattggtactgtaaaaacaggtctttcagacgatgcattgtccacgtgcctaaataggagcctctacatgcccacagctccagggccccttgagatttgggacaaatgtagcatatttcacgaggagtatttatcgggtgaggatgtgggcaagatg

SEQ ID NO: 353620 - DNA, 183 bp, Zea mays
ttttcactagataatttcttctggttttctggtttgcgaagtgtttaatactcagagagttcattcatcgttagggcttaccacatcatggtctaggcagtagtatcttgagctgcgttacttgttgggcttcggaggttatacttttcttgatgaatgaataacccatgtatgttgaacttt

SEQ ID NO: 353621 - DNA, 186 bp, Zea mays
ggtctattgacaatatatcttatccatggaaacagttggctggaccttgagttttttctctttcatagacaggactggacgcgacttgtggctattttctctctgtttataatattttgcagggctagaattattcctccatttcctggttccgtttaaaaaaggttcccaaaaatttttcctgtg

SEQ ID NO: 353622 - DNA, 220 bp, Zea mays
  unsure (1)..(220): unsure at all n locations
agtcttaagttccaagacaaggacgattctcaccaactgaacttatgacttcagaatatcgcattcgttcgtnnttgtgcgtgcttacattactgttaccctatgctagttcgtgggccatatagtgatccgtttccctgactccgatagctcgtggatacccgatttcgttcccttgccatacgaagggccagcttttgtatccatatcgtgcagcttg

SEQ ID NO: 353623 - DNA, 190 bp, Zea mays
cacggaccagaaggttacaagttcagttcagaaacagagactaaaagtttgatcaatctccatccccctcaatcttcggccacccgttctgggcttgcgacttgacaaacgaagctaggatcttgatgtcgtcttccgatagccgggggccgaagtgtcactgtcctcttggggtgcatttctctccaaa

SEQ ID NO: 353624 - DNA, 183 bp, Zea mays
caccataccatagtccctactccctaagcactattctacctcgttgtttcctcttctattccacctactcaaggaatagagtactctgttcttttaaaaacagaagtttcatggtttttatttctattcattgattgaccgtttgctgaaatcattaaaaaattcgaaacatatgctattgtt

SEQ ID NO: 353625 - DNA, 180 bp, Zea mays
  unsure (1)..(180): unsure at all n locations
cagaggcttgcttgctcactcgcgacgagaacgagtggtnagggaaccaatctcggccaatgccacgtctggcaaagaagatacaggatttgatcaacgcctcgacatggtaggatagaacactacggtataggcggggattgttcacaagacaatctggttctggaatggaccattttc

SEQ ID NO: 353626 - DNA, 180 bp, Zea mays
cgccggggctcgaggcccggacacgcgcctttcgctgctcgtcgtcctctgccggagagaggcaggctctcttcagccgcatcgcccccgtctacgatcatctgaacgacgtgctcagctctgggacagcaccggacgtggaagcgcatatgcgtctcttggtcgagagcgaagatgggg

SEQ ID NO: 353627 - DNA, 280 bp, Zea mays
gtatgcaagaagctgcactgcaggatctctgaactcgactctagtgaagggaactgtggtgctttgcttccaaacaagggcacagagatcagctgcagtggcagtggagactgtcaagaaagctcgtggcgtaggagtcatcttcgcccagttcttaactaaggacatagcgaccttcatcgatatgccctgttttcaagtagactaccaggttggaacagctatcctcgcatacaccactagcacgagaaatcccaccgtccagtttggctcagcaaaa

SEQ ID NO: 353628 - DNA, 153 bp, Zea mays
ttgaattttcagaagagagcagaccgccagcgaagacacaagcagcgtcgtcagggcgtgaaggcaccaccgaatctcgggagcagcggcgatggcgagattcaacccatacgggaccaccggcggcacgtgtttggccgtcgccggcgccga

SEQ ID NO: 353629 - DNA, 143 bp, Zea mays
gctaggtcagaacttgcttggaaaaatgcaaattatgcacaaattctagaatatcttcgggtggactatgaactgaatcagtggtttggaagccttgacttcaaactgaaatttgtggagcataacattcactttcttcaaga

SEQ ID NO: 353630 - DNA, 283 bp, Zea mays
ttcggctcgagtctatctaccatggagatgccgaggatgaacatcgatgcctccaagtgtcatggctcatggccaaccgaatctattgcttcttggagcggacaagaggttgagtgaacatgcaggtctcttgagctgctatgcttcacgcatctcccacatgctcggtgtctgagcccatactgagagcacgtgttctacttaagcaactgctttcatcgtaataaacactggctttggctagctgtctttagtgatctcaaccagaaaaatcttgagccca

SEQ ID NO: 353631 - DNA, 273 bp, Zea mays
  unsure (1)..(273): unsure at all n locations
agtcctccatgacnagatacggatacacgagtggcaggccattagagacagtaatctattcggatgtgatggcaagtagcgtagagtaactgcatgtttgatgttgagctatctggacttgccctctcaatctgaagcagcgcttcacgatttgttcactgtatcctaaaggtcacaagattgacaaggaacgtttgattgaccaatggattgctcacgacatgttcgctagtgcggatgctgttcgatacttggagtacactggatatgagt

SEQ ID NO: 353632 - DNA, 113 bp, Zea mays
gcggaggctacattagcaagctcctatctctgctagccgagcgcgagcaggtgtcacctacgctctacagctagcgcaactaacgaccatccacctgaaagaggcagtgcagt

SEQ ID NO: 353633 - DNA, 262 bp, Zea mays
atcacttgcccccacagagttgctcgacagttcggattgcgccagaagtttccggtggagccattctcgacttcaatacaacttcataagtgagttactacatgcacttgttattctaactaataattgaaatatcagttagtcgctcaatatatggttctaacttttgcaggttcgacagacagagacagaagaacgtcacggcacttcgagacgcaccatcgtgcattacattgatgaatgggaccagcagggggatctg

SEQ ID NO: 353634 - DNA, 245 bp, Zea mays
gtcactatgctgtacaaaacaatctcttgaacttattctattgactataattatgtattttttgatcaacatcttttcaaacactcctttctcctaaataacttgtgtctggtggccacactttacttcaatgagattacgttttttagaatccctttgtaagtgaaatcatgcaataataatctttgtagctggttcatttcgacaaatacaatgttttcctccaggttaattcgtgtgattga

SEQ ID NO: 353635 - DNA, 261 bp, Zea mays
tcgcgagctgccgccctttttttttttttttttaaaaaatggttgttaagatttttcatctttggtggtttgttacaatgaagaacataagatatatgaagtcgatttggtattttgccatctgcggatgtgaatctaaaaatgtgaagtttcaatgcatatttgcgattatatgaatctagaagtcacaggctcacagcatgacatgaagttgggctggttgaacaaactttggaatccgcatcatcacttgaaaacccc

SEQ ID NO: 353636 - DNA, 291 bp, Zea mays
ctatgctcagtgtccattgtggctcagtagaagaacctcgagcctcaatgtgaatgaggcacaagaagaccatcttggcgcttgccttaagtgtgttctttggagggcttgccatccttttcttgttgggacgtcttattttgtccatcagaagcacagaatctgctgacagaaacaagagcagcaacaacagtgacattgaagcaacttcattcaactctgcttctgagcacgtgcgtgatatgataaagggaagcactttggtgatggtacctcgaggaaagggagaat

SEQ ID NO: 353637 - DNA, 289 bp, Zea mays
ataagttctgagattcttgcagctactagagagactatatgtcagcaccttgagggggttgaggcgcagatgcaggctgacgtggacaaattggtcaatgcaggcaggtctaaaaggaaacgcatagaatctacatttgaagatcaacaagaaaagttaagaattcttcatgagaagttcaaggaggaggtcaacaagcagcttctgaattgcaggagttctcttgaggattttgaatcctaccatgcagaacttaagggagtagctgacaagcaaaaatcatcccaca

SEQ ID NO: 353638 - DNA, 156 bp, Zea mays
atgtcttcaatgttgttgaagtcggccagggaatattcttcagtggttgcagttgtggggaaggggcatgtttctggaataaagaaccattggcaacagccaattcagtgttccttgcaggtaaactgcttattagaattgcctgatgctaaccaa

SEQ ID NO: 353639 - DNA, 278 bp, Zea mays
ctccagcacggcgtcgtcggtggacgtcgggggccacgcctgccgatccgacgctgcgcctgcggaggttgacggggatcacgtcccggatgtcgtcaccgcgagcaactcggggagcgtcccggaccgcgagaggagagagacgacgccatcgtcgagccgggcgcacggcggcgagctcagcgatctggagtcggatctggtggggcggcagaagactggctgctcgtcgtcgccggcgacaacaacatcggctgcggagctgatcgtgccgccag

SEQ ID NO: 353640 - DNA, 166 bp, Zea mays
cgacgctgcctttagaagaggcagacatgtgagcagtttgtggaaaatagaacccacgtataccgagctgtccacgactgtcgtcccattggaaacaattccatttcactaggaaatattgaagtgtccttttcgctctggacattcccttccatgcacgtgtatg

SEQ ID NO: 353641 - DNA, 208 bp, Zea mays
gactgacgcagagttgtggataataccaacatacgcgaactcagcttggtcaatcatgggaatttcatttatatcactgcttgttatgtctgctgtcctaaccgcgtgtttctttacgcggagacaccagataagacgggacagggctcgacttccccaaactcgggaattccatggcatgaacagccggttagttaaagcaatgcca

SEQ ID NO: 353642 - DNA, 269 bp, Zea mays
cgcatagctcatactccccaacttcaggggcgccgccttcatctacgacaagttcgtgcgcggcagctccagaaacacggcctcaccgccgccggctccgtcaaatcatcgtcgccgtcatccaaggacaaggacaagcccaagaacaaattcctcgccttcatcacgcccaagaaggatcatgaaacttactaaagtggattgcaatgatcccattcctggaccatatcccggcaacctataactatagtgcactccactagatttct

SEQ ID NO: 353643 - DNA, 273 bp, Zea mays
gagtaaccatataacgtggagcgacgacgccgaggagccctgcctagacatccatgtcaaactggaggtcactctggaggtctacaccaagccattcagcatgcttccgttgtcagcagtggagaagccaggtaacctgttgatgcaaggcctgctggacaggctcgttcccgtgctaggagagcagttgctgagggactaccattcctgggctcaggctcagcagcagcatgaatcgtcttgatgagattggaggtcaagggaaggaggaga

SEQ ID NO: 353644 - DNA, 269 bp, Zea mays
cgcgaaaccatccgaggcctccagtccagattcccaagccgccttccgttcggccactcgcgcgacggttcgttccgccgccgccgccgccaacgccaacgctcggtcgtatctctactgtgaatcttccctccgccgctcgccgaactttccgccgcttcctcggggaaagcaaagcgccgaattttgacttcctttttattccccccctacctcctccgcgcgcctaatctattccgattctccggacgcggccacgcccaacgtcg

SEQ ID NO: 353645 - DNA, 254 bp, Zea mays
gtgcactgcacggatattatatgtgttcgttgtgagaactgggaaattcgaggagagaagaagagcttgattttttacagtccttttaacgcccatagtttcatttcatttctttcgtcacattaggcaggtcaagcctccgagggaaagggtttgtcagttcgaaagttttactgcggtcgtcggttatcacggagaatatccagacagttgttggttcgagaacattcgtttgtgaattttggtgttcggaa

SEQ ID NO: 353646 - DNA, 262 bp, Zea mays
gggtacgccgccgtccggaagcacgcgccggcggcctacgtggtcatatccaaccgcctatcgtcgaggaactccacggagctcctctagttcgccgaccatgggttcccgggcgccgtcgtcaaagtgcataattaaacggttttcaaaaactttttaggaaatttcaccgcgaacagaacatcgacttcgtccgagataacttctccgacgagatcgccgccgtcaccacccgaaatggccgctcaccttcgtcggcgaa

SEQ ID NO: 353647 - DNA, 264 bp, Zea mays
ctcctccttcgctgccatttagtgctcgtgtcgcgtgtggctgcactcatatatagcgtagttagctaagatcccaccagcagagtagtagtagcaagcgcctggtttccggtttccctgcagtgaaggaagaggaagcccaaccccaaggacagcagcgtacaatcaggctgatacttattaggcctcagcggttgatacttatacacctcgctgcctagctgcgtcctatgctgtagatacgagatcccgcaacgttcgttt

SEQ ID NO: 353648 - DNA, 124 bp, Zea mays
gggtggccgccgacgacgacagcatcacggccacggtggtgttcctgctgctcacacttgcgttcgtcggcctctccatcctcaccctcggggtgatctacctgtcggtgcaggacttcttgca

SEQ ID NO: 353649 - DNA, 272 bp, Zea mays
agccaccatagaacgaaatttcataatgctttggcaaacgagttgtagactatggcaacccgaatactgtcgcgtcaaaatctgagaaagttggcttcgtacacgctccagaatatatcccagaggcaactagttccgccttatcctccagctctcaggccaaactaaaggaagctaggttggtagaaaaacaatagaagtataaattgccaaaggcccagggccctatggcaaaagcggatgatcttagcggcgaagaaagattttacttg

SEQ ID NO: 353650 - DNA, 264 bp, Zea mays
actcactctagtctctctcgccccatccccttccccgtccctactccagctccctctcctccgactgctgcccctccaccgtccgcacctcctccccgccgccggccacatccggactaccccgccgcgttacctcctcctcctggcgcttcccgcttggcggttgcctgggatttacccccgctctgttcccctttcggggaacgccttcagaggcaggacgggtacttggtccgggaggcgcggcgacggcgacagcggcga

SEQ ID NO: 353651 - DNA, 260 bp, Zea mays
gaacaaacgaagatgcagctcattgctcaatcgaaataactgagctcagtcctcaaaacaatgaaaaaagaggaagaacagctgagatcggatccttgtactgatcagtttatgttatcgcttgggtcatcaatttctactagttgtgtgcccgtgcgttgcaacggaaacatataataccattgatagcttatgtacgttgggatgaacatcgacatatatctgaccggaaaaaaaaaaaaaaaaaaaaaaaaaacaaa

SEQ ID NO: 353652 - DNA, 261 bp, Zea mays
gcgtgttcttccaggacttcggcgagtccatgatcaagatgggcaacgctggcgtgctcatcggtgctgctcagggggagatcaggaagaaatgctacatcgtcaactaactagctagttattatatagccaagctagctatactacgaaagcttttaatttgtttgtttgccgcaacggaattgtagcttgctgtattaattaatcaatcagttctctacatatgttatttgcatgcttatgtatagcctattattaatg

SEQ ID NO: 353653 - DNA, 150 bp, Zea mays
ctgtcaacaaggacttccagcttccggggcgctgcatggtgaggagtaatttccaggagtaaccgccagtggatttaatagtatgaggctgataccgtatatgaactacatttttattaaaaatttaagcacttcgtatatctcctgatt

SEQ ID NO: 353654 - DNA, 267 bp, Zea mays
caagaagctctttctcttctaacggtggctcgtcctcgtcggtttcggttggcaagtcggtgagaacgttcaggacaagggagccagcagttttccaagaccaaagccaagaactgcccgacgactccggtgatgatcgtgcacgcgctggacgtgcacggatcagaggagccgtacggctacagagcttatcagtccatttccaggttccagtacgagaggtccaggagcgaccctatctgggcggtgtggcagtctcgtcggatg

SEQ ID NO: 353655 - DNA, 161 bp, Zea mays
tgctcgccgcgccgttattgattgcgtgaacgtcctgctttggcgtttgtgagctgcttaatcccagctgttgcctgcaaagctgtaacggcagcctgcgagctgctgctgtacctgtacatatcgacaatcaaccacacggagaatgtgcagatgaacaa

SEQ ID NO: 353656 - DNA, 152 bp, Zea mays
gtcccggccgacttcgtcgtgtccggatcctggagcgacctggccttcacggaggccaagaagttctccgccgcctccgtcgcctggtagggtaaagacggcaagtacacggccctcccgccgttcgacgccatcgctcagaaccccgaggc

SEQ ID NO: 353657 - DNA, 152 bp, Zea mays
gaaaagactgccaaagttggtagagctgcttacgaccacaactggggaggaaggagtttccactctagtaataagtgattgcccgaaacttgttgtgaagccgtactttcctccgtccttgcagagtttaagactagaaggaaataatgggc

SEQ ID NO: 353658 - DNA, 130 bp, Zea mays
gtgcctccgggcaaatctaatgcaggcaaagcagaggaggattggcctggggctgaggctgggaccggccgcaccggcgctcgcgacttctggctggtgtttttgatcggccggaccagacatgaacaga

SEQ ID NO: 353659 - DNA, 103 bp, Zea mays
agtctgttggtgctggggaagatgcaccattccgatgaggatcatgtccgtgtcaaattgaaacaggagatagtgacgtttggcgacccaggtgtacatgcca

SEQ ID NO: 353660 - DNA, 288 bp, Zea mays
aagaacacagggcacacgcactacacacacggcacgcagatacatatagagagaggttagctatagcttgcacatctatttaactaactaactaactggctagctagctcgatccgcagagcaaagcgaaagcagcaagaagcaaagcaatggagaaccctgcgagtgtgctagttctaccagcgcagttcaccaaactcaccttcggaaacctgtacatctgccaggctcaagggctccacgctcgtacacagaagcgtgataacggccgggtctgacgagtgggcg

SEQ ID NO: 353661 - DNA, 285 bp, Zea mays
agaaaatgacattaagctgttcgcgctaatgcaaaaggtttgactaaatcctttttgattcacaactttcgctgaactctcgatatactgtaatttgacgagctagagacaatgtggcaggcctgttacacgatcggcgggcagcctgtcagtgcagccgaaatagagtttgtgattctgaagatgaagacaccggtgcaccggccacagctcgtataactctgttcctcgttttttcaggttcctctattcatcatacaagttgcacaatccatcttactattc

SEQ ID NO: 353662 - DNA, 285 bp, Zea mays
atcggatccaatgccatctgccgccatgtcaaagcgaggtaagcagcctcttttaccaactcgattcggccatttctcgtcgctcgatctggctataaatctcgcctgctcgtgcatgtgacataattcggctgcaacaaggtgctcggaaaggggatgctgttgtccaaccccatcattgttagggccaagctcatctccaagatcatcgagaagaggatcaatgttactggaggcactgtcttgctgaccgccacataggtctttatgcatcttgttttatct

SEQ ID NO: 353663 - DNA, 282 bp, Zea mays
agaaaaacccacataatcctatcgggtttattgctatttattaacttatgtagaaatgtggcttgtttgcctggtgcattgtattgtctgtctgtcttgaatatgtcaaccttgaattttacctctattaatcttgatcctatgcttatggtttgccctctttcagttccttctgctacaaattcatagtcactgatggggaaagcaaagcgtgcctcgatcttcatcaggctggtttctgcagccggcactggattcttctacgtgaagcgcaagaatcct

SEQ ID NO: 353664 - DNA, 125 bp, Zea mays
cgacttccaggttacgaatttgcgctttcagaggaaggtgatgagagaagggtctactatcatactcagaagactagaggactggacaaccttcttggagatatgtatcataaaattcttgacat

SEQ ID NO: 353665 - DNA, 277 bp, Zea mays
ctccgcaggagaagaataaatgggccctcaacaaccattagcccagaacgggctaatggggaccgacatgggacggatgaaccctacagagaaagggcacatggtggtcaccacacgtacagagatcgctatcagggcccacgaggaagcaatctaagttcccgtctgcaggccagaataaagctacctcgaagatcacctgatagagttgatactcgcttcgaggatgagcgagacaggagaagattccgggataggttttctccaatgaggcgta

SEQ ID NO: 353666 - DNA, 148 bp, Zea mays
aaggagaggcgcagagcatcgacgatggcgagcggcagcatgaagagggagatcagcgagacccacgacaccctccgcttcggcctcaatgccggcgtcaaggccgacctcgcgccgccgcacccgctccagtccagcatccaatcgg

SEQ ID NO: 353667 - DNA, 145 bp, Zea mays
cacacaatgccgattatggagccagaaagattgcaggaagttggatcgtatatcaccttagacaaattcgataaaatggctcgcccatttgcaatgccagctgaagattttcctccagctgctcctcaacctttgcctgttcgct

SEQ ID NO: 353668 - DNA, 139 bp, Zea mays
tatttgcagtgctcgcgctcgtgtgcatcctcccgctctttgcgccgcggcccgccctgtcctcccgcgccgcgccgaaggacggtgtctcctttaccggcgcaggcaacacgatacatcaactccttaaagatcacgg

SEQ ID NO: 353669 - DNA, 140 bp, Zea mays
tccatctgaaccctttcgttcctcacagcgggaaccctttggttcagattcgaactcctcgcagccaaatccgatggcggcctcatcatcagcgggaccctcggcggtagacgcggcctctctctttgcggtggcggagg

SEQ ID NO: 353670 - DNA, 202 bp, Zea mays
atattccctacgcctcgctagcgccttccgcgaactgaggactcccgagaggccgagatccaccccgatgtccgccatggagatcgacatcaacgcgccgccgcccgccccagccggcgagggatcctccgtggtcggtccgtcctcctcatcctcccgcaagcccaacaagcgcttcgagatcaataagtggaacgccgtc

SEQ ID NO: 353671 - DNA, 203 bp, Zea mays
attctagtcctaacagtacccctcatagatcacaacattataatttggtctaccaaagtggagatagctgtagtagaactgatgatgatgaagcttctacatctgaaagagaaacatcagaacatgataacaatgggtcgagggaagaaacccatgtgctggaattacatgcttatcgcgcaacaatgttagccttgcatgct

SEQ ID NO: 353672 - DNA, 182 bp, Zea mays
cagaggaatgaacatcctcgtgtaacaacggagcgcggtcaacggagtccagcgacgcgttttcctcgtttgggtactacttgtatacacagattatcagtgccacagagagagcgataattgccagaactgtgaagatgagagcctgcaagtaacgatcaaagtgtggctgttagactgga

SEQ ID NO: 353673 - DNA, 199 bp, Zea mays
  unsure (1)..(199): unsure at all n locations
agctgaagcaacgcatcatagacgagacgtcgtcggnggagcatcacgttcaacgacgccatcgtgcaggtgcgcagagcacactcacttcttgtacggaaattgacaaacatttggtgcgcagagcacaccgatcgatcacccagacattttgttccagtatggcctggacagcatcccgttcggtggcgtggggcac

SEQ ID NO: 353674 - DNA, 193 bp, Zea mays
cgaccgggctacatacataagtacatagccagccctggttattgcttgctcctatttgcacgccgcccggcttctggacggacgaggacgagggggccggtgcaatgcggctcgtgcggggtacggttacttccacttccatatagcagttactgtgctgggtaacaatggtttgggtttggtgcctcactgc

SEQ ID NO: 353675 - DNA, 194 bp, Zea mays
aagcaagcttctgtcgacaccgtgggagcgggttagagtgcggtgcgagggagagatggccgccgcatcctgggctcgcggtgctgcccttctacacgagtggggtggttctggggcttcgcagacacgcggggaagctttgcctggttcgtgtgaatcggggttgtggccggagcctgggtaatttctcgacg

SEQ ID NO: 353676 - DNA, 188 bp, Zea mays
agtccgcgtgtcaccgacggtcgacggcgaccatgcttccctcattcctctcgtgcgtagagttctctctcccaccaccgcatgcaccccgaccgcctcgtcgcagcaggcggctgtgcagcccctcccctgcagttgctgatgctcccgcttcagtcagggaacaactacaggcccgtcgctacgag

SEQ ID NO: 353677 - DNA, 178 bp, Zea mays
gccaaactggcgctccgatgtctatgattgtagaaatctgttaatgtctctctgtgctcaactctggctatcaacagaacaaatttggtgatgaatataagctttttcttctcatcaacccagaggatgagaagccagttgctgtggttatacccaagcagacattacagcctgaaac

SEQ ID NO: 353678 - DNA, 188 bp, Zea mays
gagcgcgagacgtcctggacgtagcggacgtacttgacggcgatgaaggcgaaggagagcccctgcgagactggacgccgcgcacgacggggagcgggaggaggcggtagatgcacgtcatgaggcccgtggcgccgaggaagagcaggacggcggcgaccgcgagccccgcgtacatgatctgcggg

SEQ ID NO: 353679 - DNA, 268 bp, Zea mays
cagcaggcagcagcttctccctcgcgcgtgtcttcttcccttggagctgagctccttctcccatggcgcctccacactcccagccgccctcctctgcccagcagccgagcgcccagctccctccctggatccatggcgtccaagcccctgtgccctctctcccatggcgtgaggcccctactcccatctctctaccagcgcccagccatggtggtcgccgacctccctgctccctgctgttgctcgccttgcttggatgagaagcagc

SEQ ID NO: 353680 - DNA, 267 bp, Zea mays
agctcccacacggccacccactcctcgtgggccacgttgcatcaccccgtcctcacctatggttcacaccggagactcagaggtcgatgctgcgtcgccgcagagctccgcgcattcgcagggagcgctacgccgagccgtcgcccaggccagaagatcgccgcctcggccccacccaagattcgcgtcgctctcgacgccgtgccgcgccgccagctccgcttccaagctccagcgacctgccagctctacgcgtagtgaggtagt

SEQ ID NO: 353681 - DNA, 235 bp, Zea mays
caaaaaaccctcacgcgtattaagccatccccctcaccacctagggtttccttttacagccgccgccgacgccgccgccgacaccgacgcatctctcagcctccccgcactcacttccgtcgccgcagccgccacttcgcagccatgggtaaggtgcacggatcgctggcccgcgccgggaaggtccgcgggcagacgcgatacgtggcgaacaggcacaagaagaagaagcccc

SEQ ID NO: 353682 - DNA, 140 bp, Zea mays
gttaaatatacatatttacaatttcttcccctctgagttcatgatggattgatgcctgcagatgcggcatgtcagctgcgtgctaactgtgatttgcaagctgttgcttaaatacacagcagatatctaagctttaaaaa

SEQ ID NO: 353683 - DNA, 259 bp, Zea mays
cttttgcgtttttgtttctcgaggttggagcgccgctcgagattgtcggtcggctttctgccctcgctgatgacgtcgaaacgaattcagacggcagacaagaagaacaaccagcagacccagagctcgatcagttcatggtataacgacaacactatatgtatatactactaatttctgaattttctgattaattgtgtgtgtctggctgaaacaatggatctacatgcatgttttgtgtgcgtgtgtgtgtgcagga

SEQ ID NO: 353684 - DNA, 256 bp, Zea mays
tagagttgcaaatgactgtcttgcatacttataaaagcatcctttggcatatagatttgctactatttaggaactgagatcatggtttcctcggttcatccacaaaattgaatagttgagatcatggtttcctcggttcatccacaaaattgaatagttgtcaattgttattattctctggaactgtcttaaactttggcactatttttgttcattacctccttgtagatactgtataaacattggtctctacctc

SEQ ID NO: 353685 - DNA, 295 bp, Zea mays
ggaggttttgagcagatccacgtatctctatatttcaattatctggtggtgcaccctcacattgctagagccttcaagaagctgtcgttcgaccacaagttaatttgagctcgcaatttcgtcaatgagaagttcccaggagtgtgagggcaattactaggcaggcttggacaattcttttgcttgaaccacatcgaacaatgatttgtggtctaagtacgtgtggattttgtgtagaccttgaacttgatattatttgtaaggctatgacacattattatgtgtgttgtgtgga

SEQ ID NO: 353686 - DNA, 105 bp, Zea mays
ggcaatgtggtgcacactttaaaactttgaactccattttagtcagcctccaagggcagcattgcagtcgcaggcaatgcttagtcgtgccttcatgccattctt

SEQ ID NO: 353687 - DNA, 273 bp, Zea mays
cgtcggtgtcgatctgctccggcgaccgcttgtcatcgattatccctacatcggtttgacttggagaagacgagcttccaccatcttgggaccctataccctctcctttagagagctgcacctgaagaaaccaatgaacattaggtattacaaataagggctgtattgtattaatgtggttcttgtaaacttatttttcctttgaattttgtaattgaatcatccacaggtgtgcgacttgcttatgtttatgtggatctattaattatgttc

SEQ ID NO: 353688 - DNA, 100 bp, Zea mays
caaagaaagggaagaagagctacaggaaggcaaaaggcgaggcgcacattggaaaagaatgagacttcgactgttcttcatccgactccgatgatgaagg

SEQ ID NO: 353689 - DNA, 288 bp, Zea mays
gcggtggcggcggcggcctcgctgccggagtgaggctccaccggtggactgctcatcagtggtaaagcagcagaagtgcttcactgcagctgcccccgccgacgctcgcgcaagaaggcgttcgtggcgcgcttttgcacggcctcgtcgaagtgatcaccgagactgcgaggccgccacggagaccagcacgaaagagacgtacgtgacgatgaaacccggcatggacgaggcgttcgtgtccagagaggagctagaggagagcctcacaagaactggcccgtggac

SEQ ID NO: 353690 - DNA, 256 bp, Zea mays
gagcagaagaagaagtcggcgtccttcctcctcgcgcccatcgccgcctcccgggacaccctcgtcaaagcccacgcgcttctggcttcgccgagtgcgtctactgaggacgccgaggaggtgaaggggaggatccttgcggcaggaagggactgcgtgccgcggcagaggaactcgattgtcgcgctccagtcgcggactggcgtagaggtgtgcacattcagcttgatactgaagaacgccgcgtcgctgctcg

SEQ ID NO: 353691 - DNA, 279 bp, Zea mays
cagcaattagaacatacaatatgagacacaaggtatgcaatggaaaccttcatatactgggaagagacctgtggccatgtgtggtgggttgtatgaacccccacccattcatgctaagacaaaccgggtctgctaagacaaactggtcggatgcccaccctttgttcggtgaatcatgagatcgagccctatacgagaattcagaaaaaaaaaagaaaatctacatgcccgagtgaccatgtaaatatctatcattgcagttcctgaacccttgactac

SEQ ID NO: 353692 - DNA, 289 bp, Zea mays
aaacaagacctgcagcgatgtgctccactgcagtgctgctagttcgcacatgcgttgtgcttgtgtgtttggccgccatggcgcgagccccggccaaggtccatgctgccgccggcaccggggatgggctccttgctatccctaccaacgcctccctgtcgcactgacactcttggtgcgggcatgtccaaatctcctacccgttcgggatagggccgcgctgcttccgtcaaggcttcgagctcagctgcgatcacacagctccttctcccaggctcttcttcgtgtc

SEQ ID NO: 353693 - DNA, 280 bp, Zea mays
gatgaaatagaaatagacaccaaatgcttttggtaaaaattaaggagggggaggggcaaaatttactctgcagcagcttgcatgctagacaataatcttgagcatcaacaacaaagacaaccgcagcaactttaggcaggacttcatcaagtttgggtttgagcctagcatgaccaggaacatcaataacatgcataagttttactttatctttctgcagggaaggacaacaggaaagtttagcagaaatatcgcagtcaggatatgcatgttttttcac

SEQ ID NO: 353694 - DNA, 278 bp, Zea mays
gatatggcaaaatctcacattgttgcagcatgcaagtcgccgtatggatcgaggtccggcgattacatggcttcccttgcacttgtccactgccagtgtcgcaactggaaagtagtttgaaagagatcaccaccatattcaagaggacccgacaattctgtttggaaattacttgcaatccttgctatatagactgcaaattacttgcaacaaggacatgggttttcagacaatgacggaccgagttaaggaaaatatgagaggctatcgagtttggg

SEQ ID NO: 353695 - DNA, 263 bp, Zea mays
cttttcccgatcttgtgttgttggtgaaaaaatttgattcctttgagaggatttggtttggggattgtttggtagtgagttgcactctttggaccactgcatacacctatttgttgcagattttggtcacgatttgagaaaaactcaggttgaactcgtttctagaaaaccccaacaaaaccccaatttctgctgtatttttaaatctgcgggtgattcacaagtcggattgagctcaaaatttagggagatcttgcaaaggt

SEQ ID NO: 353696 - DNA, 101 bp, Zea mays
agaggcaggtacgtacccggccggactactacccggcgaactcggtcgcccatggccaccgcgaaaccttatccccacaaccacacggataaaccctagct

SEQ ID NO: 353697 - DNA, 264 bp, Zea mays
ctcttgttgatgtaattgcttcatggacatcttcaaattctggtccaagactacttcgcccatgatcacccagctgtctgcgtacagaaatgttagtaacagtgaagagcaacatgatttaatgatgcattatgatacgagacgttggcaattagggagttatgttaccttggccggtggaggaaggatacatggcactggcaataggagcttttgtggacaaactatcttaacccattggcaaaggcaagatctccttcctca

SEQ ID NO: 353698 - DNA, 262 bp, Zea mays
aacaggaacgcaatggcattcatgtttgatggccgaagttcgcggcgagcagacccctgatgaggtgatccaattcggctttagatcccagcattgagtggaatccttgatcgatagttcttttgcatgtgcagctggagatggaggacggcgacgagatcgatgccatgcttcaccagaccggaggcagcgttcctagcaccacctaaaagcatcagtcgcggagcttcgttttgctctccgccctgcgtagtagtaaaca

SEQ ID NO: 353699 - DNA, 267 bp, Zea mays
acctcgacgtgtctccgcgaggtttaatccggggaaagcaaagctctgcacatcagccacattcacgcacagaggtactagagctcgggcagcagcaaaagacatgacgccaccagcagcgccaaccatggccgccggcaacgccgtccacgtcgggcgacgccggcacgtgctcttgttcccgctcccgtaccagggccacatcaaccccatgttccggctcgccggcctcctccacgcccgcggattcgacgtcaccgtgttcca

SEQ ID NO: 353700 - DNA, 205 bp, Zea mays
cccagatgtcgccgcccaccgtccacacgtcgccggccgcttcgactatttacagccgtcgtccgtaggctccctgcagcggcttaccatggtagcgctcgcgggatagcagcgcgctcacgcccatctccaagaccgcggtcgggtcccctgccatggcgtgcacagcctcgggattacttcaaggacccttgagatggcgtgc

SEQ ID NO: 353701 - DNA, 187 bp, Zea mays
gaagcatccagagtcactagataagcaggtgacgagcctgagcgcgagggagagccgccagcaccaccggaccagcgacagcgagcacaggggcggcggcaggaacagcttcaaagaccagctcgggggcctcctgccgcagtcgcggtccaggaggatcttcgacaagctggtggagcagcaaggg

SEQ ID NO: 353702 - DNA, 258 bp, Zea mays
  unsure (1)..(258): unsure at all n locations
acaggccaaggcaggtgctagaggtgccaggggcgggacgaaggtggccatggtgtactactccaagtacgtcaagacccagaacagccctgccgtgagtattggtatagcacagcagctcgagtctacagccgccgccgtcgtaggagtagcaggaggcggcggcgaaccngacgtcgacgaaagggcgacggctttcatactggcagtccgggagcggttcaggaacgagaacaagtattaacctagctagctcat

SEQ ID NO: 353703 - DNA, 250 bp, Zea mays
gcttcctggagacacttatgatggcttgttctttgtcaggttgctcgagaaacctcaaaaggtattgctgattttgttgatggaaatcgacaaggcttttcagttgcaagtgctgttctcctcagcctagttccatggattcaagtaagtagatcaagaccactgatcttatctgcttcttcatcttgctctgctggctttcaatgctgcaatgttggcgatcttgtcacgtcttgaacagaaaggggag

SEQ ID NO: 353704 - DNA, 223 bp, Zea mays
cttccacctgatttcgtttcgctggtcattattgtacatgatactgtggacgtgaatggctatccttgttccagctttgaaactaatcattatggtcttcatagtgtcttattttaaggtgttgctttttcaatgccttagtctaagttattttagtatcctataaaatataaatacaaacaatatcaaacacattagtctcaaacatcaaaattatttagtt

SEQ ID NO: 353705 - DNA, 262 bp, Zea mays
gcgctcgacttctttcgcacacgctcctgctgccggtacccagtcctacggcccctacctctctccacctcgactcgccggcgttgctcggctgcagctcgtcggagcttcctgttctcagcgcgccgacctccctcttctccttcatgtccggccgccggtctggccgaggaccctggtcgtggggtcgcgtcctacctccctacgtcgcggacctgccgtgtcctgggcgccattccagcactgccaggttccgcgccat

SEQ ID NO: 353706 - DNA, 110 bp, Zea mays
gcacctcttctctcaatcgtatctacaagctgagatagagtcatgggatgaggatgatgtccaccgggaagtaaagatcatgtcggctgagtgtgcactaaggctagctc

SEQ ID NO: 353707 - DNA, 246 bp, Zea mays
cgaggttcctcatgcccttccagctcaagtgtccggagaggaggctgcagatgaagaggaaaccgtacagggatggtggcgactcaggcaaccggggcgacaaagtcaacgaactaattgaaaaattgaattaaagcagagttgttcgcttcggactggtacggattaaaaccaaacgaacaggcctgtctctctctagttgtgattttgtggtggagtgatggatctgttactttgtcagttttg

SEQ ID NO: 353708 - DNA, 254 bp, Zea mays
tgtatttttcccagctcctatcttctcttcgtcgtagtgctgcccttcagcgaggtgctggactggagcaccttctcggtggtgctcgccgagagaagggcataccggcggacctcaagaacttcctgtggcacgccgcacgccacgcccatcaagtacgacttcttccacatgatcctgcactccatctggttgagtagagcgaaccaggtcgagctcgacggctgaactgtgcggtcaagtctctggaacag

SEQ ID NO: 353709 - DNA, 302 bp, Zea mays
agtttgtaggcaagcctctttttgggacgcttatagcacttctgcagaatgggaagccggttattggtggcaatgaccagccaatcttgcgagaaatatggattggggtggatggaaaacaaacaactttgaacggacaagaaatatctgttcgcgcttatatacaataagcccacatctctttgaagcagatgctgaagatgcatttattcgtcctcgcgcataaggtgaaagtctcactttatggctgtgattgttatgcttatgctcttctggcttctggttttgtggatattgttgtt

SEQ ID NO: 353710 - DNA, 284 bp, Zea mays
caacgagcgtttggatgagttggccttgtttgggattggcactgccactggcagcaatgttgatcccgtagatgttgatgcggcgcctgtgactgcctcctcgagccccactgccactggtggtagcactgcccgtgacaaccggccgaggaagaggctagcgacatctagggtttgggctgacttcgaggaagtaactgggctcgacgacaaaggtaagaagggtgcttgaggagcgacgacgacgacttacaacagatatggttgaggtcttatcttgtatt

SEQ ID NO: 353711 - DNA, 152 bp, Zea mays
ggtagccaatgcaagaaacttggaagcaccggtagccactgagcgcagatacaaagttgagagatggatgtggtctcgtggtttagccaggtctcggtggtggtaagcgttctggccgtttgctggaccgtgttatggcagaacctgcagca

SEQ ID NO: 353712 - DNA, 297 bp, Zea mays
ggtgctgctacagtgctactgctacctaaccttttgcttggccgatagataagaataccggactgatggatggaagtggatgtgaacaaacagctggttggctcagggcaggctccacaccaccaacggccggagcagatggacatggacgtctcacttaggttagctagcttctttttcctttgtgaccgtgatctgctactgcaggaaaccatgcatgattcacaagcagctagcagcctccagtcatattcctctttattttatttttttatataaaaaaaagaaagaggaaag

SEQ ID NO: 353713 - DNA, 286 bp, Zea mays
ggtgattataaaaagcttggtgacatgattgtaccagtcctccaagaatgtatgcaacacagcgggaactcacgtggcgcaatcagtgctcagaccaaagcagacatcgattagctcttgcgatccaagcaaagtttgaaattggaaaagagtatgccaaaagaggatcttcatatataacaagctgcagcactggttcgtcaagttggaaggcaactcactgttctcttcagggaacattgcaagagctgcagacaaatactccgacgcactggcactatgtcca

SEQ ID NO: 353714 - DNA, 291 bp, Zea mays
gaacaagactgcttagtaagaccctatcttaaaaatcaacaaaatgtctgtttcagcatgagttctaaaattgtaattagattttatttagcctgatttatgtaaataagtcttttaaattgccttttcttgtatagattggagttaacttgcacagttgtattgtatataagatattgcatgaccattaatgaacttgttgctgttttcccacaatgttaacagttttgtgaatttttcactatgcatttacagtgttctataacaatgacttaaaactattttatacat

SEQ ID NO: 353715 - DNA, 257 bp, Zea mays
ctccaccagagaacccgcagcgcccgccatggccgtctccgattccctcgcgcatccagggctggcgatcgtggtcatgggagtcagcggctgcggcaaatcaaccgtcgcggcaatgctcgccgaagccctgggctgcagattcatcgaagcagacgactaccattccgaggcaaacaaaggtcgaggaagctaaatgctaaaaaaatggaatcaagtgtacattacggtatagattttgtgcaggagtaatatgt

SEQ ID NO: 353716 - DNA, 258 bp, Zea mays
caagaagtgatctgccatgattctatcttatgcatgctaaacacagcattgtgtaccatttttgcgtagtgttgctgcatgttggttcttgtgagctaatattacagcagatttggtgtttttccagaatggactgctggatccatggtttaagagcaagggcctagtgggtgcaaaccaggtgttggcctacttcgctgtatcaaaggttggagagccaccatcgatgggattactgataccaacccgaggggttga

SEQ ID NO: 353717 - DNA, 274 bp, Zea mays
ccacgtcgtgctgagggactacgggcacatggacatgctggacgacgacggcgtgccctacgtcatcaacaactgcatgtgcatgaggaacaccaaggacaccaaggacctcgccaggagggccatcgggggagccgtggtggcgttcctcagggccacgctggaggacgacgacgaggatctcaaggtcgtgctcgagaaccgccctggcctctcgccggcggtgctggacccagttgggcatgacttggcttgaatagcaaggctggcggag

SEQ ID NO: 353718 - DNA, 271 bp, Zea mays
agtctgccgacagtaggcttctactaagtggaagcaaggattccactctaaaggttgtccacttgacttaagctgtactgttgtgttgttcattggacagcacttactctgtcatatatatatgtatataaaagaaaaactttgtacttttgccgattcaccaaatgaatgcatttcagatctgggatattcgaacacacaagttgaaaatggaattgccgggccacgcggatgaggtgtacacgtggattggagccctgacggtgaaaag

SEQ ID NO: 353719 - DNA, 135 bp, Zea mays
ctcaagatagataaagtacttgatctccaaactgacaaactgtttattttctagctgatattttgctatttggcatttacgtaaaagcacacgatgaagcaggtatcgccttacctgttgaaactgaaaataaag

SEQ ID NO: 353720 - DNA, 126 bp, Zea mays
ggctatacgacaactatattgtattgtatgttttctgaagtaacactgtatcgtagattagcattctcaattagcataatcatgctatgtatatgatcgactactgggcttgtgagggaatgtgtg

SEQ ID NO: 353721 - DNA, 132 bp, Zea mays
tatcatggaaaacatttccctgtttctcaagactttccctggaccaaggggactagggggtgtttggtttatagggattaatttttagttcctcccatttaattccatttaagtgtctaaattaccaaacac

SEQ ID NO: 353722 - DNA, 118 bp, Zea mays
tgagaataacctaggtaaagcaggtgatgtgatgccactgttcatgtggcgaagcgccagcctcgctatcgagctttttaacacatttgccgctctccagtcaaacttttatgggtgg

SEQ ID NO: 353723 - DNA, 133 bp, Zea mays
agccgcttgacgcgctcacgctcttctgtggttctgagacgtgcccgtgctcgcagtgttctcgctcaccgctgcaacgccactggcacaatgaggtgagagagaaagaaggtaggcatggcaccggcgtgcg

SEQ ID NO: 353724 - DNA, 110 bp, Zea mays
agagatgctcaggctccctatgcctctccacctggggtagactccagacttggatattctcaaacggagccaagagctgcttactcacagccataccccccatcctatgg

SEQ ID NO: 353725 - DNA, 149 bp, Zea mays
ggaaagcaagactgcaaactacatatttgaggtgaatgtgcaatatatctattatttgatttaacccctaaaatctggggaaataataaccgtcagtttataattcttttgtttggtcacttgtcttttacaaggaacttgatggttaa

SEQ ID NO: 353726 - DNA, 198 bp, Zea mays
ggagttttgaagacatgaactgtcgtgtggatgaggtttcacgtgcttggccaacgtcagtgacaaaacggcagcaggtgggcatctttgaagcaagtattggttgatgagctatgaattctcagggaagacggcccgaatgaacttcaagaaacgctccgagtagaactgggggtccacaacagagatcgagtccga

SEQ ID NO: 353727 - DNA, 271 bp, Zea mays
aactgaattcgctgcgctgcgcttccctcgtcggccccggcccgtgcgcgggcgtaccggctctacctcacaaaatccgccatggctggcggttcgctcgagccaggccaaactggagccgcgcccaaccagcgcaagaggaaggctccggcccctaccgcagacgctgaggacgaggcggaggcggaggcggaggagctgcagagtgtggaggagctggagagagaggtagccgatctggaccgccgcgtcctcgaacacgtccgcggca

SEQ ID NO: 353728 - DNA, 268 bp, Zea mays
ggcatttttctcttaagggctagtttgggaaccctattttcctaagttttttttttccattttcccaagtaaaattagttcattttttcttgggaaaatataaatcccttggaaaatgaagttctcaaaccaactctaagggctagtttgggagtcacttccggttttgtggctcccaaactagccctaaaaggcaggttggcccgtaggaattaagagtaggaattaagagtttcggtgatggggctattccttagaagaactgtac

SEQ ID NO: 353729 - DNA, 270 bp, Zea mays
gcgcaagtcgctaaacatcggcgcggggtccggggattccgacttcagcgccgacgagcacgatacctcggagggcgagaccgaccgcgaaggcatgtctggtttgaatcatgccctatgtaacgaagaaaggatattaggtggattgggtgcaagcacgactggtgacgaaatgagcgatttaccttactgccttagaatgcacagatcagagatcagtcgtgctcagtatgttgatgttagagaactcaggatttatgtagggacatg

SEQ ID NO: 353730 - DNA, 271 bp, Zea mays
gcggcgtcacggcagaggtgttcgtgaagggcgcaggggagctggtggcgtactcgtcggcgacgcccaggctctgcaaggtgaacggcgacgaggccgagttcacgtccgaggacggcgtggtcaccgtcgacgtgccgtggtcggggtcgtcgtcgaagctgtgtcgcgtccagtacgtctactgagccggacgcgccgatgactctgctccctgctggcctgctcaggacgcaataatctaatgtttagagcttaccaagttttacag

SEQ ID NO: 353731 - DNA, 129 bp, Zea mays
gtatttttaagatttctctagctaattgcatcgatcggcgaggtagtcactcaggggattatgtgagtttgcaaaacgccaaaacagtcgatacgcgtatagaatttgcttgcttgcttgacagccaaa

SEQ ID NO: 353732 - DNA, 275 bp, Zea mays
caaactcagaacaatttaaatccacatctctttttttaaggattctcagaagcttacaagtagcagaagctcttcggatgcaaatggtggttcagaaacaacttcatgaacaattagaggtaaacacctagctcagtgattttttagtaaaaaacaacggtggatgaatttgatctgacactgtataatcatctttaaagtctgtataaatttcggatttgcatggctagcaatggcgctaagtttattctccgtcgtcaggtgcaaaggcagct

SEQ ID NO: 353733 - DNA, 273 bp, Zea mays
ctgatactggaggttgaattctattcctgagtccaggttcgcattatcgatggagctcatagcagtctggtggctcgagattgagggatgggtccctttcgagttcctctccaccgacactagctatgatatatgccttgtctacaagctggcagatgagcatgatggcctcagatggggggagtcctacgtagcagtggatggagtacacaccactgatggcgttgtttcctttgtagacgaagatgccgtgcgtgtagatcgcgtggctta

SEQ ID NO: 353734 - DNA, 267 bp, Zea mays
tgttgcaacagtaatgccaatgctgattccagaatcaatcacaaaagtttatttgtaacataagctcttcggatgcaaatggtggttcagaaacaacttcatgaacaattagaggtaaacacctagctcagtgattttttagtaaaaaaaaacggtggatgaatttgatctgacactgtataatcatctttaaagtctgtataaatttcggatttgcatggctagcaatggcgctaagtttattctccgtcgtcaggtgcaaaggca

SEQ ID NO: 353735 - DNA, 265 bp, Zea mays
gtcagtgagaaacccattaagagcctttttcacgcccctcagcttctcgcctctagacggccaccccacgcagatatggcgacgcgaaccgtgagcttcccctcctttgcggtctcttaccagtgccgaggtgcgaggaggatgcatttacgttgcgagggacatgagaagttgcgagtagccgtcactgccaatgcgactttcttttaaagaagttcactagcttttatggacacttgaaagtcaacttataaaaaaaatccat

SEQ ID NO: 353736 - DNA, 227 bp, Zea mays
gttctagatcgcgggagaccgcctctgcttgggagagggtatggctctgttggcgtcatttaggtttcagattgccgcagataaggccagatgtcgattgtctagcaagacctagatgtagtggcttctatcttagtatgggagtccttctagtccttcaagcgcaatcccatattcgaattgtatatgttctgtttatatgttcgtgcatttgtccatcttttgga

SEQ ID NO: 353737 - DNA, 100 bp, Zea mays
gtcagttgaggaagacgccgaattagcgagccgggctatttatggggacacattccgtgctaccagcaaatactcgttgtcttagtgtttaccacgttgg

SEQ ID NO: 353738 - DNA, 255 bp, Zea mays
gatggaggaatggagacagttggcttaaccagatgctatatacagattattactggctccaaaggatgagcagataagaccataagacttggatcaatgtaaatcctcacctgccctttgaagagccaataagggcatctttgtctttaaatacagccaatgttattcagattttgtacttgtctatctgtttacctcagtgtagatgatatgaggatggtataactatgtacattgtttttgaacatactttgt

SEQ ID NO: 353739 - DNA, 236 bp, Zea mays
cgagcagcgcaacggcgttcgattccttcgattcttctactctcctaacccaagtgcgcatggtatggacggcctgatcagcttgagcgccggtacgaggagttcaacgtcacttcgccagtcgtcgtccgcctgggcatcaaaacggcttcacatgtggaggttcgttatacacgaccactgtttcgctgtcgcaaagttcgtaggagccgtagtctactaggaacagcaatagg

SEQ ID NO: 353740 - DNA, 232 bp, Zea mays
gaaaagatttagttgcagtggtaatcagagtaccctctgaatgacgagtatgtagggactggagtggcgtatggtttgattgataggcaaatctgattcatgattcaagcttgtctggaactgtgaacagctggccttcagtatttgattacattcattcaaacacccgtttcgcaatgttcagtattgttaccgtatgcgagcgagcaaagtatatatgttatacattgac

SEQ ID NO: 353741 - DNA, 190 bp, Zea mays
gagtaggatttggctcctgatatagtcagctggctgaactttgctgtgtttatcaatgcttagacattgtgctctaatgtgtcagtgatacctggaactgacaaaagcagcacaaactcctggtggatacgtggataacctcgtcacacacttgactagctgagccagtgcgtgataacaatccaaatct

SEQ ID NO: 353742 - DNA, 182 bp, Zea mays
gcgagtttggctcaattttcgataagtgagagagcgcctatgttggctaagtgcgactttggctcaattttgggcgtatgctaatatgtttcacaacagggaaatgcttgagatttgggatatctgtttcgctataactgactcaattttgggcatatgctaatttgctaagtgcgaacaaa

SEQ ID NO: 353743 - DNA, 285 bp, Zea mays
ttcggctccagcgactctgatgatagtactaaacgcgaaccgataccctagcgcgcaccacgctgagctgcagagctctgctcgcagcttattccatgctttcagcttcactacggggacttcgtacagcctggactgtcagtttgaactcaacggatcaatcagtatgtgttgtgctaaaccggttgttgtaatctcctattttgattgggttattcgaaaattgtaccgcgtcaaagaacagatcttggcgtactgtaattcgcaccgtgaaaaatcgttttc

SEQ ID NO: 353744 - DNA, 199 bp, Zea mays
cgctaagctagctaggtcacatgacatgagctaaagacgacgacacactaataggacacacacaagacacactaactccatagctaaatacactagcatacccccccaaaaaaatatgtccgcgtcacggttcctcctcgccgtcctcgtcgtgggcagcgccgtactgtgcaccgacgccgctccccgcgcgctacgc

SEQ ID NO: 353745 - DNA, 266 bp, Zea mays
cgatgaagcaaaagatcagggcggagtacgaggggtttggaggcagcacatacggcaacataaatccaactacttcctcaacatcatgatcctgattgcggggttggcgttacttgacgtctacgactcgggaactgagtgttatatcatcatatgatccgattcctgaagtctacgagtgtccatatctacgactagcattagagctacgtacgtgcaaacagtttttttcgcgaatttggagagaaacagcaaaagactgtata

SEQ ID NO: 353746 - DNA, 271 bp, Zea mays
caaagcagcaggcggcttcgagcgggaggggggcaaaatgagggcggcaatggcgatggaagcgaggaggggacaggtggagcgggagtccggacaggaccgagtcctacgaggagtggcaggcagggcgggggcgaggacgacgcccggcaacaaatcgggccgccgacctggacagaaacgatgcggagattgggaggaggcgagcgagcgctgctctcagtacttgcggaatccgggcggtgggagggagaaggtggacgctactttg

SEQ ID NO: 353747 - DNA, 235 bp, Zea mays
ggtgaacaagagccagccgcaggtgccggacgccgcctacaacggcccgccgctcagctattacgtggccaagttccagccggcgcagacccttgaggcccccgccccggcggaagcggtagaggcgcaggatggcgccgccactgtccaggactccgcggctccggaggcgcatgaagctctcctcatcagctgattcggatttgtggcagcttacagatgaggttgtagtgat

SEQ ID NO: 353748 - DNA, 111 bp, Zea mays
gtaggtagctagcactagcactagcactagcataccgcatccactgctcccatcagccacagtagcagattcttacgtctagcaagagcttagcttgcttcccactgttac

SEQ ID NO: 353749 - DNA, 104 bp, Zea mays
gtactgtatgccattccttggtgacaaaatgctgtatatttggttttgaaacaatgaatgtgctgggtatacacagcagagagggtactgtccactttttgtat

SEQ ID NO: 353750 - DNA, 155 bp, Zea mays
gtacggcgggaattttctcctacgatatggtttccgatttcacgacggaaacacagcaggtcgagcacgcgtacgtacgccgtgtagatttgtacgtagcgtgcattatttatttagataaggtttctctgtacgtagttgcgcggtccttgttc

SEQ ID NO: 353751 - DNA, 103 bp, Zea mays
agttggctatggcctcagtaacatcagtctcctctccccacattgtgtcctgtgggggtgaggtcaaacgctgctcagtacagaatcatacgaactgatgtgt

SEQ ID NO: 353752 - DNA, 276 bp, Zea mays
taatgaggcagttcaagatttcaggagatctttacacgatggaaaagaagattgtaggatacgaaacactgttgggcctgcgtgaatgcttaagtggatcctggaaagcgcccaggcaaaaatagttgaattcctagagaatgttcagaagataatcaacatgctgatccacactccagaggatgatgataatccagatggatacagcgatgcagttaaggtgtcgttcatgctcacggtattcgtcttcatcgtggtggccattgctcgtatcaa

SEQ ID NO: 353753 - DNA, 286 bp, Zea mays
ccacttgccagcaggaggagccgcttgcgggcctttcatgttgaggctgagcgccttggggctggttgcagagggttgcagcggatggtgcgggtgctgctgctgctgctgcatcgccaggaacggcggcactgcttggctggggtggtggaaggcctgctggttccctccaccgaacgggtgcggcggccggcgaagccatcatctggctgcccatctgccccgtcgccaccttcagccgctgcagctccgatttcagggcctcgttcagagctgcgacaggatc

SEQ ID NO: 353754 - DNA, 125 bp, Zea mays
gcgaccgaagacgagctccgattccagtcgtatgatgatactggattccaaaataaacactgtaacataatgaaggcagcttgttgattgtacgagacaagataatgacatgggcaccaaaacgt

SEQ ID NO: 353755 - DNA, 274 bp, Zea mays
agagttgcgagttccatggaccgaacttgctgcttaaggccgcgaaaaatgtgaagcgcgataaggagttgaaggtggctaagactaagagcaccagaaagtaagaggcatggagattgtgagcaagcggattttgtgttctctgccatgatcaaagagcgccaatttctgccctgggaggctcagctctgcccagctgaatgggacgggcggctgagggccgtagaaacctgtgctttctgaactaatgggttagagaacatgaattcgctag

SEQ ID NO: 353756 - DNA, 281 bp, Zea mays
cgctagggtcatgttaaagcaaaaggtaggcaggcttgtctatcattgactgtaaccttgcgtgacacggggcatttggcgcgcgaatccaccagtgatgtcctgtacctcatcgggggttgctacttggtacttgccgaggtagccggtgcttcttggcttgccgtagaaaatccttaagaccttctcgccaaatttccccatttcccgtgttttttctgtaaaaataaattgtttcatgtgaaatttctatatattcctataaaattcatgcgttctaa

SEQ ID NO: 353757 - DNA, 101 bp, Zea mays
tgtgccgtgaacgcgacagagggtggtgaggtcgctgtcgaggaagggcgacaggatagcgggcgacgcgacgccaaggccacggccggtggcgtagagat

SEQ ID NO: 353758 - DNA, 206 bp, Zea mays
ctcgtctgctataaatggagctcaccttccacgacctctggcagttcccatccgccgcccgcgcacttgttccttccggcacagcacacaggacaccgtagacagattcatcgcgacgatggggctggacgtcgtggagatcgggatgggcgccgatttgagcctggatctgaggcacttcgcctcaaaggccgtgcggcagagca

SEQ ID NO: 353759 - DNA, 191 bp, Zea mays
acacgatcaagcgctgcatctctgtaactattaattaagagccctctaaaccctgctattctagttgtctcttgagtcttgaccattccagggaaaaaaataaaccaagaaagttacaggaaccagcaccgtggtacagcatttcttcattattgattaccattattacgcgaaaaaaaaaaaaactaatt

SEQ ID NO: 353760 - DNA, 275 bp, Zea mays
gccgaaaccaacactccatctgcacaacaccacctctcttctccaagatcaccaagaagcttcttttctaaggactgcaagggtatacaccagcaagacaaggtaggaattttctcttgccctaaatcttctagttctccaatttttcccctgaatgaaattaggaaacctgaagcaatatcagtgcttcagttagatgtggctattcatgcattctttttgctattcctcgacttgttgagtacctttgtactcattccgttttgtatccctct

SEQ ID NO: 353761 - DNA, 231 bp, Zea mays
attcacactcttttagattttgcacaaattgaggtaaatataggacacactgctagtttcttgatcaaccatgaaaagaaattcagagattggatttattgaccactacagtagaattagtaataatgtctctatggaatcactgtaacagatgtgtttttgatggttgctctcctgaccttgctagtctgctagctctatccataggaatttggcgtctgtggagtaggg

SEQ ID NO: 353762 - DNA, 146 bp, Zea mays
attaaattgtgcttttccaagaaaacaaaaaaaaaaatcataaacctctctatctggtgttttatcaggttgtgaaaaatatacttgtaaagtgtatacagtggacagtatgcgcctctgtttaataattcaatctgtgattccta

SEQ ID NO: 353763 - DNA, 207 bp, Zea mays
ctccttcggcctgaggtaaacggtaaaccaaagcaaaccaaccggccggacgctattatctgggtcgtctcagtagctccggcgtgtatcaccatgcctgttgtcgtaactcgtgtgccagcaaccgtacgtgtgtgtgcgtgtgttgtgagatttatagttgtacctgatccaggttgattatatatatattttgcttgttgcggt

SEQ ID NO: 353764 - DNA, 183 bp, Zea mays
tcgaggctcctaacaacggggcggctgcttctgctatagtgggagccgctggctttgaggtgcacactacagtaggagctgctggctttggaccctgaccaagacgtgcaagtgcaactattcaactgatataggtagaagggagagagacaaatggaggcagggataatggcaccgtcatga

SEQ ID NO: 353765 - DNA, 107 bp, Zea mays
cgcggcctccgccgtacgccgccgggtgagctctcgtggcccgagtgccacggcaacttcctcgaggaggtcaccatccctgcgcgaaccttcatgcagctcccttt

SEQ ID NO: 353766 - DNA, 256 bp, Zea mays
ggatgggagaggcgtggcagggcgggcctcacgcttctggtgtgtgtgactgctgctcggtcggtgctgcatgctgctagctctgcttccatgcatgtgcctcctgtgcgtgcacctgctagctaaaccatgcacgcttaataacatatatatacttattagtatattagtaattaccatgatagatatatatgatgcacgcacacgcgtgtgctagctagctacaagcagccgatggctcaatccccttgctagt

SEQ ID NO: 353767 - DNA, 250 bp, Zea mays
ccgcgctgaccaagcggtgatgggcaagacggaagtgaacacggctgccgctgcggcacgtgaggagaaggcgtgggtgccggaccctgtcaccggctactatcgcccagcacgtagcgccaaggaggttgacgcggcggagtacgcgccaagctgctgacggaggctgcggccaactgattaatcaagcagtcactttgtcgagctacagcatgagttggctcacttgctgtccacctagcttctcctg

SEQ ID NO: 353768 - DNA, 255 bp, Zea mays
gtcccacagcgtggctctctgggttctcccacttgtcctccttggaaggagctcttgctggccagtgtttggaggggaggatgagtgcctgtcactgaggcctcactatggttggcgtctgaagcgaggcggtcgtcaggcctgtgctgagatggctgctggcctggcctccaagagtgctggacaggcgggggacactgcccagatgctcggtggagggacagtgatggccttgactcatgaggcctagagaaa

SEQ ID NO: 353769 - DNA, 176 bp, Zea mays
caaatttagaagttgcgtggctaataataagattcttaaaacgagatatgaaccaaccatgcccatgccatagatcacaggaggaaacctgggaggggggcaaacatttggtccttgtagctacatctaatttttgatctcatatctatttttggaatacgtaatacatctatttt

SEQ ID NO: 353770 - DNA, 139 bp, Zea mays
ctgctggagagtctgagtcccatgaaattggatcgccaaagagtctaaaagatgctatcaaaccaaaacataaaagacagacgaagaaaagtgacaggcgttagtttagttgcaagcctgtcattttgtatgccccaga

SEQ ID NO: 353771 - DNA, 267 bp, Zea mays
ctttgcagctccaagaggaactcattcgtgaaggagcatacgagcgagctggaactgaacttaagccaaagcgtcgtgctgctgataagaaaaggcgtggcaagaacatgtgaagtgttatattttctttttaaaaaactagcaataattcatcggatgctaggctatttcccctcattttttgtgaacagacatatatatgccgccgttcgtagattctagtctcgtgcattccctttgagaatgtcagattgaagtgtgtttttc

SEQ ID NO: 353772 - DNA, 184 bp, Zea mays
cgggacttatacagcagatgcttgaagacccaaacttcgacatccacaaggaaggcaagtacatcctattcgaccgtacaagagcctcgccgccggcaacctgtgcgacgggaggttcgtgttcggacgagagacgagaccgggacaggctccggagccccgaggacgacggcaagagcaacct

SEQ ID NO: 353773 - DNA, 170 bp, Zea mays
ggagaaggggacgatgaggatgaaaatggtgagattggtgaagaggatgaggagggattggaggtggggaatgatgacgacgaagacgacgcagatgcggatgatgaggatgcagatactgaatatcttgtgcaaccaatcgctcagcctcaagccatggctattggaag

SEQ ID NO: 353774 - DNA, 123 bp, Zea mays
agcggacgacctccgccgctgcgtcgcgggcatcgccgccatcgaacgggtgatccgctccagggccttctcgcggttcacataccacaacttcgcgttcccggccgcgctcaacgtcacggc

SEQ ID NO: 353775 - DNA, 142 bp, Zea mays
gacacgtccacacaccacagaccacacgcacggtacagcctctccgcagctgcaggtgcatgctgttctccgacgagaccccaagaactcgccaacctatcccaattcccagccacccttccctctttcacaatgctggcct

SEQ ID NO: 353776 - DNA, 231 bp, Zea mays
gtattttttttccttcattaatggtgtagaagcaacattcgattggttggttggctaacggacccagcgcattgtccaaagctcaaccgcagcatggcgggaggcagctcatgcacatcagccagtcaccgatcgagcatcggcttgcggtaccggatagagcaagtgatacatttggcggatagagcaagtgatactatgatatagccagcttttgtctaatactatagt

SEQ ID NO: 353777 - DNA, 275 bp, Zea mays
acgccgcgcctcctccgatccttcctccccgtggtcccgccgcgcgtccctcctcctccacctcgcggtcgcgatcgcggggccggttatttcccgccctctgcgaccactcctcgccggctgcggtcgacgcgcttgcggtcctcgcctcgctcgcggcacttgcgttcctggagcgtcctgcgcgactgttggctgtgagaaatttggaatattggcacacccaacaacgctctttggtattgcagcatctcgaacgctgaacacgacaacat

SEQ ID NO: 353778 - DNA, 233 bp, Zea mays
aggacagacagttgatagagacctcttgacaatcccaacaaccacgtgttgtcttttttgtaccagcgtgtaattagcctccctgccttgtaccctcccctatacgttcatctgtcgtgtagacgtcggtgtaaatatcaattttggggccctagttacaaggtagggaggctagttactgcatctgttactcgctccaaaggttgtgtgtgtacagactgaggacatttctc

SEQ ID NO: 353779 - DNA, 141 bp, Zea mays
agtaaattaaacaggcttggatgaattagttttttgatttagagttttggagagattatttgtacggatttgaaaagattacttgtatggaacgttgaaattattgtttggtgctaaaaaatattattggaatgttgttgg

SEQ ID NO: 353780 - DNA, 263 bp, Zea mays
gaaagatttgtcagctgacctacaaaaagtcacggacgagtacatgaaaaagatcgattccatccagaagcagaaggaacaggaactgatgaaaatctagatcttcaacaagctgagctgactgtgtatgactggtgagtaataaccgcctctgtaaagcatgaacccccgcatatatgttgggggaatgtatctggtgctcatcagagggatatggtgctcacgtgtacatttaacagcagcatcaattttataaagatgtt

SEQ ID NO: 353781 - DNA, 229 bp, Zea mays
cgttacctagccgagctcctctgctcctctcgtggccgaacaggcagagcgaccagtctacagagagctccccatggcgtcaggagctgcggcccctgtcgttcaggtgagcgtccatgcctttataatttccttcaaccccaagcttcaagtactcgaatgctaacccctcgattagtctgttatttgcagaccctggtgctgaaggtggccatccactgccatggct

SEQ ID NO: 353782 - DNA, 149 bp, Zea mays
tgcatttacagtacgttcacccccgtggcccgacccttcagccatcgcaaaactgaggtattcttcttggctgaatgctggcgtcgacagcaaagtccacaactccatcctgcatgcgctcctccctgttctctgttctcactcagcac

SEQ ID NO: 353783 - DNA, 230 bp, Zea mays
tggcttttcgccgcttgcttgctcaagaataacgcttgccatgttcgtttagtagccagccgtttgcacattgttcttggtgtggctgaaaaggggtaggggagttcttaattcttgtgtaaacatcggatatagaagttacaggacctcagtaaaaaacgtcatgagaaatgcaacttgataattttcactaaaaaaaaaaaaaaaaaaaaaaaaaaaaaaaaaaagag

SEQ ID NO: 353784 - DNA, 291 bp, Zea mays
gataggaggggtgcaactatttagtgacgagaagaagcaagcaacggccaataggcactttgtttataggacataatatttacagattcaattttcttttctgcggtccaaacaatccattttttttctattccagtggtttgcaatccggtagttctttcacttccctgttccctcgtttctgcgttttgcaccgaccaaccaatgttgggctgcctcgtatgcgggttgctgacttgtccacaacaagcacatcactttcgttttcttttctcccccaggaagatgagt

SEQ ID NO: 353785 - DNA, 214 bp, Zea mays
gtggaactctgcactcgtggagaacattaacccttgaatctgtgtgatgacgattcattggcgtcaaaggacatctttgtataggggtgtgttagattggatgacatgtgaatgtgattcatggatcagcctggatgttctgttatgattaagaactgctatgtatcgtgcaatagacacatcgtctgtactttggatgttattatcaggtccc

SEQ ID NO: 353786 - DNA, 287 bp, Zea mays
cacgctataaaatcccagctccatggccgcaaaccagcagctgcagcatcagcatcgttccatccatccatcctactatccagcttcagcccgggccagccgctccacagcagcaagcaagcaaggctgagaacgaacgaagcagcccgcatccgcatccatggccgccgtgctggtggcgaggcaggggcgcgagctgcagcggtacagccagagcacgggcgggcgcatcgtggtgggctgcatcccgtaccgcgtgcggcgcgacggcgagctggaggtgctgg

SEQ ID NO: 353787 - DNA, 166 bp, Zea mays
gattgatcgcatattcacatcccaaacccccggcctctccgctacgcgacaccgcgctcgccgcctcgaggaatctcatcccatcccgttcccaccaaaccgatccgatcgaatagtccgcgagcgacgcccatggaggcggcggcggagctggcgctgcgcctcc

SEQ ID NO: 353788 - DNA, 211 bp, Zea mays
agctgatcgacatcgacatcaacgccgtgaagaatgcggtgaaggacctggagcccgctcccagcttcgcattggcacagaagtagcagctcccagcatcattccatcgctttgtttgtacacagtaccagagaatgtaatggtgcaggctatcacaaactgcaaacggcacgcacgatgtgttataccgataaataaatgacaatctcgt

SEQ ID NO: 353789 - DNA, 277 bp, Zea mays
gacggcttccccaggagaacagcaagctagctgctatccaaacccgtgaacatggcgatggtggccaggccagtggcctccaggggcaagccctgcccaccacctcgcgcgctgacaccgccccaagccgacgacctcgactccgacaacttcacactttacaccaagacgcaagagcccatagctcaggactgacgatgctcatgctccccaccatgtccgatgacacctccgccaacccgctgctccccccgtcgctccacagcatgtcgtccac

SEQ ID NO: 353790 - DNA, 282 bp, Zea mays
agagaaattaaagcggatgccagagattgatgatgatgaagactggtttcctgaagatccaattgaagcctttaaggttatgcgggaggagaggatgttcgatgtatcagacatgtatactactgcagatgcctggggatggacgtgggaaagagaaataaagaacaagatgccacgtaagtgatcacaagaatgggaggttgagttggctatcaagataatgcacaaggtaatagaactgggtggtactccgacaattggtgattgtgccattatattgcg

SEQ ID NO: 353791 - DNA, 187 bp, Zea mays
aggactgaatggcatgaatatcaccaatggtctttcagatcatgcgaataaatccaattggaaccagcagccagtttccaaccgaaaggccaaacaagacctttctttacaagatttacagatgaaaggatttgtggataatatcggttcccctgaggtttcagtgtctaagcactatagcacctca

SEQ ID NO: 353792 - DNA, 181 bp, Zea mays
ctgcgtccctgcgtagattaaatagtgccatcccatttttaaatcttctaacaaagatgcatcatgcatgcatgtactatatcacaagtggaagaacatatatatacttggcttcctttgcagcagcagctaatactgatttatttagtgggcagcaacaaaaccaaggctgagccttgag

SEQ ID NO: 353793 - DNA, 182 bp, Zea mays
acgcgcgccagggggctgtcggtgtcggagggccacgcggttgggcggcgcacggtaggagcacacggtgcacctgatcgcgagcgtggggcatccgcgtgctcaccgtcttcgcctgctcccacgagaacatgacgacccgccccaaggcgaggatggacttcttcatgcagctgtacgag

SEQ ID NO: 353794 - DNA, 182 bp, Zea mays
aaggacgccttgtggaaacagaaccgtcctctagtactcctaacctaattcaactcaatccgtacccaaaaccatatgtctaacaccaatcaatgctgcagttttgagaaccgcaatcagtactcacaatcaagttggtcagctctcatcaatggccactgattactatccatgatttaggt

SEQ ID NO: 353795 - DNA, 176 bp, Zea mays
acttgaattatctagagccgaagtagaaactttacgaaccgaaatagcgggtgctgaagaaagggaatctcacttaaaagctcggttggaaaacattgatgaagttttgagatatgcacggctttctggctatctctacattagaagtcgatggacccaactccctggtgaaccac

SEQ ID NO: 353796 - DNA, 174 bp, Zea mays
  unsure (1)..(174): unsure at all n locations
acaagacggcgctgctggacaccatcagggacgcggtccngacatgtggacgccggagatgaaggcggcgtgggaggaggcctacgaccagctggccgccgtcatcaaggaggagatgaagaacgccgccgccgccgaggagcagacgaagaacgccgccaccgccgagaggag

SEQ ID NO: 353797 - DNA, 172 bp, Zea mays
atggagctcctctatggtacctcggcatggcaatcgctcatatcccctgcttctttttgtattggttggtcgtcaaggcgaacacacttatttcccacggatgtttccacatgcttatgttaggacagtatagatctaaatatcagtagcatactatttcaacaccgcttgg

SEQ ID NO: 353798 - DNA, 172 bp, Zea mays
actggaagtacgtgctcttctacgtgcgcctcaagtcaatgtacctcggcctcgacctcaccaccgccatggccggcgtccccgggtccgcccctcttgactacgtccgcgtcgccaacgagctcgtcgacaacatgacggattccgatcgcttcgtgcggactcccaaggt

SEQ ID NO: 353799 - DNA, 161 bp, Zea mays
caaaggaagaattctggaggacctgatggagcactcgaccgcgcgcttcaactgagcacaccacagttggtgactaggatcttggtgtacgggcggttgaagcctcgttccgcaaccaccgctctcttgtcgccgatcagcttggccactctgaagtacgg

SEQ ID NO: 353800 - DNA, 299 bp, Zea mays
  unsure (1)..(299): unsure at all n locations
acccggattcctactacccggctgcgaccgctgcagcctatcgcgaaaggtattagtgagtgccatccatcggtccgtgctggagcgcgcaacgcgctcntgcgcatgcgagttgggcaaacagttagccaccgtaaacaagcagagagagtggctgtttgtgtttttagcttcggtacgcttgttttcatcagtccttcaggggcacttggagtggagagcagtaggagttgaggatgcagagtgggtgtggatcatcagggcctcctccgtattgctggctgccctgtccattgaac

SEQ ID NO: 353801 - DNA, 280 bp, Zea mays
cgaccgtgcccagggagccactcttttcctgaaggacctcgagaggtatagcctcgtaacctgtcactcacattcagcaaactgaagatgggctgcggtttcgccgctcccggttactgacgcgaaggcagcaaacctgttgcagaaacggagttgccacggaggaggaactgtataacattacatactatgggaaaggaagaatgcccgtcagttctgccttctgcagtgaccaatccttttgttcttcaatcagcaaaaagctacttgtttatgagaa

SEQ ID NO: 353802 - DNA, 135 bp, Zea mays
agagtggtccatgctgtagatactcatgacagtcgcactgttcagctgttcatctacaggtagcaagtagtctagatgtgtttatagctgcttttattcagccaattggcctcttacataagcattggcctcata

SEQ ID NO: 353803 - DNA, 266 bp, Zea mays
acctctccttgtcccatcgccttatgacactctgctgccacctagtatcttgccaggctattcctagtctgccatggaatgaggacaatggcgactggcaaccagacaccaggaggcaattccaagatgctgctctggaatgagaagtcaaggtcctctaggccattgttgttctgcgggcatcgtgaatccatttaattttacgatttttctagttatttgacagtgtcctcagaattggtttcaagactacgatttacttgagc

SEQ ID NO: 353804 - DNA, 267 bp, Zea mays
aagagcagtctccaatagtatagcaacaccaagaaaataagcgccatgcagacgccggccatgtcgacgtccacggccacgacaacaagggccatggcgccagcgaagccccccgcgcggcggcattgctgcagctacctcctcctcctcctaccctccaccggccaccgccgcagcgtcgcggcgtggctccgcgaagaaaaagaacccgtggctggacccgttcgacgacgggcccgacgaggagttcgactaccagggcatgtt

SEQ ID NO: 353805 - DNA, 256 bp, Zea mays
cagcataacaaaatggtaggaactgcctacttcttaaaaatctgtcattaatgttttggtaaatttgtaaaatctgaggcaaggtagtgcatgggttaagatggaactagtgcttctattgagatgtcggtgttgtatgtaaatggaaaacaataattttaatttaaatgaaattgtgttttagttatcatgtaatctaactattaaaggatctgcggatatagaaacccaaaaacttatgcacttttgtagtgta

SEQ ID NO: 353806 - DNA, 263 bp, Zea mays
gatgtttctaaagctgccagaccactaggatgattagggaattgagtcctttcctcatgtcctttccaacactcttgatgctttggctccaccagtttgagaaatgcgtgcagtccagcagaggggcaatggggagcagaccaaacttgctgaggatcgaagtccagacttcacgccgcaaaaacacaagagatgaggatatgttgaatggtctcgtcggactgatcacaaagaggacatgcattaggatgaggcagccctct

SEQ ID NO: 353807 - DNA, 259 bp, Zea mays
gcacgcggctgcgctcgatcaggcatcagtgatgtgctaccacagcctaccgcgtatgtatcgccgatgagcaaccccagcttcgaccacagctacgagccccctctgcggcgaaacctcctgcttctgcgcgacctcctcgacctcctccgcttcatcgccggggtgatcctggaccgcctcggcgtcgcgccgtgccagggcgaggtgcatctgccaggacaggctttaggcggcgtcggcgagcatgtcaacgatg

SEQ ID NO: 353808 - DNA, 275 bp, Zea mays
attgtgttctggcattgaagggtttacctaaaggaaaggactacttttgcttgctgaaatgagctcagctggcaacctttcttagactacactgctgcggttgtaaagattatcgagcaacatcctgctttgtaataggattatatcagtaaatcctgcatcttggtctctagcactctcgagccctgcattcatccatgccactcttggagtttagatggctgctggaggatatgcccttgggaaacaatataatactcccatttttgtgagtg

SEQ ID NO: 353809 - DNA, 242 bp, Zea mays
gtaccgcctggacaggggtttccagatcttcctcaccgcgtacccggagtgccgtcgcctcctcgacttcccggagctcaggctccggccattctaccccggcgcgctcgtcttcgtcggcgccggggagccgttctacctgctctccgacccgttccgcctcccgctgcgttccctctcttcggtgttctcccccgtgggcaccctcaccgacaaggtcctcgtcgggctcacgcgcctcc

SEQ ID NO: 353810 - DNA, 289 bp, Zea mays
ctgatgcccacttcgctctggaagttttagcactttcataagttttttgattgccacttagctgatagaagaacccaataggtgcagacagtgttgagtcaatgtcctagaactttctaatgaaatttctctagcttttattcaattgtcaactcctgttatgctgcaggttgatttggtttctacagtccacattgcagacaaagaatactttgatagactgcagcgagagcttgaagattacgattgtgtcctgtatgaaatggttacaactcgggagaatttgagc

SEQ ID NO: 353811 - DNA, 279 bp, Zea mays
  unsure (1)..(279): unsure at all n locations
cgccgtgctccaggcgtacttcgccgcctcacacgnctnctcgacatctacagcctctacaccccggtctgcaccgactcccggccggctcgtcggcatcgtcctcctacgacgtccgcggccaccggaaggtcgccgtccacggcgccgcccccaggatcttctccaaataccgaggatggatgctgaagccggcgggctacgacccctgcacggcacgatacgcggagacctacttcaaccggcccgacgtccaggcggcgctgcacgcgaacgtga

SEQ ID NO: 353812 - DNA, 195 bp, Zea mays
cttctttgtgccagaaaggattacttacgcaggcaatggaaactctgaagataatggctgagaatggttgcgtccgaactcatctacctacaacatagtagtcgatgcacttctgaaggccggaaaggctcaggcagcccttgagctgctgagtggcatgacaaatggtactccagatctgattacttataatac

SEQ ID NO: 353813 - DNA, 259 bp, Zea mays
cgccggacggcgagcgcgtcgggtaccaccggtgccggggcagcgggaacggggactcgccgctgctgctggagagcatcaagggccccgcgccggacacgttctcgctcttcaggatcgacgggtcgttcccctccttctcgcacgacggcaagaggatcgccttcgtcgggctgccggggctgtacgtggtcaactccgacggctccggtggccgccgccgggtcttctcgggcaacgcgttcccgacgacatggga

SEQ ID NO: 353814 - DNA, 216 bp, Zea mays
ccttcactagctagcttagctagccagccacctccgttcactccatcgatcgacccgtagccaaccaccaacagctagctagctagcaacaatggctgccgtcgtcaacgcgcgagccgcaactgctcgttgctcggccgccggcgggccaccacgcggtgctgcgtctttgtttccgccgtcgataaggatgaggaagaggacgacggcggcggc

SEQ ID NO: 353815 - DNA, 248 bp, Zea mays
gatgtggattaccattttgatgttgatgatgttgataccccagtctctcaacctcggagcactagcgggaaggaaacaggtgatcaggttggttcattgccccacaaatctcaagacgcacaggtcggttatctagtcaacctgctgagaaacgcccgcccgctgcgaaatcctagcaatccatcacaaacaccaagggctcagtccaccagagtaacctcagcaagctcggtcaccacatctgacgc

SEQ ID NO: 353816 - DNA, 252 bp, Zea mays
ggcggcggcaccacctggagaggggggaatccagggggatgctgctgtctggtggccttggtctgggcctcgcatacgaaagtggaaaatcaggcttgcctgatctgatgacaggaccatcgccatcgccatcgccactgttgggtcccaagccagccacgctggatcttttggggctctccatcggcgggaccatggtcggctccacgggcctcccggcattggtggctggaggagagctggacatggggt

SEQ ID NO: 353817 - DNA, 268 bp, Zea mays
caccgctgctcgggcttcccgccgcacagcccggcttgcctccgccactccgtttcccgccgcacactatccgaatccgccgcagcctgatccctgctatcaagccacgttgcctcgctcatcttccgccgccgcagggatatcgaggagagagagagagagggagagaaaagatgtcatcacagaagagctactataaggagaagttgatgcggcggaaagatgagaaaaaagaagagccagagacacccaggtaccgcgatcgtgc

SEQ ID NO: 353818 - DNA, 248 bp, Zea mays
gttcgacgcagggggagctatgggttcggtctcggtttgtcaggcgaatggcaactacccgccgccgccgccgcaggagaaagcggagaaggtcgtcgaggatggcgttgccgtcgacaggatcaatggcaactaccagccgctggagctggtggctgaggcggggcaggtcgtcgaggagggcgatgccggcgtgaccatggaaggcgtcgcttccatcgccttgctgcctaccggtgccatctccg

SEQ ID NO: 353819 - DNA, 277 bp, Zea mays
tgttttcaacagcttgcattaaaagagatgttttcagctgcttggtttattttgcatgctgcactgatttggtcagagaaccatcactgagaaatatcgagtagccacactgtacattgtgttctaccgtatgttattcaaactatgagttagaattccctagttctgaaggtttcgtaccacagtagttatggtgctagtttcagtaggctaaaaaaaaggaagactgtcgcagtcttaaaaacttaagatgtcaagtagagaagctttgagtgca

SEQ ID NO: 353820 - DNA, 265 bp, Zea mays
gcgcacgtccgtccatccatggctctccctacacgcagcgtcgtgccgctttccacaatccgtgcctcaatccccttccttcgcgcagacccttccatccatggctcgcttccagaaatccccctacctacggcgcagcgtcgcagtccggaatccacccccaaaatcactatccgctctagtgcgatggaaaggaatcataacgcgtgcttcccccttccatcctcgacgttgcgcggattgcatggccatcgtttcgcgcccc

SEQ ID NO: 353821 - DNA, 261 bp, Zea mays
acagcatcgagaggattccaactgttttactctttaaggatggagagaaaatacatagtattaccgggacactgccaaaggctgtttatgtgaaagccattgagaaatctatttcagaacaatgacatatttggttaatattctttggtccatagatattaaactgtacactccattttataccagatagtgcagagagctcaaggtaaaatttgagtttacagcacaagcatcttatctagaagtatggaactgatggtg

SEQ ID NO: 353822 - DNA, 261 bp, Zea mays
gccaccaccacggcagcaacaataatacccttgacgatcaagaagaagcagaggagctcgacctgctgctgcctgcgccaggaggggacgacgtcgttgacgcgcacgacgacgagtgcaaggacatcggcgtcgtgccggacgacgaggccaagaagtcctcctccgtcgcgcctagcgctgccgccggcgatccgacgatggcctcctccgagggcgccgtggaagcgaaggagccgttccagagccctgatgacgcca

SEQ ID NO: 353823 - DNA, 264 bp, Zea mays
ctacggcctctcggcggggcccggcaacagaccgggcagcagcacggcagccatggcgtcgagttcgaccctggatttggcgatgggccccggcgccctcctcccccgcagcgcggtcccgtacgcctccttcgctccaggaaggggaaggagcgcgagcgcaacgaggagcaggaatctggcgctctccgcttcctcctccaacggtgcagcagttccatccctgacaacagattcggagaagaagggcccagtgataatgga

SEQ ID NO: 353824 - DNA, 180 bp, Zea mays
ggggcgcggaggaggaggcggacggtccagaggcccgacgccgtgacgtgacgacggtgcaacgcgacgcacacacgtacatggcaaaattgtttgctttaagtttgttccaacaccttcattgtttagtacagtatctaactcggtccggcattgttgtctcgatcgagtaataaacaa

SEQ ID NO: 353825 - DNA, 267 bp, Zea mays
attgattgtatgatccatacaccagctgtttgattcatcttacctgtatttaatttttttgttgtgcacatggagggcctgtgttagatcataggaactaagatatgggtcatggcagtcaattcccattaaataatatgatgaccaactttgtttgcagttagtgtaattaatgaacactgatgtttttggtatgcaatattttacgttcttaaagttgagcggagattaataaaaaaaaagttaatagaggtagttttgttcgcc

SEQ ID NO: 353826 - DNA, 157 bp, Zea mays
agccccttcctctacgtcgctcgcatcgagcctgcgccaccacctctgccatggccccgaagaaggataaggccccgcagccgtcgtccaagccggccaattccggaggtcgaaaccagaagaagaagatgtggaacgagtataaacaaggggaggg

SEQ ID NO: 353827 - DNA, 293 bp, Zea mays
agtcaggagcgggtgctcgtgcatggcgcgtgtgggtgccctgcggtgaggccagccgtgtggtcggttgcggtggcggctgctgtggtggggacacttctgtacgcccgtcggcgggataggagggaacgggacctgctcgtgcttctctccaaagagaaggataagaggatagcacaactcttgcatcaaattgctttaatgagtgacatcagaagcggcaatgaagcagtgaaggttatcaggaagtcctaatcattttcactgttgaagggttcagttgctatgttgta

SEQ ID NO: 353828 - DNA, 188 bp, Zea mays
ctccaacagttgttctgtttttggctggtacggttgggtatgatgtcctcagatactttgagaaggagaaaagcaaaagctagatgacagcacgaagcatgtttggagcaatgatgagggtagagttagcaaatgtgcttgttatgtatgaagtagcttaaagcagcagatatgtgccagaagatagg

SEQ ID NO: 353829 - DNA, 172 bp, Zea mays
cccccgacgtcgcggaggccgctcagtccggcgagctcacgccgtcactcagggggttcctcctcagcatcgtgtccggtcgggtcgtgctcattggtattgtcggcgccgtcgtcggcgtctccaacttcgaccccgtcaagagggcctgatctgaatccatcgtatcgat

SEQ ID NO: 353830 - DNA, 270 bp, Zea mays
agagaccgttccagagccctagaagcattgctttcgatgaccagttcgatagggtgtttgatgaactgatggagagcaccaggaagctgatcaaagcaacatcaaaggagatcgacaaatagcaggcgaatgtagaagcgagcagggggcagcacgtataggatgaactgcgtagcgagagaaagcgatgccatcagaatctaagttattaatgtgtgattggatcaagtggcctagaagcttctacttctgtgtaagaaagaaagacta

SEQ ID NO: 353831 - DNA, 163 bp, Zea mays
aaaatcttctcaagaaccaaatgcggaaactgtggcggagaaaactgagcgagcagttgcttctagcactggcattcaagaggaggtgaaacggtcaagcatagaatactggaatgagagatttaatcggttagagacatatttagagaactgtgatcattca

SEQ ID NO: 353832 - DNA, 249 bp, Zea mays
agacatcagattgccgcctcctgctcgatctgcagcctcatctgcctgttgaaccgcgcgatggggggtccaccctcctgttcagctcctcgtcgctcagttgccagtagtagtcgctctccctctcctctgccgccgacttgctcgcatccgtcgctgaccgccggagtctcccgccgccgctcttgccgtgtcgtggcagctcgtccggtgcacgcggccactcctgattggctgcttcctcctggt

SEQ ID NO: 353833 - DNA, 148 bp, Zea mays
gatggatgcaatgaaaaagataaacaaggataaggtgaaagcggccctggagaagcggagatcaaaaggtgacctttcgagaaaggttgatgtgatggatgatgatgacctcattgagagggagctggaacatggcttggatttgccg

SEQ ID NO: 353834 - DNA, 290 bp, Zea mays
ctctcatcctctcgacctcgcttcctccctcccaccgtgcccagccttttcctcacgacctcgccgctgactgcggtcccccatggaaccgtgaaggcggccgagcacgcggccgagatggaggcgacggtggtcgtcgcggctgccgtggaggccgaggaggaggaggctgctgctgctgcggcttcgaagccgcagcggtctgggaggaaacggccccgcgcgattgggagtgggcggtaccgctcggtgtccagatccatgaaagagcagcaatccttctgagggga

SEQ ID NO: 353835 - DNA, 145 bp, Zea mays
ctctgattcccttccattcgttggaactgaaactcattgacggcgaaggaaagtgggagctatgttccatccaccaataaccgattgccatcaaccagtttatttatgttcaccggagtaggttatttacaagttgcaacgcaca

SEQ ID NO: 353836 - DNA, 142 bp, Zea mays
cgtgtttgctagttttttttaccagttgcttggtataccgtatacgcgagtagaatgtacatgtacgtatactgtcagagatgggggaatggtggtagggggtgtagctcctggtgtagtggtgttcatattcgtgtgttgc

SEQ ID NO: 353837 - DNA, 284 bp, Zea mays
gggctcaacgccgagccggaccagttcgacgccgacgccgacgccgacgagtcgggatcccccagggcgaccctgcccctgcattccaaggttggatcggctgtgaaagcagggttctggacgatggtggacatggcaagcgggcgttacctctggcgcacccttgttgcgcagccgcgaattcggaatccgagaaggcccggtgacgaatgctcggttgttcgtaaattgtctcgtcctgcggatggagtgccacatagatagacataggtgaaggcgggtgc

SEQ ID NO: 353838 - DNA, 140 bp, Zea mays
tgtgcggcggcaccgtggtggccaacgcgacgacaagcatcacaggatccttcatcctcaccccggtaaacgctactcttggtctcttcagctccatgttaagcggccagtgcaatgtggtggtgaccacacccctggtt

SEQ ID NO: 353839 - DNA, 136 bp, Zea mays
actctctctcatggataattttagtgtatctagcattgtaaacctatgcttgcatgaatccttattcatcagatatgatgggatacttaggtagtgtttggttttagagtatggttttatggagccatttcgtttt

SEQ ID NO: 353840 - DNA, 181 bp, Zea mays
gcgaatggaactgcaaccgccaccacgggccccaccgcggcaaatcgccaccgaccagagaatggagactggagccgtctcctcctgtcctcccgagacccgactcaactttctctcggcacgccactgccaattccccgccagcagcagaaatcacactccgcttcatcttccgctggat

SEQ ID NO: 353841 - DNA, 192 bp, Zea mays
gaacgacaaagaggttgtctggagtgccatcaggcggctactgcgacacctcttgccacccccgagatccatggacgcctgatcctccgtgtcggaatctgaaggacattatcgcgagcacaaactactaccctaagccatcgtactctccaactcgtgacagtgtagctggagtgacaagggtggttgcac

SEQ ID NO: 353842 - DNA, 160 bp, Zea mays
agactgatgatgagtggagctgaaactgaaacaactcccaagtgtaaatccatatgtttcttttattttcagatgcaacttttggtctgtgcgttcattttttttcttttgcagtaataacacaattttgtgtccgtaaatagggactgtcatcttctac

SEQ ID NO: 353843 - DNA, 180 bp, Zea mays
gtgaattacgtgctgaggaagataaagttcagacggtttaggatttagacagtcattatttctactatcgcgatgacttgaccgattctgtgtctatgtttattttggatgatttttactaaagtaattctcatagaaatgggatgagaagttaggcgtttagtagtttgcaccaccttt

SEQ ID NO: 353844 - DNA, 179 bp, Zea mays
caagcatgtgaggccaaaacaatcaatcaaacactgaagaataaaacaactcaccatggagccatacatcagttcgtagcagtggtacaacacatgcaactggtaaaaagagaggatcttgccttctgcttttctttgcttcttggtgaactaaccatgaatgatttgctattctgaag

SEQ ID NO: 353845 - DNA, 201 bp, Zea mays
  unsure (1)..(201): unsure at all n locations
gtcaaggttaatacgctgtactgactcgcttttctacatctgttcgttggtctctgcngtcatacggtgctactcgagttatcactgtgttgagagctggttggacgaaagctcccagtcatgcagtgctgtagcaaaaatcgggtacgctgatggatctagcatgatctaccacgttgcaaccaagataacatataagta

SEQ ID NO: 353846 - DNA, 174 bp, Zea mays
acttggccttctgaacattgctctgattctagagttttgggtgcgaggggctcaatctttttttgtgccacacaacaacttcatgctttagtgtttttccctttctgatgcctgcaattgtgctcaccggtctatggttttcccatctattgcctaattatacctctattttac

SEQ ID NO: 353847 - DNA, 186 bp, Zea mays
tcgaattcggctcagcagaggtggtgcgtgtgctcctgggccggccgccctcctcctccccgcgctcctccccgaccaccgcagtacaagcctcaggggccgcgtctacccggcgatcctccccgctcgcgcccacgctaaaacggaaaatgttatccaggggctcaccgacagggaactccatgt

SEQ ID NO: 353848 - DNA, 172 bp, Zea mays
cggagggagtattaaatttatctaataaatgtaggtgttattaaaggatgatagcttctgactctcgtaggcctcaaatgttgaatagaagcgaacaacaattactattattttttaattatgctaatgaggactagaactcgagacatctacctttgaatcaaaaagttgc

SEQ ID NO: 353849 - DNA, 168 bp, Zea mays
atcgatcgacccagaacccaaccccaatccaacggctgcgagactctcgtcgcgccgccgccgccacctgacagcctcctctcccctgcgcgcgcacgacgagcgcgggcaggaacagccgccaactccctccaacttccttaaaccctagcgccagagcaggcaacc

SEQ ID NO: 353850 - DNA, 173 bp, Zea mays
gattttgaatactagcacctagcggattgaaataatgaagttgcagtctgcgagaactggattgtacgatagggatagacaatttagctgttgtcggactgtgtacatcgttgtaccatcaccggaaatattgtacaccgagaagccatattgtaattacggcatgagaacag

SEQ ID NO: 353851 - DNA, 183 bp, Zea mays
acaggccatgaaaagtgtcaagcaaactcctgcttacaaaaataggttaaaagctttggagtatgagcgaacaggaggaattgctagcaaaagaagggcatcaagcaggtggataagaaagttgaagaagagctaagtaatgaagttgaattgcaaattcatggggttgaaaaaccgtctgtt

SEQ ID NO: 353852 - DNA, 183 bp, Zea mays
acatgtacctatcagccataggattcatctgattgttttgtgtttatatgttccagtttggtaaatatagatggcagtcgccctccacagagaagataatgtctcaaatttaagtgctgaacgttttttgcgggagctatagtacacattgttctggttttgtcatgcataatttgcaataaa

SEQ ID NO: 353853 - DNA, 186 bp, Zea mays
agccagaagaagctgttccagagggcgctgtcagagcaagagatcatcaacgactacatcgccagaatagaagaagcagtttgccggggagatcccatatagtacctagggtgtttacatatatagtttgagaagagataaaaaaaccctacaattaagccctctctatatatatctatatatgta

SEQ ID NO: 353854 - DNA, 177 bp, Zea mays
cggctcgagaagaaccttggcccgacaccatgctcccaatggccgtccaccccaccaccacgccggccttgtccccgcgcgccgcgtctcgccgcacaggcctcccatctcctccctggcggacccctcgtcctccccctgccatcgcatcgtcagtttcaaaagcaggaggctgcc

SEQ ID NO: 353855 - DNA, 171 bp, Zea mays
tggaaagctacaccattgctcttgactttggcagtgattgagctgagtgatattgcctttgctattgactcaataccagcagttttggcgtcacaagggatccacttataatactatcatcaaatatttttgctatttctggtttgcggtcgctctatgtgctcgtttctg

SEQ ID NO: 353856 - DNA, 288 bp, Zea mays
atgatgtgggcttagcaaattgtggttgagatcctgattttgtgcctactatcccaatttcccaaatagatacaataaataactgaataatcagtgtcaccacatgcctcagatcaatccacttctaaatcaagttttactacaatggatgcatttcgtgatagtatagcaacgactctcacttgtgtggaattagcaccaaatatttatgctatattttgcaacatctatttgtagtgacttgtgtgaagagtgaagacaatgattatgtaatatgttactagttta

SEQ ID NO: 353857 - DNA, 183 bp, Zea mays
gttgagtggcagcaatttggctgaacgcccaccggagaacaacgcacttgtgttgcgtacgtcggtcacatgcattgcatctgcatccggagtagcgagttctagacacagcacgcaacagactgaggtagcccagcgagcgagcgagcaatggcaaccctcagcgccgcccccctcgtcggc

SEQ ID NO: 353858 - DNA, 288 bp, Zea mays
attagcgtcaccatgtctacaggagaagaagagtgctaccgcaggataagagaatctggtccgccgccatagccattccgcactcccgtcgttattaggtgcctggggcttggtccgagagcttcggaccacactatcgcttgggtatctggcgaatcggagctctgtatcgtcgccgggtcgcgcggattcttcatcagagtactccttcgccttggatccgcagttcgccgtgacccgtggtaccgtgcatccttatacctacagcgagaacacgtgtcactgcag

SEQ ID NO: 353859 - DNA, 277 bp, Zea mays
gcgtcgatggcattgtggagatctcatggcgtccaggctcgtccactcctcgtcctccaggggactgtcgtcctcgccgacgccgccgttgcccaatcaacaccaccaccagaaccacaaccataccggggatggcctcctggctgccagcgggccggagcccatgaacgggctggatgcggacgaggtggataagtcggcgcccgtgccgtacctgccccagctggtcgtgctgtgcgagcagcgccacgagcctgaggggatcgatgaggctgcg

SEQ ID NO: 353860 - DNA, 148 bp, Zea mays
cggctccggcagcgtagcacctcgtttgctccgagtccgcgactctttcactgagatacatacaccccgagtcgctagcgagaaagtaagcagaatggagcgccacgccgacaagcagctcctcgtgctgccctcctgcctcctcctc

SEQ ID NO: 353861 - DNA, 277 bp, Zea mays
tcggcctcccaaactccgccgccgccctgttgcttccagtctgccctggcaatctccgtcttgcaaaccctagccgctgccatggcatatctagctcccgcgaccgccgcctgcttctctccgcacccccatctacgtagccgcctcttcccggcgccgttcctttctccccgccgccgtcaaagccatcgccagttctgcacatcccatcctctcctccctccgcatggccgcctccgccgccgttctcttcgccagcacttccccggcactctcg

SEQ ID NO: 353862 - DNA, 235 bp, Zea mays
  unsure (1)..(235): unsure at all n locations
tacncgcggcgcaccaccgcaccgcctcgcctcctggtccttatatgaccggttccccacctccgcctccgttccccatctccaccaccaccaccagcaccaaaccctagccgcctcccttcgccgccgcagctgatcggccccgtcttcctcgacctccgatgcggccagggacgacgtcgtctcatctcccgacctgccccccctgtccgcgcacgtcgccgcggcggctgct

SEQ ID NO: 353863 - DNA, 274 bp, Zea mays
tatgctcacggacggagtcttagagtctcggcatccagctccaccatcgcgtggcccagttttcgagatccaccaggcgtccttagaatatggtgcagggctaccgagcagcgagcaacaagctgccgagcacagggcgccgaccgtcgagcagcgagcaccgaggaccgccgagtagtcgagcaccgagcagctagcaccgagcagccgagcagcaagcagagggctgcgaccaccgagcagccgagccgcctcgtcttctctcgtcttctct

SEQ ID NO: 353864 - DNA, 149 bp, Zea mays
cgccgttttctcgctctcgcgctcgccttacctgggatgggatggcaccgcacgcacacgaccatccttctctcctctcttcacctaccgattctgcgcgcatagaagaggcactccttcatcgtcagctgcctttcgcatgtcggcat

SEQ ID NO: 353865 - DNA, 204 bp, Zea mays
gcagacggttctcaatgcatgtaaaactgagcacaccaccaaaatcgagggcaccaccttaaaaaaccctaaataattagtagatatagattcttcaaagctgtaattagtatatttctcatgcattgagaatatatagtctgatctaaaattcaagctccttttatattaaaaaaaaaaaaaaaagccaaaagaagggggggg

SEQ ID NO: 353866 - DNA, 108 bp, Zea mays
gtaccagtgtttcccccatctgaagaagtgaaaggcctgaacttagcaaccagcgctggtttggtcactacgatcgggccagggggcgttccttgtgttgagggtgtt

SEQ ID NO: 353867 - DNA, 258 bp, Zea mays
gttctctctcatttcgtggcaaaacggatttcttttccccaaagcatagatggcctgaagatatagcttggcatccagatggtgagacaatttttgctgtatacactgctgataatggtgattctcaggtttcaatgacaaaccttatatcaggacaaggctccaggtagacagctgcgcttgtttgatgtcaggcttaggcaatctgaggttcatgcatttggttggaaacaagagagcagtgagtctcagtcggct

SEQ ID NO: 353868 - DNA, 273 bp, Zea mays
cgggcgcaaggatttgtgcgagggagaaagaaagggaaggaaaggggataggacgggaggaggagcacgactgcttaccacgggtgttcttattcttccccagcccggtaccgtagatttctcttgctctgtgtagtgtgctttctaatttgtcgtatatatataaatatgtggaaatatattataattaatttcctttgaatttgacttgtacaagtttctataatttttacatgtgaaaaaaaaaaaaaaaaaagggcggccgccgattat

SEQ ID NO: 353869 - DNA, 297 bp, Zea mays
  unsure (1)..(297): unsure at all n locations
tacactctggcctcctgcccggtgcctactcctactcccacattgaaccaccgcagtcntcggccaggtcaccatcgcctcgctgtcacaggaccaggagcgccaccagtcgtcgttcagcagcggcggggccggcgctggtggattgctgggacagcgtgaagcaggagaaccagccgctgaggcccttcttcgacgagtggcctgggacgcgggactcgtggtcggagatggacgacgcgaggtccagtaggacctccttctcgacgacccagctctccatctccattccgatgc

SEQ ID NO: 353870 - DNA, 288 bp, Zea mays
ccagcagcgaggaagaaaagtcagtgcaggttcgtcgcaggcagcagcctgatagtcgagatacagagaaccgcatttactctgcatcccaagggcagttttcacgctgctcgcaccgagcacaacccgcacggcggcctggcgacgctggcggctatctgctgacgcgaggggagacgacgatatactaccgcgcgttcaatgcgacgaggtggacgacgtatcgcgccgctggcccgccgtcgcgaaatggtcctccagccagagctaggcacgaattattggggg

SEQ ID NO: 353871 - DNA, 279 bp, Zea mays
attttccgggttttattttcggaaaaggagaaaaaacactcgccgccgcctgcttcttcctccttatggtttcccttttttgttttagttttgacgcttgtaggttttggtcttggctggcatctcgaggggctttgtgatccctccctccagcccggcggccgggcaatatgtagcagcagtcgtcgtttcgatacctgctcgtaggcgcaagcgtgatcacgtcttatgctactaaagtactggtgctgctgcttgtaattggtgtattgaggagac

SEQ ID NO: 353872 - DNA, 263 bp, Zea mays
atttgaagtagcggctgtttgtttcatactttcagcggtttgtgaacacatatattacataacaaagagaataatagatatgctacaactcgagtagtttatatacataaccccgaagtttacatagggcggaacagctgtatagttgacttcttgctaaagtatccagcaactattggggcttcaatttcagagatgcactattgatacattatctcttccctgttggtgttggcccgtcatcgaagacatgcgccatatga

SEQ ID NO: 353873 - DNA, 277 bp, Zea mays
tgcgggtgaggctctcgaacaggggcggcgccgctgctggccagcatagtggcgtggacaccggtgctgtggacgattccagtgagcctaggaacgcgcagaagcggaggcctgatgccagcagcgtggcctccgtcctagacaagtaccgaagagaatttgccgtcgtcgtcccgtttgctattaaccatgatcgcgagcagcatgactatggttcaactactaacgaagacggagacaaatcggttgaattcgaggattttctccaagtgaatgc

SEQ ID NO: 353874 - DNA, 269 bp, Zea mays
atgcagctgaaccggttggcaacatcgagtcagggcttccgctcaactatgagaagcctagggctcggaatacataaactatatatatagtattctgaatctgtcgcattggattttgttaaatcactcttgacctcagttcttcgctgatgtggatgtcaaatacgatgaggttttcctgtatgtctttcagaacgacatgtgtcctaatgctatctatccgttttcgatctcaagacgcgctactcacgacacgagcctctgcgttg

SEQ ID NO: 353875 - DNA, 106 bp, Zea mays
gccagctacagtgaggttttcagttcctgtatgcacttgctgctgccgtgcgagtagtgggtaggagagcattcttagagtacggtgctgccagcagtcgttcctg

SEQ ID NO: 353876 - DNA, 279 bp, Zea mays
cacaaccacaggcaacgcaacccccaaacccaaaaccctaccacggcggcggatgctggcgagggaggaggcgaagctggagaaggagattgtgcggatggtgctggccggggaggccgaggacaagctcaagcccaattcgggccagtccgtggctgtcggcgaccaccacctctgcgtcggtttccacgacgatgccagcggggagtatcgcatctgggaatggcatggccacgtcatgctgttcgacgacgaggaaggatactccgcagagtacat

SEQ ID NO: 353877 - DNA, 274 bp, Zea mays
cgacccgcagaaaaaatccagtcagcgaagggttcctctgaccgggcgaggctctcatggcggcggctgaccccgagacggcggcggcgctgcggggggaggtcgccgcgctgcggatgcgcgtacaggagctggaggcagagaatcagaggctggcaaggcttgcttcgacctgtacctgcggattcaagtgtttcacaggtgtcgcctaggtggccaggcgtacccagcttgccttgtgaaatagtgatgccttgtcgcctaggcgtccagg

SEQ ID NO: 353878 - DNA, 272 bp, Zea mays
gctggaccgtggtccgcccgccgccggagtttgccggattcgtcttctccgtcgcgtccgtccggatctgaggatctccattttcttcgacccgcccgcggctgcttgtagtactagtacgtacgtgcactgttttcgtcgttgctggatccgaggaagactcgccccatccaagatctacgtttgcaatggatggatctgcgcatccgctgacttactagtgcgccttgccttcgattcgtccaaggatggtaatcgacgccaacaatgag

SEQ ID NO: 353879 - DNA, 271 bp, Zea mays
cacattacacagagctgttcaactggaggcagtttcactttctccaatactcgttttggtagtttatcggcaacctcaaatatgtttgcagcaaaatctttagcgttgtcttgtacagcaagccccggtgcttctttgggtttccctccagttcatactgcaagttctccagctgctcaccgcaaatctgaagcagcaaatagcagtatcagttttagttccatgcagcagtttggcatctgcaggttcttccacagtgcaggacaaatcc

SEQ ID NO: 353880 - DNA, 126 bp, Zea mays
caaggtggagatggttttggtacaccaaatggtctaaagaagacacaaattagagatttgttcttggatcccattgatatatgtaataaacaataatatatcaagatttattgagaatacgaagat

SEQ ID NO: 353881 - DNA, 294 bp, Zea mays
ctctccttcacatcttctgcttcctccacgtaggtgcacagctgtgtttatcgccttacataggtgctgtgttcacaaatcacaggcaagcactcaggttcccggaaagaaaaatcccaccggctacttgttcatttcggtgctcagcctcgtccgggcagtatcttcctagatcagttcgcaccactaatcgcgagctcggcttccagctgcagtcgacggcgtcgtcttcagcctccgcaccctgaagtattcaacgtcagctcgccctatcctcaacaaacttgtcggcac

SEQ ID NO: 353882 - DNA, 163 bp, Zea mays
ccaatttccatttccaccacgaccactctcttcctcgcagcgcgtaccaacccgccgccgtctactgccactccgcctgctcatggcctcccctacgcaaggtgatgcccccctcgcggctccggctccggcggctgacgctacggacgcggccttcgccgcc

SEQ ID NO: 353883 - DNA, 293 bp, Zea mays
attcttcccaaggactcctgtggaggagatggtacacttgcttttgctcgagctgcaagaaaggacaaggtataatgcccatattaattagtgatggaagatgaagtatgtatctactttgactgcagagtgtgttagataagttcatcgatgcaagttatgttagcatcatgattggagctaattgcaaaaagtgctagtcataattaaataggtcagctaaattactcatttcttcttttttgcagcccttaatcattaccgtgcaggaaaatgagacagtgcttgatgat

SEQ ID NO: 353884 - DNA, 292 bp, Zea mays
agattctccagtgtctccttgatgccgtggcgctcctggccgcctctcccgacgccatccccacgaacgccttctccgacaccgtctccgctccgccgtcttctccgacgtcgtcaacttcccctcgacaagagtgcaaagtggaaacaacacatgaagtcgacatggagaaggaaatcgcatctacagtccacatgaaacttgtgaaaaaagaattaaatcccaaagttcctaatgaagagacttgtattacagttttatgttatattgtctatctatttgtgtgaatgga

SEQ ID NO: 353885 - DNA, 294 bp, Zea mays
tggacgggcaggtagccaggagctgagggcaccagcgagggggacttgcgccagatcaggttaggctatctccagcagcagcatctgaggagctggcaccagaggtggggacacttcgactgtgaggagcaggcaggggtcagcaccatgtaagagaaaggggctggcaatggagaccaacatgcaaagcacagatgatgccaatgagaggctgcaatggcgaaagataggaagcatcagaaaggatatgccgaggattaatttggaagagatggcttgactcacaacatgttg

SEQ ID NO: 353886 - DNA, 288 bp, Zea mays
agctgagcttgctcaaaattggggaatcagggcgacagttctttatgatcaatctcctgatttttttcaccctgcttcattgatggagaaacatgggttgtttagcaggctagggaattccatgtgtagtgctatgggcaatgctgattgcatatcagtggaggaagtaggggaagacatgaacacttctgcctttaccagtaagattgatggccaagttttcttgaagcctaacaggccagcacttgttgtgagcagcacaagctgatgaagatttcagcatacttt

SEQ ID NO: 353887 - DNA, 283 bp, Zea mays
  unsure (1)..(283): unsure at all n locations
atttcagaagagtcaaaattcaagcacgatacattttgaaggctttgcaaactcctaaacccctgatgagtctgttcantctggaagtgggaatttgagtagatactgatttgtcccgtagtatggcagatgacagggaggtcttttccaagcaggcactcagaacacaggtcaccgtatgtgctcatgcagtaacaatcatactgaggacgaaggactctccgtttgatgcagacacaattgtaatggagatgtaaaacttcttagcaatcagatggataaa

SEQ ID NO: 353888 - DNA, 203 bp, Zea mays
tcgccaccggccaccgctgccgatatctaggtgttcggatgcacgtgagcgcgcactggttccagtttgtaccatgatgtaaattacttaccgtaccagggttcaatcggcaaggaagaattgttgtgttcaaaaaaaaaaaaaaaaaaaaaaaaaaaaaaaaaaaaaaaaaaaaaaaaaaaaaaaaaaggggggggcccccc

SEQ ID NO: 353889 - DNA, 280 bp, Zea mays
cccagatcaacctgaactacaatctcacatggattctacccgttgatgccgggttctactacctcctgaggttccatttctgtgagatccagtatccgatcacaaaggtcaaccagaggtcgttcttcatctacatcaacaaccagacagcgcagaggagatggatgtcatcgcgttcagcggaggaatcggcaggacggtgtacacggactacgtcaccgtcacggctggttctggtcagacgtccctatgggttgccctccatccggaatacacgacg

SEQ ID NO: 353890 - DNA, 183 bp, Zea mays
gcaagagcaaagagcaacacaagccaaggcagcaaacgacccgcggcgacgcaagaagagaagccagcagtcgtctggatccatcgattgacatggccatggcggcggcacggagggcaagagccggaggttcgcgctggcctgcggggtgctgagccagtacgtgaaggccgagcagcagat

SEQ ID NO: 353891 - DNA, 283 bp, Zea mays
gcgacaccaccgcggggaaaattcgaaagagagactgccgacgtggctgctcgcccgcgccgcgaatcctcaacctaagggtgtccgcagagactcgcggaagccgcacggtgtgattctggggccgtgacgcgtagattcttcatcaagcgccgttcaattgctcgccggacttcgcccttcaccaccggcgcgcacttcctcgcggacggactccttcaccgcttgaccgccggtatgtagtatcccatcacctccgctatcttctcctccacgcgtagcc

SEQ ID NO: 353892 - DNA, 249 bp, Zea mays
gccaccagtcgatgggattactgataccaacccagaggggttgactgctgcatttggcagctgggctcctgcagtggctgcccgcctgcaaaatggtggacttacctgcaaggtgcttgaaaaggaagcctttcagaagcagatgctagagaagttgatatggatttcagctttcatgcttgttggtgctcggcatccaggggctactgttggtgtggtggaaaagaattaccgatctgaggttgcgag

SEQ ID NO: 353893 - DNA, 243 bp, Zea mays
gcacaaccggattggaaagcaaacaaacactccagaatggctctgagcgagacatgattttggaggcactccgccattcacaaactcgtgctagagaagctgatatggcggctaagaaggcgtacaatgagaaggacacgtcatcaagcttttgctccgacaggcctcacatctctttgcgtgcaaccagtggctgaaaataatgcagctggagaatattgtcctgcagctcaagaacaaaga

SEQ ID NO: 353894 - DNA, 169 bp, Zea mays
cgggtccggaagtcagccaaacccccacgtcggcgacgcttcctacctcttctcccaaaatccgcgccgggactcaactaatccacgaaattctgggtgccattgtgatcgtgcttacctggtcgtggctataaactaactgacgtgcatctcatcatttccctcctcc

SEQ ID NO: 353895 - DNA, 158 bp, Zea mays
cgcctccttaaaagactcgttggaaatcaaagctggtctcaagttgaatggtaccgccatgggaacttaaacatggtgatatacaagtctttgctttgatatggaaggggaaatgcgtcgttctagctggaaatgttagtctgcattctagatattat

SEQ ID NO: 353896 - DNA, 254 bp, Zea mays
acaggctgtcgaagtatcaagacggcagaacagggtgagggaatctactgggaatggcgatatggtatcaaaattggaagctgccgagtacaagcttgaagaactgaagtcaaacatggtgggattagggaaggaagtattgcagcaatgtcggctgttgaggctcagcagcaacggttgaccttacagcgtctcattgcactggttgaggctgagagaacttaccatcagagagttctggagatacttgacaa

SEQ ID NO: 353897 - DNA, 168 bp, Zea mays
cgaccctcgtccgtccgtccgtccgtcacctgacggctcccaaatgctaccccgcagatccctccacttcctctacccccgcctcgccgccggtcttcgtcacccgtcgccgtgaccgtcggcgcggtgttaagggtccgtacgctgcacctcgcggggagaaagggg

SEQ ID NO: 353898 - DNA, 170 bp, Zea mays
caaaggtgttcgccgcgttgggagatgggcagaggagaccccagaacctgaccgcagaaaaactaggagatccgcactggccaaggaagagaaccaagagccgcctccccttcttcctcccagctctagagcagctgctgttgaagagcaattcagaggacccatctgtt

SEQ ID NO: 353899 - DNA, 166 bp, Zea mays
gtttggtcattatgctctaggatccttcaacttgacatcacagcaatcgttgaggagagtctagacttttcaacggaggttatggatttggcagcagaggaactcttggagattgtgcctcttggaaaaggcttctttcttgccaactatcctatttcaaatttgg

SEQ ID NO: 353900 - DNA, 283 bp, Zea mays
attttactaagcagagagaataagcttaccaagtcatcagtcatggtcactgctagtgcgattcaggcttttgtgaatctggtcctcacttcttgtgatgctggttattccattgtcatgtttacaccaaattatttcatcacctacatgtcgttccagatgacaggtgctaccgacatattagttggtggttgcgattccaggacacttcattatgatgttgattggttggagaaggttctgaaagataaggagcatgtccctaaacttgttactgttttga

SEQ ID NO: 353901 - DNA, 281 bp, Zea mays
attctttgtagtgaagaatcatgctcatctgctgcagatcagataaagaacgagaatgatgagtttctgtaagatcgaacaagctggatatactccaaacatggaggcacatctcaacgggacggcactatttaacaacccagaaagttttttttattgaaaggtaaccggaaaagtttgctaaaactgaaagatacctgagaaccctgttcttgaaaatgaagttcacatgcattagccggttcaagctcagactgttattggtacgagcatttctttcg

SEQ ID NO: 353902 - DNA, 284 bp, Zea mays
gcggatcctaatcaatctggaaaaaagcagctagcacgcctattctattccgtacctgcatgcatccagagcaaattaaaaagtttcccacagctcgttgtcatcatctgttgttaaatcaaaatgatgtatgcttactcccaagtagtagctgatctctgctaattgtttcttgttctcccattaatgcaacgtacgtacgtggtgcaggaacgcgaggccaaggatgaccatcaccatcttcctcaagataatggggctcgccatgctcgataccggtgctg

SEQ ID NO: 353903 - DNA, 269 bp, Zea mays
gcggtgtccatcgtcacgtacgtggggtcgctcctggggatcgtgctcatgtacgtgtggtacgcgctcagcccggcctgcaggctcaacatcctcttcatcaccgtcacgctggcgctcgtgcagctagctgacttcgtctccatgagctccaaggtgaaggcagggtacgtggcgccggggctgatggggatctacgtcgtgttcctgtgctggtcggcgatcagaagcgagccgcacacggaagtttgcaacaggaaggcagaagt

SEQ ID NO: 353904 - DNA, 139 bp, Zea mays
ttctgttcatatacgtgcagctcagttctgcttgaaaatgcagaggcgtgttgcctgatacatgtcgtttcaatcagtgtttgattctttttcgttatttggttcagcatccgaattgtgagtacagctcttcttgtta

SEQ ID NO: 353905 - DNA, 279 bp, Zea mays
gtcctccacagtccacacgctggcacgctgccgccgaccgccgtcagcagcaacctcgagctcccaggtctctgtcggcgacaacaccttccagagagcaacggtcgtcgtcggatcgtcttccacaggcgccaccgcgagtccgcgacctcacagtcggtagtcggcaccgccgtaccacagaccacgactctctcagccgtaccacaatccacacgttgttgtagtgccgctcttcaccgtgagttcaaagctaggccaccggaacttgactgggac

SEQ ID NO: 353906 - DNA, 114 bp, Zea mays
gctgcaactgccactacttttgcatttaaaagaacaaaagaggcatgtatttttcacaaggcgtgcatgaggttgaaatcaagattttgaatggtattcatatgcaactaattc

SEQ ID NO: 353907 - DNA, 193 bp, Zea mays
tacaggaggtatcaattgcctcctggtgtagtttagagaatcccagaacacaggaaatataattggggatgttgtactttaggtagattgataatcttgagttcctgactattgaattccatttccccctttatttgttccgtgctcatctggaatgctgtaactagatagggtttagctgagttatgactgg

SEQ ID NO: 353908 - DNA, 161 bp, Zea mays
tgcggccaggcctcgctcgtcgaagggctcctgttcggccaacctctcgtcatgctgccccttcgccggggaccagggtcccaacgcggcgccatggagcggaccaaggttgggctgcaggtggcgaggaacggcaaggtacggtcgttcgaccgccacgg

SEQ ID NO: 353909 - DNA, 191 bp, Zea mays
ccacgctaaaatctcgcccaaatcatccccgccccagcaatggcgacctccttcggtttccgaagttccggatcgggggcttccacggcttcctcccccttctcctccaccccatcagccttctccttctcccagccggcgtctgcctcctcccctgcccccgcctttggctcctccctcttctcctcatc

SEQ ID NO: 353910 - DNA, 186 bp, Zea mays
gtcagggatgatattctcggtggtggataaccggatgggctcgtaccctgctgagtgcgtggaagaagtttgctgcgctggcgtagcggtgttgccaggacgagacggactcgaggccatccatggtggaggtggttcgggagctggacatgatatggcgcatgacgccggggacggagaacattg

SEQ ID NO: 353911 - DNA, 193 bp, Zea mays
ttctgccatcattgtggcgcagtgggaccggtttgccactcctaagcaccgggaggccatatgctggcgggttcctgggacttggcttgagtggcgtcgtgcccaccatgcactttactatcgctgcgggctttgtcaaggccaccacagtgggccagatgggctggttcttcctcatggctgtgatgtacat

SEQ ID NO: 353912 - DNA, 196 bp, Zea mays
gcaacctggcggagagcacttgttcatatgttacgccggggttcagattgagagatgcacgtcgtagcttcaggctgacctgtgggggttttggtttttcaagagctgatcactaagttgccatgatttcattacctaggcgcaatttatgaacctttgcttagtcggctagataattgcggccactttttaaagc

SEQ ID NO: 353913 - DNA, 184 bp, Zea mays
agagagatgattacatgtttgacagttagatgtactttgtgactaactgttagccttgtaaatctaccaggtcttatgcctgttcgtggagtgtgatctgatgggtcacttcacagcagagcagggggtggaattcgttacttgaattatagtaagcattttgtcgccatgaaccctactatga

SEQ ID NO: 353914 - DNA, 183 bp, Zea mays
ctcaagggtagatagcgagcattagcgagaatcggaagtgctaggtgggcggtgcgtggccgtggtggtaatgatgtgtaaaacatgttgacgtcttgtggtgtctccacgttctaaagtcgtcttcggatgactgggactgtctgtgtactgatgctatgcacttccggagatgagtatgta

SEQ ID NO: 353915 - DNA, 181 bp, Zea mays
ccagacataacgtaaagtagcgctttaaatttgtacgaaaaatttccacccatattattatactaggtgtgtgcccgtgcgtgcaagggagtacgctaggatgatcatcgatacatatctgattggattttatattttcttggaggtctgaagaaagtttgctcggaagccaaacatgtta

SEQ ID NO: 353916 - DNA, 177 bp, Zea mays
agctcgttgcttcgatcatctggcttcttacctgctagccaacaagcgtgtgcccagctccactccctaaagtctgcaaggctacagctggctgggggagacactgccgctctggggctcccacctgctcaccgtggtgcggcccagcttgcagctgcctgggctcacaccaatgcc

SEQ ID NO: 353917 - DNA, 188 bp, Zea mays
atgacagaaacccctcgattgaagccagggatataatcgggtggataatatgggttggtccggaaaatgtgtagaagcaacagctgatcagcagaagcttgtgttcaaaaattctccaagtaacaggggaaagtggtgcaacgccggtctttggaagtactctcgccacccgaactactttggggaga

SEQ ID NO: 353918 - DNA, 203 bp, Zea mays
acgtcgatgatgccagtagctgcagatgtcacagtaggctcgtatgggacggaactggaaatgtgtgtttggggaagcggataagagaagccttgcagaggatgtgaggtacggtttgagttcagggcagtggctgctaacattgaagatttgacgcctggaatgctaggtcgccgtcccggagaggccctcattgttaactt

SEQ ID NO: 353919 - DNA, 182 bp, Zea mays
ctgttacacagtgggctgttgggttggtggctggcttttcctctatggacttcctcttcctggccccacctgaataggcaccacaccttgaatctgcaccctctggagggcatctgtactcctgtgcaaaatgcccagtccagagacaaaacctcagactttgtgcacctaggtttccttcc

SEQ ID NO: 353920 - DNA, 184 bp, Zea mays
atgtctttaatgtaaacaaatgacaaccagcacactataacctcattggtttgtgtctacagctgggactcttgccttaaaactgatgattgataaacttgatcgatgtaatgagaattgtgagacctaaataccttatcgtctgtcattgtacccacaatactcattaccgttctctattttg

SEQ ID NO: 353921 - DNA, 178 bp, Zea mays
gcggagagtcggagggaacgaaactcagggtctgatttcctaggcgaagctgtggtgggaagggaggaaaaggattgctcgccgcgaagacgacggcggccaagtcggcggagaaggacaaggggaagaaggcccccatctcacggtcctcccgcgcgggcctccagtttcctgttgg

SEQ ID NO: 353922 - DNA, 205 bp, Zea mays
agcgagagagatatctgaagtaggtgtagaagcagagggtggagaggatgctggtgatgcaaggggctcaggtgaggcaacaagtgctgatagaggtgcaaatgcagtggatagtccgaccagagaatcagagtacgcattcgaggaagagaggcctgggcttcttggccacttgtggccttctgcgatgaggatcttctcgtct

SEQ ID NO: 353923 - DNA, 100 bp, Zea mays
tatccagtgggcctccggtcaagtgatgctgacccacagtccatgccacagaaggcgcacaggcttcatccgagaggtcggcctcatcaattcagagcat

SEQ ID NO: 353924 - DNA, 102 bp, Zea mays
tcagcaatccacacgagcacgtcgacgtcacacgggcgctgcgcacatacacaccaagcgtcggcaccaatggcgtactaccaggaggtgtactactgctcg

SEQ ID NO: 353925 - DNA, 113 bp, Zea mays
acgacaccgaccaatgtttttcaatgagccatagcctgggttgtgcgtggagccttggcgtggaggccgcgtgtccaacccatgcagctgtcgaccgaaacacgaataacaat

SEQ ID NO: 353926 - DNA, 112 bp, Zea mays
agtacttgacccctagtagaggtgtacatctggctgtgtcgggcttggttggcatgacataatgcgtggatcgtgtctaggtcggaagcccacagattggtatggtatgact

SEQ ID NO: 353927 - DNA, 288 bp, Zea mays
acatgacggcagccagaccctcgttcaccgggacatcactgtccaacagcatacctgctacgagtccggaattacgagccccggctctctgatttcggcaccgccaagctgctcggctctgcttctaccaactggacttctgtagcaggcatcatatggctacatggctccagaactggcatacacaatgaacagtcacagagacatgcgacgtgtacagcttcggggtggtcgctctggaggtgatgatggggaagcatctggcgatctcttgtcctcgctgccggc

SEQ ID NO: 353928 - DNA, 290 bp, Zea mays
atcagggtattgttggcggcgaagggatcccgacgatgctcgctgggggtaagcggacgctgaagctgacaccggcgctggcctacggcgacaagggtgctgggtgcagagggtgggagcccacctcgtgcgtcatcccgccgaactccacgctcctcttcgacgtcgagaacgtcggcagagccaacggctgaggtctccggaaactctgaaagtctgaatgcgcgaggccaaggttcagactgatccatgtggacaacgatcgtagttgcccgcgcagtaagaggttt

SEQ ID NO: 353929 - DNA, 138 bp, Zea mays
gaactcctgaagcaatggcaatgagagctctaccgctgaccccttccaggagctcatcgtttggtagtcaccaaaccatgccgagaggcggcggccccagattagtgagaggttatgcgcagggagacgaggagggcg

SEQ ID NO: 353930 - DNA, 282 bp, Zea mays
ctaatctggtcgtgcaaccccgattcccccgctaacttgcgcacgatcggggctactcgtggtggtctctgttgggcgcggcgttcccgatgatggtggcgggtcagttcatccgcaccaagcgccgccgcgacgaggagcagcgcctcaaggcggcgcgcgggctggagaagagctccgactaggtcttcgtctgcgagctcgtgtgcacttccaagcgtatgctcaacaaggtcggggccttctcgaaggacaccaaatcggagacctgcgtcaccgtgt

SEQ ID NO: 353931 - DNA, 250 bp, Zea mays
atcctgcatcaactagtggaccagaagcgggatttgccaatgcttcagcggacacaaagagagacttggcagacagaaccgctgagctggagcgagttgatagagtcaaccactgcttacaggaggactgggaaaggagtgctgcgatgaagaagcagcgagacctggaggacaaggcttttgaacgggcttcagacaagctgtttctcctcgaccagtgtgcacagtatcggcgctgcaagcaatgcca

SEQ ID NO: 353932 - DNA, 282 bp, Zea mays
gtgtgatgcaatacctaccaatagcacgcaagtgtatcagctggtatgcatgcgatggcttgaagctgacacgctcagtacattctctacaactaattcttgttgtctacttgggaccaaccagttggttggtgtgtcgtctaccgccacggctgcattccacatgtcccttctttatcatgttgctcatcttcgatagatgccatgattcagtgaattaagcatttatatttgagaaaggggcccggttttatgaataaaaaaatgacaggattgtatatt

SEQ ID NO: 353933 - DNA, 274 bp, Zea mays
ctctgcagttgctcttttccagaacaaggtacaccaattctgttggtatttggatttggaggattacctgtgctctgatgacttgctgtcatattagtagtttgtattccgtatcaaataatggaaaccatatttactgaaactcacatgcgtacttctattctagatttcaaactggttcatcaatgcccgtgtccggctgtggaagccaatgatcgaagacatgtacaaagaagagcttggtgaagcggagtagactccaatcttctccgac

SEQ ID NO: 353934 - DNA, 247 bp, Zea mays
agaataattcatttaagaatgtattctgatactggaatcctacttgctcaagacattaacacataactgtattacctgtggaaatacacatttcctcaaagccaactcactaataaagcaagaaaatttatatcaaaacaacaatgattaggtttgactatgcaattgtgagttgatttctaaataacaaaggtatggtgtttttcatccttttggttaaacatatatcctttatatatatgacatt

SEQ ID NO: 353935 - DNA, 279 bp, Zea mays
agttgatcacgtgctatggaggactagaaccgagtcgaccacaagatgttgttaagcgcgggtttcttcgtaaggtgatgctgatggataaacttaaggatggatggcctgatcaagtgtcaggacaaggaagatcatcaagagatcgtcgtctaaccaacactgacttagtgttattccaggtctgaagtcagagtacatccacatatctgcatgctttgaacacgcggcacgacagaaacacaatgaaagctaaagtggtcagggttttggagtttg

SEQ ID NO: 353936 - DNA, 277 bp, Zea mays
taatctgagcggtgggacaaacgaccatccaaaacatcggttcgcaaagaagacctgccacaagcgaaccatatgagtggtgggacaaccgacaataccacacatgggccaactatcctgatttcaagcacaaggacactcgtgagcacatttggcttcgttcacatgaccctccttgggtacgaaagcagcttgaattatatgacctggaagtagcagcgaatggccataggtgtacaagtcgactgtccaaaaaacagaattggaaaacccaaga

SEQ ID NO: 353937 - DNA, 315 bp, Zea mays
acgagcgtacactaggcattcggaccgagatagctttagttatccctggcgtcattgattcagggaagccagcaagcatctacacacgaagcaccttgcaaaaccttgttgctggtcagcagttttcaaaaacatggatgaccaagtttgtgggctgatattagcttctcagactggcactatagaaatgaggtttgggccagatatggctattgttgatgagccctctttgatgtcattcatgcgctggagttcacaagacaggcatggaaaaatccacaagctcctcaaatggacagttcctttggtaaatgg

SEQ ID NO: 353938 - DNA, 260 bp, Zea mays
gtcaatgacatgtggggttcatgatatatatctaaagtttggatcttttaatggtatatatccaattgttccaaaaaaaaccctactgctggccactcccacgtgagtgcagtctgcggaaggaattgaagcaaacatcaaaataattctcatttaatatttttatttattcagtgtaatgtctaaccatcaaggcatctcttgtctgcactgtacagtaatgtaccaccctgcctgatcaaatgatttagagctaggat

SEQ ID NO: 353939 - DNA, 142 bp, Zea mays
gtattttctgtggcagttattctagacgttcaccaggtgtaaaagcctgagagagaaagttaaaggtactcaagctcccagtgcggtgctaccacatgaatcacattttaccaataggggcgatctgtcacctggaccctgg

SEQ ID NO: 353940 - DNA, 261 bp, Zea mays
caatatgtctgatattcgtcggatatcgaatatccggatattttatcggataaatcttctcggatatccagatatcttatactggatagctgtgtgcattttgttgattgtttgtagaaagaaattaataatacacaaatagcctcaaaaattcatgaaaatttatggaggcataccatatgtccacatataatcctccaaaatatttggaccataaaatccacaatattgtagtgtttctttcatttcactttcacttgt

SEQ ID NO: 353941 - DNA, 256 bp, Zea mays
tctttgggaaaatagagttcccaaactagccctaagatggaaagggaaatgaaatctcgtggacttgatgtactgtactacgctaatgcatcctctatgcaaaatgttgtactttgttttggcttgtcttgtgttttgttgcatcaatttcactggcggtggaacttgtttgtcattacatggtgctgcagactcagcatttcttattgatcgtctagccttggtgcttacatattattatttgtagtccctggat

SEQ ID NO: 353942 - DNA, 244 bp, Zea mays
gggccaaggccacgtgctcgctgtcgccgtcgccgtcgaagcaggtgtggcagagccggctgcccgaccgggctcgcaggaacctccctggcctcgtgcttgcgatctgaccggatcggatgcgaatcatgcgacatataggttgttgcccagccaactggcggtgtggcttagcttattatgcctgtgcatgtctgcaatgtggttacaattggacatggatgaatcaaatgagccacacatt

SEQ ID NO: 353943 - DNA, 169 bp, Zea mays
ctaaaacttactttcaaacattaaaagttatgagtttagttgaaaacttggctgcaacagatggaggatcgattagtaatcatttcaaagtgaaaagaaaaaaattgatacactttagatacacaaaataattactgagtgaatgtaaatgccagactctgggcttatt

SEQ ID NO: 353944 - DNA, 175 bp, Zea mays
ctcccttggactgagtagtagtgtaatggaggtgcccagagtacggcacctcccttggactgagtagtagtgtaatgtacatcagccttggatggagctccccactgccacttcacgatgtccagcagccttgcactgaccttgttctgaattgagggagagtatatgttacact

SEQ ID NO: 353945 - DNA, 194 bp, Zea mays
tgtttcattgcaaggttgacaatattttgaaaatgtgatgatggcagaacatggacccaaagaagatgacacttgagcgtgcactcaagcttctgagtagtaaaagtgtcagacggattggtcgtctaaaggtgaaggtcgaaaagaaggaacccattgaatggcattagctgagcctgcctgcacttgtgtac

SEQ ID NO: 353946 - DNA, 178 bp, Zea mays
caggaaactgcctcttttgtcagtgaaataatagaaagattgtgttagttaagttataactgtcatttgtttgaaaatgttcgagactgcccaaatagcttttcaactgctggacatatagctgagatattgtactttctagcaatgtttattcacctttgattacattgttatgtga

SEQ ID NO: 353947 - DNA, 276 bp, Zea mays
agtcatcagcacaagatgttcatgagtatctggtagatgactatgaagactcgagaggcttttaaggagacgaagaagcttctagcaccactgcctatcagtgatgatctgaaggcaactataacatcatcgaagcgagagtggggcacatcctggtggcagcaatattccatcctcttttgtagagggatcaaggaacgacgacatgattacctgagttggatgagaatcacccaggtcatagctacatcggttatcttaggtttactgtggtgg

SEQ ID NO: 353948 - DNA, 273 bp, Zea mays
gttgaatagagcttgtttgatgttaaagtgggtaacgtaggagtgagcttgagacacttgaactccaaactctcctggaggtttccagtagcactactgttcctacaagggcttcatttttaacttcatctgttttgttaacatcctgtctttttgaggtgatctcagaggtgcatcaggttctctcgcactggggaggccacttgccccgatagttgctcagaaaattggtctgggcagcctgttgtcctttgtccttcatgtatgtttttt

SEQ ID NO: 353949 - DNA, 145 bp, Zea mays
gtattcgatgattgtatagtcgatcttgcagtacacggagaaaatggtggcttacaccagttacgaaaagaacaagtggaatgaaactatcaatcttacacatacagctttgttgaaaatgtggacttttagtgagaagaaacaa

SEQ ID NO: 353950 - DNA, 265 bp, Zea mays
atctactgcagcttcagaatagtgggggaggaattcacaaaggaagggtggggctttgtaagttcatcgtgcttgttctctgtcttcattcacttcacttcatttgggcattcctgccatcgcatctcagggaagcacaaatccgtgcctggcactgtactggaaatgatttattctgctccactcttttcctttgcaggcattccagagagactcccccctcgctgcagatttatcgacggcaatccttccaatttcagagagt

SEQ ID NO: 353951 - DNA, 271 bp, Zea mays
cggtttgtgggtggtttatttgtcttccatttatacatgatgagcattaacgtggtaagtccaacattgactccaattcttatctcgtcgatgctggaagcacaattcagtagagatacatgaacagttgatattcaggagtataatctctgggtagacatatagctatttcatttgatggtttatcgagtaacattgaatttgccaagagtatcatactaaagggggtcatgtcgaagcttgttctgttgtataaagagtatgctcgaaa

SEQ ID NO: 353952 - DNA, 259 bp, Zea mays
gtagcctgcggaccatttcagcttcgcgcctttcaggaaaaccttcgaccaggaggttggtataggtggtgatcaggtgccatctaatcagcttggacgttcagagccgcatcatgccggcctggggcagcagccacacggcccggtgctcgcgacgaagacggctgtgcctgctacagctttcctgatcagtaggccatcgaaccctgtctcgactatagtgccacctgcaatgcagcatgcatcagttgttctcgat

SEQ ID NO: 353953 - DNA, 266 bp, Zea mays
atgattcaaactgatcactttttggtggtacaagaaaaggagacaatgagcagagaggagtatgctttgcaaggactcatgttgcatggggacaagctgtgttgcaaccatgggcaagaaatgctttcagtcctggacaagttgagcagctacatcaaattgattctgctgcacataaggtcgctctggagctgggtatcaatttaccatctgatccatcagttcggatgcaatgggatccgggcatcagtacggccacagcttgg

SEQ ID NO: 353954 - DNA, 266 bp, Zea mays
ccaggagaaaggaaaaggaagcccagctctctctagcctggagccgagaagccgagggggcgaaggagcagcaaggcatggaggagcccgttccggctgatccccccaggattttctggaagtcaaggagttcagccaatggccggagcctgcaacaagagcctgacaaagacgctaccgaggaaactaacgagcaggctcaagaggaacccatgaagaccgacgacgcaacggacacagcagcagcagcagcagctacagctgag

SEQ ID NO: 353955 - DNA, 238 bp, Zea mays
cacctaaagttgtttgtccattcatgacccatgttcatgtgcaatagctacaactttcaaggtatttgagagattgctcaaaaagtttgccagatctaaagcatcagttgaacggtcataatggtgaatcaacaaggaactcggcggggcatctctaaaaggttcagcttggttgtaatctataaactggaggaatgtagataccaatgacgtcttactccatcagaagctactactc

SEQ ID NO: 353956 - DNA, 283 bp, Zea mays
ctctcagcgagtggaatcgatggaagccctgcccatactgagccgtaacccaagcaggagcacagaccgagactgggagaccgcgtcggcggcatcttccctggcctcagtggccgagtacacaggtcccaagctctttaaggagcccagtagtaaatcacacaagccgattattcacaatgccatatcccattgctgcctggctggaaaagtgaacgaaccccacaagaattccatattggaggagcgtgagaagtgtgatgcaatcactacatcatactgt

SEQ ID NO: 353957 - DNA, 118 bp, Zea mays
gtgaaagttctacaagcactgcacgcagtttcaaatcatcttcggacgtttctggttgatcatagtgtccttccactctttgacaagactaatactacagtgcaccaagatcgcaatg

SEQ ID NO: 353958 - DNA, 230 bp, Zea mays
cttcctgcgcgaaggctccgacggcgacggcaagaaggtggatccccgctgccccaacgcgcccaacccgttccacgtctgcaccgaccactgcctcgccaagatatccgaggccggccgctcgtcggagggagccaagtcgccgatctcgctcttctcccgccactcccgccgctcctcctcgcactccgaagatggcagcgtgaagtccgcggggagcaagaaggtgg

SEQ ID NO: 353959 - DNA, 100 bp, Zea mays
ggactacttcgagaagtgaagcggttaagatcctatccatcatccctggtgctgcgctgcgttgcgttgagtgcgtgatcgccgcaatcgtacctttgct

SEQ ID NO: 353960 - DNA, 170 bp, Zea mays
gttagttctagatcgcgagcggccgcccttttccccttttgtatagacgctaggttcctgtgctatgctttggaaagtattcctcagctggacccttgcctttagaaagcttactatatttaactatgtacccttgagtttaataactcgagcagcataataatctataa

SEQ ID NO: 353961 - DNA, 173 bp, Zea mays
gtccagcaacttcttcaaggacaggaagctcggcgcgggccagttcggggaggtgtacagaggtgagctgccggaccctctcatgccgccggtggcggtgaagaggctgacgaggcagatggaggcgcggacccggaaggactacgtgaccgagatcatgaccttgggccggc

SEQ ID NO: 353962 - DNA, 225 bp, Zea mays
tgtagcaacatatcaagctactaaaatgactttagttgatgtcaggctgttttgcaccttctgcgtttctatcagatatatcatcaggtgtacgtgttactgtgcaatgtaccgtctgttcaggaaggatttgtgtaaatgtagtaattcaatcgtagaaaacaaaaaaaaaaaaaaaagggcggcagcctacaaggaacctcaacaacccggaaattatttccg

SEQ ID NO: 353963 - DNA, 109 bp, Zea mays
ctgagatcgcctcggacgtggaactgcccgttgacaagttcaacggcctcgacgagatgatcccgacaggcgctaggttcaacgacgaaggaatgtaccgttccatcga

SEQ ID NO: 353964 - DNA, 179 bp, Zea mays
gttaggctcattcatcgaaacgcactcagagagaaggtaacgaaaaagattttgatcacatcatagcaggcaggatcccttacctgattatgaattatcatcctacctttaaactcaggatatgactcaaagtcttacccatactttacctataatgactagctacgattcttctccat

SEQ ID NO: 353965 - DNA, 126 bp, Zea mays
atcggcattcggctcgacgtcagcttgcaccgagtttacagcatgaccgtgcgcgactcgacatacgcagccatcactcttcgtctgaagacgttactagctcattcgttgcatgccacgaacaac

SEQ ID NO: 353966 - DNA, 283 bp, Zea mays
ctgatcctgcattctaccgcgacgcctaaagtctccagtatagggcgaggtcgacccatagtcccagaacgaaacacatacgccaagaatgagtaaaggacactaccaggagacgcggaagcagaagacgcgaaatacgattcacgcagagaggacgcaagtatcaacgaacgacaaggtacattgaactccatcaatgaaacgcaacgagcacgtcaacacgaaggttgagcgtgccttcggcaagtacaagctcgacatcaagaacaacctcgaacgaggt

SEQ ID NO: 353967 - DNA, 155 bp, Zea mays
aagaaggacaggacgaggatgacatggatgatgccccttactatcaccctatacatatagtagatgctgaagtgcttactaggaccttttttccctaatctttttaagccccatctaagtacactgtcctctctatgatagctatataattgtgt

SEQ ID NO: 353968 - DNA, 124 bp, Zea mays
gcgaatgttactttgtcaaagcatgtataatcaatcatactactaactatggagacatgttcatatgagagatcggcagcagcacatctttgcttatataaacaacaaaaaacaacaaaggggg

SEQ ID NO: 353969 - DNA, 284 bp, Zea mays
ttctaccgtacaagcaagagctcgtcgggctgttcgccaacgtcagttggctgcgccggagctaccacccgttctaaaacgcgatctgtccatgccttccgacctccgtcagtgggccaaaaagtaaaaaaagatgatatcttgctcgtttttctgtggataatactgcctatagtactgtgcactgtttttttacagtacggcggaagcagtagatctgcgtattttctctctaagttatcggcttggataaaatagggttttagttttaattaaaaaaatag

SEQ ID NO: 353970 - DNA, 102 bp, Zea mays
tgtatgtaacctgttcaaagcagaggaattacatcccaatccatccatgtgcaaagcagaggaattacatttatacacggatggattgggatgtactctgtt

SEQ ID NO: 353971 - DNA, 264 bp, Zea mays
tcggggatgtggctgtaaactcggtgggctgtcggtgtgtccagggggaaaaaaagagagaaaaggcagcgaaagaaattgtccatacatgaagaagcccagggtcgtcgtctgtgtataggaagggattaaaaaagatgttttgttttcttctgtctttctttgctttgcttgtgttcccgttttgactatgagaaatatcgggtaaacacaaaaaaaaacaagaaaaaacaaaaaacaacaaaaaaaaagggggggccccca

SEQ ID NO: 353972 - DNA, 161 bp, Zea mays
cttgcttaattaactggttttttctcgtggctactagctgagaaagtcacaaagatattttacgtgcaagcagtgttatgtactctatctgtccttgctattgctgtgagagaaattggcatggctatgtaaatctaagaaaataagagtttgtagatatt

SEQ ID NO: 353973 - DNA, 226 bp, Zea mays
gcttaattctcatcgtgtcgtcgattccgccggctatcgtcgttcgtcattgcgtcgcgtgtgtagctctatataagtcaccctcctgtgtcgccgtcgttccgcgcgtcagctagaaatctcaagaggcgggtgacgaaggagccagcagtgtggtattcaccaagtgcgcgacataaatctcggacatccagagcgactcaagttcgactcgtcagaattatta

SEQ ID NO: 353974 - DNA, 264 bp, Zea mays
gtgcacttctagcatgcatgatagcaatcgcaagcttcttcctcagccactaacctctatgtacattttcagcgcaagatcattgtcgacagtagtatacataaaagtgtacacaatatactgaacaaacaaccaagacacaagtgaatgtaatttggcaaagtacagtaagatccatgcataaacaaacaccatatggcatgtcttaaaaaaaaaaaaaaaaaaaaaaaaaaaaaaagtaaaaaaaaaaaaaaaataatggtt

SEQ ID NO: 353975 - DNA, 270 bp, Zea mays
ctcacaggtgccatggtcctcctcgcccttcctctcatcatccctgcctggtccagttgctcagatggccctgaccctgcatatgatgacccacataagccactcctgatcagtcagatggagtccaatgccaggatgcaaaagccaaaggagaaccagatgcaggtcaagggccgcctggcgacgctcggtgaagaacacagtgcaaagaaactcattcggtgtgtggacttctggctctactacacagcctacttctgtggagccact

SEQ ID NO: 353976 - DNA, 267 bp, Zea mays
cgggacggggcggctggacaacaagatcgcgatgtcctactgcgacttcgagtccttcaagttcctggcccggatgcacctccgcgacgacgtcgtcgaggcacacggggcgcagtgcgaccgtgttagggctttgctccaggaagtgaacatggtgcccgtcgacgtcggcgagcacctcacgcccaggagccccgacgaattcgaagacgctggaccgtgcatcgcgaggctggtcaccgcgttggagaaggccaagaaggaggc

SEQ ID NO: 353977 - DNA, 276 bp, Zea mays
catcctcgtcttcttctgtctatccatggcgatttggcgtccccacctgtcccgcccccacccttctctggctacgtcctcgctttcccttcctcccagctgcctgcccccccttccctaccctagctacgcacgctaccagctgccccccatccatgccgtccaggaagctggtgcaggactccaaagggatcgcattgatctcttctcacctgccgcctgctgcatgcgctgcgcgttgccgcacaagatcagtgccatccctttggcattttc

SEQ ID NO: 353978 - DNA, 249 bp, Zea mays
gtcttctgaagaacaaaaagaggggataagagctttgcaaataaggcatgcagaacacgctcaaaaggaatgcttggggaattcatcaatagatggaaataaaacaagcatggagcatgctcatatatcatcagtttcctgcgaggatggtggaggtgcactatgggatcatttttaggagggaggatgttggaaagctgcacgagtacctcacaaaacagtccaaagaatttcgccatatgtactgtt

SEQ ID NO: 353979 - DNA, 263 bp, Zea mays
cgagtgagcaatcgtgcacggacagaagcagacgcaactgcagatgatggtgtctgaccaaatggtctccgaccgaatacgctcgctcagcgagtcaggttcttcttcaggccagggaagtcccattttcatacaagaaaccagctcgctggcagaaccgtaccgtctaaacctatctggagacgcgctcgaagcttacgatgaagcttacgaagagttcatgaggatcgcggactccccttcacaccacaatgtcaaacggg

SEQ ID NO: 353980 - DNA, 271 bp, Zea mays
gtgttgcggagaccgttgtcacctcctcgtttgagcccgaggcggtcaccagcgctgatttaggcgtgtcgctggtgggcgacgacgagagcacggacatgataccgctcaagttcctccgtgcattcaggaacaaggtgaaggcggccatggcgatgctcaggtcagtggtgttgtagtgcaagcgctttggcaaccatgtgctctaggatgtcgacatcggcctaccggagctggagcaacgtgatgttcctccacgtgagttggctga

SEQ ID NO: 353981 - DNA, 268 bp, Zea mays
gggcatatgtcatacttctggaatattgtatctgcttatgatttaatagaagtaggatcactaggctacttatcctcaataggtcaataatgttcttggctgggctgggggtaaacgaccatgttcaaattgttaattcatttttaaggcagcatactttgggtctgcattttaggtgctgctattaatgagttttgaccctaagttctgatagaagccatttgctgatgtattctcagcttcatgaatggatgttaaaaatgccact

SEQ ID NO: 353982 - DNA, 187 bp, Zea mays
tggtttctctgcaggagaaatgttgtagatgtcagatttgctttatgtaaatgtaaactctaaaaggtaataagctacatgctagaacgacaggtcattttgattcgtttatcgaccaaaaatattgattaaaatataggaaaacattaaaatgaaaaaaaaaaaaaaataaaaaggaagaaaatga

SEQ ID NO: 353983 - DNA, 99 bp, Zea mays
ctctgaatcttgactgtgtccgttcattttcgcttgtttcacactgaagtgttataagctcaactttactgcttttgtcttcttgtgaaacttgagttt

SEQ ID NO: 353984 - DNA, 267 bp, Zea mays
gtgaatccgcaactccatactccaaccagcgctccttcctcggcgcgccttcagccatcgcacagctgagcagtactagtaacatccagtttgctggtcaatcaataaaccactcggtgtgctcgtgggaggaagaagatggaatccatagatttgaaggtgcaggtggtagagtcatcatttatagcgccgagcgtgctgacgccaagcaagggcctctggctctcttccttggacatcctgctggtcaacataggccacacccca

SEQ ID NO: 353985 - DNA, 260 bp, Zea mays
ctccgttctagtgagaacctcgagatattgtcttgagctcaagtattggtcttgtgtgtgcgtatttgctgtggatttgagtgtgttgccattcctgatgtaacctgtttcccttccgtgttggtcggctgcggggcttcttgtttggaagtctttggagttgctacgttttttacccgccacttggccgacttgtggcacttgagtgttcatctccttggcttctagaccccgttagagcatcaccagcagctgcggga

SEQ ID NO: 353986 - DNA, 260 bp, Zea mays
tgcacgctccccagcgacgtaaggcgtcctgctcgccttactccgcacctaaggcgattgggggagagtctgccggtggcggcacggcgccggcaaaggagagaggagcgaacataaggacaaagcggggggatggagagagagacgctggtcgctcgggagttttgttgctcccagggaggagaaaggaagttggcttaacctaatcttaatgggctagttgggctgatttgttggctggctggctagtcttttttctt

SEQ ID NO: 353987 - DNA, 258 bp, Zea mays
gcgtgtttgagctgctggtgcggtggtcagcgcgatgcccaaggccaacggccgaacccggaggcagaagtttggttacagtgtcaaccgaaagcgtctgaaccggaatgctcgacggaaggcagcgccgcggatcgaatgctcccacatccgacatgcctgggaccacgctaaatcggtacggcagaacctggccgatttttgggttggctgtggaccccaacagggcggtgcccctccgtaagagaaaggtgaagg

SEQ ID NO: 353988 - DNA, 255 bp, Zea mays
gtgcacattcgcttcaagctcttcgccttatctccagcagcagcagcagttccagggttctctcaattagcagggtcttatgaacgcccccctccaatgctatgttgtcaggtcactaccaagcttgtctactaaaccagcatcaagttcatcttgcgagctttggcgtttggggttctgttactgttactgttaggttcaggtgaagccttctttttttcctctacccttcatgatggatcatggatgcacaat

SEQ ID NO: 353989 - DNA, 258 bp, Zea mays
tggctaaattgtttcatgacaatcaggctggaatcttcctccgttcggtctccagcaaatgcagctacatttggaccttctgttgatcaactgttgcatgatctaaggttcctctacgatgctttgctgaacccggagtccatgttgtcttcacaaccagaggtggttggtgcatcagcacacagcgcagagcaaagataattgattgcaagcagttcatcaaacattatgatgagcatgctctgcggactccttcaa

SEQ ID NO: 353990 - DNA, 149 bp, Zea mays
gatctctatgaggatacaaattcctgcaacatggtcaaggtacaatggcttggcaaagctgatgagtcctgagtgcccagcactacgagaagttcaagagtgatactagatagagaaatcaaaaaccttatttttgctatcggcagatt

SEQ ID NO: 353991 - DNA, 244 bp, Zea mays
cccttttgcagagacatgtatggagacgatgacccttcacgccaaccagaaaggtgcaatgatgctgctggcgcttatgcacaggcatgcatagatgttgccacagacttgaaccatccagttatagacatctggaccaagatgcaggaatttccagactggcaaacatctgcaaaactataagcaagcgtatattccgattacgtctgtgaccaatgcaagatccagatgcgctaagtgagca

SEQ ID NO: 353992 - DNA, 192 bp, Zea mays
ttttaggaagagccgggagtgggttggatcagctacaaaatgaggtgcaagtaactggaaggcttcagcaacaaaaatcttgttgggttaagggtttttgctcgcatcataatgatacactgctagtttatgaatacatcaagaacgggagccttgacactattctatttgatgatagggaaggaaatgcac

SEQ ID NO: 353993 - DNA, 189 bp, Zea mays
cccattcctcctcctcttcctactcaacgccacgatcgaagaagagactcagtcaattttcgccttgctctcctcttcgacccatcgtcgttcctgggatcagcatcgacgagcaggatttttccggctgtggaggattactgctgcttgacaaatccgagcgcaaaggttgcttcctgacgcgttccc

SEQ ID NO: 353994 - DNA, 202 bp, Zea mays
  unsure (1)..(202): unsure at all n locations
ggcgcatgngcggctccgaacacgcatggcctcgtgtcggtccctaatctttcggcgccatgctcgccaatggcccttgttgcgcccggagtctccagtcacacgccctcgacagcagacgcatggaccgccgggtccaagagcgccgccatcctctgtccagcgctgggaggaaacaaaaaatcacgcggcggtctgcacc

SEQ ID NO: 353995 - DNA, 189 bp, Zea mays
gggattcaggctttcttaattcacaccacccaggtttagagggctattactattgggaaggttaaagaactgctctgttgcatgagttcataaaacctaagaattcaatttggagttctttagttggtcccacttaaaatgtacagcttgcttagctaggaggaaggatcaggttgctctaggtagttg

SEQ ID NO: 353996 - DNA, 190 bp, Zea mays
aacgaaatgaagaatctgaacttctaattgagcagctcaaggaagagcttcgagaacaaaaagtaaaaggcaaaagaggatgcggaaatctcacccaagaaatggctgaactaagataccagataacaggcatgcttgaggaagaatacaagcgtcgatcttgcattgagcaggcagctattaaacatat

SEQ ID NO: 353997 - DNA, 284 bp, Zea mays
tacgatgcacatgacttctactttctccacatcctcatcagcatttgttattatcctctgttttgttttgtttttgactttcgataatagctatcctaatgggtataaagtagccatagttatttctgtgttctaattttatcaattctaaaatcttggcactgtgaacaagatttcatctcttacaaatgcttgtggctggccactaaaagcctgaggaatccagaatgtctggccctcatcttagctggcagttggcaccaaggtagaaaccctaaatccct

SEQ ID NO: 353998 - DNA, 229 bp, Zea mays
tatagtatcgcagcaccgggaagaatggctagtttccattacagggatacaagatatggacgttgatgcatagggtctgcagtaaaaaaaggaatagatgttatgcaatttaccgatcaacgtaacgttgtaactccgctcatttggattccttttccacctgccctcggtaggtgctgccgcagttcatacttatctgtgcataaaaagtatcaacagtacctcgctg

SEQ ID NO: 353999 - DNA, 213 bp, Zea mays
agtcttcagggtcaaggagaaggaggcagcaggcacttcttcgacctcttgtcagtcaggccggttcaagattggcaggtccatgtcaagcagtgggcaggggtttttcttctcacggaatggccgctccagtggtgctgtgctgccactgtgagttggtatgtttttaccgtcggttgcagcctcagcaaagccgggagctggtagtgtgtc

SEQ ID NO: 354000 - DNA, 227 bp, Zea mays
gattcactcatcctgagactttctttttgcagtggagagagagaataatctagttggggcaaacactgaactttgtcaattaatttgaggctatttcctatttgacgcgctttcttgtgtgaaattccctgaaatgatgttattctagataacttctatgtcaggttcctttggatacccttgaattcagtgtagtaatattgtcagacgtttccccaataagtgtg

SEQ ID NO: 354001 - DNA, 286 bp, Zea mays
  unsure (1)..(286): unsure at all n locations
gaacttctgctccatgtaatttgcggagaactttctgcctgacaagagcacacccgtggagccattccttgccatcagttggtctgttagtgcaagtcatagtcgtagcagcgatagcgcactgagctgaattccttgttcttttgaggacttgacgcagacgcacacatatttcgtgcagcctttcnggtcgctggaatggggccatggtcatgggctcatggccatccagacggtggtagggccaagcttaggcgaggagctgggcggcgtggcgtacttggca

SEQ ID NO: 354002 - DNA, 205 bp, Zea mays
actggaagttcgccggcgacggctatggacaagaccagctttgccaccacgtgcagcctgctgagccagtacgtcaaggagaagaagggcggactgctgcagggccttggtgccctcgccatggcgccggcagctggagaaggagctttccggccgccgaccaccatgaacttgctgtcagctctcgacgacgcgccggccgagg

SEQ ID NO: 354003 - DNA, 212 bp, Zea mays
agccgcccgaggacaagaacaacaccgactgcaatggcaatgtggacgtcgccaggaaggaggggaccaagatgagggagtggtggaaagaggagttctttgaagagatgagcaagaagggaggaagcttcgagaagcggcgctccggcggcaaaccgtggatccgttcgatcagcatgaacacgggccacggcgacaccaacggcggcgag

SEQ ID NO: 354004 - DNA, 183 bp, Zea mays
gattgcccgtgttgctgaacacagcctcgtgctgcggcaatcagcattcaaacccagctccccagctgccaaggctgttgttgatcagctgcttggtgttgtctgcaggggtgaatatggtacattgcttctcccatgcatcactggccttggatgccttgcccgtaccttcacagcaagtga

SEQ ID NO: 354005 - DNA, 124 bp, Zea mays
ccatggtatagatctaaagtttggatctgttaatggtatagatccatttgttccaggaagaaagcgggaaccccagtgtaatcggtgctgactaagacagcttcttgagctgtccctgctatta

SEQ ID NO: 354006 - DNA, 273 bp, Zea mays
cagcgcggctgcctccgtggagaatactccgtgggggccggacccattctctggcgactaccgcccggcgtgttgcgccaagtaggcggacgctgcggagcttctcgccatgctgctcaccaagatgatcgccaactgaatcaatctagctgcagagcagtgacggctgagagtatttagcgccagttcatctcttgggccgagagcatgacggtgctgtagctttttgaggcataacgaggtgagttcccgtggcgttgcaacggaaacaca

SEQ ID NO: 354007 - DNA, 267 bp, Zea mays
tagatggaatctgctcatcattacatgtgattgttcttccatgtgttctatttgggcaggaaatatttctaatttgatgctcactcttgtggcacattgtttttgtggggtcttgtgaaacatgaaccgtgctttgaagctccatcctgtgttgtgcaagtatgctgctactgccgattgtgctctactgctctacgatccttgatgacattggtttcacttgttttgtttcatataagctggatggttgtttgcacatgcttttac

SEQ ID NO: 354008 - DNA, 268 bp, Zea mays
aaccagcacaacagcccgaatcataggcttgacgcagagactccatctcatctgcgctcccgcgcgtggcctaacgctaacggagtctgaagcaaaggagaggatgccagaagcttcgagtggccgaaacattttgttaaatcgactgcttgtggtggatcattagtgctgatccggtgctttcgcgtgcaggctggtgctattcatgcgtcttggctattgtgaataaatagggttagagggatgtcttcagaggagctgagggcga

SEQ ID NO: 354009 - DNA, 100 bp, Zea mays
cgaaggtgccgaatgcagagatttctcgagtgtggaaccctttgtggttctgttggtatggacttcgttttgagcgaaattaagcattttgctgttggca

SEQ ID NO: 354010 - DNA, 264 bp, Zea mays
tcgatactcacgatgcgaataatgaccccgagcacgcgcacaggtcgaagatcgatgatgatctcgccgccacggcgccgtttgcgccgggggttacgctatccacgagcaccacgagatagagaaggaccacaatgcgccgatgaggcccccggcggcgagaagaagcaccaccacctcttcggctgatgacctggccggcgagagcagcggtccgtcaccgaccgatcgaccgtcgcgccgcgccgcctgttttcgttgagt

SEQ ID NO: 354011 - DNA, 231 bp, Zea mays
cactagtgcagcgagatgcagtgacgtgggtttctcgtcgctgctgccacagctggacatcagcacacctacgtgtcacacttccacacctgcccctccactgggtctgcccaggtttcgccgccgtcactcgtgcacgggcctgtgagatattggaggcacaaaggaatgcaatggagatatgctgatatggaggggcttgcggttcctatgatatctttccgaaacaac

SEQ ID NO: 354012 - DNA, 263 bp, Zea mays
ctatggcgcaccaccacaacagccttcatatggcgcaccacaccctggtcagtaccagccgccagcgcaccagccacctcctggccatgactacggtcagccggcatatcctggatggcgtgggccatattacaatgcccctcagccgcagcaatctgcgccatatccacagccaccgtacactgcccctggggcttaccctccgcaccagagcaactattacaggcctcagtaagctatcttatcgttcctgcaactatttg

SEQ ID NO: 354013 - DNA, 286 bp, Zea mays
aatgactctgatcagtcgcgcattgttttacatctgtgctgctgttgtctacggccatatcatctggacatagcacatgtatcttgtatttgagccactggcatgaacacagccgagtgcactaaaggactagacatactatcatggtatcccaagcacgctcttttatccaagtttcagagtgtctgatcgcgtcaatcattgatacaatcaggctatgacctagctcgggggctggcggtggtggccttgcttcagatttgggtgcgcaacagtttaggtttct

SEQ ID NO: 354014 - DNA, 283 bp, Zea mays
cgtcgaccggttctctctcccgtgccttgaaatgtctgctttctctccatggcgggcaccgtgctaccgccctagcccagcccgaggcatccagcctcgccgtgttggtctccgccggccagggctcggtcctcggtggagcgtcctggggccccttgttgccccaggattgccgcggccttcgccatcgcgttctatgagcgcctcccgctcgccgatgcaccagagctcaatgtcaagccgaatctctccacagccacctcgaccgggccagatgtgtagc

SEQ ID NO: 354015 - DNA, 281 bp, Zea mays
gaaatgtggcgtgccagggcaaaggaactggagttggagtcaaagatgaaaagcaaaaatagcagaagtaacaatcgtgatgattttagaggagagaagcccaaaagtgatttgagaaatcatagctctggctcaaggtttgaacaagaagggaccacttatagtaattcttactcagaacgggaggatggtctcagtgatgatgagattgaaagatttcttcattcaagggcgaaacgaggacgtggggctgttggttctaggatggacgagcctggtcc

SEQ ID NO: 354016 - DNA, 280 bp, Zea mays
gaaagctcttctcctctcttgatcccatctctatcccaatcccttggcccccaggctcactgcggcttatacagtatcctaacctgctactaatcacagagaaaaatgtgaagaacgaggagcagaggaaggctagaagcctgagcaagtgagggtagaaccttttgggactggcctttgaagcgctggccagggatggcgggggggccataaggacagagcctggtatgtcttcatagtcattgagaatgtggagataccagttttggtggggggtgat

SEQ ID NO: 354017 - DNA, 274 bp, Zea mays
aagaaagatagctattaccactgttccaaaatttaggtaggtgtatagcaaaagctatgtacctagaaaggccaaaacaacctataatttgggacacgccgagtaattattggagaacaagaaaaatgagatgataatacattggcagcatttggatttcaggagaaggctcttcaccatgattaataacctgaccactgtttatgaagttgtgaccggggttgctaaggaagcatccaaagcccccaacggcagcagcaaaagcagccaatct

SEQ ID NO: 354018 - DNA, 271 bp, Zea mays
gaaataaattacatatagccatctagaagagagtcctttctagagccgacgcgacgggatcaagatttgtatttgaacccggacgacgggaggagtacgaggcccagtcatggaggaggagaagcaagtgctggagggtgccgctacggcggcgaggcggcggctggtgatcggggtggggttctgggtgcagggcttccggctcttcccgtggctgggcgtcaatttcttcctcaaggacggcatgggcgttgctgcctcctcgctgcag

SEQ ID NO: 354019 - DNA, 278 bp, Zea mays
ctccacgtatgtcaccggcgggtgctcggtgatcaattgggctatttcgtcggaacacaacgagctcgtccgtgacagttggagaagcgtggaacctctgtgaccgcgtaggacttcacgcagtggagtcgtcaccgccgtggccttgtggacagccatcccagacgcttcaattgtccgtgaagagcaagtactgctggagaaggactactacgatgaattcgatgaaatccaggggtcgtctcccagtcaactattggcaccgaggagatatttat

SEQ ID NO: 354020 - DNA, 277 bp, Zea mays
ctaggtttagctttggaaaaagatatggtctctcatcatgaactcagctctttcctttcttcggaggtgttctggatgcattccgacaaagacgccgcagattgtgtacagaacagcgcggtgcacgggccaaccccattctgaaggcgagctaccagcaggcaacatgttttcttgccagtaatcacgactcttggctactactgcgtatctagaactgctgacaatactactcagcttcttttgcggtcaaaccgatccatgggtttgacaaagt

SEQ ID NO: 354021 - DNA, 266 bp, Zea mays
gtcaaatcctaaggctccagcggcagtgacagaatccaaagagggaacagaggcatcagcatcgaaggggctggagaagacagagaacatgatgcagctggtgcccgagcctctcagggccagaccagacagatgggggctgggcccacacaggcgtgcaccggtagagggcacaggaggccaagggcagctccaggccagggcagggggcagccaggaacctccacccaggcctctgtggcctctgtttccttctccctttcttg

SEQ ID NO: 354022 - DNA, 275 bp, Zea mays
aacccctttaagaatctaataaaaaattggaaatccccaaaaagacatcctgatccaaaagtatgcatataatttcagggaatgttcaaatccctggagatgtgtcaatctatagattccttaggtcggatcccagtttgtgagccaagcggatttttctggtctaaatatacgaaccactgttatagtcatcatttcatcttttaagttaccattcccaagctataaagagtgactgccttctatatctttgagttgaagaattttgttatagt

SEQ ID NO: 354023 - DNA, 281 bp, Zea mays
tccaagtgttgtttttactttggtgggatgattatacttaattttcttacttttaatatgggaaaaaaacaaacattacagaaagtgtatcctcagtattcaatgatcaaacctatgcacgagaatttcttaagaatccttccaaaaaacctatagatagacagatagatagagaagcatattttaaaattatgttttatatgcacaaacctaaatatgtatttattgtagtagctctacaactcgaatcatatgtactcttttgcactttattttttaaa

SEQ ID NO: 354024 - DNA, 267 bp, Zea mays
ctagcatgtaaatcggcatggctagttcctggaggattaggcaggtcgttactggcaatgaagtgaatttgtttttgtatattcagattttacgggacagagatgtcatttaccttgtaatttgaaggactattacatgtgcttatgacataatatgtagcagtttcatttgcatgtgtcaaaacccatccatcatgactggatcgaggtcaaagtagtcatgttttggccccgtttagtttgggatgactaaactaaactttagtc

SEQ ID NO: 354025 - DNA, 271 bp, Zea mays
tatttattcatgctaaacagccatttaaacgggctaaacagacgtggtaagtcactgtgtggtgtgtacacgaacaacatttttttttgcttatccttgcatgatcaatacactactgcaatattactgctttattattgcttttgtttcatgaaaatttgcaaggatgacatcacccgttatatgtactttttaaactgttaacaccaactaatacatttgacagcatctgtcttgtgcccaaagaacataccccaacaccccctggcac

SEQ ID NO: 354026 - DNA, 268 bp, Zea mays
cttcccccatcctgtgtggatgtgttctctcactcatgcggcataagcacacatactctcgcaacccggcatccctcaggagagcctcggtggtcaacaaggcctttctgttaccgtggtgcactgtctcactggaatggatgtagaaggcttcttctggagctgtcctccctccctggattgagtgtccccatcacctgttccaagctgcgttatgaggtgggaccctttactggctgacagcagtcaacaccgagcgagggggaaa

SEQ ID NO: 354027 - DNA, 265 bp, Zea mays
cggggagacagctggagttggagagattgagggccacggcagcctgggtgtgtctttgcttctcttcaggacgtgaagacgagccagtatccttggtgtgcactcagaagtcctcctgaagttctcagccagaccttctgaagatggagcggtctacccaggagctgtttatcaacttcacagttctcctgatcactgtgctcctcatgtggactcctcgtgaggtcctatcaatactgaggggccatgccacactcccgggagt

SEQ ID NO: 354028 - DNA, 260 bp, Zea mays
caaatctgaagggcgtccttcgtctggaaaggccttgcctagaatgcctgcctggccacgccatcaatcagagtgtccggctgttcgggaggactgggaattggagaagtaatctgagctagtccttatgtatattctaaaacaatatcttgtggatagataaccatagaggaaacttgaggcttttggtctgagatttatcattggcggcaaagcatttttgccttagaaattcttttgcatgatggaggccacaggtt

SEQ ID NO: 354029 - DNA, 260 bp, Zea mays
cgaggattttgacaatgttcaagtccttggagcaaatatgtctgctcttgggctttcacagaaacccatatatacacatggagtcaaggaatcctcaatcagtaattctaacgatggtccagattctatggagacaattcctgatgcagtgcctactgtattcactgagcctcctgtggaggaccaacttgcatggaatactctatggcctgaatcgcacaaactatatggtcatggaaacgagctcttctctatatgct

SEQ ID NO: 354030 - DNA, 150 bp, Zea mays
accagctccgctccgagctctctgctcgccccatggcgtccggccgagctcctcctatgccgacgttgttccctgccgcgctcgtacccatggcgtttctctctccacgctgatctctatatctctgctaggcaattcctcacgtcatgc

SEQ ID NO: 354031 - DNA, 183 bp, Zea mays
ataattcacagacaccaatggaaggaaaagattatcagttttcaactatttacatggttggagataatcctaaagtggatatcaatggagctatgaaggctggccacccatggtcatctgttcttacaaggacgggtgtttttaggggaaaggataacgacccacagtttcctgcagatgtgg

SEQ ID NO: 354032 - DNA, 122 bp, Zea mays
ctgtgtacctccttgtgaatgcaatgcggtagttcactcaaggtaccatgaggaagactgctgcaacaatgttgttgctgatgtaagctgatattatccaaatttattcagatttcatggtc

SEQ ID NO: 354033 - DNA, 139 bp, Zea mays
ctgtattctgtggtgagtggagtaaggtagctgtgaggcttagctgctttctggctaaatcgatgcactgcatccgttctagggtgttgttcggcgtcgttccgatattgtcttgttctgaaacatttgtggttttttt

SEQ ID NO: 354034 - DNA, 262 bp, Zea mays
atgaggaacagggcacgaccgtaaggctcaatcgctgaggcatatattgcggacgagtgcttgacattttgctctaaatacatggatgatgtcgaaacaaaatttaatcgggaaccaagaaataaagggttttctaatgaggaagcctataccgttgatgtttttgggcatggagttaattttacctctgcgcctgaactagtgtatgatgatagtgccatggatcaaatggtatggtatgttctgaacaattgtagtcagg

SEQ ID NO: 354035 - DNA, 263 bp, Zea mays
ggcggcacctaagaaacacgtctgcactcatgccttgtgtatggcgaaaccaatctgagccatggcctttctctgttcttgaccgtgcactgcactgcactgcaggttccactccactgcatacctgcagcaaatctggtggttcgaggtggtgggagaggtggacttctgcttcccggcgttgacggcctacagcctctacttcaggctccacctcggcaagtcctccacgcgacttcggccgccgggtctgcagctcggag

SEQ ID NO: 354036 - DNA, 109 bp, Zea mays
cttgaagctggaaccataatgcttgtcaagcacttggactcgtcgccgcctgtgctccaatcctccagctctataggaggcagcctgcgcacaccatcgtgcgctagtc

SEQ ID NO: 354037 - DNA, 235 bp, Zea mays
ctattggatgggattatggggtctaaaatcccttactattaggggtgtttcggtagtgatcaattgcatctgaaactgctgcagcttcaagcttgttgtgttggtgtctagtgtctgcatgagtttgttccttggctacggtagctacagcatgctttactgaacaagcccttgaagtttgtacattgagctttggtatatatttgcattggactataatgtaaagaactaaaaa

SEQ ID NO: 354038 - DNA, 265 bp, Zea mays
  unsure (1)..(265): unsure at all n locations
ccttcgtggaaaaagcacataagtcgtatatgtgatcttttttctatgatgaaaaaagtacggcagaccagttccattaattgccaaatatagggaagttttgtagtactagtgcacttaagtttgaggtttagtcactctcataccttgtagctgctagttggcatactaacttggagacccataaacagatgatttntttttctcgaactaggcaggagagctgcattctcatttcattaagaggagaaaaaaacaagggaga

SEQ ID NO: 354039 - DNA, 252 bp, Zea mays
agcttcagaggttaggacaaataatgtagtattctgtccccttggcccttgcatgatcaatgcgattagtgagggttgctgtgtcatattccgtggtgtaaatgtaatatgcgaaaaatggtatggcaatttacgcatgtcctgtaaatgccagtaatacccttaaatgtacttactacattgtaaaccaatgctggaaaatgaggttgaatgctggatggggctactagacaaaaaataaaaaaagggggg

SEQ ID NO: 354040 - DNA, 292 bp, Zea mays
cgcgggtcaactcggaattcggctcgagctttagtgatgatagtaatatacataggaattgaaaaggagggaggaagtccttgcttgtaatggcttccgttaatcatacaggcaatcaataagagctttgcatgcaatgcatgcagcaaaaattacagccccagagcacgaggctaactagtgtacatgtcggcgttgcaattgcatagatcaatatgtgggcacgacgccgtagtccgcatcggctccgccgggggccatgagcgcaccacggcggcacggcggaggagta

SEQ ID NO: 354041 - DNA, 262 bp, Zea mays
tcaccttgcggccagctgcttgcgtgcctctccagccacttcactggccgcgcgcgagctcctctgcgcgctcagccgttcttccctgcagtgcccctgcgcaagcttcggtgccttctccgtcgccccccgtggaagcctgctcgcccagctctgttgccgcgcccatggccggtgctccctgctcgattccgtttgtcgcgccctgcgctcgtcgcggtgctccagctcggattcagtcctgcgcgtagcgcttttcatc

SEQ ID NO: 354042 - DNA, 242 bp, Zea mays
caaactatacctactctactctactcttttgtgtttatcatcatcatcattattactcgatcagtcgtatgcatatgattccatcatttcagcatctttatctttcaatcatgcttgtggttactaaatataaaaaaagaagggggaaatttctcatcgtctatgggacgaacgcaggctgcaagcttcggaggatccaacatcgatccagcagcttgggaggacaagaagtgccccggcga

SEQ ID NO: 354043 - DNA, 267 bp, Zea mays
caaattatcttggcggtcagaaaactgtgtgatggagcaatttggagctgctttagaaaaacagcgcatagaatgggaagcttcaaccaagtaggacagctgacggacctatcaacagagtaatggagaaaaatattattggagttgacaccaaactaccttaatgccatgcactatgggatctaaatttttagtaactgaatcagcataactttgtagtggtaaatgaccatctccttgtaggccgacagaagcatcccactgtat

SEQ ID NO: 354044 - DNA, 287 bp, Zea mays
agcataccatggcaagttgtaccaacagatagccatgctctcaagcagagaagctagaaatccctcttactcctaccacagtgtcctcaaacagagaaccaggaatccccatccctagacataccttgactagcggccaagaacgcaacagacaagagaaatcgttgctgagctcatcgcatggacatcagtacgcgcctttggacaactaccttggaaggctgagcagcctttggatgagtttccttcatatggcgcctcaccatcttttcaatctgctctatcga

SEQ ID NO: 354045 - DNA, 288 bp, Zea mays
gattcttcgggcctggtgggagtgggactacttcacactaaaattccaccttggagaggtaactgaggtgcttgccttagaagttggctcaaacttcagcaatgggaggttttgctgagaatgatcgagacggaagctatttctgacgaggagtctgatgtgtcagattctgaaacaaatggagaactcgagctctcaaaagttatggaaatgcgcatcataccttcagatccggcaattggatgaaccctcttatgaagcattctgcaattgcgctgagcttaacct

SEQ ID NO: 354046 - DNA, 286 bp, Zea mays
tactctagctccagcagctcttgaacaaaatctaatcaagctcctctccttcaaattcatttgcaattaaatcacattctatccaaaaattgttttaagatggtcaatagaagggcagatgtggtgtagtggtgagagttgtctcactgagtcacaagtctgggtttcaaagcagtctctctgtgtctaatttggaatgcttgccccggttcatcctttcccagacggccagaccccactcatgtgggagcctctggcaatgggtctgtcttacttccccaagatg

SEQ ID NO: 354047 - DNA, 282 bp, Zea mays
ttccaatttccaattcaattcaatgtcctctcctggctatttatggaaagaaatatactctttcgagtgcaaacctcctatggaacatgatcagaagcgacaactacaagcagcaactgttaagtaataattttacaagccaattggactgaaatcagaggggtattgtacatggctacaatttacagccccctattccggccactcatttatctacattgaacatgaaataaacataagacctgatacattctgaagctgaccagattgggcttccattac

SEQ ID NO: 354048 - DNA, 276 bp, Zea mays
  unsure (1)..(276): unsure at all n locations
ctggaatcctcatgcaccatgctgtttgtgatagagtttcccgcctgggccatcacggtgatctcttgcctgaagaaaataggatattgcttgctgagttctatctgcgacacagagaaagcacggctactatagttcatgaatatgccaaatgaaggcaggaaaaattatgaccagactttgaaaacatcctgagaagctgagtgacgtgtctgtcaatcaagtcttnggattatcatggtggccatttttctaacagcacgcgaggctattttc

SEQ ID NO: 354049 - DNA, 141 bp, Zea mays
ctcctccctcggcggaaacatcccactgcccagcccctcttcacgtcttccctcctccggcctgtgttactgccctctgtctgctcgaccagcttgggagcctggctgtccgctctccgatcgagtacggaagcctcggca

SEQ ID NO: 354050 - DNA, 256 bp, Zea mays
agaagagggacatgctttgcgatttgtggaccttgttcgtctcatttattagtttgcccaaggtacaagaaaacttgtggttaggaataggggagagagcatgcataaagtggggtcttaatgtaggtcagtgtttttcattagagacttgtgagctaactgtggctctccaaccacggcggtacgtgcaagtgcaatgggttccagcagtgtatattttcagcagctctgtaattcaagttccaattcttctctc

SEQ ID NO: 354051 - DNA, 186 bp, Zea mays
gaatgtcgagtacaagtatgcatccagatgaggtgcactaatggtggcccatataagtggaggcaaggtggctattccgaagtgaactctacaagctgagtgcagtcaaatccgtctacctctgtacatacgttaccccgggactggctgcggatggacctgagcgtcatcggcttcgggctcatc

SEQ ID NO: 354052 - DNA, 261 bp, Zea mays
cgaaggaagttgtatagtttgacacatcatgcatgagactggctgattcagtattagtgtgtttaacgtgtacgtgatcagaatacatttgatttgagtgctgtagtttcggcgctgaccattttgttgcgtgaaatatggtagcagtgctatgtttaggaagccaattgtaagtcaaaactggaaaagagatctattcagcagaagtatttagtatgtctggcattttctgcattaatatttaattgctggttaacatga

SEQ ID NO: 354053 - DNA, 108 bp, Zea mays
aacgatctgcatccccttgtagactccagcacggccctgaactcgttcggcgttaggtgcttcgtcttgtacctgtgcgtgttggtggcggcccgcatcatcagcgtc

SEQ ID NO: 354054 - DNA, 234 bp, Zea mays
cggaagacttcgcttcctgtcagtggatgtaggcgacgatgtatagactccgcaagctttgagccagcactgaggtcgtcctgtcccggcccttgctccaaaggtgctggcatgcttcaggctcctgctccgaccgattggagagctgagtgatccttccaggcggatttgaagagcgggcgtacagattgaataagctgtagttcttttgtgaatgattttataaaatgttgg

SEQ ID NO: 354055 - DNA, 106 bp, Zea mays
atgcctcagaagctgtgtgcacgacaagacccccgagatcatgccagctagcagcaagttcgttactgaccccaaggtgagcaaagcagctgttggtttgccgctg

SEQ ID NO: 354056 - DNA, 190 bp, Zea mays
caatggaggtctcagcactgactgaccaatgaaaccgtcacgattgttacccatccgttccagttccaggcaagctgtacgtgcctgcgcagattacgcatctcaccgtcgatgactctgatcaagcagacgatcccttcattctccatggtcggcggagaagctgtacatcatatattcatatatcagt

SEQ ID NO: 354057 - DNA, 180 bp, Zea mays
tataatcgcagcacatatgaagttcagtacgtattgaggaggcagaatgatggatcttggaaaatctccgaggctgctgtccgggacctgacgtgatttcggccaactcggcaaacgggtacacaaccattggcgtataggcggcatggcaatcttaacctattaggaatgtgtagtggc

SEQ ID NO: 354058 - DNA, 163 bp, Zea mays
acaggcccacttcgcagccggcctcgacgtcgacacgatgacctcacgtcttcacggactgaaatgtagttaagtgcaagaacacaatataacagctgaagaatggaattcctaaacatcccgagaggggttcgccgagttctgttcagaacactgaacactg

SEQ ID NO: 354059 - DNA, 166 bp, Zea mays
gcgaagaaccttagtgcatgtgtattctcataacgcgcgcaagatatgatgtcatcacacaagtaagtaaagaatgtagcagcagcggttgttactcgctgtacagaaacaagtgtcgatcgaccaagactcgcaagctgaatcaaattgtagatgggaggaaatc

SEQ ID NO: 354060 - DNA, 179 bp, Zea mays
gtctgttatgatgttctttgaatacttgcataagttttaggaatgttcatggcctactggtgctactttggccttttaagttgtgttagttttctttttccccccttgaactttggccagagctgtgcattttctttgagcaacgtatgcggcgtagaagggtcaatttgttattggca

SEQ ID NO: 354061 - DNA, 180 bp, Zea mays
agacaaactactacggcacaaagcatgtgatcgaagccttgctgcctctgctgaaacctccgatgatggaaaatcgtcaatatatcctccgactttgggttgttaaggcatttcagaaacgaggatctgaagcaagtgctgaacgacgtcggcaacctcaacgaggagcggctggacgaa

SEQ ID NO: 354062 - DNA, 177 bp, Zea mays
aggggagctgctgctgactgaagctagcgctgaagttgctgacgacgttgatctgaacttgagaatctgcaaccggcatcgtcccagagccccaaaagagacaagaactgccttggtcagcagctccaccaccaccatgggcggccgtttgacggcctacgcctctgaagaaaacca

SEQ ID NO: 354063 - DNA, 179 bp, Zea mays
aaagtggacaaatgtctactacactcaaaaccaacaatcagcaatctgctccaatcttgcaagatgaactagatatatcggtcagaaaacactggatgcatgggaaaacctgagattaggtgccacaaaacttctcttggtgtacccatccaaagtttgtaagcattgctctgaagtgc

SEQ ID NO: 354064 - DNA, 174 bp, Zea mays
ggtacaggtggctctaagaaataagtccacagtgccagcctgatcctgccaatggagttaaacacgtcaatgttatgatatgttatgaatgttatgaagtttcctcagaaagaatacagtgaccaccaggtgatgttcacaattaaaacaatgaagatgtaaatgtgctaccaa

SEQ ID NO: 354065 - DNA, 182 bp, Zea mays
ataaatttatcctgttgaagtttgtctggtaagattgctgtatagagtaattagtaattcatatatagttctgaagttgaatagtatttatgttattctaagctattaatttcactgccttgtataggtggacccagataatgtgaggctgcttgaggaagaagcagctgatgccttgggac

SEQ ID NO: 354066 - DNA, 184 bp, Zea mays
ctgataaatacctagagcagtattgctgtggtacgacgcggcaggacaggacgtattttttttgtcagatgggaaatttcggatgaactgctagaaattgagttcttaatggcacacaagcataaggaacagcaagaaaaagcaacacagaatcagagaaaaaacaagagtttatatattcact

SEQ ID NO: 354067 - DNA, 179 bp, Zea mays
ggacgggtgcggcggccagtcttcgtcttcatcgtgacccacgacggagaggacagagagagagagcgagaggcctggctcagggaggaagacgtctcacctcgcctcgtctcgttttcttctgcggcgtccgttcttcaagccctcccccgtcgcccaccagtagcccgcccgccagc

SEQ ID NO: 354068 - DNA, 176 bp, Zea mays
gccagagaagcggcaaagcagagagtcggcgaggacgagactacgagaggaggaggagcgcgtgtcctttggtttgagcgagcgatggtgttcgcgtccgggtccgccgccggcccctcaagatgctgacggcgcggttcgtgcggcaggtggtgcagggccggtggttcatggtg

SEQ ID NO: 354069 - DNA, 176 bp, Zea mays
agattattctccatcacccagaattgaaatggaagtagcaacaaaatgggaccgtcgttccctgaacaaatctggcgtgctgactacgatttctgtgatcgtcatgcagcagctgctgacgaagaaatctctcaactcaaagaagagcttaggcaggcccgcaaccggattcatga

SEQ ID NO: 354070 - DNA, 288 bp, Zea mays
tatgtggtcgactcttgaatgatgttcagagtttcgaggtacattactgagttgtgagtcttaagctttcatgacaatcctgttaggctcaataaagtattagtgcgattaattatttaattagcataggaaacaatgggtatttgggttagttttcattctcaggtgctattatttaataggtatatgagcatggtatactgaattttaccactttagccttgactagttttaggaggtgttttctttgtaatcgagaaaaaggaaaacccttgtatattcaaaatt

SEQ ID NO: 354071 - DNA, 115 bp, Zea mays
actccactatgaccaacaaaaggaggcacaacggtagtgccagaaatggccgcggccatggagcacacacatcgcggcaagaactgcgctaggtgcgtgcccaatgatgaggcca

SEQ ID NO: 354072 - DNA, 290 bp, Zea mays
cacgaccaataggcaatagcaacgcgccggccgctcggcggcgtcgaacgattcgggcaatcgacaagcagccccaccaaaccaggaaactgcaaacctacccccggtcgccgactcgccgaccgcgactctccgcccagactacaaatggagctctgcacctgcgcggcccgcagttctgcaccccccccttctagctgccgcgcggcgccattcccgcgagttctctcccatcgcatttggagccgatcgggatactgcactgtctgctatacgccgtcaagccctgt

SEQ ID NO: 354073 - DNA, 185 bp, Zea mays
aggtgttttttttttcttgcttgctcggtttcttgtggggcgggccgcgaaccggcgaggcgttggcgcggggcaacgcaaagcagcgcgcgcatcgcagtgcagcaaaagcttcgagctttatccgccggattcctctcctcccctttcctcgctatcgggctccccgcttgctttgtgcttcg

SEQ ID NO: 354074 - DNA, 265 bp, Zea mays
ggtggctttcagtgcttcccgaaggtagacgcgcagatgctatctcttgcattctgtttcttaagggcaaaaactctagagaaaagagcccttgtggacctggaaacacattatacgaaggctccaggatgcatagacaaaagtgttgtaatcagatctattcttaatggtgacagtgaactgaatatattttcgcaattagtctagatttatggatgtgtgcctttttcggatggattttgctaccactctaaaacataagaga

SEQ ID NO: 354075 - DNA, 178 bp, Zea mays
tgtcctccggggtgcttctgacctgagaggcatatgactcctggcgtcgcgggtagctggtgtcgtcgtcgggcagcaaggcacgcgacggcgggtcgcagacgtcggacagactggctggatcgttttaacagcatgtggatagcgtggagttctgctcggatgtgtgaatagatca

SEQ ID NO: 354076 - DNA, 170 bp, Zea mays
cgagcctccgtaggcatgggaagcgtgcacatgcagtagcgatcctcgactctctgtccgggaatgctggacctcaatctcatgtactgctcccttcttgtcaagactggcgtgctgtctgacgcgacggttccggcgtccccggctgcgtgcgcacatgcttacgtgcg

SEQ ID NO: 354077 - DNA, 265 bp, Zea mays
gtaaaccatggctggagattggttttagacatctgcagccagtttggacaaaatatgtgaactactcaaatgaattcttaagagactgccatataatggagccacagttgtagattgtcgtgacaaaataaataaaaagcatatatcaagtgaaattaaattcgttattttggaagtcaacatcagagagtttatgaagggtaactggggagctcagtaacccccctccatggtcatatgcgttgatggtgaatatccaatgaac

SEQ ID NO: 354078 - DNA, 234 bp, Zea mays
ctagagctatagatcatgcagctccgacgatcctctccatgcatgggaattgggagctagccttctcgtacgtacatgagaccattctatgtaattagctgcctatatttatatcttgcgacatacctagctagtacaacataacacgccgccactgcaacaaggaccatgcatgcatgatgtgtatatgtggtacgtctggttattattaggaccagaaaagttatggtttac

SEQ ID NO: 354079 - DNA, 249 bp, Zea mays
caggcattggcaagatacacacgaagggaggtaacttacctatcattgacttgttagagtgtctgctgctcttaaaggcattgtgtcgttttctttttgaataatgtaacctcagtatatactgcttgccctgtacgttctaactacactactataggcgaagatgctatgtgctcgtggaacttcaaattcacagctctgctgccggcaattctcattctcatcccagaggagcctgtgcgatgaact

SEQ ID NO: 354080 - DNA, 250 bp, Zea mays
cgcctggtgggctccctgaatcttggccaaagctgctccaggttctaaacctcgatgaccaatatgacttgacgttagctacagcgtaccgcgtacgtctctctgcaaccgacctacctactgcgaaaaagatcaaccacatttattatgcctgatatagaagaggagaattaatccatagtttaatgtactctgcagaatcaatgttttcttgtaaaaatcgattcgttgatttccaccggcgttttga

SEQ ID NO: 354081 - DNA, 267 bp, Zea mays
ccaaaatccaggagcttgaatcctgtaacagagaccatgttcatgagattggggtgctgaaggcagaagttggtggcagggacaaacaaatcaatgacttgaacagtgagcttgagcaggtgcagcttgcagtagccgatgcagagcgcagtgtgaagaatgtggtctggacatcacgtgtgcccagctaccacaaccgtgttagcagctgcgtcctttgtctacgccgcacgtagtcggtgaacagctagctctttcactcgcttt

SEQ ID NO: 354082 - DNA, 261 bp, Zea mays
agctgcatactcgccttgttgccggcaccgcgaccgggcctgcagcctaggcagtcccaggttcaaatccgcccctggtactgcttgtttagtagtgaagacagagactgtagtgaaaatagaccaccacctgtattctttcaggtgttagaaatgtaaatttttgctttctggttatgtgtgttcctcttgctgcatggttattaccccacccccatccatctcgcctgtgcagaaataataaacatcactaaggtgcgt

SEQ ID NO: 354083 - DNA, 246 bp, Zea mays
aaatatcgagattgcattcgtcgagaataaaagttttaacaggctccaaaaattggccttctgcgagattgaataaattccgaattcggcgaagtgtgaaggaataatcctggataatcagagacatacgcgagcgagaaagagaaatttttactgagtatccgagattaggatttatctcccgccataacacgaagctgacacctggggtgtcacagccttccccccttaaaaagaatctcgtcc

SEQ ID NO: 354084 - DNA, 165 bp, Zea mays
gacgagggcaacgaagaggagggcagcgaggcggagacgccaggcagagaggctagccgacgagccatgctgtccgtggggagattggtggatgcctacttgggggagatcgcgacagatgccaacctgaagccggacaaattctgcgacctcgcctgggcgttg

SEQ ID NO: 354085 - DNA, 261 bp, Zea mays
cccctcctccctccagactctcggaggcgggcgcgcggatctgtcggccggggccgatccagtcgattccaccggacaaggccgccaaaaacacactcgctcgacgcagcgagcggggccggcccttcgtgccgcggggcgcccggtggcgagggccgcagcgcgcacgatctgaaaccctaggtggtggtgggcgccgccgccgtgtgtagacgcgatggatgcgaggttcccgtactcgccggccgaggtggccaaggt

SEQ ID NO: 354086 - DNA, 258 bp, Zea mays
aatagttgttctatagatgtctttgaagaaagcttgcttggattgcgatatgtgcaaaaggacctagggttcaccagctgtccttcctattaaaacaaataatgatattagagtccaaatcaagccagttctttgagcttgactacgctttgcatgtcaagacattgactttctggcagttatttgcagttgcaccagtgatgaccttattactgttttcaaaccacagtaacctgtgttatgtttctcacagattac

SEQ ID NO: 354087 - DNA, 261 bp, Zea mays
tacctgggaactagaaatcaccatcccttgcataaatggattgagacagagagaaaagttgagacgtgtctatttgacaagtgcacatgttattgcgagtttgagaccttgtgtaagaacctaccattgtgttctggaagagttattctgtataaaaaagtggtctttgttttaccacctgaaccgatgttctccacccggcaacgttttctcctgccaattcagagctccgagcgaaccattttggcggtgaaattgtgc

SEQ ID NO: 354088 - DNA, 246 bp, Zea mays
agcaaagtttgacaaatcttgacattataaaggttcgcaataaaccaattgagccacctaagaaacctgagaaggcaccattcttcttgccttcagttccatccctttctggggagatattgtttgagcctcctgccatctcaaaagatacagacatcagtaccacgaagaatacaaatcataagatgtctgaactctcctctcatttcagtcagcagttgcaattttgtggtgaaacaaagaact

SEQ ID NO: 354089 - DNA, 249 bp, Zea mays
atcatctagttcttcagaagatgaaagttctatacaggatgatatcccatcaaagtacagttcaatgaaagtggggcatccagtgctaagaattgaaggtagtcacttactagcagctgtcgtagtcagtatagataaaggaggtaacgaattgattgctgccgtaagttttagtcttgaagcttctgaagctgtagctgagctaaggtcatcctttcagttgaagcgttaggaagcctatgctaggct

SEQ ID NO: 354090 - DNA, 253 bp, Zea mays
cggaccgaggaccgtccccggccgagacgaggacgctgctgctcctcctcctggtcgagacgaggatgctgctgctcctggcgctgttcggctctccagtctccatcgcaatcggctctccaagtctccatcgcgatctccacggttgggcgcctgggcggacacgcacgggaggccgcaggtgggcgtctcattttgatttgatctcatttgttagctaatagctactgcctagaccttcattcacagatgt

SEQ ID NO: 354091 - DNA, 255 bp, Zea mays
gagacacatgtcttaagggcattgagagccccccatgctagggagagagtaggatgtgcctgcctcatctccgcccagattcttacaaggttattagagcttttggacaagatccacactcagttggatagagagggtcacgagttggcactatgtgtaactggatattcgggtggacctaaagggtcggtactcagacttctcaatgcagcccagatatgacaacatggaggctaagctcccttgataatccaa

SEQ ID NO: 354092 - DNA, 252 bp, Zea mays
gttgcagacactgaagaagaagatactgttgcagagacagaagatgttgttacagacactgaagatactgttacagacaccgaagatactcttgcagaaacagaagcagagaaaggtgaaagagcaatcgcggacaagggtgagctcgagcaggacgaaaagaaagatctggtagcactcgctgaacttgccagctcaccagcactgtcatcgttggttaagccaacagtagtgaagaaagagctggacttt

SEQ ID NO: 354093 - DNA, 125 bp, Zea mays
cgcagaagaaggcagccggcttcttcgacgcgatcttatttgctgttgggttcggtcttgctggagctgggtttcttcttggctggactcttgggaggcttctgccgaagttttaaagttgttgg

SEQ ID NO: 354094 - DNA, 212 bp, Zea mays
gtcatcaattagaagccaacgagatttctcagcatttgataacgaagcagccgagggcttacagtccgcgttggaccacatggaattgcctgaaacaatcaggtggaggatccaagcagccatgcctcttcttccaccatccaggcgcccttgtatgcaatgccaacctgcgcagttgtcgttggctgcattatcaccactccagagcagta

SEQ ID NO: 354095 - DNA, 199 bp, Zea mays
caaaaggctacatcaagtgctgctggatcaaatactacaggtcaacccgaacgtggctctgattctagaactgtctttgttagcaacgtaagtgctcctctgcttttctgcttatgaacatatagacttggatttcactagtttttgtttctttttaggtacattttggtgcaacaaaagatgctctttctcgacactt

SEQ ID NO: 354096 - DNA, 250 bp, Zea mays
atgaaccaaaaattgttagcaatgaacaatatatttccgatgaagaagcaggcacagtgcagctaccgaaccctgccaaacaagacattctggaagcggattctgcagtggaacaaccatatgttatcaacaacgaacaacagattatggaggaacaaccaggtgtggagaaccaacaaaatgttgcagttaatcagcaacacaaaccagacgaacaagcaggcataatgcaagaacaaaacattggaaa

SEQ ID NO: 354097 - DNA, 201 bp, Zea mays
gaaatagtactaatatttgtttgtgtcatgcaagctacgtagaaactaggggtgcatgcacatggacccacgaaaatttagaaatctagtagtttggataaattttcaccatatatacactacctataaattattattatacaccctcaagatatatgcacagtagtggtggacctagctgttacgcttagagaggtatgc

SEQ ID NO: 354098 - DNA, 265 bp, Zea mays
atttcaggggaaagaagagacagaaactccagaaacagcattgccttcaaagcattttctgatggctgactcaatagctcatctgaagcaaattgcagtgaattgcccaatatttcctgtgcaccggacatgtctgaagaacagagttcaataacaatactacaaccaaaagtatccagaatacagggaaaaaacaaactgacaatttctgaaaagctgtccctgttagtttgatcccgggcacaaaggaagcaggcattccatg

SEQ ID NO: 354099 - DNA, 267 bp, Zea mays
acggttcgtgcacgaaccgttccaccgggggtggcgctcgctctacgcccgctgcgacctcctcctcggcgtccgcaagatcgggatcgggaacagcggcgcggcggtgtgcccctggcgccgcttcttggtgacccgagctgcaacgtcgacatgtgaatgtgtgatggatcccgtcgtgtagcaatctacgtgcatggtatatatgcgtgaatgttcgtctctgcgtatgtgatctgtgtatgcaaaggcaagattacatgtacg

SEQ ID NO: 354100 - DNA, 253 bp, Zea mays
agaagagctggtgagtgaaaagaagagcaagaagaaaaaagagaaggatcatgtgaaactggaggagaatgtgaatgaggtggaagagaaaattgtcaatgacagtgcagcagaacaaagagttgccataactgagagggaaaggaagaaaaagaagcataaacaagaggaatgcactgaggttgtgaaggagaagaaaatcactgatggtgatctagaccgagagaagaagaggaaaaagaagagggataga

SEQ ID NO: 354101 - DNA, 126 bp, Zea mays
agatggatatgtgaaaaattcaactaactaaagattgggtaattgattgaatctgtacacagatggctattgacaccaatacagagcatgctgagcctaagcacaaataccttctgagagtccacg

SEQ ID NO: 354102 - DNA, 184 bp, Zea mays
agtcgctcctctcctttccctgattaatactaggcgcacagcaacatgccagatctctgtagcccaggtgagaccaactgcttgtgttctgtttattccccaccaattcctatatttgattatttactgtatatgtttgtgtttgtggtggaggtaaatcctaggaaatttagatgagaagaaa

SEQ ID NO: 354103 - DNA, 249 bp, Zea mays
agcacggatccacttgaaggcaatttgaaggtaccaagtcctaaagagctaaagtggaggacagaaagtgcaactttgggtaaaatggtaaaaccatgaggtttgaatacttagataagttgcatatgcctaataatatgtttctagcacttttgctttatctctaactcaattatgtgagaaaagtgcttataggacttatattgagtgataatgcaaatcctggtcaacttatggtgaaatgatgag

SEQ ID NO: 354104 - DNA, 227 bp, Zea mays
cgctcctgttttgttcgcccgccatgatgtaaatgatcatcacccaactggaacccctgttatctcgttacatgcttaggcctctgatcgtttcgtagttgctgtgatggagctctgacaagtctgagcacgaaagtgggtagaacttcccactgtcgaagcggaattgcttctggtgaaatctggacaagttttgccgaatacagattcatctgccgattgatcgt

SEQ ID NO: 354105 - DNA, 251 bp, Zea mays
gaagtattttctgaacctgcaacatttcaatctgggcttctagcatctgctcccgttgctcgagctgttcaacgagcagttgagcctccaataggtccgtctttctttggtccatgtcatcaagcaagcttcaaggttggaagaaacagtcccagtttgttcacttgactcggtaattccaagtataagcaaaatgatcagatggacaagtcagggttagaagtttcacctgtccctttccagaataagat

SEQ ID NO: 354106 - DNA, 236 bp, Zea mays
gctaggttttttttggcttggcatatgaataccacggcaccacgccatgaccaacatcttggaacgaacaaatccagagatcacttgtactcctacctttgtagacggtgccgaagccgccatcgccgagttctctgctttcgtcgaagcggttggtcgcctcctcgagctcctcgtaggtgaagtggtgcgttggcgggtcctcgatgctgccggactccatgtcaccaacccgg

SEQ ID NO: 354107 - DNA, 244 bp, Zea mays
actgtcatcagcttacatatctgcacttggtgcttctgaaacagagaagaaggagctggctagtcggtttgagctcggagagaaagaagccgaggaattacgtgggaagatgagcttgcttgaggaacagatccgtaaagagaaggcacggtcatccgagtttgcggtaaaatgtcagaagatggaggaacaaatctcctgtagatctcttcttggccaccaaccagtgaaatcatctgcggcg

SEQ ID NO: 354108 - DNA, 237 bp, Zea mays
ctcttccgaactgaagcgtgcatcatggtgtcgtccattaattctactagctgctggttgtcactttgctttcccaacccgcgctggcagttttggcgtgttatacgtgtagtgtatgccatcatcatgcttcgtgcatgcatgcgtgccatgccatgccatgcaaaacgatgggccattaattgggctgggctttatttgcatcgccaggaaatggaaatccttgtgcgcgcggcg

SEQ ID NO: 354109 - DNA, 261 bp, Zea mays
atccttcgcgcgaattagccgctcagcgaccgggattcaagattactggctacagggttgcgatcagatgaggggcgcacaaggcttctggtgcagagcgcgaccaaaaccaagcaaatcaatcctgtcaatggaccagcaaggatgccggcgatcactactcctcagaggcatgggaacgagaatacttccggtgaatctgtcgtcacgaaagacgaaaacgttgagccccttgtcgccttcagcaggccacctcctttg

SEQ ID NO: 354110 - DNA, 180 bp, Zea mays
cggatgtaaccgaataaatctatactgcacgagtgaatgcagggccagcctcctgaatgcagcgaaccaaacacacactgattcgtgttcaatgcatgtggagagtctaactctcctgatgcggacaaaacaatcccaaccaggataattatgatttatgaacaccacacaatgacataa

SEQ ID NO: 354111 - DNA, 255 bp, Zea mays
cttcagtccatgcccacacgctccctctccactacatccactctgccagctctgctcctccttgctctctaacacgcacgcttgaagaccgtggaggccggtgacagagtcgtcgtctggaagacgggaagagagactgcgtctcacgatttgaagcgatttgtgttgttgaagctttgattaagcaagctgtttctgttcactttatacgaagggtcatgccttcggataatgaaggagaagatttaggaacac

SEQ ID NO: 354112 - DNA, 252 bp, Zea mays
aatggttcttttccgtaggaattctcatttgttgatacgatgtacctttgggaagtaagttgtctggacaaaaaagttataataaatttcataagtagtgcatattattaacaattcaatctgaccaccactaatatcaaataattacttctgttatacatctaaatataggcccagtaatgctagaattatgaattggtttatgcatgaaacactactgtacaacttcaaaatgttgcagctcatgtggtc

SEQ ID NO: 354113 - DNA, 242 bp, Zea mays
cggaatggtccgccgccgtcgtcgtcgcaggtgaaactcatggtgacgcctgggttctatgtccaggacaggctgctcaaatgcagggtgctctgcaggtacagcggctagatctctatcgctgattggattggaggtgcttcgagtgttcttctttgactgattgttagttattagtgtgatgcagtagtatctgttctgctaggttgcaaagtgctatactgggacgccagaatatcatt

SEQ ID NO: 354114 - DNA, 258 bp, Zea mays
ggttggtggcctgtatagcgacctgctgcagctgtcgtcagtcagcctactcttgcccaaagccatctccacttccgtccctgttgcgtccgccgttgctaccgacccgccccagccaccttcttccaaaacgcgtcgttgccatccaggaaggtgcaaggatagagaaaataaacactagcaagatgcgaaaagagatgctggacttaaccagacaagatcgcgatggtgaagtgtcggtgaaggatgcagtagcgc

SEQ ID NO: 354115 - DNA, 267 bp, Zea mays
caaccaacacgctaaccaaaactcgatcgatccagtgcaccatcgacgccgcagatctgtccagcaaaaatggagcaagtggccggcccgtgcagaaacagcagattattttagccaacatgacgtgcttattaaagccgagggaacatggaatctttcactatgagtattcgctaacaactgaaaaaatatcattatcagaggggggcaactttttctttttgcaatattctttttttttctataaaccgcaggagcagcatcctt

SEQ ID NO: 354116 - DNA, 264 bp, Zea mays
ggagcacggaacaagagaccggttttatgtcatagacatgaactactttcctgggtacggcaaaatgcccgggtacgagcacgtgttcaccgacttcctgctgagccttgcccagaaagagtacaagaggcgaccaagctatagctccctaggctcaggcgaagggtgacaagtgaggaggaggctacttggcgggggcgccctgtatatgtatagcatccgcaatgcgtgcgtacagatgtgctgcgtgacgggagatgatgg

SEQ ID NO: 354117 - DNA, 253 bp, Zea mays
caacggcaggggtggtgacggcggcacaagggcggcggcagcaagggcagcaactaggccagtggctaggcaccactggtttttagatgttagtgtagattagtagtagaaatagtattaacaaaataatgtagtagtagttagtagtatagagtagtggaatgtaatgtagtagtagtagggaaagcatcaactcataacgagttgatttgtaagttctgtagcttcgctttatgaagaatgattttgtcta

SEQ ID NO: 354118 - DNA, 250 bp, Zea mays
atgatagtgatagtgatgatgaatttgattcaccttcctatgatgaattagctaacttgcttaaggaatacactcaaatcattagaaagtcaaaggctaaatgtgataagttaaaagatgaaaatgaatttttaactgccaaatatgacatagttgtaaaagctagtgatgatatgaaagaagaaaacaaaactatgtcatccactgtaaatgagcttaaatcctccctaaaagatgctaagaataagtg

SEQ ID NO: 354119 - DNA, 251 bp, Zea mays
cttcactgcaaagaacttctgaagccttcaggtcccaaggtttggataaacgtgatgaaaatcttgtaactgcagaagatgcatcggcaccacattttgaagagaaaactgacgtcgatgtagatgtggaagttgctaagggtgagagctcaagcgatacggttcctggtggctctgagaatcctcctttacctgacgagtacgttgatcacaaaattgaagaagacacatgcactgctccttcaccttca

SEQ ID NO: 354120 - DNA, 248 bp, Zea mays
gagcgcctttcttaagatggtgaaactgatgaatgagaatgaagcggataagaagaattactgggccaatgggaagctttcccagctgaagtgccctgtatgtcaaagaaatgggctttgccggtgtcaatgtgcagccgctccctgggaaggacgggcagaggtcggtgcaagctaagttctccgccagcctcgatggtctgaacaacgcgtcacggctcgccgagttgttcgagcgccaaggccac

SEQ ID NO: 354121 - DNA, 248 bp, Zea mays
ctaagaaatgatactgccactcacttttcacatgatgcaatagttggggaagatgtgatactctatgcaatgttgagatctgatcctgtggcaaagggaacaattacttcaactaatccaaacactgtgctaggaggtgaaaatcttggaacacaattttgtgaagtagttgtgaatgttgtgctaaaaagggacgcagatctgcctcgcccttatgaccatatggagaccatgggtgatgcttatat

SEQ ID NO: 354122 - DNA, 243 bp, Zea mays
ctcaaagccattcagcgctactgatgcctggttttgctgagtttgggcctcaaaactcggcggtggtggttccggagggaaccggtggcggcacacggcgtgatcacggagggtgcatcaaggcgaatcaactccgtgtgaaggacatggccgtcggatcaaaaacttaggagttggtcaatttcgcccccggtggggtggatagactctatgtaaataggggtactttaggaaatgagaata

SEQ ID NO: 354123 - DNA, 158 bp, Zea mays
agcatggcgatgcacatgatcatcctaggaaacggcgccggagccagagtagaagcttgagccctccaaggaagtcacaggagagggatcgagagcactatcgcggtagggaccggtctcatggcaacgacgtggggagggatagggtacgcgggaaa

SEQ ID NO: 354124 - DNA, 255 bp, Zea mays
cgtcatacatacagaggtttctttgccaggccatataatatgtacaaaagatatatgtacccagctacatcatattattatctccactttctcaatcagcttgatgcctgacgactccaagatctccaatgcttcacgcacgcaaatgcagagtcagtaccgttgcgcgtcatggtaattccacaagggcaaacatgaaaactaagtagcacctggaatgtagatttccggttgcagaggcctgatcactccgtt

SEQ ID NO: 354125 - DNA, 253 bp, Zea mays
aaatgcaggagatgaagagttaacagaggatcagattgatgccttcattatgagtgagcagatagctgcaacagaagggaacaatgcatcaatagacagcaaatacacacctcaagttgggatggaatttaagaccaggggagatgcagagcacttcttattcttctatggttttttcgctggttttaaaccagcaatcacccacactttcaggacttccaacaaaaaagaagcaatgaagtaacaaaggtgg

SEQ ID NO: 354126 - DNA, 178 bp, Zea mays
agaactgttagaagttcttatgggcagcaaatagtgcaattctcttatgatagtgttgatgacctagtagataaactcggcgccccggttggatgtcgggctgcttgttccatttcagaagctgcatatggagctttggaacacccggtcaatggtttagaggactcccctctcatga

SEQ ID NO: 354127 - DNA, 236 bp, Zea mays
caaattagtaatggggtatgtcgacaagtatgtgaagccatagagtaatgtggtcaccttccttaggaaagattgtacataatctttaaacatggcaggtgtttttggaatatgactgctaggaactgaaccggaaacacctgccaagattaaacattatgtacaatcctcccaaaggaaggtgaccagattagtaatggggtatgtcgacaagtatgtgaacccatagagtaatg

SEQ ID NO: 354128 - DNA, 267 bp, Zea mays
atccgtctcccggttcatgccatccccatacggccactaactcctacattccacagatgcgtttccgtagcaattccttgcctggtgggaaactcagggcagatttgaagactgccggcaaagatccagcgaggaggtggcgtatccatcccaaaatcgcaacatctggactaagggaaggagctgaataagcacgtatcaccctcgtcgtcctcgccgccaatgcctccacggccgaggcggcactcgtcgtcgcgcacaagaatg

SEQ ID NO: 354129 - DNA, 268 bp, Zea mays
atgaacaataatgaccacttcaacggcggacaggttgaggcggcgggggttcggaggcttcggaggctgggattttcggcggaaacttcgttggtggtggagatcaagttacaccgcccgggctctacagcgatcaagcctccatgctgccgcagatgtcggcgacagctctgctccagaaggcggcgcagatgggcgcgacctcgagcgcgaacggcggcgctgcatccatgttccgaggcttcgtgggcacttcccctcacgtgcg

SEQ ID NO: 354130 - DNA, 273 bp, Zea mays
aacggtgccgtgcgccggtgctggccagtctaggttttcggccctcgcccgccgatccgtcccccccgccggccatgtcgaagcaaggagggaaggccaagccgctgaaggcgcccaaggtcgacaagaaggagtacgacgagagtgatcttgcttatttgcagaagaaaaaagatgaggaaaaggcgctgaaggagctgaaggccaaggcacagaagggcgcaattggaggctcgggtctcaagaaaagtggaaagaaatgagcattgccca

SEQ ID NO: 354131 - DNA, 265 bp, Zea mays
caaggacactaggtattaataatagtaccaaaaaatagaatgtttcaccatctaccgtaaagcccaaggaagtgcttatcctgaaagcaatggatgaagagccaaagaagcagaatcgggtcacatggaccattgagctccatgaaaaagtttttggaggctatcgaatctcttgggggaaacaagtcctcgtgaaacctggagtttgaacacatggctgttcccatggcttttgtagatgaagtggagcagcgcttgttgtttt

SEQ ID NO: 354132 - DNA, 256 bp, Zea mays
ctcagaacgcgaggctacgtgggaacttgaggagttgatgcggcagaagtacccggaacttttcgttgtgggtggtggacttctggatcgttcttagggattttgcccaaacttcggtaaaggcacctgatctttgcttttcgaaggaagggatgtagcagcacggccaccacacttttaaataaaggaataactgattaataatgatgttaaacaggaagagtcaagtctagggaattattacattctaatcttt

SEQ ID NO: 354133 - DNA, 255 bp, Zea mays
aacaagtaaagcaaatatgcatcaagtatgacattccatatcgcatttattatggttagaaagaaacgggaaaagggtctcgcaggggggttaaagtttatgcactaatgactagttaaattatgcactctagtttcaataggttcctaacaaaagaattctgttatatgcactagtgggaacctaatcattttaagttgatcaacatcgcacgagataaacaattaactacatgaatcaattagcataacggaa

SEQ ID NO: 354134 - DNA, 252 bp, Zea mays
gcagcaggtgggccccaggaccaccttccaccgtcttcgaatcgccgacgccctgggaatgccgtttctttcttcacctgttctgatgacaccggcgatataaacattcggaccaaagttcgtcaagacttccttttgccatctcaagtaaccaaacgtgcttcaccgaggcgcctgtctcccacacaaccgacgagtacaaaaaaaaagttgatgaatacactgctttgccttgacgatgcggagaagccg

SEQ ID NO: 354135 - DNA, 252 bp, Zea mays
ggagcataggagatcatggcctttttgactgatctgaaagcagacaagtcttgctgcaaatgacagtttttgagtgagtaaacatgttgcaaggtgaggtgtacaactggacagagaagtatcccgtctacttggtgtgcggtgacagcttattgtgttctataacaggctaagagatcaaaggggaacataaattttacttaagttccatgcagctagtgttcaaatggcagggttagctctctacgagaa

SEQ ID NO: 354136 - DNA, 222 bp, Zea mays
atcattactcttttccttattttgtagaagagccctccttttgtgagtgcaggattcttattttttttctgtcttcagggtaattcttggtgtgaacccctgctctgtgagtgattcatgagtgtacgtaaatatcagaaaaatttccgcggtttatctgtacagttgaaaggccactcttgtactccatctgatccgttaatgataacatgagaagatatc

SEQ ID NO: 354137 - DNA, 255 bp, Zea mays
aggagctgcccttgtggccatgtgatgaataaaagcacgtaaagcaagcagactagcagagggttacgatgtgcagcagttaggaggagcaggtccggcgacggcgaggcagatgaaacaactcctctgttcctccctctccatcttgttgctagtagtatatatatttggttgctcttgcattgcagcaagcagtacttgatctgactgaggcacccatttccccaagccacaaaagagacgagcatgacaagc

SEQ ID NO: 354138 - DNA, 259 bp, Zea mays
atgctcggtgaacgtgcacaatatccaataattatagatatttggtaaacaagcccccacacccatgtttcaatgtgatttgaaattttgcacgaaacagactagccttgcaaatgccacagattcagagattccataaaagagctgtcccgttatctttacattttttggctacattattttgttggtatgttcagtttgcttgtctgtctctttgtttcagcaaatggaggagcaattcaaggtattgatagttctt

SEQ ID NO: 354139 - DNA, 252 bp, Zea mays
cgctcggcactccgcgtgctagggtctgccgaggtctccctcgagctggatcccgcgtgctagggtttgccgccgcctcggccagaaggcgatgataccagaagccaaagtaggagcagaaggccaagaaggttcttgatcacttggaatgagggaagactgaactgagcgttcttgatcacttggtatagttattgcacatcagcaccaagcctaatcttttacttgttccagctatggctgacatggtct

SEQ ID NO: 354140 - DNA, 253 bp, Zea mays
atttgcatgggtgaactttttcttttcaggtttcgttgcagcaaaaatcccctttccattgactcagagattcaggggaatgctgcaaaatgggattgacctgagcactgttgatgtcagctatgttagtagccggtcatgcaactgatgatgcacagaagatgatgcaaatgggtggtggatttggatttaacccaacaatgagtttgggagcagagaaagacagcctggatatcatgcagcatgactgggc

SEQ ID NO: 354141 - DNA, 205 bp, Zea mays
gtccgcgatacaagaccaatccaatcccagcggtagtggaagcagtttcatttccttccttgcagctagcagcgatgattcttgtggcgatagtggcggactgctcgaggagtacaccgcgctggtggcgcggtgctggagcagctgctcaacgacgcgccgttcccgcgccggatgtgcttcctcatgctgcggagcctcccct

SEQ ID NO: 354142 - DNA, 252 bp, Zea mays
gtagatgatgataatttcattgatgacactggagttgatccagctgatcgttatggcagcgataatgagcgacattcacctggacgttatgcacaggctgaggagggtgaggaggacgatgaaatcgaacgactcttcaagggtggtaagaagaagaagaagaagaatgatcgccctcgtgcagatattggccttatagtggaacaattcattgctgagtttgaagtagcagccgaagaagatgcaaacttg

SEQ ID NO: 354143 - DNA, 242 bp, Zea mays
tggggaagtacctaaattttgctctatgggtcaatgttttaaagtcgacaagtcgattcaagtcatctgagcagcgataaggtgactaattgcgattagtcgaacctagtcgactcctagtcgtccacctatactaggaccatgtatgtatatatacatatatatgtgcgtatacacacacatgtgtgtgtccatagcagcatgataggttaaaatgcatcatgttgttctgtgactaaaaa

SEQ ID NO: 354144 - DNA, 194 bp, Zea mays
caaggatgaagtgttcttcgaatctcgagcttggttagattccgactgcgaggatgacttctacagcgtgaatggagatttcactccatctcgtggcagcacacccatccatcagcccagagcgcagacggtgatgagcaacatctttgaaccagacacgcacagttccaaatcaccggagccttctccaactg

SEQ ID NO: 354145 - DNA, 244 bp, Zea mays
gatgtaattgctggatggcgcccaaaagtcatgggttaaattcatttctaaagttagacgttaaggggcggatgtagtacaggtgcatggggatacaggtacaagcagaacagaacaggctcttgatcagttcattaaggataacaaagaagcaaaaaaactcatatgcttacggtgacattggcaatggctatacttgtggataaatgttggtgaattgtatccttatatccgcacacctaac

SEQ ID NO: 354146 - DNA, 268 bp, Zea mays
gaaaaaggaactgacaatcctgactcctcaaacaccactgccatagtccaaataatgaatatccggaccatactaaagcaaaacctccaaaactgggaaagtgtgcaccactgaacatacatattatctttttgggggagaacaataaactaaaagtgaaaccaaaaagattcgggcatcacaatactcggcccatgcacatagtgatacaaaattatcttaaaattaccaacgaagcagaaatttaaattgttttctgacacgcacg

SEQ ID NO: 354147 - DNA, 255 bp, Zea mays
catcagtatacccagttcaatatggatcgccgccgccccctccgctgcattgatagaaagaatctcagaagcacggaacggaaggatagttggttctgctctcgcccctccggccatggctaccacttgccagattcaccagtgtacgtggtcattgtcatgcttagcaaatactgttggttgatggctgcatgcctcaagagcacggaacggaaggatagttggttctgcatgtctccacagaattttgtgaaa

SEQ ID NO: 354148 - DNA, 254 bp, Zea mays
atgtacctcgttccaggtgtgatcggattcgtcgccgtacactgtctctggtacggagaagtgaaacagctgctggagttcgacgagtcaaaagctgaggcggaggaaggcggtgcagaaggagagcaagatggtgatggttccaaagccagcaaaaaggtggactagcatgatttagttccgggaggtaaaaaagaggacagggagacatttttcgtgtaaggtcgtcttgcagctagctagctaaacgggct

SEQ ID NO: 354149 - DNA, 251 bp, Zea mays
agaaagaactggaagaaattctggcagagaggtcattccatacagcgcaagagcaagttcatccgtgctaccaccttccttctctatggcactgttatattcaggaatctgaaaaaaaataccgaatgaacaaagagtcaaaacaaaaggttgtaaatcttgcaatatatctttttaaatcatttaactaatatcagaggagacgtgtattcatagtaaaaacacaatgtatgttatacttttgatcaatc

SEQ ID NO: 354150 - DNA, 256 bp, Zea mays
gagatgtaaagaagatgaaatgctgatgtggtcgacgatagatcagattcagagttgctgccactggttatcttgtgaagcagccaagcctaattatttatgccacataacctgtgctattgtaatgtgtcacatgcttatatttgcaataaacagctctaggtggtcagctttgtctgccgcaatgagcagtgtatcgatattgtggtttaaaaaaaaaacatctgaagacttccactcagttgcatatcagaaa

SEQ ID NO: 354151 - DNA, 265 bp, Zea mays
tcctgtaccacaagaggacatgggaattggagcaccgatggaacttgtgccaaatttggatgagaaatgggtagttaggaaagggcactttcttggtgtcttagtatgcaaccattcatgcatgacagtgcaaagtctgagttcacaggttgttgcaccaaaggccatccatgatgacaacagcttggacttacttttagttggtggaaaaggaagatggaaattgctgagatttttcatacttctgcaattcggtcgccatctc

SEQ ID NO: 354152 - DNA, 253 bp, Zea mays
aaccgtcgttacgtatccccttctagttgttaaggcaagacttcaggcaaagcacatgattaacgatgacaagaggtatcgctacaaaggtacggaagttctctaccttttgtctttctttaatcaggtctcatttcttgctgttactggattggtattgaataatatttaacttgccacgccatttcttgctgttactgacaaactattgaagatcttaatgtgccattcttgcgctcaggtacacttgatg

SEQ ID NO: 354153 - DNA, 250 bp, Zea mays
ctttctccatgaagctggagacggttcctcaaattatgcacccagcagctggacttggctgactgttataatatacacctgccccaagagctgctgcccgtcctcatgcggtggaaagccccagagctgttgttggggagcagcggaggaggagatcctgattcaggaggatgaagtcctttaggatctaaccagtgctggttgagaaactattcccgatttgaacatgtaatatgcagtttttttttgt

SEQ ID NO: 354154 - DNA, 122 bp, Zea mays
cagcggccgcatacgaggaatgggcttcaagacatcggcaattacaaatacaggccgatgaagcaaagaaattgcgaaagagaaagacagctgaagctcaacgattgcttgacatggagaag

SEQ ID NO: 354155 - DNA, 159 bp, Zea mays
aatacattgacaactgtaggcagcgtcaataatgacattgagatgcttgccaagcttaaggaggagttgaaatcataccaaaaagagtttgatgcatcaaaagagatctcaaagaagctaatgtcggaaaagaatattcttgaccagaaagttcaaagg

SEQ ID NO: 354156 - DNA, 248 bp, Zea mays
atcattctgattagtagtatagtgtaacaaaatacaacttccaggggagagtgcttagatcattttatcggttagctatattagatgatttcaaagttgactgcaaactttgtcatggagcaaaacttatttcggttccctcttataatgagaggacaatatattttggtgtaggttgaacgcgtactcttgtggtgttttaactcttttcccgttctagaaactgggactacattcggatgaagaac

SEQ ID NO: 354157 - DNA, 254 bp, Zea mays
aaggtggccacagtttcaatagtgtttggatgagagtcgcgtaggggcgaggtgaacaccggagtagttttaggtggcggcgtgatccaaaaaatcgaggggacggtgttgccctgcctcatcccactttgtcctcaaaccaaatcagcgtgatgaatttgatagtaatcacggtgaagtggaatcaaagacagttcaaatatcaatggcgtcgctggatacctgcgcggttccgcataggagagcagaagaaa

SEQ ID NO: 354158 - DNA, 238 bp, Zea mays
gattatgtcttcgactggacagttttgaaatacaaacaaggccacaaacaaaagcaaagtcctggggcacctattgctcgacctattcaagcacatggaccgaaacaagcaggtgtaaatggtgttattaatcataacgaagcccaggagcatgtagagacaagtcgtccaacagggcaagctgcatggtcgcaagacaaacaggcaaccaacaatgatcggaatcctgacgtgcggc

SEQ ID NO: 354159 - DNA, 255 bp, Zea mays
ctcaactcaaaatgagagataacgggtgaaatggaagtgatatgcttccatgtatccccttatgtgcaagagtccagaagtacaatttctatttgtcaggggaagctgtactcctatagatggttgttatgaagctcatcgtgggccatgcgtacatgccaagatcatggtgtcaagccgttggatgatttctcctatatgttagtttacgaaatagttgattgcatctttgtagtatgtatcttcttggctgtg

SEQ ID NO: 354160 - DNA, 247 bp, Zea mays
gatcgcaaactgccgccctttttttttttttttttattttctagtttccctatgatttacactatttaaacttccaatttgtttctagttccaagttcaaatccaaattccaattcaattcctattttgaacttcaaattttccagtgaatataacctctactatttacaatattattatttattcttttccttgttatttatttatgaaaggactaaatgacttcattaaaaaaaaaaaaaaaata

SEQ ID NO: 354161 - DNA, 245 bp, Zea mays
gtaaaagggttgggtatctcaacccaataaagatatgtgaggataaccacacttttagaatcggaaaaggcaacgaagcattacagaggctaacagacgaagaaattgaggtgcgtatccaggatctgaagaaggattttgaagcaagatacgccacctacataggacacgcaatgcttcaatttgaagacagggaatccatagtggccccatacaactttaagttggaaaggtgctggtgctcg

SEQ ID NO: 354162 - DNA, 237 bp, Zea mays
gaggagctcgtgtgcgacatcggcgacgccaaagatgttgttggcaggcctctgatgttcatgcaagtgacgaggttcaaatgcggcggatttgcaatcggcgtcagcgtatgccacaacatggctgacgccttcggtgtcatccagttcctcaagagtcgcacgagtcatcgccgggtccagcccatggccatggacaagatggtcggttgctacttcctcatcggcccgagagag

SEQ ID NO: 354163 - DNA, 239 bp, Zea mays
caatcatcaaaagaagcctcagccggttgtggagcaaggatagcaagccccacacgctgcagcaagaagaaccagaattgcatcacagatgtttcatgtgttcacttgatgcaaactgaaactgattatgatcgcactgcatccattattgatggcaagtccattgcagaggacatgaggttacatattgctgaagaggtctgtcaaatgaaatgttcagttggacacgtgcctggtct

SEQ ID NO: 354164 - DNA, 135 bp, Zea mays
atatgattttgaagacaatacaaatcataagcacatgctctcatcctgttcctcaaccagccggagctcgcctgctcctgaaatctcgatcgaccatggcagtaagctacaaccagcgacgaaatggcgtccact

SEQ ID NO: 354165 - DNA, 254 bp, Zea mays
cggaccccaaggagtacaccaagacagcaagcaagtgtagtactattgaatagtcattctctatccctgtcttgtgtatttctctctagatcaattgttggcgcgtgttctagccaaaagagagaggtgaagtgttgctgcaataaagagttagtgagcgtgatcttgagcaaggctttcatgttgtgttcttctaccgtcgagctattgagttgtgattgtcgtggttctgctgtactgcaacaccattggat

SEQ ID NO: 354166 - DNA, 135 bp, Zea mays
cgttcacgggcactgttgccctctatgtagtatgttttttttttgtttttaatcgttttagtgtttgaccaagtacgcgtaatagatttgtaagttcgacaacgttttaagagttcaattcacgcaattcacgct

SEQ ID NO: 354167 - DNA, 242 bp, Zea mays
ctttggtaagccagtcgtagaattggacggcaaatatgtagcatcgccgattgataggttcaaatatcatgaaccttttgatgctgtttgtgtgtgtatgattgttacttctggttactgcacggtttttacgactcatgatatcgcatcgaagtggctttgcaaaagctaaaatttgcgttccctaaccttgtttcaactagcggctctacaatcacggttggactgttggcttgaccttc

SEQ ID NO: 354168 - DNA, 259 bp, Zea mays
ccagcagcctcggcgccgccacctccgtgccagcctcggcgccgccgccgccgcaggcgtcgccttcgacctcaacctgcccgcgctgccggagcggtgcgcgggcgtggacgaagacgaggtgctcagcccgctcgcgttcaagaagccccgcttcatgatcccggcttagttagtgttaagctcgtgtggatcagctgctcatttgttcgtcacttgtgcttcgtgacttggattgttcatctagatcgtagtggtg

SEQ ID NO: 354169 - DNA, 188 bp, Zea mays
actagttctagatcgcgagcagccgcccttttttcatcttcttcttcttgtcacctttacgaaacaacttgatggaggaatcctcttcctccatcaagtcgcttcgaaaaggtgacaagaagaagaagatgaaaaaagtggtctactacgagaccgactcttcgcaccctccacatcaagctccgagt

SEQ ID NO: 354170 - DNA, 219 bp, Zea mays
ctttcaaccatgccctggccacggcaagggcgagcaagtgtggatctagcctgccgcagatggtgcgacgcagccccggccacgtgcggctctggcgcgagcgaatcctcggacgcggacggagcaccgagagcggtaacactgacgagcgagcaggcgccgctaaagaagcgcaacaccgtcgacttccacaggcgaatgaagcaaggccgttcgatg

SEQ ID NO: 354171 - DNA, 249 bp, Zea mays
atggctcgaatccttatgaagtttgatgtttgaacttaaaagtctgctcagtatgtttttttttcctggttatatctcctaataactgcctgggatcaaatttgattcgctggtgtttattggacccctccaggttcttgtttaaaaccgtttcttgctgaatgttaacttggttctgtcaggctcagttttccactatggcttacattaatgtgtttggtttgttgaatgttaacttggttctgtcaa

SEQ ID NO: 354172 - DNA, 247 bp, Zea mays
gccggggatatcggggttcgcccgatagctaggcgtgggacgcggtcgggttcgttgggttctggatgacaggtggggtcacgcgcgcacagactgggtccgagcgcgagagtgccgcatagagactgccccgtggggccctgctgtcggcacgcacagggaggagacgggctgcgcggtggggaaaacggtagtgggccgaaatgtggtaggtcggcccaggtaagctcttttcccttttctattt

SEQ ID NO: 354173 - DNA, 256 bp, Zea mays
cgaacaagaaacccgcgaaggctggaaccaagcaagggagcattatgtcattcttcaagaaagcatgagccagcgcggtgcgcaccaaaacgagacaggactaggttcagcaaactgtctgctgccgcgcttactgaaccaggtcgctagccaggcatctgaactggtagccctacggctctctacctgaatatcgtcaggccagcgagcaagaagggctccaagcagagagcacgtctgttagttcagtgattat

SEQ ID NO: 354174 - DNA, 249 bp, Zea mays
cgcgggagagagcgatggctgtgtctcgtgaggcagcggtggcgaagtgctaaggcggcgggccggcggcagcagcagcaggctcacaacaacggcggcctagatccctgcaaggcacacagcaaggttgatttccctaggtaaccacatcctcctcttcctttcgtcgtcggtgaggcgaaactggaagccgatgggcagatccgtgccggacgcacccggcgggccttccatcaccgtccgaagttt

SEQ ID NO: 354175 - DNA, 258 bp, Zea mays
agagggcatggagatgcaatcgtagatgagaaacagaagcagtgcgtacctacggtttctaatttgggaaggccacctcgaccccactctacagtaccatccataccgagaccattcaaagagacaacggaaagctacccagatgtggacttaaacgacgccttcctttggcgacttgctcaagagggtataggagatacccacaagattacaactatgtgcagtgcatctagacgccacataaacatgtcagatgct

SEQ ID NO: 354176 - DNA, 260 bp, Zea mays
aagaattcgtcgccttcaagtttctcaaatccgcagagctccaggaactctatgcccccatgcagatttccaaccctctcctgtaaggtggggtgaacaaacaaacacattaacaaggtcgaatacaaagcaaggactctcccaaatcgaaagatttatttattgttacctgaaatgttgcattcgtcagcctgatctttctaaatttctcctcgtcaggatttttagcaacgtttccaatgtaagtaagcagtgtttgg

SEQ ID NO: 354177 - DNA, 259 bp, Zea mays
atggagggcagggcattgggttccagataagggatgtccgtgtccgtgtgctcggtgagatggcatgggtgaacatgaaggcgaatgttgatgttgaccctttggtgttccatgtgacgaacgtgtacgagctctgtaatgggaggtggtatatggtccatcaccacagctcgctcatggctcaccctgctccgcacaatatgtttggttgaagctggagaaggaaagcaaagaaaacctttgggaagaaaatttgatg

SEQ ID NO: 354178 - DNA, 244 bp, Zea mays
ggaagaactgaatggagcatcacaaatggggaactggggtcaaggagctaccaacaccagcagtatcagatcaggtggccggggcagctgggatggttcagcacggggaggtggtcgacaacgacaccacatcgccggttctggtggtttctatcacagttatggcaggagaagatgagtttgtcctgatgggaggtggttggcagaggcgccacactgtgggttcttgtggtttctatcagtt

SEQ ID NO: 354179 - DNA, 234 bp, Zea mays
gttttcttccagcacgtttgcttccagcaaagttgtcagttcttatgattagatgaaaaatctagaattattctatcatttacacatccatatgacctttgtgatatgtgatgatgtgaggtattcaaccgtgtctaactactaattattgccttcttctatttgttgtataggaaaagatgaaatggaacttaaattttagtggtcgcacaagtttggagccagttgatgacc

SEQ ID NO: 354180 - DNA, 257 bp, Zea mays
aaaatcatctccatgtaggattctttcttgtcgtgcttgtccccttccttgtatagcttgttgtccatgtccttgagtgcttcattactggttcttcagtccttcatatgcttgtccttcattccatacaataagaatttcattaggtagcaatcagtcccaaatttgacaaaactagaacttaagaatgacttaacttataactgaagttgatgtgtgtgtgtgtgctctttttataggtccttgaaacatatgag

SEQ ID NO: 354181 - DNA, 249 bp, Zea mays
ggaaagatgagcaccaactcaagtcttcaaggatcaaatgaggccaccaagatgaatcaagatccacaaaatcttggaggaagtcttttcttatcctactctttcttacccaaacctatatatatcctaaagacatcttctatcctacataataaagtggacatacatatattacccatgctctcctatcacttattaataataaaaaaagagagactcttgattttgaactaattagaagctaaaagc

SEQ ID NO: 354182 - DNA, 252 bp, Zea mays
ctcaagtcatccagggttcgatccctgagcctggttgcaatttttttttgctgcggacggacaaataacggacgggggagggcagaacggggtggcagcctaccccttacattcttcatagtagtagagatataaagcactgaatattcataaatgcaaacatgaaagcgtataaccttgcattttattatttgagaatgtaatcatgttttgaacaataaatctctacaagttggtgtttccaaactccca

SEQ ID NO: 354183 - DNA, 249 bp, Zea mays
gtctaatttgattatggaagaatgtgtaacttaagtaccatacttaattcaaaaaagcctaggaaagtacatatattacacccccatatttaaactaaacaacatgcttaatttaatgaggatgaatccaaaccgaatcatattaaaatacaaagagaaaacatgaaagaataatcaagatttatttacatggaggtaaaacataaaaaggaattgatgaaccaaagggcaattgtacttgtttttgtt

SEQ ID NO: 354184 - DNA, 242 bp, Zea mays
actagttctagatcgcgagcagccaacgcgtgacaagctgagtgaggtgagaaaaacttcaatgttgatcgtgtgcaaattgtcgtgaagtttgccaagtactagcggttccatgcgtattagtcacaaatctctcaaggattctagcggcttgtgtggacaaccgtggatgagcctgcctacaatgcaattgttcggtgagatccaattgaggcatgttttcctatgtaatcttctatttt

SEQ ID NO: 354185 - DNA, 244 bp, Zea mays
ttccaatatttccgcactggaaggagtacaagaagcaagagaacgagggtaaaattacagactacattgggaagcttgctggtcaattcaccatggatgttgagagtaatgcagtaaaagatgcatgtgttgatatgctaaagggtggacagcgccaaatgaggtataggctgaaaaaaaagtacttcactagagttcctgcaaatcaagtgaggactacatcacctgtttcatgtatgactga

SEQ ID NO: 354186 - DNA, 237 bp, Zea mays
gctcggcattccacctacaatccgatggtcaatcagaagttgttaacagaataatcaccatgtatcttcgctgtctagccggaggcatcctaaatcatggctgaaatggttaccatgggcagaattttgctataattcatcatatcaatcggcactgaaatgttctccattcaaggttgtctacggacgggacgctcctccgatggtctcctatcaagcaggggactagtcaaaggt

SEQ ID NO: 354187 - DNA, 196 bp, Zea mays
ccataatatggcacttgagcccacaggacgcacatttctcgtaacccgtattccaaaactttatctacctgaacccatagttactgtttaagagcaacaccaccaaaaaaaaaaaaacaaaaaaaaaaaaaaaagaaaggcccccccaacgagaccacgccggcccgcgcaaaaaaaaccggaccggacccccccc

SEQ ID NO: 354188 - DNA, 260 bp, Zea mays
aggaggaatggcggcaatgttgatgcggttgaggcgaccacagaccaaggcaatgctgtagatgttgctcagcctgaagacgtgcgggaagatgttgtggacgacggaatgttgagactagcggcaaccagaggttgggtgcccggtgacagcagccctcctttgagcaagaggctttcagctaaggattgggcagaatgagagagacaaaaggaaggagctgaatcttttgaaatatgaagcctcaaggatgaattgct

SEQ ID NO: 354189 - DNA, 260 bp, Zea mays
gccatatggatgttgaatgatggatgcgatgaagctattggagctgcatgtgctgccttcggctttggtgtactttgcgtcgctctaaaatcacaggctttcatttctttgagtggacaccatatcagcagagaatgtgtttctgccatatactaatgcccacaaatatcgtttatcaaaaagtcgttgaagccatttattcccttgaaggttgaatgtggttctctccataatctccagatattcccatcctatcagga

SEQ ID NO: 354190 - DNA, 258 bp, Zea mays
ccgcatctggatcccaatacgaggaggaccgcagtcgccagacatcctcgacgcggtgccgttggcagtcgttccgccaaccaactgggcgagtcagccaccgctgccgacccccactccaagtacagagccagtgctgcgatggaggtctccaactccggctcctccttccttcgcgtcggccgcggcgggactccacacgaatgcaggagaatctaacggcgtcttcatcccgaatggccttgggcgtgcctgggc

SEQ ID NO: 354191 - DNA, 260 bp, Zea mays
atgttattatggacgcaactttgatcctgaatgcgcacaactttagttgttctgtctgtttttagaggattcatttttagataggttgaatattgtcaaaatttggttgttcgaaatggttatgattgttgagttgattcttgatagcattactaaacaataacctatgcgtgcacaagtgtccctcattgcaatgcacgggcatatacctatcttgtcactgagtttgattctttggtgccaggtgcttctaatatcaa

SEQ ID NO: 354192 - DNA, 269 bp, Zea mays
ctaggccccatcttctaaagaagttaagcaagtttcaacaacatcttctgcagacaacaagatggcagctctgtatgcttatccaaaagtccaagggctttgttacaagtgtgggatgacttactctcgaggacatcgatgtgctgaaacagtccagttgcagatggtggaagaattgtggcagatggtttcattgcctgagactaaaatgttatcgtcgtctgaagctaactcgtcgtctcaagcagttgtgaaagggatatctactc

SEQ ID NO: 354193 - DNA, 263 bp, Zea mays
agaacacttgcagagattctcatctctctctctctcttgcgtcccgtcctagcggacaagcggagtggggctccctcgctctgtgtcactgcttgctgcatcgctgaaagcgtaggtgcggcggcggcacacgaacacttgcaaagttgcaaacccgtacgtggggggggggtgcggccccgatcgagcagtggtcgtcgtacgacggcgccctggatccagccgagagctgcgtgacgagcgacgaatgatgcgctcaggct

SEQ ID NO: 354194 - DNA, 264 bp, Zea mays
ggaacacgtccatacgtgtgatgggcatacatcaaaatctgtcattctggcacctcttctgttaccagtagcagcaggggagcctgtttggatgatacatatgtaaatttgttctgcaattatgcttcctatttctttacattgtttaagttcatgttggatcaatatgtatgcagattagatgtatatagtaataataatatactccttcgtgttcacatagtaatgcacttatgctccaagcctcgtttcgttcaagcttgc

SEQ ID NO: 354195 - DNA, 260 bp, Zea mays
cgaagatgtgcttaaaattttgatcgagtgacatgttctggaaacttatgtgcacaagagacgctgattaaacatgtaacgtaccattagccttggtacaggatagggacagtaagctctggttctatcttgtactcttaaaatatgttcataaggtggcatatggtcatggtaaatgttaaggcgatggtggcactgtttggttgggagttaaaaaaaaaaaaaaaaaacaaaaaaaaaaaaaaaagaaaaaaagaaga

SEQ ID NO: 354196 - DNA, 244 bp, Zea mays
caataatatgagagttgaatatgccactgttacaaattgtgtgcgtttggttcatgataaatgagggctacttcatcaaaactggatgacatatacctatgcttgatcaacgctaaagactttgaaatattgaaggaaaccaaaacacctgccaatccacctatcttgtcatggtagagctgtgggagatggatatcctcggatccacacaatggcgaaaacttcgctcggggtcatgtgacag

SEQ ID NO: 354197 - DNA, 241 bp, Zea mays
ctccccgtgacgcgacgtatctgctcggctccctctcccggcagcatagctcctcgcagccggatttccccgcagccccagctcgagcagtgagctcgccgtcgcccattggctgttcgacagaatgcctgtgggaaaacatcgtgttgtgcgcagcccatccgtgacaccgtcgaaacccgtgctagtcgtcaatgccattcgtcgcgcacgcgtgttcgatacaagaccggtcgggtgc

SEQ ID NO: 354198 - DNA, 284 bp, Zea mays
  unsure (1)..(284): unsure at all n locations
cggagatcatccggcacgtgctgttcggctacttcagccagcgcacgggcctgatggtgcacatcgaggactcgcacctgacncgcatccagccgcacgccggcggggacgccgtgtacttggagaccaccaccagctccgccctggaggactaccgcgccgttgaaggcgtcattgtcgcgcactcggggcgctcggcggtgaccctgttccggttcggcgaggccgccatgagccacaccaagacgcggatggaggaggcctggagcatcgaggaagttgcg

SEQ ID NO: 354199 - DNA, 270 bp, Zea mays
ctcgatcttaggaacgtttcttgcttgcactgagcaggggaaagcttctataaggtccatcacgaaagaaaatgcagcttcaggctcacatattgagccatctgctacatgggatgtgtgcggtggggccaatgtgcaattttgctcagttgatcatggtgaaaactatgtgatgtttggagggaaaggtatagaagtgagtttgtgggatattacatcttgtagtaagacatggtctgctaaatctccccgaacaaatagtcttggtat

SEQ ID NO: 354200 - DNA, 260 bp, Zea mays
tggggcaacctgcaccagctgaaagaccaggtaggataaggcgactagaatcacatgtcaaaaatgcagaggatgaggaaagaactcttgaagaatctttagaagcgaaaggagttctccttgctcgggctcatgaggaaagcaaggacttgcttaagctactctttaagagctttgttgacgtgctcactgaacgtttgccgcctgtctctgttgatggggaaattcctaatctgcgcagtggagatcaaaatgtaaat

SEQ ID NO: 354201 - DNA, 259 bp, Zea mays
cacgcacacagaatgcctctgtgtcggccaattctcctaattttgctaggaactggcctatgtgctcgcttgtgctctttccttggtcacccgaaaacttcgcaaattcgggtatcctagttccctgtggatatgggtgatagtcgaatcggctatcgtaaggcttccaatacgactgccccctagggatcatgctaactccgagcttatctcggaacgccctagctatttcttcccttactatatcggtggtagccga

SEQ ID NO: 354202 - DNA, 248 bp, Zea mays
ctctaagtgaaagatcacatttaccccttgtttggagggtaaggatttataaataaagttagaattcattcatgcatgtcccaacatggatatattcttgtaagctgcgttttgagtgactacattacgattatattcctgtgcacatgtggtttgcaaaaatctgttggtttccccaaaaaaaaaaaaaaaaaaaaaaaaaaaaaaaaaaaagagaaaaaaaaaaaagaaaaaaagacaggcctcag

SEQ ID NO: 354203 - DNA, 254 bp, Zea mays
cctagttccgggtcttctggaatcagtacagctttttgagccacccatgagtcatgacagaaattattgcttgtttgtgctggttgtagtgccacttgcggcgcatctgcaagtcatgaggcatacacgctgatttgatgaaattgccccttgtattggttttggcgaactaaagagaactgcggttcagacatgccatatacttggagatgcattggtggttgattgtaaggttgcaagtgcatctcaaattt

SEQ ID NO: 354204 - DNA, 248 bp, Zea mays
ctatacatatataaaaataggaaaagaaaagggaaaataaaaaaagaaaagagatttcctcagctagttgggccggggggaattcggcccagtcgagcgcaggcgcgcgcggccacgcgggcaggcggcccacttggcccgccagcaggggaacggcgccgtgggcacgggcccacgtgccagatggatggggaggctgacgacgctaggaaggggtgacgggggggaccggtcggaacctgtggggg

SEQ ID NO: 354205 - DNA, 265 bp, Zea mays
gaataaaggagctaataatccgaagtgtaccgttggctgaaacatcagtttgatactttggtgaacacctatgctgcttgctggacatctcatctcagcaaaacgtaaacaacatggacttgttgaaccggcgtgggctggctggaaccggatcctctgctgggtcgtggatccacctgatagcctctgcagtcgactgcagagaatctcaatccggactgaagctgctccaacgaccagcgccagcaaattcattcgcgaatct

SEQ ID NO: 354206 - DNA, 191 bp, Zea mays
taaacattttggaggtgtttttgaagtttattgcatctggagaacatcgtttggctctacctctcttttattggtactcttaaatttcttgttccttacatttgggatggtgattctctacttgtacagcaactggattgtatggacggaggagcctgaattagattctgtttctgcatgagcaataagtt

SEQ ID NO: 354207 - DNA, 267 bp, Zea mays
gtgagattagttgttgaggttagattttttttcagtccatcttgagaatggtctatgcctttatggtttaggctagcaagtcttagattggttgcataaaattacatctctggttacatgtgaggttgtaaaatcagtatggaattatggatgagtgtaccaaccttaatgtacccgttcaagattatggtggtatctttgcgtacaatgctgtaactattcatttttttttgtgtgtgtgtgaagttaaatataagatgaccacac

SEQ ID NO: 354208 - DNA, 235 bp, Zea mays
cttgacttgagcattcctttccaaagctggtggtacctagaattacttttcttacttgtatgctaactatcttgtcgtttttctgttgtccctccctctgattctaaaaccaaaggggcaactgcgtcattaaaacaatgcaggcgggcatgcatccgtccaatcagaccaggttccgtggtctgcactgaattaaaggggcaactgcaaaactgccatcgttttcaggctttgc

SEQ ID NO: 354209 - DNA, 178 bp, Zea mays
cttgggaaacattattaatcgtgttttttgccgcccttcagaacgtgaaggcccccaacactattcaccattactatttatcatcgttactattcattgttactatttcaccgtcactatttgcgagggcctctgtgatctattcatttgttcctattctcttccggttcatccgatc

SEQ ID NO: 354210 - DNA, 119 bp, Zea mays
gtttgacatagacgacaggctaggggtctgcttgagatggccttaaaatgagacagatggtatgcttctagcaaatatcgtggcttcctctgagctaacttgtgatttttcctagatga

SEQ ID NO: 354211 - DNA, 100 bp, Zea mays
cttagtaagttctgatgaaactattgccagcgctaacgaaagtcatagcagtggcaagcatctggtgaaggggcttccaccaaagtaccaggctacaatt

SEQ ID NO: 354212 - DNA, 246 bp, Zea mays
ggaacggaggtagggtaggcgggccccacccccacaagctctacgctctacgctctgctctgctcttctctactcctgcgtaacacacagacaaaaaaaaaatagcatcatgtcggaggtgaaggactccaatgtgcctgctgcacttgatggaaatcctcaacctatggaccaaactgaagacaattctatgccctcagcacagcaacaggaagaagcaatcaagaagaagtttggaggactaat

SEQ ID NO: 354213 - DNA, 135 bp, Zea mays
cgtgcagcttcaccaaaggactggagctaggtcctatatagcccatcgttacagcctgaggactaagtacaacaacatggagccggatgctcttgatttctttggggaatgtatgaatagtccccgaaatggtcg

SEQ ID NO: 354214 - DNA, 240 bp, Zea mays
cagtgataagggtcatctataatgagcaagatggtcgacgacatgctagatccatgtcgtctaggtctagaactggtgacccccatcctagatctaatgcactcgtgcagtgccctattaagcagggctagctcaaaggcgtgcatgatgtagagcaaacatgtgcttgtgtcaatggatgcatcttgatggccttgttcacactctaaggcatggcgttgatcccagtgggcatggtgg

SEQ ID NO: 354215 - DNA, 234 bp, Zea mays
caacaacgcgaatttatggaggcttgcaatgcacataaccaagcgatgtatcaattaatgcagcaacagggcatgacatcaaattttccaccgccaccacaatggagccaatttgcaaacacaccagttccaccaccacagttcaccacacctccgacacatatacctgcacctggagatagggttacgcccgaagcgggtggtagtgggtctgatcccgcagcagggactgga

SEQ ID NO: 354216 - DNA, 231 bp, Zea mays
gccatattgagctattgatttatgccatattgagctactgagaaacagaccagtacagaactacagatacttgctcttgcactggcatgcctctatctataataggctaaactagacggcgtcttcttgctggggattctggagaggaaatgtaccggctttgttgatgtatatgccatatacagctatacaattcactgtcctacacaaactaaaaacatttgcttctgg

SEQ ID NO: 354217 - DNA, 257 bp, Zea mays
attgcctaagtgtcctgttttatatgtttcttctctacttgattgtgatataggagttcatagacatgaatgcctaggtcctatttaaacttacgttgtgttggttgctcttgtacggtcaatagaagaacaaatgaacgattaaggtgagcgtagtaaatgtgtgtacttgtgatgtcgtggtcatgttgcgtaaataaataaaatgttgtcatctttttaatggtgttaatgttgaacgccgacgacgtgtagat

SEQ ID NO: 354218 - DNA, 159 bp, Zea mays
acaaaagattcggggtgcaattgaaagatattgaattgacaaatgccaaaataagatagtaccaaaatcatggtgtcacaacaaagcttatcgttatattgcgtatatatgtagattggacccaagtttcaataacgcaagatctgaaaaaaatggtta

SEQ ID NO: 354219 - DNA, 147 bp, Zea mays
gtcatatttaaataccattaagttaatatattattctattatatttatcaaggtgtggctcgcgagccgagccgagccagcttgggagccaatatcgagccgatacgagcctcatccttgagctcgtgcaatgggcgagccgagcga

SEQ ID NO: 354220 - DNA, 242 bp, Zea mays
gcaccgcggccgttgacttttctgctttaattccccatccccagctcccgaatccttcgtctcgtctccacacgcaacagcacccaagcagacagaagccagagagcaattggcagcgagggcaggaggcaagaagcggcgtcggcgtcggcgtcgacggcatggaccggaacctgagtgggttcctgatcgggtgcgcgggcaccccgtgacgctgctggcgtaccagcagacggcggtga

SEQ ID NO: 354221 - DNA, 253 bp, Zea mays
agcagcagcagcagcccaaggtgcccccgcgggacgccgccggtggcgagaacaaacgcgacgacatgcacaagcacaccagagtacgacacgtcgcagggctcggaggtaaaggagaaggagaaggcgcgccacctcaaggacgagaagcatgccaccgcctagaggcgccggcggcgacatcaggcagggctgtcggcgtttagtttagtcgagttcgctttgctcccggcctctgggcgcgtcacgtact

SEQ ID NO: 354222 - DNA, 157 bp, Zea mays
gcttgatcgacgtaagattgagaagctgatacttggaggagaagcggagaatcaatacaagctttctactgactattatggtgtcactgccggagatgcaacacagggaaagcaccagcagccatggctgatggagatggaggaactgctgtttgtg

SEQ ID NO: 354223 - DNA, 232 bp, Zea mays
cttctgaagaaacaataacagagcaaaacacacaaaaaagcgggtaacatgggaaggtgaacaagcccaagagaaaaagtctcccccactcctcactcgcacgcagaacgagtgcagccttgggcgacggagcacagcaccacaatccacaagaaagaagacagagaacaggagacggagcggaggatcggaggagctctgacctttgcgcgggcaggcgccgccgcaattc

SEQ ID NO: 354224 - DNA, 162 bp, Zea mays
aaaacaaatatttggaattcagtaatcgatgtgttcaacggctgaagcaggtcttctattcggttggagccagcagcgaaaaatttaatccttcgtctgaagacctgccaggggccttcgaacatatcgaaggtgaaattgatgaccttgacaaagttatag

SEQ ID NO: 354225 - DNA, 151 bp, Zea mays
gttttggaaaggttggcataacttggttgaatgtctaaatttgcgtttacttaatcagcagtttcaagcaaacatatgatttataattttatataaatatttgggtcaaactttgagaaatctttagaatacacttgatagatagagatga

SEQ ID NO: 354226 - DNA, 213 bp, Zea mays
ctccccgtactacgcgtcccctctccgtcccctcttcgcattgtggcagcctaactacatctactgccgtcctcattcgtgtgttttgggtttttgggtccaccaacacctcctgaagggtctcgtgttctgctgccgatggcatgcatgacctagatctgccgagggcgtccgtggatacagttagatgttgggtggtaccctctggtctag

SEQ ID NO: 354227 - DNA, 269 bp, Zea mays
taaggatgggatagctgcagcgcatagaactatcaatgggtacgggtacccaatggataaaaatcatattaggttatgagtataacgaattttgatgtcacattatatctatctagtatagtgggtgtgagcatgacatgttctttcttgtccaatatttgctacctgttggggtctttctcttccgaaggtcctcaaaaacgtgagtaaccatatgttcagtatgacagactgttacaggaggcttcgactttggaatgaaggttcgc

SEQ ID NO: 354228 - DNA, 253 bp, Zea mays
caagggacatggtgaagggtagagatctgcgtaaagtggcaggttacagttcagttgaggtcactaactaagtgcacactttcattgctggggagaggactcaccaagattgggataatatatgtacattgctctgtgatgtgtcacgaaggtcaagaagcggggacagctcctttcatgtagacactggcttagcattctaggatttagctgactgctcttctttgaattgaaattgatacttgatgtacct

SEQ ID NO: 354229 - DNA, 138 bp, Zea mays
caacactaacaacttgtgggtgaaccttaaagctgtcaagagactagtagagctgagcacttaagatggaattatcaacccagaagtgatgggaatctcacttgactgatggacattcgtcttcaacgtgatagtccg

SEQ ID NO: 354230 - DNA, 244 bp, Zea mays
gacactgataaagtagagtggactcattggcccattgcacatgcaggccatccatccagtggaccatcatccactttccaatatattggtccaagttttggtgtagttaatggagtaatggcctttaatatgtttctatgtgtcgatactctttcagtaaattggctagatttttttaggcgactaaactgtgtggtcactgctcagcacataggttctccttttttattcaaggtcactttag

SEQ ID NO: 354231 - DNA, 250 bp, Zea mays
catatatgcatttcgttattgcctcacagaggataagaagaagtgtatagaaataccagttgcttgtgagttgctgaatctagtattaggcttgcagttccgccctcaggttgacaagcttagtaattacctcaaggcaatggattctacttttttatgtggttctactcatcctttcttcatgaagactcggtgctcaattgacatgctatatttggactgtgtttcagtaccaaaatgactacaagat

SEQ ID NO: 354232 - DNA, 269 bp, Zea mays
gcgacgacactacttctgaggcactaccttccactgatgatcttgtcgctgagatagaagagttgaaggcttctttggctagtcaggataagttgcttaggcaagctgcttttgagaggagacaggatacaagagggcatatttgtatggcaatggagatagagaaagtgtcaaataatcttatccaacatcctatgaagcagatgatgtcttcgacaagttccaagtatgagaggtgctttgaaaccaagaaaaggaggggcaccaat

SEQ ID NO: 354233 - DNA, 267 bp, Zea mays
gtacacgtacacgcagatccatcgctcctactccccttccctatcgtatcgcgtcgtcctcgtcgccgccctacgccccaactaccttggtggctagggttcccaaccaacgcgcctccatcctgcacctacctagatcacctcctccacttgaagcattcgtgccggcgtgtggaaggacgccacgaaggcgactcgggggatagcggcctatgcggctcggtacagtcttcccatccccaacaaccagcttagaggttcggttcg

SEQ ID NO: 354234 - DNA, 246 bp, Zea mays
ctagaaaccaaacatgaccttatataggctggaaggtgggtggttacatgacagatctaatcttgtacttatctgttacaatcctatcctaggtgggtggttaactgacagatctaatctcatacttatctgttacaatcatatcacatctgttaggaactctaatttatctcttttatcccaataatatcgttgttaatttatactaatcatattagaccttcaatttaaataaatcttagatta

SEQ ID NO: 354235 - DNA, 241 bp, Zea mays
agtcccgctgcgacacggggtcatcaagatgcaacctttattactactgcagcctgcccctgatcgattttgcctcggctgtgcagcctacccgccgccgggcacggcctaccctccgccaggccagccgcaggcgtacccgccgccggcatacggcgcgccgccacccatggccgccggcgggtaccctcccccgccgcagcaggactctaagggcggcaacgacggcttcctgaaagga

SEQ ID NO: 354236 - DNA, 244 bp, Zea mays
ccttattgcatttgtaattgtagggatgtcccttctctgagcaatctgaacatgctccccgtttgtctgtgctgcaaattgcaatgtatcatccagcctcgctccaaaaaagaaaaagaaaaaacgtacgtctgagaacaatgcctgatatcgatgagatttgggggagaacatgacatgattccacctggcgagtggtgagtcccgatataagtatataaggatcgatgtgttatgatgatgg

SEQ ID NO: 354237 - DNA, 242 bp, Zea mays
gactagttctaagatcccccgccactgtagaccggccagcagagcctctcccagccgcgtccgaccctcggagtagaccctgcgtgcctcagtgaagctccccgagcaaggaatcaaactttgcctcgccggagaagccagtccacggtcgtcggacttcacccgaccgctagtgaacgtagaccgagctccacggtgagttgttcttcaattccttgcacgtgtcgactcatcaacacccc

SEQ ID NO: 354238 - DNA, 187 bp, Zea mays
attttggccaaaggggtgctttctactaccactatacttgaaaaatatcgtacaacagaattctaatttttcctatcttgttctttgtgcaagagcaatcattctagaatttggcaactttttgcttaagggaagtggggtggtttgcattatttgaattaagtggtctttctctttaatcactagc

SEQ ID NO: 354239 - DNA, 150 bp, Zea mays
agaattacatgtgattttttctgctgtcgctgaagcctaaaagattattattgtatagtaacacgataatatgagatctgtatgtcagattgctgtgaaaacattggcaaactgtgtttccaacttcatgattcaaattcttttgagggg

SEQ ID NO: 354240 - DNA, 258 bp, Zea mays
cagtatattggtctggctgagccttcaaaagcgcaagtacttgatgagcaaggaattaccccaagcttctgttgttagtgagacttcaaccaaaaactttgagtgataatatttgacaagctgaatgcgccacgggaccaacaggcttgctgcaatggtaagagccgactcactgagttaccaggtcgcggattcgaagtagccttctacatttatgggggaaggcttgacttgatttaatctttccacagactgcct

SEQ ID NO: 354241 - DNA, 251 bp, Zea mays
ataataggtgcagacttatcttaagaacattggttgttacagaatataccagaccacactttacaaattttcatgatatactggtttactggaatgccttataccactgctaattcagcatagcacaccatttgcacgattattcctaatttattgttaattcagccatcaagcatatatgcaatcatttacctttgcactaattggcaggttgacatcaaagttgctccaggatctcttgctaatgaaga

SEQ ID NO: 354242 - DNA, 255 bp, Zea mays
gcaagatatggcatattttttcaactcctctttctcagcgtctgttaactcttctccatgcaaatcttgatcgttaaaatcgtcttccgaaatttcatcaatttgctctttccccttttcagttgccgtgctcactgcagctgcagtagtttcttcttcggccattttcaagagtatattgtcaataacctcaagtgtggtttccaggttcgactcttcagtggtcccggcttcggccccggtagctttggcttc

SEQ ID NO: 354243 - DNA, 183 bp, Zea mays
aaaagatgctcactcccttcagctacagcctaggtagacgtgcgcagtcagtagtcctttagatgttgtctgggaggttagaagccattttagacgtgagcagtcagcagtaccaggcttctcccacattttagacgtgcgcagtcatgagcagctgtattctgcgccattttagtggggtga

SEQ ID NO: 354244 - DNA, 255 bp, Zea mays
gatggccatgatcactcgactgcagatcagatcaagcgtccgaagcgctacacgctacacctcaatccatcggaatcgaggagctcccaagttttggccgcttctacttccaacctgcaccttcaaccacacgcacctttcacgtcccaaggaacatgctggctctggcatctccagaaatagatcgctggctgctcgctggttttgaggacgagaagacgtacatcgcgaaacgtttgcgggagttgaggaagc

SEQ ID NO: 354245 - DNA, 254 bp, Zea mays
atcagctaatgtgttgggagcttcttcaacgacatctgatgaggcagtcccagtcccagttgtccagatagatcaggactcagaccgtgatgcgaccattgtgcagctaagttttggagatcgtttgggggcgctacttgacacgtgggcgcaaggttgaggaccctgacatgttagaaaggattcggctaaccatcatcaacaaccttctccagtaccatcctgaatcaagtgagaagttagccatgggtgaa

SEQ ID NO: 354246 - DNA, 254 bp, Zea mays
cgggcttccaggtcgaaaagaggcccaggcttgagagaaccgtgctggccagcgacatgggcgcgcctccattctccgtgcaagcaccacggctgcagcagccggttggagcgatgcccacacaagcagcggcacagatgaaccaagcgccaggcccattcgcaccaccgcctccaccaccaccgttgccgcctcttctgccaccgctcctgcaacagttcggtcaaagcgctggaggaatgatggggatggga

SEQ ID NO: 354247 - DNA, 254 bp, Zea mays
agaaagaaaagggcgacaactaatgcaaatgaggatggtttccctattccaacatgcattgctattgtggatggaatggatgagctttctgatgatgagaaggttgatgcttatgatgtgtttaaggacgcccaaaacagggccattttcatgactgccaacgatgatacacacataaaatggttgaggaagaagattgcaagaacatgatttgcttcaacactgtgacatgaagagcagtaacacataactgt

SEQ ID NO: 354248 - DNA, 332 bp, Zea mays
atgactttgtccatggggtcaataaggcggtagcgagccgagctctatgcaattgtcccaacagatgtagataaattcaataccattgattagttgtggcacaaccgcattatagtaagcaactcttataatgtgtttggtagggattcaaatctagatgcatattttagttccatattcatatgggtgtagagtagtggacgatcatatataaagtagacatgaagctctaccgagcaacaccaacactagtttccccttcaccatggataaaaagataagccataatcatcgtccaccataatgtctgtcagagatttatatacttttat

SEQ ID NO: 354249 - DNA, 334 bp, Zea mays
cggcctttcctgcgcagaaatggcttcttaaaagaattgacaagttaagaagaagcttcctttggaaagtcagaactttggttctttctccccgacaccagcaccctttagtaaagggacgccaccagcgatttcagcagcaggatctaagaaaaatgacattgatgacgacaatgacgtcgaggtctacatgagtgccacccacgatgaagcaagtgcttggttgaagcattctaacgacccaattgatggctatgggctatggcaagaagaatgataaattctaggatcaagttacagatgacttcaacagcaccagaccagttgaccacaa

SEQ ID NO: 354250 - DNA, 200 bp, Zea mays
actggggagctggcccctctgcgttgcaaaggcactagcatctctgtgcgaacatgcctactcagcgtacaaaagcaaaacctttttcttctttcgttttgttcggagctcaaataggccatgtgcacttgatggtggtcttcttgtgagcgcacctgtacctggattctccaattctgctttggcaaatgacgttaacg

SEQ ID NO: 354251 - DNA, 166 bp, Zea mays
  unsure (1)..(166): unsure at all n locations
ctacaactgatcagcatttacaaacaaaagacctgttcatggcggcgtaatttcgagacaactgtttcatgactacatcatggtgtggattgtagacactcaattgcagttacttgataactgcanagctgagaaggtaactataaacacatacttcgtccttcca

SEQ ID NO: 354252 - DNA, 135 bp, Zea mays
gggaacgatgtcatgtacgtagtaccatactatctatcagcagactgaaattgaagctgctattcacacgaaatatacaatgatagagatttgtgattcatgacggttataatgtcatgcttgctttcatgtttc

SEQ ID NO: 354253 - DNA, 266 bp, Zea mays
ctttctgttatgcgccaagaaatgccagaatcacaccactagcaactgcatcatttggggatatggctgattcttcaactcctatctttccccgaatccatgtaaaagatccatatcagcgtctcggaatcagcagggaagcatcagaagaagaaattcgagctgctaggaactatctgataagcaagtatgcaggccacaagccaagtgttgatgcaattgagtctgcccatgacaggattatcatgcagagtttctttgatagg

SEQ ID NO: 354254 - DNA, 266 bp, Zea mays
ctagttctagatcgcgagcggccgccctttttttttttttttgactgagaactgactgctttatttattcgccacaggtggattactcagcagcccacatagtttgccgaaacgataaaccacagtgctgcaagaaaaagaaagcatatttgccttggttactctagcagcacatgcttatagcttcacagattgatcaaatagcagctatgctccatctgcttcccagccatggctccttgtcatgtccttgctcttggcattct

SEQ ID NO: 354255 - DNA, 260 bp, Zea mays
aatgtgtttcagagaagggcggcgtcgcggtcttcaaggacaaaacgctaggtatccaggaagacggcgtcttgcctggcttcttcaaacggaacgtctgaagcatcaaataataatgcatacctctgcacacgatacttaagtgcaagtctgcaaatcacgattggagcacacagctgcggcgatctgaaacatgttcactcaagtttggaggagtacacttctctgtcctcctccgcagatctcctgaattcgaatgg

SEQ ID NO: 354256 - DNA, 288 bp, Zea mays
ccaaatctgcgcaaaggtctcccactcaaattcctcgcggcgaccgatatggttgggagcgtgggcaacgggctggccgatctgggtgcaagaaccgtctccatgaacggggcggggaaggcgctgcgtcctaccgaggcggcgacggccgccgccgtcgacggtgacgctcccgatggagctggatccgtcggaggccttagttgccgctgcggtggaggctaagggcgatgaggctgccaacgggaagacggagttcgtgatggggatgaacgtacacacctcctg

SEQ ID NO: 354257 - DNA, 286 bp, Zea mays
agaataatgctcacctcatatgtagagaagttttatctcttccctatattgggagccttgaggagctgttgaagggtaatttccctctaaagccccttacgtggctacgtatggtggggtgagagatggagtggatcgttggagacagtctgagtagacccaaattcagaggggtagagatagttggatctatgaaagagataaactgaggcaagcgtttttttccgcaaacgtgaggcaagctttccccgcaaatgcagagaggctggttttgctgggaagctgg

SEQ ID NO: 354258 - DNA, 212 bp, Zea mays
cgtcacgagactcctagcgacggagagagtgatgttagatcacgcgcgtgttggcgagatacgtcgttcgagagctgcccgcaagtattagatcgcttcagttccttgcggctcccggcttgtgtcgtcggcatccttgtctgctcggccctcttctcgccgcgcgctggctggctcaacagcggcagccagtgcggtgtcgacggggtgag

SEQ ID NO: 354259 - DNA, 136 bp, Zea mays
ctctctctccatgtccgtccctgtcgccatctatcactttccccgtttgcattttggcccgaatctccgtctccgtctccggctccatctccagctcctagccgccgcggctcgactcctcagtcctcagtccgaa

SEQ ID NO: 354260 - DNA, 290 bp, Zea mays
cggccttcggctcgcgccgagacctcccgccgtccgaccctgacccctcagccttctccgtcccgcctcggccctcgacggccgccggtatacaccgcgccgtctcgagacaggcaccggcggcccgcggctggcggctgactcgccgctgacgcagacgatgacgggtgcggtgacaggcctcgccgcggggcacctctggcagcaccgtcgtcgctacctggtccgacgtgccccgtgtggcgcgagacgtcgcgctccctggccttctccggccgctccagctgtgc

SEQ ID NO: 354261 - DNA, 268 bp, Zea mays
gctcgggcttgggctcgaggccacaccgcatcgagcgccgccgccactcgcgctcccctgcgatctctcgccggccgccgcgtgccgctcaccggccaccgcagcgtgttatatttcagcgcctcttgatcggcgagcctaaacccgcaggagagaggctaatgaacgatcgggtggcatgcggcagagctagctcgtcatgcactggaaggtcctgcgtggtgacaacgtgatgcttgtgagatgcggagaccatggggagtccggg

SEQ ID NO: 354262 - DNA, 240 bp, Zea mays
gcaaccttatcgccggcgacgttggcaacaaaaagggatattgatggcagacgtgtatttctcggttgactaatatatactgctagaattaatatgggcaccaacaacgatatatctataatgttattcttcagtgtcactgctccagcccaaatcgtgaaattgtatccagatacaatttgggcttctggtaagccgaatctggacatggaaaacgatgcacgtgcacctaatgtgatg

SEQ ID NO: 354263 - DNA, 202 bp, Zea mays
cctgaagaccgagagggacaagaagcgtgagacgtatttccccatgaggcagtacgctatccaggcctagctccgtgaacgcccctttatcctgtcaagttttgctcagcagttacttgaatttgagacaaatctatctccatccaagtcatatgtcgctgatcaactgcatgatgaaaaacgagtactttatgcttgttta

SEQ ID NO: 354264 - DNA, 266 bp, Zea mays
cgacgggattgcgcccacaagcgacgcccccattcttctccggctccggtgcattccgtgtcctgtcttgatggaagcagcgatggctgccacgtcctccctactccttgcctccggctccaggaggtggccagcaaccttgcctccttccccctcgccccagcagcagcgtctggttattttctgcctcgctgcaagaacgaggccgctggacagcaagaggggtagctggaggcgctcttccagtgccactggcggccggtcga

SEQ ID NO: 354265 - DNA, 265 bp, Zea mays
tgcggacgcggcgcacataggcgccgtggatccgtgttgtggtgtccttggcgaggacaacgacgcagcgtgcgcagacgtggaagaagggaaaggggagtgcgaccatgccgacgaggtagcagccgccggtaataataatagcgactccggtgaggccggctgtggaggagcctttgccggcgaaaaatcaccgtcgtcgacggcatcgtcgtcgcaggaggctgagagccggcgcaaggtgtcccagaaacactcccaaggg

SEQ ID NO: 354266 - DNA, 124 bp, Zea mays
attagttcagatgtagacatagatgcatgctggtagatggctagcgtcttcccatgttggctcaaacgtcggatgtacacaatgattcataaaaaatagaaacggatggtgagatttctacaat

SEQ ID NO: 354267 - DNA, 265 bp, Zea mays
aattctctccctctgaacaaaaaacttcctcccgcgcagttctgcggtggccttttaatcttggtgagcttcagttttttgtttcttggactcttcttcttgttaggttgcgttgcgtcctgtgcttctgattggaggccgccatggatgaggtccccggaaggagcagctccgtgagagctacaaggagcatctttggcgaaagcatcggtgggaggaagccggagatgaacagggcaaggaatgttttaggacaagagaatct

SEQ ID NO: 354268 - DNA, 263 bp, Zea mays
tttgcttgctccccctccccgacaaaaaccccctgtcccgtcgagcctcgcatccctagttccctacaagcaaggaaggaaacccgggcaacacgacaccggcggtgccagtgccacggaaaattagccggctccctccccgacgtccggcggcggccgagcaacggtgctggctcccaacatggagacatataccacagacgacgcgcttaccattatggggtttggaaaattccaagcgcttgttcttttctacgctggaa

SEQ ID NO: 354269 - DNA, 270 bp, Zea mays
cgctcatcgactccagagacgggtccatctacggggcgcttctagaatgggaccagctcgccgccctcgctgacctgatagtggccaagcctcagggcgctcccaaggtggtcctcgcgctcaggggcaccatgctgaggcagctgaccgtggtgagggacctggaagacgaccttcggctgtttgccctggagagcctgagggggtccgtcaggttcacaggcgcgctggaggtgctcaagtcggcgatccacaggcacggcagcgcca

SEQ ID NO: 354270 - DNA, 270 bp, Zea mays
gtcttcctctacgttatcaacaaccgcagagcagcaagctcccgccgtctccgccgtcgctaccactgatcggccaccttcacctcatcggccgcctcgcgcaccgatccttgctagagctgcagcttcgctatggcggcggcggcggtctcctcttcctgcaactcgggcgtaggccgaccttggtcgtgtccactgcggccgtggccgcggatctgttcaagaaccacgacctcgccttcgcctcccgcccacgcagcgtgggagggg

SEQ ID NO: 354271 - DNA, 271 bp, Zea mays
tggcgcaggtgctctgacgggaaagtacacgccggagagtcctcctaaaggccctcgaggacggatatacacgccagagttcctgacgaaggttgcatacatttgtgactcctttatggtcgtttgttcgttccttgatacctctctactcagtactcactgaatgtctcctggatgatcatgccgtgcagctccagccacttatcaaccggatcaaggagatcggaggaagctacgggaggacttcaacccaggtgctatgtccatctac

SEQ ID NO: 354272 - DNA, 266 bp, Zea mays
ggaggcgttaccgtagtgaggatgacctcgagcttgcggtgcggaggccatgggcggagaagagaaaggggctggcggcgagactctggcgttgcaggcggagggcggcggccatgccgacagtgtgttccgcacaccagcggtcgctccctccctcggacgtcgctgcgcagtcaccacggctcgtcgttgcggatccaacggtagcccaaccaaagtcacgtgacagaccagtttgggcggcccattccagcccacagcggacg

SEQ ID NO: 354273 - DNA, 282 bp, Zea mays
tctctctgtccacgttcctgatgagcgcatccttcgcagtgtacgggcttctcctgcgtgatttcttcatatacttcccgaatgggctcggagtcatcctgggagcaatgcagctggtgctgtacgcgtactacagccggagatggaaaagcagcgactcgtcagcaccgttgcttgcctgatcatgtagccgagttcgtcagtccaattgcccgtgccgtgctttctgttgttctctgttctgccatcctgtaattctaggagaggagctaggcggtgttt

SEQ ID NO: 354274 - DNA, 279 bp, Zea mays
aagtgagtgggtgtgaggagagctttgaggggaggggagctagctagctactggaggagggcttcctccggcgccggacatgggggaggtgaagcacctgtgcctggccaagttcaaggacggcgtcgtggtggacgacgtgctcaagggcatgaccgacctcgccgccgggatggacacggtcaagtctttcgagtggggccaggacgtgctgaaccaggagatgctgacgcagggcttcacgcacgtcttctcgctcaccttcgcctccgccgccga

SEQ ID NO: 354275 - DNA, 272 bp, Zea mays
cggctcattctcctgtagattttctttagccgccgtcgttatctcctgcgccgcctcaggctcgtggaagacgatctcgccgccgatcccttctccttatccctcccacgcgcgtttgattctttcagccgcggtacttctctgtcccagcgcctacttcctttgcttctacctcacggcgctcctgccccatctccggcgttcctccagctcgcccatggtggcgcgcgctgctcccctgcgttcttccctgcaattttcagccttcccgc

SEQ ID NO: 354276 - DNA, 273 bp, Zea mays
ggctttggaaatcattacactggttgacaacttcaggatgtgtggtgctttaatgcctggacatggagaaactataaccgaagaagcaatttgggagacgcttccttacttctgggttgcaatttccatggtatttctactagcggctacttcactcatgcttctcaagttatgtggtgatgcagttactctggggtggtgggatttatttattaattttgggatttcccagtgctttgcttttctagtatgcataagatggtcaaatccaat

SEQ ID NO: 354277 - DNA, 275 bp, Zea mays
ggcagcttccaccaatcagtgcaccttcatcctcaaaggctgttctggtttgttacagttccaacagcatggaaaaagtctacgccatcaaaactcctcataagacaagaaaatcacagtatgagctgagtaatccaaagttgccgccacttaaatgcaagtttcgcaaaaggttatcttgccacagtgttgagtctgcaactgcaactacagacaatttaggatacgattgcattttcatgaacaagacctctgtgacagacatggtcagcata

SEQ ID NO: 354278 - DNA, 273 bp, Zea mays
  unsure (1)..(273): unsure at all n locations
acgcaaccgggcgcccaaaacaaaaaaaagctgcgcgctctgatccgaatcgcactcgctggcacgccgcagcgaactntggtgctggacatcgagggcacgacgagccccatctcgttcgtgacggacgtgctcttcccctacgcccgcgacaacgtccgcacgcacctggacgccacctactccacccgcgagaccaaggacgacatcgccctgctgcgcgctcaggtcgagcaggacctagccgagggcgtccccggcgccgtcccggtc

SEQ ID NO: 354279 - DNA, 268 bp, Zea mays
gaaaaaaagaaacatgtttgtcaccaattttatttatcaaactagcatctcagtgaaataaataaaaaaacattgcacggattagatatgggcatctcaccttctctcaaaacaaagcgtacttgtctccttggaggacaaataatatggttactacaacagggtataagatgcctttctacttgtattgctctgaaactatgcgagcgtacttgtccatgaattggcatttcttgtcaaaaccccagccaggattgttcttaagaga

SEQ ID NO: 354280 - DNA, 271 bp, Zea mays
tctggatgatccttgtgttctttgtttcccgtcccgcggtgtgcgcgcgcacgtctgccgtctgccaagaggagtaggcagagatggcttgccctgcgcagtccatgctctccgccagctgctgcatcctcctgaggagcaagcctcgggcttcctcctcccacgtgcgagggggcatcatcggcggtggctgcagcagcaggccgttccagctaacctgcaacgcttcctcttccccgtctcctccctcgccggcgccggcgcaggaaga

SEQ ID NO: 354281 - DNA, 263 bp, Zea mays
cctacgcgctggcccctccgcccgacgctccacgccgccgccggccagcaccgtgcacctcgccgcctccggaaggtgcctgctgcgtgctcccagctcgctccgacgccgaagaacccgctctctcagggcctctgcctctctcgagcaggtcaaggaagtcgccagctccccagctccctccgcagggaagagtagtcaagcaactagaagagatgtgaggaatatcgcaattgttgctcatgttgatcatgggaaaacaa

SEQ ID NO: 354282 - DNA, 99 bp, Zea mays
gctagctagctagcgtccgtttccgtatccgcggcgtgcgttgtagacgtgaagcacgtggttggttgatcaacgtacgtggacgtggcctgtctttcc

SEQ ID NO: 354283 - DNA, 257 bp, Zea mays
gttttgttacccttattgtgaaatctacatcattgttaagtccaaattttaatgtactgactactgtctatttataaagaaaggttgtaccactatgggaaatatttcatgggtcaactatagcccttagaaaaaatgggcatttattttcctaatgttctctatgcagccacccaaaaggtcgtgatagcaaagatttatcgagttccagtgatcttcaaaatgatgtaagtgcatattcgttctgtgctattgtg

SEQ ID NO: 354284 - DNA, 250 bp, Zea mays
attggtcatatgagctgaaaaggtctcacaggacgggtatttgccgcacaaaatatcaataggagttctttgttagttttacaataagatgctgtatagcagtcaacaggctattcttgtctatacaagatacctttgtctacaaatcttgtctcaccatgttgtattcgactcaaacaatgttgcagtcatggacattgtccgtttcaaaaaaaaaaaaacaaaaaaaaaaaaaaaaaaaaaaacacac

SEQ ID NO: 354285 - DNA, 274 bp, Zea mays
gttctagatcgcgagctgccgccctttttttttttttttttttttcaaggaaaaaaattgaaatgatatacgcaaatcttgtaatacatgcttccgttacttgtattgctttctgctatgtacaagatatgtcacccacaggcacagctaactccgaccagcaaactcaactaggtaggttggtttcttaatacttcacagggatcttctctcatacacatgcgcacatgcagtgctaatacttgaaacaacgtgcatgttaattagatgcatg

SEQ ID NO: 354286 - DNA, 267 bp, Zea mays
tgcggtattcagacctcaagaaagttgatcggggggtgaggcggcacttccacgacgatataactgtcattgtgagctaaacaactcctactgaaaccacgcggtatgtgaaggagccaggcaagacgataaaaaaaaagtaaaggaaaacggagaaggaaaaacagctgttgtgatcagttgtagtgtatttcaccgttcatgttcatttaaaacattttttagattctcaagtctcaacctggtgaccagtgcactgatagcaag

SEQ ID NO: 354287 - DNA, 268 bp, Zea mays
attggtcaccactggcatcccaatgctgctgttcacgcagtggttgaagaacagggacgggatgataaagttatagtgaccaagtttcctctggtacttcttcttcttcttgtacttgaacactataactttatcacagacagccaaacacaaggttaagaatcacaggcataagtggatacgaagagtaccctgctgacccaatacttgaccctgctgcagctttaaattaaactgtaagttatgtagttacaaaacggctggtagt

SEQ ID NO: 354288 - DNA, 270 bp, Zea mays
catcaaacaagtttcacaaacataagtctccaacactcacaaacgtaagtctcaagtatctcacaaagtattaccaatattaaaaagttcagaccaagttatttcacaaagtattacctacaccaacaaacataagatcatgtgcacaaagtatttcagcaaggtggacatctggactagttcgacgataggctgggcgatccatgagggttgtttgatgatgctgattgtccctgcacagagaagagattgcatgtatcagactagatg

SEQ ID NO: 354289 - DNA, 265 bp, Zea mays
ggacttggagcccgctcccagcttcgcattggcacagaagtagcagctgcgttccaacatcacccccattgctttgtacatagttcaaacagcagcaacgctagagagaatggtgcagtattacaaactacaaacagcacacatgccgtgtattccgatgttataaataacatctcatatcagctatgcaacgaataagacttagaacactataatgttatctggtctaaaaaaaaatatagaggcaaaaaaaaaagggcggccg

SEQ ID NO: 354290 - DNA, 247 bp, Zea mays
agtcgccgtgccgtcccctccccttctctctctcctcgctccccacggcacgcatcgcctcgtcggaacggaaggcgggaacgcctcgaaccaaggaaggaaggaacggggattaagaagccttccaaagcgttctcgaatgttggcttcttccttccggggttgttcctcctccgcggcggcccccacggtcgcccttctctttcaactatgagggggaagcggtccttgctgccaaccgtgcgga

SEQ ID NO: 354291 - DNA, 132 bp, Zea mays
agcggaagtaagcgaacggggcatccacgtccgccatccatggctgccacagccgcgacggctcacagcggcggccaccgaagcctcctcctacaacctaccatctcgctcctcaccggaggctccggatac

SEQ ID NO: 354292 - DNA, 214 bp, Zea mays
cgcaaacacgctcgcacaccgtacccctcatctcgcgccaccggccaccgcacacagaacgcgtgctccgtccgtcctccctctgcctcgctcgcgcagggttagcgttgactgatctagcaacgagagctagctagctagaggacacgacacgatggccttgcaggtcaccggctgcgtgtgctgttgctgccctccgtgcagtgcccggcgg

SEQ ID NO: 354293 - DNA, 274 bp, Zea mays
ggagaactggagatccacccgcacgcggactgcttccttcgctagtcggtaaggaaccctagcccccttggcttgcgtcgacggattcctcgtccgtgcaccccttcgcgggatcttctcttttcgtcactcccaagctatcgcccccagttttgatcctcaatttctataccaaagcagccgatgtttttgtggtccccacagtgtccgagatttgccagctagggtttacgcgcgttcccctcgtttgctaacggcggggatgcattactgt

SEQ ID NO: 354294 - DNA, 272 bp, Zea mays
gccttgggtttctgggctggcaacagaagggcagagctgtggaacgagaaagtctttggcgcgacagagatcaagctggcggacaccgcgaggtctgccatggactggggcacgcatcatgagagcgtaccatagagcagtacacgagcatcacaggaagacacgtgggcaccttcggcttcgcggtgcacgccgaggccagctccggatggctgggagcctcgcccgacggagtcctcgggtgcgggctggacggcgggatcctggaagtc

SEQ ID NO: 354295 - DNA, 263 bp, Zea mays
cgagtcgacactcgacacaggcccgcgatcccctccccctcttccttctccggattcgcggcgatctagccgcctccgtccgcgttcgatctcaccaggagaatgtcgccggggtcaagctcccgaagttcactcacttcgtcgaccccgccgcggcatccggggggccctccaacgcgtctccgagccttacgggcctcgcccgctgcgggcagcaggtcgccgcctgccgcgccgcgcacgtcaaggccatcgaggtgctc

SEQ ID NO: 354296 - DNA, 260 bp, Zea mays
atttgtgaggtcgcagataattaaccagcttaaaactaaccgtgacgcctatgatggatacgttcccatggcatatgatgattacttggagaaagttgcacggaacggtgaatggggtgaccatgtgacgctgcaggctgctgctgacaaggttagtctttataatctatgtttccagctgtcattcctggcatatcctgtgtggtggagctgacaagactgccattgttttactcacatcctaatgtaatgtaagacaa

SEQ ID NO: 354297 - DNA, 261 bp, Zea mays
ccgcggtcagggctgtgcagcccccgcgttgcattggggtcccgtgccgatcgccaggccgcgtgatccacccgtgctcgagcaagcgcctcgcgctcctcttcttcatcttcgttgcggccacctttgccttctgggaccgccaggcgctcgtcagcgagtacgagtctgatttgtagctggatctggttaattgaaaacgggtggcatggagccatctcttccgcctggcgcctgctgccgctgaggcgctgactggga

SEQ ID NO: 354298 - DNA, 265 bp, Zea mays
cggataaatggccttggcagttgtgatcagttcggccggcgtcctatgcattggcatcgcaaaatcaccagcggaagcaaggtgtgcgtgcacatgcgcgcctcttctttccagcaggattttgtgtggcgagggctgatgtggccaggttcgagccacgagagacaaaatacttgtggctcgtcaactcgttctcgacttgttttagttttgtcacaagttaagctagtatcttggctcggtttgttacaagccagctcgagtt

SEQ ID NO: 354299 - DNA, 270 bp, Zea mays
ccatcccataccaccccccttcatgtcgtcgccttcctccccgcgcacttgcccctgcatctctccgctgcccaccactccctcgcattaacgacgaaggctcatcatctctgatggagaaaaagaaggtgcaaagaatggtggtgctaggaagcaggttaatccgaaagacggcaagtgaagctttcgggagggccttggggtggtgtcctcttgacaggcggatttctggttgacataaaagatgctgaagccgtgaaaacttgttgg

SEQ ID NO: 354300 - DNA, 271 bp, Zea mays
cctcctcggtcctcgcagacgattcaccccgcaccgcgagcgaggagaggagcctggccgcgagggcgtcgacgctgatggcggcgtggtggcggaggaaggtggtgccctgcgcgcgccgtgcctcggccgccctcgccgcgcggctccgcggcgtaagcctggatatcacctggacaccgtggatcatgtgccaggcagtggtggcattctgaagctcaacgaggacgtgcagacttgcggctacaaggacgtccaggtcatgttcgac

SEQ ID NO: 354301 - DNA, 269 bp, Zea mays
gttattgttcgtattatattggctggcctgccgtatggggcaggcagctcgtgcgctctcggcagccggcactcaaatcggcaggaggcaaaacaagatacgtggctggattctggatgatacgaatacgattgcaaggtccatctacggggtgaccatatacgtacgtacgtacagatacatatgcgagagttgtttatactgcagggttccttttctcatgaaaagaaaaaaaacatcagacgtgaactacagtgagaatgtatgca

SEQ ID NO: 354302 - DNA, 261 bp, Zea mays
cgccgaccccgtcaacaacaacgtgctcaccagcctcaagttccactagaacgtggtgcatcagcatacctgctgctgccgccgccgccgccagttgtttgctgtggaaagctagatgcatgcgtgttgtaaaggaacctgaagcgttgcatcggtcatgattcatgcatggccagcctgctgcctgtaacaacaaactagtattgatcttattgagaccggaaactgtattgcacatggtaaatcaatgtacaattcctc

SEQ ID NO: 354303 - DNA, 276 bp, Zea mays
agatcagtagacctctgatctcactgtccagaactacactctcctcatcgttgttcgtccaccgccttcgctgaacttttcaagtactttgtctagatgagtaccggttctgcgggtgtcttcctgcaccgtggaaaccaggctctcatggatgattctgcagtgccaattggcttctcaatgacgagctacacgacaggtaaccagtttcagagtcggataacatttggtagaccaactgggttcagcagtgaacaatagcagcatccatggccg

SEQ ID NO: 354304 - DNA, 280 bp, Zea mays
cagctcgtatgattttcttggaaacagcgaccacattgttttcagttatagacagcaaggaaagtcacatcttggtgtgcttgattgtgattcaggttctatttcattgcttgacatccctttctctgatttatctgatgtggttgctgcagatgattacttctatattgaaggtgcttccgcgagtattccacggtcgattgctaaggtgacattaaatgaaagcaaaaccaaagtagtcaatttctcaatagcctggtcgtcctcaccagacctcgta

SEQ ID NO: 354305 - DNA, 279 bp, Zea mays
cggctcgagctgctcgccgtcatcagcgccatcaacctcgtcctcttcacgttcgccgccaggggctacgtctataaggagaagcgcctggccgacgccggcatcgagctcgccgacgaggagtctattgccgtcggccactgatgctgctgccagtgccacaaccctgcatgcatggagatggcaatggggacccgatccccgattccccgcggggaattcctctattaggggatggggatggggaattttcttcccccacggggatgtaaatgggga

SEQ ID NO: 354306 - DNA, 272 bp, Zea mays
ccctacccaatgtcctcgccgccgccggcttcgcccatggccgccgagaatgaggcctgcgactgggcggagatgccgtcggacgcgctcgcggccgtgttcgcgaactcggacgtggccgagatcctgtccggcgccgggctggtctgccgcgcgtggcaccgtctcgcggcctcggaccctacgctgtggcgccgcgtcgacatgtgctaccagggggaccagctgcagaccgaggaggtcgaggccatggcgcgcgccgcggtcgaccg

SEQ ID NO: 354307 - DNA, 286 bp, Zea mays
ctagatcgcgagcggccgccctttttttttttttttttttttttttcgagcaacacacacgtgacgacgtttgctcttatttacttacacgcacgcacgtgtacggcgctaggggccgtatatatatcgagttctgcatgcatatctcgatcgatgggatgatcagtcgtttcagtcgcagtagtaggagtagccgtgcccgtgcccgtgcccgtgcggcaccctgtgctcctgctgcctgctctcgtagtgggcctccttctgctcgcggtgctcgtggtacgcg

SEQ ID NO: 354308 - DNA, 215 bp, Zea mays
cttttgatccttgttttttttagtgtgtgtgtgttcttggagtttctcttgactgatcccgatggaaggggcctacagaagaagccttgggcgaggaggctgatcatgagtagatattgtgcagctagcaggttggccaccttttttcacatgttattagtgcgtatcgtatatatgatcggtacacttaattaacttgaaaggaattcaggtct

SEQ ID NO: 354309 - DNA, 267 bp, Zea mays
agcagctggtgcttattgagaaccgcaagaacgatgatctgtttgcgatgtttgcgttcggtgacaataagaaggaggccgttcctgcagcgaaccagccgccgccgagggtggcagtggcagtggcagtggcagcttcctcgtccctgcgcctgcgatggcggcggcggtgcccggtaataagaggaggtcgtccgcgaccaacattatggtctccgtctccgacgaccagagcagcaactcctacggctccggctcctccgactt

SEQ ID NO: 354310 - DNA, 268 bp, Zea mays
gtggaaacctgccagcgccttcgtctgatgaaaggttcagaggccgtgaacttgggtacgtacatgttttcccctaaagcctacctccatgtgtttaaaaacgtctgcgttttgttttcacagccatcgctgttgttcattttcacagcaccgagagccgcccgatgaggcacactagctccgttgggcgttggcacgcacgcacgcactggcgtcttgaaggaaagcgggaactctgctggtcttgatgaggatcttcacgtgagat

SEQ ID NO: 354311 - DNA, 261 bp, Zea mays
cctaggctggcctaactatcaggggaacatttggcaggacggctcagtgcactggaatctattggtggtggacctgatcctggagaactttcagtgttctgccgcatcaccctgagtgctcgacgaaaaggactgctgccgaatgagcctcctaactctaactgctcacgctccatgtttcagtgccacgggctcagtttttggcagcacggccaccggtccatgtgtaggcgcactccttgaagaaatttgacggctgtc

SEQ ID NO: 354312 - DNA, 255 bp, Zea mays
ctaggctagtctacagctagtacacaccccacaacaatataatcgtcgtcgtggcggattggagtctgacagttgccataccaccagtactagctcgctcgctcgcttgctctcagaactgatcgctgtgaggagtatgccgtcgctgtggccaacgaggaagaagcgggcgcgaggctcggcggtccggtcgtggtcgcgccgccgctggagcaagaaatcatcgtcgtcgtcgtcgctgggggcgctgtggcg

SEQ ID NO: 354313 - DNA, 256 bp, Zea mays
cacagccgccggaagctcctcctcctcctcctccttctccatgagagagatctagcaaagcatagcctccttcctgctggcgggatctccttttgattcgtaacttataacgaaagaggaggaggcacagcaccttgtcaaatgatgaactctcagaagctgcagctgcccgttcaggatctgatgagtctgagagggagatcattcatcatcagcaaggttgctgcccatcccagttccagcaggaggcggcgtc

SEQ ID NO: 354314 - DNA, 282 bp, Zea mays
gccaaggccgccgtgtggagggagaaggcgcgctccgcgcgtcggaagccgcctcctcggagatgaacctcagggcgttcgtcgcgaacagatcgccggcggcaacaactaggcctggccgtctcgctagacctcgcgcgcgtcgtcgcatcgcatgcatcattggcttttcccccacaaggccacaacagctagctggcattagatagtgctatgctatacaaggcgtaggatatggtcatatggaaatctacgactgtacgtacattgttgctgctgctg

SEQ ID NO: 354315 - DNA, 287 bp, Zea mays
gttctagatcgcgagccgccgccctttttttttttttttgtataataggatgtatattcttataactccatataaaaatttacattgacatagtcctataaataggtaaatactgccagcgctacagggatcgaccattgggtacctagcacttgtagcatcttctccggacggagcttccataagtataacgacacaaatctttgatatatttcattaatatgaattgttgtttcaaaatgatcagagaggaactttgttgtccatatgaataaatggaacttatt

SEQ ID NO: 354316 - DNA, 270 bp, Zea mays
ccatgtcaactactaccttgttttctcatttgggaacatttctgtttatttatgtttggagtgtctagggacctatggcagatgcaaaatttattcaagagaagtttattcggaagtatgtaaacttagcataaatatacgacaattgctgtcttaaaactttctggtgtgtcaagttactgttttggtgcctataatcttgtaatctgtctactagttgttggtaaatgagctttacttgtcccttggctgtcaaacagttaatgttac

SEQ ID NO: 354317 - DNA, 271 bp, Zea mays
gcagaatgttgtatgtcacaaatagtcggttgacatcgctctatacacttttcatcttctcaaaagccaaaataaattcgcctgggcacgaggacggcgggtgccgctccggccatggagttgatgtgcttgagcaggcaaccatcgggttggacgaaaggaagggtagggtcttgtgctaaattggagtatttgactgcgctgtggttgacattggagaattgcgatggcggcgatgggaagtggagcctggctgcctgtgtgtatggag

SEQ ID NO: 354318 - DNA, 277 bp, Zea mays
cgcaccgtgagcagccagttaaagcccgtgcggctcttgcttttctactctctgagagggggaacttctttcgggagtttattcttgacgagattgtgaaagccatcgatgcgatttcaagggagcagttgatccagatcgccgcgtcttttgggataggaaacgcggccccagtttttagcatggttcctgtcagggccagggcattgcttccgacgatcacagaggaagacagggtcatcctgaacaacgtcgagaaggttgtgaagttcctgac

SEQ ID NO: 354319 - DNA, 273 bp, Zea mays
gagacgatgtaccacagaaccaaccatcacttggtcagattattgcacaagaaatgaaagattctttggttgattcactccaagtggaacagggacctgtctctgcaaataccaataattctaaagaagaaaccaatgtgctaggaaaactccagaaattagaagaaacaaaattctctcaaggggaactggagattgagaatctgtgcaaagacagggtacaagatttgccaataccaaaggctgaggaatctggaattggaagtgagcctg

SEQ ID NO: 354320 - DNA, 262 bp, Zea mays
gggcgtacaaatcaggtaggcgagatccgagcagaggccagggacgcgccgacacgagccgatagggcgcactggcgatggccgcacgggcgtgactccaccgcgctccccggcggggcggcgcctcgccggtgccggaaccgccgcaccggcctctaggctcctcgtcgcgcggcgtaataaactgtctccgctcgctctccggctccgagatgcgccgaggctgtcgttgctccgggtggaagcctgctccgacgactcc

SEQ ID NO: 354321 - DNA, 225 bp, Zea mays
ggcttaaggtcggcatggacatcaccaggaaatgtgtatgggttttgattgattactaattcagactttcgtttgggttcttatacgaacaggaattgtcctgtgtgatgtcgggcattgtattaaggctatttttgggtttaaacacaaaaggacctctagatgagtttgaacccaaaaaaaaaaaaaaaaaaaaaataaaaaaaaaaaagaaaaaaagaataa

SEQ ID NO: 354322 - DNA, 253 bp, Zea mays
ctcccacctaagctgagcggccatggcgcggcacctcgcgccttcgtctggaagcctccaccgtctcctcgcgtcctgccactacccgcccacctcccaggcggcggctccccgtccgctcctcctcccgaagacccgatcggcggctatgcagctcccgcgacgcgggcggcgcgacgtcgtcgccgctgcagctgcctccgcaccgtccccctcttctccgggtaccgaggtggcagtctggggtaaggtc

SEQ ID NO: 354323 - DNA, 242 bp, Zea mays
ccgccgccgcgcctgcggtggcggtgaggacggcttcggaggaggccgtgtacgaggtggtgctgcggcaggcggcactcgtggaggccgcgacgccacagaggcgccggacgcggcaccgaggtgggcggaggaagaggaggaggagagggtcctcggctggggcctcctcggcgacgcctacgaccgctgcggcgaggtctgcgccgagtacgccaagacttttacctcggcacgcagct

SEQ ID NO: 354324 - DNA, 236 bp, Zea mays
cattggaaaaatggggtggggtgcaggaggtttcacgccttctttctcttgaactaagatatcctagaagacaagcagacccggacgatgagagacagtctgaatccccgtctgggatgatgaagaagcacggagtgaaacctgatgaaggcaatgtttccccaaatgcgcagaaatggctcctgaagctgaaggacttggatgtcaattgggtggaatactaggtttagctttgg

SEQ ID NO: 354325 - DNA, 202 bp, Zea mays
agcacatggaattacgagatatgattttctttcccataaaaatgagaaatcacccttctcatattacacctactgcttgcttgattactgtatcctccagaacaatggagctattgtttcccatgtgctggtttacattgagcattttgcttgaccaaaaaaaaaaaaaaaaaaaaaaaaaaaaaaaaaaaaacaaagaaaa

SEQ ID NO: 354326 - DNA, 235 bp, Zea mays
agccagtgaagcagagcagcagagaacacctgcaacgttcatcctgctcaatttgctcataagcacaggctctgaactgagttgatcagagacgagccatcgagagagagagagaaaaaaatgcacgcgttcctctctacgtcgatcccggccacttcgtactcgagatcatacttcttgccgtggccacctcaggctcccgtgaagctcgtcgtcccgtcgtcagcgccgaggg

SEQ ID NO: 354327 - DNA, 232 bp, Zea mays
gccgcgcgatcagcggcctgctccacgtcgcacccgtactcggacggcacgaaccgcttgacgctgccgcctgcttccttgatggctgccacaatcctgagctggccgtcttctaggtcatgcggtccgtggtggccgacggcggagatgaccacgtcaacctggtggaacgtggagcaggccgcgcgatcagcggcggtgctggagccggcgcggacatcgtgctggccaa

SEQ ID NO: 354328 - DNA, 276 bp, Zea mays
ccccaacagccaccaagcctcttttcgtccctcgagagcaaaccatgacaacacccataaatgtaccaagccacccaaagttcttagacggtctctcttctccctgcctgcctcatttcttctcctccacacatcctcctcccttgccgtagatgacgcaaacatgccatctacctcaacaattgacaccacgatcacagatcgcatcttcatggacttcagcgtctgtccaagctactttcgctcagacagacctctaggagctgagctttcctc

SEQ ID NO: 354329 - DNA, 231 bp, Zea mays
tccatgctcaccacaggtggccaatgtcggcgaggctgtcgcaggggtttgaggggaacccgcttaccaaaagcttggattgctctttgcacaagagggacgctgctgtccttgctgctgtccggtcgctgcggcagtccatggtgtttgatgagggggcacggcgttcctcgttcgacagtggggactacttgatgtcgtcggacacagagagtgtgtcatctgggagca

SEQ ID NO: 354330 - DNA, 227 bp, Zea mays
tgctctgatagcttgctccaggacgtacgtacgtacgtagatcgatccatcgatcgctagctagctgacgaccatggcgtccctctcctctgccgccatcaccgccccttccttcacggccgcgcccgctcgcgcagtggtcagcaggaggtccttcaccgtgcgtgcctctctccgcaaggccactgccaccgccgccgtggccgttgccgccagcgtcctgcttg

SEQ ID NO: 354331 - DNA, 277 bp, Zea mays
gtgcagcagagggagggtgacacggacgccgtgcaagcgaaccgcggaacggtggcgcttggcaggtcgtcagagacggagacggcgacggtggcggtgggggtggccgacgtggtgaacctctggaggctggtggagggcgcggacggcagcccggcctggaccaagatggtggagaagtcgctgcccaccgtgacgtaccgggcgtggaggacggacgcccagaccggggctccgcagtaccagagcagcagcatcttcgaggacgccagtccag

SEQ ID NO: 354332 - DNA, 120 bp, Zea mays
accgcagcaggtggcgtggacgatcgtggccgccacgtcccgcatcgtcgcggccaagacgccgtttgttggccaggatcgcgccgccgccagtgccagccccctccgcaacgtcgccgc

SEQ ID NO: 354333 - DNA, 275 bp, Zea mays
cgctaccagagcatggcgggagcttcgtcgtggtcgtcgtcttcatcctgcgcggcgtcgttcggatcgcccgaccacgacgtcgtctgcatcaccgagccggactctggtggacgccgcagccgtcgccgtcgccgacgccgagggaagcgtcaagttcctgtggagctacggcggcaggatggtggcccgccgcaccgacggcacgctgcgctacgtcggcggcgacagaccgggtcctgtgcgtcgaccgtcgcatccggttttacgtgttg

SEQ ID NO: 354334 - DNA, 272 bp, Zea mays
cagcgccaacaagtacgagaccttgctggaggtggtttaggtgatgatcgacctgaagttgatcatcaagcgggcctacatttcctccgacgacgagtggttcatgaacggtgagtggcgctgcctccccctgctgtctttaggaagttaagataggttaaaggaagatggaacctttctagggtgatgcaaagcctgacttttacttggattgtgtaatatttctattttctttcctccccctcccccgaacctgatgtgtgatgtgtgtt

SEQ ID NO: 354335 - DNA, 269 bp, Zea mays
gtccctccgaggcacttctcgtccgttacaccgccggcgtcactctgcaccgcgcgctgcatccagcgtcaccgtctccgcgccttcccaagtacagtgctgcaatctctccgttccttccttttggtgttcccatttctcaatgtacaaataccgcctctctcaccattccctttgcaggcttggaaatacctctagaggaactcaacccatccgtcgatctacttaggagaactgcggaggccgttggcgatttcaggaaaacgcca

SEQ ID NO: 354336 - DNA, 265 bp, Zea mays
cgcgcaggtcgggagcttgagggccgagtggctggccgaggagaggacccaggtcgtcggcactttccctcccaggaagagagggtggaccggcttagtggagaaggacaccgccggccagaccaacatctattctgtcgaggtgataatactcgcgctcttcctacattcaaacgctctagctagccttcgatgccttgcgtacagattttgcggacactggtgtcccgccgtgtccgacggactctagcggtctgcttccctg

SEQ ID NO: 354337 - DNA, 216 bp, Zea mays
aaataatgttccatgcaaaggttttcatgttttttccataggtttatgcctgtctctgcaactgccatccattccctgcttctgatgctgttactagcttttatcttctttgatgcagaatgtttggagcaatgatgagggtagagttagcaaatgtgcttgtaatgtatgaagtagcttaaagcagcagatatgtgccagagaataggctggtgt

SEQ ID NO: 354338 - DNA, 264 bp, Zea mays
tctcgacctcgcttcctccctcccatcgtgccctgccttttcctcacgacctcgccgccacgctcgcgtctcgccgctgattgcggtcccccatggagtcgttgttccatcgtcttcctgtatttgtgctgctgatatgtgtaacttgtgtttctccaggtgaaggcggtcgagcacgcgaccgagatggaggcgacggtggctgccgcggaggccgatgaggaggaggctgctgctgcggcttcgacgccgcagcggtctggg

SEQ ID NO: 354339 - DNA, 258 bp, Zea mays
cgcccctcccgcctcgttctctccgccatcgtcgccgccgcctccattcctccaccagtccaccatcgccacctacgcccaaccaaacccaactccatctcttccgactataaacgcaacccaccaccgctgccgcgaacctctgcgctccgaataccccagacccccgatcctcccaatggccaccgcattttcgctgcgcgctgcggccccggccaccgctccccgcggcgtctcccgatccacttccggggcgag

SEQ ID NO: 354340 - DNA, 267 bp, Zea mays
ccgataagcagcggccaaaacagaaagcgcgatttgtttgatcgcttcctcctccactaccactagctagcctgccgccgtccgccgtgcagtgtgcgagctccgcccgccggtgccggaggagagcgaggaagttccctctctgaaaaaatcgcagatttctgttagtatcatcaccagttcgccatcatctccgctctgtgggggcagaagctccgcttcgttccaagaaaggcccccgcgtcttcctccgcaaaacctcccggg

SEQ ID NO: 354341 - DNA, 263 bp, Zea mays
ggacggcaatgtcggccagatgctctacaggatcgaagacaagggcagggaatacggctcgtatgtcagagcaggagagtttcgatggttcgtcagggaaacagatggcagatgctggctaccactgctttgcacctgactggatcggatttgggttcagtgaaatgccacaacctggatatggattcgactttaaagaggacgaatttcacaaggcatttgatgatcttcttggtactctaaatatcaccgagcccttcttc

SEQ ID NO: 354342 - DNA, 244 bp, Zea mays
tagccagcctcagctcctcgttgcccagtgctactgcaaaactatcaggagtgccaagatcttcgtcgtactatacccagttgatcttttgctcgaggcatcctttccataaggcggctgcagctgcagctttccataagctcccacccgatctcctctcggctaagctacccggctaggaatcataagcatgcaagaaccatctggcgtcgtggcacggatcacgatcaatctgcgccggccg

SEQ ID NO: 354343 - DNA, 266 bp, Zea mays
ctctaatcattccgacagaaggaatcgcaagtcctcaaacatcttactatgccgcttagttagtatactgtaatatatatgtgtcggtaggaattaggatataatcttgtgagatttctgataatatgttgagttgccgatatgcaatttgatagctttatttacagtaagtggtataagttatgctatgtttcttccatgatgggcgattccaattgataggaatacacattctaataaagtattccttctttatttatatgttt

SEQ ID NO: 354344 - DNA, 248 bp, Zea mays
ctgttcagcacgcacagtaggtctccgtgtgctctgtacggcctagtgctgctgcgctactggttgggtgcgtccgtgcgtggaccgctgtagcaaccagggcacccctgtccatggtcgcgatcgcggcctccgctggcctggcccttggcgtgtgcggggcgtagagacggaggagaatgttgtactatgtgcgggcgcggcgagcgaaccagtctggaccagaccagaccacaccagggccagag

SEQ ID NO: 354345 - DNA, 201 bp, Zea mays
cacctgcagaaagtgaagaccaagtaccctgtcatcgtcgtttccctccaggcgaaatgagccgcgcgccaaataaaggaccaagctagctgatgcaaaatctggcgtcaagttagctattagtaccgctactattatatgcatgcagaataattagtcaaacaatcagaaaaataaagtgcctcagagactgttagtggc

SEQ ID NO: 354346 - DNA, 243 bp, Zea mays
gttctccgtcggtcccagctacaacgtcagctcgttgtgacctgtgagatttcagaggagagatccatgaggattgatgaagagaagcagccccaatacagcatccgctagatattcgacgaaacgctgaaaccaataatcttcgtcgtctctgacttccgcagcagcgtcgttccctccatggtgctcgtcatcgacttcgccctcaagtcatcatggcttgacggtcgcctaagctcgtcc

SEQ ID NO: 354347 - DNA, 228 bp, Zea mays
cttcaccaaagcagattacttgaagacctatgcacatgtcctccagcctgttgacggccaagctaactggccaatttcagacatgcctagaccaaaaccaccagcttttgtcaaaatgccaggaaggccaaaaactgaaagaactagagaggtgagggaagcacctaaggggactaaactaagcaggatgggcattaagatgagctgcaggttgtgtgacaaacctgg

SEQ ID NO: 354348 - DNA, 262 bp, Zea mays
cttgcagcgcgctgatgtatccatctccgtcgttgctggtcatgagaagaagagtggctcatcagtggccgtggtggacatgcgtcgagaagatccggatcaggcggcgagagaatgtgaggacgacgacggagacgacgaacaggagtgcctgatgaggaggacgttgctcgctcacaccgactacatctacacccaggggaagcacaactagctagtcactgctcactagcctgtgctgctggctcatgctcatgtcatg

SEQ ID NO: 354349 - DNA, 194 bp, Zea mays
ctttatttaaagttgtcggggaagactgacatacttttcttgcttcccttgtgtctgctgtgcctaatgtaccatccttaggtagttaggttattgctattctactgctttgaattgctatgccaagtggtgatattttcattggaactcttgaacgatggctcataccagataatgcaatgagttctgctctc

SEQ ID NO: 354350 - DNA, 110 bp, Zea mays
cgccacaagacaccttggcgggcccccgacgcacgttcagttcggagaacacaatcctgcccccagagtctcccgggacaagctcgctgatggcttcgcggggcgacctc

SEQ ID NO: 354351 - DNA, 273 bp, Zea mays
ccgagggggagggtttctccagcctctcgtttctagccatcccatggccccaggcgcggcgtcgccgggcgtgagtcgcgagaaggacgccgagaagcaactccggcccaccctaccgggtgaagtgcgagcctgacgagcccgtaccagctagccagccaaaccaagggagcgtgcgagtgcgagggaggaaggacaggaagcggatcaagcagcgggacgacttcatcacggctgagaaggagaagcgcagagcacagtattctgccgctg

SEQ ID NO: 354352 - DNA, 269 bp, Zea mays
ggaggctctcgcgggcgccgcatcctcctccgttctccccgcgcgccacccgccctcccgcgtggccgcgcagtccctcgcgctccgccctagccgctgcggtcccctccgcgcggttaggccggcggtgtcagtggcaaggacgacgcccacgccgccaacgggtctcccgtcctcaagctgacaagtcacagaaggcttcatcaactaacgttagtactgactctagtggatctagagctggcctgtttagaacacccatatcaggt

SEQ ID NO: 354353 - DNA, 267 bp, Zea mays
ctctcttctttttgaccccccctcccaactactttgtagttttgccaatcacggttctactaagaacatatcggttatcggagagcgaaatgttcgtgcggattctgctctttatctctctccctctctctatgtataaagctggctaccatgctttggcaacacgcgcgacttaactgcagctgtgcaatgctacagcctacagcagctcaattaactaactagtccaatacgaaataggagtacctttctctcatcattcttctt

SEQ ID NO: 354354 - DNA, 177 bp, Zea mays
ggcgcggtcgtggcttgtgagcgaaccagatcaggtcacaggcagccagcagccacaatggtgttcggctctatcacgttgtaacacttctccctccgcatttgctcgctcgttcgtttcttgagagatgacagatgtattcatacttggaggatgtatcctgagtattctatttct

SEQ ID NO: 354355 - DNA, 261 bp, Zea mays
gggagattgggtcgtgcgcgcgcggaatggttatcttgccggtgtgggcgcgccgcgggctacgggggattggtcgggtcgcttggtggccattggatccaccaaggatggctcagattagaatcaggacaccgtttcacgtaattgtgatctgggccgtagatgccaaattggacgagtgaagctgggactcggttatgagaagcgcagacgatagatctttgatccaacggtggggatcacgtaccgttttaatttatg

SEQ ID NO: 354356 - DNA, 251 bp, Zea mays
agtactcgtcccaatgcccggatgctatggcacaaaaaggtcacaatgtttttgaacacaacagaacaacatgattaatgatttacgtccttctccccaacgaataaggggaggaaggttaaggaaaccttcaatcaattccattggataatgtaatccataaccaactccggtacgccaatgtgtgaagttgagcgtacctccttgaaaccattaggtcccattaatccaaatggccaccaaggtccccc

SEQ ID NO: 354357 - DNA, 276 bp, Zea mays
gggccacgtcgtcccccgtggctggcgctgtcctcgccgccccttcctccgccgccgccgtagtcgtaaagcctctgcctcgtggcgcacgaatttgcggcagcacgggcaggcgcgaagtgcttgccggtaccgggctgggcgctgcgctgctgctagcgcttgtgcccgtgtgcggctcggcgcttgcggctgacgaggaatacgtgagcgagacgaaggatgtgatcgggaatgtgcggtcgacgatcaacctggacaattctgacccgagcg

SEQ ID NO: 354358 - DNA, 275 bp, Zea mays
ctctccacggccgcgagcagcaatcgatggtgggggacctgtccctcctcgccgtcgcctccgcctcccccgtcgtcctcccgccttccaagttgcgatttcggttcgctgtggctgacggattccgggattcgtggtgtcacgatgaaacaggagctccatggcgtgcttcctctccagggtaagagaccgcacgacgccggcgtgcagctctgcgcgccgttgcagcagcacccgccccaccatctagaggcggtgccttaccaccagggcca

SEQ ID NO: 354359 - DNA, 281 bp, Zea mays
caccagagggaggggacgacgggggcgagcagcagccggcaacggaggtcgctgctgatgtggtcgctgctgatgtggaggcagccacccctgcttctatcctggccaacggcactgtcggaggggatacagtgactgtgcctcaggatgcttcgccgcagcccgagtgccaggtggcagagcctgcacttaatccgaagaggaagttttgaacagggaggtggtttgtaacccaccaaatgacgtgaatcctattgttgaggaaacaccggttcctgagg

SEQ ID NO: 354360 - DNA, 271 bp, Zea mays
cgcggcggtgtcagttgcggcgggggcttacggactccccttccggccggagggcgccgctcaccaccgcgagctctccgcggcagtggccgtcgtcgagcgcgcctgctgcctctgcgttgacgtgaagagatcactgttttcaggtggcagcagtattcttgagaagaatgaccaaagtcctgttacagttgcagatttcggagtgcaggcccttattagtttggagctccagagattgttcccatcgatacctcttgtggccgaagag

SEQ ID NO: 354361 - DNA, 282 bp, Zea mays
gatttaactacattacattaaatatgccttgatctcatcacatatactacatgacatacttagaatcattctgttactttgatataccggtatgaattttattgaagttaatgcttgattcatcacttggatgattcttggtatcatatatcatacataggtcacagaacatagccacattttcagttcagaacatagccacactttcagttccttgtaaaattattctggaacttatgctgtttgtgactttcagattaaggccaagacaatcagtgaaat

SEQ ID NO: 354362 - DNA, 275 bp, Zea mays
gaccaattccatccaatttggtgttcgcggcaggccagtttgcttcccggtgatcatggcggcggcggcggcggcggcaaaggccgtgcggggccgtccaagcgcgcgaccacgtgggtcgactccgccagaccgccactccggcctctgtgtcaccggaaactcgtcgcgcatttcatgaattgaatggtgtaagtggtaatctatggtgtctccatcggtggaggcgtgggagatccgactgaaggctgcaaacacgaataccattgctctca

SEQ ID NO: 354363 - DNA, 169 bp, Zea mays
agatgattatgtagaggaaaatgctgccgagttggatcccaggctgaaacagttggaggatattctttaaggctgaattttgttaggttctatatcatgtatacctgtttggattactaaattcctcgaactgtacatcccaatttataattcgtttgatttttttatc

SEQ ID NO: 354364 - DNA, 272 bp, Zea mays
ctagtagaaatcagagatccaaaggtctgaagctgaagaaagctcttcagattagtctcttgcttctggtttctgtttggttgctctaccaagttaagcattcttatgagaagaaggcatacagcgaagatgaagtgagtggttcacataaagatgacaaggaccagggagagacagtcagactaggcaggaacgatctgcctccaaagatggaggccgactcttcaacattggatgaacgggttgaggatgaagagaatgatgaaatggag

SEQ ID NO: 354365 - DNA, 276 bp, Zea mays
catctccccaccacctcccctctcatctccctcacgccctctctctggtgctgcagctcgcccccccctctgctcaccatctcctccctggttcccatggtgccctccccttcttggtggctgacgcccctccctccatggagctcgcctctgctatgtgttcatgctgcaaccctgtctttccttcttccatttccacaagacccttgtgtgctctctctctctctctctcctcttggcgacgactgggtggcaggtgcccaggtcttcttggga

SEQ ID NO: 354366 - DNA, 223 bp, Zea mays
ctccacttgaacttttttgtcgtttaatacaaaggcaggagagctagagatcattgcattaatgagaagtatttagtgtacaacccacacaagcacacaaccaaacatatattgaactggttctattgagaatgctatagtgataggttgatagtataacgtgatggattttaaacccactatgtctaatgtagcaaatagttaagggcacggatttccagac

SEQ ID NO: 354367 - DNA, 271 bp, Zea mays
atgcatcatgcacatcaattatatatggactacgtacgcagatgataaatgaagtgcgggaactcctgcggccggcggagatgccgggcttcttgacggactccaccgtccgccgcttcctccacgctaggagctggagcgcacgcaagccaccaaggctctcaaggaaaccgtcaagtggaggcgccagtacaggccggacgaaatccgttgggtatagtactaataagtagccgtactgcatgcacgtttgtactgtacgtacgtacgt

SEQ ID NO: 354368 - DNA, 267 bp, Zea mays
gttctcttcgccgccaccgccgacaaataaccgccgcgatttgaagcaagagagccgcaccaggacaagacatatagtgagagtgagagctcgaggagggggtggcgcgatggggctctcgggcgcgacgatctcggcgccgctcggctgctgcgtgctgcggtgcggggcagttggcggaggtaaggcgctgaaggcggacgcggagaggtggcggcgggcgggatgcatccgacgcgttggcggaccgaagtgaggtgcgtggcg

SEQ ID NO: 354369 - DNA, 270 bp, Zea mays
tgtctgtctgtctcctactctccttacttggaaaatcgatctactcgatgttgtacatcagtacatgcgtgacgctcgaatcatgccatttctgtgctgatcggcccatttgctctaacatctagcccagataactcttgtggtacacatcgacgcgacactctgacacgctacggcctctcggcggggcccggcaacagaccgggcagcagcacggcagccatggcgtcgagttcgaccctggatttggcgatgggccccggcgccctc

SEQ ID NO: 354370 - DNA, 245 bp, Zea mays
aggactcctgtgtgttgttaaattaaactggtttccgcgtccgttaggacttaggagacctcatcgcgtaacagccttccaaaaaaataaagagagcccccttctcaaccagctgctgattaattggtgcagggctagctgtcaggacggctcagctccagctttgcggccctccagctctccccagttcaagttcaatattggcgagcatgcgagtttgccttcttccgtcgtcgtcatcatca

SEQ ID NO: 354371 - DNA, 278 bp, Zea mays
gccaccggttttcccatgcttgcgccaagggaaaatgaccacagcacacaagctccaaaacatgaggttgcccttttgcggcttcaccaagttaacgggatgcagtcccctgccgtgcaggtccaaaccagcggtggctttgttctgcagcacctggtgcctgtctctttgagcacgcagcatgatcagcagcaattgaaccaggctcctgtgtactatgtgcaaagccaggatcatgctaaatccacagagagcaaggcgatggaacctttggttca

SEQ ID NO: 354372 - DNA, 271 bp, Zea mays
cagctctgaaagactgaaactcacggccatggccatcctgggtgccctcaggctcgcgccgtctccacccgccctcgccggctccgcgccaccggcgacgtcgccgtatacggctgtacgctcctccgtgcacttccgcctcgccaatgccggcgccgccgcgctcgtcgccgcctcgctcctcgccgccgaccccgccgtggctttcattggaggaggaccgtacgggaagcaggtgacgcgggggcaggacctcaccggcaaggacttc

SEQ ID NO: 354373 - DNA, 269 bp, Zea mays
tgattatttccaccgtggcaaagaatatgatgaaaaactgcgaagagagaatcctgggttgtacaaagataatgattctcggccaagtggaaatccaggaggcaaagcaacagatactaaaaatccagatggtgttggtgcaggacggagagaagctgcgagtgatgaactcatgcttcagcgtttccgcaaacgagaaaaattccgcgcccttcgaagataagccagagctgacaggttgctagattgtgccagttgcctttgaagct

SEQ ID NO: 354374 - DNA, 99 bp, Zea mays
gagcaaaggcagcacactcagctatccagcaaaagaggtggagaggcaggagtcatggccaccgtcagcaccgccgtgggtgaccaccatcgttgcccg

SEQ ID NO: 354375 - DNA, 270 bp, Zea mays
gcaccaagtgctgattcataggttcacgttgtttcagatataggcttcaagatgaaaataatcatgttagctgtacctagtagctcgacataggttggcaatcgtgggcaaaaacataatatttgattttctctgtagttacaaagcgacttcagatctacacgagtcgtatacttttacatgcaatatttctgtctctctcaagcacatgaactccgattctttctgttctgcaggtagggatagatgactctttttttgcggtgtgag

SEQ ID NO: 354376 - DNA, 185 bp, Zea mays
cgcgacccagcgacgcctcctcggccgtccgatcgccctatccgccgccgcgcgattccggcatgggagtagacggttccagcaaatttggtccaacaattctttgtttggccgcttgggctccggtctctcgattcttcgtagcttggtgggatgtcgccggatccagcggccatcattgttgt

SEQ ID NO: 354377 - DNA, 271 bp, Zea mays
agatgaaatgccttttgtacatgatggaaggaaacaaattacgtacatgtatatgtggatcgaattgactgttgcattctgcctgtatttaagcaacggtttccacccaaaacgtctataatttggtccttcctagatgtgtcaaatgtgtttactgcactgcgtttgcttttgtggcagcgcctaatagttgtttataaagtctgatgttaacaaactattgtcatgctatgtaatatatagtcttaacatgttggtttgttgagtgttc

SEQ ID NO: 354378 - DNA, 114 bp, Zea mays
attatattttaggaccgagggagtaggtctgatccagctttgttccgtgtgaaattgtatatgttggtggtccatgaatgaatcaaactgaacttatgcgcgcgtgctgctgtc

SEQ ID NO: 354379 - DNA, 261 bp, Zea mays
caagttctagctaaaggagtatggattccttgtgctactgctgatgtaaccctcttctctgtcccaagatcgagttgctccagagcctggcacaccatcaccagtgtggtgaccaagtccacccgaatgctcatctcaccttggccagggttgcatgcccaggcgacacttgttatgtggtctctagtggtcagtgaagctcacgcattgacgcaaatcagcttttgaactctaccattgtcaggtgatcggaacagggtt

SEQ ID NO: 354380 - DNA, 253 bp, Zea mays
atgagtaacccgacgaataaaattgtttttgataggtaagtatggaataatattactggacgggtacgtaaccgttgacatcctagaccccatacagacatacagtgcgaggcaccaagccaccaagtacgcctttttaactcgctgccggcggagtggagtaagatctcagctggcgtatgaactcgtcgatgtatctctcatggcgttccttgtcggccacaacacgctgcatttccagggcattcgccac

SEQ ID NO: 354381 - DNA, 246 bp, Zea mays
cgtatgtgcgtgatgcatcgatgcatctatctcgctcgtagcatgcgcatgttctttctactctacttttaattcgtgcgtgcgacttagggcaccccacaagataatgctccctgcttacgactgacatatatttgtttgtacatgtgcagaatagttacgacagtatatttatagcctaggtttgttgtttatcttttctagttgttgtaaagaaggatgcactaaatacaagggaagggtgta

SEQ ID NO: 354382 - DNA, 222 bp, Zea mays
ctcgaagcttcgagcacgccacaacccaacggcgcgcgggcggcgggcccgtgagcgtgcagtgctgagtacacacgcacgccgagcggcgccactccgggttagcagcaacaatactgtgggattatatgagatgagaaggagactactagactagcagccgtatcactcactacccgctgcccgcgcccgatcgggcgactgccctgtggtgtactggtg

SEQ ID NO: 354383 - DNA, 122 bp, Zea mays
tatatgccctattgaaattgtcattttgctttgcaaaaaaatatcagcgtgccgttgtagattttcaaatgtatatgtctgccgtcaaactctctcgtgaatatgtttggttacaataatgg

SEQ ID NO: 354384 - DNA, 269 bp, Zea mays
cgaagatagcggaagcataagatcagccgcgcaaaggagagggagccatgctcgctctcgcggcggtcgcgcgcccactcgttcgcggcgtccgtgtatggaagcctcctcgtcccctcgcctcccgtccccgcgccgggacgtcgcgcggcggtgtgcgtcgtcgccaaggtcaatgtggccacgccccagtgacgaccgcatcggccgccacgtgcgcgtccgcaagaaggtaactggcaccactgataggccgaggttgagtgttt

SEQ ID NO: 354385 - DNA, 267 bp, Zea mays
ccgggagcgcctggccgcgctgctggagcaggagaacgcgcgggacaacgtcgacgtcgcgtgcctggtcggcgacgcgcacctgctgacgctgctggaggtggcgcgggggctcggcgtgcccacaatggtgctgcgaaccaccagcgccgcgtgcttccgctgcttcttggcttatcccatgcttcaccgaatgggttatctgcctccccaagagtcgaagctgtacatgccggtgaaggagttgacaccgctacgggtaaggga

SEQ ID NO: 354386 - DNA, 271 bp, Zea mays
ctgcagtgaacgccggcatcctgtccggtttctcgggactggagtcgactcccggccccgacctcccccggctcgagttcctggagaaatggaatggttagttgagatcctgagttacctgctgagttcttgtggaggccaaggacttgttcttgctgcaacgttttaccattccgggccttttctgactcatggaaaccatgtctccctgtttcgctctcaagcggagaaccagaagaagtacaccgagttcgataacaggttcaagaag

SEQ ID NO: 354387 - DNA, 271 bp, Zea mays
ttgcattgcatgcatatgtatggcatgcagggccgtgtgaagaaggataagctggactccttcaacctgccgttctacgcaccttcgatggacgaggtgagggacgtgatcacgcggaccaaggcgttcgacatcacccacatccagctcttcgagtccaactgggatccacacgacgacgacgacgtggagatgaagatggaagaagacgtcgccgccgtccagagcggcgtcaacgtcgccaggtccatcagggccgtgatcgggcccc

SEQ ID NO: 354388 - DNA, 276 bp, Zea mays
gttcttcggaggcttctcttggagatttgatgctagagaagcttgatgaagttgaaatctctgtaaagaaaatgcaagcactgctacaggggcctgaaatttccaagtttaagaccacatcaggttgactccatgtatgttgacattttcacaggtgattgaagttgaaattgtttgactccttgggaaatgagaattgcgttctttttggaagtactagggagtacataccaaaattttgggcatgttcagctattggctgcggcacagctgtac

SEQ ID NO: 354389 - DNA, 276 bp, Zea mays
ctcgaggctcgagggaaagagacagccccccaaaggcccaaaccctctcctcttcttcttcccttccattcgggtcgcgtccagttgctggcagccatctctcgcggtcgcggcctcgcgggcaacctcctgtcttctccccatcggatccagtgctgcggatccgcatttccgcaaggtagtcaatggcggcttccccggcggaggcgggggcacaggcgctgcccgaggcgacggaggcgaaggagaagggcaagcggggcggggtgctgagga

SEQ ID NO: 354390 - DNA, 272 bp, Zea mays
taggaaaccaaaactgtccgctttaacaggctctgaaatgaaattgggaaaatgatagctgtgtttgggagtaggtggggaatgtcagtatttgtcagtatcactaaaaatgttctgtaatcatgcttgctaacagattgcggtttcatttttgctttcttactggtttattttaagctctaattgaagaattattggagatgctgagttcatatgttgtcgactccttcctgggacagcagtacatgcgccgccataggtccagaggtcgg

SEQ ID NO: 354391 - DNA, 170 bp, Zea mays
aagctcaacagtcatggtcgacatgggcaaggagcaacaacaacacgaggcggatgaggtgcaatgggaggtcgtccaagaagaagtgctagtcgggcaagagacagtggtaccggtaccgtcggatgaggacaaggtggccgaggcggcactagtgcacaagatctcca

SEQ ID NO: 354392 - DNA, 116 bp, Zea mays
tatgctgggtgtgccagtgatgtgggcgtggagcaggcaacaattggctcgtccttgacatttatcgattctcccctattctcggccaatgaattttattcgtttctccgagcaag

SEQ ID NO: 354393 - DNA, 267 bp, Zea mays
caccactagagaaggtgccgcgactgctaatccggcgcaatggccgcggcggcgatgggcctcgtgcgtgactcctgcagccacagggaaccacgagcacccgccggctctgcagcacaggtgtgggcgtgggcgtggcgacgggcttcctcagctccgggaccgtcgcgtcggcatccagcgcatgcccggcttacccgtggtcacaggacgggtcgctgggcgggcacaaggtgttcatgcagcacgactgctcggcgtgccact

SEQ ID NO: 354394 - DNA, 264 bp, Zea mays
ggacgtgtggtggactggtggttgcgttgcgttgcgttgcttcgcgttggaggttggagttggagtgggccgcgtgcgagaggatctgagcggataggccatggagtggagtgattagcggttgccgggtcaggagaaggcggcgtgtgttttgatcctactcgcgtttgaggggccccgatttcgagcgggtgttcagttttggtgccggatttcgagcgggtgtttagttttggttttggggacaatggttttggactgcct

SEQ ID NO: 354395 - DNA, 252 bp, Zea mays
ccgccggccacttcttagatcgaaagttcggcttcgacggcagggactgatgactgatccatatgtagacatggccgacgtgccatctatatatgatcatatatgtttaatttgcttcaccctagccgtctccacatgtagacatctatatatgatcatatatgtttaactagctgaatgcccgtgcgttgcaacggaaatatataataccaatatactgcgataacttatatacaaaatgtgtgttatatt

SEQ ID NO: 354396 - DNA, 239 bp, Zea mays
gtttgacgtcgtcccgcagcacatccagaaccagctctccacggcaaaagcagaggaagctgctgcttagtttttcgtttccccgtagatatatccatacagtacagcgtccgcagagcaggttgataggaagcgcatcaaggtgtatccgtgtatgtagctttgtagcgtcttgaacttgaaccccgtcacggggcattatttgccattgattttggacctgtagtggacagtgaaat

SEQ ID NO: 354397 - DNA, 240 bp, Zea mays
gttatacattggttccagtattattgtcttcgcaaaactcttggcttttcaagttactactttttcactgatatacgagtaatcgtcctgcgtttggtggttggctgatctgatcggttggtcatgctgggatgttgttttgttcgtatgttgtgtcgtctagctgtttctgtttggacccaagaagttctaatctgtcaagtaactgtagcagatataatctctgagaactggttgtgt

SEQ ID NO: 354398 - DNA, 236 bp, Zea mays
aaatctctccaccccggccccggccccggccgcggccatggcggcctccgctcccatccacctcctcctctcgccctcccgctctacatggccgccacaagatccgagcctgaggcccatactgcccctccacgcgtggccggcgcgccaacgccatctccgcgctgcccgctgcgcgttgtcgccgcctacgccgtcgctcgacctcccgctcctcccgttccagcctgcggagg

SEQ ID NO: 354399 - DNA, 245 bp, Zea mays
ttatcaaatgcatacaagattttgagggcgcaattgtgataagatattcaatcagaagatctcctaattctgtaatcaactttcttccaggctcgtataagtacacactgagaggatcaacttcctttccaaatttgtttattgctggtgattggattgtcaaccgacatgggtccttttctaaagaaaaagcatatgtgactggacttgaagctggtaatagggtagtagactattttgacatt

SEQ ID NO: 354400 - DNA, 243 bp, Zea mays
gtttacccgagcacgcggccacttatccgtccggctggccgcccgtcccccacgatcgcctttggggctgggctgggcaggaccccgagggcatcctgggcgcgccgcagggcggccacatcgcgcgcctcgagttccgccgccgcctcgagagggactccgaggcgcgcgaggacttcgagcgccaggtgcgcgatgagaaggagcggcgccgcagcgagcgcgaggataggcgcgggtgat

SEQ ID NO: 354401 - DNA, 260 bp, Zea mays
gcgccgtcgccgcggtcaccgccgaggtcgacaagctcgcccccaaggtggcggcgctggacgcgtcggtgcgcaatggggagaaggtcgcggagaaggacgtggtgcaggtgacagagcttctcatgaacgagctgctcaggctcgacgccgtggtcgccgacggcacgtcaaggcgcagaggcggatgcaggtgaagcgcgtccagaagtacgtggagacgctggacgcggtggcggccaggaacgccgccaccgtcc

SEQ ID NO: 354402 - DNA, 264 bp, Zea mays
cacagcagcgccatcccctctcatggccctccccgacgacgccattcacctcccccgtgtcgccttcgtcaagtacgcccctccgccttccaccccatggcggagtgctcgattccttcatccgatggcgccacccacctcccctgctctcctccgccgccgcggctgtcgaggctcacttccaggcgcactggtccgcgctcgacgctgccgcacgccaggacccggtgcgggtcatcgccgcggggggctggcggtccccgc

SEQ ID NO: 354403 - DNA, 269 bp, Zea mays
ctcggcagctaacgacctgcagccaaccatctaccagcgactcagcgagcgagagcagcacacacgcagctagctaggagcagcagcagcggcggcggcgatggcggcctccatgatctcctcgtcagctctggcggtggcgcctcagggcctgccgcccctcggccgccgcgcctcctccttcgccgtcgtctgctccaagaagaagatcaagaccgacaagccctacggtgcgtgccacctagcctgctgccgcggcctgtgtgtag

SEQ ID NO: 354404 - DNA, 253 bp, Zea mays
gctaagtcaagtctatggcattgttgagcatgctcagggtggggtcatctacctgagatggttggtaatgtggccctgataatgtaaatactatagatattctgtagagaaattttgtttagggatttatttgactcggagaagcagtgaggggggaaatagatgtagctacgctgataaaaaaaaaaaaaaaaaaaaaaaaaaaaaaaaaaaaaaaaaaaaaaaaaaaaaaaaaaaaaacaaaaaataagaa

SEQ ID NO: 354405 - DNA, 261 bp, Zea mays
ttttctatatatagtctagccttatgtaaatggctattaaatacagatatgtgatgacaaatgtaccattgtcatagtgacatggccttgagaaatcttagctttctaatgataatggtcaaatattctatctaattacttccattttcctccttttgccctcttattatatttggggaacgtcagtgttgtttgtggtatttctcagtatgacaaggctttcccatttcaggtccataagcaaggcagcgcccttggcag

SEQ ID NO: 354406 - DNA, 257 bp, Zea mays
tagatcgcgagccgccgcccttttttttttttttttttcaatatactttatgaagtacacaagtttctgtatgtatatatggaaaattaagtcacacacttgcatacaacattattacatcgtatatatatgcagctatctcttgatataaggtaattcaaaaacctatcacctgcagtataatatagtggaaaatacgacggtagacattatgtaaaaccctagatatctaccacacgacgtctcacacaaactat

SEQ ID NO: 354407 - DNA, 268 bp, Zea mays
gcaaagtcacatgtcgcagtggtttgtgacacttctactatttgtaacaatgctttcctggctaggctcctcctccatatccggcaacatggtcaggttcggcatgtggatcccagttccttggatgggggctttcacctgcaagccttaccctctttaggctagcgatcttgccatgaaatgcaacatgcagtaaatgtcgagttccataatatggttgacaattattccttctatgccatgaaacctacaacaatacattctgtac

SEQ ID NO: 354408 - DNA, 266 bp, Zea mays
cgacaccggcccacgtgtcaaccgctccccactggctgagccaacggcggaccggcgggataggatatggtggccggccggcggcgcacgcggcgagccaactcaattagtacagcgtcgagcaagaaggccgaagcggggcgagagggagagagaggccggcgcggcggccggcggttgggacgaaggggaggaaccgcggaagccggcagcagccaacgaagagggcacagggcagcgcacactgggagccggcagcggcggtg

SEQ ID NO: 354409 - DNA, 268 bp, Zea mays
ggaaatcttcgttctcctcattcaacgccgaactgcttagaagatgatacggaatgtgtaatacctgaaaacgactgtgaaggtattgtggactgtgtcaaaaagtcccttgcaaagtaaatagactatattctttcaaaaaaaaaaaaaaaaaaaaaaaaaaaaaaaaaaaaaaaaaaaaaaaaaaaaaaaaaaaaaaaaaaaaaaaaaagtaaaaaaaaaaaaaaaaaaaaaaataaaaaaaaaaaaaaaagggggggcccccctt

SEQ ID NO: 354410 - DNA, 257 bp, Zea mays
ggcattgcatgcccaagtgttgttgttatcgttaccaagatcatcgctactactgatgactgatgcagtgcgttcgtgatgaactgtgtaagcaggttttgaagggagagttacctgcatctgcatggaagagggaggcgacccgcagcttccgagcatctccgcacgcaccacgtccgacagcgcggggggcgtcgacttggatctccttgagcagctactgtctgacgacaacggctggctcgaggtggtctcac

SEQ ID NO: 354411 - DNA, 238 bp, Zea mays
aattgctccatcacagatgtagatttgatatctacattctgctttcacatacctataaaggagttatttttcatattttggtatgttgttgttttcactaaacttcaagagattttaattgtcaacctcatatgttggaaaacagatggttctagacacacttgaagaatggttgtcactgaacttaagggattttaattgttactgaactttattgatgcatagtgaatttaccatt

SEQ ID NO: 354412 - DNA, 269 bp, Zea mays
gcggatttttctctttattgaacagtaatatcagcctctgtaggagtgtcaagcgtcaactttgttctacatgattaaattatatgtaccaaactgctacatattggaacattcttagaatgtctataagaagcatttactgatatgctgtatagagctcttgcttttgttgattcatggttacttttggtatctatgtattctttgtagcactcaacagagattcaaatgttggaactagaattagtcccactggattgagatcatgc

SEQ ID NO: 354413 - DNA, 264 bp, Zea mays
cgccatggcctccctctcctctgccgccgtcaccgccccttccttcgccgcacacgccacccgtgccgtggtcagaaggaggtccttcaccgtgcgcgcctctctccgcaaggccaccggtactgccgccgtggcaatggctgccagcgccctgcttgccggcagtgccattgcccagaaggtgctgctaggctcaggcgactgcgggctcttcttcgagccagccagttcaccgtcatcgccggcgacaccatcacattcaag

SEQ ID NO: 354414 - DNA, 259 bp, Zea mays
gagaaagcaaaaaatgttgtttttatagccaaaaactatgtttgcatgtaaggctacgtatttagttttatacttcattggtaaagtactcaaaccatctttgagaaaatttaagacttaaatttggtcaatcattaaccatgatgctgtttgtatcaccccccttcaatgattgcattggaaatgcaggtcctgtttctgcaatgattgggaacaggctagaaagcagacctatttcggcatcaccatccttcagctc

SEQ ID NO: 354415 - DNA, 251 bp, Zea mays
gtgccgacaggcagctgtggttcgcgtccaagcagtccctctcctacctcgatggcacgtacgtacctgcgctcgttgcccgtcccgcgcgcacaaaccttctgctagcgacgatagaaatcctatgctcacctgcctcattgttgctgctgcatgcatgcatgcaggctgcccggcgactatggcttcgacccgctgggcctctcggacccggaggtcaccggggcttcatcgagcccaagtggctggcc

SEQ ID NO: 354416 - DNA, 248 bp, Zea mays
gttgtctgttaggaatatgatagcattcatacatatttttcggtaatctcatgtctagttaggcgattgaaaattttgtagtagaacctgattttgtattttagtctcgtatatatagtgatacaatggctagttttggtatcctattgctttgtattcacatgtatctgcatacatggccaattgtatctggaattatatagcatgtgacgcaatactttctattaataaaaagattagttgcagag

SEQ ID NO: 354417 - DNA, 246 bp, Zea mays
cgtagtcttcctcccacaaaacctgcgccacatcttcatcctcctcctcgtcacctcctccaatcgtgccggcggcgcacaaggtagatcatctgagcctattcatcgcaacctcaagatcccccggggaagaaggggccatgagtcccacggcgtcttgcagaagatatagaacctactcctacaggctattagaagctgaaggcaattacaatcatcaagaacaatcaaatgatgcaacggcta

SEQ ID NO: 354418 - DNA, 245 bp, Zea mays
ttctagatcgcgagccgtcgccctttttttttttttttttttttttttttttttgaatacatcacacacaagagaggtaaatttcagttatacaagacttcttcatctagtttctttaagtacaacagaccacttccattccttcctcctacaccaaaagccaggttttccacgtacgactgcccaactcgccagcagcgatgtgcaagcacaggtgcagcagctagtagtagccgatgtctttg

SEQ ID NO: 354419 - DNA, 260 bp, Zea mays
aattaagctaatactgtatgattttgtatggaatatatttatacactactgttagccatactacctatatgttacatttcagctgtagaagcgagttggttggagatcagaaacaggctacccaacttgaagatggcactgcgacgggctctaggatggtcggaaggggaggttatgcgaccagagtcaaagccctgctcccggttaatgcggcagactgcgggcatcttctccgtcggtggtggtctggctttctgggt

SEQ ID NO: 354420 - DNA, 260 bp, Zea mays
gaattggcccatgctgcgcatcatgaagcagaggaacgtaggatcggtgcagcattggcgaaagagcaggattgcaatgcttgggagagagagttgcgtcaggcacaagaggagctggaacgattagacagtaagcttgcgttcagtaacgatatgcagcacaatattgatgcaaatttgcacaagttgcttagcctcaattcggagctgtctgcctatgtggcgaacaaactgactgaagaagctgaaggtgtttccaa

SEQ ID NO: 354421 - DNA, 260 bp, Zea mays
  unsure (1)..(260): unsure at all n locations
ggccaaggcagctcctcctctcctcgccgccggcagccgcactgccatcacagcgcacagccatcgtcgaggaaaggcgccgctggcgcggntttgttctgcagtcgcgtcatcgtcagcaagcgcgccagggtaacagcgaactccggagacggagagctgaagcctgcaggcaagcggaagttcatcaccaaggaagaggagccagaacagtaagcaagcagtgtgaatctcacctctcctcgtagcagcctgtgagt

SEQ ID NO: 354422 - DNA, 263 bp, Zea mays
tggacctcgcccccgcgcctcccctctcatcagttcttgcacacacgagttgcagttccagcagacaaatcctcccactggtacttccaccacaccacagtccacaggcagagaagagcgaagatgcttcttcccaggcacagattcttcaagttcaggtccttgtagatgagctgcagctgcaggatctcagaatcagctaactattttccacgcatagtcgcctttaattccaggtgacagcaagggcaggtcgactgcgc

SEQ ID NO: 354423 - DNA, 244 bp, Zea mays
atgcacttcctttcctttatagtgacaaattcacattcattgtcgcagccgtcgaatcgacattttaatcacttaagtaactgggattatttattgctagatacgtgtcatattgttcagacatggcatcacctagaccatttatgccagtctactactttggtggttggaagctgaatctgccttctacatgaatgctgtacgatttcatatctgtctgacaaaaatacgatgagctgctgat

SEQ ID NO: 354424 - DNA, 264 bp, Zea mays
atgaaggcaagtagagatgcctgaaccatggtcttcagaacgcgtggtgcacatctcagctcagccacagtcggtagctcttagggttttaaaggttaggagggaaatgaagttcgggatgacaactatcaagagccaactgaatctgtaaagcaacacttagacggcggagatctcttctcatgatctgatggcagtcagatggtggttcagtttttctgtggcgcgaagtgttttccgtttttcttgttattcttccaattc

SEQ ID NO: 354425 - DNA, 266 bp, Zea mays
ggaacgtcggacactcacacacatggtcatggcgcctcagccttcgcgcgctctgagtccgaggctgagccgcgcccccggcgcggccacgcgtcgtgcaggtgctcggccgcgctcgcgccgctcttcgggaagcggccggcgtgcccctcgtggtgtcgttcccgctgccggagatgatgcaggaggagatcatcccaccgctgcaggccgccttggaggcggaggaggacgtgtcccaggtccagctcgccttcgaaaacaac

SEQ ID NO: 354426 - DNA, 279 bp, Zea mays
tcggttcctgtctaccttgatccacccaattggagccagcaccagcaccaccaccagccgcagcagcagcagcaacagcacgctcaacatggccagcagcttccaagtggcggcaacggcggcggcggcggcggcatggacacgcatgcgcatcatcatcatcatcagctgccgccagtgccacctcctcctagcggggctctcatggctcctcgccctgacatgtcggctatggtcgtccctgcgagcggtggtggtggcgggccgactagcggcggc

SEQ ID NO: 354427 - DNA, 275 bp, Zea mays
cacgagccttgtgtcgtggaaacaatctcaagtcatcgattcatccagcacaagcagcatcacacaaaaccgatcaatctcgcagagggagaaccaaccaatccatcatctatctcgactctctcgcgtctccgccggtcccagcacggcggcgccctacgccgctcctccgtcgcagtacggcggttacgggtacccgccaccgcaggccgccgcgtacgggtacccgccaccgccacaggccgggtacgggtatcagcagcagcccaagaaga

SEQ ID NO: 354428 - DNA, 274 bp, Zea mays
gcaggagatcaccggcctccccgcccctgggccctcctcctcccccgccgccgccgtcgccgcgcccagctggacgcccgctgcgcccgcgtgcgtgctcccgacgctggacacgtccgctttcttcctgctcgaccgtgccgccgctgcgccagcgtccggtggacaggagcccgggcgcgcgcgcatggaccgcgacgcacacgcacgccgccgtggcagctggggccgacggctcggactcggcggcgctgctagagctggaggcactggt

SEQ ID NO: 354429 - DNA, 270 bp, Zea mays
caccacggcaccaccgagcagcacagcacagggcactgcccgattccacccctgcagcctctcgctgcccactttccatgtcactgcaccactgccgcgctgccacgacgcccgccatgcccgccaccggcctctcgtccgcgggcgcttccccgttccgcctgcccgcctccagctcctccgcccagggccacctccgtctctccccccctgctgccactgccagtgccaccgcctgccgccgccgcttgcttctccgctgcgccgcct

SEQ ID NO: 354430 - DNA, 212 bp, Zea mays
ggttgccaaagcaagataacgatgtatctggttgcatcatgtaataattattataattaccatttaacttctggcgggggtacatcatgtaatggttggtgtacacccaggttagtaatcttaatagtgtttggctgacaggctgagggtcagtagacggtgtgcagttcgcttttttcaggggaaaggtacaggtgttaaattgtgattgt

SEQ ID NO: 354431 - DNA, 264 bp, Zea mays
atgcgccgttcctggtgcacctgttcagcagcggcgagggcgagcgcgtgacggtgcggcgggagccgctgcgccggagagctggccggacgtgcggcgccggtgggggccaggcggggcgcggaggccggacgggatcatcctggtcgagcaggtggcctcggacggcggctgggcctccgccgcctcggatgctgcgcggcaggtgtgggggctggtggtgcaggcgcgcggcatggagcgctcgtcgtgctacgtgctttc

SEQ ID NO: 354432 - DNA, 267 bp, Zea mays
cttcccgccacaggctcaaaagcaatcaagcgactcctcccacagtcccacttccactcccacccacccacacgcacggccgcagcagcagcaccatgtggtcggcagcaacggcggcggcggcgcgcgcggtgtccgtgtccccagtcccggcgccttcgctcctcagcggccggcgcggcgggccgcggggcggccgggggtcggtgtcggtgcgcacatggtgtgggacttcgtgggcggcgacctggtgcggccggacctggg

SEQ ID NO: 354433 - DNA, 170 bp, Zea mays
atccaccacacgagagaaccacttccatggccggcgcctcatcgtgagctcctcgcagcatcgctaccgcgcccttgcgttagtctgtcttcctgtcgcacgtacgttttgtttattccttttcttggagcgggatcggaggttccaaccggcaaaagagagatgatggt

SEQ ID NO: 354434 - DNA, 205 bp, Zea mays
gtttttactaaattaaaatatcttatagtttagaatgcatcttgtccaacaggtagtcaataatggcagacgagttatatttggccaaattacattgtactccgtgtaccgagaactgtttttttaagaatcctttattgaccaggaaaaaaaaaaaaaaaaaaaaaaaaaaaaaaaaattaatagaaaaaaatatcaaatggga

SEQ ID NO: 354435 - DNA, 263 bp, Zea mays
acggcggcgcgagtgggcgtgcagaagccgagagaaggcactcggcagggcagatggaggggctgacgtccagtgagatcgccggattcgtggtgggtgccctgctgctcggcgccaccatcgctgcccccaaggtcgacggcttcatcgcctcctcccagagaaggtcactagggatgtgtaagaggtgcggtgaccttcggattgtagcatgctcgcagtgcaagggaacaggatcagctcggagcggagggatgctcagt

SEQ ID NO: 354436 - DNA, 260 bp, Zea mays
ctacttttcagcatggccatccgatttactcttcgaaggcggtgagaatccggctgggtcattccaagcttgaccctggaagagagacttttgtttcggatgaggatgagaacctgactgcgatcgctgatgagaactacatgtggacatacacgtcgccagagtttcctatgcttcaggaaaatgtgttgcaaaccttcaagcttccacgcccggctctttgcattggtggtatagtgaagattgaactactggggagg

SEQ ID NO: 354437 - DNA, 280 bp, Zea mays
ggcacggcggtggcccggcacacagggcacgttgggtgcgccttgagccacttgccgatgcacttgtcgtggaagctgtggccgcaccgcgcaggcccgaagcgcctggtcctcccgcatgccggcgaggcagacgcagcacttgtcctctgcgccggagctgcccccgctgccttcatcctcgtcgtcgctgagacgcaggagcgacttggcggccgagaccgttgacccggtgtccggcgagagcagacgaccatgacgatgatgttggcgaggcaga

SEQ ID NO: 354438 - DNA, 278 bp, Zea mays
gtagcgtgcaaacttcgaccgggaccggcgatatccgccatggccaccaccactgccgccgctcgctggagcttccccgcccgtctccagctcctcaccagccgccgcttttgcttccccgcctcctctgccgcgccgcccagttctgtagcggggttcagttgggccgacgccctccgcgtcgctggggacggcgggcgcggcgacgagtccgacctctccgggtacttccggaaggtcaagagctgcaaccgcggaatggataaaaaagggcagtt

SEQ ID NO: 354439 - DNA, 272 bp, Zea mays
ctctgcctcgaccgcccatagcctgcctggtagccatggaccgatccaagtcgtacgcgggcgggcgcatgcaaatcgagccgtactacgacggatgcggcgcgcggccggacttccggtcctactcctacagcgccggcggcatcgggatggggacgtcgtcctacgcgtaccagtacgagtacagctgggcgggggcaggggaagagatgaagcggactaagtcgaagcggcggtggctggcgctggcggacccggacatggagcgcaac

SEQ ID NO: 354440 - DNA, 268 bp, Zea mays
atggtttactggaatattatcgactggaggtgggacaaccagacaccacagccacttcattcagctggtttcttcctgaaccctctattttttgatggaattcgaggtgacatatcaaatggaatattctcaggaatgctagactgcatagaaaggctggtacctgatgtgaaaatccaagataaagtacagcgagagctccacatataccggagtgaaacagcagtggattttcgtaggcagatggctgtccgatctagacgaactt

SEQ ID NO: 354441 - DNA, 302 bp, Zea mays
cgataatgctggctttagctatggaagctatgattttaacagtgtcgacatatataattcaccaatggatccttctgggtttaatttacgttcacaacttggaggatcgtttctcggatctagcccacatattcgacgaagacctcatctctcacatggtggtggcattcggttaagccctggtggtccagggcatatgtctcttggggccagtccatcacaatttacaccgccaaattcccagatgcaaatcccaacaggtcctaatggaaggtatggtgcctctccttcaagaggtggac

SEQ ID NO: 354442 - DNA, 299 bp, Zea mays
aaaagatcagcaaggacgacttcatgacgtgtcttgggaggttcccgttcctgattgcgttctttgcagccccgatcaatggggaagtgtacatcgagatagtctgaaggcaaggcgatgccgtgtaagagtaaccaggcgcagttcaaagatgaactagcaggcgacaaatatttgagaagggagttagtattatattgtcattacggaatctgctgtgagatacgcgctggactgatagattgtcgatggaactgagaatgcacatagaaagcatttctaatgtactcctgtaagaa

SEQ ID NO: 354443 - DNA, 246 bp, Zea mays
gggcggcgtctcggggactcgcttcctagcagcaccactccttcctccattcctccaagccacgccacacctcggcgcgtcccggcaaaaccccatcgatacccaaaccctagccagcccctctcccacgcgccatgtccgtcgcgtctgcggcggcggcggcctccctcatcgcctctacctcgctctccgtcccagaccgcatccggcttcatccccggcccgcaattcctccactaacgtggt

SEQ ID NO: 354444 - DNA, 258 bp, Zea mays
ggactggtggtccatcgatcgtcccagcccaatcatgcatgccgccatcttgtctcgctctaggatggatcgatgccgggcaacaagcgcatgcagcggcgatcgatcgaggcagcacgtgcagccactgcccggcgcgccgcttgtcgcccggatcttgcctccccctcccaccaacaatcacctctcgtcgacctgccgcgcgccgctgtgcctgtgctcattcatactcatagctcccatcatccccttcgccct

SEQ ID NO: 354445 - DNA, 261 bp, Zea mays
ctcttgacatgccggttgggattggggtcactttccccatatccagctctgtcataagcaaggaggtaaattcccagtccttccacgagctcctgattgtgagagttccaagaaaccagtaaggcaaaacatgaaagtgggtgtagccatgttgtgatttttttttttttaccttagaaacaggcgaggggaagtccttggtgctatcaaatgcgtgcactgtgatgatcttgtacctggccttgtctctctgtactccat

SEQ ID NO: 354446 - DNA, 251 bp, Zea mays
ggcctccagtctatgcctccacctccatgctccactccacgaatccgacaactgtgacctccctgcggtcagcggtctacgccctctatggattagcaccacatcgttcgccccttgacagctcgtgatcgttgatggctactgttctataagtgcaggtacaaggaactgttgtatgaattatacaggagtagtaaatgttccataaaatatattgatgctatcaagtgttctataaatcataatagttg

SEQ ID NO: 354447 - DNA, 286 bp, Zea mays
cgggttttgctgcttgatggcggaacaaaatgtagtacagattaggtgatatgcagtcaagtgtttacctgtctgggtgatggcattcgtcaggaaatttctgccctgggctgttaccttgcatcgggggcagttactggcatgccctcggctgctcacaagtttcaggccatggtccagccccccgctgggctggtccttgcggtttatggcgatctgttgtcgtgtgtccgaggtcgcgatcgctgccagggtcgtggtggtgtctgcctgtctggtcatggct

SEQ ID NO: 354448 - DNA, 286 bp, Zea mays
  unsure (1)..(286): unsure at all n locations
gtggtggtggtgaccaaccaggtggtggacgtggtggagggggacgccgggaacaccgtggcgtggtcgtcggggcgccgtctgagcccggcgctcgggatcgcctgggccaactgcgtcaacacgcgcctgttcctgacgcgggaggtggaagggaatggcaccagcgggagcgcaaggaggtggatgaaagtggcgtttgcgccgcacctgccagagcaatcgtgcgagtttgtgatacggagggacggcgtctttggcgtcgagccggagangtaggcgctcc

SEQ ID NO: 354449 - DNA, 274 bp, Zea mays
atcagtaactaataattactttagattagaaagcaagaatcgaggcgagaagatggtgcagttcggcaagtggctgaggaggcagatcgagcggagctcccggagtggcaggaccagttcctgcggtacaaggagctgaagcggtgcgtcaaggcgcgctccggcggctgcccgccgttgcccgcggaggaggccgagttcgtggccgagatcgacgcggagaccgagaagatcaacgccttcttcctcgaccaggaggaggagttcatcatcc

SEQ ID NO: 354450 - DNA, 279 bp, Zea mays
tttttgagtaaaaattggtgaaccaggaagaattgatgcgttttcttttcttgatgagtcattaaactgtctgaacctgaaagaagagtccaatccagagttctcaatacttgtctcgtgagtttgtccgctaacatattcaccttcttgatccttaacatatttggcatgtggcttacaagcacaattgcatatgtcctttacatttggacagtactcatacagacatacacaatgtatctgcacggcaaatggtcaggtacgagggcaagctaagct

SEQ ID NO: 354451 - DNA, 272 bp, Zea mays
gtgggacgcctctcagtcaccgcgcgccgagcagacaggccccttggctgcgacgggtggtggtgacgacggcgctgctcccagcgtcaccatcgccgccctgcgggcgacccggtacggctgccggccgaacttcgaaggggagttcgcggcggttcgcggagctcgcgaggagacgcggcggacgtgggcgtgctgatgtgcggaccgcaggagctgcagacgagcgtgacaagaaagtacagggcgcggaacctccaccgcggcagcgt

SEQ ID NO: 354452 - DNA, 264 bp, Zea mays
ggctcatagcatctagctgaccaaagttcattcctttccttcaattgtttttcccctttgtttgcttaattcgattcatatgagatgttttttactagtacatatatataggacgttctataatatttgttcatcaccaagaagcagcatggatgcccaaagggagctctgtattggatgaggaaggaacacccagtattttacttgtacgaatttataaatagttgtacacacgaattactacataccaagagttttatattt

SEQ ID NO: 354453 - DNA, 281 bp, Zea mays
cagcgacacgatcgcgagcgcacgcacgtaagcacgttgtcggaagctcaagttagaagaagcaccagtgcctgatcgatggcggcccaggctctcctctccggccggcagctgctgggccgccccgtgcagtcggccgtctctaggtcgtcggcgaggaaggcgcccttcgtcgtcagggccagctccagccctccagccaagcaaggtgccgacagcagctgtggttcgcgtccaagcagtccctctcctacctcgatggcacgctgcccggcgactat

SEQ ID NO: 354454 - DNA, 276 bp, Zea mays
ccaaggcagctcctccaacatcgaacgacggcaaggtggacatcaagagcgaactcaaggcgatggggaaggcctcggttgcgccactcggtgcggccaaggcggccgtggtatcatccccgggccacctgacttgcaacccgaggaatgggaaattcgcgggtgaccggagcgcagagacgagccggggcgatgctccggtgaaggtgaagacggccggtccgtcgccgccgcgaggcgtcaagtcgggcaacgcggggaaaccgaaacctacag

SEQ ID NO: 354455 - DNA, 264 bp, Zea mays
gttctagatcgccgacggccgccctttttttttttttttttttttttgtttttttttttttttttgtttttccgccaccgaagacgaaagatttattccatgccattatgccaagtagatggtcacagttgctaaagggtaattagccttctttttaccgtggccttacaagtataggtaggagcactatatcacaacaccctacatctacgttactacgtatggtccggatctgactcagggacgatccctccgtaccgctcc

SEQ ID NO: 354456 - DNA, 279 bp, Zea mays
gttattgcttccctagacccccactcacgtgggagctgccagcgagtaacacgctaagtcttaccgcagcattttgcagagaggctgcggtaagacttaccctgttattgcttccctagacccccactcacgtgggagctgccagcagttctgtccttcatttatcaaataaataccgtattgtgcaggatgccaggatgtacatagttgtttagtttagttcttattacttccttattcgctttccatgaaaatttctgtttcctttttttattgcac

SEQ ID NO: 354457 - DNA, 202 bp, Zea mays
ttttttaacaaattgagcaacgacttacagctccaggtttatgataaccgtagctaacatatattttcaatttgctcctactggcagtggcggtgttgtatgtttcttttcttataaggtggtccaaagcaaaatctgagtcgaaatagtcatgattcaacaactatagaaacaacttcatatatatttgttggatgttgcc

SEQ ID NO: 354458 - DNA, 135 bp, Zea mays
catatacatatctaccttgcatatatgtgtacacaagtgaatgcatgaattcatcactggtgtacacatatacatatctaccttgcatatattgaggtgaccgaggatacaagatgcaccatggttagttttgtt

SEQ ID NO: 354459 - DNA, 249 bp, Zea mays
gcaggccatgctgttcccacagcctgctcaagcaggagacgcgttccaccagattctgaacggtctcgcgcgcaactcccgcacggtagcaatgtgttcctgaagcccggtgagagggccctgaactggacagccggaccaccaggcgacctcaagccttggtagcgtcttgtggatggatgacctcttctctggaaaggaagtatggacaacatgattaatatacctgtgcctttgaactgccatggg

SEQ ID NO: 354460 - DNA, 251 bp, Zea mays
ttttaatagaaatgagacctctaacataacatataaatcgacaatacgcggtaacaaacaaatttatcagacacgacttgacttgtttataaagacaaccaaacacgacttgacttgtttaaataggctaggctaaacccgttccaggagttgcaattgtcctgtccgtttccgatcctgttttgagacactcgtattcctttcctttttcctgctatatacactgggaaaaggccaagaaggcaagcaag

SEQ ID NO: 354461 - DNA, 261 bp, Zea mays
ctttcttatggtattgctggagctgtggtctttcgggctgtggtgatcatcttaggaacagctagcatccaggttgattgttctcatgctactgttggttatgcttttcatttatcatgttatattgactgttacatttctctaattttctgtagaaatttgaggcggtgaacttgctgttggctgtgatcctgttattcacttcttacaagctatttgctgaagaagaacaagaatctgatctatccgataacttcattg

SEQ ID NO: 354462 - DNA, 335 bp, Zea mays
gcatgatgaatttaggtgcactaagagagtatgacgccatgagggtacgaagtcggaattcggtcgagacaaagctgggttcacaaagaaggcagaaaagcgcaggcgtttcttggacggtgagcgcggctactccggcggacatggcgaccaacaggtgcaccaccgagacccgcccgcgtcctctcttgttcgccaccggaaacacgggacaccgctcatctgctccgctcttgccttctgaactctgaaagcggcagtgccctggcgaactaggcgccgctggaagccatcctgttcgacatcgacggcacgctctgcgactccgaccccat

SEQ ID NO: 354463 - DNA, 262 bp, Zea mays
cagctagccgccgccgccgctagcttagccaccagtagtccgatctgatctacaggcaaggggcaactagctagctagccgcgcgccggcgccatgatgaacctgaacctgaagcagcctctggtgctgcccgcgcaccacagcaatgtcgtcggctcgcgcctgtcgtcgtcgtcgccctcggcagccgccgccagcaggaggaccggcggcggcgtgtcctcccggtccggctcccggcggcacgtgcggctgccgagga

SEQ ID NO: 354464 - DNA, 262 bp, Zea mays
  unsure (1)..(262): unsure at all n locations
agcagctccgctggtcgatcagctctcggctgaccactgatcgccagtgggtgcctgccgaccaggtctcgccgccgccgcggtagaccccaagcacncgaagaaaaaactggccaagatcgagaggtacagcacgaaaaagagaggcaagagagataggagaccggacggcggcgggccggggcccaagaccgaggggctcgtgcgcaggaagctgactgaggctcctgtccctcgtccccttcggctgcagtgatggacc

SEQ ID NO: 354465 - DNA, 226 bp, Zea mays
cagtaccacaccacgccgcgctacatgaggacggtacagcggcagagaggtgcgacgtacgacgacgacgacgcaggcgccacacatgggagcccagctctcgcgcgccgtgccccggttccacggcctccggggcaacgccgcgcccaggtccgcggtggcggcgctgcgcgccggtgaggtggacaggagggggtcgtcgtcgcagggcagccgctgcgactac

SEQ ID NO: 354466 - DNA, 282 bp, Zea mays
cttggaggtctggactctggagacggcgccagacgcaagtggccaggccagtcgacccacaatcccactccccatttgattagaagctcctgtgcagctggatcaccctgcataatctattttgttcttggcctagccgccacctagcgctcgcacgctatggcgtggccgtggtcaccggcgccgcggcaaaccgcgcgcttcgtcgtcgtcgtcgtcgtcgccgtcgttcttctcttcgatgctgcccgtggcccgtgcggcggcgactagtgagtcgtc

SEQ ID NO: 354467 - DNA, 275 bp, Zea mays
gtgcagtgaagacgatgataagtagctttgaaggcaccagcaccccacagggtatcgtttcagaaaccgactcaggcagccgcagcacgcaggcaggcaaaacagccatcatccctgttgatgatcaccacaaagcttcaaatcacaggtctcagcatatactagtagaaacgatcgcacctgcacaactacaaactattaggacgccaaaagcagccgaaagcagaagccgacgcagagcaagcaagcagcacaacgagctgcatccaagaact

SEQ ID NO: 354468 - DNA, 270 bp, Zea mays
agagcagcgagccatcgacacgatcgcgagcgcaacacgtacgttgtcggaagctcaagttagaagaagcaccagtgcctgatcgatggcggcccaggctctcctctccggccggcagctgctgggccgccccgtgcagtcggccgtctctaggtcgtcggcgaggaaggcgcccttcgtcgtcagggccagctccagccctccagccaagcaaggtgccgacagcagctgtggttcgcgtccaagcagtccctctcctacctcgatggc

SEQ ID NO: 354469 - DNA, 267 bp, Zea mays
caacgagctgtgcacagcggtggcggcgacacaaagaaggtcacggcaacttctctccgccgccgcacgctgcgtcctttccagttccagactacgcagcagtaccggaagtcaaagagcatggacaaggacaaagcagcaagacaagttgaattggtccaccaccaccaccacctccatcattgtcattgccgccggagcagctcaaagtgaagagcacggacgacaaaggctgcaagaaagaagccgccaacgtttccccgacac

SEQ ID NO: 354470 - DNA, 133 bp, Zea mays
attttttgaatttggaaccaaaatccataaaaaacctgaccgaaattcgcatcttggtcaacagcgaacagcgaaaattggaaatttcaccaaaattcggtgatttccgagaaacgaatccgtggttgggcat

SEQ ID NO: 354471 - DNA, 242 bp, Zea mays
ctagttctagatcgcgagccgccgccctttttttttttttttttttgctgttactttatttcttatttagcataaaccaacaatatgcgcctctaaataaggcttcaattgtttatttgtgtaagagaatgcaggcataaatacaaccaatcacagagaggggccctggggatggtaacaataacgttagatacttgacgggcaccttaaacattcaaggatttcggaaactcctctcgtag

SEQ ID NO: 354472 - DNA, 243 bp, Zea mays
gccatcgacacgatcgcgagcgcaacacgtacgttgtcggaagctcaagttagaagaagcaccagtgcctgatcgatggcggcccaggctctcctctccggccggcagctgctgggccgccccgtgcagtcggccgtctctaggtcgtcggcgaggaaggcgcccttcgtcgtcagggccagctccagccctccagccaagcaaggtgccgacagcagcgtgtggttcgcgtccaagcagtcc

SEQ ID NO: 354473 - DNA, 242 bp, Zea mays
gccatcgacacgatcgcgagcgcaacacgtacgttgtcggaagctcaagttagaagaagcaccagtgcctgatcgatggcggcccaggctctcctctccggccggcagctgctgggccgccccgtgcagtcggccgtctctaggtcgtcggcgaggaaggcgcccttcgtcgtcagggccagctccagccctccagccaagcaaggtgccgacagcagctgtggttcgcgtccaagcagtcc

SEQ ID NO: 354474 - DNA, 234 bp, Zea mays
ctgcatgatggcaattgaccgcaacagaaggatgcacagaactgtacttggctccaccacttatggaaaactataaagattttttttaacgcctcaatccagagcctacagacttttcataactgagttgacatgtctgcactagacagcacccctacacgatgaagtggtggcggcactgcattctgttcctttattctctttggtgacttgttgccatagcattccaaagaa

SEQ ID NO: 354475 - DNA, 169 bp, Zea mays
cggccaccgctgccgatatctaggtgttcggatgcacgtgagcgcgcactggttccagtttgtaccatgatgtaaattacttaccgtaccagggttcaatcggcaaggaagaattgttgtgttcaaaaaaaaaaaaaaaaaaaaaaaaaaaaaaagggcggccgccgac

SEQ ID NO: 354476 - DNA, 319 bp, Zea mays
  unsure (1)..(319): unsure at all n locations
aggatacncagttgctgcaactggccttctccatcttcgatgcagatgctgatggacacatcagtttgcaggaacttgaaagcattctaaacatctgtgggtcaaaaggtgaatagagatgagctcttgaaatctgtggaggcagctcaccaagaggtgcagcagcagcagatcaaggttgatgccagcaaggacaacggtattgactggaatacatttcaccaggttatgagcaggcccatcgaagaggaagaagtcaaaactgtatggaagatcctggacagtgagaagaagggtcacatttctgtggtggacatct

SEQ ID NO: 354477 - DNA, 309 bp, Zea mays
cggctcgaggccaaagccagccagccagcaggcgcccaagcgcaagcccacgaagaagcagcacccgcagccggagcccgagcccgtaacgacgctcgaggggccggccggagccgtgccgccggtggcgccggagcggtcactctccacgacgacgtcgaccaccaccagcaccgcggactactcgcccgcctcgtcgctggagaacgcgggcgacagcttcacctcggaggaggactactagcagatcgacgacagcttctggtccgagacgctggccatgacgacgacggtggacagcttcgagtc

SEQ ID NO: 354478 - DNA, 103 bp, Zea mays
ccaacagctaaaatgtaaacacgacattatcatagttgagtacaggaataattatctcttaaaagagaagcgcccgcccccgacaagacagacccaaagcccg

SEQ ID NO: 354479 - DNA, 237 bp, Zea mays
gttggacttttgcaatctgttctttcaactggcccaggactcctgtattttttttcattgtttttgtgatatatctgtatctccctctcaacttgtttcttcattcacatatatcacaaattcaagatatatggtaattttgccaactatagcaaaccaaaaaaaaaaaaaaaaaaaaaaaaaaaaaaaaaaaaaaaaaaagaaaaaaaaagaaaaaaaaagaggaggaaaataaag

SEQ ID NO: 354480 - DNA, 327 bp, Zea mays
  unsure (1)..(327): unsure at all n locations
gaacgctcctccgagtcgcgancccgggcaagtttcnccacggacggggcgacgaaatcaccgctctgctccgacgtccagctctgctcgcgagcaggacatcaccgtgcgtccaccatctctggcttgctgtcctccgcgcgtcatctccatgcctggcttgagatatgggttcttgggaagagctagctaggcagtttttgttggaggaagaagacgatgaggagtttttctttattcttctctctgctatacttccattcctctctgaagagaaaaggtctatccatacctcctctctctctggtgccccaaaggttaaggaga

SEQ ID NO: 354481 - DNA, 154 bp, Zea mays
tcgtgtaccttgtgttggcctccggtccacaagaagctagagctagtatcgagatgccaggtgcaggctaggcggcgcgcggaatatcatgtggtcgtcggagatgggtcgaagaagccgccgaacgaacggcatggtggcagatccgcagacg

SEQ ID NO: 354482 - DNA, 300 bp, Zea mays
agatgcacgcagcaggcttccccacagctgcttccttgcaggcaggaaggagggatcgaatcgaatagagccgcgctcagcctgccggtcgttttcccttcaaccaccgcgcgatctgctgcaaatcctccatgctttccccagcggaaaaatgagagatacagatactagctagatatattatcctcctgctgctgctgctgcacaccacaacaacccacccgccggtgcaagttcgtagtgattccatttcatttgtgaccagcgcaattgataatgccggcgtcgtcgtcgccgtcg

SEQ ID NO: 354483 - DNA, 297 bp, Zea mays
aagatgctgttgaggtcgatgcagaggatgacggagtagaagaaagtcaagatgaagctgttgaggttgaggctgagggttcaagtgatggtgctgtccttgtgaatggaaacagtagcgaggaacagtggggtacgaaaaatgaagaaccatcagcataaaagctgtagttgagcaagttgctgactgagcaatagtggattaacggatcagcaacttcgcttcagcggtgtagtttgtaaaggtgaaatgctattccaagtgaacaatgactcatacaccacctttgcagtcgta

SEQ ID NO: 354484 - DNA, 136 bp, Zea mays
tctcatcgcctaatgtcttggatccttgccccgcctcctgcaagttgcaggcaaccgagaagctaccactactagctgctcaggctctgctcagctcaaaaggcgttcaggtttagtgcacgagatgagcagcgcg

SEQ ID NO: 354485 - DNA, 138 bp, Zea mays
  unsure (1)..(138): unsure at all n locations
tcgaaataaacaagcagatcagaatacccccacacgcttttagttagccgtccgtccgnccgtctctgaggagcacacagcagacgattttaaactgcagctacagtctacagatgtcaggtcatgtgacacatcctg

SEQ ID NO: 354486 - DNA, 164 bp, Zea mays
  unsure (1)..(164): unsure at all n locations
tttctncttgggnatccggctggtcaaacgttactntgacaagctgtttacggcgtcttgccttgctgatctgacccagtatnacatcgagcagcttggactgcgctggcgaacagaccggcggtgtctctggcacgggcattctctgtggtatcggcttgtgt

SEQ ID NO: 354487 - DNA, 299 bp, Zea mays
aagaaattagagaggattttgacttaaaggagatttaatcctcctcaatctttatagattagtacaaaacgaacatgacctaacaggaaaagaaggagaagcattttattatccacgcctctttgccttttgttttctctttttgaccttggataagattccatccagaaacgccctccacgcggaccaatcacggtactttcccgtttgatacttcgctgctgctgctgctgctagttttttagcgtatccatgtacagaatcccttggtttgaaaagaattggctttggataagggc

SEQ ID NO: 354488 - DNA, 183 bp, Zea mays
tttagaaagagttgcacttattggagataaaaattgggaatcagtgttttgttctatctcaaaaccattttttccatcttgcgaaattgaattcttcaaagaaaatattgacgaagaaaagaaggtaccttcagcacctctccagtggattttcgcaaacactcacctctcaccttacaacac

SEQ ID NO: 354489 - DNA, 329 bp, Zea mays
ggcttatctgggcaagctgctggacggcgagaagcacgaggtcgcgttcacggtgaccaacgccatggacacgtggttcgtcgacgccaacctccacctctggctggaccccaggggcgcagcacggcggcgggcattgtgagctacgacgcgccgccgctggacacggccaccgcgactctgcccgatggccccgacaacgggctctactacacgacagcgttccgacacgtctccgcctccgggtgggtgcacacgccgtcgtacggcaaggtcacggcgacgtggacgcaaaagttcggctacgagaacactatcaacttccgcga

SEQ ID NO: 354490 - DNA, 263 bp, Zea mays
ctgcgcaacagtgagggagttacaactaataaatatgcgcaaagaaatggttcaatatcttcagactggccagggatcaatcgcgaggattcagtggagcacattattcggagcaaaatatattggctgcctatgagatcgtgagctttctgtgaattgtctggcaaagtcctattgttgagcaaagatgcctagatgggagcatgtataacttgacagagtgtcactgctagcatgactcgattttcacagatgaagattgt

SEQ ID NO: 354491 - DNA, 253 bp, Zea mays
tccaagtctaagcagtcttggcaagacttatctgacagcagcctcagtggacaacacacaccaacgcaatctgatggatagcaagactgtccttgtagctcctactcctttgatcactgtataacagctacccactatttttccagggttgtgcttcttatagtgctgatccatattatggcggggtgtgggcaggatacgcttcaaatggaattgtccatgccagattagtggtgcagcaaacactagggta

SEQ ID NO: 354492 - DNA, 138 bp, Zea mays
cacacatcgtagacaacgcaattagctaggaatagcatccatggagtcaggtgcagctgcttcctcggacctcttgcacctcgacgcggacatggaggccacaagtgcgaggtctgacacattcaccatcaccaacaa

SEQ ID NO: 354493 - DNA, 315 bp, Zea mays
ggcacatgagctttttgatttcagcataaggagcacacgattgtacgctcccaacaaaacaagagatccaagcatcagtattcgattatttgggaatcgccggattgcgatatggttgtttaatcttatcagaggggcgctttttcgttacggttttggatcggtttgggcatgacggcaatatcaacatcgacacttatcatcacggctcgaagcttgcggtaatttttatcaacctttaattcatggctttaatgaggcgcctgatggaccaactccatgggcctaatacattcttcctactttcgttatctt

SEQ ID NO: 354494 - DNA, 311 bp, Zea mays
ggtctggagaatttgtttaagctgtcgagtctcaagttcataatcagtagacgaccattattatgtgtgagtaatctgtacgcgggtaccaaccaaactgtggtgcaaacgcgttcgactatactgtgcaaatgtctcccaaagaagatattgagttaagttcaatttgtacggatttaggacagagagatccagcaattacaggtcgaagctgcaacagtttagatcaatatgatctagttagttgtgtaatcggactggacactactcaggatacaaatcgcattaattatcgcgttgcttgtactttt

SEQ ID NO: 354495 - DNA, 237 bp, Zea mays
gttctagatcgcgagcggccgccctttttttttttttttttttaagcatctcaaacggccatcatgcgaactttttatctcgttttgaatggtcctccgtgaaccccagtcaaccacagacaatcgacagacaacgcaccacgctcaccaaccgaaaaccccaagataaagaatacagtactccgcacaacagcccatggatctctcaaaatcaaaaggcgatgccttccaggtcga

SEQ ID NO: 354496 - DNA, 284 bp, Zea mays
gcgacgccacctcgcgcgcgacgcctggggctctgcgacgccgtgctcgagatgtggcgggcgatgcggcacaccacgaggcgcagggcctgcgcgggtaagctgcgcgggctgagcagccgcacgtccatggaccccacgagcgagatccaccaccgggccacgcgggcgctcgaggccgccatgaacgcctggtccgcggccatagcgcacatggcgaacaccagcgcgactacgtccacgccgtccacggctggctcaagctgacgctgacgccggtcaac

SEQ ID NO: 354497 - DNA, 268 bp, Zea mays
acgcccccacaccaagccgtatcgtcttctccctcttgtccggttcgggtggtccgcggtcggggtgagtgagtgagcagctttgcttctgcatctccccgttcccttccctccccagcctcccggcccggcggcggtacgtgaccctgacgccgcagcgctactagctcgccgaacgaggtggcgcgcgcgactgagagcacacagcacggacggctcagagcgaccgcaaaagatgcggacacactgtgaacgcgcgcgcgcacgc

SEQ ID NO: 354498 - DNA, 305 bp, Zea mays
  unsure (1)..(305): unsure at all n locations
accaaactgggtgggtactcaaccacgacagatctggagaaatcgtacagggtttccattcattccctcgtatagcttttactattcggcattcaggttcaagtagctttcggatagcgacgacaatactagttctaggcttctagcaagcagaaattcttttttccctgaacaaaagataacaaatcatatgttacagagaaaagtagccanaatcattggaagcaacagcaaggcacgacagggattactgttgagctatcggcgtgaacagcgtcaggctaggttcagtccagtcggtctct

SEQ ID NO: 354499 - DNA, 301 bp, Zea mays
cgggctctccatggaacggctcaaatcggcggtgcgcccgacctccggcgggccgtcggcgagggcacggccgccgatctagctaacaccacctctcgcctgttcgccttcttcgacagccttcctctcttccaccaggttatgcaagagctgaccgaccccgagcttgcgttgtgtcgcaaagacaaggtgaaggctgtagagttgaagggccacggcaacgcgtgcttctctaggagggagttcgggaaagctctcaggttctattcgcaggcattgcgccatgtcccaattaattcgg

SEQ ID NO: 354500 - DNA, 120 bp, Zea mays
agacttcatcaaagaaccagtcgttattctgtcaagatgcatttcacaaactccatcgctcaagccattctctgcctctcagttacaattctccctgtcgcacagtcttcaatcgctatc

SEQ ID NO: 354501 - DNA, 325 bp, Zea mays
tggacctgttacctgttgagatattaattgcagtcttggcctccagatttgagtacacgaggatgaatccagcaaaaatgctggtgatggatttgtacttttacagggactgattgtttgcatgggaagttgcattagatgaggttcgagtggaagatgtgagaattggaagagactgatgtacgggatgttgctgttggaactgcagcccaggctggtcctcagtgacacaatgcgtcattttgtcaaacaggccgtgcacacgaggtatgctacgcccgtgcgctgctttagagatgcttttggtagtgtggagagtccactg

SEQ ID NO: 354502 - DNA, 326 bp, Zea mays
tcccaaacccgcggcggctgcggcggcgactgttgggtttccttggtcatgggctgcttcctctcctgcttccggggcggctccaacccgtcgggcgatctccgcgacccgctcgtgagggagagccgcatcggggacgcctttgtcaacgacgagaagaagcttgatgaagcgactgcaaagctggatgtcgaggcggctactgaccacggagtcgacgacgagcttcggagagaggccaattatctcaaatcatgtggcacaatatcacagaccccaccggaatttctagattcaatcccaatcaactcagaagatgctaacga

SEQ ID NO: 354503 - DNA, 162 bp, Zea mays
cgttctcgcagtcgtcgacgttcttcacgaaacaggcggcgaccctggaccggcgcgtcgggcggcacttgcaggtaccaccggccgcgctgcagagcttcatcagcatcaccatcgtggtcttcatccccctctacgaccgcgtcctcgtgccggtggcgc

SEQ ID NO: 354504 - DNA, 318 bp, Zea mays
ctcacgtcttcgagctgtgacgactacggatcgagtccacgatcggcgggatctacacggacatggaggccatttgttccgagatcgagtagatcgggctccaggtgtcgtcttgcctgcatcccagcgatggcggcacgcctggcatcctcggtacacccggatcggtgatggggcgctctcctgttatcttcaacaacactgatggctcacgttttgggcctagccctgagatcttcaactgggacagtggtaatgggtataatctacccagtttccgctgcccggtcagggaactcttgcatcaacatcttgttg

SEQ ID NO: 354505 - DNA, 140 bp, Zea mays
  unsure (1)..(140): unsure at all n locations
ctcgagaactcgttcgctcgctacgtttccctccgcttgccgagtgctgcgcgggagcacgcgcccatggcgacgccgccgccggcggaacggcgtccgcgcttcncaagtctggggcggtatccaagggctacaacttt

SEQ ID NO: 354506 - DNA, 221 bp, Zea mays
cgacagacagagcgcggcccgctgctccgctcagctgcctcgtcaccgacgcgccacgcccgaacaggatcaccttcgtctgcgccacgctcgcctccatgaccaccatcctgatgggttacgatcgcgcgctgatgagcgacacgacatgtatcaccagcagacctcagcctctccgacatgcaagtcgacgtgcacacggagtccatggacctgttcat

SEQ ID NO: 354507 - DNA, 318 bp, Zea mays
gagcttcctagcctctcttctcaagcaaattgatcggttcttgcaatttgacaactttatgcctggttataatgcagctgacagtcaagacccttgtacgaatagcaaagaaggatcacatttttgaattggttgcccctttccgcaacatggacaaaccatggaaagttcgaattgaagctagcaggattcttattgatcttgagttacaccataaaggactcgatgcagctcttttgttgttcttgaaatatgtggacgaagaaaagtctttgcgaggttggattgctagagtactttttgatggttttgtatgct

SEQ ID NO: 354508 - DNA, 291 bp, Zea mays
gccgcagagcgcatggctgacatcaaggttgccgcggggattccgaagacctcgacggagacgtggtcaccgtacccaaggagcgaaacagcggtgagatgcaggtgtggaaggacctcatcttgtccccgaccccggcgatccgacgcatactgctatcggccgtcggctgcacttcttccagcaggcttctggctgcgattccgtcgtcctgtacagccctagcgtgttcaggggcgcgggaatcaccggcgacaacaagctcctgggcgtcaactgcgccgtgggcgt

SEQ ID NO: 354509 - DNA, 289 bp, Zea mays
tgccagcatcatggcctccgagcatgcgcactgatctgccaaggccgccgccggcagcaggttcgcggtgacgtacggcctgctgaggcagtacatgaaggagcagggcggcagcggcgccaccaggtgcctcgcgccggccgtgggcgtgggcctcatgccggaagccgacgctgctgctgcggcggcggaggcgacggaggagaggaccaccgtgctggagctcttcccgcagcaggctggcacgctcaaagacgagcagcgaaggaagaggaaggagcgcgctgac

SEQ ID NO: 354510 - DNA, 222 bp, Zea mays
ctttgacaccacagcgcccgcctccgtttgcactgttgcctgccgccctccttcctgctcctgctcggctcgctacggctacgggcactggcatcgacagtgacatccccgctcgcgccgtcctcggtcctccctttcttctgcctctcgctcgcgcgtgcagttgagagcggctcggcagcgcagttgcgcggacacggcagcgcagttactctctctctc

SEQ ID NO: 354511 - DNA, 292 bp, Zea mays
caaaattggaggcttgagtggaagcttctaggaatttcatcacgtaagtcattagctgatgctgctgtactggctcttgagaagaatcttacagaacagaactatcttcttgccaaatgtaagttgttgaatctcccctgcataatagatgccctaaatgacctatttggttatgaaatcaatgaatatgtactaagtacaagtcagatgtggtttcagtacatgacatgcaccccactacggagggataaatacaaagaaatactgtcacggctgcaaataaaccgacctt

SEQ ID NO: 354512 - DNA, 294 bp, Zea mays
cgcacgatggccgccgtaatgtcgctgctccgctcgtcggcctcccttcttcgcgccgcccccgccctcgcgagatcctcggctaccacgcgtccgtctcttcggcgcgcattggctgctcctcctcgccttctccggtcgcccgtcgagtcgagcttctgcgtggagtcgcttctgcctctgcacaccgccaccgccggtgcacgcatgacgtccatgctcgccgctcctggccaaggcctcggctggctcacccaaggatctgatgaaactagatgaagagcagccggggaa

SEQ ID NO: 354513 - DNA, 304 bp, Zea mays
gcgaactccgccaatttgagcgaatgaattctatactcagcgcagacaacgatgaattccgatcaaagctctacaaatacgcagactacgaggacatcgagagagacctcgaggttatcgaatctatcgaattctctacaggcgatgatgacgataccggtactttgcaggaagaggccactagcactaacagctctgcgagatccgcagagtattcgttggagcagttactgatggctcgcaacgagagactcagcaacgagcttacagtacttcgggtatctcatcgagatcatcagagtca

SEQ ID NO: 354514 - DNA, 101 bp, Zea mays
  unsure (1)..(101): unsure at all n locations
gaagggccagcagacaacagcgcctctttcttctcangcatgtcggaggacgaagcgaacgctgctgctgcgccggcagagggaaagaactggcggcggaa

SEQ ID NO: 354515 - DNA, 287 bp, Zea mays
gtgccagatgccgccgccggacgcctacccctacttgcccaactccgcgccgccgacagccgccgcatcgctgggcggcgcacggcagcggccgtcgtggtgctcttgggcatgatcgtggcatgagaaaacacgggacatcgatcgacctagtgctagaaccggcacaggggaatggaaaaaaaggcgttgctttcttctgtagatagagagacctcggtttgggtttcaggaatggtttggaactttggatgtttttcttttcagtgtagatggataagccatga

SEQ ID NO: 354516 - DNA, 336 bp, Zea mays
caacaacacactccaatcgtcgctagccggccagtactgtccgtcacatacacacacactgacaccaccatccacaagaatctctccacgctacagccgctacatactgcagctgcaagctagcgaggcaagtgtgtaacaactaagatgaagggcaaggcgtcgaggttcctgaagcagatggtgtcgaccatcgtggcggtagtcaaggccaagtccacggcggtgcgcgtcaagaccagcgccctcaagacgcgcctcctcatcttcggcatcctccgcaacaagaagctgctcgtcaccgcaatcaaggacaagatccacgccatcatgggg

SEQ ID NO: 354517 - DNA, 261 bp, Zea mays
tggcaggcctaggggtgccgttgccgtgtggtgctgcggctacctcgtcgatcacgaactcgaccaactcacgtacatacactgatatacacagacaatacagtagctagctagatagtgacgtggcaactcgattatttaccgtgtacgtagtacagtaatttgttcattattagagcagtagagggccgtgtgggactgatttttggggcagacgccggccctaaaaaaaaaaaaaaaagaaaaaaaaaagagagaaag

SEQ ID NO: 354518 - DNA, 353 bp, Zea mays
cacgcacgcaacagctgaactgagttgcactacttgttgtgccaactacacacgagagctagacacccacgcgacgatagaatggagaccatgaaggcaacaagaacgctggtgcagcccgtctactccacccctcacccgctcgccggtgagaaggtccccctgaccgtcttcgaccgcgccgccttcgacatcttcgtgctcaccgtgctcgcctaccccacgccggcaccgtccaacgaggcgctcaaagatggagctccgcaggccgtggctctgtaccctcacctcgcgggccgactcgccgtcgacgaccggtgcgccggttccttcacgtagacgtacgaggcgtg

SEQ ID NO: 354519 - DNA, 275 bp, Zea mays
ccaaagactagcaactcgttacaaccatgttacaccttcccacatgtgtgttgataatgggaaggtgtaacatgcttgtaaccattgctagtcttgggtgcatggtgtggttagatgacaaccacttgcccttatcaacacacatgtgggaatcttatactataggtggtacatggcacttacctgaagccaatggctgtagaccccggagtttcatccttgttttgtttaaacctagatttgggatttataatttattgaatgacattcgattt

SEQ ID NO: 354520 - DNA, 329 bp, Zea mays
accaccacaagctagctagcagcctagcactagcagcggccgggcaagccacctctctccctcgatccctcgccgatcgatcaccgtctttgcactgatctctgcacgaagctagcattagtatggacggcgccgtagcgatagcggcggcggcggtcctgctgctctgcgccttcatctacgcggcgtggctggcaccggccgcagccaggcgccgcctccgcggggcgggcttcgacgggccacgtcgtccttcgccttcggcaactccccgagatcacggctcgctgcaggccaggcctaggcaacaacaaaagtctccgcgtcgc

SEQ ID NO: 354521 - DNA, 341 bp, Zea mays
ctgtcaaagaaagtgtgctttctgcgcttaaaggtgttatcaaacatgctggtaaaagtgtcagctctgcaataaggtcacgtggatgcgctcttcttgaagatctgctgcaggctgaagctgatgatgtccgcagttgtgctgcaaaagtgattggcacattgtctcagtacatggaggagacagagatttcagatttggtgcaaatcctattgaacatgagcacttcatcagactggtgtaccaggcatggtgctttgttatcgttctcatacatatcaatgcattctccatcaaaattgtgtcatttggcatcctttcgatctctggtcgatcttttg

SEQ ID NO: 354522 - DNA, 175 bp, Zea mays
cgtgcacgtctcgtcatcgccctactcgctcgcaccatcccggagtctccacggctcccaaacactagcgcctcacggacctcgtgagggaggcggcgatgttcttctccggtgacccatcggcgcggcggcgggtcgacctcggcgggcggagcagcaaggagcgggaccgcaa

SEQ ID NO: 354523 - DNA, 221 bp, Zea mays
ggcattcgcgctcgagttctagatagcgcccagacgcactttatataccttttcagatgcgacaaccgatacatcaccgttaaaacaacgcgatacacgctccagattgtaccatgggatctacaaaataccatctcatctcacatgcctcactgtcgatcaaccacaccagatccgctcatgttcaccatcacatcactctccctctaccagaacaaaaa

SEQ ID NO: 354524 - DNA, 337 bp, Zea mays
taaaaactttatatcattttttttatattttagaaaaacatcaaaacaacaactacaattaagaataacttatcaataataatgactatgaagagtaatttgttggttgcggaaagcagagtttcaaagagcaactcagcctcaaaaacgcgaggcccaggaaaaaacattaccaagaaaagaaaaaatacaagagagagaagagacagagtgggttccaaggcaatctatatcgaggaccctaacacgcctcaagaaatcgtacttcgccttgcgcgtcgtattcgtttttctgtaagaggcatcgcttcatcgcgaactattgatgtgacacttc

SEQ ID NO: 354525 - DNA, 193 bp, Zea mays
ttctagatcgcgagcagccgacctttttttcatctttttgatgcgcacaccgatccatccccgttacaacaacgcgatacagctcaagattgtacaatgggctctacaaaataacatctcatctcatatgcctcactctcgctcaccaacaccagatcagttcatcttcaccatcaatactcctcctctacca

SEQ ID NO: 354526 - DNA, 304 bp, Zea mays
aatcaaacctgtttctgaaggggaagaaagaaacagctcctttcggttggaacagatgaaatggcagggcttgctaagtgatacatcaaatgctgaatcaggatctgatgttgatgattttggtgcatcatttgttcataaagtttctgactatggttgcttgactccggttcatgaggaatagagggcacagatcgtatgcatacttaagctagagatcaaccaccggaatggccctaatctacatggatcgacagttactggaatgacacacaacaatgctgttcacatatctgcatagagc

SEQ ID NO: 354527 - DNA, 294 bp, Zea mays
gtttccaaggatcttgtcgaccgactctccacactccgtgcccatgtcgcctcgctggctgaagaaatctatcacgcggacgtatcagctgttcaagaactgcagcatgcgctagaggagtacttgccagttgttcttggtttaacaacgaaagagagccgtcttgaatcgtcagtacagttcagatggaagaccttagacgacgaccaggagtgttgtctggcgagcgcgtggtatgaggtgctctcggtggtccacatgatggccatgcttgcgttgtttgaggctaaccta

SEQ ID NO: 354528 - DNA, 271 bp, Zea mays
cgagcaccgtacttccccccatacggttattggagggctcctagattccgccgccctatgcgctacagaccttacttctgaagtacgtgcggggtaataatgttcaatgcaaaaccagccatggttagtggtcagtctcgggaataattaaacctactgctgtatcgtttgcgctgttcaatagttgacatcgttgcggttcaatgctcctttaccaaaaaaaaaaagaaaaaaaaaaacgaaagacataagagaacaaagagagaggcac

SEQ ID NO: 354529 - DNA, 288 bp, Zea mays
gccgatcgcgaggcggaactcgctgcacaggttcctcgagaagagaaaggacaggataaccgcaaaggcgccataccaagtcaacagttccgtcggcgctgaggcgtccaaggcggagaaaccctggctgggtctgggccaggaaggaagcgatggtcgccaagcaggagatgtgatcgatgagtagagactagatcgagagagattcgttcgtgcgcgcgtcgtcgtagcttcaggttaagggaaagaataatccaccgtcggttaattgctcggcttaattacact

SEQ ID NO: 354530 - DNA, 285 bp, Zea mays
gaccaaggaaagcaagattcatgaagtgcaaggtccaaaaggtgtttatccagaaggtatggaagtcattagtagtgcaattcctcatttttattatgaacaatccttactgaaattattatttcattactttgtaaatgtagattcccctatcattgattcattagagtttgtagatcaggaatatgtatttgtgtctggaccacacccagagggatcatcgtcttcaacaaatgcttctcagcagcttaacttaccggcaaaatatgataatttatctgtttc

SEQ ID NO: 354531 - DNA, 183 bp, Zea mays
cggctcgagctccgccgcccctcggacccccaaccagcagctgccgcggccatccgccggcgagatggcgctgtacctgctgttcgagtcggcgtccggctacggtctattccacgcgtacggcatcgatgagatcgggcagagcgtggaggccgttcgctcctccgtgctggacctcgatcg

SEQ ID NO: 354532 - DNA, 284 bp, Zea mays
  unsure (1)..(284): unsure at all n locations
gtanaacatctgttctgttatccatcatgaaacattgttttttttgtgcatgaaaatttcagtcattgccttttttggagcggggttctgaaatagttcgtagaatacacatttcatgggtataaagctttttctatgcttaaagctatctcttctattatagatatagatatcttctataaaggtaaaacgaattgagtcattgctaaatgttcttgcatcttagatctaagttagacatcagtagatatggttcctatctgggcactggctatagggctcac

SEQ ID NO: 354533 - DNA, 127 bp, Zea mays
agaataaaatctctcctggtaattccactaggacccaagtgccactgctaccacactcaaactcaggcgtaccacgcacgcatctctgatacgtggcaattccagcacaaacaaacacaaatgcggc

SEQ ID NO: 354534 - DNA, 139 bp, Zea mays
ctgaattcgttcctcacaatcatccggcgcggccaggaaaaatgtgcgatccatgtcctctgggctgatcctgaagttgttcctgcctgcgctaatctggtacgcatgcatgatgctgacttcaatttcatgcgctgat

SEQ ID NO: 354535 - DNA, 120 bp, Zea mays
ccaatggccacaaatcgtccccgaagtgcggaaacaagacccggaagttcacaactttctcgatttgcggataatgcttcagataatgtgaaagcgtcgataaggactattgatagaccg

SEQ ID NO: 354536 - DNA, 309 bp, Zea mays
cagcctacgcaatctaggtctccagtgtgcctccaataaaagctccatagccccatagtttctgcagatgctcaacaacttcaggatcaactatatgatgagaagcaagaaaaaatggacttcatgaagaacctgaaaccactgataatatcgataggacgatggaataaaatgacgacctccatcgtcagctactacgcttcaattgaagacaagtgtctccatcgtgagtctagttggctactataggatctgcagtcttgtggcagctatagtaggtgtatatagtagctctagaattcaagctat

SEQ ID NO: 354537 - DNA, 320 bp, Zea mays
cagatcttgtatttacggtctcacaaagttacagtttcagggttattgcagtgcatctgtagaatattacaacacagtggtgacttgctctcgcgtaaaggctcctgagagcgagcgatcagcaagccggcctgctgtcgctgctcgctcaggggaaagaagatcacacagatgcaaaatgagagctcaaaaagaagccgtcgtctagcagcgaaagcagcaatagccactttcaccattctccttacattaattcgtatttctctttgtctacgatcgttcacacaaacacttactctatatatacgcagttcttataa

SEQ ID NO: 354538 - DNA, 262 bp, Zea mays
gcagtcacacccatttcttgtgtcagtctccctctccctctctccgatcctctctactagcagagaggcaagttcaatcttctagctagcagcatcggagaaggcagagctcgactgacacaatggcgggaggccagctcaacgtgctgacacactcgaccaggccaagacacaatggtaccattcatggcgatcgcacgcggaggggtctcacgcgaacgttgtcgacgcccggacaagcttcgcgatcatatcgccactc

SEQ ID NO: 354539 - DNA, 321 bp, Zea mays
gtctgctgcctgctctagtggtgccggacctggggtggagcggagatccacaagggcttggattgctttcgttgtcatgctgtctttgaggaggacatgacactaagttgaaatttttatcacacgaggaagcaacaacacgaaaaaaaatcacatttcagtgttgcactctgaggagggttcattgttggtccaccaaactactgcagtgctggagggattttgtagaagagctcttcatgttcaccacttctagattgtcataggctcatagcattgtagctgatcagtcttcaagatcttcctatgagtacatagaaa

SEQ ID NO: 354540 - DNA, 139 bp, Zea mays
cttgcaactcgaccgaccaccagagcagcagtagactcacagctcactcaccgagtctcacactctcacacgtaccgatcgagcggaagcaaacaaagcacacgtacggggacgtcgagagaggatcggaatcggatgg

SEQ ID NO: 354541 - DNA, 295 bp, Zea mays
tacatggattaactgttatgattccttaaatctatatttcctgaacctgaaagggcacaagggctggctcatattctgatgaaggttctcagaagaagcctgcaggtatgtctcattgaatttttattttgacttatttatattaatgtggttagcacttgattaattatttgcctattctcctgaacttttgatgaaggagctggccgtgataatgattgggagtgtcaaattgccataacatcactttggctttcgcacagtctgtaattgagaaatgcacacactagactgc

SEQ ID NO: 354542 - DNA, 107 bp, Zea mays
ccttatcgttagtcacgattcaaccttcaatgctagtgtgcagcaattggtgcctcctgcagttccttggtaccatgagcgcctgatgcatcagacgtcactgggat

SEQ ID NO: 354543 - DNA, 145 bp, Zea mays
aatcaattcacatatagcattatgctggatgttttatcaacagggggacaactccacaggttgaatgagattctagatatttgtagtggatgtctgaataggccagtttattcttatttgatcaaggcactctgcaaatctggtc

SEQ ID NO: 354544 - DNA, 278 bp, Zea mays
agcagccgaagcatgtcctggcggtggactctcgcgcgccgcgtcgccacgctggccgcgatcggtggcggcggtgcccaggcgcagaggctcctgtccacctcgtcagccggcggtggcactggcctcctgggtcggcactacatacccctcgcctcccagattcggagcaaggtagttggttgcagaggagctgctcttgtgagctccagatggttgcatgaggcccaataccaggttcgccaggacggggcttccagggctcaggaacagcaaga

SEQ ID NO: 354545 - DNA, 294 bp, Zea mays
aaataaatgaattagaattttaaattacttacgagagttctttgccttttgttgctttattgccaattgcttcccaaagtttctgctccttttgtcatagtcatctgtttggttacttaattttttcaagcacatcatcatcggttaccatcatttcaaacatatcattcaaagcaatctggagcctagaagcatgctaaacatcattcgtggtgtcagaatgtatttggattaaaaacaatggagccccatgtagtttttgctccatttgatgcaatcacctcgtgtcaatgg

SEQ ID NO: 354546 - DNA, 337 bp, Zea mays
gtaccattggagatgactcgtcatgtttcaatgatatcgatttccttgtcacctaaggagcataacaagaattcacctgggtatcaagctcctctacattcggatcttaagccacaaagatatctgcaacctcagcaatatcaacagtaccagccaagacaacatcaagttcaaacagattcatatggacgcggccgaggcagaagcaggggccgaggaaggggctggggtactaggggtgggtacggcggaggctatggtggatatgaatatgataacaaccaagtaggttatggtgggtatgaacaccacggtggatatggacatcaaggtggat

SEQ ID NO: 354547 - DNA, 303 bp, Zea mays
tccagatctaatccaagggccgaaatcagcccataccccttcgccgcggccattttctaaaagagcccctggaacctttataaatatacccacggcccttccacctttaagattcataaaagcgggtcctgtaatctttcacttcagaccctattttctttactaattataaccgcagtccattttaattcataataaatgaataaaaccctggaaactgatttttggaataaaaataattcctagaactttgaaaatccataacttgctcattttaagtccgtttcaacccattccagttgc

SEQ ID NO: 354548 - DNA, 292 bp, Zea mays
gtatttcgccgctactttactcatttcggcacccgactaccttgcgccagaaacggcgatcaattacgattccttgattgctatttttgttcctatgctttatgccgtatttcgttgcagtatttgcgggctcaaaagttcaactggtggcaaaagtgctgacctatcttgcaacctacaggtgatacaaaaccacttcgaaagaaggcaagaccgatgaataaacgatcaacagggagcatttccgaggctcccgggcaggccgcagctcgaaccttcctcaggctattcc

SEQ ID NO: 354549 - DNA, 288 bp, Zea mays
aacaccccattagctaattgttagtgtggtcccaacagagcctaagactagctaaccatgtgcatggaaacgagcttgtgaaatgcccggaaacagagtttacttgcataataaacatagagctgacaatgcaacaccgtctcgtcgcgcccgatgcaatgcacctcggcggtcatcacgtggacatggctcctgtcctgcccccggccggcagatcgaccgcacgcgtacgtgtcagctcgtcctgctgcctccatggtcatcccctgcctttgcttagtcactgtt

SEQ ID NO: 354550 - DNA, 286 bp, Zea mays
gtaactggagcatgctgatgaacattggcagttggtcaaggggggggggtgaggtggcgtatcttctttgggaaggcatgggcatcccaatcccttcgccagaaggaaataaggagacgcgaagaggatgttgaggtcagtcggatccacggttaccatatacagtccggtgacatggcctctttcaactatagtgtgtgtgtgatatggtgagcatatacaagaacaacagtgtgtgtgtgtgtgtggcagaagtgaaacaaactgatacggttgtgttgcactg

SEQ ID NO: 354551 - DNA, 286 bp, Zea mays
ctgtcctcctaacatcgattttcctccggaatcgtaacctcagaaagccaaatctcattctccggcgctcaggcccacccaagcgtcgactctcccgatccaatcggtacctcctagttcctcgccggcggtagcggcgtcgggcgaacagcggtgacttggcgagggcgcttggccggcgacaatcatccactaggatggaaggtgaggcagagaccgtggttggttcttgttctaaaccatgtgggcctctggaggactactacattccagattacattctgaa

SEQ ID NO: 354552 - DNA, 287 bp, Zea mays
  unsure (1)..(287): unsure at all n locations
agtccgcagcgagggtgggatggccaactttggaagcagcgggttcgcttttgacattgaatcttatatccacagccagcaactgcagtattctcaagagatggcctgtacagtcgacaaggctaatttggacccaccaattgtgccacttttagttttaaagcatcttgtccacatgggttgtgaacagagcgtcaaaagcttctatcgtgctgccttcgggggttttgaaacggaccctcgtgtcnccttttccgaaggtgacctcgtgaagctgctggaaagat

SEQ ID NO: 354553 - DNA, 288 bp, Zea mays
cggagacggcagtggcaggtctggaatgttgccgatgtcaaacatgtcagctaatccttcacagcttacaattttctatggcggatcagtatgtgtgtatgactcagtgccaccggaaaaggctcaagcaatcatgcttatagctgcagctgcagcggcagcggcagctaccaaaagcagtgctgccgctactgttaagcctccaatggtgcctgcagccactgttgccccagcagctgtcgtttctcctgtgcttacacggtctccatcactgcagagcacttctgt

SEQ ID NO: 354554 - DNA, 156 bp, Zea mays
  unsure (1)..(156): unsure at all n locations
cggcattcagggggaaatgggtgagtcncaagctcttcctctcatcaacttcttcccgttccacgcagaccaaccagacattaagaattgagatcctgcaaccgcaacaatggcggccatggcgaacacctctcgtctccccaccccctgcagcct

SEQ ID NO: 354555 - DNA, 293 bp, Zea mays
  unsure (1)..(293): unsure at all n locations
ggagtgctcattgctcagtgatgattccatgtgagttgattagcaaggtttaggataacatctgagtgttccactttgaggtggcagcaaatatgtagaatattgtagtttaggcgcatcttaggtccanagtccanatggcatctgtatcttgtaacattaagtggtactgtacagtgcccgaggtgagtgtatctcaacttgttgagctgaatttcacgttcgatcatcattatgacagtttgaatttattcagatcatcattatgataggatgaaaagtattcaagtgtt

SEQ ID NO: 354556 - DNA, 285 bp, Zea mays
ctgctcgatgatcgaggccttggatgagctgaacccggctggccccgcggcagggaaacacaaggccatgtagatgcgagtcgcagggggtgcattcacttccctgctgaactgaaaacaaagtatgattgggtccatcctaggctcccccatagatatagctctttttcagaggtaagatggactaattcagcagcaggttctttttatagattcttcgttgttatgaagcacgcggtactattgtagtagatgaatgcgatctgtcgcgactgtcatctacat

SEQ ID NO: 354557 - DNA, 327 bp, Zea mays
  unsure (1)..(327): unsure at all n locations
cggctcgagcaatcgcatggacgtgtatggtgcgggctggaattcaggtatcgacatgaactacaacccctctgttttggctgtttttgaggttccagaaccggtcattgaagtagaggctctgtccggaaaatcaactagccttgaaacaccccttgagtttagtggatcatccaaggtcgaggttcctcagctcgaacgtcccgtcgttacatccactattttagacgcaagtgaagacattcaagcaacggaagaattggacgagacagatccatgcttcgctctatttcgaaatgnaggccctacctcgattgaccgtcctca

SEQ ID NO: 354558 - DNA, 324 bp, Zea mays
ggcgaacggaaagccgcctggcgactccagatctctccggcctgctcctcggctcctcgctcctcctgcgccgccgcggaggcagatacagcctctggatccagccccgctgcatctccgctgtggcggtgctttggctgcttcctgcaggttggagtttctgaatggccaatcccagggatgcggtggacgtcagctcctccatgtcggagctgagcgtagaagcagcgccttcatcgattgaggttcaagtccccaagcagggtgcgtatccctcacaagcgggcaaccgcggcgctgtttgatctttttcataggggagtt

SEQ ID NO: 354559 - DNA, 221 bp, Zea mays
gctagacggagacgggggaactggctgcaccttcacagccagtcaaacctcaaacggacacgcgacgggcgcggccgtgatcgtcatcgcgcaggcggcactttcggagccaccaagggaaggaaagagacgatccgctgatcgccggacgactctcatccgttctccaacaaagcgggctgattggcactcctgctcccaagttccccactcccttcccc

SEQ ID NO: 354560 - DNA, 338 bp, Zea mays
ttcaccgcatgatcgagtggggaactgttcatacaaaatttggtgcacagatgcttgtcaaggagagaggggcttaggacgaggagataatgaatatgagcatgcctagaggcttgtggtgcagttcactggtttacctaaggaacttagagagtactcagtaatctgggcggttggttctatgctaggcatctcaaaagaggtggatatgctgtttactcggaaatttgacagggcaaggctgaaggtggccgtgcttgactcgaatttgattccgcaagtagttgatgtggtaattggagactacttatatgaactgaaattcagggtggagtcag

SEQ ID NO: 354561 - DNA, 317 bp, Zea mays
cggctcgagcggatgaccaatcggtgccaacgctgcctagaagggcaaagcttttggagtattttcaaccggagttagttgaggtcaatggcgtgatgaaggctatttgcacatattgcggggcgatgttgaggagttcaagcacaaatagccttagaaaccacgttgcggatacatgtcctaaaatttcagttgaggaccgcaagcaattcattgctacaatggacaaaggaccagcggaagcatcatttgtgtttgactctcacaaggctcgtgagtgtatggttaagtggtgcatcagtgccgacgtcgcattc

SEQ ID NO: 354562 - DNA, 165 bp, Zea mays
aagttgtgtgtgtaatcggttgtgccacaacctgtacctaatccttcgcttcgcttaccacttaccaacatcccaccagtctttttgctgatgaactcggaaggaaagagtcacgaggatacgagtatggtagagattctagagtacgaataatactatgtttaa

SEQ ID NO: 354563 - DNA, 149 bp, Zea mays
acgacaccgcgtccaacgagaagctcagggccatgatctaggagtaccacctgaaccttcacggacgtctcgaccacgaggagttcgcggaagtcatccggagactgagcgccgactcgctctgctcaatcagcgggagctgctgatca

SEQ ID NO: 354564 - DNA, 179 bp, Zea mays
  unsure (1)..(179): unsure at all n locations
tctcctccanattggttcgtgataccccccacgactcccacaaacccaccggccaccgctttggcttcatccttaccactcgatcaacactaacgctggtgcccaatggatccgacacacctccggagcaatggccgcctcctgtccttgttccttctcctgcttgccgactcagattt

SEQ ID NO: 354565 - DNA, 283 bp, Zea mays
tgatagtgcattctttctttacttgttaataaaaagttttagtttgtagatttgtcctgaaaatgttaggagcttattacattatcttgtggtgagaaactgttttgctaaaggagaatttattatctttattgtgttatgtggaacttctacaggtggttccattcttgggttgcctcttcttgatccactagctggacttgttgtctctggcatgattctgaaagctggtattaagactggatatgagagtgttctggaattagttgatgctgctgtggat

SEQ ID NO: 354566 - DNA, 254 bp, Zea mays
caagcaacttcctcccaccaccaggtccctggctccctcccatgcccgcatcgagatcttagcgggacagcgagaggagaggcgacgcggacgcgggcgctccccgatccctcctcgctgcccgtcgccgccgccgccgaccgaccgaccgaccggggccagggggaggaggagggaaggggagtacggacacgatggaagccgactctgggaagctcttcgtcggcggcatctcgtgggagacggacgaggat

SEQ ID NO: 354567 - DNA, 303 bp, Zea mays
atccagagaaccatttaaggttgactgcagtaaacggaaaggacattttgattacgttgaaacggtacttccagcgctcttggagcatcaatacatctcattgacacctgccatgaatcaaagaagggatagaaaccccgcatatgcaaaagcttcatactgtcaaagctgttacagcgctctcaggttgaataagaatgtggaatccaaagctgttgagctcctcgaagccataccaaaacccttcttatcccttcacctgagattcggaccatatatggtcgcctacagtcggtgttcata

SEQ ID NO: 354568 - DNA, 293 bp, Zea mays
gcttcaccacggcgcccaccaccacgtcggtgcccatcaacacgtcgctcagcgcttgccagacattgcagtcgcagggcaagctctacgggatcttcatctgggcagccgaccattccaggagccaaggcttcaagtacgacacacaagcacaagcactgctcgccaacgcccctgctggctactagtagatggctaccataccttcaatgcgtttaagttggatttggatttcattttcaggtgaacaaataatattattatgtatggaataaggctgtcattggaatata

SEQ ID NO: 354569 - DNA, 270 bp, Zea mays
ggtccttcttcccggttcctggttgccgcctcggaacgcatggcgttgcacttgcagagcccgagttccttcccctacaggaggaggacacccggttcgtcgtggtaaccttctacaaattcgtgcccctcgacgacccccacgccgagttcgccagacacctcatcttcctccagtactatcgtgtttctgtcgggactcgggaagctcaagagagcgaccaccgcactggaggccgaagggaagggacgagatcgttgaattccagtg

SEQ ID NO: 354570 - DNA, 291 bp, Zea mays
  unsure (1)..(291): unsure at all n locations
catcagcagcagcaccttcaacagcaacagcaacagcaactaaaccagcaacaacttcagcagcaacagcagcagatgaccatgtcaggaaatcagaatgcacaactagcacagcagttcaaacaagtctcatcaatgagtgcatatggcatgcgaatgccacctgtcaaagtagaagctttccatgaattggtgagcggggactcgtcgctgaagcacgataacgaccctaacaaactcacttctccanagtagctgcggtgtgcaaaggatagcttttgcggtctgttg

SEQ ID NO: 354571 - DNA, 296 bp, Zea mays
cgccgcctccatgaggcacaacaccgctcgcagtgactcgatccctgccgccgcagcctgctgattgcccgcagccatcgccctgcccgatcctgtctccctgatccctccaccggtgcgatgccctctgccctcggcagacggcagctcatctcgagtgctcccttctcgcccaccacggccgtgctcgcgtacccggccggcgtcaccaccggaaaggtgtaggcgggagcacccgcgccgtgctgcaccgcccgtccgctccgggccccagttgtctggcggccgtagctctg

SEQ ID NO: 354572 - DNA, 282 bp, Zea mays
gtcaattggtgcaaccttgctggcttcattatccttacaatgttcctgatgtgctcaaaccccatgactatcacccctatgagataaagaaagcttagttgcagcttgccaagcaagttatagactgctacggcagcatttgcaccttcatctgttcgcatcgtgacggtaatgggcctcgcggaaatgagtgccccagtctctgatgaggatgcagcgtaagagatttgatccggaacagttagccttgaagagaaatcggaggtgtttagtcttcttaag

SEQ ID NO: 354573 - DNA, 103 bp, Zea mays
gtagaatatacctcgtgcttcacgtggcatcagatgacaccggacctactctaagcaaccgggtgtcggatgttaagtccgcgcgggattcagctattccctc

SEQ ID NO: 354574 - DNA, 137 bp, Zea mays
  unsure (1)..(137): unsure at all n locations
gtntttttttttttttttttttttttgactttaaaagctcaataaaacgctagagcgagcacggacacgcttgccaaataaatccaggggaacaataccagtccacatggactagcggcaacacaaagcaaattaat

SEQ ID NO: 354575 - DNA, 262 bp, Zea mays
  unsure (1)..(262): unsure at all n locations
gtcctgacgctgtcgatcttcccaggatttttgtctgaagacactggagcacacagcctgggaacatggtgaagtttcttgcttctatgcactccgcaaatcacttgcatcattcagacatccaacctgttgatgttcttttcgtgaacactagaaatgcttgctagtatttattcctggcaaatcgtctatgtgtttcaggtacgcgcttgtgctgatcgcgatgtacaacgtgtgggacctgatcgggangtacgtgccg

SEQ ID NO: 354576 - DNA, 144 bp, Zea mays
ctagaacatatcgagaactgaggtggtgaataaatagagtctagaaggctacctaacactgcattaggaaaaataatacagtatcgtagatactacagtgatcttaaagatcagagaaggccatatattaagaaatggtgtagt

SEQ ID NO: 354577 - DNA, 113 bp, Zea mays
tgtcacacgctctcgcgtctcctggagcctcgacggtgccggtacgtaggctctgtgatcctccccgtgcctgacttataacagctcaccgacgccacccatgcgcgtctaga

SEQ ID NO: 354578 - DNA, 296 bp, Zea mays
atgtttgttaaataccgaataaatacgggttcaatccggaaaaaacgggatcccgtaaaaacggacggaataagttctctctcgtttctgtctcgtttctatattttttcgtaaatacagaaatagtcgggtcaaatatagaaaacggtacggatcgggatgtgatttttttggtccgttttcaaccctggcgggcgcgtcgcgccgtcgcctattgctggacatccactgctcagtgacgcgggtggccgctcgcctcgcgcagcgcacaccgtccggagaaaaggttccaccgt

SEQ ID NO: 354579 - DNA, 258 bp, Zea mays
gcaggatcgaaaggaggcaaggtgttttaacgtggttattactacctacaagataacagaaacttgtatttgtaatttgagatcaagcttgtggatgggcgaaccctcagcggacttcagtgctgaagatgttagtagcatctcaggtccttgccacaacacttgtttaaagccttgttgcgagcatggttgtgcctgttgggaagatgaatatgttgaagcagtaatatcttgtgtgcaagatgatttggcggttga

SEQ ID NO: 354580 - DNA, 282 bp, Zea mays
gttgcaggtgcttatgtattggtattcaacagatgtggacatcatcaacaatgctgttattttgtgtatatattacttcataggtatctttatttttctttaggaacaattggatctataccattaaaagatccaaactttagatatataccatggaccccacatgtcattgactcatgtggacccacatgtaagtgagatagtaatggtatggatccagattggtgatcttttaatggtatggatccaaatttcccttttctttatgtctagcaacaacac

SEQ ID NO: 354581 - DNA, 271 bp, Zea mays
gagatggtagcacctaatgtagaagaccaagttggtagagtaactaggcagaagacaaaggcactatccttagttgagcaagatatacatggttcgactgcagatacagatgagcacacattgatttctgccaattttcctgcacagcatgatgacgagattcagatgtgtgatgaaggtcaaatagatgtcatgacagataaatggataaggggacaaagtatgggtagacaattggacaggataagtcgaggcctaaacactaggatcc

SEQ ID NO: 354582 - DNA, 321 bp, Zea mays
  unsure (1)..(321): unsure at all n locations
ctcgactcncgagcagcaaccaaccagcaaccgagccagccatgtcgcccacccctgcaccggccgcccgcgccggcgaggagctgccgtccactgaggtggtggtggtccggcacggcgagaccgcgtggaacgcctcccgcgtcgtccagggccaaatggacccggagctgaacgaggccggcaggcggcaagccgtcgtggtaacgtctgttcgctcggctcaacaccacccacccattgcacccaccatctacccttattttcttcttctcgctggctcaaaacaaaacctgacgacgaagctgctttaaatttgta

SEQ ID NO: 354583 - DNA, 163 bp, Zea mays
gccgagcgcagagtctcagctaccctgagacctgggtcctgagtacctgcggaagcttccatcgaccagccgccagacaccgtcaccacgactgcacgacacagcctcacgctcagatacgtctgacgaacccaaactcgcatcctgcaatcccctactcccc

SEQ ID NO: 354584 - DNA, 313 bp, Zea mays
aaagaagagttggcatatgaacattacatattggaaggacatggaattaagcataggtttaggtgctaggtatttatgaacgaaagaatctttatctccggaggcgagatctccgcgccgccggcgggaagctaaactaattaatggatgtaataagctagtaggggtggtgctagctgccgagcgcgtgcgtcgtgacgaataagccgacgatgcctgggcggtaggggaggtacgactgctgctgcggctgcctcgtcctgtcccctgcgagctcggcggcgccgggcttgccgtataagagcctttgcgc

SEQ ID NO: 354585 - DNA, 227 bp, Zea mays
  unsure (1)..(227): unsure at all n locations
cgatcgcccaccctatcgccccnttcttcntgncngttcccgngccgnncttcgtcgacaccacacctctcgccatcgctcctcccctcggcttggtgctcgtgtgggtcgttatgtgtggcggctaggccgcgggcaagaagaaggggtcggtagccttcacgatcgactgcaacaagcccgtggaggacaagatcatggagatcgcctcgctcgagaagttcctg

SEQ ID NO: 354586 - DNA, 201 bp, Zea mays
ggcgtccaccgcagtcaagctcatcgacatcgaactcaacttcacagatcggctgttcacgggcctctaccacggcaagcagtgacacgccggcagctatcacagtcgtacttgcgcgcgagtcggctgcacgcgtcgatcgcatcattgtcaccggacgctcctgaaagagccagagacgcactgagatcgccgagaccg

SEQ ID NO: 354587 - DNA, 232 bp, Zea mays
ctttccaccccacctcgcagatgcggctggcgacgacagcgccggcgcctccgcctccggatccgttgatctagttgctgctgcttgattggggttaggaagaggtggaagaggagggaataggagatgttgttctggaaggacggcggcggtactggtggcggcaacggacgggaccttagcggcgggccgccctgcggctaggttcgtgtactcgtcgttggcgactcag

SEQ ID NO: 354588 - DNA, 297 bp, Zea mays
gtggagcagctgacgggcctgggcgtggagaaggtggttgctgcgtacaaattcagggacccaaagacctccgaccaggagatgctcgagagcatctgtggcgtgctcatgcccttgaagctccaagctaagatcgccaaagccaagttcgaggcggcgtgctcgggcaagatctcgtgcgcggacatcgtcgctttcaccgccagcgacgcgtcctacttcctcagcaacgacggcatcaacttcaaccgtgcactcaacttattcaaggaaatgaaggcaaccggtgtgaagcca

SEQ ID NO: 354589 - DNA, 324 bp, Zea mays
gtatttgggaaataaaagcacggaaattctctctacagtgctcagacatgatactggttggttctgcaaggatactccctgctcactcacacagacacaataacaaaacaaagagaaggaaaagatgcatcattcccctacagccttattcatcgtccgttgagcacagcagcagcagagcagcccgtcgtgtcaagcatatttgcaggtgccaaggcctgcaagaggatccaatgatccatcatccggtgtcagctcccccaacacggttcacgggcaatgagacactcacagcaagcaaggaagcactcactggggtcagtg

SEQ ID NO: 354590 - DNA, 289 bp, Zea mays
gaactctaaccatgttttgcaaggatctccattgccatcatctctaaggaatgacataccacaagaaacaggctcttcatgctggcgaccaagcaggttcggttcggctatgggaaacattccgcttatcatcatcgatcaagaacttcagtttctcctttgaacttagatccgacacttaggtgtcgtttggttcatatatttgtaacgtaatgggtaatggataacgttaaatcaaaaaaaaaaaaaaaaaaaaaaaaaaaaaaaaagtaaaagaaaaagaaaaaga

SEQ ID NO: 354591 - DNA, 289 bp, Zea mays
atacactaccatttttcctttcgcagcgtcccgtctgtctgtctgtctgccttcctccgctcacctcctctgctacttctcgctttcttccatcttggtccagcctccactcttcctgctgagccatggcggctgccgaagaagggccagagccactcaggtatcagactctggccctgagggtgagcatccactgcgagggctgcaagaagaaggtgaagaaggtgctccacagcatagaaggggtgtacaagaaggacatagacacgcagcagcagaaggtggtggt

SEQ ID NO: 354592 - DNA, 220 bp, Zea mays
atgtggggtgtgtgtgtgcctgtgtgggggaactgctggggatggagagcgagatggcggacgcgcacgcagcggcgatcaccgccgccgcagccgaaaagctcgcggcggtggcagaggaaggggaaggggaagcagagggggaggagcacgcagaggcagcggtggggtcaaacatcaccatggagcgcgtcgacgccgcgaagaacttcatcgagaa

SEQ ID NO: 354593 - DNA, 285 bp, Zea mays
tgctccgtctgtcccgcggcctccgctctcctcgccgcccgcccgcctgtccctccctctctctccctccctcctcgccgccatgaacaacctcctcacggattcctttgagctccctcggcgggactcctcaagagacgcagatattgaaatgggaatgcatcaggctgatgcttcagacaacttgaaagatttcttgaagaaggtcgatgcaattgagagtataattgcaaagctgtcaaatctattgaataagctccagactgcaaatgaggaatccaaagc

SEQ ID NO: 354594 - DNA, 284 bp, Zea mays
  unsure (1)..(284): unsure at all n locations
tgctgcaaacgcgcaacactggaatagctagctgacagctccttctcgacgcacggacggatatacctgtccgcgtgcacggccatcagataggtaggtgcactgactccactgctgcaggagctgaatttcgcacatgtcagcaggtgcccaaacagatgggcgtgncctaacggttcatggctgacaaccagccgccggcaccccattctccttccccggcggtgcaggtgcaacgcgccgggccggcagccggcggccacagccaccaccaggcggcttct

SEQ ID NO: 354595 - DNA, 277 bp, Zea mays
cggacgagacgacgaacgagatccccatcccatccggttccgcttcggcgcgtccctctgttgccttgcccttgccgccaaccaacacccccgaccccgagagccgagcccctcttgcttggccctcaagctttcggtgcgtcacccgccgccaaccctcgacgagactccgattctcttttcccctaggccaaggtctggccttccggtctttcttcacgccgtttgtgcggtgcggtggcgatcgtccgcgatgggcgccgcgcggggagaggag

SEQ ID NO: 354596 - DNA, 280 bp, Zea mays
ctagctcctgccccgccgtcagcaagcatgacaccgatcaatgaacagcaacaagccaacaaggagcctcctcatcacacacagtctgcaacatgccatattgctccagctccaagcgaggtagcgggagtggtcggggacgcggagaacgccgaccaggagcaggagcaggaccagcagcagcaggcagcgaggcgggagcgggacttccttgcggggatcaggaagctgttcaagagcttcaagagcctctcccacatcttcgagatatacaaggacg

SEQ ID NO: 354597 - DNA, 279 bp, Zea mays
gattaaacaagcataaataccgacttgtcgaggaatacgcaccagccatgcagtcactgagagttaacagtgtgggagagcccaagcaaggtttaatgtgtcagcttggcacattcgttggctgtgcaactgtagatactggatcggatctagatcttatcagtcccacattcgcaaagtcaagggcttacaatattgagccaggagttgagaaagttgagtttgctgactgtagtgtgggctacactgttggcgttgtcaaaacttcatttgtcgtgg

SEQ ID NO: 354598 - DNA, 310 bp, Zea mays
  unsure (1)..(310): unsure at all n locations
cgaagatgaaatggaatgtgaactgcataaaccaatatcaagaagtattactgtgaacgccnggcctgcatctcngctgccttgccaagtcagccatcgcccgcggtcagccaaaggcccgggagctctacacccgctacgagcctgtggcagagcggcgtgccgccgaggcctgggtggccctgaaccgtctccctctggtgccctcggtcaccagggccgtcctccccactgccgcacagctctctgccaggtacaattcggcggtgcgtgatggtgccaagcgcgggaacgccgtggccacctatct

SEQ ID NO: 354599 - DNA, 269 bp, Zea mays
cgtcacgacgccgccgccggatttggccgcgctgccggaggacaggacgacgacgtacaggaccccactactactaagctgcacctgcacgccgtccagcgtgctgaggttattattagatcgcgaggcggagaacccgtcgtggacacaggatcgactgcgggggccaattaacaatgccgcccgtttttatagattgttgcgcgtgtgccatggaagttcatatagcagatagcccagcagaatgcaatggcacttgctagctagtg

SEQ ID NO: 354600 - DNA, 283 bp, Zea mays
attcaaaatgggtggttctaaccgagaaggcggcaaggcgaagcgcttaaaggccccgaagaagcagaacaaggacctcgacgaagacgacttggctttccttgagaagaagaaggctgacgagaaggctcgcaaggagttggctgccaaggccggcggcagaggccctctgaacactggcacccagggcatcaagaagagcggcaagaaatagacgacatacgacgaagcaatatgttattgagaaacgtttacatgagcttgctgcgaagtttgcgataat

SEQ ID NO: 354601 - DNA, 265 bp, Zea mays
tggataactgaggaagcgggcggtgcctgcctgggtgcgcgtcgtcgccagaccgtggcgcaatgccgcgcctccgcctccctctggtcctcctcctccccatagccctcaccatcatcctcctcatcctgttcccaacttcaccaagcccgcgatcgcccccgcctcagccactcccctgcggcgccgcgctctccgatgcggcggacggccggtgggtgccgaccccatcgcccgcaccgccgccactatattctccgtcctg

SEQ ID NO: 354602 - DNA, 231 bp, Zea mays
cttcgcgcccgacgacatcgacgcggcgtcgtcgtgggagtcggcgcctgcgcagggtcagaagcaaggacagggaagctcccagaacgggagctcgacggcgagcttcaccaccggcgacagcgagcgcgagggcaggggcctgttcgacctgctgtccgacgtcgacctcgcggcctgtgtcacgggcagcggcggctacatgccggacggcgtggacgccgtcgtcca

SEQ ID NO: 354603 - DNA, 293 bp, Zea mays
  unsure (1)..(293): unsure at all n locations
tatnacaggaggttcatatctgtcaatcccacgccgttgttgatttgagacacaccaaaaaaatgttcatctccctccctgtccctttaatcaattatcagtacctgtatgctattgcttgttttctcctgtcgtttgaatttaacgagaatgattggtggtggttgtgggttatgcatgagttggcgcccacttgattccagccggattcgcctctctctctctctggtcctgtaaattccatgaatccatgattcgtgagcaactggtgtacaaactacaagctgatgatg

SEQ ID NO: 354604 - DNA, 231 bp, Zea mays
taggagacggtctttaaaaagcaaactatttgctcaattattttaaaactatttgccttcaatttttccatatacacaattttatttaaagtaagttcgatttcatcataatcaattggatatatatcaactagacagcaacaaaattattaatcctgtgctttttttttcacttaaatgcgaaactttaaaaatcaactataatttaaaatagttttcttatttatcatt

SEQ ID NO: 354605 - DNA, 301 bp, Zea mays
cgcacggagcgtacgtacattgcagtagctagctatagctggccggccatcacctctcgctcgctgctaaacacgttccagcttgtttgctcagagaaacagcgcgcgcgcacacacacacacatcatcatcatcgattcatcgtacacggcgcactccggtccctggtcaccaaggagcatccgatcgacgtgccgatggaggtggacgagcacatgctcgtgacgatctccgtcaacacgatcccctgcgagcccaacaagacgtgcgccggccccggaaacaaccgcctcgccgcgag

SEQ ID NO: 354606 - DNA, 295 bp, Zea mays
gccggccagtacacacacccgaccgcgaagaaaccgagcaacaaaaacatgcgagaaatggagcacaagaggccggttgtccgccgccaggagcccaccgtcgcaaggacggaggacgacgtggcttccggcgacgaggaatccgacgtcgagttcgagttccccttcgtgagccaggagtccggcgcgggcgcgggcgccgcggcggccgacgagctcttcgcggacggccgcatccgcgcgtcctacacggtgtttggccgagtcctagacgaggccgcggcgccggcgccga

SEQ ID NO: 354607 - DNA, 291 bp, Zea mays
atttcctttgaatccgctctcctcccttcttctacctctatccgtcaagagagactcccgtcgcggtcagtgctctcggttttttccttgcggataacgatacaatggctcccatcacgcaagagaccgtcgacggtctcaaggacatcattaacaagctcgagtcgcgcgttgccgatcttgagggccgccttgttcatggcagcccggcttccagctcgaaatcaatggctgagcaattccgtattgtcttgatgggtcctcctggtgctggcaagggaactcaggctc

SEQ ID NO: 354608 - DNA, 243 bp, Zea mays
cgccgccaaggccgcaaccggccgtcgctccatgctgcggtagaatttagaaacgagaagggagatggcggccgaggcgctggggttcatggcgcggggagccaacggtgggagggcggcggactcgtcacaagggactttctcggcgggtgcgcgccaccgggacgcagggacgcgtcgcagaatggcaccgtgccggaggtggtcacagagcacgctgccgcaagcgtggactcactgtac

SEQ ID NO: 354609 - DNA, 239 bp, Zea mays
ggcgccggtgctgctcaacaccacgctcaagttttgcgcctcccccagcaggaacagcagaggctgctgcgacgccaccgctgatgccgcgctcagcaagcagttcgacgccatggccatctccgacgctgcctgcgctgccgtcgtcaagtcaatcctctgcgctaaatgcagtccatattccgcggacctgttcggcgcggggccaaagatccggacggttccttccctctgcaact

SEQ ID NO: 354610 - DNA, 198 bp, Zea mays
ttcttcctcgcaggcacagccgcttctcccaaaggttgcgatggccagcacaacctctcctctcctcctgcttgccgccatggcggtggtggcggcgacgcttgccgtggcgccagtctcgtcagcggacctgccatccggtgtcgcatccatcacgtccaagatcccaaacccatggtcggccttccagaacctcac

SEQ ID NO: 354611 - DNA, 134 bp, Zea mays
gttggacacttggaccggcattcagaaaggagagctggagttggcgatggtgtggcgtgcacatgggatatttaaatttatacccttagttttgtcaccttcctcatttttatctttagttgaattttttactc

SEQ ID NO: 354612 - DNA, 310 bp, Zea mays
caggagagaagagagtgtgagtacgaccagaaaatatccattgatttctacaaggtatgaacagttagctttgaactgccttttctttcagaactctcatgtttccttgatgcatgttcaggaaggagatcccttgaaaccagctgtgacgggcgtcttagtgtaaggatctgaagttccaaaaccaaaaataccaattccatgctatccgctgatgttgctctgtggaactcataacttggtgttcatgcaggttcgtttccactccagatcaaattggcaacaagtactatcttggcctgctcctctg

SEQ ID NO: 354613 - DNA, 312 bp, Zea mays
tgacgcgagacctctaaggctctaacccaaggttgatctcatctcgtgcactcctctcccttcccctcctctcctagggttagcaagcttgatcccgtgcgcctgcttgggtgtctgaccgcaccggcgccgagatggtagccgctgcggcggcgagtgcggccggtgtccttccgccgcctcggtgttctcctccgcgctcctttgccctgcggcctgacaacctcccgcgtcgccgcacctttcccccgccgcacagattccatgaagatttgtcaactactcttaacagctacacgattttcaaaacag

SEQ ID NO: 354614 - DNA, 301 bp, Zea mays
tatagtctcaaatatatatcacacttaaaactaataattttgagttgctgctgctataacttattatcttattttattgcaatgcctttttttagactattaccaaattggactgatgattgctgtctgggctgggtctgtctgatgatctagcctgagtggttgagcctgagagggaaatccaatgctctcattgtggtggttagtgcactaggtattaattacagagattaagaataatttttgattgatctcattgtggtggttgtactgtacgttctccacatcaacccagtatttg

SEQ ID NO: 354615 - DNA, 298 bp, Zea mays
  unsure (1)..(298): unsure at all n locations
aanaaaacgttgcgttctgcatcctcatgcaagcgccatcgcatgggagatagaagagagagagagagagggcgtacgctgcgactcccgttctgctgctgttcgagggagatgtccatggaacaatcgacgcgtcgcactgggagccgaagaaccaaacaggtgatggcgccggcactgtcttccctgcgctacggcaatagcctctcggtggtgagcatcttcgcgcgcgacggccgtgctctacgggggcatctaccgtaccatcgcagactgcccgggaacgaccccaccgact

SEQ ID NO: 354616 - DNA, 295 bp, Zea mays
caaccacaacacttccaaaaactcgatatacatcatgggtcttattgaaagcactcccgccaatgctgaaggtcaagctgcgaacagaggtggtttgatgatctcgcaaggaattatccctcctcaagatgagaacaaattcgcttctcttttgcaggaaactgatctcgatagcgcgaaaataaaggagatcatgaaagaggttggatcaaacaactacgacaagggcctcaacaaggctgagttcactagagtcgccgaagctttgggcttgttcgagaaggctaagactcac

SEQ ID NO: 354617 - DNA, 302 bp, Zea mays
ggagacatgtcgacctttccatgcgcatcgaccagccgctgtcgtgtccacgcaccacgctcgactcgatcgagagagagagatccttcttcgccacgcgcagcatgcctgccaagccgagacccgttcgttcactgaccactcgctgccacgcagtccgcacccgccatccacccacgaccacgaccacgaccacgaccgcgacctccccggcaagactcacacggtggaagggaagaggaggaggtttcagacgaagagcgccgcgttgttcgcgtctgcctgcagggagtgggagagcg

SEQ ID NO: 354618 - DNA, 243 bp, Zea mays
gcgaggggaacaagcacaccgcagtctcagtcctccgcctctctttcctttcaagaactactcgaggtctaattgtcccagcctgccgcgcgcgctcggcacgccagaacgaaggacgtaccagaggcacacgatttcaaatggcggactgcatgcaggagtggccggagcccgtcgtccgcgtgcaggcgctcgccgagagcgggctgtccgtcatcccgagctgctacgtcaagccgccgt

SEQ ID NO: 354619 - DNA, 259 bp, Zea mays
gcacgcacgcactctcctccgacagcgaccgcgcaacgtccttctcccgcgccgcccggccggccggtccctgttccctctcctcccctcggagcagcaggagcaggagcagccgcgttcgtcctctgcgctgcgcggcccgccggcctgaccaagcaaagcttatcggccggagccggacgaacgaacgatgcagcaggacctcagatactcagagagaagaaacccggaacaggcgcatccagtgatgtcggcgagc

SEQ ID NO: 354620 - DNA, 290 bp, Zea mays
gtgtcggcggcggtggcgacggcgacgtgaggggagatcaatccaaagatgtcgatttctccgtgttcttctgagctatttattttcttttgatttgtttttttcttttcttgtttttaaaaacaatagctactagtggtagtagatgtacatgttgtgtatggagtattatttgttctcctcaaggatgatgtgatttagcagctgatattagggagtgagtacggcgcaatgatggccggtggagtacatacataaattataaagagattctcctgttcgatggggta

SEQ ID NO: 354621 - DNA, 289 bp, Zea mays
tttccatatatggtatgctatactcgagtaatgagaaagcctctagtgctacaaagatttacagtgcagaatgtacatccacccacgtttcgaataaacagtaatttgtactactactttagaacccattatcaaaagtgaacacgtcaaaaaaggagaaaacacagataactaatcaccggtccttctcggggctaacgtcgctgtcccgcccgtccggcgatgccgcgctgtcatccaccggcacgacgccggcgtccttgcggctcctgtacttgatcagaccgta

SEQ ID NO: 354622 - DNA, 187 bp, Zea mays
acaaaacacaccacacaaatccacggggggttttgtcacctccaaacttccgaattccacctcacccacccacagcaccgagcaactaaaaccctacctcacgactcacccagcaaaacaccgtgccaaccgtatccccaaaaccccacgcgcggagcactaaactctagccttgcagcgctacacc

SEQ ID NO: 354623 - DNA, 321 bp, Zea mays
caaaagttttagttccaactgggagagctagcatggcaagttcgcgctgctttgagaacccgccggtgctggagccggccagcggaggaggcgaggtggttgacgacttcggcgggcagaaggcctacgtcagcggctccgccgggtccaaggccgccgtcgtcctcatctccgacgccttcgggttcgaagcgccaaacctgaggtacgctgctagtctcactctgagctaatctgagctgggtagttgctatatatgcctgggctatgggctttaaaatttgtcgaatgggttcttgaattgcatcagatttttagttg

SEQ ID NO: 354624 - DNA, 259 bp, Zea mays
  unsure (1)..(259): unsure at all n locations
cgatctcccaaacaacattgccaccgccgcctgggcgcctcgcttcncctcacctcgccctctccaccaagccgcgagccgcctcccccatagggttcctctccccggagccgggggcagcaagggggatggaggggtgggcgtccgcggcggcgtacacggccgccgcgctggcctccgcggcggcggcgacggtggtggctctgcggctcgtgcaccggcatctccttcactacgccgagcccacgcaccagcgttt

SEQ ID NO: 354625 - DNA, 155 bp, Zea mays
  unsure (1)..(155): unsure at all n locations
tgtgtgattatgcgtggttatctagaccatatgtgnataccaagaagttaaacaaatgtattatagcgtgcttgtttgaggtgtgagaaagtacatcttcttagaaggggaggaaaaaaggaaaaaaagagaaaaaaagtggaggaagagaaaag

SEQ ID NO: 354626 - DNA, 309 bp, Zea mays
  unsure (1)..(309): unsure at all n locations
tcatcaagctaagtttctcctcctcttctccctacatccgccacccctctcttccccatctccggctgccacctagccccctcccccccaccgtccggggtcggtcgctctgtgatgtattttgttttgcaccaattcatgcccatctttatgtacaacatgtttactgcttgggttaactactactttacgttaattagcctgcagtgaaagcttatttagatatgctctgcatcacacaacttctacgttcttgcttttggaattttcagtaagtanaatacatggggcttcttacgatgatctttc

SEQ ID NO: 354627 - DNA, 309 bp, Zea mays
ataagaatggtctaaggtagaccaaagtacaagctgccctagaaggcaggaaaatgggggacacaaggaaacaccaaaactaaatagaagagagagacggggggcaccagttccaacaacattcaaattaaggccacagctgcctaagatcctttgcacccgccattctccaaagcttaacatcatcttgaattgttcttgttatgaggaatgcattaatgccataaacgaattcattcctgaactaattctttttgcagggaccttcattgccatcgtgttggatatgacaacaaaaaattacctaaa

SEQ ID NO: 354628 - DNA, 307 bp, Zea mays
tgatgatgatagcggtagtagagtgctcatgaagctggggaaggccaatttgaattacaaaaacttgttgatacctatcgctcaaatatcatttacactatcacaaccccatcagagtctcttctcaaggagctacagactgtagaggaaatgaagcagcaatgcgacatgaaaagagagacatatgaagctatgagggcatcctacacacaaaaaggaaggtcaaggcattccaaaactgaaacatactctgcagaacaactgcaaagcgctctcgctgagtaccaagaagacgcagcgctgttca

SEQ ID NO: 354629 - DNA, 122 bp, Zea mays
cggctcgagcttccttttccgatatgatgtgaattatgttatctagtatctgagttttacccacgtgtaattgagctccgtgaccgccattgttcagaaagagcaggcggagatgacgtcgg

SEQ ID NO: 354630 - DNA, 299 bp, Zea mays
tctgctcgagatcagatccaacgccaccagctagcagcagcagcagcagcatggccaccaccagcacgcctcgcctcgccaccctcctggtgctcctggcggcggcgtcaccgctgctgagcgcagtcaaaaggccgccccgaagctcctgctgcggcgaagcggcgcagtgccgggtggtcgcgtcgcctgcgttggtggcggacgggccctccacagactgaaaaggcgtcacgacgaccatctacgattcagagcgcttacgacacgcgcgtggacagagatcacgcgactgacga

SEQ ID NO: 354631 - DNA, 319 bp, Zea mays
cggctcgagcggctcgaggcggctgatcctgctccaagcctccaaccctagcttccccgctccccaccttcctccgtccggggctcatggcggagatcgaggtggtatccgaaggcggcaggcgggacgaggacgaggagcggcggcggcagcagcagcaaggcgcgggggagccggaccccgtggtggacgtgtactctgcggcggcgtatggggacctggagcggctccgcggtttcgtggagcaggggggagccagcaacgcgctcagggagctcgacggcaacggctagcacgcgctccagtgggccgcgctcaa

SEQ ID NO: 354632 - DNA, 324 bp, Zea mays
tggtagatcaattaatccggtcagttcatttattagttggattggatcggcagcgcgcaaccccgttcgtctccgttcccgtttgcacggcagtcgtcctagcttcattcgctggcctccctttgatcttcctcggtccctccctctttctcctccgatcccatagcttctctctctgtgtgtgctaaaaacagctagctaggttaggggagaggcagcagagacagggacaatctagagattaacagacaagatcgatcggtcgagcttgcgcgcatgcactgaattgattctcaagcgcgcagagatccatgaactctcatg

SEQ ID NO: 354633 - DNA, 223 bp, Zea mays
aggccttctccaatactgtgcaaacgttttgatattgttgacctttcatggggaagccaatgcctgttcaaagaccaaggagcaagatggagaaccttatctttatgacagaatccaacaaaggaacaaatgatgaagtggagagctcgagtagaagtttgcagcatgcttctatggaagcggaatctgatgttgaatcacgaggagctgcaactgatcctga

SEQ ID NO: 354634 - DNA, 293 bp, Zea mays
cggattagttgtactgtacattgttcctgcgaagacactgggtcgtccgggtcaatcggcagcttgaaccagccatggcggcgcaccggccgaacgccgcggcgccgctgctcgtcctaggctccctgttcgcggtgtttgcgggagccaaggataacgctgcggtggctgcggtgagtgtggtggccgtcatggcgttcgtgatggccttctccgtcggcttgggccctctggcgtgggtgtacagctccgagatactgccgctccgacttcgcgggctaggtgccgggctc

SEQ ID NO: 354635 - DNA, 150 bp, Zea mays
tcccgaccacgaccccgataggctgtcgggcgagaggctcatcatcagcttgcccgggcgcgcctcggtctcggtggcgtcagtgcgaaccggcgaaccggacacgacggcccaccgcctccctctgcttcctcccgtcgaagccctcca

SEQ ID NO: 354636 - DNA, 315 bp, Zea mays
  unsure (1)..(315): unsure at all n locations
cgacncaacgcgcccccacggccccacccacgcgcttgtgaacagcgcagatcgcgcacggctcgttcgaccctgtcctctctgactctctctatacaatatccacttcagttgcgggtgcggccaccttctcccctttcctcagaccccaggccccagcccggcaagcagacatgggcaaccgtgcgtcgcgccaccaccgccaagccgccgagcagcaaccggcgacgccgaccctgccgaagctccagccccagatccagccgccgcctccggctccgccgacgcagacgcagcagtaacagcaggcgccgc

SEQ ID NO: 354637 - DNA, 311 bp, Zea mays
  unsure (1)..(311): unsure at all n locations
aagcattatagcctttacttgatggcttgatgctctgttgtctgagattaatcgagactagtcgccttgtctgtgccatgatgactagaattgactagataatttacaaacctcgagtccacaggtacaaagttgagcaatatatgctcagtgcaacattgatttcaagaaggatcgtgtggcttctcaattctattttataatgatcatcagtgtttgtatcaaagtttctcagtcatttgttgtanaaaaatatttgagtcttgatttgttttttcagctctanaaagtaacacaattcaacatttcct

SEQ ID NO: 354638 - DNA, 297 bp, Zea mays
tgttaatttgtcctggatccaagtagacaatttgatccaagtgatagagcatgggggtttgccctggatcgtgggcccaatctggtgtgacgtccaatgcacagttgtgtgtctattgtattatattgcagtaacccttctcagtgtagtatcatttgtatctaatgctttatccgatgcatgtatggatgtctgaggcagctggtttatttgtttatctttgtttctaatgtgtctttgtttgggcttgttctatattgtgtcttataggtttttaataattcttttaatgtcttt

SEQ ID NO: 354639 - DNA, 313 bp, Zea mays
tgcataccaacctcaatgcccgttttaagtgtgatgctctaaagcttgctatggtcaagaatcagcgattggcagaaaaactcttcaatgggagtctatacgactgcatctgtaaatttgaaccagttccttaacaacatggtagcgactgcggaggttgtgtcatcttgcagcaactagcagaagcagcttgattggtgtagccggtgagacagaaacaatcatacagcgtacggcataaccgatccttccatgtacggggtacaagagacgccctttcaataaaacaataacagtgttttctgaaacgata

SEQ ID NO: 354640 - DNA, 262 bp, Zea mays
gctgaagttctagcatggctgggcttgttctgaagtcagagctgctggaggtggaagcagctgtatagggctatagagaagtcacgtgtttttgattgggataattatcctaattgcttgtaagtagatgataataataaacagagacagatagaattactggagcagcttgacaaacatcgctcatataggtttgagtctgattggcaggggaactcacattttctgctaattattattgtgatagtcatattcagaagag

SEQ ID NO: 354641 - DNA, 295 bp, Zea mays
caagaacctgatcaatcaacttcagtcccgtccgtagagggttttgaaaagccaacgtacacctctgagagagttcaaccggagcctgaatggcaacgcccaagctgtccccggtctcgccggtgcggcaggacggcaacgacaagccgtgcgcgccatcctccccctcctcctccccgtcgaccgttctgagtgcgcaggacgcgtacgagcagcacctgcgcctgccggagctgtcgagcctgtggacggccggatgcttcccggagtgggcgggcgagggcctggtcaagcc

SEQ ID NO: 354642 - DNA, 298 bp, Zea mays
  unsure (1)..(298): unsure at all n locations
tggcaccacctccacctcgtcgtctcccaccaccgccgcgcgcgagccctagcccgatctagccggcggcaggcactagatcccgccgcttgcggcatcccgggacgcgcctcgccgaattcgccgctcctcgcactgcaacacgcccggaccactanaaaagaggcaactctggggcataacgtacttcaccttgattacaggttactgcantggatgtagtattttattattggtggaggttgtcaccacaagacatatgttgtgatctctcgatggcgangagatngaacaggtg

SEQ ID NO: 354643 - DNA, 294 bp, Zea mays
gaatcctctgaccaccgcagagcctcccccctgaggaaaccctagcgcaccgccgaccgccgccgacccgtagcatggcgtccccggcccggcccgtcgccgcgtccgtctccggcgccttcggcctctcgcccgaccccaagcgctgctccttcgaccaggcgctccggcacaaggagcggccggttcgttcattgctcgttgccggggatgggggtgcaccgtgctgccttgttctggtttgtgccaacggttgcggggttatcgtctgcgttgcgtgtgactgcggatatg

SEQ ID NO: 354644 - DNA, 229 bp, Zea mays
cttacgcttcatgtacaaccactaaggtagccgcctttgcgtttctttcttttaactactgcatgaatatgatgtacttagccttgttgtatttggcatgacaaccgacaacctctccatttcacctggttatgctagatctgtagggccataagctgctatgatatgcacatgagaactctgtacttgcggtttgatcttctctgtggaattctgaactatttgagga

SEQ ID NO: 354645 - DNA, 307 bp, Zea mays
cgtaaatggccgaagatctcgctctctttttgaaggatgtaggttttcttcatctgttggacaatttgatacaaaacgacattacttctctggcacaattatctaccaaaacaagtgcagacctgcaatcaagttgtggaatagcgtcgatggcagcaaagaaaattcttaaaggtttgtccgagcacacgtctagtgtacccatacagcaaccattgcaatcggagctttccaccttgtcggcggactgcccacatccgacccaatgtgctctctaatgagattaggcttctgctagagatacgag

SEQ ID NO: 354646 - DNA, 314 bp, Zea mays
gtgccatccaatctttctacttttgaggcgttttctaagttgctccatacgttatcgtcatcaaaggcctttcgaactgcttttgaattgaacattgcttcaaggtcagaaaagcaagcacagcagctaaacagatcgatttggaagtcaagttcagccgtatcgtcggacagcagttttatggacagcatgcacacaaccatcatgcccagcactctagacaacctcctcctgaactcaaaccagagcttcttgtacaccgctaagttggtgaagcatggtggcgtgccagatagcatattcaacggttggga

SEQ ID NO: 354647 - DNA, 131 bp, Zea mays
ggcgcgtcggcgacccggcggagtcctcgcgcctgcgtatcggcgacgagatcgcgtggtccgagatcagcggcgtctactaccgggacgactcgctcaaggagaacaccaaccccaagtggctcctcaag

SEQ ID NO: 354648 - DNA, 311 bp, Zea mays
gaaagaacgggccagagtctcagctgatactcaggatcatcaaccagaaactggaaaagatagtagtgagaacactactgaatttcgttatgtgcctgagggtgaggagagcacctctcaggcattgggtgctgcaacagctgaccagatcaattatgacaatcagattaatcaatctttcttggaagatgaaagctgtatcaggaatttggaacatagtgatgagagaacacctgataaccctgaggtgccttaccttcaaacttcacaagcacttcccaacaagtctgaaaatgccaatgaattggatg

SEQ ID NO: 354649 - DNA, 144 bp, Zea mays
ccccgatcgcccttggagatggagatggtcggaggcagagcgacgccatccacggcctcttgtcatacggctgggccgggctctggtccacgctggcgagcctcctgttcctgtggtccatggtgcaggatcacctccctttcc

SEQ ID NO: 354650 - DNA, 301 bp, Zea mays
atttatctttatattgggtgaaatgttcatatgctttcctcagcttggatgatggtttgctttgtttctcagctgtgtttggttagacaaggctgatatgcccgcgccatcctggctcggtgctggtgcctcagtgaaaccgaatgatctgctataggatgtttggttgggggctctggacctggctcgtctccatgccggcagaaacggtctattctgccgtggggtatgctcgtctccatgcccggtatagacactgctgcatctagatcgaagatggtccctccgcttaagctatgat

SEQ ID NO: 354651 - DNA, 303 bp, Zea mays
cccagaactcggcgacggcgctcctgatcaaggcggcccagatgggctcgacgacgtcgagcaccacccacaacaaccacaacggccctactacgactagcacgctgctccgtgctacgggcttcagcggcgccaccggcagcgggcagctggggactactggcggcagggcgccgcgggagaagaaggggcggcgtcccacgaggcacacttccatgagctcatcatgaactctctggccggcggcggcttctccggcaccgcaggtatcggcggcggcgtggacgacggcaagctgagcac

SEQ ID NO: 354652 - DNA, 296 bp, Zea mays
aaaatccgtcactaacaccaatggattgggtcaagtttctcatttctgctgttatcggtttggtcactctagttggctctcttgaaatgccaaaggctgatgtatgggttgtaatagcaatcttggtcggggggggtgggggaaagtggtgagagaaaactcacacttcaacaaaatatgacaatgtatcagaacttgattacaaaatcaatgtatgacaaacagcttgatagtgggaaaggaactcttcttcacttatgcgatgacgtgatacagcaagaagttaaagaggtcat

SEQ ID NO: 354653 - DNA, 111 bp, Zea mays
  unsure (1)..(111): unsure at all n locations
tgacgtcncctccgacatcaaccctgcgctggccgccttcctcaggacccgctgcccggccaacacgacgaccagcaacgaccccaccgtgatgcaggacgtggtcacgcc

SEQ ID NO: 354654 - DNA, 120 bp, Zea mays
tctacagtctactgctattgatgcgaatacattatcgccatctcttttatcaaagaaggatagctgtgattatgatagagtttatagtaatcttgctacttcaactcctccaaggactcc

SEQ ID NO: 354655 - DNA, 233 bp, Zea mays
tgatgtgtttggttttgtaagaactgtatgttcaaaatgtacacacggactaattctgcttaatgttcctacacatgtcaatctgtcaaattcctccgtgtgtacattttgaacatacagttcttacaaaaccaaacacatcggaggaatttgacagatttggcatgtgtagcaacattaatcagaattactatcatatagtccaatctacaacgtcgattttgcttgcaaaa

SEQ ID NO: 354656 - DNA, 310 bp, Zea mays
cacacacacactcgtctctcacaactacgagactagcagttcttcagcaccaacacaaacggtgtaactagctaccttataacaactagctagtctctctcgatagacatctaactagcttaccaacaagctagctaggctctctttcagggtcccttatatggcttccgcacacaaaatcgtgttcgtgcttctcttgctgacagcatcgtcgtcgtccatgctgcaagccaggacgatggcgccaagtcatgaccgccagcatgcacaaacagatcatcaagcggcagggcacgccaaggagagggag

SEQ ID NO: 354657 - DNA, 289 bp, Zea mays
agatgattcaggtctcctccgcagcctaatgcatgatagcgtagggcctcatgggggattcagtttctttgtctttaaggagtgagtcaacagaggagactactctaatctgttaaggctaggtgaagaattccagcaagagcttgcaagctttctgaaagagcggagtgatctgctgtgggttcatgagatatgcttaaaccagttctcatctgcttccgacacccttcatacctatgcgctgcgtcgtagtcctgatggatattcgagcttcacaaccagcagagag

SEQ ID NO: 354658 - DNA, 287 bp, Zea mays
tgtttccttctattttctgtgttgtgattttgtcaccaaatttgctagctttgatccacatcacgattcatacacgttttgtgctatccttggtccatcttctataaccagggtactttgattctgttggatttatgtaaagtttggtttttaatgaggctgtttcatgtaggcaccgtatgcatatcctgaatttcagcaccgcatacactttctacagggcgcttgccacaccagacaagcacagacaaacacgcgagcggcatgcgatgtcatcaccggcagca

SEQ ID NO: 354659 - DNA, 265 bp, Zea mays
tgttggttgttcactacaaacatggacaagatcagccagcggtcttgtcagtggtattcggattgagagatgttctttttttagtcctccaccacaaatgttatcccatcatgtttcttgaaatggtgtgtggtatgatcaacaacctgcaaagccaaaagcagctgtgtgatgcaaatgccacgttctgtgcccaacttcggattacaataaaacggggaattcctcattgtttcaataaacattcaattgcatacgatgaact

SEQ ID NO: 354660 - DNA, 286 bp, Zea mays
tgatttcttatcctatctcgattagactttcctttgttggttgtctgggataaaaaaattcctttctatctgagcatgcatatggtttttgttctgttcatgatcttttttacaaaggtcgtgtagcagcttattcttttgaatgacatttgcaatgatgatactgtttttacccagctcattatgagacttccctctgtgggttgtcatgataagtgctattcctttgtatctgagcgcattcaagaattttactcatttgccgtccactattttcttaccaagc

SEQ ID NO: 354661 - DNA, 281 bp, Zea mays
ggccactgcaacgagctcgcctgtcgcctcgccccggcgccccgcgacaacgagacctcctcctccgctcagccgcagaagccacctcgccgccggcagcagcgttggcggaaaaggggtggaggcgcggcgattgttcgcgggatgagctacggcggcagcagctccctcgcgcccggtgccaagaggccgttcgagtacgggagaacgcatgtggtgaggcccaagggcacgcacaaggccaccattgtctggctccacggccttggtgacaatggaac

SEQ ID NO: 354662 - DNA, 304 bp, Zea mays
tcggccacggccggggccggagccggagccgagccagccaagtccgtcaaggccgaggcgtccgggtcgccggcgtcgtcgctgtctcccgcgacaacgaccaccccggcctcgacggtgacgacgtgctctccttcgtcggacgctggagccggccacgagatgtttcccgtgacgccgtcgagctggacgtgggagcagctggagggcgtgttcgggatcctgtcgccgctctcgccacacccgcagctcggcttcccggaggtcaccgttaactaaggggacatcggtcagtaagcatcaa

SEQ ID NO: 354663 - DNA, 295 bp, Zea mays
ctccaatcatcactggctgtggaagtcttgaatttcctgctcatgcttcctctggagactagatcggacagggaacttttcttgatgaatttggccgagaaggcattgaagcatctgagatcatgcctcggtgagcactgcgtaaacatggcatccttggcggaatagttggatgtggagtatgagtcagcattcttcagctccaggaccgaatttgatagattattcagtgatccatgagatctgtttgattgcaagcagtttggtttcgtctcacggtcatcgacctggtaca

SEQ ID NO: 354664 - DNA, 300 bp, Zea mays
ctaaacctgacgccgccatggccgccgccgttcgccacatcgtgcgccgccgcctctccacggccgccgccatcactgcaccggtccccactccggcctccatcctcaacccgtcctcgccgagcactcccctcacctcgcgacataagacccgactcgccatctccctcctcaagtcttccccgccgtctccccccgaccagatcctctccatttgccgcgccgggcactgaccccggagacacacatcgaccgcatcgcgctgtcgctagccgcatcaaagctctcctccgctccgga

SEQ ID NO: 354665 - DNA, 289 bp, Zea mays
cttcttccagctctgacacgcgtgcggacagcctgacacctacagtagaagttagcctgtcgtcatcagatcagctagccatggacggcggtttcccagcacttcttgaccccaccgcgctctcactggcgctgccggtgacccagggcccgcaaggctcaataagctcagcaaggacgactacctggccatctgcctcgccgcgctcgccggcacgcgaggaagcggcctcgtcgtcaaggctgccgctgggttcgggcggaaagacaccggcggcattaataagcag

SEQ ID NO: 354666 - DNA, 271 bp, Zea mays
tgaaactcaggacagaatcgcagttgcaacctgttagatgtcttctaccggcactatatatattttttgtttgatgtgtaatgatgttactgttcaacgtttattaccctactatactgttggatgttctttggacctgtttcatttcgcacaaggattggacttccaatatcatgctacattttacattcgtggtaaatacctgattagaaaaaaaaaaaaaaaaaaaaaaaaagaaaaaaaagaaataaaaaaaagaaaaaaaagaaaa

SEQ ID NO: 354667 - DNA, 254 bp, Zea mays
caacaagttcgagtggtgctttatggtatgcgaggcatgcttggggttggggtgtacaagactacaagtgtacgtattacgtactattataccaggtatattaataagccctagagagagagagagagggagagaaaaaagggtttattttgaagaataagggcagagtcagagggtggtccaaaggagcgcctcaactgatgagaagagaaggcaaagcttctgcttcaagcccagctggtggttgtatactg

SEQ ID NO: 354668 - DNA, 300 bp, Zea mays
tggagaaaaggcggcgaggcggaatcgacgatgacgccatcaaagcggacggaggaggcggccagctctaaaacgacgacaaggaagcagaaaagggaggtcaccgctgataccataggatttcatcggagttccgtcctccgtgtcaaaagaaggaagatgagaagaagaaaaaaaatcaaacgtgaaaagagctcaaaacaaactctcggaatgagatatagagatatattcttttttttccttccaaattctttgtgggatgctgcggctctagctgtaaatttgaactcattacaa

SEQ ID NO: 354669 - DNA, 294 bp, Zea mays
  unsure (1)..(294): unsure at all n locations
gagaaattccatctcgagcagagcgcagcaacacgtgcgcggaggtcacagctccgatcgacaagccggccaagcagccacacatgcctcctcacatggcggcgatctcgcaccggatcgcaggatccggcccgcgcgtcgccgttgtggcgccgcctcgcccgcgggggcgcgctgccgtggtcgcgggtgctgcggcgaagggcgcacatcgggagcggacgctggagggcgcgagtgacgacctgagggccgccgaggctcagtgtctggactgngctccgcgcggcgtcg

SEQ ID NO: 354670 - DNA, 285 bp, Zea mays
caataatccaacaatggaggccgcggaggagcggccaagacgacgccctgccggcctcggcgtcctcgccctactctgctcgtcgttgcttcttaacgtgctcttcctcgcgtactactacttcctctcgccgccgtcccagcttgccgatggtggcagctgcgggctgagctgggcgctgcgggcggccagggatgccgaggcgttggccgccacggacagctgctccggccacgggcaggtgttcttggacggcgtcgtcggccaggacgggcggcctgggtg

SEQ ID NO: 354671 - DNA, 299 bp, Zea mays
catcggctcctattcaaccttccctatcatgtcgcgccgccgctgccctgcgccccaactcccttggcggctagggttcccaaccaatgcgcctccctagcctccgtcctccaccttcctagatcccctcctccacttgaagcgttcgtgccggcgtgtggaaggaggacacgaaggcgactctggggacgacggcctgtgcggcccggcgtagtcttcctagccccggcaaccggctcagaggttcggttcgagcagagatcgtcgaagcggagacctagagtcgaagcgacccaaat

SEQ ID NO: 354672 - DNA, 294 bp, Zea mays
gccttggtctctcctccaacggggcaacgactcaccggctatccaacctacgaacgggatcccgatgcccatggcggcctcggttcttctcgccgcaccggctcctcttctcgccgcgtcacatccacggcccacgggcgaacccgccgcctcccgcaccgtgcctgcgagcgcccgcttctcctctccgggtctcctctgttctccgcgattcctccgccgccccggcaataacccacttgatcctgcagaaacccctcacgcgatccacgccaattcagccagcgccgatgt

SEQ ID NO: 354673 - DNA, 294 bp, Zea mays
tccctgaaatgcagtgcccagtggtgctggataacaaggcgtacaagcaagtggccagcatgagtgctgtgcctcctgtttcaagtgacatgggtattattccggaattctcagatgtggcagacttggtctctgtggatattcttggaggggcctttgagatgatgcctggtcctgagttccccctgccagaagaaggtgatgatgggaccaccatgtacaacaacaacgacgaggaggctcagagccttccaggcatcatcaactccatctgggagcagttcctggtaggca

SEQ ID NO: 354674 - DNA, 276 bp, Zea mays
tgcttatgcatgcacacttgtttcacttagttctggtactggacttcgcactatgcttggcgtcaaaacattaactttgatgatcatcctcttttcggatgactatttaataatcatgggttaactgtgtgttgattttttttactatagatgaattgtgctcccctatcagaatctatacaagctgtatgtattgaaatcatactctgaaagtctgaatatgaaaagtatggaatttctgagggcaatttaatctcagaagttctaattttctgg

SEQ ID NO: 354675 - DNA, 291 bp, Zea mays
  unsure (1)..(291): unsure at all n locations
ttctanagttagaataagctcagttccaatcaaataggggtaatacatggaatagatgaactaccaatagttctactctttggataagttctaaataccctcaggaatcctttcaacacatatagaaaggttggaaagctcaaaatcaacatatcactattgtggagcaagtattgagcaaaagaagatatatgagtaaaagaatcaaaatgcaaagaggattggactaaaaagatgagaatacaacacctcaaaatgaagacataaaaagaagcaaaagtacaagactcc

SEQ ID NO: 354676 - DNA, 288 bp, Zea mays
tcggcgctcaggtctcggatcagcatcgtgagggcatctgagcaccgcagcatagacatatcggttgaaaccacagcaatcagttcagatggccggaagcgcactggacctgttcagatattcaacttgtgaccaatcattatacctctttgggcttcctaccaccacaagcaattgttactagaatttgtcttggtcgtttaagttttgcacactgaatggagcactttgtgctactgattttttggtaaaacgatgatcgtgagaattagattggaaggctttctg

SEQ ID NO: 354677 - DNA, 132 bp, Zea mays
acgtagacacgtacgtagtatattgattgatccgcaagcacagatcagatggcatggcatggcacatctcctcccatgtgccgagggacagcgccatcagagctgcactgcactgtacattactttaaagcg

SEQ ID NO: 354678 - DNA, 191 bp, Zea mays
tcacgaacaacacaacaaaaagaaagatcgaacaatgggcgaaactattcaaactcccttgacaagattgcttggcatcaagcacccaattctcttggctggtatgaaccaagctgctggtcctgccttggctgccgctgtttccaatgctggtggtttgggttcaattggtggtgttggttacacacccg

SEQ ID NO: 354679 - DNA, 300 bp, Zea mays
agtacattaagatagcagctatgcttcctaacagaaccatcagggatgttgcgctgcgatgctgctgggctacatgtaaagagagtaggaagaaacctgatggattctacacagggaacaaaatgagagacgtgaagccaatccaggacaacatggttgcatcagtcccaatagctacttttcacatgacacctacgaccaatgtaatccccttttcggtatcaacgcagcatccgcatcaacaaagtcaggttcccaaagaagctcctgttgtcgacagtgcaagccagcgtctcctgg

SEQ ID NO: 354680 - DNA, 299 bp, Zea mays
tagggattcgtgggcgctaggttggacgccggcctccgcgctgcccgcttctcgtcgccgccgtctgccgacgagtttgcggcagatgtcgagcccaagaacgtccctgctgtctttcgcggcgtggttaaggagtgggcggcctcctcccgttgggatcctctccatggtggcctacgattacctgctggaaaaagtgggacctgacgtggctgtggaagctatgatgtcaaacactggccatgtgttctacggggatctcagaagccatgagagggctggtttttgctcgggacttg

SEQ ID NO: 354681 - DNA, 298 bp, Zea mays
gtcggcaacaggaaactctactcccgttatcaccttctgcctggcactgctactgatgatggaggtggtgaagttaaggagcgtctctggcatagccaaggtcaccggcgtacactgtgcctggccggagcgttggtcatcgccctgtacacggggccgtcgctcagcccagtcaaccgccatcaccgtgcctctggcggcgcccatggcttcaaagctccaacccgtgagaggacatgggttacaggcacgttcctgatgcttctgtccaacgtcacatggtccctgtggacggttc

SEQ ID NO: 354682 - DNA, 307 bp, Zea mays
cagcaacaaagattcggtggtagcactctgtccactccctctcgtttgttgaaaaaacatggagcctcaattttttctcgaggtctcgttacggcttctggtcgtgaaggcctcttcactgctggatacctcggtcttgctccctccattacccgtaacctaatcgaagaaagagagttttccaacacgaacgctcgattcatcggtgcactgctcgctggattgctctttggtactctcagtcatcctctcgacactataaagacttgtatgcaaggagacgtagagaaagagaagtacacatcgc

SEQ ID NO: 354683 - DNA, 303 bp, Zea mays
tcaaccaaaaacaacagcgaaccttgtaacattactacttctgtactttatatattattattatttatttatatttgttgttatttatactctactacctacttcgctcctcctaatttattatattatctattactcaagcaacacactctgtaactctattcgaacaaatatttgaagaaaaaaccaaacaatgaagtccctgtctatcctgcttctgttgtgctgcttcgttgccgtagcttacggctggccccagttccaaaaggccactgttgacctcgaaggcctcgtcagaataag

SEQ ID NO: 354684 - DNA, 293 bp, Zea mays
  unsure (1)..(293): unsure at all n locations
tgcgcctttccggcgttgcccttgtttttttcccctctccaactcgaggggttttcgatccggggggcggttcccggcgagatttttgacccggcccggtgcttggttccattgatctccgtctgctactccttcctcctacttggttgccttgccttcccggtccctgatcggagcctgtcgccggcgggcgggcgggctgagtttactgcccgttactggggggacaaagagcagaaggaacagagagtaaaaaatcttggggcttgatcggattcgangacggggcaatg

SEQ ID NO: 354685 - DNA, 297 bp, Zea mays
  unsure (1)..(297): unsure at all n locations
tgattaatgctcaaatccgaggattagctgtgtcgtgagagatggaggagcaaaaagatccatccactgcacctggacttggactggccgcccccatcaaatctttgcgaattggggaggagggcctgctgcccatcgttgccagcgaggagatcgtgccaggcgcgctgctgggcggccgtgccctgcgcgagtggcgccgtgctgtcgtacacggcaccgacgtcatcgtgagccgccagcgtagantcgacaacccgcccgccgcgactcgacgggccaacctgcacgcctacg

SEQ ID NO: 354686 - DNA, 236 bp, Zea mays
tgatgtattaggtctactgatagcacctagtatagatggccaaacgggccggcacgccgatcccggcatcgcccgacggcggcatggcccgccaggcccggctagcgaagttgccgtgcccagataggccggcgtgccgctgccgcggcccaggcacggcccgtgagcctgttagtcgtgccgggccggcccggtggcactatggcccatctgagtatattgtagaatttagcaaa

SEQ ID NO: 354687 - DNA, 289 bp, Zea mays
cctcgacctcgccacgctaggagaaggatgtgcaacggaacaccaagatggtggtggtggtggtggtggcatgccaaggccgagcacgaacgaagacgggaggagcaggataaggctgcttctcgtcgtcgagttatctggcgacctcgacgacgacgcgtggaataagctatgcttcgctgcggctaaacggcgcatggtgccaagcaacgacaacgacagcagcaaggtcatggtcatcgtcacgagccggtcagagaaggtaaccaggttcgggacgacgacagcg

SEQ ID NO: 354688 - DNA, 315 bp, Zea mays
gaattggatgagatcatgatggaagtaaggtaggtggaagagctgcaggttctaaaggagggactgtacccatgggaagataggctcaaggtgatctagttaacatatccaacattaggtttcagacggttcggtgtggatggcatatgaatatgatccggtgtttgtgcaatccgacatctgaaggacacagcacatggcatcgttaagttcgttcagtaactttcggagccggaaccggacagcaaagaggggcagagccgcagagggctcgatccctcaagtgacccgcaggatcttgtgtcttgaatcatc

SEQ ID NO: 354689 - DNA, 321 bp, Zea mays
  unsure (1)..(321): unsure at all n locations
cgcgtgaccgttctcgagagcgagagcangaacgggagcgggacgttccttggacagggagagggagcgggagcgggagctnggccgttctctggagagcgagcgggagcgggttcgagagctggagcgttcccgcgagggtgaccgtgaacggcagcgaggcagggacagggacagggactcacgcagagaggccagagcatcaccaggggccattaatgatagttcctcgatgaggcggaatgataggtcgaggtcccagccggacaggtcggagcgtggcccgccgcagccgtccagccncgaccggcagtcgcgtcg

SEQ ID NO: 354690 - DNA, 324 bp, Zea mays
  unsure (1)..(324): unsure at all n locations
natggatgaagaatgacaaggctgctggaacacggagtggtcttggtggtggaagattggtagccaagactgtaagcaaggacaaaagggccgttgagggtttgcctgatggatggcgaaaagaatacaggccaaggaagaatggttcatttctggatgtgtactacattgatccagtcagtggatatgaatttcgctcttttaaggatgtgcaccgttatcttgaaactggagatattagacagtgcgccgtaagaccaaagaagagtaccatctgcgaagttcatataatagaaagtcaaactcatgccagtgcatcaccac

SEQ ID NO: 354691 - DNA, 319 bp, Zea mays
  unsure (1)..(319): unsure at all n locations
tttgctctacggttgttccanaaataatgtttatgaatttttaattacttctagatcaagaacaagaaggcgaataatacgcattgacagaagcagcagcagcatggatacatgacgaaaacaacgacagcacagcacaagagaggacaccggacccgatcggagtacagccagccactcgcttctgctcctagctaaacggcccgagaagcaccgccggtccggaggatgggaggagcatgtagcagccaacaagctggcgaagacacacgacctctacgcaccgtacttgtaggccccaatcccaatgtcctccgag

SEQ ID NO: 354692 - DNA, 318 bp, Zea mays
tgcctgccactcgatcagcagtaggcccacagctcactcgcaaccactcaccaagctagcggaagcaaagcagagcagcggtcgccggccgggcacgataccagcgtcgcgagagagagagaggatggcgttcatgcggtaccgcgcgctgccgcggggggagctaacagcggaggagttccgggcgtggctggcgcagttcgacgcggacagcgacgggcggatcagcagggaggagctgcggcacgcgctgcggagcctcaacgtgcggttcgcgtggtggaatgcgaggtgcggcgtgcgcgccgccgacgccga

SEQ ID NO: 354693 - DNA, 302 bp, Zea mays
ctcggagaccgagggaggcgaggcaagcggcgggtgccgggccgcccgcgccggtgccgaggtcctcgagtcgaccccgtacgtctgtcccccgcttgccgccacccgctcgtggtccttccatttccgtgtcctcccccgcatccctttttaatgctcgtcgtcctccattctgtcgccgctgtgttcgtgtctctcctcgctccccgatcgctgcccctgggcgccgcgttcgccgccggatctgggggcgggacggtgccccagacgaaccgatggcgcgggcggcgcttcgattgggc

SEQ ID NO: 354694 - DNA, 109 bp, Zea mays
cacgcggccgtcaacttcgggcagtaccgtacgccgggtactcccgaaccgccgccgcaccgaaccgtgcggccggacgacatagggactgacgaaccgagagtgtcgt

SEQ ID NO: 354695 - DNA, 310 bp, Zea mays
tcagggataactgcgtaccgcccgctggtcgtcactccaggcaacagtggtagtatatcatgtcatgtccttcaattgtagtgtctggtgtccgaattttttgttttttagctcattttgtgacacaaatttacgtttggaccccagaaattttatttgcacgtttggacctgatgctcagcgccataggctgtggcgccgaggtaacacagctcggcgccgagctgtgacgtggcagcaacggctacttgcgcctagggctgacctggcaccgacgtggggcgacgcggcctcgtagctcggcgtcaca

SEQ ID NO: 354696 - DNA, 306 bp, Zea mays
tgttgtttcctgtacaagtacaacaacagtttgaaggacctctactatagttttgcaaccccttgttaacttgtcatgtttattagtataagttgttggaactgtatctgactgtaacaactttcacttgcttcactaacatatgatggctgcccaacctcattgaccaataggtgcagtatccaattctcttttctttagagcatttatttaggtatcctgcaagtagtagtagtgttatgcgtgttctaatattctatgtcacaaatgtaaaacactttattaattgggcacaaaattatttaa

SEQ ID NO: 354697 - DNA, 221 bp, Zea mays
attttatattagagaatatatttcttaaaatacccattctatatgttaagtgtgtatgaattttatatttgaaagcatttgattaaataatataataaataaagtaattaaacaaattatattcatgctggatttcttgagctatgcattctaaataaatttgtaatttaaaactgcatttgaattgatttgggaatggaaaatagaaaaaaaaacagaaa

SEQ ID NO: 354698 - DNA, 261 bp, Zea mays
gatgtaaatacagtcgacattttgtattctttgaagcatccatcactcagtttaccataatatcgggggaagactcaggaactagatagctaatcaaagaaatatgtcaaaagatagaacaaagaatatcatcagaaggttttatgctaattttcgcttttcttcttcagcaaaccaccgaatctcttcagcaaaggcttcttcttatgatgttgcggctgtttagttgatgccatgcctctgctctccttagttgagtgc

SEQ ID NO: 354699 - DNA, 244 bp, Zea mays
  unsure (1)..(244): unsure at all n locations
gcgcgacaccaccactttttacattttcaattttctataaagctcctttanaattttgcaacatgaatccagctcctcctaaacccgtcaacagcgtcctagaaagcgttggaaacacccagtggtgcgcctaaccatgttgtgccaaggatgcgcagagtctacgtcaaatggagttcttcgccccaagaagctacaagatcgcatgctcatcaatgtagaagagcagaacgcgcgagattaa

SEQ ID NO: 354700 - DNA, 297 bp, Zea mays
  unsure (1)..(297): unsure at all n locations
ctacagtcaaaattgtcgccacatggttccacatttgtctgctcatgcttctattgaagaaaacattcctgttgtagacaaggttgtggatgatggatggggtactcccagaggtagtctccaagcttcttcaggtattctgtgttattatatgattgcttcttttattgtgaatctcttgcctaaagttttgttcttcattttacatccgttcagtttattttagtcgatgtctgtcccacaaaagtttttctacggatgtacttcatcaatccttanacaacgtaactcctatgt

SEQ ID NO: 354701 - DNA, 209 bp, Zea mays
  unsure (1)..(209): unsure at all n locations
attccattgtctggtcatttgtcnccggccggcacgtaataatcaccactatggccagcggacggagaaagagcggcattccagctctggggtggtggctcatggcagtcggcaccatccgctccgccatcgtgtggtcctgcctcttcagttctgcatcgctctgcttggccgtctaccccgagatgaccggcgtgcaggagcgagct

SEQ ID NO: 354702 - DNA, 293 bp, Zea mays
aagaggttccatggtatctggatgatggaactggacgtgtatatatggttggtgctcgttctgcagctggtttaattttaactgttgccagtgaggtttttgaggagtcagggaggacacttgtacgtggaactctagattatttacaagggttgaagatgctgggagtaaaacgaactgaaagggttcttccaactggaatctcattgacagttgttggtgaggctattaaagatgatgttggaactattagaattcagcgaccgcataaaggacccttctatgtatcacca

SEQ ID NO: 354703 - DNA, 247 bp, Zea mays
cttcttcccatccttgttcatgttgtgctaaaagatgtgcttgttgcattagaatttcaaatgacaatgcttgataaatactgtatgttaggtaactgttggcagatgatgatctcattgttcatgaatagtcttgtatgcgaaagggcttctagcataatggttaaggcttccgagtagcatctctatgtttcggggaccaatttcgggcttgggtaaaaagatcccctcggcgtgccccccccaa

SEQ ID NO: 354704 - DNA, 234 bp, Zea mays
tcctcctgcagcagcagcataaccagaggggagtgcagcaagccgtttcgagagacagctttataggctactgctagcagtatggcttccgctgcgcgcttcctggtggtcgtggtcgtggcgtgtgcactcctggcgagcaacaactgccacgcggcgcgccacttggccgacacggccgcggctcccgctgctgctggtgccgtccctggcctccccgccgtgccgaccttg

SEQ ID NO: 354705 - DNA, 284 bp, Zea mays
  unsure (1)..(284): unsure at all n locations
gagcatagtattgattgaggtttcttccaggcaaacagctgcttcagctcgttcatcttcagatctttttgttttttgtatttctgtttgtaaatagaaaaattaccatgttaagtacaagcagtggtagtaacaataagaagagtaaaaaagagagacgtttctcccagcaaacactttacgaacaattcatcgcagatgcatcgtctccanaacccaaacccaaagcctcaaacccgccgaaaagatcattgagtaattccgcaccgccgacatatgaagcc

SEQ ID NO: 354706 - DNA, 258 bp, Zea mays
tgtttgctgccgccgcggtttccattgcttctcccgtcgctagggcgttcgtgaatacgtgatccatcgtctccatctccgtctggtgtggtgtgttggtttgagagactcgaggtgtgggcgtcgcttcgtctggaatcggctctcccatttgttagatagatccgtcatatctccccacgtctgggcgtcgcttcgtcggctgcgacctgcgagacgccggcgccgccgggacggtggacgaagcgatcaaggata

SEQ ID NO: 354707 - DNA, 302 bp, Zea mays
cctgaaggaacggtcattacttgttaaaatttcagagttgcagtctaggatgataatactgactgatgaattaattgcagctaagctaaaacatgtttcattgcagcaagagctaaatgcactgtactgccgagaagaaattgtggatatcagggatgaggataacgaagaaacataatgaggatccatgccgtatgaattaaccgcctctctctgagatgcataaattacctgcctctccctgaggtcaatggagaacaggagaaggaaagcggcggggagaacaagagcagaacagtgga

SEQ ID NO: 354708 - DNA, 302 bp, Zea mays
gtaggaaactcgtactgcctgacagacgatgcagtgctcttgtttgactacgtggaagaggttcttctcgagataagggacaggctctttggtaccgaccctttgggtaaattccctgaaacacaatgtacggccagctccagtaggaagacggctggttcgagaggtggctaagggaatcgattctcttgtaggtaaagattttcacacactttagaacaggtaatgatgaaagacttggacagtgggtcgtggctggatcttggaggcgatactggaagtgttgtagttgagttgtggga

SEQ ID NO: 354709 - DNA, 105 bp, Zea mays
  unsure (1)..(105): unsure at all n locations
ccgcgaccatcctcncccgcgcggtgcaccttcgtcgacgccccgccatcagcaccaccaaatcctctcggtcgacgccgcgccatcaacgccaccaaatcctcg

SEQ ID NO: 354710 - DNA, 255 bp, Zea mays
  unsure (1)..(255): unsure at all n locations
tgtttccaatgagtgaaggatcagaagtcaagaccggtaactttatgctcgatttcgctttgggtggtgtctccgctgctgtctccaagactgccgtcgcccncatcgacagagttaagctcctcctccaaactcaagatgccaatgccaagctcaccaagaagtacactggtatcgtcgactgcttgaccagagtcgccaagaagaaggtatcagcgctttctggagaggtaactcgctaacgtcatcagatac

SEQ ID NO: 354711 - DNA, 218 bp, Zea mays
tatctcgctcccgtcgacctgacagccggcagtccggcatgcgccacgagccttatccccttgctctctccacccaccgcctccccgtcaaacggcgccgcgccgcaaggggcgtccaaggtttcctcgtccttcacccgccgtgagtttgacactccctcccagacctctcgtccctgccgtcgcccttgttggcccacctcgccctggggcacgac

SEQ ID NO: 354712 - DNA, 254 bp, Zea mays
  unsure (1)..(254): unsure at all n locations
ctctacagcgaccaggtagaaatcatttggtgtccagaaatgacgacaaggtcatccatgctcgttctcacgatgatctccttcctcctcacccttcctccggcctactcccaacaccaagtcttccgtgccaccatgacccgccacgaaccgaccatcaacttcactcgggccgcgcacaggtcncgcgaacggctttccatcctcgccacccggcttggcgcagctctgcagggagcgcgcagacccgctgc

SEQ ID NO: 354713 - DNA, 276 bp, Zea mays
tgttggtctggaccaggtgatgtacatggatgggcaagaaggagaaggatagaagcaacattgcaactccaaacatagtgtgtgtctctacttatactatctgtaacgtttcgaagcgcgtcaatgtttattatcattcaatgcgcctactgaaaatttgacgtgcttggtgaggattgttagattgtatatgcctcctattagtattgtgatttttgtaacttggtgagtgtacataaagaagcatgatttttgagttgttttgaaaaaaggaag

SEQ ID NO: 354714 - DNA, 298 bp, Zea mays
gagcgcactgtagcaaaagccttcaccggtcggcaagaacaccaatggctgacgagtcatggagggtgccaacgccagtgcaagaactggctgccactgccaccttggaggagccgccaagccagtacgtgctgcaggagaaggaccggcccggaagcccgctggtcgctgatgacatgccagagcccctccctatcatcaacctcagccggctatcggaagacgctaccgaagctgccaagctcgagtccgcactgcaaagctggggtctcgtcctggttaccaaccatgggataga

SEQ ID NO: 354715 - DNA, 270 bp, Zea mays
gaaccaaaagggcaacggaatacaacatgctcatccaccaattcgcgatacagtgtccaagcgatacattccgtatttcatacaaagaatctcagctttcatcacaatttacaccgcattattatcgcctattcgccttcagaactccaaaccgcagttccggagtccaaacagaatcgtcctgctggaacgacgtccttgcatcgcgaagtgtgcagcagcagtcctagcactggcctgcaggcgacgccgccgagcgcgaggggtcga

SEQ ID NO: 354716 - DNA, 292 bp, Zea mays
tggggttgaattttaggtttcaggtcgtttattttagggtacatagaagcagaaaggaaaggaagatagccttttacttagatgtcattaatttggagcactccttttcttgctctgcccctgtcctgtttgtaatttccgtggggcttcggcaaaaaactgacaaaataggttgtgctccggtttctgatctctgattcaatgggaaatggaattattccttttgctttgcctgtgtaagcagttagcgcctactccgtctgttccaatatacaatttgttttagcatttt

SEQ ID NO: 354717 - DNA, 149 bp, Zea mays
tcctgcccccgtccctggtcggaccacgagagccccggactgcgttcacctctgccttttgttcacccctgcacgcgttctctggcgctcttgtctcgtgcgtgcgacaacaactgggcgaccgccgccgccgccgccgccgccctacg

SEQ ID NO: 354718 - DNA, 284 bp, Zea mays
gtcgaggggcaggggaatgtcgtcgtcgtctgcgtcatcttcggcggcggcgcaccaccagcagcattaccggcggcagacaggagggagcggtctcgtgccgctcgccgcgctcatcaaggaggaggcccgcacggagcgccaatccatagccggcggcgaaagcaggatctccgcgcgcgacgatgacgcggcaggagtaggaagctccggcgtaggaggggaggcggcggaggcggcggtggagtcgcggctggagcgcccgctgctgcgctatgggtgcg

SEQ ID NO: 354719 - DNA, 302 bp, Zea mays
ctaaaagatattaagcttagtagattcatcttatcttgaaagatacttcattaccttagtagactcatcttatcttgaaaagatttcatcttatctgactgacctcaaaagattctaccttatccctatggattcatcttgccctaataagcatatttaccccacactagtgtaacaaccatgatttaatccaaagtaattagaaattatctagtctaatctagttataccaatctaatatggatcccatctaatctaatatggtccaatctaaagtgaattacttaacagactagttaata

SEQ ID NO: 354720 - DNA, 209 bp, Zea mays
ccgagttcctcgagtcgaacacggcgtcgctgagcgtgcagcaggagaagcggctgaagcagatgggcgccacggtgcggaacgcgtcagggtacctcaacagcctcaacgtgaagggcgtacgcgatgcggccgcgcgggcactcatggcggagatgaccgtcaaccagatctccgacctcgtcaccttctagcagacaatgggcaag

SEQ ID NO: 354721 - DNA, 286 bp, Zea mays
gtcggcatgtatccgcccaaggccagcggcgatccggccgccggggcgcgccggtgactggcttccccgtcggcgggcctgccgcctcctcccagtggtcctccggcctgttggactgcttcgacgactgcggcctctgtaagcaaagcaagcaagcatgcatgcatgaactatatatatatatatatatggtcatgtcattaattcattatgtctatgcgtgattccattccagtctgcctgacgtgctggtgccggagatcatgttggggcgtggcgagatcat

SEQ ID NO: 354722 - DNA, 255 bp, Zea mays
gtgtgtgtgtgtgttcaggtctatccgagagcaaggtacgttgaatctgcttttggtcgccgccgcctttccttttggccctgcgttgcgtcgtgtcttcgacattggttggtggccgtcgcgccaccgccacgccgtggagccaccggtgggccggccggaaccggaaggcaggccgccgccgggtgctcggctttgcctagcgccatccatcgagatctccgtgccacctactgcgtgttgcctctttgagag

SEQ ID NO: 354723 - DNA, 309 bp, Zea mays
cggctcgagattttagcctccttttgggcatgtggttgtattttgttggaccttaatgaacaataatggatgcatcctgccccgttgttccctttcgatcttcaatagaatctagaaattttcttctgcttgcttttgtctggcgcaatgggaaaatatagaaaatataaaaaaaaccctattgttttcctgttgtgcacattacagaaaatcatttttgtaaacaacaagaaaatacatcaagcaaagtgacgagatgcacaagtgaaaacaactccttttcctgtacacgaccggtgacaagatgtg

SEQ ID NO: 354724 - DNA, 311 bp, Zea mays
atttttgccttgtttatcgtaaggagtatgttatcctttttttttcttatttatgattgtgcatacttaagatattacattgctagaatgtgtggtccacagagtcctttgggtgactgttaatattgttagaatttatttattactagaattcacagttcctttctttagtttgctatctttgtgacaaagtactgagctgagagaaatataaaggaaaagagtacaaactcgtatgcaacatacttcgatttggaccatgagtgtgatagttcaatgcttgtgtaacagatgcttcaagtcagtcaaag

SEQ ID NO: 354725 - DNA, 247 bp, Zea mays
gatcatcgtccatgcgggagatatccatggactctttggaatttgatgcctccgagtccctccttcaaacctcgcttcattgcttctgttttgttcacattgctctctttttgaactgagcaaacctatctcgactgaatcatgatgggaattctagaaaagtctcgagaaccagactactcgccagttcctgacgagcggtccacttcgtcgtccgatcaacttctcgactatgaagaccgcttgg

SEQ ID NO: 354726 - DNA, 310 bp, Zea mays
ggccggccggcgacctaccgatggggttcatggacgccgaggagctggtggtgacgctggcgccggtggccgtgtactgggcgtacgcgggcatgtacgaggcgctgctggcgcgcaccacggcgctggacaagtacaggctgcactcgaggcgggacgaggagaccaagaacatcgcctcccggaaggacgtcgtcagaggggtgctcctgcagcagtgtatccaggtcgccatctccgtcgccgtcctcaaggtcagtatatatgtagctgctggtgctggagctctctccacacttctcatcagtgt

SEQ ID NO: 354727 - DNA, 306 bp, Zea mays
gccacgttcgtgaccctgcactgcagctgcagcagcaggtaacgggtgatcctatcatgggcgacgacgtgcgtggcctgcgcgccgccgccgtgccggcgaagacgccggatgcgcgcgcggctccacgtggcgatgctggcgctgcagttcgggtacgccggcttccacgtggtgtcactgctggcgctcaacatgggcgtcagaagctcgtcttccccgtctaccgcaacctcatcgcgctctgcctcctcgcggtcttcgcctacttcctagagaagaaggacaaggccgccatgacgcccg

SEQ ID NO: 354728 - DNA, 177 bp, Zea mays
ccggcgtggtgtgcctctgcctcctcctcgctgccagctctgtcaccgccgcggcgcggcagcggccgacgaggagtccctgtcgtcctacatcgtgcacgtcgcggcggagcacgcgccacggtcgacacgcccgcgcttgctgtcccggtcatacagctctttcctgcacgagag

SEQ ID NO: 354729 - DNA, 225 bp, Zea mays
gcagctcggcctctgcttgcgttgcgttgcgtgtgtatgtagtggccgcaacacaaaatcaagagacgtgatatatgcgacccccaacagccaacgaccggcctccaagcgcgtgggggtggagcagcacagctggtgcagcagcacgggacgacgacttcggcttctactactcctacctccaggacgccgacgccgccgacgcctcagcgacgtccaggctcg

SEQ ID NO: 354730 - DNA, 166 bp, Zea mays
tgcggcgtcggctcaacttcggggcgtcggctcgggatcgccttcgccggcgtggctatcgcaatgcaggtcgtcctcggcgccttcctcgcgctgcgcgcgtggcagctgcggcggctcgacaaggccgaggtgtcctcctccacgcccctgcacctgaccagcg

SEQ ID NO: 354731 - DNA, 125 bp, Zea mays
ctgcaggtacccaagaaaaatacaacactacacatgtaaacttgggtagcaatggcactacaagaacactcttatttggcacatcatgcatctcaaaagtcactctacaaaaccgagtaaactat

SEQ ID NO: 354732 - DNA, 257 bp, Zea mays
tgtcgagccgctcgagccgctcgagggctcaggacgaagagattggaatacatgcccatctacttgctattatccatgtttctgatgatgctgatcttcgtcatatacggagtgctgcttggtgatggcttcatatatattccaaatggcattggaaccatattgggtatcgtacagttgctgctgtatgcctacatcagaaagggatcaagcgaggaagccaagctgcccttactaatcacacatacatgagcatg

SEQ ID NO: 354733 - DNA, 319 bp, Zea mays
tgacagattaactgagcagtagatgtggatgaacgtcgatcgccgatggacccagaggaaagtatccgcgcgacatgacagtacgagagaaaatccgcctctaaaaacgttcacggcttgtgtcgctagaatctgcggcgtgagatgcatgcatgtgccacgccacgcctctcaagagtgaagagtacccggccaaagcacgacagctatgccgctcgcttgccctccattattgatgtgagagggcggcatggagctgatgcgcgcgaaagggaatgtttcggcgcgcgatctttcgcgtgctctcgggtcgaaagag

SEQ ID NO: 354734 - DNA, 306 bp, Zea mays
cgaggataccaaagcacttcatattgctatatattgtgtgtattgtggatattatatataccatcaacatatatcatatattatatcttctatccttgctatagaatatcatcatgctcactcgaacaatcggtgggtgggtgacgtgggtggtgttggtgttggtgttggtcgtgggatgccgcgcccaagcccctgaccctgccattctcattaatcaaatgaccactgatgaaaaatactctttacttcgtggcataggttgggcgggctggaaccccaagaacaactactatgtagggaaca

SEQ ID NO: 354735 - DNA, 313 bp, Zea mays
  unsure (1)..(313): unsure at all n locations
aanaaaatctccaaattgaggtttttgggtgccaggattgcatagtgcagtcatgttatttaagcccacagtcccatacatgctcacaagaagtcaaggaagttggatcaagtagtgatatctcagataccattctaaaggagtctgcaaacagagatgtggcattaggaataagttttccagaaattgatgaagttggttatccacataataatctgaaacaaaaattgacattatcttatcatatggatggacataaaagtgaagagcctaatttcattaccaagaactcaactacagagacggtacaact

SEQ ID NO: 354736 - DNA, 310 bp, Zea mays
tgtcagttcagcatcgttgtttgatactttgttttgtatttttgccctcactcatttgtatgtatatgtaattgatccataaataattagttcaaggtttagctcatgtggccattgtattgttgccgacgtgcctgaatatttttttaacaaagagaagattccgtttactttttttttctgttacttttacatgagtgatttgaaatgatatgtgcctagaatcttatgttatcatctgagagggcatccatttccagaaaaatattactatatatcttgttttgattggattagtcctagtgtcctg

SEQ ID NO: 354737 - DNA, 311 bp, Zea mays
cgggatcatcctggtcgagcaggtggcctcggacggcggcggggcctccgccgcctcgtgaggcggcgcggcaggtcgtgggggctggtggtgcaggcgcgcggcatggagcgcgcgtcgtgctacgtgctttccacctgccgcgtgcgctcgtcggccgggttctgcacgcacttctgcctcgcgcgggcgcagtgcttcggcgaccctgtcgagctccagctccgcaacgcctggctcaaccgcctggccggccgccggtagccgcccgtcggctgctgctgctagtgctactgatactactaatagga

SEQ ID NO: 354738 - DNA, 302 bp, Zea mays
agctggctcccaggctgctcagctggtgctggatatccgcaagatgaagggtctcaaggaacagatgatcccactttctgagtttgaggacaagctctaaatttgtggttgttggttacactgttacagctgccggttcaatcgtcaattggttttactgtaaatgcagtgtgtgctgctgtgcggacagtctgatgctctattttaatatctgttaagctatctccagcagcttactcatcccacccgttatcttaaactccatgctgatgagacagttggtatatgtggtcttgtaagtg

SEQ ID NO: 354739 - DNA, 302 bp, Zea mays
atccatctggagagggaaagcaagttagtacgacgtgttttccttgcccaacaaattttgaatacaatccatcatcccctattccttgcttctgtgctgcgcctctgggagttggatttcgactaaagagtccaggaatatcggacttccgaccctataaagaagcctttgagaatgacttaacctctctgctggaattgcgtgtttatcagctgtacattgaacgctacatatgggaggctggcccaaggctgaatacacatttaaagttattcccaaataatacaaatttattcgatatg

SEQ ID NO: 354740 - DNA, 283 bp, Zea mays
agaccaggaaatgcacttgggagtactacgatgataaagatgaagtgaagcatgagataaggtcgaacaaactcatgggagagaagatgcagtgtggatctcagctcattgattcgtacattaaacagtgcggacagaagatacgtaggtttgccgaagaacttggctgtaatagcccgatgcgtgttgagcggagaaaaaggaaggtggcttacgagaagagggcacaggaggctagggaaatgccggcggccagagccgaggaggaaatgctggacaatct

SEQ ID NO: 354741 - DNA, 281 bp, Zea mays
cgagttcgagcgtacttgcgtagggaacccccggttgcttgctcgtcagtcgtcactgtactagagtccagaaaccgctggaactttacgtagtaaaacaaaacataacaacacaggtaaggtgagcacagctaggagtttcgtactagatcgatcggtagatatggcgagcatcggcgtacgggattgccgagccgtgcttcggccgaattggtggatctggtattgcgatacttgatcttcttcttcctcctctcgctattattcttgtccttctgcat

SEQ ID NO: 354742 - DNA, 276 bp, Zea mays
attcttttgtgaagaaaaaatagtaagcacaaacttgttccatacttattcattatcataatattttttggctgagagaatttaaaaatatcgaggcttcgagcgtatccgaacgtcaacatggacaatgctagacctgatcaagcgatcgtagaccccagtcccagccaactgtcaggatatatattagtttgtttcggagcttaggttgtaaacatcaaaattaaattctctttgttaaccaccagtacaattgtagtcacatgggctgcccag

SEQ ID NO: 354743 - DNA, 325 bp, Zea mays
  unsure (1)..(325): unsure at all n locations
cggctcgaggcggcgtggaccgcgcgccagggcgcatgcgccaagcccgtcggctgcgtccgaggcgaccgctgcttggtctgaacccggcggcgtgcctcccgcttcagaagccgcagcaccaccaccaccaccaccacgcgccggcggctccggcctctggcatgcgtgccgtgttcctcaccccgtccggccccaagcgcgagcgtaacggcactggcgtgtttcttcccaggccggctggcgcnccggcagagccgaagaaaaagacagggtgttcgacggttctggtccctgctcgcgtcgtccaggctctcaacctcaa

SEQ ID NO: 354744 - DNA, 309 bp, Zea mays
tgtatatttcgccaatgttacttttctgttaatgctgatcatgaacgattttggtctgatttggtgtagagaatcaacagtctctagaacacttttatggctgattggctacagttcggctctgtttttgtcatatcatttagtagccaagttcctactgaagattttagtacggatcctttctaattaagctcactgtttggaaattgtgagttgaagctatcatttgattctttggagcgcatggatttgacatcaatgttaagttttcatttgtacaaacaccataatcaatgattgatgattgca

SEQ ID NO: 354745 - DNA, 303 bp, Zea mays
ctcctagcaacattcatccatcaatctatcatcttctccttctgctgaggaagacataatgtctcgttccggtggcacaactctctacgtcactggcttcggccacggtactcgagcgcgcgatctcgcctacgaattcgaacggtacgtcccaaccgccgatggtccacgacctcgacctcttcgacccctgcccgattgacttccattacccccctcctcgtatctttcggtcagatctgtcggcttcagaaatcgtgacgcgttctcattgcgctcctaaacgtcgttctttacctcctt

SEQ ID NO: 354746 - DNA, 296 bp, Zea mays
tgagaatcttaaatcgcctcctcacccctcctgcctcaccagatttgatgcacacacatgcaaatcctgcaggctgttgcttctcagcagggccaaaagctgttcctttggcctagcagtagctaccactagtaccaggagatcttcccgtcccaactcccaacatcttcgacagaggaatcagctgtgggagctcgtgaggcagagacgagctgacagacactcgtgtgtaagggcgggcagagacaagatggagaaggaacacatcaagatggccatgctgaggcaagagcaaa

SEQ ID NO: 354747 - DNA, 297 bp, Zea mays
ggaaacacatcctttacatatatctccatgcgcatcatattgcatgcattctgaatctgttcatgctccggcctttatgacgctgaatgctgatgtcccagactcacacctatatatactacaacacaaaatacacaacatatcattgactaacaaatccaaaatttagtggctactaactctgctcattccctcccttgtataaaaaaacatctacttgtattgcatcgggcaccattaattagttgttgtaatactccatcttgcttgggcttgataatcatttggatccttgat

SEQ ID NO: 354748 - DNA, 295 bp, Zea mays
ctttcgccagctcttcgtctacagcactgccacattagtacttagttaccagcagtactactcttgtgtagtagcttttaatttcccgcagctagctagctagtttctacttccgcccgtccgcgctcatctgcgcacgtacgtgcccccgtcagcaatggagtccgatcgttcgcgctacttcctccgcgatgtcttggacctcacgggctgtgcatgccggcgccggcgcgcacccgctgaactggggcaacgcgcgcagcgcctgtccgggagcgcactggacgacgtgaag

SEQ ID NO: 354749 - DNA, 284 bp, Zea mays
cgctccgcgacgtcctcgacgacgccgggatagggggcaaggcctcgcgcaatctccgcctcaagcgcccctcgggccgcccccacggccacctcgacgtccgcgtaccgtcaaggagccgtccaggtactatgaccccaatccctacccggcccccgcgggctacgccaacgcgggcactcgtgacccctacggctcatccgcggctgctggcggctactacggctccggaggaggctatggcagcggcggcggttacggcggcagtggcagctacggcgccg

SEQ ID NO: 354750 - DNA, 288 bp, Zea mays
atgaagtatcaaatctcatattgatccgtacaccagtaggctaacttacactgttacacagcattctactgatttttaccggagcccaaaacgttcactggagatctaatatgctagcactaatctttggtatgaacaggttcactatatcttccacaaagatccattgaccaaaatcctccttcggcggtcggtgatcatgaacagccgatgaaatcgtgcgcaagagttgtacgactgaaagagaacaggagaaattcgatgctcattgcaactccttgtcctgtc

SEQ ID NO: 354751 - DNA, 259 bp, Zea mays
cgcacacccaaaccaccccgccacacaaagagcaaaaccctctttctctgaccctcagtcaacgccgcgaacttgggtcttgcgatcgagggatgaacccaccaaatggctcgcgtggagaggcagccgcggcaccctagtaggctcgcccctagctaccacccggagacggagcgtccgacgacgccggctgatcgccgcaccggcacgccatggaacgctggcagggtaagtttgtgaacatgtgtttgcggttcag

SEQ ID NO: 354752 - DNA, 180 bp, Zea mays
cttttctttaatacggaaaaagagtacaagcaaaacttacaagatagtgatagagaagagataaccataggtcagatagctcttctctaccgcaaggcatggcgctccatgaatcggcgtcgcatcctctcatacacaaccagcatccccaccgccacggattcatcaccccgtgccata

SEQ ID NO: 354753 - DNA, 302 bp, Zea mays
cttctagatcgcgagccgctgcccttttttttcccgcctttttttttctgttttctttttgaaccaaacagcaattgtacaagtacattcgacaacgcgccaccagtacatacagcaatccttgtgtgacacaatcacacaatagagcaacaacacgatcgatcgacgcgactactacaagctagccgtattatcgtacgtacgtacacttcttacgtaattactagccgctaataacaacaggacgatcctgcagctgctaatggtatgcgtgcatggttggttccatgaccacaccgtag

SEQ ID NO: 354754 - DNA, 305 bp, Zea mays
caggaaaccctgtaccaaaaccctcgtcactccatcctcgtccctcccggcgccggaaaaaccagttcgcgtccatcctcctcccctcccacttcgccatggaccccagcttccggttcgacccggacagctccgacgacgacgcggcgggtgctccaccgcggggcggcccggtgcagtcgccgtgggagttctcgtcgtacgcggagtccgtggcggcggacacgcgcaccgccgcaccacctccatcgacgagaaaatctcgctcctgcgccaggaacgcgggagatccgtcgttcccgatg

SEQ ID NO: 354755 - DNA, 298 bp, Zea mays
  unsure (1)..(298): unsure at all n locations
acatcattgctgtttgttctaggatttggcgcatataaatcctgcgtaacataatactggcatctattattatttattgtgaaggtttatttcattcggttgcttggttttcaaccttattttcttcaaggatgtgatgtaaagctatatatgtttcacttttctttggcaagtttttcatcatatgtttctattttgttacaggcaccgntagaattgtggactacacaaattatgatgatatgaaatatgctgtaagtccataatacattcccttgtctcatgacattggcttgtc

SEQ ID NO: 354756 - DNA, 303 bp, Zea mays
cgcgcttcgtgccgcccatcgtggtggagatcgccaagatgcctcgcgtcactcgtcgagaactacaagtccatacgagtgctagtgtccggtgctgcggtcttcgtcatcttatacaagacgccttcgtcgcatgtgctcggagtctgccgatgccagcatagataggcgtcgccgagccgggccacgtcacggacgtcggacatggctgtcgaagcgcacagtctccgcttagcaggaggtcacaagcaactcaccagcgcgggatggccttggactaccggcgacgaagctagacgcgcg

SEQ ID NO: 354757 - DNA, 304 bp, Zea mays
acagttccatgatccatggcactacagtgctacagcacagcggggcgtattatatagtatgcgatatatatacgagaaggcacaataatctacatactgtagtggtgctctgtatgcggctgatgtgtacagtagtagtatttttttttctccttttgttgatgaggtgttcttttctgctccctttcttattttaccatcttttaccgaagaagaagaataataataataataataataataataataataataataataataataataataataataataataataataataataataatgg

SEQ ID NO: 354758 - DNA, 311 bp, Zea mays
tgccggacactcaggaatgttctactacatgctcaggggcttatttcatctttgcatctgtatacgctgtcttagttcaagtaacatggcattgcgtggggatatttttggcttcatcatcaactattctctacatcatgattctaatgtcccggaaatgtttaagccatatgccccagtacttgatgctaaataaggttttcagacattcatggaacaacattcatcttcgcagctgtcaaattctctacttggcaattgtcttccaagatgcatccttaagctccactgtgaatgttgaatatgcacac

SEQ ID NO: 354759 - DNA, 301 bp, Zea mays
ttcgtctgtttcaggccctcacatgttgaattgttgatgctaaaatgtgctgcatatatatatatatacgatgaaaactatcgtcaatgcttttgatcaagctcgtctatctactgctgcgactgataagttggttcgctcgctgtgcccgtttgtttccctgctcgtttgttcagtcccgatacctggtctggtgatcgctggaccatggacgccaagaagattaagctgcacgactaccacctctacggatcgcagcagctgtttcccgcggccggggggctctccttccacccggctc

SEQ ID NO: 354760 - DNA, 299 bp, Zea mays
cctctctctcgtccggtcctccctccccttcctgaggcgttccctctctctcctcccctttcctctgctggtctctactctcttgtcatcgcacccgtctccccgccgccgcctcgtcccgatcgacccccgaatcgccggaaaccgtggacttcgcgaggttgtgtctttacctccgagcggtgtagggaatataacagggtgacagctgaattgcagaaaaaaggaggacatttggttgttgcatgatggtggaaggccccaatttcgctggcctgattggtggtcatgacaatggt

SEQ ID NO: 354761 - DNA, 148 bp, Zea mays
aacgcatcgctccccttggcatccaggatgacagaagcatcatttctgccacgtgagacgctcttcaactgcaacatcattctaaaatgacagacgcactactataggcgtacatggatacccgtgcacctctcattgtgaccacagt

SEQ ID NO: 354762 - DNA, 176 bp, Zea mays
  unsure (1)..(176): unsure at all n locations
cgaatatcagcatctggcttcgatggagttgctgcctcnctacgagcgagcgcactacgctccagctcaacgatgacgatgtctcccggttcaaagatgcattaaatctcgtcgatgatgaacaccaacgttgaatcacgaccgaagatcatggtactcacaagcgctctcaaggg

SEQ ID NO: 354763 - DNA, 153 bp, Zea mays
  unsure (1)..(153): unsure at all n locations
gtcgncgncgccaacgccgtactcacggtgtacccgattgcggactacagcctagtcctcgtcgacgtacgatgtggctgcacgcccggtggctactaacagcactactcctcctacagcatcgagttacagagcgagacgtacttcatcatc

SEQ ID NO: 354764 - DNA, 205 bp, Zea mays
  unsure (1)..(205): unsure at all n locations
acagaacctacgccttcctagaggatatgcttatgttcctcgggactctttatctanagagaagctatggatacaagatacacagccccataatccacaggagcctggtggataggatcagttgaaatcaagccggttcatttctatcgaggaaggccataaaaaacttgtgcaagcttgttctttgcaactgaaaactacaagc

SEQ ID NO: 354765 - DNA, 178 bp, Zea mays
cgcttctcgcgctcgtcctcctcctctgctcctggacagcagagcacagcacaacacaccgagatagaacaagcagccgccaccggagctcagaagcaccatcagcagcagcagcacacccggtcaaccttcgacacacgcgcgcacacacacatggcgtcgcagcagaggccacagc

SEQ ID NO: 354766 - DNA, 362 bp, Zea mays
  unsure (1)..(362): unsure at all n locations
cggctcgacggctcgacgtcgcccgtctgcanactgccgcacttactgatccggctccacatctccgcctggaagacgagaaacgaggaagacgatcccacctcgcctggagaacgcatctcaagacttcaaccttcctttccggccggagatccgcttcgcatctccgcgacagatccgggcaaacgggccgatgcagttcttcggcggctcgtcgctgacgtcggtcgcgccggatgcaccccagccccggcggcgacccctggtacgggcacgggcgtcacgcgcaggtcctctacgtcttcaaccgcaacggcgtctgcctgctctaccgcgagtgtgcacgcccctccgcacgctcg

SEQ ID NO: 354767 - DNA, 280 bp, Zea mays
tacgcaggtacgggagtgcacgtacacagcggagggagatctcgggctctcagagctgcatcatgtacccatcgcgtagaagtggagatgagtcgagctgtacgagtcgctctctctcgatcagtacgtttgacgatctgggccgaacttcttgcaccgacatatgggcatgtgacatgcacctcactaagatgcgaactaagagttgtgcaagatgatacacagttgctactgtggcactgtccaatggcatactatatgggtatcattctaaagtctg

SEQ ID NO: 354768 - DNA, 311 bp, Zea mays
cactcaaagtcaaacgtgaatgcttcatctgcgagcctaacaactggtggatatgcttcagcgctttctacaggtgaggcgagcacatgagaagcatacagtagtgacgaaggtggacaagggtcttcatcacatgcagtgcctatcaagtctgatgcagtactatagctagagcttgatatcactccatattctagaatgctaatgaattgtgaagcagctgagctagtgctagatatcacgagacatgtcatactatcagagacctcagatcaaattccggtcattgacaagcttcagtatcagagatg

SEQ ID NO: 354769 - DNA, 285 bp, Zea mays
caggaccttggaggttgttaaggagaaagaaaatgaaaacacagagttgcaggagaagctgcagcagcttgaatctcagctaatggaagcgaacagaatcagagaggaaggcaacactgaaactatccgatggaaggagaacatattagaccaagagaatgaattacagaacataaaacaggagaatgacgacctgcaggcaaaggaatcagcagcttctgagaagattaagaactcccttcccagcttactaatgcaaaagatggcacgataaatagtaacacc

SEQ ID NO: 354770 - DNA, 284 bp, Zea mays
cacaacctcttctcccctgtttcctctcgtgcgttctccgcaggcgaggagggctcgcggcagcggcagggtctccgggtacgtcgtgaatgagaagagaaagggttggaggaaatatttccgaatctgtttccattacgattttggtggcgtagaatttggtttcaaacgcgcagttatgcgcacactagatcagatccgacttgttctgcggcattccgattgcttggcccttttttgccgattagttatctacgtaaaccatggtcggcataatgcgtttt

SEQ ID NO: 354771 - DNA, 276 bp, Zea mays
gcactatcactcactgactcaatgagtgatgtctatgtacacgtcatcacccccaacacacagccaccacatcagaccacaagcaccacacaaaaaacaaccgtgccatccgccgcgtcctctgccgcgtcctctgccacacccgccccgccggcttcacttctgtcgttagcgggcggtgtggcggtggcggcgagcagcgcacgggcgagcggcggtggggacagcggcggtgaggacggcagcggcacagaaatggcagtgaaatgcaaaaac

SEQ ID NO: 354772 - DNA, 277 bp, Zea mays
gtcgccgccgtctacttcaacgcgcagccgagaccgccgcccgccgacgctaaccgtacggctcaacgtacgaaagaagaccatcctacgacgcttgcaattagctgggcaagcaaagctttttttttatcctgagtcgatctttacgtatgtatgtttgtttaaataaaaaggtagctaatcagctgcttggctgtgaccccacgagctagcagctacaacctactggtacatgctgcacattttagctgatttatgaaggtgacaatatgattgg

SEQ ID NO: 354773 - DNA, 277 bp, Zea mays
atcgtgatgagactgaccataggttgaagtctcttgagaaacatctaaatgaagtacacaggtctatccaaattcttagggacaaacaggagttagctgaagctcagaaggaattggccaaatttcagcttacacaagatacatctaaaaagaaggaagatgtaccaacatttattcctgagcaaaagaagcctgaagaaaaccctgacacatcaaaccagcaactggctcttgttttgcctcatcaggtgaacctgccatcacttgcccctagagc

SEQ ID NO: 354774 - DNA, 271 bp, Zea mays
gagagtccgaagcccgggcattcagaaatgggcaatgaagaggagagggcgaatattcgatcagtccatcatcatcccgagcttgaccaggctgagggcggaggtgacgacagtgtgcaggctgatgacgagacacgggatggagaagagatgtgccatgatgccaatgccatacagcagcaggttgaagagcagagcagcagtagctgggaagacattgatggcgaaggaggcggcggcgggaggagcagcacgcggcgtcagtcaactc

SEQ ID NO: 354775 - DNA, 221 bp, Zea mays
  unsure (1)..(221): unsure at all n locations
cccgccgctgcattgcctccccggcgtctctcaagtccctcgtctccgccatgtcccacggcgagctcccagcgcgggccggcgccgccgtcgtgctccgcgaggtcgcgtcgtcggcacacgcgcacacactcgaggccgtcctgacgaccccgggcatgtgcgacacgctcgtcgacctcgtccggaacnccgtgtccacgcaggccaccaaggccgcg

SEQ ID NO: 354776 - DNA, 271 bp, Zea mays
ctctctcttgttcctcccttcctctctctaaaaaagggttctgatacctttctagaagctcctgggtttctgttgccgacccgagctccccaggggcgctcaggaggcgccgagccggcgaccgctccggcggatctgaggagccgccgcggtcgctttgcctccggttccttgtaaactattgattgggaaacactctgaagaagagtttgttggctgcataacatctcctgaagctggtttgaagtttgctgataggaaagatcatggg

SEQ ID NO: 354777 - DNA, 274 bp, Zea mays
gactgatctgtgccatccgtccgttcccgcgagcgagagatgccggccgcagcatatggcgtccgccgcccaccggtccatggggtctgccctcctgtccctcaacctcatcatgtacgtcgtcgtcgcggtcatcgctggctgggcaatcaactacagcatcgacgagagcaggaactcgctgaagggcgcgacgccgccggtgcgcctgttcccgatctacttccccatcggcaacctggcgacggggttcttcgtcatcttcgcgctcgtc

SEQ ID NO: 354778 - DNA, 263 bp, Zea mays
  unsure (1)..(263): unsure at all n locations
tgcgaaatttactgagaaactggaagaagtacataccgcataccagaagatggcgaaaagatgtcagttgttgggagcaagnagaatgaaaactatgaacagagataagcacgagctgcaagaaaaatttgctgagaaatccaggcagaagaggaagcttgatgagatgtatgaccaactgaggaatgaatatgagtcggtgaagcgttctgcccttcaacctgcaaataactacttagcaagacctcagccagacttatttg

SEQ ID NO: 354779 - DNA, 258 bp, Zea mays
cacatgcgagcgggcgcacagcgcgcggttgactctcctcgtgcaatgagcgccgccgcacgccgcgccaccggctcggggtcgcgcttcttctcctgctggtcctcggtggcgccgacgcgaaggcgcacagctacgaggacgcgctgcggaagagcctgctctacttcgaggcgcacgctcgggccggctcccgcacagccagcgcgtcacctggcgccaccactccggcctcaccgacggcctcgagcaaggggt

SEQ ID NO: 354780 - DNA, 259 bp, Zea mays
aggctcgagaacaataacattatccaccacacacaaaaatggctgttggaaagaataagaaattaggtaaaagaagaagggaggttctcgtaaagtagctgatgcatttgctaagaaagaatggtatgatatcaaagctccttcagcatttcctattcgtcaagttggtaaaacagttgtgactaaaactcagggaactaaaaatgctaaagattcattattgggcagagtatttgaatcaagtttaggtgatttaaaa

SEQ ID NO: 354781 - DNA, 146 bp, Zea mays
  unsure (1)..(146): unsure at all n locations
cgcgctggcgctcctcctcctgctggccgtggcggcgtccgcgtcggccagcagctgggagccacctnggatctcgacctgggcttcctctcctctggggaacgccggacggagtgccgcagcacggtggccgagtgcctcgccga

SEQ ID NO: 354782 - DNA, 283 bp, Zea mays
cacgaagccaccatcccgacattcgccgctctttctccacgcgccggtcgccgcagacgcaagcccgcccgccgcagctgacgccgcgatccgcgagggtgcaagctagctctggccccgctgccggtgccgactgagctggacccgcgcttcacgctgccggccgccattggcgcggcgccggtcgggtgcaccaccggcgggcccactcggagtcgttcctatgcttctccgacgcggacctgctcctcgaccctgacggggacctctccttctccgacct

SEQ ID NO: 354783 - DNA, 295 bp, Zea mays
  unsure (1)..(295): unsure at all n locations
agcaattttanaaagcttcttcatcatctataagggaaggccgaagttgacataataagaggcaacaanagacgattggaatgcatccanatatttagctttgaatatgaatgcattgaagatatgctgaatctcaagttctcaacttttgtttttgttgccttgcgtctatcncaacttgctttcttgttgttgttggtgttgttgtttctggttaccatttgactacaatcgtgatcactagatgctatgaatgaaatgcctttgctagctttgttgcatatggcatcttggt

SEQ ID NO: 354784 - DNA, 293 bp, Zea mays
  unsure (1)..(293): unsure at all n locations
cccaggccgaatatacttcaccactacgctgtacgaaccacttcttttcaactccaccctagggttcctttctagcacttgatctagtcggcctagcttcatattccagttctcgtgacaccatggtcaccaattcaggggcaactcctgtcggagagtcgcaagtaactttcaggccgcttcatcctacgttcgcggcggaatgtaatgggatcgacttttcacaaccagttagtgaagaaaatgtcgaaattatccgcaaaggtctagccaagtatggncgtctggtgttt

SEQ ID NO: 354785 - DNA, 294 bp, Zea mays
cgcaaagatagttcagccgcaattcgacactccacattacgccagcacatcataactgccttcaaatccatcattacgaacaaatttgaaactttttagtgcaagcttttgttacattttttaattcattatcatcttggcaataatgaacaattcgaattgtttaaatgctgtttgtgttgccgtttccataaaataaaacacataaactttcaactgacttgttaactaataaaaactgattttaattaatacaataattgtttggttttctaattaaacacaatttagttg

SEQ ID NO: 354786 - DNA, 280 bp, Zea mays
caggggattccgaagaaggcgactggattgaggtgctcggtgagcaatgtgaggccaacggtttggtaccaccgaccaaagaggtggccaaggagacggccagcgaagacgagtgccagctcctgatcctgagtggggtgttggaaacagaggttgacttcgtcgacgccgatgcagagggtgatcatcgtgctaggtgttctgtagatgtaggattagctactgttccgtcagttgagcagctgcaggaagagcagccaactgtttttcttacggaggc

SEQ ID NO: 354787 - DNA, 270 bp, Zea mays
taacttcacaaataccaacaagtttgcgaaccagtggctgttgccgctttcatctttcaagaggagctcatcggtgatcacttggcgtcacgcagtcacgcttgccgtcctgcggttgcattagcacatcgttgttaagactttacacccgagaacgttgctacgtacgtcgtctgagatgggacaataaattgggaatatgtatgtacaatgattctagctcgtaactgatttccgcaaaccctatcatagagctatgatagcaagcaa

SEQ ID NO: 354788 - DNA, 266 bp, Zea mays
cgaaaaggctgcgacaattcgaatcaaaaatccatccgagtcgaatcgagccagcggaaactccgcggccgatctcctgtgctctcaccgcccgcctcccccgattctgcagcccctcgctgcgaatctggacgcgatttcgaggctagggtttgggaggctccggatcgcgagcccgtgcggaggcaagggtttggattcgggggttgctgctgcatgtcgggggtgctggattaagctactccgcgcggcctgtgatcgtggtg

SEQ ID NO: 354789 - DNA, 263 bp, Zea mays
gcggcggctatgggcggacatggccacccttactcgccggcggactgcagctgccggggttcgtgccgcagcggctgtcgcaggcccagatcgtcgcgcctttcgcgggcacgccgtgttggccgtgctcggcgcctggctcgtctccgggagatgcggcggcggcggcagactatccaggaccgaccgcttgctcatgggctggtggctcttcaccgcgttgacccacctcgtcttcgagccacccttcctcttcaccccgg

SEQ ID NO: 354790 - DNA, 228 bp, Zea mays
tacggatccaaccgagggactgttcagttagtctcgattgcaggcctccatttctccaattggggggacttcatgcgagcgggcacggatccaacgctggagcctccgctccaacggcctctccctcctcaacgcctccgttgccctctccctgttcggcgccgatggacaggaagacgagggaagggcgcccgaccgcaaccgatggccatggcatcacactgtgcc

SEQ ID NO: 354791 - DNA, 285 bp, Zea mays
gtgttggaaacattgctgatctgttgggaactggaatgagcattctaatctctaaaagcaatccatcactggtaacagcactagatattattttataaccaggtgagatctattgtactgaatactctgaatacggcaaggttcactgtggctgtggattctttcatcaggactgggtatgtaccctcattgaaggatggaaactcacaagagacaatatttaatccaccttggcgacattcgcccgtcgcaataggatcaagatttggggaggcgtttcaagaa

SEQ ID NO: 354792 - DNA, 288 bp, Zea mays
gtacgtgcttgtgcgcttgcagcgttcgcgtggctgcgctgcgacagggaggacgtggatgactgcgcgggcttcctgcgcgcccacaggatactgacgcggagggtgaccagttcgtagcggacccgatgtacgtcctggtcagcatgctcgacagggacgacgcctacgacatatttgtgaagcgtctctcgtctctgcgatgaagacggtaggctactcacggtcacggagatcggcctagttggagaggagtgtcgatgccacccggccggccggcgtcggcat

SEQ ID NO: 354793 - DNA, 286 bp, Zea mays
aggtgcaaaatgatggatggtgtgacgcgttgtaaggagtgtgtgcgtcgtggtcgttcttgcgacggaaccggtgtccctttatcggcgttgaatcgtatcacttctgaacataaaagattgcgtttggaagagaaagaggctgcggacagcttgctgagtatcaacagaaagccgctgaagctttgtctcgtttgtcgcgcattcgttctcagcgcgagtctttggtaactcggggtgcggagatggtgaatcgtgggttgaaaagtcttgacgaattggatga

SEQ ID NO: 354794 - DNA, 101 bp, Zea mays
agcacgtaatccgccttcgagcgtcacccgcccgcagtccgtgtggcctgggcgagccctttcgtgcccattggtctaaaatttaacaattaacctttaat

SEQ ID NO: 354795 - DNA, 179 bp, Zea mays
aattctttctggctttgccggattctctgtttttaaaattcccaaatttggcttggaaataggacttttcattttccaaacatttattccgattttagggcaaacttgcagaaattttagaggacgcatcattgcacaaaaaatctgaaacttggtctgttttcttcttatgtgctgct

SEQ ID NO: 354796 - DNA, 110 bp, Zea mays
  unsure (1)..(110): unsure at all n locations
gcctcagtctcatgttacttactttaagcacagcattgatgatttacgtaccttcaagctgatgggacacctatttgacgantgcaggaacacgcgagaagcattggtta

SEQ ID NO: 354797 - DNA, 275 bp, Zea mays
agcgtatcaagcatcccacgaagaaatcgtccttccccgctcatgcggttatcactgttgcatgcctttgcctgctaccagtatttcggcccagcgttttggtctgagctttgtgcaaagtttgttaacgccgtgaaagagttcgagatgtgcattcttgatttggtggacacattagtagcgtgtttggtttgaggaatgagatctctctcactcactttttaaaaaaaaaaagctaaaagaagacaagcaaaagacagaacaagaacagcccc

SEQ ID NO: 354798 - DNA, 291 bp, Zea mays
gcctcggagcgccagcacttcatccgatctccttctcacctcctcacctcaggcgcacaccgatcactctcttccctcctccagcagtccagctcacacccaccgcgccaccccttccactcagatccagggacatcgcagatccaccggctctccgatccgctcgcctccgcacccgcccgatcggatcccgcaggttttgtgcccgccacgagttagatggtttacgatggcgccgtgaaggaccaggaccaggagaccgtggcggcgagcactgcatcggcggcatcg

SEQ ID NO: 354799 - DNA, 292 bp, Zea mays
cgcacacgctcctcaccctgctccgcaggacgagccgccccaccagcgcggcggacgacgacgactacgaccacatcggctgcctgcgcggcgtcaacgacgtggccaggcacaacaacgcgctgctcggcgcggccgtggtcggcctcagggccaggcatccccgggccaccatcgtcttcgccgacttctacacaccgatccgtagaatcctggaaaaccccaaccagggtggtggtcagtgacgtcctgaaggcgtgctgcggcaccggcggcgcctacaactggaacg

SEQ ID NO: 354800 - DNA, 289 bp, Zea mays
ctgaatggaagtaaaattcggcagacaggcattgaggattactcctatgacaaggatgttgtagagatcaaactgccagacacagatctttcttctgattatggtgttcattttgtcaaggatgtctgcattgatgaaggagttcttcctgatcaaaagatttcatcagaaaagcaagtagaccaaaaagtgtctataagctttgattccagggaagagataagtgctgactctacaaaaactgcacatgagttgaaatcgaaaatagttgtcctacctgtcaagtgtg

SEQ ID NO: 354801 - DNA, 235 bp, Zea mays
ggcatatgaattatggttttcaaggcttgggtgctcttcatccccattctcttcctgaagttcacgatggagcaaataatggcaccccgtacaatctaaacaccatggtaccaattggtgtgaatagcaactcaagaacagccgaagcagttgactgcagacatcttcataaagtgggttctagcaacctcaatggacattcatttgatcgtgtcggtgtaagagctatgggatt

SEQ ID NO: 354802 - DNA, 319 bp, Zea mays
tgctaacaaaaggacggtgaaagaagcacttgtaaacaggaaatggatttcagatattaagggggctcttacagtaagagtcttggttgattatctaaacctttgggaatccctttcagggattgagttacagccaaacataagggataagcatgttttcagccttgctgcagatggtaaatacacagcgaaagcagcttataatggtctgtttttaggatctgcctcctttgatcactacaaaagaatctggagatcttgggccccctcaaagtgccgttttttcatgtggttggtggcacacaacagatgctggact

SEQ ID NO: 354803 - DNA, 313 bp, Zea mays
ccaattttcatacgacgaattttcatcagcgaatacccaacctacatctcccaccacaccttaatcagcaccaccaccgccatcacaatcgagccagcccatacacgtggcaaccaatcttctcctcttccaacctacctttacaccacaaccacatcaaaccgccatcatggttcgcggagaagctacccaggtcaaggtccactacaagggctccaacgaagacttcatcgtcttcctcgacagcgcggccgactaccaaaagtggctcggcgacaagtcggtgccgctggcccaggtcgtgtcgtcattc

SEQ ID NO: 354804 - DNA, 243 bp, Zea mays
aaaccgtatcgtctcacctgatcagtttccttcacctcatcacgcagcccggtttaacgaacaaattccaccgtaccagagtagccaagcgaatcacgagtctggatcacgcgatgacgaaggagcagtccaacccccagcaccagcttagcggaggagaagaaggttatggtggagcagcagcagacgaggaagaccccgaagcagaggaaccagaacttcgtccagaaggcagctgaccaa

SEQ ID NO: 354805 - DNA, 256 bp, Zea mays
tgttaatatataaagatgtgagctagatgtcattaggtttaccagggaaagtccttcaaagtatttatcatctttattcgaaatttcatattttatagaaattgtagaccaaagtttcacctaaatgacatgtagtttgcatcagagagtacaagagtgctaaagcactataacagttacataattccagaaagaaactgctgatttctctatctttatatcaatacatgtatgcattctctttctctctctttct

SEQ ID NO: 354806 - DNA, 255 bp, Zea mays
gccagcgcgggactccaccactcctcctccccctctccgcggatcacccaccgaacccacgcgaaaccggcgtccagatcttctcccccgcggttcagatccccggacgcagccggcgccttctgacttgggttggcacagccgtacaggttcatttcttggttgctttgcgctgcggtggatctcctggcgtggcgacatgggcctgggtttgggagctcttctcaaatccggcgggctctcggtctcggatca

SEQ ID NO: 354807 - DNA, 209 bp, Zea mays
  unsure (1)..(209): unsure at all n locations
gaagcttaataaactcaaaatgaaatcttttctcatttttgccttgtttttggccgaagtgccactgctcagagcaatttgcatgccgaatggactcgatggactcacaaatatggcgacacctacanaactgtggaagaaagccaaattcgtttcaacaacttcaaagnaaatttgaagcaaatacaacaacacaatgctatgtatcg

SEQ ID NO: 354808 - DNA, 303 bp, Zea mays
atcggctgcgcttctcgcgctaacgagtcggtaagccgcagaactgccttcacaagaacagcgtcacttccacttgatgagttgaaccatgatccatccgtttcttcactggggcggcaacgcaaggagtgttccaagcgttctctgaatgaggggctgttacggagatgggtagagacggcgttggcaagtatcgccgctctggcccacgcgagccgctccgcggtcggcacggctcgtagacggaagcggcggccaggagatacgctcgcagagatcctcttgcgccatccgagtccatga

SEQ ID NO: 354809 - DNA, 249 bp, Zea mays
gcaaaccatttcagtatggctatgccatctatccttggccaacaacctaaatactcgcctggatctaataccgggaacaagcagcagtcacatatgaaatacaacaatagaacagcagccgtaccctcaaagccatttcttcatatccaacacgatatgctcctacagctccaggagacgacggtgctgctgcccttggcctataccagaagacgacgaacgacaagacacagccacaagcaccacacc

SEQ ID NO: 354810 - DNA, 237 bp, Zea mays
tggacaactggtagtgccccaagttgccaatcaccaaatgttctggtgaagatgaaatggccatttagtgtgcttttggatgtttgtgaccttgtaaatagcttttcctccgtggattgcagtgctaaggtgccccatgttcacgcctcagtgacaattgtaaagcacacttgttcctgttcatttgtgtgaataaggtacttcatttggttaaacaaacaaaaaaaaaaaaaaata

SEQ ID NO: 354811 - DNA, 268 bp, Zea mays
caattttgaaaagtaaatgaagccttccaatgaagatttgattgctggctttgtctgtgctttagttttattaattaattaatctgatgaccacacataaatagtttgtgtagcttttacagtttagtatgctttatttatgtaccagaacttataccgcgtttctgaaacagggtcatattgatcatggaatcttgtttttcttttgaagattcatggtaattcttgtttgcagcactgccgggcaaacaggatcacctggttcaac

SEQ ID NO: 354812 - DNA, 103 bp, Zea mays
ctcagctcaaaccagatgtgagtgtcacttctgctggaccagaagatgaaaatggtgaatctgatgacgagggtgtcgagactattacactaggtgataagag

SEQ ID NO: 354813 - DNA, 207 bp, Zea mays
cgcaacaaatcacaccgaatcaccctctcgcccaccaggccaccaccacaccacaccacaccacaccaccggcggcggcggcgacccagtcgagaacacgaaggcgatggcgacagcgctgaaccgcgggctccgcctcctcgccgccggcgccgaggcgtccaagccagcttctcgtggattccatgccaccggcgtgaagagaat

SEQ ID NO: 354814 - DNA, 305 bp, Zea mays
ttcaaaacaacagagaccgaaactcgccatccaccagacagaaaaagcttccagctcccctcgccgaaactcgccgccgtctcctcgccttctgcctcgccaccggtcccgtcgcggtttcacacgcatccgtccggtggacggagcaggctaggttgccggctgcccccggtcgtccctccttcgccgtcgagctggaggacacgcgtacaacgccgggttcttctgcggcgagctgtggtgtggcctcatggagcccaagggcgagttggctcagaagcctattgaagaagcaatcaacagct

SEQ ID NO: 354815 - DNA, 121 bp, Zea mays
  unsure (1)..(121): unsure at all n locations
agcttngtctctggcctcccttcctccgaatccatccatccagctatctagttnctcccttccaattcgatgccttggtagcgctgtggtctcggcgcgtcgtcgcgtgttccccgatttt

SEQ ID NO: 354816 - DNA, 309 bp, Zea mays
tggcacggtggcaggcgcgacgacgacgacggcgcccaccaccaccaccgtcaccacgaccactacctcgtcgcctcctcctcctccctcgctccagacgatgcagcactttatggcgcaggacgacttcgggcttctacaggacatgctgccgtcgtcatcgtcgtcgttgtccttcgtcgtccacagcaacggcagcaacgtccagctgccctgaattcgatcagctaatagtcgtcgtcaccagtcaccaccaccacaagcgatcgagctaatgaggaaggaagctagcagagataagagatgata

SEQ ID NO: 354817 - DNA, 293 bp, Zea mays
caggtcaaggcgtcatgccaaacattcctggcatgggcgctaggcggggtcctccggcctatggaacataccctcaaatgtatccggtgtataacattatacatagagctggttatggtggtccagccacttcttttcagcatgaaattaatggtggaggtgattacaaaaaggatcaaatgaatgtagatatgcagcaagttgacaacactgctagcgttgcgacaaagttggaaaatatgaagctaggttgacaatgactttcaggactattacttctacaacgatgacac

SEQ ID NO: 354818 - DNA, 264 bp, Zea mays
tccaggcccagggtgtgtgtgtgctgctaaaccaccaaggtcgaagtatcccttactgcttggtatacgtacgagtagcgtgtccctgtccattgtacgtacgtcgatggctgaggaggtgccaacgacgccgccgccggcaccattgtacgtcgatggctgtccgggatgcgccatggaccggaagaaggcggccaacaagggcatcccctacaaggagttctttttcgtcgcagtcaccaccattgcctctgctttgccaat

SEQ ID NO: 354819 - DNA, 283 bp, Zea mays
gccgccctttttttttttttttgttaactgagaagtggtttcataagcaatggctgttacaaataatgggggcacgattttcacttcagctatactagtgagtagcaaaagatggaacatttgtttcaacaaattctgtgtgacaaacaagtataatttcatatgtatgacactatgactgtatcatcgtccccaaattaccaggtgcaatacatcaacaccattgcctactaacaatgggcaaagctccattctgagatccaacttcaaagaatacggaata

SEQ ID NO: 354820 - DNA, 99 bp, Zea mays
tatcgactcaaagctccctttagagcccgagctctatccaacccacgaacgggatctcgatgcccgtagctgcctcggttctcgccgcagcggcggtct

SEQ ID NO: 354821 - DNA, 303 bp, Zea mays
atccagagcagtaaacctcatcgaggcggccacgatggaggacagcaaagccccggtgtcggagcacggcggggagacctccaaggccgcggtgctcgtgggggtggccgccggcagcgggggacgcaggggcagggcggctacccgcgttctggccgtggtcgacctcatcctccgctccgtcgcggtggtcgccaccgtcggcagcgccatcgccatgggcaccaccaaccagacgctgcccttcttcacgcattcctccggttcaaggcgcagtacagcgatctcccgacccttacgtac

SEQ ID NO: 354822 - DNA, 301 bp, Zea mays
  unsure (1)..(301): unsure at all n locations
ccctttctctctcttctctctctaccgcgccaggccncccgatctcctcctcccactccgatcgcccgaccgatcgccgagcttccctgttccctccccgcccccgcgacgccatggagccgccgcacgccgagcaggccgtcgccgtcgcacgctgagcaggccgtcgccgctgtagcagcaggaggagaggatctatggccggacgaggcggactgtggctactacctccgcacgacgctgcgacgggcgctcctcagatcggcagagacctctttcgaacgcaagtagccgggagatt

SEQ ID NO: 354823 - DNA, 295 bp, Zea mays
cgcaaagctttgcaagagatggagaaaactgttgacatcaatgaagggagccattttttgaaagatcttgaaatgctcggaagtgtcacaggtgaacagatacccaacttggttggtgaaacaagtcctgggtttcaaatgggaagcaacacactagaaaagctcgggctgtacatgaaaaacgatgaggatgacgaggatggtgatttcacagatgaaccagtggctgatgttgaagagggagaaatagattaactgtgtttctggaccatttttgatatgttacaggagacct

SEQ ID NO: 354824 - DNA, 177 bp, Zea mays
gcgccaactgccggaagcccaactagacagacgtctacgtataccatagcatagacagacatcagtggcagtggtcagtttcgagattcgtgcgacacggacggacggtctggattcctcgacatggccagctaagagggccgtggctttttgcgtggaaagtgtggagtgcgttgg

SEQ ID NO: 354825 - DNA, 248 bp, Zea mays
gaggcaatggtgcggacacactagcacactggccaacctcagcagagataatgacggtggaagatgcctttctacaggtcttgcaatacttggataaaatatggggaacaatatcttcttcagaaaaaaaagaactggagaaactggcatttataccagttgcaaatggtactcgattggtcccagtgaagtcactttttgctcgtctgacaattaacatgtcaccttttgcttttgagcttccaagt

SEQ ID NO: 354826 - DNA, 293 bp, Zea mays
ggagcagctgcagcatgtgttgggtatccagtgcccccagtagcaaccatcctggcacaaaggatttatcggacgagacacagggttcgcggtccatgctgccgtgccgccctcaattttcgctgtggaaataggagattggcagggggcaccacaccattcatcttcgtctcaccgccaggaggaccagcgcatcgagacgggaccaggtgggcctgccgtgttgtcatcatggtcagtccctcctttggttgctctatggtcctcgactgcaacggttactgtacggagaa

SEQ ID NO: 354827 - DNA, 284 bp, Zea mays
cgttgacctccctctcgtcttgtctcaccgaatcatatcctcttcttgttacaattggatctttctgttagacttgtatcttctgcctcccttctatttatttcccccctcccttctaaacctgtcctccaggttctctccattcgctatggcgtctactcacaactccaagcagcgcctggcgctcgctatctgcgatttcctctccgcttcgacaaatgacggcactctcaccgccgacgacaaggactccatcgatgtggctatcaactgtatcgccgaat

SEQ ID NO: 354828 - DNA, 310 bp, Zea mays
  unsure (1)..(310): unsure at all n locations
tgaactgctccgccagacatgcaactaaaggacaagtttttggtacagaccacaattgttccttatggtacatctgacgaggaactcgttcctgcctttgtaagcacctagctataacctttagttgcagtgttcttttcatgtcatttactgtaactgtaaatatcactattttctgtcttatcagttctccagagaaactggcagatacattgaggaaagcacattgagagttgttcttgttagtgcataccaatcncttgaagagctaccgactaataaaattcatgacactgagcaagttgttgag

SEQ ID NO: 354829 - DNA, 152 bp, Zea mays
  unsure (1)..(152): unsure at all n locations
cgctaactcatattcaccaacgtcgacaaggtccacgccgtgagagtccttgataggctggtcctggatgactgcttcgatgggatcatctgctnctagaccctgaatcctccgtgcccgcctcagggagaccgggatgccgagatcttcga

SEQ ID NO: 354830 - DNA, 299 bp, Zea mays
aacaagtgatgccgtttcttatgtatttgttcaacgattttgatcaaatctgttttctagtatttttgcttgtctccactcaactattaaacttaattaattacatttcaccacgtacaaattaaattgttttaaattatttttcttttcttttacttaattagcattgctttccacttttggattacacattaaaaacaaattagagcgcagattaaactatttgtacatcacaatcatcttgttttgtttgatttacacacaatgacgtcaagtgctgtggaaacttttacttggct

SEQ ID NO: 354831 - DNA, 316 bp, Zea mays
ttcaaaacaacttaaattaatttttacaatttattttaattttgaaacaaaaaaactttaatttaattcaaaatgaaagtgttcatctgtttgtttgctgcttttgccgttgctaacgctagtttgttggctgccccagctcatttgagcaccggatcatctactcaaacccgtagccaagatgctcatggcaactatgccttttcttacaacgaacaacacgccactggtggatcaagccgatctgaatctggaaccccatacggaacagttggatcttacactttgaatgttgctgatggacgtcaacgggtag

SEQ ID NO: 354832 - DNA, 320 bp, Zea mays
tagggtcgctgcacacgcagatccagtggttccaggacatgaagcccaagctgtgcgggcaggagcaggagtgccggccccgcccgcacggccagtacagactactcctccggctctgggcgccgtcgtatgtgcgtccttattaccgacctgcaaaattggattggttgcttgtagtagaagtgtagagagagcgagacagagatagatgacaaacacgaaacgaaccggaaggaggacgataaggcgcgcgtgccggccggtcttttactcctctctgttcatagctgtcccatatcgtagtcaagaaaactgagcag

SEQ ID NO: 354833 - DNA, 270 bp, Zea mays
cagcggacagcgacgccgttcctttcgttgtgcttccttgggttcttgctgccggccgccggcgatttggcgaggtccgtttgggcggcaggtagaggtaggtagaggcgatcgtttcttggcggctggtggaatggatagccacgccgctgtgtcgagttccgtcggatccggggatggcgccgcgcagccaggaggaactcaggaagccaagtgtgagatcgtctcctgatattacctatttaggcttcataagggatctctctactt

SEQ ID NO: 354834 - DNA, 129 bp, Zea mays
caacaaaagcgcttgcccacgccacgacgctcaccaacaaccaacgcgcacgcactgatcagcaccgcttgctgcatgctcagctgcacctctggcaccaccacatccgcttcgccaactccatcgcgc

SEQ ID NO: 354835 - DNA, 242 bp, Zea mays
ctcgacttcgggtccatttaaatctttcatcttcacttcttctttcttcttgagttgttgttggtttttgaaccaaaggacccttcctaaacctttctcttttattacttttcaataatacataatggctgatgatgaatttgaatccgttggatcaggagcatccacctgcttcccaatgcaatgctctgccatcaagaagaatggatatgctgtgttgaagaacagacctgcaaagtcgt

SEQ ID NO: 354836 - DNA, 258 bp, Zea mays
caccctcgcattggtttctcttgaccgccttgtcacttgactccgtgcctgctctaacagacagcggagacgaccacgacgacggcgaggccaggctctgcgatggagcaggagccgcaccggcccatggagctgcccccgggcttccgcttccacccgaccgacgaggagctcatcacgcactacctggctcgcaacgccgccgacgcccgcttcgccgcgcttgccgtcgccgaggccgacctcaacaagtgcgag

SEQ ID NO: 354837 - DNA, 159 bp, Zea mays
cgagctgcggtatatgtctttctttgtcaacaggacattgtaattgggctttgttctttggtcggcgagagccagacaaattggcattgttctgcggagttaccttgtttggtcttcattgtccacttgcctgtgttgcaaaattatataatgttatag

SEQ ID NO: 354838 - DNA, 296 bp, Zea mays
cacacttgttggtggtttgaagagagtactgaaaggttagtgagaatatgacttgggaaatcaaatatggtgttgtcttcactctgtcttcatgcatacaaacaaccatgagcaatattattcagtattataggcgtggccttagatatacctatcttactgattttggtagtggcagattaattgtttgcatatgctgttagttattttggaatttgttctagcaagtagttccctgccagctaagaacaatatgttgcataatctaactgctcgcattttctattgaatttaac

SEQ ID NO: 354839 - DNA, 159 bp, Zea mays
tgtggacctcgagggcggcggcgcggtggatgcgatcgcctacttcgcgcaccggagctacgccaaagacatgtggcggcgcactggggagaagggcgtccccgagtacacccacggcgtggcggccgggtatgtccggcgcaaggatccgccgcaggg

SEQ ID NO: 354840 - DNA, 260 bp, Zea mays
cggctcgagctcacctgctggcggaggcggcccccaaaagccaaattccccaacccacaccacctccacactccagtaagcaccccgcctcccccctcgaactccctcctccaaattcctctgctgctgcgactgaatcgaattgctccactgctactaatctctatactactactgcttgctcctgtttcaatcgatcaatcatgccgcgcgtaggttttttccggcgcaaagggttagggtttgctgtcggcgatgtc

SEQ ID NO: 354841 - DNA, 281 bp, Zea mays
cgatggtcctactgtttcaatccaagctaccccttgggtacgtcgtatctgcttttgacatcttaggttccatcgacggagaatgtgctataaaactccagatagatgggtctgatgggtgttcgcatttgccttacttgattaactactcaaataggatgcggagatgctaagtaggaattcttctcggacctccaccaagcacctgttatctgtgtatgcggagaagttagattattaagtgcagttgggcctgacttgttttatggctcgaaataatg

SEQ ID NO: 354842 - DNA, 283 bp, Zea mays
attgattgcttgtgcccagtctgcaacttgtgtcgatgtgaagataattctttaagaattgtatctgttaactcgggctatgcttcacttgtaaccgatttgatgccttatgggacagtgtcgtgcattctgatatttgaaccaaattacattgtagctattgaagacagcagaaacctgcatatctgggaaatggttgatgggtggagggacatctccaagcgcacactattggcgacttttgcagctccaggaaacactgtcttcgagattctgccagttg

SEQ ID NO: 354843 - DNA, 253 bp, Zea mays
ctcggattatgcctttgttctagctcttcgatggcaacatgcacaggcacgcagcagactgggactgcacggcgtcccatcacctcaacctcagccgcctagacatatgccagctgctgaccgagccacgtggagttgctgatcgtcgcactggcggcggcggacgatgcgactacgcacctctcgcgcgccgcggttgctcctcgttcggcggcggctttcgcgctgctggctccgacgtgcgccctggtga

SEQ ID NO: 354844 - DNA, 227 bp, Zea mays
acgatgacgttctcaactccgggcggttggatgcgcggttcgtctctcgcctcggcactacgccgcggcgttcgacgccgtggatgcggctgtgctggcggacgtcactcctcgatggtcaatgcgtatgagatgttctcgcgggatattcgcaacgctgttgcgtgcgaggccgcgtaccgcttcgagcgtcacgagatcttcacctggtggcttcacgcatgtag

SEQ ID NO: 354845 - DNA, 285 bp, Zea mays
cggactactgcaagctaggcctacagcaatggcggcctcttcgtcgatccaacgatgcgagagacgaggaatgtgggggagccccgagcgcaccgtggtgtggactgaacccaagcccaagccggcgaggaaggtcgccgtggtttactacctctgccaccgcgacggccacctcgaccatccgcacttcctggagatggagctatcccagcaccagcagtcccactcctcccgccctgctcccggcctctacctccgagacttcaaggcccgcctcaacgcgct

SEQ ID NO: 354846 - DNA, 296 bp, Zea mays
atccaaaccagcctttttccccctccgtgcgcccacagcaaagcccgatgaggagacgagagtgaagaagaagaagaaaccactaggcgcggcaaggatttgctccgagaggcgtactccctccagtccagaaccaccgccggagtattccgagcggcatttcctgcataaacaccggtgccaatcaggagggttctgtgtgtttctgttccattccgtatccggatcaccgtgcggaaattcttggttggtatggtatgagtaaatgcgatctgcagtgacttgtgagacaggtt

SEQ ID NO: 354847 - DNA, 281 bp, Zea mays
cgacctcgactcctcgttctgcaggatcctggcgaaccggcagtctgcggcgaggtccaaggagaggaagatcaagtacaccagtgagcaggagacgaaggtgcagacgctgcagacagaggccaccacactttcggcacagctcacgcttcttcaggtaacgaatattgcttggttgctttgaccaggcactatcataacctattgttccccctccaaagtcccgcttatcctcggagacaaaaaaaaatgatcatattgtggttgggtgtgcgaacata

SEQ ID NO: 354848 - DNA, 269 bp, Zea mays
ggcatcacacctcgtctgcttcttcctcctcctcctagcacagctagcgcctgcgccccttcgcctgtgatcatgtctttcagcagcggcaagtgctactgtggctccatctgctcctgcggcagctcatgcaactgcatgtcccctaacgtggagaccgccgccgccagcagcatcaagaccacggtcctcgccgcgccgatcatcaaggccagcgccggcgtgttcgatgcggtcaccgatggcggctgctgcgactgcaacacctg

SEQ ID NO: 354849 - DNA, 308 bp, Zea mays
cgaccggccaagggcagcacatcgagcgcgggtgaggaggggttggattcagacgccgaataccaggaggcagaggaggacgagatggagacgccgcgcccaaagcgaccggcgaaggacagcacatcgagcgccggcgaggatgggttggattcagacgccgaataccaggaggcagaggaggaggacgacgacgaaatcgagacgccgcgcccgaagcgacgggcaaagggcagcaacagagtacggaagtatgaggaggacgaggactacgaggaggaggttgacgaagacgacgaggtggagga

SEQ ID NO: 354850 - DNA, 309 bp, Zea mays
agcgacgctccagcgccgccgccgtcctgggcgggcagcagcaacaatcgtgcctggtcggggagacgtcgtgggcgtcatccgagctccccgagctgggcgtcgcggacttcgagatcggcagcttcgacgtggagagcatctggagcatggacgacagcctgtggttcacgcaggcgcagggcgtgtgaatccaagccaccaacacacgctgacacgcggcgcgcggcacggaaatcgatccacgttacggcatcatatatcggcggtggacatgcacccgcgtccatcggacacaagcagtacgtc

SEQ ID NO: 354851 - DNA, 295 bp, Zea mays
ataattacgactacgacggcgaaatcggcgttgacatggactatgcaacctacaaatcccgtctcaagagcatgccaccgagtgagccgcagactccgaatcgtagccgtagtaggagtagcggcagaagagcctctgattcctggcagggattcagcagcggcaatttcctgaaaccattgacgtctggaggctcgggaccatctaaagacgagctcagcgagctgaatcgccggattgggactttctctgaaatcgagcaggaaaaagacattaaccgtcgttaactaattcg

SEQ ID NO: 354852 - DNA, 217 bp, Zea mays
tcaagaaccgatgcggattctccttttgtccctcctgtcctatggcgagcctgccgccgtccctcgcgagatatctagatgattcgctgttcagttcaggtggtgtgatagccgttggggaatatgatattcgggagacgtacattgacgttctgcctcctgttgaccacatagccttctcacggagcggctgcttgttcccgggcgcggcgcgtct

SEQ ID NO: 354853 - DNA, 274 bp, Zea mays
ccgcgttcgtcgatatgctcgccagcagcggcaaggtcaacgtcctcctcatcgtcaacgccggcgacgtggtcaccaatgtgccctgggaggcgccgcggctgcccaacaagaaggagcagtaccagcacgtgggcgcggactccggatctacagcaagaactcgccgtgcctccgcccggatgctgggcccgcctttcgccacgactctggatgcgtacctgcacctcatcgacggcttcaccgggactgggcgcccgtttcggcacgacgc

SEQ ID NO: 354854 - DNA, 287 bp, Zea mays
gccccgtcggtcgaggccaccgtgtacctgtcgagcgtgggccagcacctgctccgggacactgtcatctactgtgcggcggaacggtacgggctcgaggagctcaagcgcctcgccttgcgcaacatagccgttcagagtggtatcgatgtcggtaccatcctgcggagtgcccagtactgctacgcacacacccccgactccgacagccgcctgcgagcacactacttggccctcatcatccgctgccgcaagaccttcaagcgcagagcacgatgcaggccgat

SEQ ID NO: 354855 - DNA, 321 bp, Zea mays
cggcgagctccaggggactaacaatcagcgtgctctgcttgagaagatgaatgatcgcgtatcacaggaatacagcaactacggtgacatcgccgctggtctgcgagtatttgtagagcagctgaatgagaaaaaacgagggctcgaggagtacgggtcgcagaatgatgcgatagatctacaggtgactgagtttgaggcagtggtgtccatgctcgacaagcatgttgccctcttggaaaagaaagtaaaatcggcctatcacatttctactacccaatgatttccatccatatgccacaatgcagattcttttgccaa

SEQ ID NO: 354856 - DNA, 306 bp, Zea mays
gtccgcgatgttgcggaaggcaaggtggtcccgctcgagtgcacgctgctgatccggctatcggccgcaccgctggtctgttaccgcacggcggatgacgacatccacgtgtccgtgccgttcgacctgctcgacgacgatgacccgtggatacggaccacggacatcactccaagtggtgcgattgggcggtgcggtgcgtatagaatcacattctcgccgcggttctggccaaagatggaacgcgcgctgacgtacatgagggataggagggtggcgatccttgattgcgttggaaggtggggg

SEQ ID NO: 354857 - DNA, 290 bp, Zea mays
ctttttctttttttgatttttttcctgcacaaggattgcacgtctcgtgtttccactatgtatataaacgtacatgtacatgctcataataataactttgatatatatgcccattcgaatattggtcacatatttatatatgctcaaaacttcgatctgtcaccgaactgacaacctccaatggcgtttgtgatcaattataaaaatgaggatgaaaagataatttgattctgtcaccggacagctgatgccacggtgttctgccatatccggtagtgctccttgagctc

SEQ ID NO: 354858 - DNA, 299 bp, Zea mays
  unsure (1)..(299): unsure at all n locations
gatttcctcccactacttcttgttagattttatgacctcctattgtaccacatctcatctttccaagttggttctcaaacatgtctgttaccgtcacaaagaccaagacaaatgtcaatggccaggacaatgaaaacatagcttctctgacgcttactgctccagtgaggaccgtgccactcaaaccatccagagcgctggatggntatgtacgcaaagagatcactccagtgataggtactgagttcctgatgccatgttgtggacagctgcatgctccacgctgatgacctctgcgc

SEQ ID NO: 354859 - DNA, 301 bp, Zea mays
ctgatacgagctgtctgtagatagatatttgttctacctgaagaccgacccggtgttcggagatttggtaacaaaagaggccatactatgacaaatttggtagctaacagattcgttgccgcatgtgtgcgtgcagtcctgtaattcattcgttggaccgctgcacatgtgcattagtcgtcggtgtatagtaatgactatcctcccatttgatttcataggcaggactgaagtagtggtcactgaccaccgtggcgggacggtcgaaactggaaacccaacattgtgatagctttactgg

SEQ ID NO: 354860 - DNA, 291 bp, Zea mays
atgaatacgaatgactatgggcgctacgatccgactccggcgttctctaagcctcgctccaagcttatacccaactaattacactcacacttgctgtatctacatgcttactatatggatggtatgcatatagaaatagtcatgtacagaatataatgtatatatgtaactactcacttcgttttcttttatcgcgttctagttcaaaaataaactaatcggcgacaaatattcgaagtaaaagaaaagaaagaaaaaaaaaggagaggagcagggtacaagaagagaggg

SEQ ID NO: 354861 - DNA, 306 bp, Zea mays
cacgcgtccgcccgtttcgctcgctgtctcccgcggcacgggggctccagcgccgaacggaaaaccccaccccaccaccactggctactcccgatccccagtcgccatccctctcctcgcaaaaggccaccgcgacgcgaccgcgtactgggggcgagacgccagtgcaggcaggcaggcagaagaggagtcgccaggaagcaaccgcgtaggagctgcaagcgagcacagcagcagcgcagaaaaaaatttctggaataatttttcttccctttggctcccgtgagttccggtgctcgctcgctc

SEQ ID NO: 354862 - DNA, 329 bp, Zea mays
tcgccttgaagccttaacctccaggcggacgatccgccgaaacgctggaccagttacccccatcctgcacggcgcaggggagtagagagaggatgatggagtcggaggtggtgaggatggagatggtgctggcgccgacgctgccgttcaagaaggtgcagacggcggacaagtatcccaagggccagtcccggggccgccagtggaagcacctgcgccacctgctccagtccgctgatgcatcctccatgcccccggaccgccccaattatatgaatatccaatcgcccccatccatttacccaccaaagagatactgtgacttaaca

SEQ ID NO: 354863 - DNA, 322 bp, Zea mays
gataaatctgctgctgctgtggagcaggttgtcaaacctgaaacagcaccttcgaatatcaaaccagagtcagcaaaaagtcctccagttagtcctgtcaagaacaaagaggatggtaccgatgaacatgataaaaagcaatctggaacaaatgatgtctcaccacgtgagagtatcagcaaccgtggagcaatggattcccctactcatggagataaaacccatgatggacactcatggggcatggataatgactccctatggaactttgataataaggagggtgagaatggtgattcagatctcttctttgggccacaag

SEQ ID NO: 354864 - DNA, 312 bp, Zea mays
gcaccagcagctaccaggagtagtggtttctcttgcgtccgcctcagggcttgcgtccccccgatctgtgtcgcggaggcggcgagcggcttggccggccgggagagagtgagatcgagctgcgagggcgacactcggacggaggtcggtcgagaagaggccaacgatcgacgagaggagaaggagatcacgcagccgcctgcaagaaattcagcagcaggagaggatcgatcgaggaagatgtgcatggacggcgccgtgccggtgaagagggtctggctcggcatcgccgcgcgcctcggcctccgccga

SEQ ID NO: 354865 - DNA, 304 bp, Zea mays
  unsure (1)..(304): unsure at all n locations
aggctcgagataattattattgagaggtttaaaaactgtaacttcaaactttgtaaattattgtactatacttgttgttgtttgttattgttgctgttgagaagaattagttattaagaactanagacttacttgtatatatttgtaaatagttgtatacaattgtgtatattttgtagtgttattgtaaatagttgcggtgagttgtgaatcaagatgagaagagttttgggtatcacgaagggctctgataggactctatcaacgctcttgaagaataagggcaaattgcagagtttggttg

SEQ ID NO: 354866 - DNA, 312 bp, Zea mays
caggtaccaaggctggtgacaagcacgagcacgaccaagctcgagaggtttcctccgcctcacctggacgcgtcgatcggctacagtctagacgcatcggttgacgacgggggcacggaagagttcttctcgtcgtcggccgctgagctgaagaaaatgccgagcctaatcttcggccacgtgaaatcttacctggcgagtagcccgaggaagggcgtgcacaaggcaaagccaagcctcaacatggcgatggcgcctcccacccttctcatcgtgcgttccggccttactcctttgggcggtcaatggagg

SEQ ID NO: 354867 - DNA, 292 bp, Zea mays
tgagaatcataacaaatataagtgtaataaaggattaatctcgaataaaaaactggtaataataaaatattcaatagtaatcatacttttataagctagccttaaatcatcgttacctatatggctatatgtacagttgtactacacgatcccgcataatcaatctactgcttttccattcagcagtgggccagtggcttttgttttctttcgtgattatgctctcccgtcagcttgcgtatccagcggaggatccgtattttgcgctaggatattctactattcatctttt

SEQ ID NO: 354868 - DNA, 172 bp, Zea mays
ggcgcatcatggagttcggttgtggtgcaggtggttgctgttctgctgcgccccccacgacctttttgctgagtggcagtgtccgctgggctgggcgacctaaaaccgcacctcggggccgcgacctcggcatgcagggttccgcgcgcacggagcagccagcagctgggtg

SEQ ID NO: 354869 - DNA, 216 bp, Zea mays
caaacaacaccttatagtagcctctattgttatataaggggaaaactcaaaagtgaagtttaaatattagtagtagatgcaggcattcatccaaaacatggatgattgtgcacttaatttatgatttattgtatttgtcttctgttggtaaaatcttgtgatgtcctgtgaagctcctctattttatttacctttgtagccagttttgggatgttg

SEQ ID NO: 354870 - DNA, 176 bp, Zea mays
acgcggtgaaccgtccgtccgctatgacgctgctgcagcacccgttcgtggcccagccgcagccgcagccgcagcccctggtcgcctcgccgtcatgatggctcgccgtaccctacaaatccacaatgcatgacggatttgattgatttattgattgcttcccgtcctcatacaac

SEQ ID NO: 354871 - DNA, 243 bp, Zea mays
  unsure (1)..(243): unsure at all n locations
ctattgtctcccctttcgagtggcattggccacactgacttctaagtattccttgttctcgggaattctagacgggccttcgatccgttctcctgactgtaccattccgcgactctcattggtcttgcgctgtccgctgagttgcatgaagatctcctcgccgacacagatctgattgcaggccagcttgtccttgtcgtgcaactanaaatacaaacgtctctgtcgaaacaagaattacac

SEQ ID NO: 354872 - DNA, 223 bp, Zea mays
aaactggcatcggggctgccatcgccagagtgtttgctcgaaacggtgcagctgttgcaatccactatgtctcagagagctctaaagcgagggccgagaaagtggcagccgacattagtcgggaatttggaactaaaacaaccgttgttcagggagcgctggaaaaagctagcacttcgacgaagattgtccaagagactctggaagggcttaacgccgacca

SEQ ID NO: 354873 - DNA, 299 bp, Zea mays
gtttcttgtgtttgttgttccatctgctgtacctgtacgtagcttcgtcgctgtcaacaagcctaccgacggcaagcatttcctccgtgctctcggcaaggtatacgcacaggcacaggcacagtcacacacgctgcacgtataaatccacaaaagcatttcctcggcgagtcgggctcacacagcagttggctctgctgctcatcaccttgcaggagaggcaggagctcgcagagcgagtgatggtcaccaggcttcacctgtacgggaaatggataaaggtaactaagggggtgcag

SEQ ID NO: 354874 - DNA, 298 bp, Zea mays
ccgtgccggcccaagcccggcccatctatgcgtgccgtgctgggggcccgacgggtcggaatttgagcgcccggcccaggcccgccttcgggccgtgctagcccggcccatattatttcgtgccgggccgtgctttgggctcttattttcgggccgtgctcgtgctggcccgaaaagcccgacccagattcccagcactacttaacacatccctaggtttgcctcccctccccttgtttccaaattttagtattggagcacaacaagggtaaaaggaacttctcttccataatgacta

SEQ ID NO: 354875 - DNA, 298 bp, Zea mays
gttggctgcttccgtgcctgacgacacggtccgtccgtccgtccgtcgaggcggtcgctgctgcttgttttactacttgattaaccagcctttggtgtggctcgtcctccctctccggatctctcccgtttctgcttgaagctctgtggcgagagagacatgggccagggtgggaggacgatgcatctagctgttgacgatggcgaaaaatttgtgatgatcgtggatatcaagtgtacagatctagagaggatgatgatgtagcttttctctattttcttttcatttccttatacgt

SEQ ID NO: 354876 - DNA, 228 bp, Zea mays
tggcatcctcggagcctcctccacctccggcaagcccggagtccaagcccaagtcaacaattccagtcgctcccgaaaccctaacctcagcggcggtgaaggagtctccccgacctctgggaaacccggaatctaagtccgagtcgccgctactagtcgctcccgaaaccctagcctcggcggtgatggcagcggcggcagtgaggctggttaaggagcgcgagagga

SEQ ID NO: 354877 - DNA, 297 bp, Zea mays
  unsure (1)..(297): unsure at all n locations
agaagacagcaaaagcagttaactataaccacgaatgaaggtgtgacatactacttctggctattttgatctatgtagtttaatcaatataagttacctaaaatccccatatggtattgtgtatttaattatactaaggtattgtattatcatcacattaatagattccatcagaatatgcatttgccacaagatgcatatgcatgtgtgactcgcaccattanacatcaacactgtttcattttcaggggcatcgctctctcccgtgggcggctcgggaggcgaaaccctagccgc

SEQ ID NO: 354878 - DNA, 300 bp, Zea mays
aacgcccaaaggaacccgtcgcaatttttattctaggctttagtacaattttttataattttattagtatatgcttccttgataaattatttcccaatttatctgtttgtgctaatatacatgggtgctctttttcttttgtttgtgagcatttttatggcctctcttttcatgatcttatttttccagacatacaagtacaagggttaacttttcagaacattctgcaggcactttcacatggatgtttaattaatttactactttaagaagcaatcccagatccacatccaattgtgc

SEQ ID NO: 354879 - DNA, 300 bp, Zea mays
cggctacgacgcgctgcgccgggacaacgtgcccagctcgcagcgcgcgcgtcctactacaactgccagcccggcgccgaggccaacccctactcccgaggctgcagcgccatcacccagtgcaggggctgatcgatgcatgcatggtttcacattccattctccggcagcagggtaaatcggttgctgctagcttcattcatgcatgtgtgtggtgcttgattttcttttttggggtctttaattgtcgtccgtcgattattgtggtgcagtggagatgtgtctgtgctgttgctagca

SEQ ID NO: 354880 - DNA, 261 bp, Zea mays
  unsure (1)..(261): unsure at all n locations
agtctcagagtcgagtttgccagatatggagaagtcgttgaaggaggtctagaggttttggctttgtaacttacacatcttgaggaggcttcagctaccatcactgccatgtatggacaggttagttcctactttgaaggattgtgattcatatgtttttattatcatagtggtgatnattcatcatgtctcagttaggctattgcttacaactggctaattcttgtaagatntgcatcctcaacattaattttgatatga

SEQ ID NO: 354881 - DNA, 294 bp, Zea mays
tccttgtccagcgcccccaaccacaaggagtcaaggaacaggtcggggtccagccatccgaccccttgaatccgcttgccctcctgcttgatcccgccgccaccatctcaaccgcccactccttcctctccctatagggttccctgccgctcctgcgaatcgagcaatcggagacccccgggccgccctccaatgacgaccatgagcgacgatggcgaccgaacctgcccgctctgtgccgaggagatggacactactgaccagcagctcaagccatgcaaatgcggctatgat

SEQ ID NO: 354882 - DNA, 110 bp, Zea mays
cgacgggtctggactaggccggacacgcggtacgaggagagggaggtcgtgccggcggaggccgtggctcgggcagtggagaggttcttggagcacggtgggcccgggga

SEQ ID NO: 354883 - DNA, 178 bp, Zea mays
atctttaaagattactatctgtgaaatgttgaactattggaatctgaaagatgatatcttatcggtgaaatactccgtttgaatccggtatataatatacctgattactacttattcagtactatggatataaatattcccgtttcggcattagcacacccagtatataatattattt

SEQ ID NO: 354884 - DNA, 253 bp, Zea mays
tatgctcgatgacaaggggaaccatccgttacttttgcttgatcaacactacagtatgttagatggtaaacaagttgctgttgatcttctggtagatagctggtagattagagtagactctgacaaccattcctgtgcgtatgactttgttctgtcttgtcagatgtacgtgctgggcctcctgcttgtagcaccgcctctgcagcagatctataagactgtgatttccaacttgccatttttttttagaaaa

SEQ ID NO: 354885 - DNA, 287 bp, Zea mays
ctgaagcacaagccttggtgactgaatggacagtggatcccgagtaaaactgaaaatttcttgggtgaactagaaccagctccaattcatgctggacgctgtttgagtgtacacagcaacgtcatgtgcaatagctgacttctggctgaaagttggtaaaggcgatgacttagtggtatatgcagaagcttccaaaagcctgatgagcaaggtagatgaggtctgagaaacactgcattcgatatatatatgccttatgtactaccttcatgcagtaggtttgtagt

SEQ ID NO: 354886 - DNA, 294 bp, Zea mays
cggcgacatccaatgcacacccgcccgcctctcctactacttcaaccctgtccgcgtcctccgcctcgacgcgacctctctcgaaggcacctacaccaaggacctccaagacgccatcaacgactcctcccgcatcggccgcttcctgatctacgggtacttcaactcgtcgctcctcactttcctcgccccgctcatcgccatggcctcctccaccttcgccgccgccatcagcggcatcgcgaccctcaccctccttgccgtcagcatcgctagcgtcgtcatcttcaaccg

SEQ ID NO: 354887 - DNA, 213 bp, Zea mays
cgaaacagtatatcttccattttgtttgttcagatcccttgagcacacaggacagctagaatgccaagatttacaatgatgaaaagatgtgtggggtaacatttttttttccttttttacttcatgccatggatttagactacaaagaatggagcatactgtacatacatgtcaaaatacagagaatgaaataagaaagtgtcatagcctaat

SEQ ID NO: 354888 - DNA, 331 bp, Zea mays
ctcaccctaccaaaaccctagccgctgaaccccaagcttcctcgcgctcgcctctccccgccgccacggcagcctagatccccgcgcgccccgcgtcgccagcttcggagcttccgcatctgggttggtggtgttctgttagggttggcccaccatgcctcggagttcgcgtcacaggtcgcaccggtcccacaggcggggagggtccgctgaccggtcggagtcagagggcgaggagtcggctccggcctcgggcgcgcgggatgaggccgcggcggcggctagggtttccaaagatgccgagcccgagaggcgtcgttcgtcctcgggg

SEQ ID NO: 354889 - DNA, 303 bp, Zea mays
acgcccgctaattcctcctagttctagtcgcctctctcctgcgccgactcatctttttcctcgtgtcactcccctgctgctgctgctgccgggaagatcaaatcccgtcaaaaggctccaaaggatcagagttctgtcaagatggcatgcccaagagctccagcagtggaaggttcaggtgtaagtggcgttctttatgctgtggaacctaaggatgcatgcagtccattgagagcgaaagcagttcaaggctctgtctcaccttttgcgttgattataagaggcggttgccaatttgatgac

SEQ ID NO: 354890 - DNA, 291 bp, Zea mays
ctggcaggtgatgaccacctgaccgtccgtcgcgccgacgccgacgccgacgccgatgcctcgtctcttcgcctctcctggacccgccggttctcccggatcatggatgaaggcggctctgtgcggcgcgcgggcgacctgctggcacaagggaatgacggcgcggactcttgctctcttttttggacgaaaaaagatcagagattgagattgtagtagtatttgttagctagcgcgctggattgattagcaaaaattattgaaacgcgctatatttattttggatagcaa

SEQ ID NO: 354891 - DNA, 257 bp, Zea mays
tctttatgtttgctgcaaactgccaaccgcatactgcaaactaaaatggaaacatacaagtactcagacctttcttcttctgatatcttacgcctggtccaacgcaatgttgatcctgcgaatgagatacgtacactggtagaagacgtaataggtaatgtaaaacagcacggagaccgggctttgtatgattatgctcaccagtttgataaggtattgctgcaaaagctttacctggataaagcagaacatacaaa

SEQ ID NO: 354892 - DNA, 301 bp, Zea mays
  unsure (1)..(301): unsure at all n locations
caccccgtgcggctgagcctcgccccgcctcaactccacctccgcctccaaatccgatcgatctccgaggcctccagatncccggcggccggaacacggcgagctcaaggcggtggacacccctcgcagcgctcgtctcctctcgctctcccaatccccttaccagattgcagcagcagggaaaaaaacatcgcctgaaagttcttcaggccctggtgtagcagctgaactacctagtttgatggtgaagaaagagctctacgtgatccaaagatggtgatgagataaaagcaccaaaaag

SEQ ID NO: 354893 - DNA, 253 bp, Zea mays
cacaccatcagatctagcagacctctctcgacctcatcggcgttggcggacgcgtgtcgaccggacacggcgccgagcgggtgcacgacgacgccgcggcgcggtcgctggcgccggcacggttgccgtggtcgcgtcgctgcgcgactgacgctcgcacctaagacgactgacgacgtaccacaagtctattcgaatcgcactgacgaagctgacgcggatgcatgcgctttcggaactgtctagacgagag

SEQ ID NO: 354894 - DNA, 254 bp, Zea mays
cgcaccctttcatcagcctgcctgtccactgtcggcttggcgacttcctccgctccgctcccctccgctcccgaacggtcgatctttgcatggcagcagagctggctccaaggggcggggatcgtggaagttcgtcagcggtcctcgcggaagccgctcgcgagaggcgtgacgctcggcgtacgacagactggagacagtggcgcgtcggcgacgtgatgcaggcggaccgaaatatgagccaccaaacggtg

SEQ ID NO: 354895 - DNA, 275 bp, Zea mays
  unsure (1)..(275): unsure at all n locations
cacttcttcgagccggccaagtctttcgacagccacgggaacctcatcgacgccgacaccacggagcgacccaagcaggtgctcgtgtgccttgacgccttcacgcgcacgctccacaacaacaacgactgaagcacgagctgccgggatcgccgtgctaataataataatctctacttggttgcttcagcaactagtaactagtggtcgtcctactacaaaccagagtatatgtgctcgaacctataatagaatacatggagaacttngctacc

SEQ ID NO: 354896 - DNA, 239 bp, Zea mays
cgctctagatcgcgggcggccgctcgcgatctagaacctctagcatgcatatggagcgaacaatgaaggccataatgacacttcaggaactccacctgcataccaattcccattttattatccagggatggtagaacacaacatggcactttcatcagtgcaaaattttcaagcaaacataaacagtgctcaagcacatacaccaccagcgatgcttcatcagtacaatgttttctccc

SEQ ID NO: 354897 - DNA, 233 bp, Zea mays
cggacggtgggcgacggcgtcggcgaagccgcgcagatctactgtgagctcgcccgcctcaggttcctataccatctcgaattcggagtcttctctcgtccctatccccctccagcaccgccacagccgaaacctttgcccgacaacgcgacaagcagcttcaatccagttccttggaggtcgcgttagagcgtggttgaatctgacgaagttgaaagaccccctcactcgcg

SEQ ID NO: 354898 - DNA, 243 bp, Zea mays
cacacgcgtccgcggacggtgggatgaataatatgataaatttcttaggcaaggctggccgtttggatgaagctatgaagctgtttcaggagatggaaacattgaggtgcattcctattgtggtgacatacaatactatcataaaagcactttttgaatcaaaatctcgtgcttctgaggttccatcttggtttgagagaatgaaggaaagtggaatatctccaagttcgttcacctattcta

SEQ ID NO: 354899 - DNA, 223 bp, Zea mays
gccgatacgactccagagtccagaccaagctcttggcctccgcttcttccggccatgtcgcgcttcttccacggcgccgccctcaccgccgccgccgcagttgcgggcctgtcctctgctttctcgcggacctcacttcgtccctcccacttgcggcttctccctcttctccgtcgacgcccatcggccccgtcgcggcctccggtcacctagccctcgtccg

SEQ ID NO: 354900 - DNA, 244 bp, Zea mays
  unsure (1)..(244): unsure at all n locations
cccgaattcagccaaacttctctctcccaccgcgcttgcatcctctcatcgccaccccaccctcctcctccctgtctttctccccccctctcgctcnccctcttgacaaattttcctccacccattcccttcctcccctcttcttcttctccacccactccaccgagcgccctctttctctctgaattctctctcgtcgtgcccacccttccatctgtctgctgcctctctctctcgcaatcag

SEQ ID NO: 354901 - DNA, 235 bp, Zea mays
cggacggtgggtcgcgagcggccgccctttttttttttttttgtaaatatgtttttttaaaaggtaaaattcaaaaaatcgaggcggagagcatacgcgtatctgcagaattacattgtatttagatggcaacactgacacggttgcattcacgcagcttgtacgccaatttcaggagccaggagggataaaaaaaaaaagacctagctaacatcatgtagcataactttttaat

SEQ ID NO: 354902 - DNA, 236 bp, Zea mays
cccacgcgtccgcaagaagatgaaggcatgggagaacgcggcggtgaggctcgaggagaacgacatgtactaccaggtcgtcagcaagctattcctcagctatgggatggcgcaacgcggcgcggcgatcacggaggtgcgcaagatcgcgcccggcgcgaggaccgtggctttccgggaacaggggcagcgcctcgcctacgcgcgctgcacagccaccggcaccgccaagttcg

SEQ ID NO: 354903 - DNA, 230 bp, Zea mays
gagacaccagttctgtcctagtatcacgagcagtttgtgctaacactgtggttgaattttgtggtacacagctacacatcaatcctgctaaactacactagcaaatatagggtcctttcctatgtggtttatgaaggttttgtgttgcttgaagtcattctgaggtttttgtggatggggtcatacaagtcttttttcttggtgtatgctctgttacatcactaagcact

SEQ ID NO: 354904 - DNA, 227 bp, Zea mays
ctagctatcttcttgcttcctatattcacaaggtaggtcgtcgatcagagggggtgtgtgtggcagcttaattattggacgacgacaggagagatcgatcgagcatttgcaattaatggcggccatgggcatgaagaagggtgtgctgatgctggctctcgggctcgcgatggccgttacctcgtcggccgtcgtctacaaggtcggcgacgcctctgggtggacga

SEQ ID NO: 354905 - DNA, 181 bp, Zea mays
cggacggtgggttgaaatcatgtagagttgtactagacgatggatttatatgtccggcctacgtacgtgtctgtatacagaatttacctctcaaactgtcaaaccccgaaagtttcttgttttggagaacttgggagtgtgaatagtcgctactcgctactaataaatacgactgtcgttc

SEQ ID NO: 354906 - DNA, 230 bp, Zea mays
cccacgcgtccggttgattttgctgccgcaacaactgcagctttaaagattccatctcccagtgtttctcgtgggagatcgtttgatgaacatactctctcaaactcatcaactgtaccacataaaaggcgaggtgaccttgaggaagaagaggaactgatgagagtcctcaatctatctaaagctaaaagtggggatgtagaagtttcttttgacacttcacatagtca

SEQ ID NO: 354907 - DNA, 172 bp, Zea mays
gttttgctcttgttagtcgttatgcatatgccttgagttgtgtaggaggacacgcggatgtgggccctgttagcacgcgtaataaagaaacaccattgatgaagctacttactagaggctccatctatcatgtatttgctgcagttattatgcaatcggctggtgttctatc

SEQ ID NO: 354908 - DNA, 323 bp, Zea mays
cggacgcgtgggttttttttttttcttttttttttttttttttttagaaaccaaacacaccttaaatataggctcaactaccattggttgagcttcaccatccacataatacaaattctttatacttatacccttctacaaacgcaacaccttgcatgaatcagaaacagaacttacttccgtatgaaactgcttgtgcagatgtaaagataaaataaatgcagatcccaaaacacttgttgctcaaagttctgaaaaagctaagtaagctactctaacttcagtccatgtttcatctcttctgtcctgatggcttggtttga

SEQ ID NO: 354909 - DNA, 323 bp, Zea mays
gcatgtcaaggacatggctatccgctgcacaagggctgtcaaggctttcaaggtttaggatgccaagtctccatggtgctctggttggcaaccagttgattcttgaatgtccatgtcctggaccatttcttctatcatgcaaatcactacacctttaaagtgggagtttcgtcgtgcatcgtcggcctccccatgcgcgtagacgcgtcgctagatttcccccacgcgctcagcaaaatataaaaaagtgtgcttgctgggatttgaaccatgggtctctaggaagagagacatcgcctctaaccactgtaacttgtgttgat

SEQ ID NO: 354910 - DNA, 319 bp, Zea mays
aaaatagtggataagataggagacgagataggggatctgttggagatgacataatatggttatgcatagaccttcacgtgttaggtgtcttttgtcacttctcatcttattcatatttctcttagagttttggttgactatttagtttgtctattttgcatggacttagctgacaatttatatttcagccaagtgtactttcttaaaaaaagtgggtcgcatgatgatcaattgaaggaactttcttttatgctttgaatttttcttaacatatacattgggtataatcctgcccttctgtttcagtacactcggacat

SEQ ID NO: 354911 - DNA, 314 bp, Zea mays
ggacaacctcaaaacccattctgaatatgccgatcaacctcaggggccacaagcaaatgccgtttctttcgctttaccaacaggtcaggtcttagacttagatagtcatatgattggccaacagcacacgaatctgtcatcattctggttctcccttgagcagcacaggctgcagttggatcaggcccttcaactccataaccaacagttgcaggtgtcactgcagcagcaaatatctatgcagaactcaactctactgaaccttgtggaatctatgacaagagatgtgctgatgcaaaagaatgatgagatag

SEQ ID NO: 354912 - DNA, 314 bp, Zea mays
atcaccgcggccgacgcgccggcgactgtcgactacggcacggcctccggccagtacccattctccgcgacggggaacactacgtcctactcctacgtgctctaccactcgggcagcatccacgacgccgtcatcgggccgctgcagcccagcacaacctactactaccgctgcagcggcacgcctcgcgggacctctccttccggacgccaccggccgtgctgcccttccgcttcgtcgtcgtcggggacctaggccagaccgggtggacggagtcaccctcaagcacgtcgccgccgccgactacgacgcgc

SEQ ID NO: 354913 - DNA, 290 bp, Zea mays
ggttcccgcagctccgccgcgccacgcgtgccgcggccacggtgctccgggaagtcgccacggtcaacgagtccaagccgcttgacgtgtcgctgggcttcgcggctcagctagtgaggctgacgggtccacacgagctggcacaccatctggtcaacgccggggtcagcgagcggacctggtcaaccggctggtcagcgtgctggctacgtacgcctgcccttcgatcaaggcgccgcggatccgaaggtttacggtcgacctcgtcatcgcgctgctgaggacgccgc

SEQ ID NO: 354914 - DNA, 320 bp, Zea mays
cgacgatacaaacaaggaacctgttgagaaatcagctgttccaccgcccaagaaaaggatcgatgtaaatgagctgaggacatgtaaaaataaaggatgtggtaaatcctacaaggagaaggataaccatgattctgcatgtgactaccatccaggtcctgccgttttccatgacaggatgagagggtggaaatgctgtgatgttcatgtcaaggagtttgacgagtttatggagatacctacatgcacaaagggttggcataatgctgatgcggtgtgaattcacgccatgcttaaggctgttttcatgttgtatcgtc

SEQ ID NO: 354915 - DNA, 137 bp, Zea mays
ctattttggaagacgcgaaaggagtgtcattgcattgatgctgatgcactactgaatgagcttaagaacgatgttggaagcaaagacagtgaaattggttcaagtaaggggtggagagatcgaataaatatagcaga

SEQ ID NO: 354916 - DNA, 307 bp, Zea mays
cacacactcgccaaggagctcacacataacacaaaaatggcgagaaccttgttgtggctcgcgctcttgtgcgccgccttggcgttttgcacccgtgcagcaggcctcctgctcgagctcacccacgtcgacgccaagcagaactgcatcaccgatgatcgcatgctccgcgccacggagcgcacccaccgccggctggcgtccatgtgcgatgcgagctcgcccgtccactgggccgagtcgcagtacatctcggagtacctcatctgctacccgctgcagcaggcggaggtcatcatctgcaccg

SEQ ID NO: 354917 - DNA, 99 bp, Zea mays
cccaatcagatccgatttcgtagagatgaagccggcagtagaggcggaggctgacgagcgaacggcggaggagatggcacctaagaaggcagcggctgc

SEQ ID NO: 354918 - DNA, 333 bp, Zea mays
cccacgcgtccggccacgcgtccgcggacgcgtgggcccctctcagctccggtgtcgtcaactccggctgtgcgccgtcggccatgcctccccatgccgactttgctccccatgtgctcgcccatgccacaacgatcgtcaatgccattacgctaatgatcgtgcgagatgaagggcatggaccgacgatatcttagtgactatgtcgacagaagatgaatgtattgaccgtaccaggattttggatgttcggcaaccagatgtctcttacaacactaacgtagtgtttatcctaggcacagccccggtggcattcactcttttctttgatgt

SEQ ID NO: 354919 - DNA, 312 bp, Zea mays
aacaatatatggactaaaatataataaaatagaggtactaaaaattagtccagacatccgtttattgtttaatgcatgctccaccataagattcttgatggcgctaacacacgtgagtgacgtacgccctttcacaacatggttttgtttcagagaatggactaaaaatgctgcttccctggacccgctccttaaacttaaaccaccacggagcacagtttcgccatccatgagccttctactacaggggtgccatggcctgacgccggctccaaagggggacctgaacctgaccgatgaatgcgctcaagg

SEQ ID NO: 354920 - DNA, 306 bp, Zea mays
aaacaagctgatttaagcgatttaaacgcaatttcatcaatcaccactttattttgattttaaacaacaacaaacctctacttaaattatttcaagatgatgatgtgctacactactccgtctttgctcttgcgcagccattctctgccttgaactgggttgatgaattggccgatgatttgttcgaacctcgtttggaagtttggcctgcatctcgtttgcatcatagtttcttcaatcgtcaattgcgcaatttgaacgattctatgttcggatgggccaatcaacaattggaatctcttaaca

SEQ ID NO: 354921 - DNA, 170 bp, Zea mays
agcatatcatcggcatcgcctgctctgctggtgaagatcgaaggccgaagtggccaagaccacacgccttccaaggtccacacctaccccaagatcctcacgctccatcagccgccacgatgtgcaccctttagcatcgcgaccgcgtcttcgtcctcatccttaccggc

SEQ ID NO: 354922 - DNA, 288 bp, Zea mays
gtgtagaagaaaatgaaagtggactaatgaactatgacctctcacctgtcaaaagaaaggacgggcaaagagccggagccgcgaccgacgactcatcagacatggcgaactggcggcggcgaggaagccctctgcggcgtcgaccgtcgcactgacactggttctggccctggcttcggctgtcctcctcttcctcctgctccgcttctctccctcctccccgtaccccaacccgcacccgcaccgccgcctccgcctccgaccccgcgcgcatggcaccaccaccag

SEQ ID NO: 354923 - DNA, 99 bp, Zea mays
gtaccagtgaggtctatggtgatcccctccagcaccgcagtggagacttactggggcaatgtcaatcccatcggtgtcaggagctgttacgatgagggc

SEQ ID NO: 354924 - DNA, 288 bp, Zea mays
cggacgcgtgggttctgcggcagagttccggcgcctcccaggctgtcacagcaggaggtgacggcaaagcggagagcagcaatgccgccgccgacattggcccaccatcgtcgaggaggttgcgccggtctttcttctcgttcagccagagcaggggatcccgaaatgccgtactgccgctctgaattgggcggcattgtcctcatcaattcaacttcttcgactaaaaaaaaaaaaaaaaaaaaaaaaaaaaaaaaaaaaaaaaaaaaaaacaaaaaaaaggggggg

SEQ ID NO: 354925 - DNA, 105 bp, Zea mays
gaaccgactcctatggaggaccatgatgtgaaggaaagtgatgatggtggtgagggagagaatctcccccctggttcatatgtagtcttgcaattggaaaaggag

SEQ ID NO: 354926 - DNA, 315 bp, Zea mays
ctcagcagacaagcacaaggagcttacatctaatgagctgtgtgcatggactaaagaagatctacatagagcagaaggtgcaatgctcaaggttctccaggtcgtccaaactggacagtgggtatcttggcgggcactgaggggtgctgcgtcgaaggctgttgattcgcaagagctgcttgattattctctccgaggactgggtgggaaacaactggataatggcctttgtgttgctgtccgttgcaatgccggtactagtgcaatcgagtacaggctggaatcttcctccgttcggtctccagcaaatgcagc

SEQ ID NO: 354927 - DNA, 303 bp, Zea mays
ctctgatccctttacgtgtgaagaaccagctccatctttgtaacaaatttgtgttgggagaaacaataagttaaacaccaccgtctttttccgcgttccttgttttgatgctatacagctatgctattcttgttgtttgcttgctgattcagccgcgagctgtcgttcctgattggactgttccacaccaaatcagcatgaaatctgcataaaggtcatgcttttatgggcggcctatttatgcaacatcatttacatgcttcttattactgaaaacagtagatgctgtatgatgtaatataa

SEQ ID NO: 354928 - DNA, 306 bp, Zea mays
cgctcctcctccactcctcgccttcctcggtcgcatcaagaacacgagcaggaaggagaagaggaggagtcctatcagagccagacagccaatcagtatctgtaccattaccgttcgggcaccagattaccaaaatcctgcagaggggaatggcgccgagcagctacgagatggcggcttccaccctgctgtgcggcgaggacagcagcagcatcctggacctcgaagcggggggccaggaggaggaggaggtgctgctggcgcggagcaggacgcgcggggagcctagcgtggtcttccccgtgc

SEQ ID NO: 354929 - DNA, 306 bp, Zea mays
tgacattcctcgatgcgtcaactctctccgccttcacgcaggcaagccgatacttcaaggcagtagccacgcctatcctctacagaagcattgaagtgcccagcagtacagagggctacttaaacggccaaaacgctatggcccgtctcatcagaacattagtccaccagccatccctggctcgccatattcactctatcgacaacctcccggtcacgttgcaccccgggttcgttactcttctcttcgcgcccgcgttcggcaccgacccatctccaggaccccgaacgcagctaaacctcttgc

SEQ ID NO: 354930 - DNA, 286 bp, Zea mays
agcagctgatgggtgaggttggagtgatgtttgagatcaaagaccttggctccaaagagaaagaggaatggaaggttactttcactaacgacgagaatgagacaatggaagtcggagctgttccttggcaggagttttgccagatggtgaggaagatcgtgatccattccattggagacaggggccatatggaggcttgcccttgcctggggcaggatgggaagagggactattagaagaagggatttttttttttggctggggcaggcaggagatggttgcggct

SEQ ID NO: 354931 - DNA, 292 bp, Zea mays
ggcataaacttggttcgatcacgatgcaatttgaagcagcctcggggtcgagggggcaagtgcaagcaggcagaccgaggaaacgcgtcagctgtacctcgaagtcctcgtctccaagccaggaaccagaaaactcaaaacagcaggtaacaccacaaagaccgatctaccgcgagtccacaaagagcagcagtatcaaaatatgaatgtcgtcttcaacttcaacatgcaagcaaccgaagcaacagcatatccagtgctgttgacgttttacagaatttattcattcaca

SEQ ID NO: 354932 - DNA, 134 bp, Zea mays
ccagacttcacattcccatctctttttacttgtacagtgatattggctcactttttttttgtgattgtggtctgtgatcatgccatttagcagtattcgttgtagatcatgatcttacttttggagatgtcaag

SEQ ID NO: 354933 - DNA, 254 bp, Zea mays
gatggaattatttttgtccgtccgtccatcgaccttggaaatttcttttctttcttggttgcatggacggacggacaaaaacaattccatcgaaaacccaaaaagagaaaaagaaatttccaaggcccatggagaatctgtacaaaagagtggctacgtgcaagaggagcgttgagtctgtgagcaggaccaagcagcagcagcagctaggttgttcagtcaggcagtggatgagctgtgtgtgtgagagagag

SEQ ID NO: 354934 - DNA, 254 bp, Zea mays
ccagatcatttgctttgctttggtcgttccttcgttctctgacagcaagcggaggtgcctgtgcaaagagcaagcagcgagctaagctaagttcttcagatacaagagctagcaagttagcagagatgaagcaccagcaaagcacgcgtcttcttctccctcaagctgctgcggctccagcagatcacccctctcccgcctgctgcaaccggcggtcggcgacggaggagatcgcccggggccagtccctggtg

SEQ ID NO: 354935 - DNA, 259 bp, Zea mays
ctagaccaaacaactgaaaaagggaacacctgcctccacatcgccgctctctgcggccaccagaacttctgcagcgaggtcctggcgcaggagtcgcgtctccatcgtcccggcccgtcgtctctgctctccaccaccaacgacgacggcgagacgccgctgctcgtcgccgtgaagagcggccgtgtctctctgggccttcatctgctcgaccagcactactcgaggcacgagttgctggtggagcatcttcttaagc

SEQ ID NO: 354936 - DNA, 257 bp, Zea mays
ctggtcttcctcgtgggcgccgcctccatcgcggcgttcctcgaggccatcgccatcttcctctgcgtgtggaagaagggcaaggacaagaaggccaaggtgctcatgccgctgctgggcgccgccgtgccggcgctgctgtacgcggccaccggcacggcgttcgcggccagctccaacatgtcctactgctcagcctacggcaggcgcctcaacgtctgcaccgccgacgggggcggcagcggcagcaacttctg

SEQ ID NO: 354937 - DNA, 313 bp, Zea mays
cattctggaaccatcgcttgtggatgctaccgggaacaatcgtgaagatgtattgtcatcatcgtcccctgttgatctttttttattgcctggacaagcttttgatagaactggtcgaaactggggcgtggcggagggtatgattacatattaaaattacgtttgcctgtccggaattgatatctttcagggacaattcagaaaatacaatacactataagaaatgtgatcacaaactgtatgaattccaaattttgtttcagttcaataatattgaagttttaataaaaaaaaaaaaggaaaaagaaacaag

SEQ ID NO: 354938 - DNA, 313 bp, Zea mays
ggaccgtggcgccgctgtccacggcaccggcggcgacggcggcggcggctacgcaccgtacaacaacgctcccgccgccttctgggctccccaggacaccaccaggtcgcccatgtttatcagcactagggaggtgcacgtgtaacgcgcgcatagcgggtacgacaactacgatggcagcaacaacgacgaccgccagatgaggagaggcggcggcggattcttcgggcccgcgttccatgccgtcggccgcttcttcgaccgcaagttcggcttcagcgacagggactgaagcgcacatacgccggcgttg

SEQ ID NO: 354939 - DNA, 317 bp, Zea mays
gtggaagccctgaagcatagggcctaccagaatatagatgtcctgcagcctaactacaagatggtgaacaactaccctgtgctctgcagtctccctgctgctcagggtacttccctgtttagcgctcttcatccaaatcggcagtcactcagctatggcgacagctcgactggtgtagggtttggaacaaggccttcaagggagactttcaacacatcccttggatccagtaatgagccacaaacttccaactatatggagttaagacatgagcaaacaataaacagaattctaccgtatgatccaagcaatggaac

SEQ ID NO: 354940 - DNA, 101 bp, Zea mays
cacaattcacaaacagcaaaccgaccgactccacacatggcaatgcatacccgaatcttcttcgtcgtcgttgttgtgaagagacatactagtggaggagt

SEQ ID NO: 354941 - DNA, 296 bp, Zea mays
cccacgcgtccgaccacgcgtccgggacgcgtgggcgcacttcctctcctggcactcgggccgccctgcccacgcctccgagctcctctccttccactcctcagaatacatagaggagctcgtccagacgaacgccaccggagccaagaacaagctctgtgagggcacgttcttgaacccgggctcctggggtgcggcgcttctagcggccgggaccacgctctcctccgcgaacacatactagacgggcaggggaacctggcctacgcgttggttcgccccctggccaccacgcg

SEQ ID NO: 354942 - DNA, 325 bp, Zea mays
gatctaacaagcaagcggccggagcagctggtctctctctctagctacgtataacagggagcagaagcttgtgcgagtggcaaacgcgcgcgcgatggcggctcggggaagaggcagtgcaggcagtagcagcagggcgccgtctgtcgctggtaccgcgctcctgtgtgtagctgtagccgtgctcctgctggcggccaccccggccgcggtggcggggacgacgtacctcgtcggtgacgccgctgggtggacgctcaaggttgactacggccggtgggtggcgggcaagaccttccacgccggcgacatcctcgtgttcaag

SEQ ID NO: 354943 - DNA, 332 bp, Zea mays
gcaacgagcagtctgacggtacttagaacaacagcagaacaaaagaagtatattcagatatatatatatctcggtagaagtgtagcagaggtgaccatgagctactggggaagcccaggcggggcgccgtcgtgggcggcgagccgggggccgtcgccggtggtgccgctgctcgtggtggcggcgctgggatgggtcatctgccaggagaccctgatggggtggtacgagcaggtgacggaggtgcaggagacggtggcggacaacgccgtgctcctggtcctcggcgccggggtgctgctgctggccctggccgtggccggcaaccggag

SEQ ID NO: 354944 - DNA, 320 bp, Zea mays
gctaccaccacgtgcaccagctggccggctaccacttggtggtgagcccgccggcgaggttcctcgtcgctggccgttaattcaacagagcacctgcttgcatgcattgctagctgcttggacgcccggccggcgacggtggtctaaaatggtctggtcgtatcgtcggttatggttgagcttgagcttgaacactcttttcttcctcttcttcttcggcgtcatcgtaagtagattagagatccgggcgcgcgcagaactttgttcaagtgcttgctgcttgctttaatttgccgtctgttaacgtttgtttcactctg

SEQ ID NO: 354945 - DNA, 144 bp, Zea mays
cccacgcgtccggtccttcgttttcggttcatcgctcacattcgttcgtgtgctttatactccaacgacctctcagagtcagcccatctttttgtcaacactcccaacaaaaacaaacacttcagtcaccatgcgtttctccgt

SEQ ID NO: 354946 - DNA, 309 bp, Zea mays
atgacttctcttgtctctaataattatcgtaaactgttctctgtcagcgtcagtagtcctgcctgattttgcttcgccacaccgcaaatttccacaaccaccccattcatgtcatgctcatgcaaaaggagcaggacaacattccctcactagctagaggctagagctgtgtcctgactgcagctcagctcaccaccaccaaccaaccacaccttcttcccatataaccatccatcgatcagcagcagcaactcaaggccggccgctggggagtctggaacatacctctagcagcctcgcctctgtagc

SEQ ID NO: 354947 - DNA, 194 bp, Zea mays
cgagacgcgtgggtgaatatggtaggacggcgtcactttgctcctaatttagagttactatgtcctacatgaaatcaattcaaacaacaataaattaggagcaaagaccctccatcctaccatattctgaaaccaaacacttacctaaatacatctgataagtaataacctatttggtaatatggcgctaatac

SEQ ID NO: 354948 - DNA, 309 bp, Zea mays
gcttcctgccagtgccaccatatatttcgtaggcgttgaggcagggagggagagatcagccatgcagttccacatggcgcagaagcggagggcgtactcccccggagcgtcacagtcgcagccgagcagcggacgaaggaagaagaggaatgcggtggtgacgctcggtggccaagggaggaggaaggagaggttcttcggggcgctgcggctgcggctgcggctgcggatgcgatggccgtggctcgcgtccgtgtaccggcgcgcgctgcggcggctgaggacgagctacgagcaggccctgcgtga

SEQ ID NO: 354949 - DNA, 317 bp, Zea mays
tttttcgttttttatggctcgacaaaattaaatacacgtttattcaccgcgcaaacacaaaaactaaaatacggttaaaagaatgaagcaacggaaacactctacaagcctcagatcgccaaaaggaactctaaatcgttaaactaagttcggtggaaggaccggaggacagccgccgcttcttgaccggcaaggggctctgcacctcttcctcctctcggcaccttgccgcgccggcggccgacaccaaattcagatcgaagcccctcaagctcgacgcggactccgacgccgccgacgcggtgagcgacaccgag

SEQ ID NO: 354950 - DNA, 309 bp, Zea mays
gggaaattcaacgtcgccgaagggaacttcctcgtggcgcacacccactcggaggagctagagaggcagaggattctcctgtcagaggtggtgaacccgatgcaaggatgcttcgggtgcttcccccgcctgggtctgaatcagtcgtctcccgcctcgaaagcctcgtcggtcggttctgagagctcgaggaggaatccttctaccatgggatctgctaggctttcgccgtcgtaatgtctctctacgaagggggatcgagctgaaggagttgagcaaaggctattacgatgcttggtatgattcaga

SEQ ID NO: 354951 - DNA, 327 bp, Zea mays
gggattgctgaatagcaacatgagcctttcctcattagcttctcttgcagaagaaaccttcaagtccaagttcgtcgactgccacaaggactgtgttcctggccttgcagatgcttatgctgcagcttgtgctagtattgtgccctcgacagtgtaagttaagccgtttcaaaaacaaaaacagtgtaagttaagcttctcattttgtgttttaaaaaaaaaaaaaaaaaaaaaaacagcctcaccaagaggaagccgtgctccgcgcccaagtggaaggagatgactgggagcggcattttcgctgccgggagcaatggagacgct

SEQ ID NO: 354952 - DNA, 335 bp, Zea mays
gcctgatgtaccctctcgccatggtcatcggcgccgccaacgcgctcgtcatggtcacgacgattgggctggagggcgcgttggtaggggaggaccttaacggctgcgccttcgtctacggctccctcagcttcctggacaagatctcctgcggaatcgccctgttcgcgctagaatcgtacgaagacacgatggtgagctacggcgagacgaggggcctcaacacggtgagcaggtacgggacgggcctgatcccctcctgcttcgccgtactctccctggtggtcacctccacgctgaggctgcaggacgacaccccgagagccgccgctgca

SEQ ID NO: 354953 - DNA, 337 bp, Zea mays
ctgacctcaaaagattctaccttatccttatggattcatcttgccctagtaagcataattattccacactaatgtaacaaccatgatctaatccaaagtaattagatattatctactcatatccgatctaatctagatcctatctaatctaatacgatctaatctaatgtggtctacttaatcagactagtgacactggtaagaaaagattagaccctacaagccaggtgttaacttaacttagtatagtaaaccaactcagtcacatacatgagagctatcccaaccaatagagtcatgatgaattacataatctgtctatccccacctaacatca

SEQ ID NO: 354954 - DNA, 317 bp, Zea mays
atcgctcaaatgtacttatctggatggagcgtgccaattcatgatgggggcttgacgggcaacaaactgagcaacccagatgtgcttgtcatcacactaccgttcctctatctggtgcttgtcccagtaatagtccttacatatggtctgtttgcagaaaaggctactgtgtttttgcagcacagaagaagagtagtatactctcttgactcaacaaatgtgcatgccgagtcaccaagattgctgccagttgctccaagggcttcactaatgaaattcgccgacaagatggtgtccatggtgatccaattttgtgg

SEQ ID NO: 354955 - DNA, 146 bp, Zea mays
cggacgcgtgggcggacgcgtggggcatacacaaaccatggttctttgccttgctaggtttggaatatgtgttttctttatatatcattgcgtctaaatgcttaattcaagatgacaggaaagtaatatttgtgctgtttttttcc

SEQ ID NO: 354956 - DNA, 310 bp, Zea mays
gccaaagccagcttgatcggtgacgatttattagctagccgtcgtctgatagctcaattggttagctgattaacgtggtgcagaagaagaagttgagctagctagcgatggtggtttcaatattgactcacccgttcatggctgctgcggcgtgcgtcgccgtcgcgttggctctgttggccacgaccagcagcgcgcagctggacccgcacttctacgacaaggcgtgcccggtggcgctccccagcatcaagaggctcgtggaggatgctgttgccgcggaccccgctatgtcgcgtcgctgctgcgg

SEQ ID NO: 354957 - DNA, 307 bp, Zea mays
cccacgcgtccgtttttattttttttttttttttttgtttttttttttggacacgacaataccttgtttttgttcctatccttcctcaacaacaacaacaaaaaacaaaacaatgaaagacatgaatcttgccaccacaagagtggagacggagagactagagagagaggggaaaggagaagaggaaacaagtatatgtatagaacaacaacagaaaaaaaaagagagagagacacggcgtgaagtgaggtgagcagctgatctgaagtgaatgaaacctgcagcagagcagaggaaagacggggag

SEQ ID NO: 354958 - DNA, 303 bp, Zea mays
cgtgagcgtgggtgtatttttttttttttttttttttttttttttttttttaaaggacaacacatcattcaggcattatgtaaagtggacacctgtatacaaccagaaaaccagcagcccaaaatcaatcagtgatcaatctagtggcagcctaatctacattgaaatgcacaaacagacgtgcatgtaacaaccaaatcaaccaattcacacgcggagtgaagatgaaaaaattgtaccatgtatatgtattgcagtaataataattttgggagctacaaaagagattttagagcaaatgta

SEQ ID NO: 354959 - DNA, 294 bp, Zea mays
cccactcgtccgcccacgcgtccgcccacccgtcctaccacgcgtccgcggaccgtggcgacctggcgcgcgtcgagttttcgtgtggagctctctgctcacacgtactcgctctttctttgttgccgcgcgcacgaattttatctgcacgtcacagcgtgtcgagttcccacaccatgatcgcctctgtcgcaagcttgctagccacaattattttgaccacgtcagcacgcgactgaggtcgtgtttatcgaattcgccaacaatttgttgccgattcgaccgccgtcgctt

SEQ ID NO: 354960 - DNA, 297 bp, Zea mays
tgccctctccgatactcttccttcctcggtccacctctctctctttccctctctctctcccggccctctatctccttagctgcaaagaacacgctgttcgatcgtctcgtgctagcgtggtagtctggaagcgtctccttttttttttcttcctgttcgatccagtcctgtccgtccaatccaatccaagctcctcccttcaccccaaagggacgagagagagagagagagagagagagagagagagagagaggggtcctccatggccaggcctgctgtccaccctcgtcacggcag

SEQ ID NO: 354961 - DNA, 309 bp, Zea mays
ggagctgctgcacgattatactggaatgtctagcggtagtatactttgctagtactcaatacgggtctccttacaaatgactttcctgtttagggacttagcactctagtgtcaagactatttgctggaatatctgatattagcagtttctgtagtggctcagctgcagcctggtttagaatgatggggacagttggccgtgccatgcaaaataaagtgtgtgaaagcaactgcctcttaaactatgggtggtgcaagcaggttatttgaaggggctctccacactgtatctccagttaactatgactg

SEQ ID NO: 354962 - DNA, 309 bp, Zea mays
ggcgcggacttcatcgagacggacgtactcgcgtccaaggacgggcatctcgtctgcttccacgatgtgacgctggacgcgaccaccgacgtcgcggaccacgcggagttcgctggcaggaagaggacctacgaggtccaaggagaagatgtcaccggatggttcatcgtggacttcactcttgaagagctcagatcactgagggtgaagcagcggttcagtttcagggaccagcggtacaacggcaagtaccagatcattacgttcgaagagtacatcctgatcgcgctctacgctgacaggaccgtc

SEQ ID NO: 354963 - DNA, 304 bp, Zea mays
gatacatttcactgtatatcattgcacgacagatccatttagtacctttttctgagttaaactacttcaaacattgctgaagactacaaccagcctacagttgttgtaattgaagcgggtcaagacatagcatttgcaaagatttagttcattctcatcactctgcaatattcggttcatggcctgtcttattttttcccctacaagtcatctacgacagtttgccagtagcactaaatcttttaactgtggttctctactatgtgtaatctcatatcaagattaatgagtatcgtgatcgtat

SEQ ID NO: 354964 - DNA, 304 bp, Zea mays
ctagttctagatcgcgagcagccgccctttattttttttttttgaacaacaaaaaaatccacttaaatgtcaacaacaacgaaaacaacagtgtgactccttaactatacataagaaagtttcacatcaagcatccaacatgtacacgtcttggaagcgatatctatatatacaggagcagtaggacttacacactttcgaacacacactacacacttgatagagcgaggtgaccaagcaatcactggttgaggtttctcactttctgctcggtgtgacttggaacatttcttaggctccgaag

SEQ ID NO: 354965 - DNA, 233 bp, Zea mays
cggacgcgtggcggacgcgtgggctcgagcggtgccacacggccacattgccacaagcccacaaccagacggggagagagcgaaaaacggggcgaccgagctacctcgccgtcgacatcggctcccctccctcctcccataccgttgccctacccccactaccgcggcccgtggcctcgccggggtcctcctcgctgcgctcgctcggaaccagaggcctcgcgacgtcttgc

SEQ ID NO: 354966 - DNA, 296 bp, Zea mays
ctgcttcgcgccaccgcagcgaagaagcagaggaacgtacagatggtgggtccgcagaacctgcccaagcaagggaacacgaacaacaaccgtagtttccagcctagcggtagcgccaagccaaggagtagcggcaacgtcaatagcaacaggaactggtcaagatgagaggcaccgattccaattccgattccaattccttcaagagcgccaggatcccttttttttttcttttttctttttacatcggctacaacaatttttagtctaggccagtagtacataaacagcaataa

SEQ ID NO: 354967 - DNA, 270 bp, Zea mays
atacacacacgcgtccgcggaccgtgggcgcacctggtgtggaaccaagattgatgagctcgagcagagcatcaacgatctcaaagctgagatgggcactgagacgccggtcaagaagcctgagcagccacaccctgctgactctgcgtaacttgggtgtaaccagagattggtgtgggaagatttgatgatggtgtgacaaatttcagcagtacgtgatcgtatctgttttcatgagtcctggcaggtatgtagacacgaacccatcgt

SEQ ID NO: 354968 - DNA, 295 bp, Zea mays
attcttcagtacctttacaaataacttgacccatctaagaggaacaatgtggcattgtaattgtaaacatgaagaaagagccacccaaattcgtgttgaagaggactttaatctggtcggtgggagtgcacaccaaattttttagttcttgttatttattgtcttcttcttactcctgtttccacatcaatgatatgctgatttacattttattgctattcgtctatttccctctcatatctatgcatgtgaagttcctatgctatttttatgggcaactactactccctcaatt

SEQ ID NO: 354969 - DNA, 319 bp, Zea mays
ggatcagaaagagacaaaatcatcgaaggattccaaagaaccgaagccatcaaaagatgcaaagcaaccaaagccatcaaaagatacaaacgagccaaagccaccaaaggattcaaagtcgtcacccaaggactccaaagaacagaagaaggcggcgctgaaagatccgaagaaagcaccgaaggattctaaaggactgaagaaagcgctgaaggatccgaaagaacaggaatcattggaagactcaaaggaacatacagcgaagaaggccggcaagcgtgtgacgttcgccgaggtggagcctgagaaggagctcaag

SEQ ID NO: 354970 - DNA, 287 bp, Zea mays
cgagaccgtggcgtccgcacaaatcccgtgctcccccgtctgaaaaccctccccaacttcggcggcggcggcggcgctggcgaacgggtactctctccggcgagtctcccccctagtaaccaggaaatatggatgtacccggtgatgaacccgtggaggacctcacttgaagtcctaataaccctggcaatgagggagaagccactacttatggtaatgtgcaagattagttccagggaggaccaggaaagccttacgagggaccccaagaccccatgcaagacgag

SEQ ID NO: 354971 - DNA, 302 bp, Zea mays
cggacggtgggcgagacgcgtgggatcaataccatactcaacaagtgaagaagcgaaagcggtgggtatagcttagtctgtctcagaagttacagtgatactgttgtcttgaggttgacattagtatgatgtgaattgatcttaattagcatccgtttcttctatgcttgttgttaatgtaatcatttcttggagtctaagcgagccttccctagcagctaatactttctcgtggaacttcaaacaatagggttgacatgattacttggcctacctttttagaaacactgaatgaagtgtcc

SEQ ID NO: 354972 - DNA, 241 bp, Zea mays
ggacctgggcgcggcggcggctcgacacaaccggcgcgacggcggcttcgacgcgaccggcgcgacggcggcgcacagccccgacgactgaccctaccttctgccttctccccgatgcctacaacaccaagtagagttagggaatgtgaacctcctccctcttgggatccggtaccaactcctaaagatgagctttcatagtgggattttgagcggatcaagaatcagctttgacttgggc

SEQ ID NO: 354973 - DNA, 193 bp, Zea mays
ccacgtgccgtcactcgtccgtccaggccgatgactcaagtgctgccacgcgggaatggattcctatgactgtcgtcgcacgccggtgcgacgggcacgtgaacggatcactgttggacattcacctctcaggttcacaacagccggtcaccgcgtgctcactagcggtgcggtcacgctattcgctgcactc

SEQ ID NO: 354974 - DNA, 302 bp, Zea mays
cggacgcgtggcgtgacgcgtgggttcatctgatacatgtgttgcattattcaccctttcagtgctctttaacatgtgtgcgcatgacttaggagtattagctaatttatgttcagctgcatttattgtcacacatttttttgtggaaaacttgaacctagacaaaatctgcatcgttgcttaattagttgatttattccttcaggtttctgttcatttcctctgaaatatattttgggatggacctcggccagaagtgctggcagcaaaagagacaaacaagcaacccttttttgactttg

SEQ ID NO: 354975 - DNA, 241 bp, Zea mays
cggacgcgtgtgccgaccaccgacaagcaaacagctatttaccaccgcagagcttacacacagtttgcaattgcataatagctgtatgcttgtccgccgtcgccactagcgaaacatctgaccgaccgtatcctccgtagcaaggccacttcgatgtaagtgattgaagtcccacgcgtccgttttttttttttttttttatgtaaatatattccgatataatttgctatcatggtactgc

SEQ ID NO: 354976 - DNA, 316 bp, Zea mays
gcgagcggccgcccttttttttttttttttttttttttttatgacaattacaacaaaaaagaattccatattcgccaatagtaactaacaatatttcagtaatattggcgtgtcacatcacatctgcttcaaaatcaatatctggttacttctgatacgctgctgatcaaaatctgacagtgttccaagacgatccagacgacgacaactcgctcattgcctcactctcaaatcaagcttctacacatgctgaatatgaacaacacctcgaagttcctcttccccctcgttctcccacccaatctcattctaacat

SEQ ID NO: 354977 - DNA, 311 bp, Zea mays
ttttatttatttttttcacaaggctcccattaccgacaagactgctacctcagaagtaactccacccctaaatactgaaggacaaaatcctgttgtacaggatcctcccacatatggtgccccaaagtttgatagaacccctctgacagaagcaactcctgaactggttggaaggaatatttccactcaaactgcagttgttgaacctcgccatgtatcacgtgaacaatgtgctcgccaattatttaagttcatttattcccaacaactagacccgagcatgaccatcattgattttggaggatatggtg

SEQ ID NO: 354978 - DNA, 248 bp, Zea mays
gctcaacaaaggttcgcccatgcgcaaatgagaccacaagcgtctcaacaacctgcactgtctccacagaaggtgcctggtcaaggtctgtcgaggacagcatcaattgcagcattaaattcacaactgtctggatcatcacaaaatggacagatggtggcaatgtctatgcctcagcaacagcagtggttaaagcaaatacaatcatccatgggctcaccagtttccccacagcaacaatatcaaca

SEQ ID NO: 354979 - DNA, 219 bp, Zea mays
tgcctgttctgagctcccgtcagcatcacttgtaaagttcttataagtacagactagaactagacatgcatacaagagaatagacagtcgatgtttctatctgtttttgtttcattctatggcccttgtcacacgagcaccagatttttttttttctttccttttggtaccatgatggacgtgagagttccttgagatgatcaaaacatctatctttcc

SEQ ID NO: 354980 - DNA, 206 bp, Zea mays
gactagttctagaccggagacttgggggcttcacctgctgtatctcattaccatctgcatctggttgcccgttgattgagaaggaggagctgagggccatggcgaccgagaagcccatcctgtacaacgcctggatcagctcctgctcacacctttgaggttgagtgcgatgcgaacacggtgggaggactagttctagatcgcga

SEQ ID NO: 354981 - DNA, 295 bp, Zea mays
gtgatccatcgcttaagccatggtactagtggtcttggcaagttttacctttggcgctctcttggcatgaacaaagtcgtgacaacctagggtatttaactgagataccagtagtattacttcaggctatactgtacattgcaatcatagcagtgacccgactgacgaggcctaccttgaacaagatgtgctaaaacagacgtctggagagaaacactatattcatgctctatgctatcagagtcgtgactacttggtacatacttgctgactacaccatacacttcttcatcat

SEQ ID NO: 354982 - DNA, 315 bp, Zea mays
gcggcacaagcaatagcacatgaggacgagaagacgggagcagcattcggcaccatgaaagtgaagacgggcgcacaacgtaataacgctgcatcagagcaatccgcggcacacatatttgtgaagaccgtagcggcatttggattgaaggataagttcgatgacgagttctatgagaaagctatttgttgctaatggacggaacacggagcttgataggattgcatgcgctcatggttttgaggcaagccttggagatattgatgaggaactaatacagtcaaggaatgctatagaagctatatatattgccca

SEQ ID NO: 354983 - DNA, 170 bp, Zea mays
accacgcgtccgcggacgcgtgggctgcaacaagatacagtggatcgaatcgaaatgtgttgttaggcttgcaactatatatgcagattcttagttaagaggaattggcaaaggatatgacctagagacatgtagagcgcgggcctcgtggcgtcacggctcacggacgc

SEQ ID NO: 354984 - DNA, 299 bp, Zea mays
cccacgcgtccggctaaatttggcaaggatttctccaaaatcgccagtttcattacacataaatctactgcagactgtgtggagttctactataagcatcataaatcagatagcttccgagaagtgaagaaactattggaccttcgtcaacagcaacccaccagcaattttcttggagcgaaatctggacataaatggaatcctgagtcaaatgctgcttctcctgatatgcttggggtagcatcagtagtagcagcccatggccttgaatatgcaaaacaagtggagaaaatttctgc

SEQ ID NO: 354985 - DNA, 117 bp, Zea mays
gtcctcgataagatacgacgagtgcacaccacctttcaccactccgatcgaatcgatagccaccgagggcgaaaagaagatgataacactcaaaagctccgattacgatgaattcga

SEQ ID NO: 354986 - DNA, 310 bp, Zea mays
aaaacgtcacaagaggaggagataggcacacggcgtgccgcggtgggcgaccttttttgcaccgggagataaatcgacagcaccctgacctcaagtcctcaacccgcaagccgcagctgctcccgcccgccgcgcaacgctcaagcgccgccggttcttctcgagcaattctcataaatcattgtcctcataacttgtaatgggtggaagccagtatgatgatgactgggtgttgcccagtgccgatatcactcttgttctggttgggaaacttggctatggcaagagtgcaacttgaaatagcatcctt

SEQ ID NO: 354987 - DNA, 307 bp, Zea mays
tggagatgaaagtaggggcaacttcttccagaaatgacgggagacctggccagttgaagtatgcaaacaacagggagactatcgccagcaaatacacttctattagagaacagaaccggcagtcagggaaggtagtgagaaaggaaatttcaccgaactctatatctttgctcgaagaaagacattcagagcaggggtccaatgctggtgtaccaccaactggtgtgtctgcaacatgggcctcgatgaagattggttttcaaaatttcaaagcaaatatgggttctaagaagtttcttcctttgcg

SEQ ID NO: 354988 - DNA, 124 bp, Zea mays
agatctcggacttcgggctggcgaacgtgatgagcccggagcagtcggggctgttcacgacgatgcgctgcacgcggacgtagctggtcgcggagtggctcatgaacgcgcccatcagcgacaa

SEQ ID NO: 354989 - DNA, 248 bp, Zea mays
cttcctactccgtgtcattttcttgcccttcaatccttctaaacatcaatttctctggtcagaaatggtttacattcgctcccgtactttctgctgctgcattcccgttcgctttggtgtcttcattttatctttggcgggcgtcattctcagtacgcttatcgctgctgcaggatgggtgcaggtcgctcagataaaaacccacaagccgtcgacctccgacgcgatcgcctttggttacattcggt

SEQ ID NO: 354990 - DNA, 292 bp, Zea mays
atggagcattcctcgaggccgaccctggggtttcccctgggaactgctctcctgctcctcgtcatctttgccctgagcggcatgttctcgtgttgctaccactgggacaagctccgcgccctcctccggtctcggcatcccgacatgttcctggaggccgaggagcatacggccgtctccgtggcgtcgtcatcgccgccgagaaaggcgatttctggttacaagctggagagatcgggggaagagcgccgtgtgcccgttattattatgcctggagacaaggtccccaagt

SEQ ID NO: 354991 - DNA, 284 bp, Zea mays
gttactgcatgggtaatatttgaaccaaaaagattggtcatgtataagtttttctcaggaagacgacctgttgagagccataagtaatgtacaggcagctagtctcgtggagtcatctattgatgatatttagcgggtctgtgatagaaactaaaaataagaacaagttattacagttttgcttgatttttgaacaatttaaagcaacaaaagttgagtaattcagccctaaaaaaaaaaaaaaaaaaaaaaaagaaaaaaaaaaaaaaaaagaagaaaagaaa

SEQ ID NO: 354992 - DNA, 285 bp, Zea mays
agaccgtggcgtctctccaagctgtggcatcatctgccctttgttatgccggcctctttgaattgatcttgtgctgctacagcattgttagacgagcatagacggaaaacacaaacaaagccgccgcgatgccagggagctcgcgcattcctcagagcctccgcggcagtctggagagcgtcaagcgccgcagacaggcgctctccctcagcgtgatcaacctagacctcctcaaaaacatcctcttcttcttcttcgtgctccggtatacccggcggctgtggt

SEQ ID NO: 354993 - DNA, 318 bp, Zea mays
  unsure (1)..(318): unsure at all n locations
cccacgcgtacgcctgcctccacatcgcctgcatctatggccacgagaggttctgcagggacgtcctggcgctgacgacgaacagccagcagtctccggcggcggcgcctcttctcgtgaccatcaacgcggatggcgagacgccgctgctcgccgccgtggccagcagncagtctccgtggccttgtttatcctcgggcgctgtcgggaggagcggctgagcgaggcgatcctgacgcaggacaagcgcgggttcaacgcgctgcaccacaccatccgcaacgggcaccgggggctcgccctccagctggtcgacgc

SEQ ID NO: 354994 - DNA, 315 bp, Zea mays
cggacgcgtgggcggacgcgtgggcgcgtatcagtgccaaccaggcagccatcgccgcggccctcgtgcctctgcatcgcggcgcgccttggtgctccatccacgtaatccctgaagtgcggcacaggcgtggaggtatctcggcagtcggcagggcggctggagttcggtcccagaagagatggcggggggccctgatgtcgcgggcttgatcgaggatgatgcggtctccgtcatcacggaggtactgtatggaggggttgacgttcctgattccgctcatatggttttgtaatagatgccaacgcaacgcca

SEQ ID NO: 354995 - DNA, 307 bp, Zea mays
ctttatgtagcagaaagaaatagtgtgtgtttgtgtcttgacaagcagtcagaaagcaataacttggtcaacaatacttgctttgtgaaattgtggcgttatcatcttattgctaagtcatatttcttccttggaaagcttgaagaggctaaccagttcttaaagaagaatgatcaaataaaagtcatggggtgcaggtgtgggaatcaatctcaggactcaattttatcattctccatggctatctctgaactattgcggcttaaagctgctggcaatgaagcattccaatctggtaaatatttgg

SEQ ID NO: 354996 - DNA, 305 bp, Zea mays
cacgaaccggcggcaattcagcttcctggtccaagacctcatcagggacagagaggcctctcgcgttcgttacctaggtgaggtgaggagagaaatggcggcgggagcaggatcaggagcgtcggcgcccgtggcgtggctccttgcggctgccgtggcggcggcggcgctggcggcctcggcgtcggcgcagtccgggtgcacgatcacgctcatgagcctgtacccgtgcctcgactacatcagcggcaacgtgtcgacgccgccggcttcgtgctgctcgcatctcgccagcgtcgtgcaga

SEQ ID NO: 354997 - DNA, 301 bp, Zea mays
gccaggagaaaatggcggcggaccgccgtcacagcagggctctcgcgctgagcaataaggcaatggcgacgccaagcgaagggccgccggccactactggtggtggtggtgaacgcggtggtagtaataataaggcccatctcagtctctttgagatcgcggggttcgacgaggatgacgaccatgtctaccgtggtgatcattattggacgagcagttccctcttcgacgatggcaattatcgttgcagtaatgaggaagaagaagaagacgtccaccaggaagacggtgctgatgatct

SEQ ID NO: 354998 - DNA, 277 bp, Zea mays
aaaatagagagaccaaatattagttactaaaaccaaacaacttgacgccactgggaatcctcccaaaacaatgcatatcaagatgcaaatgtcaacgcgctatggcctaaaaaatgtctacttgggaagtggcggtatgctctgctcgttcctgaagtagtcagtgggatccactgccgccttcactgccgccagccgccggtagttccccatgaagtatctctccgcccacgccctggcgctccagtacgatgacaagccgtcgctgccgatgacg

SEQ ID NO: 354999 - DNA, 234 bp, Zea mays
gtcgccgcgggagctggcgcgcgtcaccgccgagggcgtcgcggatatggtggacgagtcggtggccatggcgttcggagacgcgtgtggatgtaagtacgtgcgcatccaggcccgcaaagcgccggctccgctccacgcggcagcgggagcgatgcttgcgcacgcagctttggagtcggtgctgttccgggggcgaaagctgtcggagcggaacaacgcggagaaggttga

SEQ ID NO: 355000 - DNA, 305 bp, Zea mays
cggacgcgtgggcggacgcgtgggaaaaataagtcgcataggaaactagcacgaaaaaggtattctctggtgtttatggcatgctagtttaaaaatctaaggttatatgaagatatggataatcactgtaacataacccctttacagtccatctgaagtaaacactagtcaaagccatgataataagtggacatggccatctggatcaccacagaaatgggttctatgctgttcagccctttctgccgcagaaaagggtattgtatcagaactcgcaaaaatagctggtgtgccaatctcaacaa

SEQ ID NO: 355001 - DNA, 302 bp, Zea mays
cccacgcgtccggaaacacatgagccgcatggcagtcagcgccccgacttttccgccttccttgcaccaccccgtcatatctcggcaacaatttctcggcgccaaccggccgatccatcctcgtcgtaagtctgcgctttcatcccttattgttccaggaacaaacaaaatctacaggtttccaagacaccaggacggagacatcgaggaggcggcggagacgcagccgcttccttccgcttctgagccgtataacaacaaacccctcggccccgtcccctctgtccatcgatcaccttgac

SEQ ID NO: 355002 - DNA, 273 bp, Zea mays
aagaaaacgatttcactgaacagtagagctcttttgactagatcatgccaattgtccctctaattctttttgttgggtttttgaatatagcaattgatcttgttttattgtgtgggtcttataccacctatgtttatatttacttgttgtatcggatataaatatgatctctggtcaaagtatgtgctagcgaaattcaataattttattacgataaagaagtaacttcgatggtggtctatttgtatcaattttacgctttacggataatgg

SEQ ID NO: 355003 - DNA, 266 bp, Zea mays
attcattttcaaacttgtcggtgacccattatgcaaaagaacacacgtcactgctctacccttgttagtgacatgcatttgaaaacaaaaacttgtcatcgcgccacggcctaattaacacaactagcggcgagaatcccacgacgccggcgactgcatcgccgacgcggtctttgccgtcgcggtgcctgacgtcgctgtcgccgacgacagccgcggtgtggccacctgcttgatggccacgttctgaagctggctgcgcgccg

SEQ ID NO: 355004 - DNA, 266 bp, Zea mays
cggacgcgtggggaaacattcgctgctcatggttcatgaatggcgagcggtggcgtggtggcgtctctactgtcgtcggcgaccaagctgctcgacctcctccggggtgcgccgtctgtttctcgccgtgcagggcagcagcagccggtttccgcagacgtgcatcggttgcagcggctgctgaggaggatccaggccacgatcgatgacgctggggagagggagatccgggacagttctgtgaagctatggatcgcagagatcac

SEQ ID NO: 355005 - DNA, 262 bp, Zea mays
ggagaagtaagtgaagaaaaaaaaaagaaacaaatatgaatccactgcagaaccttggtgaggagctgggatatggaggacactttggtcaacaaacgcagccagctgtgtgttatctcgacatggagttaaatggtcatcagaccgttcacttgcacgattcttatatgaaccaccccaatataccacaacacttggtggtctctcaactccagcaacaacaacagaacctcagaccattcccatccacttcagcgtcatc

SEQ ID NO: 355006 - DNA, 319 bp, Zea mays
cttgttttgcttttttttattatgaagattatatatatcgtcttgttcaaagaaggcgtcagagagtacgtaaggacactgaggaatgggtcactggaagagcagtcaccgcagcggaagggacgaggcagctcgagcgaaggaaacccggtgcctggctctcgcctgctagccctgctactacgtgctcggctccgtcgccaggggggttgcgaggtgcctcttcgtggcttgctatccagtgatacaatgctgtggcctcgacgagtgcaggcaccaccaccactccagcaacttcagccacttcagatgatgcatg

SEQ ID NO: 355007 - DNA, 232 bp, Zea mays
cggacggtgggctgacgcgtgggcggacgcgtgggtttttttttggagaggcgaaatcaacttctgttttagctaaaaaccgattgattgcaaagtctggtagcaaaatagcctgcacagtattgacaacacaggctacgcggtctcaccaaatctgaaaaatgatgattgaacctttgactctacaaaaaaaaatgcagaaccatctcaaatcctatcaagcaatcagcta

SEQ ID NO: 355008 - DNA, 312 bp, Zea mays
gaaaaaatatttttctttggctgggtacggagaagcaaacagccaccccaaaatatggtccagattcacaaaaatcgaggaaatcaagttcttaaagcggaggtacaaacacaggaagtcagtaaagtagataaagatgttcataatgtcacagtagtgagagacaggagttcaaaactttacagctttggttcatcgcaggggatagaattagaaaagctgttggaagcatctgccgaggttcttgggaaaggcaagtatggaaccacataccagactacactgcatgatggttccacgttaattataaag

SEQ ID NO: 355009 - DNA, 246 bp, Zea mays
cagaagataagaagttcttggaaagtaaccttgctccaatgcagaaggagggaacattctctgggcagggtaaaataatgggatggaatcctccaattaataatggtacaggtcctagtaaggtcctaacaataggtgggttgaacaataagtccacaatggtgagtccagcaagcatttgaggaccggcctccggtaaccaaggtaatttccaaggggcggctcaaccttcggtggcttaaggct

SEQ ID NO: 355010 - DNA, 301 bp, Zea mays
  unsure (1)..(301): unsure at all n locations
cggacgcgtgggcggacgcgtgggattttgcagctaaattgacaaaatcacctactgttttagccttttagatatgtttatatagttgtgtagcactattctacatcntcccttatacctaactgtacatacatatcagcagtttccaaaataagaaaccacatgttgatttgctggtgttgcagtatttttttgcaataagaaatggaatgcaaagtctggctcttgttacatctgaatcagtaagaatggtgtggctgttataagaaattatgtgtaaagtttggcttcgattacatgt

SEQ ID NO: 355011 - DNA, 261 bp, Zea mays
gcggaaggcgtcgactttgctgtctccagcgacggggcccgcggtctttggcggcggagtcgaggtgtttctgccgggcttaattccccggttgttctcccctcttagccaaggtttcccttcagtcctctcggagtggaatgccctaaagcaatgcatcttctctttgaatgagctctggatgcagctaagaggcaaagaagatttggtaccttgcattagggtggacatgttacgcatagtttaaattctctgacagtg

SEQ ID NO: 355012 - DNA, 302 bp, Zea mays
cggacgcgtgggcggacgcgtggggcaatacagtccgatgaaggtggattgggcgaacaagtgggcagtcattccatataatggatcgccagcatacttgcaaggtgcgcaggtgacattaccagccggcgctgtcaccgaacttttgctcttgtcagtggaatcacaggctacacccgctggacaatcggtcgatccaaaagtccaagcagttctggatcagttcgtggaggtatttgaggatccagtcggcttaccaccaagcagaacatgcgaccacactataccattggttccaggga

SEQ ID NO: 355013 - DNA, 299 bp, Zea mays
cgttattccattcatcagtgttcatgtaaatcaattagcaaaaaagggaaagtttggttactaaatactgagcaagtctatgattaaaaagtgtgtttggttttagaaataagttagtccatcatattctcacttctcttttttttactttatggaatgaaatgagtcgaccatcactatttcattgttcttaggctaataattagtaataatatgagaaatatgtctattccaccaaattcatgaaattgactcgagatgcactaactcatctagaatagattgatccatcaaatcaa

SEQ ID NO: 355014 - DNA, 213 bp, Zea mays
ggaccgggccggggtgtctggggctgggtctgggtctaggcgagagcaagatgggcaacctggtctcgggtgccgcggcggcgagctgcggactggaaggtggtgatggcggagggcagcgtgctggcgctcagcgagccggtgtccgtggcggactcatgatggaccacccgcggcacttcgtcgtcgacgcgcggatgctcaagaagctgg

SEQ ID NO: 355015 - DNA, 271 bp, Zea mays
gcatttttgcaaaattaagcaagggttaaggttgtatagaagttcccttctcctgactcccaccttctgttggagcttttagcactagatatgccctcatcggttatcactttggatgatatgaggttattcttgctgagttcaacttgttagatttgtatatctggacaagccttatatgagcatgggaatctgttccattcaccatttctctttgtggttaaggtgggaacgagtcatattggcttttcagcatgatgtttctatggtc

SEQ ID NO: 355016 - DNA, 287 bp, Zea mays
ctcgaacacagtccgcgacgtgcgacgtggcggacgcgtggtgagcgatgagacgttcatcatcgcggcgctgatggctatgcggcaccccaagtcgctggtgctctactgcgcgctgtcggcgcttgtggttatgacggtgctgtctactggactaggcaggattgttccgaatttgatatcgaggaagcacactaacagcgcacagtcagtcctctatgcattttttgggctacggctcctgtacatcgcttggaggtcagattccaaggcatcacagaagaagg

SEQ ID NO: 355017 - DNA, 289 bp, Zea mays
ctgcaattcacttgtaatgcagagggacacctctggtttaaccactgagaacagggagctgaagctccggctgcaggccatggaagaacaagctaaactccgagatggtacgtagtctttctccggaaggtcttgagccactatcataccaggcccagaaagcgactcactttccctgtttcaagatcattacaaggcaaacgatatcaaccgatcagttatctcctgtcctgaccaactttattctcttgaaaaatactgtagttatcttctgagcagataggtagat

SEQ ID NO: 355018 - DNA, 281 bp, Zea mays
acaagaagccacctcaggctcacgccgcggttccacacgagcaaatcccgccgcttcctccccacgcaccccttcccatccttcccgaagcacgaggcgagccgggccgccggatatggcgccggcggcgcgtacggcggggccgagtcgcagcggcaggcggacctactcaagcaggagggcaacgcctttttcaggaaggaacgcctcagcgccgccatcgacgcctacaccggggccataactctttgcccaaatgttgcagtatattggaccaaccg

SEQ ID NO: 355019 - DNA, 308 bp, Zea mays
ctcgaggtctgaacaatgttctatcgtctgaatggatgcctttccacttcgatggcctgtttaagactttggaccataccagagaggatggaaccgtgtataagcttccgaacccaccacgattccaattgtttactgctgtcacaccttctccttctgacactggtttcacactcttctctacatctacctttgttctgaagcatctaccagcctcccttcctctagagaccttgaagaaccttacgtggtctgttagaactacttcatttgagtcgacaaaattggacggcctgcctctaatagtt

SEQ ID NO: 355020 - DNA, 236 bp, Zea mays
  unsure (1)..(236): unsure at all n locations
gcgccgacgcgtggtgcgtcgtgtcgcggctgcccccgcagccccggccagtccgtcccctcgctcgctcgccaagtccagcaggcagatcagttggatcgatcggttcgcggaccggaaggaaaggaanggttgaagtatgagcgccgtggcggtttcgtcgtcgctgaacccggaccggcggtgttgatcgcggcgcgctgctgaggtggaggagttctcgcggagtggtggga

SEQ ID NO: 355021 - DNA, 288 bp, Zea mays
aatgtacgaaatcacggcaggtcacatctcagcaatcatgcaccaatttttttgaaagaatgtttatgcaatgtcactaggacaccagtaggaaactatcagctgcaataaccaagtaactaggagatgaccttggcacgactggctgagtcttccttgtgttcgacccacatcatgaaaacatagccaaggcaccacagcaacacgtactgaagcggaacccagcacagaagcgccacgaggctaagcatgctcccaacatactgtgggtctttgatgtaaccaaag

SEQ ID NO: 355022 - DNA, 216 bp, Zea mays
gaagcatccacgtttgtcgctcccacgctggcaatggccgccgccgcatctcccgccacctccgccgcggtccgctaacgcgccggcccacagacaaattggaatccgtccgggtcgtggtccggcgccattccgtatcggcttcctcggcaaaccggcctcacggtgggccgcaatgcctgtagcgcgtggagctcgccgcgcagtcgcagcggc

SEQ ID NO: 355023 - DNA, 263 bp, Zea mays
cggacggtgggtctagttctagatcgcgagcggccgccctttttttttttttttgcatgtaaaagcttacatagtgtattctttctttcctattttgaacttaaactaattcaaattaaagaacatggcgaactttagacttggcaccatggtttgtttacaaagtattattattagtatacaggcatcaccattgcccattgccacggcgatacatatagtctgaatatccctcccactagctaaattagtagtccccatct

SEQ ID NO: 355024 - DNA, 269 bp, Zea mays
cagcaattcatcacctcttctgacgcaacaagaccaagacatgctaagtgatgtcaagtacaggacatttatccctggtataagcaaaagccaagagttttacactaaggaaatacatcataatcaaagcaggttaagcaaaagtaacagccattcaccaagcagtggcaaccggaaagaggcgctatcgatcaggaggctgcttcctgtgatcgactttgagatcgaccggacaaaagcccttgatgtgattgatagagttgacgatc

SEQ ID NO: 355025 - DNA, 258 bp, Zea mays
cccttctcgtctagtcttgtttttctttcctcctctgttactccacctacagacctactactgccatcgggagggtaagctcttcggagccggagccgggtccacgttaacgccatcgagcgctgcgatgggcagcttaggagggagcgccggtgctggggacggcggcaaggtcgggctgccggcgcttgacgtgacgctcgcgttcccgcaggccacgcccgcatcgctcttcccgccagccgtttcggactacta

SEQ ID NO: 355026 - DNA, 259 bp, Zea mays
gtgcgcatgccgccgacactccattcccattcctctccactcacgccgagctcgttactcttctcccccattgaaatgctgctaatgtttcttcttgaacaccattaatagcagccgcccacgcccgcctcttctccttccccactagtcgtgccatcaagtagccccactcagctattaatggccgtcgaatcctgtcctctcgccatcgacgtctgtttcttctccaagttataaatagcagtgccggcgccctgtg

SEQ ID NO: 355027 - DNA, 256 bp, Zea mays
cccacgcgtccgcacacgcgtccgtttttttcaaatttaaatttgttttactttctactatatttataacggagggagtatataataacaaaatcaaaatatgtgggaagacttgtatgtggatgtctgcaacacattgcacaactaatgcatatatataccacgtttcacacacttaaatcataagagtgggagacgtgaccatctaccagccaggtgatgcatgccgaattcaggagaaacatcccttgggacg

SEQ ID NO: 355028 - DNA, 192 bp, Zea mays
cccacgcgtccgcccacgcgtccgctctccaatcccacagtcaagatggcctcctctgcccgtcagtttgcccgcgtggcaactcgtaccactacccgctccttcgccgctgctcctcgacaggctttccgccagcaaggccgccgcttctactcctctgagcccgagaagaagtccagctctcttgtctac

SEQ ID NO: 355029 - DNA, 305 bp, Zea mays
gatgcttataaccaactcaaagactactttgacttgaacacttgacgacaggaactcaaactggaaagtgcagggtcgatggctgcttggtagaagaacaattccagaagtatggggcacccagtttgacggtctggcatctcagccatttgggattcagaaatctttactattaattatattgctgtgatccttttgtcaatcagcttctttgccggttaactattttgttctgtgtatacgaggatataagcttaaatccgatgagatgcatgagttcagaggaattttcatgtagtttggca

SEQ ID NO: 355030 - DNA, 295 bp, Zea mays
ggacgcgtggaatgacagtactgaaaagtgtagcaacaaccacgcttgcttgtgtgtgatggagtgagagacaaggagagctgagtccaccaccctgtccgaattttttttgcattttaaccctttatcaggaataaaatcacttttggacctaaaaaaattttaatctcaattttggacccttttctcggcgccataagatgtggcgccgaggtaacacagctcggcgccacaggctgtggcgcgacgcatgacgtgtccatggcgaacagacgtgacgtgttaacacgcatga

SEQ ID NO: 355031 - DNA, 283 bp, Zea mays
gttgcccgtcagtgctgctccccaatagccaatagcaatagcaatcgcaatagcaggcgctgtacgacggtgtgccggcaccggctagctcgggcgctataaaatgggggcagccggtgggtgtggtgactactatcatcatttcaacctctctccctcggcctcgccggcgcacagcgcacgcttccaactgttggttgtggtggattccctccgccccggacgatcgatctttgcatggcacagcggctactccaagggcggcgatcctgggacttcgtca

SEQ ID NO: 355032 - DNA, 299 bp, Zea mays
gttctagatcgcgagcagccgcactttattttttttttttagctagtacgtgtacagagactactgcatcttttaaaaacaatataaagatatttacatcgctgcagctagctgagaatcaaatgaatctgcgcgctcggataagaaaactaatcaaacgcaaccagggaaacttgtgattaccccttcttcttcttcttcgttgctactgctaggctgctaatcctcactccatctcccccatggtctctagcttccatgcatgtggcatactggcttggaagacgccgtcttagtac

SEQ ID NO: 355033 - DNA, 297 bp, Zea mays
  unsure (1)..(297): unsure at all n locations
catcccatccccgtgcgccgagttcacggccgccaccaccaccaccacaaccgattgcacaaggccacgcggcttctggaagcttcccttcccttgccttgccttgcctctcaacccaaatcgccacggctccctccgcccgcagcgccctcggcacgaccgccggattcgcctctgggtggggttggttttgtttcccncancaccctacccacctctctcctctcctccaaggcttggcttgcctcgtgtcgtgtgtcgctccaccgcccgccatgccgacgaggcttgcccccc

SEQ ID NO: 355034 - DNA, 293 bp, Zea mays
cccacgcgtccggattgtctccgtccgcttctcgcttggttctggcttcctagttcgcaccacggcaccgcaaagcagatggtagtcgactacggattaaccccagcatctgctcgccattccggtccgtcgagtatttcgtcgaacagttggtaggggacctctagaacggatgggcagaggacaggatgagtcggtttcgtgattctcgatatctagtcatgccttcagctttctcgcggtcaatcaatccatcgctcatccggctgtaattgccgaatgggtagtcaaga

SEQ ID NO: 355035 - DNA, 174 bp, Zea mays
gtttgttaaacctgggctggaagaatagaatctgtaaacatatctgtacaactgtctatgtgttcatgtggcattgctgttaccttggatgatggatgttacaacattgttcagttgaaatgactaaaggtataaagagtagtgcaagcaggacttaatgcaatagagaagagg

SEQ ID NO: 355036 - DNA, 291 bp, Zea mays
accacgcgtccgcggaccgtggtgttcaaactctgatgtcgctgagtacaatctgagtttgaaatcacttttgaaggaaaatatatgttactagggtcaagaagctttgcaatttcaattgcataggctttgtcacccatcgtgtatatatacatctcaaacatattgcttgcttctttcagaagtgatttcaaactcagattgcactcagcgacatcagaaaggtcttgatgtgattcttggagctgaaagtgttgcagtgattcttgatgacactgagtatgtatggca

SEQ ID NO: 355037 - DNA, 287 bp, Zea mays
gggtcatgtgcaaacaagttgtattttctagtgcatcttaacccagtgcttgcatagttgcgtgaaacagaataatgtcgacacataacatgtatatctgtgaagtcatttccatttcccagtggcttgtaacatgaagcagtcaatgtttaataagtgatggaacatacgcatgcaggttgccaaatctcagagcaagcaaaacttcattgaaggtacaggtttctctgaaaacagaaaaaatacttagcgtctttccatgccatttcatgcctgtgttgtattca

SEQ ID NO: 355038 - DNA, 276 bp, Zea mays
accacgcgtccgcggaccgggaagtcggagtctttggactcggtaatcccggccctgtcctcccccgaccaaacacagtccctggatccatgggagtcgaggaggagcgcgacggcgaggagcaacgccgccccctcctctcctccaccccgccagccgcggcggacccgcagcagcaacagtaccagttcctggggcggagcacctcttcagtgctgcgcggcggtggcgggggctgggaagggcctgaggtgagcgccgacgaggtcaggtccg

SEQ ID NO: 355039 - DNA, 279 bp, Zea mays
cacccgtgtcttccaccaagaggaagccgccgccgatgccgcctccgcctgcatacccgctcccgcccgcgcccgccgcgcttgccggtgcccccgccccggccaaggtttgtagcgctactcgctagactagaattccgcgcgcggacctttgccggccgagccgttctgcggcatctcgacggggacaaccatgcgaatttccttggcgtccacgttgacgccacctgatccaccaccggtgaaggccggctggccgctgacctccgagacatggga

SEQ ID NO: 355040 - DNA, 279 bp, Zea mays
cgtacacttgacatgaaaatggctcttctaacaagcagatgtgcccctcggctgcctctgcggatctgtcacactgctagggctacgggagggctgctggtgccgcctcagctgctgctgcctcgtcaggataactggaagaagctgctaccactgcagcgcccgcccgcccctgcgcacccgcggcggctgttctgctcgttcagcgattttctgaaggcagcggaagccggtccagcgcgtcatggcgcgctactgtcgttcgccgtggcccggaaa

SEQ ID NO: 355041 - DNA, 276 bp, Zea mays
cttctaccgccccgctccgtcatccatggctcgtctgctcgcggcgcgacccttgcgctggcccgcccctcggggacgccatccgccctacgcttctgcccctcccgtgcgctgtcggacgaggtggagttcgtcgagatcgacctatccgaggagtcccctgcctcttcatccggaggggaatgcgcgggcgactcagccacggttcaggcgcagatggggtcgcggcgcctggaggacgccatctatggggtgctcgtgcgccgggcggcgccg

SEQ ID NO: 355042 - DNA, 280 bp, Zea mays
acaaaatccatccatcggatcatcagcatcttcatcacaacaaactccatctatccataccctgatacccatatacacaaacagctagctccactttctgatcgagagctatggcggctccaggtcgagttttcacactactcatgctgctcgcagctgcgggcaccatggccgctagtgacgccgccgtcgtccccgccaccacgtcaccgtctccggcaccgaccgggtggctaaaggcgcacgccacgttctatggaggcgctgatgcctcggacac

SEQ ID NO: 355043 - DNA, 323 bp, Zea mays
cgctcgttgcattgacatcctacatatctcctcctctctaggtaggctagctagcaaagctgcttgccgtgtgtgtccatctccagcaatggcttctggcgccggtgccgctgccgccgttgcggttttcgccattatggccctgtcttcgctggggcacccaaggaccgggccgttatgcagcgactgtggatcgctgtgcacagcgaactgcaccggagaggtcgccacctcctgcaggagttactgtgagaaccccctggctgctaggcagtcgtgcgagaggcaggtccttcaggcgtgcacggtgtccttctgctgct

SEQ ID NO: 355044 - DNA, 322 bp, Zea mays
gcggcgtcgacgaccatggctccgcggggtaccaagggtttgctcatgtggacaagcaacagcgtcatgttcatggagtattatcagatttcagatgcaacagtggatcaacagatcatatttctttgtatgtcgaggaattcaagcataagagctcacacagatcatctgttagatgtcttcctagtgcacagggaaatgtaacagaaatcagtcgcatgcaacctgttgcaaggaaagttcaggtagatatgaccttcaatgataaaggattgtgtcgtgctagcagaactgttgcaggaatgagaattcaacctaaata

SEQ ID NO: 355045 - DNA, 293 bp, Zea mays
cggacgcgtggaggacgtcagagcgcggagagagaggaccagtgagagaaactagaagccggccgccgctgcggatcctcgccggtggtgggaatcgacctccccgaatgccggcaccgcgacgttcagggccctggcaaggttgcttggggggaaatcgggtgaccaagcgctgagcttcgcacggctgggctgggacatggtgaccgccgccggggatttccatccgcgcggccggtctgccgtcggagaggggtcgtcagcaccgcaggcatcagctccggcatcatgga

SEQ ID NO: 355046 - DNA, 289 bp, Zea mays
ctagttctagatcgcgagcggccgccctttttttttttttttaatagaaaatcagttcatccaggaacccagttcaggagaggcccccaacatgagcaaagtagtagtgaagaacatatgagatgatatctacaggccatgcacggcccgtcgatcgcccagtggctctgtgctagcaggagctacactacatactcgtgagcacgacacctaaacccacatgatcatgattattcaacatgagaatcgaactgagactggaattaaacagccagaagggcttgttggt

SEQ ID NO: 355047 - DNA, 282 bp, Zea mays
cacgactaaggtcctggacctggcgacgtggctgacggcgtccgcggtggccgccatcaagcagagcaacccgaacgtgcgggtggccgtcagcatcggcggatccaccgtgaccgaccgccctgtgttcttcaacatcacctccgtcgactcctgggtccagaacgccgtctcctccctgaccaccatcatccagaagtacaacctggacggcatcgacatcgactacgagcagttccacgccgacccggccaccttcgccgagtgcatcggccgcctggt

SEQ ID NO: 355048 - DNA, 285 bp, Zea mays
cggacgcgtggttttttttttttttttttttttttttgtagagtcttgaggtttctatcattaaaacataacggagcatcaattttacatttcatttccttcttctctaccaataatcagctatacaccaccatcaatttgagtctcgttttaaatacagctgcaacaagtatactgactgaaaatgagacgaatgtagaagaatgaacaaagttgaacaataggcaacgaaattatgttctcaaaactcatccgatcctgaattgttgcggtcagctcgagttc

SEQ ID NO: 355049 - DNA, 322 bp, Zea mays
cccacgcgtccgctcactaatcagacttggatttcagacatacaaggagctcttgctgttggggttatttctgaataccttgctctatgggatattgtcacctcggttcagcttagacgcgaagtgaatgacactcacttctttcgtctcgccgccaatgggaagtattcaacaaaggcagtctatgagggtttttttccttgggtcgacgatttttgaaccgtaccacataatttggaaaacccgggctcctccaaaggccaagttcttcatgtggctggtcgcgacggctttggacagctaacaggttggaaaatacagg

SEQ ID NO: 355050 - DNA, 353 bp, Zea mays
aatcgctcctataggaactggtacgcctgccagtacggtccggcatccggccgacccgcgcccccagcgccccaagcgcgggacctgggaccgggaatccatcatcatcctctgtaacaccccccccctccctttcagtgtctggtcatatggccacccaggcccccctttattacctgtgaattctcccactcgagaggaggggaccgaacggataactttttctagccatgtaacatctctagtgtacttgtctccatttgcttttgacattggcacggtggattgtgttgctggcgtcgctgttgtagtgttttgtttcgcaaacctgagaattatcgggacattccggg

SEQ ID NO: 355051 - DNA, 329 bp, Zea mays
gaggtttggcgtgaagagagggtacagatgaagcttgttgatgctaagctgacactggacagcaagtactcacagctgagcgagcttcaggctaacctggaggccttcctcagtttccaccgaagcagcagtgtagacaaggaaacaacgagagatggtgaaaggctcagggaagcaattagctcaatgaagctccacggcaaagagttctcgtacaaaccgccgcctccttcggaggacatctttgccgtgtttgaggaactcaggcagagagaagaagtcagtgagaaggaaattggacagtgcaatggagatactcctatgagccg

SEQ ID NO: 355052 - DNA, 284 bp, Zea mays
agtacgcccttttttttttttttttttttttttttttaaatctcctttttagtacctcgggctcttgatggacgcaccagcgtatgcaccaggaatgggcacggctgcgtactgcacctcaccaggcgccatgggtgcatgctggctgatgctctccgagtgacctggtggtggtgtcgtagatgcccgcgaggacatggatgagcttgagcgcgatgagttggatgagtgtgaccgcgatggccggggggcaggcatgggtgcgggagcacgagaaaccaacg

SEQ ID NO: 355053 - DNA, 295 bp, Zea mays
aggaatccaggcacggatgacgcccagatcgcctcggacttcgagtacgccacgaagctgcagcaggagatggagggcctcagcgttgacgacgacggcgacggtatcagctgcgtgccgtctccgtccgactctgacgacgggcacgaccatcacgacgaagaggacgaggatgaggaggatggtaatggtggtggtgatgatgatgatccagacaacatgacttatgagcaaagacaggcacttgtagagtctgtggggtctgaggacagaggcttatccgacgagctcatct

SEQ ID NO: 355054 - DNA, 312 bp, Zea mays
cggacgcgtgggcggccaaaaaatgacctcactttctcctcgtgatttatttctgtatgcagcagaaagaggcgctttggaagtgttttctggtgtttattacgatccaaagctttcattagaacttgacccaaagattctccaactggcttttatgaaagcctctcaaagaggacatgctcccgttgttcaagttcttctaaccgatagccgtgttgatccttcttttgataacaattctgcattacgggccgcggctagaaatggtcattgtgaagtgataaaacaattaatggccgattctcgatgtga

SEQ ID NO: 355055 - DNA, 293 bp, Zea mays
  unsure (1)..(293): unsure at all n locations
cccacgcgtccgcccacgcgtccgactaggtctagatcgcgacccgccgccctttttttttgtttttttagtaatggtttattgatttcctgatctgctagcttgcataataaatatacacctggggagaacaagttaagttcggtcaccaccctttgcctatgagccacagccaatcagaaacggcgccaacaaatatgcctgccaaacgaagccccatctcttcgccttgcccttctccttcgattnattggatcccggccgcgtcgctgcagacatggcgtcacgttacc

SEQ ID NO: 355056 - DNA, 310 bp, Zea mays
gtcccgagtttcgggtttcaggctctggtgtggaggcatgtggtactttgtggagttaacaggttgcaacacagggggttttgttttactaatctgtacatgagttgggctacgcgatgcattctttgatctggatggccagcagttctcctcaaaccgaaactgtgaagcacggttatggaaataggtgtatcaccaggcatgttctggtagttgtgagacccctggagcgactgagtgaagaagaggcaggcccttgtgcatctgggaagctgaattatgacctctagttggctgtgcaaccccagaa

SEQ ID NO: 355057 - DNA, 299 bp, Zea mays
gaaaagatgacaaagttcgggtttgaggacaaaggtgatgcatatgaagattttcaagagggagatatggatcaggttgctggatctgctgaagaggaaggttatgttacttcaggaagtggtattgctaatgaaagcgaatatgaagaagcagaagatgatatatttgtaggagacatggaatcaaatgtaagaacatgtggtagttttgacaaagatccatatcagcgccaagaatcacaaggatcatggggaccccaagatttggataatagaatggacaaaatcagtgatacaat

SEQ ID NO: 355058 - DNA, 300 bp, Zea mays
gcagatcgaggcgtgcacgtacaacacggcgcccatggtcggcatgttcgccatgctcaacaggctggcccgggacgaggcgggtgtaagtagatagccatatgtatacagcgggggcttgtacaatttttatttggccctattcttttgttcattcttctctacggaggaaagtagaagtgaagtgaaggcactctcttcacaggaaattatttgtatacgattaaaaaaaagataggaggagggatttggcaaagcaaatgtaaattccctccccgtaaatatcagagagagagagag

SEQ ID NO: 355059 - DNA, 294 bp, Zea mays
agttcttcgacgcgctgtacgacagcgatgaggcgaaaggtgagcaggaggcgggggcaagcgcggatgtggactccggcagggacgatgtgctggaagtcgtgacgccagaaccggggacggtggaagtggatggcgatgatcccatcagcaagaagaagatgaggtacgttgttagcgcagttgcgctggacatacgaaggttctttcctcttcgcttgagaaattgatcgaggggagttgtgtcctcatgcttgctagtgggatttaggagctactacctggcagttaggg

SEQ ID NO: 355060 - DNA, 310 bp, Zea mays
cagatgtctcatgcgttcaagcgggcgaaggagagctcgggatggattccgctccgcaaaaggaatgttgtggaggcggcccgggtcatcgagaacgactctctcactgccgaatgtaccatcacggtggtcaccgagctacctgaacctgatacagcaaagactaacgccgtcatgccccgaattcggcgattgacgggcgtgcattccttgcaccatgatctcggtgagctcttgggcaagggaaccggatccgatgtcgtgctggtggtttgcggtgagtccttcgcagcgcacaaggccatacttg

SEQ ID NO: 355061 - DNA, 302 bp, Zea mays
gtgattcttaagatattgtagcaatcttgatgtcatatcagttctatagcatttacgagtagcagtgcaatctgatatctcctcttttgttgttttgtgcttcagtcctctatgcattttttgggctacggctcctgtacatcgcttggaggtcagattccaaggcatcacagaagaaggaaatagacgaggtagaggaaaagctggaagcaggccaagggaagtcaacatttagacgtgttttctcgagattctgcactcctattttcctggagtcatttgtgttgaccttcttggcggag

SEQ ID NO: 355062 - DNA, 297 bp, Zea mays
  unsure (1)..(297): unsure at all n locations
aataaataaacgcgcccttttcataccaaaaatagcaatgaaatttcctcgggcggcgtgcggctgcgcagatccgtacgccgacccaggccagggcgcccaaattaggcaaattccgcccgggatcgacagaattgggtcggaatcggctcagatcgatggagtcgggagaggggcgcccaccttggctgatccgtcgtggaggcccatgacgaggcgcacttcttctcgcggcggccggagccggagcgtngcccatcgtcgtcctcgtccgcggaccggcgctcctgcggttgg

SEQ ID NO: 355063 - DNA, 302 bp, Zea mays
  unsure (1)..(302): unsure at all n locations
cggacgcgtggcggnacgcgtgggcgactacatcgggcactacaaggcggagtacagcgcggcgcacgcgaggcgaccgggtagctgctccgccatcgaggtgctcatcgccaaggcgtggcggagcgcacccgcgcggcggggttcgagccggacaccctcgtccacgtctgcttcgccgtgaacgcgcggcccgcgacgcacggctcgctcccgtggaggcgccgggttctacggcaactgctactacatcatgcgcgtgtcggcgcccgcggggaaggtggcgggctcctcggtggcgg

SEQ ID NO: 355064 - DNA, 303 bp, Zea mays
cgagaccgtggcgagacgcgtgggcggacggtggcggaccgtgggcggaccgtgggtcgctccaaggagcggcgaccatagatcattgatgacgatggagggacctgttttctgccgtcctgcaatgcaatctaaactgcctgctgctgcgctgatcaacaactccctgaccaaatccgggcagcttgggactgcattgtttggtgccatttcaaaatacagaaacatttcaagattcatttctcccatctctcaaacatctacgaagaacataggtccatgctgtagcttcagctcgtcttc

SEQ ID NO: 355065 - DNA, 305 bp, Zea mays
aatccggtgaacaatcatctgagatgaacactggaagccgtcaagaaaatgcagtatcattcattgagttcagaatttttttttaaaaaaaattatagtctcaaagaatgctgtggcaccgtttgaaccgctggtttgtttggagatgccagggagcagggtttttgaggaatcccaagattgaaatgattgaagcatgctggtgttgccagccttgcgccatgtggtatgtgcggttcgctcgttcaaactggtccacatatgagttgtcttgggtacaaggctgaaggctggtcccgactggt

SEQ ID NO: 355066 - DNA, 304 bp, Zea mays
gggcaacacgccgagcaaaacagcgaaatcctcaaatccccaccccggctggtgacggcgccgcccccgctgctgcatgcggtcctgcttctgctaatagtaataggtattcagattcgagcagagcactcccgtgctgcaggcaagggaggacgcaccaccatggattgggatgctccggcattgacgagcttcgtcgccgacttgtccttccgccacctctgctgctacggggccggaatcgcagggaacgccttcgccttcgtgctcttcgtctccccgctccccacattcaagaggatcg

SEQ ID NO: 355067 - DNA, 300 bp, Zea mays
tcaaggatgggttctatgcctctctagttgaacttcgttcagcctcatcgtaggtatatatagtacctagtgttaagggtttcttctgattcttaggaattgtacgtactttcttagctctccttgttgattctgtagcttcagcgtagtatcaagtcactgggatttggagaagaaaagttaacgttgctttgtaattatcaagcatttggttcaattttgacagtggattgatgtgtgtgtatatatgcaaagaaggcatgattttgtattgtacctatgcgattgctctgttaatat

SEQ ID NO: 355068 - DNA, 304 bp, Zea mays
aaacacacgtccgcggaccgtggagactagttctagatcgctagcagccgctcgcgatctagaactagcggacgcgtggcggaccgtggactttgatccagcgatgcacactaggcttgctcagctggccatggagatagccagactgcagattggttcaatcaatagtgcacataccatctcttatttgttgagggacaattttgacatacacttcttgtgtaaggtgctgagcttcacgtcacccaggcgcatatctccaaattcggcgtgcatccttttgatcttctaagcaaaaacgaac

SEQ ID NO: 355069 - DNA, 300 bp, Zea mays
cagacgcgtggcgctcggcttaacccgacgaagctgctttaattttgtaacgagtgacgaaggtggcccgccggctgtcgagagaagccaaagctcgccgccgtgtactcgtctgacctgcggcgaaccgccgagaccgccgagaccatcgcgagggcctgtggcgtatcaaacgtggtgctgacggaggcgctccgcgagaggcacatggggtacctgcagggcctcaggtgggacgacgcggtggacaagagcccggactccttgcacatcgtcaaggtcatcgaggactctgacccc

SEQ ID NO: 355070 - DNA, 296 bp, Zea mays
attttaaacgcagagatttacagtcatatcttgcagaactgacaatatttttgtgccctcataccaagaagttccttatattgctcgacaatcgcccatggttgctagatcaggatacaaaacctgctcatctatggcaattgatggttactaagtcaaggttttcccctttcgccaactctagggctaggagaaggagggatgaaactgatgaaaagcttgtgtactcaacaagctcagtatctgctccccatttacagaataaatcttccagatggtattccttgatcgacgac

SEQ ID NO: 355071 - DNA, 301 bp, Zea mays
gacctccgctcgcatcgccgcccgcatgtacctgtctgtctctctctctcctcgctgagtcgccgccagccatgaacaacctcctcacggattcctttgagctcccccggcgggactcctcaagagatgcagacattgaaatgggaatgcatcaagctgatgcttcagacaacttaaaagatttcttgaagaaggtcgatacaattgagagtttaattgcaaagctgacaaatctattgaataagctacagactgcaaatgaggaatccaaagcagttacaaaagcaagttccatgaaagc

SEQ ID NO: 355072 - DNA, 293 bp, Zea mays
ggaccgtggcagctgcagcacacagatacctacgtactccagctcgaagcagacagagcgtctagctagctagttggttagtggcaaagaacgtccgtgaccagtgagaaccgaccgagtgaacgatcatggcggcggcgtctctgctaggctcgtacaccgggggcagcggcttattgggcgggaggctcgtccacggcaggagcagcggccggcggccagctgcggcggtgaagcggctgctgtcgaggttgaggcgctcttggagaagacgcgcggcgcggccgaggcga

SEQ ID NO: 355073 - DNA, 293 bp, Zea mays
gtgatttgaatgccttcctttcacaggtcaacattagaggtcccaatattctggttcatacataatgaacccatattattagacaaacattatcaagccaaggctctctcaatcatcatctgactgaagtactacgaccatatttgagagagccttggcttgataatgtttgtccaataatatggtcgtagtacttcagtcagatgatgattactgggcaagccatttgcagtgcaatggaagacccatcttatgggatttgaggaaaccggttaaagctgctattgctgcaa

SEQ ID NO: 355074 - DNA, 287 bp, Zea mays
caactacccgtaggagtcgaagtcgactggcgtagcgtaggaagcggcggttccagacgaccatccaataatcgccaccctcacgcgagaaatccccggtattctcccctgcagattccatctcgtcgcccccttctccgatccgatcggtctctgatcgctgcgtttcctggttcctcaaggtttattggggaatttttttagcgagttacctctttcccctcttgtgggctctgcggggaaatttagggtttagtattagggttgatcggacgatctagtgtggt

SEQ ID NO: 355075 - DNA, 288 bp, Zea mays
aatcgtcgtagaaccgggaaaagcgagagaacgtcgtgacaatctcgccgttgccctgtccttcgccacgacctccgccactcgggcttcaattggtgatcgtgggggttcatcggcgaccagagatcatgtgggggtgggtagtcactcgcactgctgacaggcgtccgctcaattcctcgtcggtagtgcggcggattcacaaatccgcgcccatcgtgccagcgcccttctcgtcatcgtcctcggtgaagagcaggtagtccaggaggaggtctacaacgagaa

SEQ ID NO: 355076 - DNA, 295 bp, Zea mays
ggatgtcctttgtttaagtcgtttccagtaaatatattatgaaattgcaggttggtgatgctttcagggagggtaaccagaaagaagtcgattatcttatacatgaagtgtcacattttgggggaagagataatggatggacattacatgttgaagattttgttggccagctttaatacagagctacacgattctaataaaaagtggatgttgtgacttgtggtcataattattaaacataaaacatgagaaggttttgtctcttgttttattagggtggctacgtagttataag

SEQ ID NO: 355077 - DNA, 307 bp, Zea mays
ggtcttcgaatctcgggtcgaccacccgtccgctcacggagagaaacacgaaagctccaaaggcgcagactcaccagctcccactggataacggtgatgagatcctcgggtccttcactgccgtcgccgagactgacgcgcgtcaacggcggcgtcgcggacttatagcaggtccccatcaggcatgccggaaagtcctacgtcacgctcgcccacgatcaactgcgttcctaacggcggcttcgtgaaactataggaggcgcggttgccacactagcgcgaagtcctacgcagctgttgcggccaa

SEQ ID NO: 355078 - DNA, 290 bp, Zea mays
cactgacaagagcaatgaaggcatcaaggttgtagcatcagaagaggcaagtggagagtcaggagatgttggtaagagtaccgaagtactgtatgcagcatcagaagaaaagagtattgaaggcatcaatgttgcagaaccagaagatgcttgtgagagtataggaggcatctatgttgcagaatcagatgaagcaagtggggagtttggagagattggtaagaccaacaaaggcaccaaagttgcagtgtcagaaggagcaagtgtgtctggatacactgataagaata

SEQ ID NO: 355079 - DNA, 332 bp, Zea mays
cccacgcgtccggcgtcaaatgaatatagtagaccagactaatggccgaggtcatgtggctgtcagccaagggtctgtagctgaaactgaatcggcaaaagcaagcagaaacaagagtagtgaaaatgctgatgggaagccctttttacagatagggagcaatatagtaccagtgattgctggaaatgagactagagaaactagtcagccagtacaacagtttgttgtgtatattggatttgagcatgagtgtccctatggtcatcgcttcttactgtcagagaaacatatgaaggagatcgagtcttcctgtttgcagtatcaaagacctc

SEQ ID NO: 355080 - DNA, 143 bp, Zea mays
atcgcgagcagcagtgcgatgcagagtggaaggactggaataattttgttctgtgcccttttgaattttgctacctttttgtaccgtaagatgaatctactagtatatttaacttgtaatttcttatgctttaatttctgtgg

SEQ ID NO: 355081 - DNA, 332 bp, Zea mays
gcgctgtgccgtcgcccagccgtcctcccgcttctgccgccgctgcccagcacgccagccgactcgtggaagtggcgcaacagcgtcggtacagtagcctcgccgcgcagcgcagccataccccggcttaccgacacaaagccactgctgctacgctagcagtaaatgaccgcgccgccgctagttaacaaagaagaagctagtggcctgcgttcttgaatgcgagagttccatagggattctacatttctacaggacacgaaacagttcatttgctcggacaaaatggtgaagcttcccgcaggattcctattcctacgcgaagatgttgc

SEQ ID NO: 355082 - DNA, 121 bp, Zea mays
agttctagatcgcgaccggcgacgtcgccgagatgctgtccacgacattcgccgacaaagtccggcagaggatcgtggacaacacgacgttccctcccggctactacttccccaagtggag

SEQ ID NO: 355083 - DNA, 321 bp, Zea mays
gtcactggctctcaagtacgatgtagaatttgagcctttgaggaagagattccctgaagtcatttcaagatttgaccaaattatgtccaatggaatggaagcacctacaatctgcagtactagtgatgcagttgatgaaatgagcagattgaatagtagaattgattcactatactgtgaaaaccagcatcttaggaatttgcttgcagagaagacaaagaatgttcaggaattatcctgccagatatctgatgccagcaagaaaatgtcatctcaatattatctagagaaagaacatttgagacaagtcaagaacattaa

SEQ ID NO: 355084 - DNA, 326 bp, Zea mays
  unsure (1)..(326): unsure at all n locations
cccacgcgtccgcgcttctcttgaaggcaaattgtccgatgtggcggcagagcttatccaagtttatgctgacaaggaagaagaatctctcgataatgagaagcaaatttctgtcctcagtanagatattgctgatctcaggagaaagcttgaattgttgtcatctgagaaaaccacagttgatgatgagttggccaaactgctagctgatattatgattcgtgacgaaaagatgaagcaaatggatgaccacctaaatcagcttcagttagagcatgccaagctgatggcagaatttgacaatgcacacaggtccttgtcagagc

SEQ ID NO: 355085 - DNA, 318 bp, Zea mays
cttttcttgaacttgattgatcttatcatgtttaacttggttgtccaatatgattctaggactgaaatatttgtaagaacaatgcaatgggagcatggaacatcttctacttaaaatcacttatgcattttgttgttgcgtttattgggtaagctttagattgcccatgaataaacgtgttattcaggatatcatctttttacttcagtggggatgaaattggacttatcgaaactaccatcaggatagatgacttttttaaagaggccaattgccataggatttgacatagtcaattgtccattgtccatgagttga

SEQ ID NO: 355086 - DNA, 317 bp, Zea mays
gtaaaaaggctgcaaaaagggcagataagtcagccgcagcacgtgaaagatggaaattggcaaaagaacttatactgcggcatgaggtaagaaatgcctgtctttcaatacacctgagcaatcagctatgtcatccaatggagttctaaatggcactgaagctactcctaacagatccaaaaaccatgaaaatctaactcaggttcccactgaagggttcgggcatgcttataatcaggcagatacggatagagctatgaagacaaacaatgataaattaacattctctggagtggtgtctctagctactgaaatta

SEQ ID NO: 355087 - DNA, 313 bp, Zea mays
ctcgcacgcacgctccggcgtcatgtcgtggatcgcgcgctccatcgcggccactctctcctcgccgcgcactcctgacgccgacgacgccgactacgaccctgcgtccgcgcagagctgggtcaagtccgcaggaggatgagtcccacggcagcatccctaacccgggccctgaggcctggtaactcgagcagccctgcacaccgagccgcggcgtcgaggactacatatgctagctcagcgaaacgctgactcgccgcctctgtggcgtcgcatccttcctcgcaccttttccgagcccgcaggaggctcg

SEQ ID NO: 355088 - DNA, 308 bp, Zea mays
actaaattgaacaaatgaagatgctctcataagcagccttggctgagtatttgccatcttgagcaaatctgaaaatgtgattgtcatccctttccgggtgcagctgaacggtgcttaaagtattccaaagggtgagatagtcagccaatacacctactgttaaggcgcccttgatgtctgctatccatctcatgtccatgagggcatctcgcacagttctactgctagctgtgcgtttagggacagcagccagaactctgggagcaagatcctcaatactttttccatgcaaccagcaatcctgccag

SEQ ID NO: 355089 - DNA, 323 bp, Zea mays
aaaagatctagttgaactccaaaccatcatcagcgagctatacggagattccaacaaaccactggttgtagccccaggaggattttatgaccagaaatggtttgctcagctcctcgatgtctccgggccaaatgttctcaacgcaatgactcatcatatttacaatcttggtgctggtaatgatccacaggttccaaacagaattttgaacccgcagtatctgagccggacttccgacacattcagaagtctccaactcaccatacagcgccatggaccatggtctgctccatgggttggtgaatctggtggtgcatataaca

SEQ ID NO: 355090 - DNA, 105 bp, Zea mays
ctaaaccctcgctacccggcggcggctacaagctcttcgtcggttcagcaccatgaggccaccggctagagggggacgtcgtgggaggggtggcaggttcgatgg

SEQ ID NO: 355091 - DNA, 113 bp, Zea mays
aagaatatgaatatcattttctttcgttggtgacgttaaacccagctgcagctagccttacagacacaagtgttgaagtcgaaaggctagctgcagctgggtttaacgtcaca

SEQ ID NO: 355092 - DNA, 341 bp, Zea mays
aaacgtgtcaggtttgatgctaatgttaaggatagtgagttggatatgtttgaacatgacgaagattctccaacggttcctcaatccatggatgtaatcactgagttggagagcacatctactttgtctgcatctcctggggtccctgactatgtaaggaacccttcaaagtacacccgatacaccctggatgtaccagagtctaatgatggctcgaacaggacagctcttgctgacatgcatgatctgttagcgagatcatacccaaacaggatacattctgagacgcctgttaagattcctagctcagtcacattcatccctcgcaagaagtcagttga

SEQ ID NO: 355093 - DNA, 275 bp, Zea mays
cccacgcgtccgcgtggcgacaaatcacccgcggccttttatcccgcaaccagcagcagcgaggccgcgagaggcaggtagtagccgcacgccacgtcaacccaccacggatggccggcggcggcgaccgtgacgcatccgacgcggagctccgcgcggggttcgagaccctggccgtgacgcggccggacccttccgcgggggtctacgaggtccgcctcaaccgcccggcgcacgcaacgcctgagcccggccgcgttcgcggagatcccgcg

SEQ ID NO: 355094 - DNA, 335 bp, Zea mays
gttcattctttttcttttctcctttaagcttcggcttattccattcctttaacgtcggaaatactctattagctaagtattcctacaccaaatctctattaccgatatgctcagacacaactcggaattcgcccacagcttctcggcatggtgacccttgcaacatgtcgcacaggggcctagttaacccgaaggttaggtccagtgggctctgaactatcttctcattcttctcatcaaccttaacataaaaccactcattcttccaaccggttggccatttggtgcgatagctgatcaccggagtcttcatatctttgcggtaagcaaagttg

SEQ ID NO: 355095 - DNA, 326 bp, Zea mays
aaggaagactaaatctcaacaaagtgaaagctcttcaactgcaagagttatctcagaaagcagtgattcggaagtacatccaataagcaataaatctccacaacactcccctagtccctcaaaagttaaaattgggccgaaaggtggaatcagaaagattaccaatagacgaatcgctgagagaattcttatgagtgtgaagaaaggacaaagggaaatggcatcatctgattctaattttgttagtggatatcttttggcaagggacatgaagcttaggtctgatacacgaaatggaaataaggaattaattgtatcctcacaac

SEQ ID NO: 355096 - DNA, 309 bp, Zea mays
tcccttcgccatagcagccagcggagtaccaaaccccacacgagcaaaagcagagcacacagcacaaacctctttcccctcctctgccccgcctccacgcacgccattccccatcccccatcccccatccaacgccggcgagggcgaggccgacgcgcgcgctgctgctcccgctcctcctcctggtcctcgcgctggcggcgctggcccgcgcgtcggggtcgggcgacgttccggcgtcgtctctgagctgggacctcggcgtggtgggcgcaggggaggacgaggagttcggcttccccggcggcg

SEQ ID NO: 355097 - DNA, 284 bp, Zea mays
cggacgcgtggggctggacgagatggtcaccgccgagagcgcaccttcggcctcttctccaggagttcgcgcgcgctacgggctcactcgtcggattccacacgtgttctgctcgacatggcttctacagccagactgttcagaagacatttcacagcatcaactggatcccaaggcaacaccatgagcgcgctggagaggtgttcgcatctccgcgccagacgctcatcggctctgggcaccgtccgggctctggttcacgtcgcgtcatcgacgtcgtcggc

SEQ ID NO: 355098 - DNA, 317 bp, Zea mays
gggacgcgaatgctggaacaccagagccccctgtatcagagtcgacgcctttgctctcatcatccgccattcgcttaccagaaccaaccgcttctgtttccttccggtctacagtggcagaagcagcagcagcgtctccccccaggccaatcagccggcatccgtcgccatcacggtccatatcccgcaagcactccgtttcaggttccagcatccctggcacccctatccccaggttccatgcaagctcatcatctcctacctgcacaagtggaagcagtttggacctcgcaaacatgtcgtcgtctccatggcct

SEQ ID NO: 355099 - DNA, 312 bp, Zea mays
gctgtcgaccttgggagatttcgtgtcgctctggaagggatcaaatgcggcgcctacttacttggtggactggctggagagctctagtgtcagccagtgttcctgctgtcgcctgcctcatctaagtcccctcccttcgttcagctgttcttgcgagttgttaatctaccgtatctaggttttgaggagatggatgacgaggactactcgtgggtgcggcgcaccaggttctcgcagtctgtcgtcaggtccagctccggcatggagcggtatggcgcgttcatcgacccgttcggtcgtggcgccaagctg

SEQ ID NO: 355100 - DNA, 314 bp, Zea mays
atttaattatttttagtttaattttactttctcttcagagaaaaataattctgtctcatcccttttgcataaggatttttagaaaattatatttatttaatttttctaatctttgagatctagtatttttatagaatagttgaatttaataatactaaagttagaagcttaggatcaaagcaatatatagatctaaatatttcttttcttaaggaaaataagtttttgaattattaatttaataatatttttagaagtgatttttaagtttaattactttaaataaaatataaaaagctttttaaatgatctta

SEQ ID NO: 355101 - DNA, 309 bp, Zea mays
cccactcgtccgcccacgcgtccgaattaatatagaccaaataagtatgaaaataactaataagttgtgttaaaaagtacaatactcaaaacatacccctaatgagttgtgttaaaagtatctttgttccggttcttgatgagaaatttatccattctatccctataaactaagaaataattttatcaattaacctagcaaataattgaccaatccaaaataccaaagtataaaacctaatctcttggtgaaaggcaatctatgtttagcaagttaagaattatatagagtaaagtctagattctagag

SEQ ID NO: 355102 - DNA, 168 bp, Zea mays
cggacggtgggcaatgccgccggcgcgacgaggagcctgtcggacctgatatctttcggcggactccgctgggaaaagcagaggaaccggcgccgcccacgtcaacgaaggcgctggcggagtacaagaagcaagggcacgacatcccttcgccggcgaagacgagta

SEQ ID NO: 355103 - DNA, 338 bp, Zea mays
cggacgcgtgggcgccagacgaccagagctagctctcgccttctccaccagcaacgcaggccaccggtagctgccagaagctcacgtacagagccaagcgaagacactagcaatggagcacgggtacccctgcaacggctgcggcggcaacaaggagaagaggccgccgctcaagagggggcagctcaaggtgcagatagtcaagactctgctgggcagcctcgcggtgcccgccggagccggcgcagcaacagggagcgcactatcgggagatgagcaagcttctctgcttctgctacctgaccaagccacatccagatgtctggtgtgtggtgctt

SEQ ID NO: 355104 - DNA, 320 bp, Zea mays
cttcctcccatcccagcaagtgaaaaggaacccaccgggggaacgagtcagccaaagaaaccaatggaggactactactacttgacctcctgggggaccacgggctccgtcgagcccaccggcttcccggcccacacggtgcctcgcaaccatagctcggcgtcgccgaggacccgccgtgcgtcccgcggcgacgctgacgccggagagcggctccaccactactacctcgacgcctgcttccggtgcgggcgacatcttggcgggaacaaggacatctttatgtacaggggcgacaccccgttctgcagcgacgagtg

SEQ ID NO: 355105 - DNA, 316 bp, Zea mays
cccacgcgtccgcgcagaagtgttcctggcgtcttccctctcagccgcgcccttcttctccacgggcaggagaaatttctcccatccatggcgccacaaatctccagccgtcgttctccctgctcctctatccctagtgcacggcgccgttgtctctgctctcccttccatggcgccactcctcgccagaatcttgctcgcctatgtgctcggctccaggaacaggcgcccccctgcatctcccatggcacatggaatctccaagtgcaggcgaccaacactttccccatggcgcccctctgcattctctcccctg

SEQ ID NO: 355106 - DNA, 316 bp, Zea mays
cacaaatgaatgaacttcgtaagtatcagaccacggcccgtttcaaagattggcaagtgatgtctgtgtggggaattgctggtgttggaaaatctgatcttgtcaaaaatttgtactatgaaaggatgcttaaagaggacccaatgtttgacaagtatggttgggtccacgtgtcccatccattcaatttgagggacttctctcggaacttacttttggattttcactcagatgccgtgggaatcagagaccctattcaggagtgtcataagcttctaaaagaacatcagtgtcttgttgttattgatgatctaca

SEQ ID NO: 355107 - DNA, 309 bp, Zea mays
accacgcgtccgcggaccgtggggcctagcagcggcggcgcggcagttggtagccgcgaccgagacacggcgggtgacctgccccgccgcagtcggggtgtatgtattaccaccgccagaataccaggagacaatggcagaccagttagggtcttacactattagatcccatggaatgatattggcaaggttgcacatgtatgactggataatacttctcctccttgctgtcatagacgggctgttgaatataattgaaccatttcaccgttttgttcggaaagacatgatgactgacttgagatatcc

SEQ ID NO: 355108 - DNA, 306 bp, Zea mays
ccgcttttcagaaagacagagaggaaaggaagaaaaaactcgcccccctctctctctctcttgtgtgtgaggtggcgaacccgaggagcggaggccacaagtccaatccgcccgtatctaatccgctgcgacgaggtgggggcgcggcggggcggtcttgatccgggctctttcctcgcgggaggcacggttggcatttcaagtgcgagaccttggcttctttgaatcccacaaagcacggttgagccatggctggctcccttgctgcctcagccttcttccctggcccaggggcttctccggcag

SEQ ID NO: 355109 - DNA, 306 bp, Zea mays
ggaccgtggcgatcgcaagcttccccagtagccatggaggccacggcaccagcaaaccttttctacgctgctttcctttatctgtcggtactgtatctcgccgtcacccggcgccgcaccagccgcctgccgcctggaccgacgggcctaccgcttgtgggcagcctccctttcctcgaccggaacctacacgcctgcttcgctggcctcgccgcgaagtacggtcctgtcttcgccatccgtctgggctccaaggtggaaatcgttgtcacctccccggagctggcccacgaggtcctccgtgac

SEQ ID NO: 355110 - DNA, 314 bp, Zea mays
cacgccaccccaccgcacgaagagagcgagcgcacgaacgggggagacatggcccactcgccgtcaggatcgcacgtagcggcgacgtcggtcgggaacgaggccttcaccgacgcggtggctgaggacggcggagactccaagctctccgcgctcctcttcgacgtgtcgcagcaggtgcaggacggtctccagagcatgctcaagacgagcagcgagatcgcgcggtgcgacggcgagatcgacgcggagctggagcgcgcgagggatgccgtggcggagaatgcccgagcgctgcacgacgaacgggagag

SEQ ID NO: 355111 - DNA, 304 bp, Zea mays
ggaccgtggctagttctagatcgcgtacggccaccctttttttttttttttgacttgaacgtgaaatatcttgaaacacatgagtatgccggtccctgacattacatatcacaagtatacccgtacgtacgcgatgatctggctgacacaacacaacaacatatgagtttaccgatggagctggtagcgtaattagcggcccatcccctgcgccgtcggcggtacatcgtcatgccggcgccggcgttattattggccgccttctgggcgttgacgtcccagccgagcgcggggtccaagccgc

SEQ ID NO: 355112 - DNA, 302 bp, Zea mays
ggaccgtggggttatgattacttgtatggttcctgcaagcttctccaaccccaccatccatggatgccctgaccttgaggtgctaactctactcacctagtgtcgccatggtcccgatgaggaagacctcgaggacgacgatgacgagagcctccatctccacggatggctgctcgagttctgagcccaagaagaaatcccactctgtcaacaaggtttacgaggacaaggacatgggaatcctctgctacaccgacgagaacggtgaactggtgtgcgaaggcctagacgaaggcccgagg

SEQ ID NO: 355113 - DNA, 303 bp, Zea mays
tttttgttgaaggagaacttcagagattggtttctggcataaagaatgctgctattattgaccagttctatgacaaatccaactggtgcattgttctcgagaagctttgagctgcagaaaaaggaatggcacaagaagccatcagaatctgatatttgtggggattcagtggtaggcaagccaaatgtgtttatcccgaagtgtatgatgcattgttaagacttatgtcagattgcccaatattttgagggccatctggacttgtagaaatatttgctgtcaatctggtcaacaccgtgaatt

SEQ ID NO: 355114 - DNA, 301 bp, Zea mays
ggaccgtggctagttctagatcgcgagcggccgcctttttttttttttttttttattgtaagggcttaaacccttaaggttgtcgagaccttcactatatatattgtttgaaatataggtgcaacaatacaagtacatatatgactccactagtattaatatacaataggaaacgaaatcctattatatccaacatatatctcaacacacgtaaatacgttgtctaggattaataaccactatgtagctataaactttactataaaactcgcacgacacctctaaatcttcgaaagcagat

SEQ ID NO: 355115 - DNA, 265 bp, Zea mays
  unsure (1)..(265): unsure at all n locations
gttgttaacttttaacttttaagcatccagcaagacattagtcgcaagaacaaatgtgtcagtttccaaaagaagctacagacaaatagaatgcaagttggacaaggcatcacgctgtcaataataaattacagtgacacaggactacagatcatactanaaggaccaccgtcatcacgcattctaaactcttaatagtccccatcctctaattttgatttagcttcagagtcaaatgtcctgcatagaatctcatagccttttt

SEQ ID NO: 355116 - DNA, 299 bp, Zea mays
atccgtttccccgtctgcacgcagaaacggaaagacgttcggccggctgttctcttgcagttgcagggattttgcttgctccttccagaaaaaataggaacaacactgtgtggcctgctgattgacggggacatgcatgcgatgattgttggttggttggttgcttcggccggctgttctctcgcagttacaagctatgactggaacaaagacgtgcttacaacaatcgtcagccgctaccagtcgtctgctctggaaatatccaaatcggacaggaggaacgatcaattagtggcggc

SEQ ID NO: 355117 - DNA, 205 bp, Zea mays
caggagcatccgggatgacgggttccggaagaagggagccgcgctcatcgcgccgcgctcgcccgacaccgtgcacgctccgtgggatagcatcagtacaacccctagtgttagccaagatcaccttgacgagtgcacggtaatatatatgtctagtgtaggataagatccgtggccgaaagatgtcatggctggcttagggtgt

SEQ ID NO: 355118 - DNA, 270 bp, Zea mays
ggaccgggcagaattataaaagtaaaaaagaaaataacaaaaaaaggaaacacgttacctggaccatggagctcaggctcggctcacccaaccaacctgggccggaaaccatatgctcacgtacatacttggcgagctgccagaattctttaatatattccggtgcagtgacatcatgctgaggtcacagatgatctcatccttgcgggtgcactacggctgactggtgggccatgtggatcccctgcgtatttgagcgcgtatcaccag

SEQ ID NO: 355119 - DNA, 269 bp, Zea mays
cacaggtccgggaccgtgggacatctcctcgtgtcagaaatcaggatgtttctcaacatattccagagccaagctactctcattcaggtgactaaaattcctgcctggatagatgctggaatttgaccccacggatatgttgagttaagtgagtgctaaactttccaaaggcttaccagcacatgttcaagatgccctttttgataaccgagaagatggactcatgagtgattaggaaaactatcctttgagtatgcctggcattcatg

SEQ ID NO: 355120 - DNA, 262 bp, Zea mays
ggacctgggtcaaattgcagccgtatattcagtcttcactagcgccaagggccaaccagaaacttgctcacagactttggtcctacaaagtcattgctcgatcgttctgggctacaattcgacttgccagcgtcttcttcctccacccagtttttcatgtctcacagctcaagaagtcggcgcccagggatgtttaggtcattgcagctgttccatctgacatcactcatttgcgggttccagagtcttttcttcgtcgacg

SEQ ID NO: 355121 - DNA, 263 bp, Zea mays
gcgctttgcttgtttactcctactacaatagcctctcgccgccgctggctctgctacccgcgttcttcgctgcatctggttcttctcggactccgccgctccccccgcagacgcaagaaactgctggccatggagcccccatccgcccaggcgatgtccgcgactgacgacttccaggacaaggccgtcgacgagtgttgctcttgctgctacgattgctgctccagcatcctggacttcctgtgctgctcgtcctgatcgat

SEQ ID NO: 355122 - DNA, 309 bp, Zea mays
cggacgcgtgggaccggatgcatgagaaatggatagcgggtaaggaaaagagcgctctaaggaaaatagggggtaagttgccaagtttttcttggagctctcaaggtctcaccacaactgagaggtgcacgtgcacaagaaaaaggtaactaataattatcacggtaaagttctaacaatttgaataggctttattagcattaagcacaataaattccttaaaagaccatcttgcatgactgacctggcataataccagcaactaaaattttcttttgtaggagctggatgagtttttttgggtctttg

SEQ ID NO: 355123 - DNA, 304 bp, Zea mays
gcaatccgtgccacctgtttccgcattccgccattccgccttctgctgctggggtttagacaaaaatcactcgtcccatttctcgcgtccccaggccacggtcgcgagcaaggctaccccactgtctcgatccaccgatttccctccctcttccgtgcctccacggatcttctcgttgtggaagcggaggcggacgctggaggcgtctcggcgcgaggattcgcgagctgctgcggtggtgggaaatgaggatctgcgaatcgggagacggtgacgacgttacgggcctggtgtttcagcaaga

SEQ ID NO: 355124 - DNA, 300 bp, Zea mays
gcttcgaagaaggcgacgaggtcgtggtacaggcactccgttcgccggactccataataccaggctcaacaattgccctcgacaagctcgactctgaaatgcctgaggttgcaggagatgacaagcccgcgaaacggccaactgccgaggagttttctttcggttgtaccagtggagattgaacttgagaacaaggagtgtctcaggggagtatctatctgggacagactattcgctggagtttccgatcatcagtagccagtacacgggcttgcagcacagatacgcctatgcgcaagt

SEQ ID NO: 355125 - DNA, 151 bp, Zea mays
ggcccggaggccagcaaggtgaggaggttcatcgagcggacattacggcgagaaggttgctgcagctcacggcgatcctgggcatgtgcatgctcattggagacggcatcctcacgccggccatctcaatcctgtcagctgttgatggact

SEQ ID NO: 355126 - DNA, 302 bp, Zea mays
ctcattgttacagcatatagtacatgcatgctgaaacaatggagatgtgaagtgaaggagaagacgtcagcacatgaagggtacatccattaactgtgtcgtatcgtatagctagttgcacaatgcatgtaacataaactaggcatgcatggcactagacaaatattgtgtacatatactacacagtgttgatcagtccatgagataaagagagaggttggtggtgctttacttgtttgtgaggtttaaggtttagtgttactgtgcatggatggacggatagaaggatgggggtgtaaaaa

SEQ ID NO: 355127 - DNA, 273 bp, Zea mays
  unsure (1)..(273): unsure at all n locations
caacgttcttgaacaaaactctttttagttgcgcttttgagttacataagtatgcttaccagccattcctatagtactatacatcaatacactaacacgaaactatacaggattacaggaagggaagcatgcaaaaggccaaagaaaaaaaaataacagggtacttgtcacgagccagaaactccagaaggactaataagcagcctatacaaatgatttctgcaattcccgatacaccanatcgatgaactcgtcgctctgaacaagtctatg

SEQ ID NO: 355128 - DNA, 278 bp, Zea mays
ggaccgtgggacctcaaggtgctcccacttttgttcgtcggcatactttacctcaaagtttttccactggtgtcaagtcagctaactgcccctggcactggagcacagagacgtggcctcaaaaatcttggttgcacttcaatatctgatgttctgccttcaggatgctcttcatctgattctgctcgtgataggagaatcgaagttacaaagaagagaacttctggtgcaggaagttcttcaagatcaaggataagtgaacaatctaatttcagtca

SEQ ID NO: 355129 - DNA, 257 bp, Zea mays
ggaagaatcaagagaagttctactggaagcctggacatccacaatgcacatcatcattagtttcctcagcgagatgcagaggcaactgaaccgacaggactttggctccttcgacagaatcaaagaggaatatttcctggcaatcgcgaaggtaactgccatgaagctgctcagctcagctagttctaacggctttcaagtgaagccaccaaccgacaagccatgcgagaacagttacggcggcggagtaagacgtg

SEQ ID NO: 355130 - DNA, 153 bp, Zea mays
gcgggacgtgctggcttctccctggttcggcgacatgatagtcgcggcggacgacggcagcgcggcagtgctccccctctacaggcactgcgtgcacccgcgggtcccgcagatggccgtcgtcgggtacgccgagagcggctccagcatcta

SEQ ID NO: 355131 - DNA, 271 bp, Zea mays
accacgcgtccgcggacgctggcaacagttaatagttgtaatccattatgagactatatcaatgtgttatcttggcacaatctatttttgctacgtgagattcactattggtaccagttctgtaatggtgtgatggttagtgacttatggtgccgcagcgaaactgagagcctcctgtgaatgcgcacacaggactgtgccactcgtcggatgctggtatcaaggtctctggtcatgatccattgtggaactaccctgatggttatcttac

SEQ ID NO: 355132 - DNA, 143 bp, Zea mays
tggacgcgtgggttttttaatgaagagtatatatctgcacttctttggtgacatgtatgttcaattacatatatgtggttggaatgacgatcagacatgtagctacgcagcagtcgactagtataatggagctggtaggcaag

SEQ ID NO: 355133 - DNA, 284 bp, Zea mays
  unsure (1)..(284): unsure at all n locations
nacacgcgtccgggacggtggcgaagtggggatttgtcccgtctcccgtgttaacatgcaaaatcaattacgtgtacgataaataagctgatggtttgatccgggattgtcacgaccctacacgcaatgcatagatgctgacaagacaacaagagggcaggaaggaggatagagggatacagctgtaagttgttggcatctagctgtaataattgattagatctgtcatctagctgtaatccagctgtaataactgattagcagttagagccactttggatgct

SEQ ID NO: 355134 - DNA, 269 bp, Zea mays
ggtaaaatgtgcttttactagacctctcgtaaactgctgcggtacagataaaccaatcccaggaaaccggaagctcgaaagctgccaagccctcgccgtcctgcagcccacggcttaccgctgccgcctgccggccagcccacccaacgaaaatccgcatatactgtagtactccgtttcgcccgcgccgcccatccgttctgctgcctgcggcgaagaccactacatgtgccgcttccaggaatttggtgttgctgaagctgaatttg

SEQ ID NO: 355135 - DNA, 298 bp, Zea mays
cccacgcgtccggtttgattccaaccaacaaccagcagcacacagcagcttattaatttgattcggacatcgatcggttcatgctagctctgcggacggccgcgcgcacgtacgtacgttcaacggatagctagctagctagctgagagaccatggacagcaagctgggcgtgcagcacgggcaccaccaccacagccacaacggcgtctccaagccgccggtcgcaaggaggaggcagagcggcggcggcggtggtggcggcaagggggtcaaggtggtgtacatctccagccccat

SEQ ID NO: 355136 - DNA, 296 bp, Zea mays
aggaaaggtagtggtaggaggatagatggagaggaaacggaaggagatggagaagggcaagtctgagctgagactggccatggaggagctccgtttgtgcggttcaagagatggcgcggaggaggaggaggaggtgcaggttcagcaggtgaaagtgcaggagcagcacaagtcatccacaatggacctcctctatgtctccaagcagctcatccatgtccttgatgagattggaccaactctgctagtcctgaggcaggacattcagcaaaatgtccagaggttacaagacctgc

SEQ ID NO: 355137 - DNA, 303 bp, Zea mays
ctcaccaccatgaagaatccttggctcctattcctcgcccccctcctcttagccgtgccgtcatcgctgcctcgtaccgccgccgtgccgctgcgtttccgtgccgcaggcggtcgcctgtccagtgcatcggcgacggcgtctacgctgctaacagcacctaccaagccaacctccgccgcgtcgccgccctcctcctagccgaggtgtccgcctcccccggccagttttactacacgacccatgccgtcgggtactggcctaaccggttgctcgccagctccttatgccggcgccgcgacg

SEQ ID NO: 355138 - DNA, 136 bp, Zea mays
gcaagctgcaagacacgacctagtagcgtgcggcccagaataatgttatctcatgttactaagtgaataatgttactttacgttcatatttctgtgcatggagtactgatatatttgcagtcaggttgcatggtat

SEQ ID NO: 355139 - DNA, 303 bp, Zea mays
cgccatgattcggcggttctgaatgcatctcctgtaaccaccgggcccggagcttctcccaagcccgcgtcgccgtcgagggctgttaacctggcaacactctcaccaaccaacaaacaaacgcgcggggtcgctgtaatggccgccgccgtgaatgggagcctagacgtgcatgagacgaaggcgcagaagagctactgggaggagcactccggggagctcaacctcgaggccattatgctcgactcccgtgccgccgaactcgacaaggaggaacgccccgaggttctgtctttacttcct

SEQ ID NO: 355140 - DNA, 286 bp, Zea mays
tgcaaagggtccacatcctaatgaagtaaaaaatgaaggatacagtgcaggaacccaatgtaatcctgcaggttccctcactatagtttataacgacttatgccaggaggccataaaatttgcaaaagaaggttcagtcacagaaggaatttaccatgtggcagtttctgccttaaaagaggctgcagaaaaggttgctgaagtcaaaaggagtcgtccaacattgtcacattgtggtttcgttagaggaagcaaacatgatgtcttgcaggagaaaagtatgagt

SEQ ID NO: 355141 - DNA, 295 bp, Zea mays
cgataaggcgataagtcgatgttagtaactgctcaaatgtattgcataactctgactagctttatttaacttgtccatcgcttcaacatgacacagatatggcaatagaaggatagaatcatcaggtgagatacagtttcttccttctcgttgcattgttgggcaagagcagcatgttcatggcaaggacccagttttccaacccaatggggtcttgctgcctcccaatgaccataatacaggtgagagtacaaggcaagctcgaattactctggacagtagcatggagggtgct

SEQ ID NO: 355142 - DNA, 292 bp, Zea mays
ctagtggtagctaggtagctgcgtgcactgcatgcgcggcgccttggacttgaagaaaccgagcgctccgatagtccgatccggaaacgatgagtgccggaccggaggacacccagcagctgatcaacagtgccgccgctagccccaaccgcagcgcaccgtccgcagcgcccagcgatatggagaggggcagcggaaccgccgcgtcctcgtcgcgcgcttcgacgacgtcccactcccaccagagggccacccacagggtcgtggaagaggaggaggaggagcctagtac

SEQ ID NO: 355143 - DNA, 290 bp, Zea mays
ataaatgggaacctacagctgaagagtgggatttgtttattgcaattgaaccaattctttcatctttataagatatttgatgaacatcaagttgtgtttgaattagaagatattataagatatttgggaacctacagctgaagagtgggatttgttgattgctactattcttgatccaaggtataaaatgagatttattgagtggtgcttcaataagatatttgatgaacatcaagttgtgtttgaattagaagatgttcgtagtgagttagaaaaactttatggggatt

SEQ ID NO: 355144 - DNA, 278 bp, Zea mays
agcgccggcgctgcagacaagcgaagagatcgtagctgtacgccgagctggaggaggagcggaacgcgcggccatcgctaccaaccagaccgacacgatgatcaaccggctgcaggaagagaaggcggcgatgcagatacaggcgctgcaataccagcggatgatggaggagcaagtcggagtacgaccaggaggcgctgcagctgctgaacgagctggtcagcaagcgggcgagggagaagcaggagctggagacggagctcgagctgtacaggcag

SEQ ID NO: 355145 - DNA, 270 bp, Zea mays
gacgatactgcaggctccaattgtcagctgaagtgtgtttggacatcttcattatacattgtgtccagctatagctcattttgttctacttgtcgacatagagtcaagcttggttattagtacgtccaagaacgacgacgtacatagcgtcggctgctgcagctagcggtgttaaggaggccttggtcgtcaccgtgtggatcgtgctggtggtccagtgttcggcgggacatcagcacgccaagtcatgcggtccagcgcattggcatt

SEQ ID NO: 355146 - DNA, 275 bp, Zea mays
ctcctcgccaacgccgctcgatcgctccgcgctctcccttgctcacgccctctacatggaaggcaagccggcaccggagccccgctcttccctgctctcgcgctctacatggaaggcaagccggcgcccaaatcgctgctcgcccgcactctacatggaaggcaagccggcgcccaaatcgctgctcgcacgccctctacatggaagatggagtcggtgctgctcaagatccgcctgcacagcgacggctgcgccgaccgcatcaggcgacgcat

SEQ ID NO: 355147 - DNA, 269 bp, Zea mays
atccgatacacgcacgtccgcgagacgcgtgggcgtaccgtggatcggacgcgtgggcggacgcgtgggcggccgtcccgccttcttccttgccaagacgagactctcctcctcctgccactgctagcgctgctactctcaactggataactggatcatgatttggggagaaggttaaactggatgcctttccatgtaattaattgcctctctttaccattctacgtgctactagtattgaagtatcaagaaaaaagaaaggaagcggg

SEQ ID NO: 355148 - DNA, 313 bp, Zea mays
cccacgcgtccgcccacacgtccgactaggttctagatcgcgatctagaactagtccggacgcgtggcacaaacacaagagatgctaaagcatttgcactcttatctgaggagggtattgcaaaagacagttaggaggataacagccgtgactgctggatgtgccacccaggctatggagactggcgtcatctatcgattctgatatcaataaagcatctcagttggagggagctttgttggaaaagaaaattgcttccatcaagagtgggctggatgcagctgctatccctgctgcgagaaaagctgatttg

SEQ ID NO: 355149 - DNA, 288 bp, Zea mays
ggctcggcacaggtcttctacgcggtgttgaccaacgccgtggtggccaccgtcgccgtcctgctcatcaacggcgacgacgagagcgtccccgacgtgtacggctccatcacagccaggaccgacatgtccggcgccagcaactcgctccagtaccagctgttcaaaagggggcagaaccaagatgtgggtgtgccggccaatacctacataccccttaacaggaaggtggtcgcggcggcgctgggctcgccgttcaaggtggacgccgacctgtgggacagagac

SEQ ID NO: 355150 - DNA, 284 bp, Zea mays
agttgaaaaggaaaggactacagtaaaaggaaacaaggtaaatacttctgatgatatgcaaaacggaagcttaagtcccctgcccaaggctaaagcatgcagggcaccaagaaccagttcacttgctataaactcatgttctaatttccaacgttcaactggaggaaatgatgaatgggaagaagcaccgtacccaaataaagtgtcacctttggcgggcatgacgaatcgcaaacgttccacacattcaaatgcttcctcacctcctattgcctgggtagggc

SEQ ID NO: 355151 - DNA, 311 bp, Zea mays
tgccgaggcacagacatcatatcatatcatatatagacgcattgcaggcaggcaccgcggcgcactcgccaacgtgcaccgcccgccatgagaaaagccaccatctttctcatggcgctcgcactcacgctcatcccccatgagcaaacggtggcgacgccgccgcagcctcttcccctgcagctgcagctgaggagaagtcgcttccttgctgccaacaacgtcaacttctcgccgccgccgccgtcgttctacgactgcagcaagaagcctccatccatctgcctctcgcccgggagacccggcgcgac

SEQ ID NO: 355152 - DNA, 267 bp, Zea mays
cacacgcgtccggccaactactgctacggcggcgatatcatcatccgctgcgacgccaacggcatgggcactgcaggccgctgctctgacaacgttgccggataccctccggctggcggcgttgccgagtactggcagagcagcaagaactctggtgacgctgcttgccagaagaactgcatcgtctatactcagccttctgccttcactctgcccgcatctaagtgcactcccagcactggtagcaacgccaccggcactgtcact

SEQ ID NO: 355153 - DNA, 300 bp, Zea mays
aaaaaaaaagggcgccgctcgcgatctagaactagcccacgcgtccgcggaccgtggggatacgcgtgggcgcgtctgtgagctcggcggcggacagggcggcagggggaggacgatggaattctgcccggtgtgtgggattctgctgcagatagatccgggcaccgaagccaccgcctgcgcctcttctgccccgtctgcccctacgtctgccccatcctgaacaagatcgtgaagaaggcgaggttggtcaaaaaggaggtggagcccatctccagcacggcggatgagatgaaatcg

SEQ ID NO: 355154 - DNA, 264 bp, Zea mays
ctccacctccacctcctcctcgtcgtcgtcgttcgctacgcagccccgctcgacaaccacgaccacggctccctgccgcgccggcctgcgggtgccgtccggcgtccagacggcgacgtgcgcggcggcgtcccggccggcggacggcggctgaatcgggctgggctgggtcgacatcacgacgtcggcggctgaccgcagcgcggtcgggaggctgcgctcggtgggcggaggccgctgcggaccggccgagatgcacggcat

SEQ ID NO: 355155 - DNA, 137 bp, Zea mays
gggacggtgcgggtcacgggcagcgacacgagcaccgccgtcaccttccggtgcgggtcctgggtgcggtgcgacttcgacagcccggagaagcgcatcttcttcagcgtcaagtcgtacctggactccgacacgcc

SEQ ID NO: 355156 - DNA, 300 bp, Zea mays
cggactgctcaagatcttcagggtgaacggcaagagctgcgtcgcggggtacgactccaagactagccacatcatgcccttctgattgtagcagcagtcggagtcggacgaacggaaccgactcacattcttcctgtctgtttcactcttgcagtttgcatctctttggttttgattcggtggaagtacattgagctgggaaaagaaaagagaagtatgagaatggcttctcttggaccaaacacaaacatgtacatggatagagattttttttggtaggaaaaaattaattgacgagac

SEQ ID NO: 355157 - DNA, 288 bp, Zea mays
acccactcgtccgcggacggtggcgacgacggcctggtcaacgcggtcaacgtgtgcttggtggggcgacgggcccgggtgcaggcgcggacggccgccgacgagcacgtgtcgccgcggagggactgcacatgcaggaggtggtgggcggcgagtgcccgcagaggtgcccgcggtgcagcatgggaccgcggtggcgggggtggggggtatggggggggtggtaggagctggtggacgcgggtggagtgcgacgtgcggcggggggtggtggggtagggggaggtg

SEQ ID NO: 355158 - DNA, 327 bp, Zea mays
  unsure (1)..(327): unsure at all n locations
ctgacgcgtggngcgcgtggggacctgcccatggagctcgccctgcccaccgccttcaccgtcgtcgtctacctcatggcggcgctcaacccgtcccccgtaccgttcggtctcacgctcgccgtcgtcctggcctacgtcctcgtcgccggcggcctcggcctcgccgtcggcgcactcatgatggacgccaagctcgcgtccacgctggtcaccgtcatcatgctcgcatacctcctcaccggcggcttctacgtgcacagcgtgccgcggttcatggtctggacccagtacacctccttcacctactactgctaccgcctgctc

SEQ ID NO: 355159 - DNA, 322 bp, Zea mays
cccacgcgtccgcccacgcgtccgagagaattcgtcccggaaaagaaaaaaaatcacgcttccatccgcgagagagagagagaggagtgggaggaccggaagaggagttcaggagggagaggtcggcggcggcgcggcagatcgggttgcaccgtgcagctcgggccttaggcgcaccagcggtggggggatccacgcgcccatgcgccggtgaggtggtggggcccgcttggcgctcgagttggaatggcggcgtcggcgtcggctgggaggtggtgggcggtggtccttgcggtcgcggtgctgctcgggccgggacggg

SEQ ID NO: 355160 - DNA, 319 bp, Zea mays
ctgcctccatgctggacgaggccatccagtacgtcaagttcctcaagtcccagctgcagtccctgcagcgcgctgccgcctcccgccacgcgccgtggcagtacgcgctccttccccacgccgacatgctgtgacgaacacgaacgcagtctcgatcgatcgatggatcgatcgttaccatcgagctagctagcttagcgcgcgcgtcggtggtcgttggcgtctcgagtaccgacgggacgcgacgacacgaacacgacggcctctgctgatgctcttgtacgtagcgttgtgtattgggcatcagctgcctcgtgtg

SEQ ID NO: 355161 - DNA, 313 bp, Zea mays
gtcgatgagaacaccgtggtcgcggactgtatgatcgacgcgccggggcacgtggttgctctctccacggacgtggctagggagcgacggttgcgggcgatggcggccgacgaggtcctgcgcgctggcgtggtgtacctcctcgttccggcagccggtccagtgctcggctaggcggccgtgacgtcgaggccatcgggcggctggtctctgggaataacggttcgaagaagagcacgacccgcggcggcaagagggtctttccggacgtcagcaccgaagagtacgcggctgaaagaaatgaggttgtgtg

SEQ ID NO: 355162 - DNA, 305 bp, Zea mays
tcccacgcgtccgcggacgcgtgggcgacgtggcggacgaaggcaaaccctagccaacgcgtacgcctcgcgtcccgcgcctcctcccccagatccggccgatccgtcgctgccatggcgctgcggcctctcgccggcaagctgagggtcctccctccgttgccaggcggctgcttctcggggatctcgccggcggcagggtcgtcgccggagaggtcggtcttcttgaggtcctcgctgccgccgccgccgccgacggcgcgcgcggtcgtcgttggagatgtcgggaggaggctgcttcttcg

SEQ ID NO: 355163 - DNA, 304 bp, Zea mays
gggaataaatgtgagggaagaactaatagagtccgcaaaaacactcccatctacttttagcaaaatcttggaggtcctgaacagtgatcctgtctcaaatgctatggagtactacacaacttttgttaaggactgccatactgaggacaagagaaatagtgattctgtgctacccaaactgaaagacttgcaggccaatcctccttctttgcatgtctcagtatataatgagatcaagagttctcttggagaggcatcaaaatctcctgggtttactgtgatcgcgggagaaattgactcaaat

SEQ ID NO: 355164 - DNA, 208 bp, Zea mays
gtctgccttgtcggtcatccatcgaccgcctcctgctcggcttcccaccccgcctgcctgcgttgcacaccagggaggagctcctccgaccgaccggccatgagctaccaggctctcctccggcactcacctaccgcagcggcacggtacctcgcagccagccagtgaccgcagcgatacgggcgcaccatgcgcgcggtactcccgc

SEQ ID NO: 355165 - DNA, 278 bp, Zea mays
  unsure (1)..(278): unsure at all n locations
taccacgcgtccgcggaccgtggtcctcagcatccgttcaagtgtgtgtttgcgttcttaggtttcaaggttggctctcagcggggggccactctncantaatggactagggcgcggacaaagaatcagcatgcatccgggcgcggtcagtttcgactccggcgacgggcggcggcgcggtggcgcgcagatgctgctcttcggcggcggaggcagcgccaacagcaactgcttcttccgaggtgttccgatggcggtcctggccatggacgacgcga

SEQ ID NO: 355166 - DNA, 273 bp, Zea mays
cagcgccgggacggtggcggacgcgtgggcggaccgtgggcggaccgtgggctcgacgcggccaaggccaccgtcggggagcactaaggccatgagctgacgcaccgactggaatccaagggatgcagctggggaggaggcgcacagctgaccatcttctacggcgggaaagtggtcgtcttcgacaggttgccctccgccaaggtcaaggacctgctgcaggtcgtgagcccgccgggggccgacgccgtggtggacggtgccggtgccggt

SEQ ID NO: 355167 - DNA, 268 bp, Zea mays
attgcagatccatacgctcttttggcaggtgcttcttctcgtggcagtaagaaatcacatatcagcactggcgctatcgctggaattgcggtaccggtggaattcttgtgattgccctcattgggatggtattatttgcgttgcgacagaaaagaagggtcaaggaagtcacaggacgaaccgaccctttcgcttcatggggagtttcccagaaagacagtggaggggctccacagctcaaaggagcaaggttgttctctctgaatga

SEQ ID NO: 355168 - DNA, 264 bp, Zea mays
gtcatagcgtacccttagtgcttaccaagatgaaatcgtccctggagtacgtttttcgtctagcatctagttgttactcgactgcaggcatcggcattcaagcatcatctttagatctactcttttagctgtcactcatgttaattgttattgttacttcatctggtgaacaagagtataagaatttgtatatgttcttccacgtcaacggtgctggcaaaagcatattacaaacagtacttttgttcaccgtggttacaaata

SEQ ID NO: 355169 - DNA, 263 bp, Zea mays
atgaagttagtttttattatatctgtggtaaactgcttaatctaccctttgttactactttcaactgtttctgcatgtctatttgataaaaaatcatgtgctgatttctactgtacctattgtcactatgatccttaaggctcattaattgcatggttttttaagtttgtaaattaatttgaaaaagaatattagtaaagaataagggaaaacatgacaattttttgttctttgtaagaataaatctgcaactattgggagtt

SEQ ID NO: 355170 - DNA, 245 bp, Zea mays
gattataacaactcgctgtattgcggatagaggctgaatgaggacaaatcagctttagatagagttcaattgagatccatcgcccttgtcaaaaagaaaaagagacagtgatgacgaatggctttcttaccctagtggtggacaacgatcgcgagagtgactctgcaactgtgaatgactaaatacagagaacggcatgcttttactctactgctcagagtaatggagcggcgagaaagtttaaa

SEQ ID NO: 355171 - DNA, 285 bp, Zea mays
gttttctgcagttttagtgcctgtatagaccgcaactgatctgagaactgcagtgcagtgttgtcacaatgtattcaggagacatggttggtaagtggtgcttgggcgcatcagttcgggtgactgctttgacagaactttggatctatgatcaaatggaggtgccgagctataacctagcgtgtggagccttgatttctgaataaaagatataccgggagcaatccacacgccagtggtgacaaggaaacggcttgctgaatagcgagctgctcgtgtgctggc

SEQ ID NO: 355172 - DNA, 285 bp, Zea mays
gatgagtgatatatcttactcatctgtttgtggtacacattattttattccttgcaagatatcaaatgattacaagtatgccttcggcttcacacaaacgagagctcgaaggtatatttgaaggatgagcacatcagtgttctgggctcgataacgtaccattatgcatgtatgacattgtttctttatttataatcgtgaggtacaacttcgtatgaattacaaacatatccttaaactctatacatgataactacaaatattatgagcgccatattgtacttc

SEQ ID NO: 355173 - DNA, 312 bp, Zea mays
  unsure (1)..(312): unsure at all n locations
ggaagaggctggcaagcacgaagcggagaagcctcgccttgcttgctgaagtcaagttcttgagaaggaagtaccagtcctttctgaggggtggctcgcagcagacacattacaggttgaagaagcaggctcggtacatgccttctccattgggaagcaataaggctgcagcgttaacgatcatggtgcaggggaccgaagtgccttctaccagcaaaaactcaaaacttgacttgaatcaagactctgttctgaatgatgtggagaatgattgcctggggcaacagtgccatccataagtcgnaaagtttg

SEQ ID NO: 355174 - DNA, 313 bp, Zea mays
tctattcgattttaattaccaagtgatttaattcctctaatccccttcaatcccttcataaccgaacaagcatttactgggtatgctcctgcgtcctgcccgaactctaacccaacttaagttgattggctattcgtatccggttctgatctaatcaatattgaactgtatacatgtgtttttcgtactaactttgatattttttttcctgaacaccattggctatacatttgtacacccatgtactaactttactcggaccgcgtatgaacccgcaatgcttccttgtcaaggtcgctacatcaacatgagg

SEQ ID NO: 355175 - DNA, 192 bp, Zea mays
gctagccgcgccactccttcgtgtagccatcagccttctcatcgccaccaatggccactgccgatgtccagaccccgaccgtcgtggcggccgatgaagctcccgtagtggagaccccgccgccggctgtcgtgcccgaagagtctgccccctccgatgccgatgccgaggccgaggctgctgctcctgctg

SEQ ID NO: 355176 - DNA, 316 bp, Zea mays
gcacaagcgcacagccacggtgagcagagaagaaacgcatccacagaagggacaaacgtccggagcggattccacattccagtctcggtctcggtccatgggcgcgggaaagggaggagacggcggcgaggcggcgcccgatgccgcgcagccgtcgtgctgaagatgaaactgcattgcgccggctgcgcgcacaaggtcaagaaggccatcaagcgcgttcccggtgtggactccatagtcacagacgtcgcggcgaacacggtcgtcgtggtggggacggccgacgcgggcgcgctcaaggcgcggctcgagg

SEQ ID NO: 355177 - DNA, 311 bp, Zea mays
ggggaagatgctcaattcatcgatgggcttgttaaaattggcaggacggccagtagctggcatcagcgactgcgagctctggtcaatatgcaagtcatttacttccgccgcattttcctgacagaggagcgagagcgtgatgtcttatttaacaatgtgtcagacatgcttagcgatcctcagcttgaggttcgagcatgcgcggcaacgacgctcgccggaatgatccgctgttccccaggccgcatccgcgatcccctgattgtgcgcctcaagcgtcgcttcgagatcgagctagaccaaaacccgat

SEQ ID NO: 355178 - DNA, 217 bp, Zea mays
cccacgcgtccgcggacgcgtggttccaacttccaagcaggagcaaacgctagccatctccacctcaagttagctctctagctatactaagctatagcagcggtgctgatcatcgctcgctaccacaccatcaccaccgaccaacccatcagctagctagctatagcatgtcgggcgtgtgggagttcaagaacggcgtggtgcgcctggtggagaa

SEQ ID NO: 355179 - DNA, 251 bp, Zea mays
cagctaagaccaaaattattcttctttcttttattcaggaaggcaaacatgcatagggttgacagcagtatcatgcgtgttgtaaatttcacccaatacttctggctgtgctcaggtctttggcccaaaaacaataatattaatactcacattaacatcaagaaggttaaccgcattgcccattgcatcgatttcacaggggagatcaggaagacatctcctttctccatctacaacaaatctgtatcggt

SEQ ID NO: 355180 - DNA, 253 bp, Zea mays
aaactctcaagtctcctgctattggatgttagctcaattggttgaatcattctaagttgccatgtttatgagtacttcatactaaatatcctcttgttttgtttcttaagcttatgattcttcaattgttgtttcatgttactctctgcttggcggaactctatgcaacaagaaaccagtaactgtcctactatactctttccatcgatagagcaatggcagtgagcctgttgtgtctttttttcttgttcaa

SEQ ID NO: 355181 - DNA, 312 bp, Zea mays
agcgtgtcaagctgttgagatctgcgttgttgagttgagtgtctctatggagtatcacatacattcaaatatgcagatatggatagatacatagctaatgttttacgcacagacgacaggaacagctgtagccaaaccaaatacattgctcgcacactacatcgacatatcacttgaaagaaagcagcatctgaatcacgaagcagggcatccgaaaggcatgcgcttagttgggtatactcttcccccctcatgcagacaggcagcagctaacatccctcactctcggtacctgacccaacctcgtccacg

SEQ ID NO: 355182 - DNA, 313 bp, Zea mays
gaaagacggacagcatagagaaagagagagccggccggccggcgcacagcaacaagataaaaatggaggcgcctcgccgtccctgctcctcgctggtacttctgctgcgtttcttggcgatcttggcagcggcggcgttcttcatcgttctcgccgtgcacgttgagcctgtgcaaggagggaggcagctgaacccaccgccatctccggaggcacatccaaccccgcaatcacattgctgcaaccgtagtgaaacaaattaagagaggccgcgctatacgattgggatgtgcgtctcttatttggtgggagc

SEQ ID NO: 355183 - DNA, 310 bp, Zea mays
gcttgacgacggcagccatggggagcagggccgagatccgagcaggacgcggcagagagctggggctggaaatccgagccacggcagaggactagcgcattggagagctgatggagagggagaaggggagctcgcggcagccatcatcggcagagcaagctccgacgagggagaaagacaggcgcggcagggaataagccggacgcgacgagcttggggaatctcgagcgcgccatggagggaccgagctgggaatcgcgcgcaaacttggaggagaccgcggtccgagcgccgcgacgaacgtatttta

SEQ ID NO: 355184 - DNA, 307 bp, Zea mays
gccgcccaagtcgccgcctccaccgcattgccattacacggggcagcagccaccgccctcgccggtgccagcgtcgttgtactcgccgccgccgccaccaccagtaccagcgcccatgccgtcgccgtcgccgccgccaccgccaccgccagtacaagcgcccatgccgccgccgccgccgccggcaccaacgccgacacctgcgccgacgcccacgccgtcgccggcacccgtcaataactgcagctacatgtactgcgccatgcaatgtagcccggtctgccaagccaaccacgacgccggcatc

SEQ ID NO: 355185 - DNA, 306 bp, Zea mays
agatatttgaacaaaaaatagtgttttgttctaaaactgtcataaagagtgcatacatcatagctatggtttcaactgtgatttgatgtcctataatattgagtgtcctatagtgtgttgttctgaaacagtcacaaagagggcctaagaagctgatggaatcctcattcaccgccgctaaggagtttgagcgggatcggagaggagacgtcagttcttcctcctctgctcaatgcggccattcgccctgtcccccaaccctgaactccacactgccactccgtgctcattttttctgaaggggaa

SEQ ID NO: 355186 - DNA, 309 bp, Zea mays
tggagagattagcagagctcaaggaaccagaaaagcccatcaacaaaagccgctacttccaagggatgcttgctttggcaagtatattatatagagaaggccggaattcggaggctgccaaatatctgcggatggctattgcttatgatccttctgtagaaaggcttctcaaggaatgcgaggaaggaatggacgatcagccaaagccagaggagaagtgatgtgctggacctgaaaaagccacagtaacagagatagcacaccgcttttgtttttgaacactaaaaccgcccccagcagtttaccctt

SEQ ID NO: 355187 - DNA, 307 bp, Zea mays
gttaggaaaagataggatcgaatcaagctgaactgaacctaaaacaattgtcctatattatatgttaccctgtccatttctggtggtggtagcggtggcgcttagcttaggtttgagcagacccgtgtatagtagatgtagctctcaaataattagcaaagagggccttttgtatcgtgcaagcataggtgttcagtcattttgataggccgcctagccgctgcccgacgcagaatgcatgattatcacctttttttgtgtggtagatagggtgtggttatcatgcacaaacacaacaagaggaagg

SEQ ID NO: 355188 - DNA, 110 bp, Zea mays
tccacgcgtccgactacacacggctcactggctcatgtcggccacaccagaaaatcattctaactgaaatggcgccatgttcgcctctcctcctggccgtggcgctccta

SEQ ID NO: 355189 - DNA, 100 bp, Zea mays
gccgccgcggcaaagaaggggcgcgggatcgtcgcgtgcgggaagcggaccgacttcggatacgacaaggatttcgaggtgcgctactcgcttgggaagc

SEQ ID NO: 355190 - DNA, 273 bp, Zea mays
  unsure (1)..(273): unsure at all n locations
acgactaggtccgggaccgggtcggtcggnacgcgtgtgcgtgacgcgtggcggttatcatcttattgctaagtcagatttcttccttggaaagcatgctgaggctaaccagttcttaaagaagaatgatcaaataaaagtcatggggtgcaggtgtgggaatcaatctcaggactcaattttatcattctccatggctatctctgaactattgcggcttaaagctgctggcaatgaagcattccaatctggtaaatatttggaggctgtgga

SEQ ID NO: 355191 - DNA, 231 bp, Zea mays
gcggctacctcctgtacgggccgccggggaccggcaagtccaccatgatcgccgccatggccaaccacctcgactacgacgaggagtagctggtggctgctgttgacttcttgttagttgctagtgctacatatgtagggagcccctgatctggttgctggtctcatctcatgagcgaagaataatgctaactagacgacgatttgattattactttatgttgtcagtcac

SEQ ID NO: 355192 - DNA, 118 bp, Zea mays
cccacgcgtccgaacgcaagcggaaccatggagttaaacacaagtgcctgctcacaattagcagtgtacgtagttgacaccacacagctgcgccattaacatatagcaggcctagcag

SEQ ID NO: 355193 - DNA, 278 bp, Zea mays
cagatggcagtccccttgttagatctgaggttgctatagcgcttactcgctttgcgttgggtcacaacaaacatctcaaatctgttgcttccgagtattggaaacctcaacccaattcattgctgaaatcactaccatcgttggcaaatataagtaatccaagcaatgtttacagtcccaacaatattctacaaggcaggattggtcctgtgttgagggttgccagtgatagcggtgccgctggtcgtgatggaagaatttctacaagcaacccaatt

SEQ ID NO: 355194 - DNA, 283 bp, Zea mays
caacaataaggttggcctttccgacagtattgcacctgaaaactgtgcagctgacactttgaatgcttcagaggaaccaaacagtccttcgttaaatcatgagaggtcatttgaggaacacgaattgcctgctttaggagaggagcctaaaagcacaaatttactcctttctacttctgggtttcaagagaaaatttcagcatcagtgatcagttctagcagtggtgtcatgcctaccattgttactgacaacgttgctacttctgaggataataatggttgt

SEQ ID NO: 355195 - DNA, 282 bp, Zea mays
gcctgtagctcgccggagatccatgcctttgtgagctcgagtggagagaaaaaaaaaaggagcagcgaagagcgaacgaccgagatgctggagaagctgtgggacgacgtggtggccgggcctcgcccggagacgggcctcgagaagctccgcaaggccaccaccgcccgcccgctcgtcgtcgtcgacaaagaaataactacatgcatcttctcatctgctggattgagtacatagaacacttgtgcaacacattcggcgagaacacgggtcatctttata

SEQ ID NO: 355196 - DNA, 328 bp, Zea mays
ggttgctcttgacaaatgttggagtgccgaccgtctagccagacggggtttacaggcagcaccctatgtgttgtttgttttgtgaccaagacgaggaaaccattaaccatcttctggtctcttgctccttctctcaggcaattttggttcgtgctgttacaagtggtgggtcttcaacgcctatctccacagccagacacgtccttcttcctagaatggtggtcaggttctgctgcagtggtggatgagcaatttcagcagggtttctactacatcatcctgcttggtgcttggctcctttggaagcaccgatgtgtcttcgatggga

SEQ ID NO: 355197 - DNA, 106 bp, Zea mays
gggaaagatcgtatcctggtccgcgggcgaggcacaccgcgtctccaagggcgatgctgttgtggtcgtcgagtctgacaaggccgacatggacgtcgagaccttc

SEQ ID NO: 355198 - DNA, 315 bp, Zea mays
gaacatgctgtcagtcgattgaatccttttcgtttccaacagtagaaacagagtatcgattttccatcattaaacttagatgtaatactttcgatacaccactctcattaaccactgtgcataaagattcgtcctccttaaaaggtcttcgagtaaggaggtttccccaaggaaatactgcgattgatctctaatgttctccagcttctagatcaatgattaatttgcacagctgcctgtattctgtcagttatcttgtcatgtgcatcatctgctgaactacgttttgtttcataataaccaagcagactacac

SEQ ID NO: 355199 - DNA, 289 bp, Zea mays
agtctatgtgcagataacccacattggggataccttagcgtgcatgtctacggagctcaaagctatggaagggagcatctgccatgagttcgagaccgggctcccagctgccgccgtgtgggaggtctatggaagcctcctcttcgggaaactgatgccccagctgctccctgaagtggtctcgaaggttgagcttgtggagggagacggtggcgctggaacggtcctgcttgttaccttccctccaggaactcctggatcagaaactttcagagagaagttcatcaag

SEQ ID NO: 355200 - DNA, 221 bp, Zea mays
cccacgcgtccggtacagctgagattacaacatttatggaaggaccaatgaagctatgtcgttgttctttgtaaatggtaattttcccatcaaacttgtgggcgtttggtaacctatgcaaaatttgttacaactgcaaaagttgtaatatcttatggattcatggacaaactgtgatgtgcagtcagtcaaaataacttatcctaatacatttgccaccc

SEQ ID NO: 355201 - DNA, 218 bp, Zea mays
ctactcgttcttgtactgcacctaccccagggacagggagatggcgcgggctgaggcggcgcgaaatagaggggattatggcgatgaaggatttggatccgaggacgaagacaatggcgagaggaagctgctgccgcagtgagtccctatggtcactggtcaggttcgaagagaccggcgtccgttggggagaagaatagacgtgagacgtttcatct

SEQ ID NO: 355202 - DNA, 101 bp, Zea mays
gtaacgggacgagatcttgtccggttgtcccatcacagctaaagcaaaaccaccacccatcgaactgatcaggttcatcactcttttcccgacacaaaaga

SEQ ID NO: 355203 - DNA, 281 bp, Zea mays
cgagctgtctgtaggggtgcagcacgactggagctaccgcccattggtgcacgacgtgttggcttgaagcagaacaagctgaagttgccggcagagaagtacgaattggatgactctgataaattctgggtggcaaacagctggtctccattccccaaagttgctgaggaaatcgaagcgcagctgccaagtacaagcaggatgtggatgaggtgaaccagcatactggtggtggcaaggttggggttgagtttgatggtactgatctaattggcaacact

SEQ ID NO: 355204 - DNA, 257 bp, Zea mays
ctcatatgtaacctgcagcatcttcggtgttcccatcggtacctgtcgaagcatcttgtagtgttcagacagttcagttggctatcagtgcgaaggagacacattggtcaagcagaactgcagaggaggtgtacctgggcagacaagttagagttagcaactgacccacttcactttgattttacgttattgagttgctctgcgatgtacaggtttggatctccttatgttgacccaagttctatatcctacaggtt

SEQ ID NO: 355205 - DNA, 263 bp, Zea mays
gatcggagaactcaatcgagctaggatcgcagcagcaccgaagcatttgccgatcatcagttcttccatccaggtacgtacgtgaagttcgttcgactcataattagtttccccttgccaatgtatgtatgtatgtatctagcgaaactccagtgcagaccaaccaaattaaacacagcatgcaaaggatcacgaaggcgctgcggctccacgggaagcagctgaggcacgcggtcctgcagcacatgaacatgaaccagggg

SEQ ID NO: 355206 - DNA, 145 bp, Zea mays
ggcattttttctgtatcttacattatgatcttttttccttctcaggtctagcgaagatgatttttagttaggaaacagagcaatcatttatcaatatgaaaaatcacactggctccatactaataattttattttctgacgcact

SEQ ID NO: 355207 - DNA, 289 bp, Zea mays
cggacgcgtggtgatgaccacgagctgatgatgacgcgtgttctagcttgttgctgctgcttaagcagctaagcattttttttgttatgttttttttatctggcctcgcagaaggctagctacttacgagtaagtatcattagtagcgtacggctagtgtgtagcttgctgctttaactagaaaaaggagttaagctaggtcgatgtaaatagttcccttttctttttatttttgaaaaaaaaatatcaatcaagaagtttaattttggggccgtcgtcaggttgttgg

SEQ ID NO: 355208 - DNA, 286 bp, Zea mays
aagtacgaaaggacaacggcacgcagtcggagatcgtcgattccaacaaatggaagaaagacaagaagaactggatcattggaagttcattgttcttgggaagctctgtcttggtcaaccttctgctgatctccataatactctttggtacttactgtaccatcacgataaaggaagtcccagctatgcagtcatcaaacagtataggattgcccctgaaagccttcacttatgctgagcttgagaaggcaaccggtggtttccagaaagtgattggcactggtgc

SEQ ID NO: 355209 - DNA, 191 bp, Zea mays
attgcagacctccctctgctcgcgcgcatggccgtggagggccaaatccacactgcgctcgccgaatctcacctctctctgctcacctgtgccgttgcccagctcgcggcgctctctccctggcgcgctcgtccgcccctgctccactgcgccgagcagttcccagccgagctcctatccagccatgccgc

SEQ ID NO: 355210 - DNA, 101 bp, Zea mays
ccgaccgtgggctggacgcgtgggatacaaagcaggtgcgctgaagaagggcatggaacatatatacgccaagcaatgtgaatttgatgctatctttgatg

SEQ ID NO: 355211 - DNA, 133 bp, Zea mays
ctttttcctaccattctttcatcttatacacctgcatctggctgtggtgttgacaatagtggatcctatgaacttccaaatgattttttgtatgtaaacatcctgtgtcatctttcttgtgctgtccctgtaa

SEQ ID NO: 355212 - DNA, 259 bp, Zea mays
atttgctcagaggcgcggcaacggaggaggctgcctgcagcagttcggccaggaagcgccgcaagcagccagcagagcggcagggcggcctggctcctcctcctccttctcctgctgcgacgggatccaagaggatgaggatgagccgtggagagcgggggacacgagcggagaagaaagaaacaatggaggacggcttcatctggaggaagtacggccagaaggacatccacggcagcaactaccccaggctctactt

SEQ ID NO: 355213 - DNA, 249 bp, Zea mays
aacttgcaccgatcgctcgtcagttctttctgatcatcggtcgcctctctagctagctagctacctacctgatcggccatggctgacgagaagaagcaccaccacctgttccaccgccacaaggacggcagcgaggacgaagcgagccccggccgcgaggtggactacgacaagaaggagaagcaccacaagcacctggggcagctcggcgggctcggcgccatcgccgccggtgcatacgccattcac

SEQ ID NO: 355214 - DNA, 139 bp, Zea mays
cccacgcgtccgttaatttcggttgaaatgatctgtatttcgcattacttgcgggcttggttcatacgtgttggaactacagttacgtttttctgtgttctagacttttctttaactaagttaatcctgtttgaatcat

SEQ ID NO: 355215 - DNA, 317 bp, Zea mays
tcgacgacctggacgcgttccgcaacggcaaggcctactacgcgcgcctcggccaggcgtggcagcccggctacctcctgtacgggccgccggggaccggcaagtccagtatgatcgccgccatggccaaccacctcgacttaggacgtggtacgacatcggagtcacggtcggggggatgaacagaggggctcgtgagggcctattgaggagaccagagaggcatcatcggcggcgaggagatcgactgctcgctcgacctcactggcaagcgcaagacgaagaacaagaaggaggaggacggcgagaacaagaag

SEQ ID NO: 355216 - DNA, 310 bp, Zea mays
cccacgcctccggcggggactccatgttgctgagcaatatttatgcaagtcctgatcgatggagcgacgccatgaacatcaggcgatggacggctgatactgcagtgaggaagtcgcccgcctgtagtgttgttgaatcaagtttgccgacgaatagttaggacccaacgaattgtcttccctgtcaggtctaattttttcaacagcactgtctattatggtagtaacctcgtctcaatttggtcaggggaatacatggcgccggagccgtgccgccccagtggtgtcttaagatgtgtcgaccctttca

SEQ ID NO: 355217 - DNA, 313 bp, Zea mays
ctttttattatatattttacagttcttctagcatctccttactggcaggacaaagataagcagaaagatttgtcagttcctggtgctgggttcaactttcatgggatcatatcttcttgttttgaaccatatatgactgtatacattgaacttgaggagaaatctttagtggatcaattagaaaaacttgtccaggaagaaagatgggaattcgaggaaggaagtcagacgaacattctatcaagcagatgcaaggtttccttggggatagaaaaagcttaaaggggtagcgcattaacaaagaaccaaacat

SEQ ID NO: 355218 - DNA, 304 bp, Zea mays
gcctcgtcgtgaacatggtgcgttccaaattctgacatcaactgaggctttctttctagcatctaatctatcatgcaaaacggattcgtcggtcttttcagtcgatgtcacattgtcagatgagcagattgacgctgcaataattgcatggggatgattatgccggttctctagaagatagctctgcaaagttacaatgcgttgtcaaggaatatcatttcgtattacagtgtttgacaaattcctgggaccctcctaatcaaaggtcattattgactaagcattataggtacttctcatattg

SEQ ID NO: 355219 - DNA, 231 bp, Zea mays
  unsure (1)..(231): unsure at all n locations
nccacggctccgcagaagccgcggcggcggagcaaacgcaggcgaaggcgagggtgtgagggaaggcgcaccagccatggtgcacgtcaacttctaccgcaactatggtaagacgttcaagacaccaaggcgtccttatgagaacggagcgtcttgatgctgaactgaagctggtcggtgagtatgggctgacgtgcaagcgctgaccttggagggtccagtatgcactga

SEQ ID NO: 355220 - DNA, 190 bp, Zea mays
gctcgttcaactgacccgccatgcgccaccacggtccgggccggggaagacgcggggccgcggtccgcgcatccctgccgcgacgcttcagaagcagaaaacggcgttggcgaacgtcgaccagatcacaggcgccaagatttccgacgagcttcgtattctcccgcggtaaactcccctccacggttcg

SEQ ID NO: 355221 - DNA, 207 bp, Zea mays
gtgtttcctcagtggactagtgtgaagctgtgcttagcgtacggatagggaggaaggacaaggcaaggcaactgatggcggcgggcggcggaggcggctcggcggcgccgttcgtgtggaagacgtacacgatggtggaggaccctgggacggcaggggtgatcggctggggcagcggcaacaacagtttcgtcgtcgccgacccct

SEQ ID NO: 355222 - DNA, 225 bp, Zea mays
gccaaaaaacgcgagacgccggatacgaaacgcgccgaaacccttacgcgcacggcgcaccgcgtcctgctctgccgaacacacaccacataccccgacgggcagcaaagcaagctgctctacggtttgagcacaccccgtctccaccacagatcacgccgctcgctcgctcgccaccagacgccacacgcccccagcccaagaggcagccgcccgcatctggtt

SEQ ID NO: 355223 - DNA, 256 bp, Zea mays
acagtcgagacggggtcggcgtcggcgacgcgccgttccacggtcgccatccctcgtcgtccgtcgcgggctcgtgccgtgccgctatccattctccgagggaacacatatacaacttgatccaaaggattctggtggcatgaatgctgatattccatctttcatctgatgaacagtgggctatgtacctcattgtcgacgcgccatggacgccaagctgcttctataggaagcccaagattgtccagcacatatt

SEQ ID NO: 355224 - DNA, 314 bp, Zea mays
gttctagatcgcgagcggccgcccttttttttttttttttagttgtgatgtgctttccattggcaggcacacattttccatttggttgttgcgtcttgtgcattcagttgtgtggtgatagaagtaactctagagatatagaattctagccatgcggattgtccctctctaacgacaattatatactagcacctgtacacgttggcccagatgaacgccaacgaggttggcgggagtgcactgcactgcacgtatgcacctgtgcacgggcagcactctgccaagagagtcctgcgcgacggctctggactcgc

SEQ ID NO: 355225 - DNA, 305 bp, Zea mays
aatcaatcccaatcgcgacccagccagaggcgagcgcgagaaaatccccattccccaatccccacgccacagcctccgtgttctccgtcgcctccgtctactccgccaagcgcgacgcgctcaccttcccgcgcgtgctctccgtcgtgccccgcgtctggcggaggctcgccgccacgttcctcgccgcgttcgcgctcctcttcgcctaccacgccgtcgccgtgctcgtcttcgtcggcctcgtcgtcgccgcggacaacggctccggcctcgcaggcctgctcggcttcctcgtcgccgtc

SEQ ID NO: 355226 - DNA, 299 bp, Zea mays
cccacgcgtccggttcgtgtcataaacgatcgctctttatgggggagaatccagacctaattgggacaacatggggatgatactgtgtaactgtagcacttaactttctggctcacgtaccctgcatacggacttggctcctgagtcgtggtgaacctggatttgaagtacgggagctttaagatgtatcctgatgacgtgatgggcagggcgtggatactcataggtccacagtcaacgtgcttttgaagcctgaacatggtcaggaggttatgatcctattgctttttcgaaattcc

SEQ ID NO: 355227 - DNA, 288 bp, Zea mays
ggtgtccaacacatgtatttgatttcagcaaagcaattgcatataaatacataatatatgtttgtggcccacctaagatccaactaaaccattgaccaacggtatagattatcatgacgaagattcctttaattttctttttgcaataaaatagctaaagataataaagacagggagaggcacttgccggtgttgttgacgttgacgacgacgccggtgagagtagactcgaacgaccaagaaaggatctggtgtcgttcgatgagatcaccggtggctcccgagaaa

SEQ ID NO: 355228 - DNA, 258 bp, Zea mays
  unsure (1)..(258): unsure at all n locations
cccacgcgtccggctgctacatcatatttactcctgctgctgcttgaggccattattctgtacgtaaatgaagccactactactctcacacagcatgcgccggccgacgacgtacgtacgtgtattatatacgctctaccccgtgagcttttgttcgagtgatacgtgatccatccatgcatggatgcttatgtatgtatatgtgttagtcgtctcagggaaccggngcagcagaaaggggtgttgtaataaaattac

SEQ ID NO: 355229 - DNA, 296 bp, Zea mays
tttctctcgttggctcccgttctgtgcggccgtcggataccagatggtgtagagaatcgatcgatcgatgcgtgttccttcctgcactgcacatggtgggctatcatgtcctcaattgttttttttccacgttaagtcaaacctggctgtgttttgatgtgcacaagtcgttcgcatacgtagtacgtgtgtgatggtagagcaggtgaatcgcatcgcatgtggcagtctggtagaggtccacgtgtgataatatataggcgggaaagtagctaggtgaactttacactcgtata

SEQ ID NO: 355230 - DNA, 176 bp, Zea mays
ctacaccatcaccttctgccccgtcgccaccccaagcgtgaaatcgtcgagtggccctggagcggcaacaacgacggcggcaccgacaggcccgacgccgacgctgccgggggcgacgccgcggtcggcaggcggcggcccggaggtgcagggcgtgatgctgggcgacaactcct

SEQ ID NO: 355231 - DNA, 297 bp, Zea mays
  unsure (1)..(297): unsure at all n locations
cggacggtggngctgacgcgtgggtgaggaactaattgctaagaggcagcagcttgatgctgtgaattttgcttacgaggctgggcttcaggagaagttccctccagttcctcttctggagtcctacctggaggactctaagaagacgtggaccgctgcttcagataattcaagcactagcagcagcgggcaatcagggagcaacgcgaacaagaaagagcagtctgcactgagagctgtcatcaagtgtgtcgaggaccgtaatcttgaagccgagtttccactggaggatctccg

SEQ ID NO: 355232 - DNA, 304 bp, Zea mays
ggaccgtggggtgcacagtgtaggtcttcggctaaatgccgtggaggccgtgagccactccatcgcccccaggcctgcagcactgttcgacgaaattcctgttagggacgtggtcacctgctcagctgcaatttaccgacatgcgaggagcgggctgttccatgagtcagctgagctgtttgttggcatgatgagggcagttagaataatgtatgacaaaaactctggaaggtcaagaggctttggatttgttcatttctcaaatgataatgaagctaagtgtgccaaggatgctatggatggg

SEQ ID NO: 355233 - DNA, 220 bp, Zea mays
ctcaacgactcaacggacgccgcgacttcacttcctctctccccgcacgcagcctcgccgtacgtgcgccaagccgccgaagcacagagacagcgcccggcggttcggcacttcggccatgcggcggtcagagtgggaggaccggtgcaatcggcacccggaccaccgcacgtccaaaggcgtctgcccgtactgcctccgcgaccgcctcgcgcacctc

SEQ ID NO: 355234 - DNA, 298 bp, Zea mays
acctgatcttcaagacttgcaatatttcttggagtttcaagttcctctacaatgggcacctatgttcaatgagcttgtccttggacctcaaaggagaaaaggctcgtacccttcaatgcagttcagatttctcggccccaaactccacgtcagcacttctcaggtatctagctctcagaaaccggttgttggcctacggctatacctggagggcaggaagtgcaaccggttggccatccatgtccagcacctctccagtgttccaagcatgatcgcagactccgtggcgtcttcaatg

SEQ ID NO: 355235 - DNA, 292 bp, Zea mays
gcctttctcgccctctttccacctttctcacacgtgcccgccttctccgcccctctcctcgccagcggttgcgtcgaccggcagcggcgttcaactgcgccccacgagcaggtttcttggcccgtcgacttccagtgagttcagtttagctcagtaagcatctgatcaacttcgaggtgccagacagatcctatgctgccttactgggatgaaaggtggctgtctgcataggctccttgtccacaagctatgctttggcctgagtattctcactgtgccgattattgttctg

SEQ ID NO: 355236 - DNA, 104 bp, Zea mays
ctcctgcactttcactctatcatcacctaccaggctactagcataacaagtcgccaatccctcccccgagagagtcagaaatggcatcacctcatagttgcttt

SEQ ID NO: 355237 - DNA, 290 bp, Zea mays
gtcaagctcctgctctcccgcggctacgcgtgcacgccactgtccgcgacccaagtaagtaacaagcatgcacaccccatgccgctctccagctgcttctgcgtttgcgtctgcgtgaacacgcgctgggagttggggccgggggactcatgcatgtcggccggctctctgcttcaaggtgatcccaagaacgcccacctgcaacagctggacggggcccgggagaggttgcgcctgttcaaggccgacgtgctcgaccgcgacggactggcgaccgcggtcgtagcgtg

SEQ ID NO: 355238 - DNA, 250 bp, Zea mays
ggacgcgtggtccggctcggcggtccgcgccctccttcatcctccggctggaggccctcctccacccccggctcgcggccctacactctcgttgggtccttaaccgtgcctcccattctctcctcttctctcgctcgagcgccgcggcctctgctcgctcggtcgaggctgaaggacgggacagcgcagattgatcaccgggcgtcggaaccgccgccgctgccgccgaagcggttatcagatcagatgg

SEQ ID NO: 355239 - DNA, 271 bp, Zea mays
tgcaatggtgcatgacaatgagatgatcgatggcaatggggtgatccatggtagcgagatgattcatggtagtgtgatgatacatggagatgagatgccccatggcaatgagatgatccatggaaatgagatgatccatgggactgagatggttgaaggcagtgagatgatccatggtcatgagatggttcagtgtaatgatctcatccacggtaatgagatggttgccgttaacgtcatggttaatggtgatgagatgcccatgttaatg

SEQ ID NO: 355240 - DNA, 268 bp, Zea mays
gtcggtttgattggtttccttaactacttgtactgggcaaaaaagtacgtctaccgccaggatacacgcatcgtcgatgagccatcatcagtcgatcaagattcacattgaacctcgacaatcgaaccgttctttacttgagaaattaaaggtgaaactggttctggttcacagtgccacttattatagtcaacctgcaaagcatgtacactgatgtctgataattgtatttggattgttagtttaatttcatccatgatatggtcac

SEQ ID NO: 355241 - DNA, 323 bp, Zea mays
ggcgtccgtgtgcgagtgagtgctgctgctgctgcgacgaccgtgtgaccgtagtcgttatttgtgtgtacgggcacacggggtcgtaccacaccagccacaacagctacggcggcggcggcggccaccacggcatctacggcggcggcaagcacggcgcgttcggcggcggcaagcacaagagcggcggcggcaagttcaacaagtggaattgaagcgaccgaaacgaatcaaaacaacacccctcagtctcgcttcgcacacgtgcacccgcacacgaatcctagtgctacataataaagtgcaagcaggcaggaggcgta

SEQ ID NO: 355242 - DNA, 308 bp, Zea mays
  unsure (1)..(308): unsure at all n locations
gggacgctgaggacatctccggtcggctgggcctggtcttgcatgccgccttcctgttcgccggtttccagccctacggcagacagccacgggcgggataccttctgaagaagcaatcacgcaagaggggaggctcggcgtgcctgtcccgactgtacaccgcgccagagcttgcgcacgnttagggcgcagacgctgccgtgctgatgttgtgtgtgcagggaagcaacgtggcgctcctcgtgttcatcaccaccgatggcgacgacacaccggaggacgtgtacctggaacatctggatctcgag

SEQ ID NO: 355243 - DNA, 162 bp, Zea mays
gcagacagtagctgcttacagagatttcaggctaatctgggggtcttttggtctggaaggaaatcgtagtagggacgacctgtgcaagtgtaaatatactgtacctgtgctgcctgaatgcccacgctttctgtttgtgtgaatgaaaaaaataagctgctg

SEQ ID NO: 355244 - DNA, 292 bp, Zea mays
ctacctcaccgccaaaaggactggcctctgggcgtacccggtgtcgaaggtgctcatggagaaggcggcggcggagttcgcggcggccgagggcgtcagcctggtgaccctgtgcccctccgtcaccgtgggcgaggcgcccgacaggcaggtctacaccaccgtccccgccatcctctccctgctctcccgcgacgaggcggagctcaaggtgctcaggggcatcgagcgggcctccggctccgtgccgctggtgcacgtcgaggacgtctgccgcgccgagatcttcgtc

SEQ ID NO: 355245 - DNA, 283 bp, Zea mays
cggacgcgtgggtcaaaatactgaagaaattcgtcaaggtgtcggagcagcatcggaaaggagacctgttttcagagaaggtgaagaggtcgccgttcagcagctctgacaaggtgcttcagctggcggacgaggtggagtgcatcttcttgaggcatttcgcgggcaacgacaggaaggtggccatgaagtacctcaagccgcagcagcccaggaacacccacatggtcaccttcctcgtaggcctgttcacaggcacatttgtgtccctgttcatcatcta

SEQ ID NO: 355246 - DNA, 281 bp, Zea mays
ttttcgtcggcaagcactcaccaggtactcccatgccttctcttcccttcctgctttgcgagtcccagcgccaaacacccaaaccctaactatttggctattggctatttgatgcctactacgaacattttggcaaaagaaaaaggtattcagccatggttcttcttgaggcagagatgtcatggaatgtgttgatctcacctagccagctggaccgcaagggcctcctgctccgcaaggctatcattgtgcgtcttctggaggatgtcacaaacaggagg

SEQ ID NO: 355247 - DNA, 254 bp, Zea mays
gtcacgcgtcctgatgcgttcatcctggtggttttgtgaggtcgatagcggctatcgaattagaagattctggacaagctgtgtgacgacttggtgtccgggcctctcccggagacgggccgcgagaagctccgcaaggtcaccaccgctcggtctctcgtcatcaacaaagacgcggacggcggcgactacaatctggcgcagtcgacgccttcgagcccgaggactccggtgacgccgttgtcttcgacgac

SEQ ID NO: 355248 - DNA, 321 bp, Zea mays
cccacgcgtccggttatcctgagttgcaattgcaacatgtaagctagatagaagagaagagaataggtgttcccgcgggaagacgctcacctgacatttcgtgaagcaccggatgccatggtgatctctcacagcttctggtcacaaacgttaaggtattcgtcgagactaggtaaaaacgggtgctacgatagatgtggaaactggcgcggcgccaatagatcttcagctatgggacagaaagtgaccactaaaaaggccatctgcaactaactgaaacggggatcttgtgattacagttaaaggcaccaaagcactagt

SEQ ID NO: 355249 - DNA, 306 bp, Zea mays
ctatacgctggcaatcaagctttgaagccacagcacgtcgtcctcgaccacctgttcatcgagaaacgctgggggtcgcagtcgctgctcgccctcggcgtcacccaccggtttgagtccaagtacgtgagctttgtgctctacaagccgctggagaggtgatggtggtactgttgtctaccgtgtgtgagtggaagaacagagtggtctggtggaggtgattaatgtaataaatctgaatgtttcgacgaaagtaataaattagttgaccatgcatgcatgcaaaaaaaattataatattgaaag

SEQ ID NO: 355250 - DNA, 303 bp, Zea mays
aactaaagagaaggagagcgtgtgttcgtttcgaggacgcacacacatacgccatggaggtgacaccataccacaccctgaccgtgaccgggtgggcggccattaactagtccgccggcaatgaggaacccttcatcttcaagagaaggtacagtttgagtacaatccaaaggctgcgtccattctcttccagtactgatgatctgctggccggttgggcatcatatgatgcagggagaactgccctgacgacgtgacgatcaatgtgcagtactgcggcatgtgccacacggacctgcactt

SEQ ID NO: 355251 - DNA, 247 bp, Zea mays
  unsure (1)..(247): unsure at all n locations
cgctcttcgtctttctccggtccgaattccccaatcggactctcctcttcttgccggatctccatcgcccattcccccccgnccatgggtccccccacccctcgccgctgacctgcgggtccactgccgcctgctcccccgccccgctcccgctcgcccgcgcgccccccacgcagcccggctttgctgctagcagcgctccagcgaccgacgacgcgatgcgaataacgctccaatcttggatgcg

SEQ ID NO: 355252 - DNA, 299 bp, Zea mays
attttcttttcttattttgaaaatgaacttgcaccatcttagcccaccggttatctaaactgtataatagctaagctgagattacgcagagttccatccaatttgacactaaaatgatggatttatactgaacccttaagtgtacagacaattttaatattagaagtcttgtcttcttgcttgtatctgacagttgatactcatccacgatagcagatgtctcactcttctgtgcttccttcatgctcgtttcagatggaaccaccaataacctcaatgagtacatcatgatgtctgtg

SEQ ID NO: 355253 - DNA, 294 bp, Zea mays
cggacgcgtgggcggacgcgtgggttcagccgttggctttggcatggtgctatgtcagggccatgtagactttttttatttgtcattgtcattgggttgtagcattccaatgcctcttctagttcagttttagatgccttgatctaattgtatattggtggatttcttacatgctcccagctgatactagttactacttgcagcttggttcaaagtcagtcctgagcatgtcgaggctgaagtgcgcgctgcggacattcgatctgagggctctcttgattctgctgatcggtg

SEQ ID NO: 355254 - DNA, 294 bp, Zea mays
gtcccgctcacgcgctccgagcgacgcgtgggcgcatagaccgcaacacggcgctgccgcaactgcagcaacccgtacagggaccagaaccctggcggtggtaagttcatgtgctcttactgcggtcttgtctccaagcgccccgtgctcgacctcaattcagccgggaaggcccctaccggatggccttgtgctcaggattgtggatattggctggacctgcactgctcctccagcaataacagctccttcttgggattctcgtggcgcttactttcatccttttgctcgaca

SEQ ID NO: 355255 - DNA, 288 bp, Zea mays
gatgatagtgcagtattcgtttcctggttgtgggaacatctttctttaaatatgcacttatatgtgcaagcacaagaacaaactcaggaggttaaggatgatgaggcccccaaagaagtatctggaaaagataaatcatcagatatgtccccaagaagcaaatgtcaaactcattctgagcacccaattgaatcaagtgcagccactactaggaaacgtgataagcgggaatggaagggaattggtcgggaaggtaatgaaaaatttccacttcgaaatgtactaact

SEQ ID NO: 355256 - DNA, 288 bp, Zea mays
cagaacagcacgcgtgcgtgtgacagacatagagaacgagcggtggtctcatctgcacgctatgggagagaggcgtccacgcgcgcaagacaaacagaggcgggggccgcacgcctgacggcggcgctcgcgtgcacgaaggaaggcgtgcctgctcgctcgcgacgaaaagcggcctcgcccgcatgccacggcagtggctgattccccgtgcgaacattcgtagcacacgacgtgcgcactcgagagacaggcgagacagaaaggccacgcttcgtccatggcggc

SEQ ID NO: 355257 - DNA, 224 bp, Zea mays
cccacgcgtccgtgcaactcgaacaacacaccacgcctctaccgccagcatggactcgcttgtcaagcgcagacatggccacggtgcttaccgcagcagcaagccccagacgaggtaccaccgccagaccaccgagcccgtgaccaccgtcgccacggcccacctacccgcctgacaccaaccacaagccctaccacggcggcggccgcggcgcgcacaagcag

SEQ ID NO: 355258 - DNA, 289 bp, Zea mays
ggatcgttgagctcaatgagaaggttaaaacgctcgaggatgtagtcgaggaacagaggccagtgacggtggaattggagtctcagctccggtcgaggcgcgctgaaatcagtagcctgaaggaggatataagcctgttgcagaagaagctggagagccagaagaacctgtcatcagcttacatatctgcacttggtgcttctgaaacagagaagacggccccggctagccggtttgacctcggatgaccgtttcctctctttacggatctgttcctcaagcaagctca

SEQ ID NO: 355259 - DNA, 276 bp, Zea mays
gcggccttggagtggcgcacgcagcggtcgcaggcggacgcggggagcgggagccagacgatgaggagagagatatatatatctgccttctttttctgtgttcaccaagcaacaaccccagtccaagctctccgtgttgggcgatcgtttccggcgaacagagcaagcaactcacagccccggatgcgactgactgactggcgcaactgtgttgctcgatccatcgaagcagacggcagcggcggattcgctgaggagagatgatgagggagcaga

SEQ ID NO: 355260 - DNA, 193 bp, Zea mays
cttggttgaccagctcgccactgctcaattccttaatttccagcttctcctgctcctatttattcttcactttccgtcctttcgttcgcaatccaaagccgaggctacaattggtgcatacttcccgctccgataacaaccgggtccaaacccccaacaacaacacacatacctcaattcattcacccccttc

SEQ ID NO: 355261 - DNA, 283 bp, Zea mays
cccacgcgtccgcccacgcgtccgagaacctgttctggaaggccggcgggtgctcgtcgtgctccgggcgctccgacttcgcgtgcgtggacggcagctgcgcggtcaggacggcgagctgcaggggcaagggcgggcaggtggagtgcagccccgggatccagctcgcgttctccggcacggacaggcacgaggccgtgctcaactcgtggtacgaggtgtccaagctccggcagtactccctgttcgggctcttctccaacctcaaggactcgctgaccaa

SEQ ID NO: 355262 - DNA, 257 bp, Zea mays
ctattttaaggtacaagctttctttgtccagaacaccctagaaaaaagtacatcaaattagaatattgttgctacatttgcaaataaaaatacagttttgatgccttatctacctccactagacggtgttgcagccttatgcaccagcttcagctggcgaatcaaggttaaccatcattaagttgatggctcatataaatctaaacataaaagtgaaagtagatgaaatagatatagacaccaaatgcattgggtaa

SEQ ID NO: 355263 - DNA, 237 bp, Zea mays
  unsure (1)..(237): unsure at all n locations
aggcgccgccgaggtccgcgacggggcncngtataatttgctgcttgatgctgcaggaaatctcaaagtttcgacctggagcaaggagctacgacaaatgtagctgaggtcgcttcataaacatgtggaaccccaattagttgccctgaggtgatcgaggatgaggctagatgtgcaatgagatatctggtctgcgagaatcccttgttctctgcggaattactttcgaggatgcac

SEQ ID NO: 355264 - DNA, 282 bp, Zea mays
gcggaactgcagctttaggcaataccgttgctgtttcatcccttaatcagactgcgagtgcagttgcagtagcggccagggaaggaaatggaactgcaactgcaggcaataaccagaccttcctgattcaggctcctgcggataacaagaaccacagttcagttgcttcagatggaagcaatagcagtccaaccaataagcagaatgaatcgcctgctagtcctcaggggagcactagcacggtgaaagatcaatctgcacgagggcccaccccagcagcca

SEQ ID NO: 355265 - DNA, 266 bp, Zea mays
  unsure (1)..(266): unsure at all n locations
acgtccacggtccgctaaggtccgggacgcggacgntncaaaagaagacttcccaatcagggtcagatgtcaagctctagtcatgaatttcgggatgtgangagctacagatttccacatggtgtggtggagaacagaccagagcccggacacaaaggttcagcagatgtacaaatgtctgataagagcactgttgttcagtccgctcgaaacctctcacctgctacaacctcagacggccagatcacacatcaaaatgctatgca

SEQ ID NO: 355266 - DNA, 123 bp, Zea mays
tttgatttgatttgcaaaggatgtgcggtaacacgatatcggagttccgtttgcaagggacgattgactgtcctgtctagcattttgtagttactacgcaaatttataaataaagttatgatt

SEQ ID NO: 355267 - DNA, 275 bp, Zea mays
gccgatccaatccatccttcttccagctctgctaccgtagcgtagagacgcgtgcggacagcctgagacctacagtagaactagaagttagcctgagaccagcgagttttctcagcaccggcctgtggtcatcagatcagctagccatggacggcggtttcccagctcttcttgaccccaccgcgctctcactcgcgctgccggtgacccagggcccgcaaggcagcaataagctcagcaaggacgactacctcgctatctgcctcgccgcgttc

SEQ ID NO: 355268 - DNA, 157 bp, Zea mays
gtgctgtttcgcgtcctgggaaaaatggatgcggaggcggcgagaaggaagcaggtggcgcctccgcagagaagaggaagcgcggccggctggagctgcggcggatccaggaccggacgagccggcaggtgcgcttctccaagcgccggagcgggct

SEQ ID NO: 355269 - DNA, 316 bp, Zea mays
gaatttcttgcattcacaggtactggacacgctgcaggagatccaggagcgccatgatactgtgaaagagattgagaggaagcttcttgatctgcagcaggtaatgaatggccaaactcccaagattcaggtttcaaggactacacactcttactgcatgcaaaactctcctgaatgcagatcttcctggacttggctgtgttggttgaagctcaaggtgagatgctggacaacattgagacgcaggtatggtgattgatgctttgtcactcgattgctatttttcttgatacctgcaatcacctatttcgttaaa

SEQ ID NO: 355270 - DNA, 311 bp, Zea mays
cggacgcgtgggcggacgcgtgggcggacgcgtgggcggacgcgtgggcggacgcgtgggcggaccgtgggcggaccgtgggtgcttgtctgtctaatgttgcaggtctactcatgggttttactctgcatacgacaatacaactctactatatgagatcctgaagtctattaaatgggcaagaaaaacatatgtaaatcgacctgtaaatgttgttggacactccattggaggggatctagcttcattttgtgcccttgatctatttatggttggcctcattgatatctctacattttttacatgttaaa

SEQ ID NO: 355271 - DNA, 262 bp, Zea mays
cagaaaagaaggggagcaggagcaggacgctgtcctcctcctttccatccgatccagggtctcctttccaatccatcgcagtctcagacaccacagcccagcagccatgcactcatctgcagctctctcctctcctagttctagcttccctgttcctgccccgataattcgctaactgttcgatctgctcctcccgggcctccttgtgtctactgctgctccctttgctttcgttgctactgttccatctcgtaggtttcgt

SEQ ID NO: 355272 - DNA, 308 bp, Zea mays
cccacgcgtccggaaattaggagatgctgatgattctagtgttgcctcattggcaaatgataaccaggcacagccctcatctggttctagtacaaaaaatacttctagcaggggattggacactgctgaatttagaagtccagccacatttggttcacgaggtgcaatgtcgtttgctgcagctgcaatggctggattaactccagtaggtggtcgtggaattagaggtagccgagatcggaatggccttccattgggtgctcgtgcaactgagcattacaacaaattgatatttacagctgctggga

SEQ ID NO: 355273 - DNA, 317 bp, Zea mays
ctcaggcaaggctttcttcataccacacacacacacacacacacacacacacacacacagaacacagtcgtcgtccgctccgaaatggcctacgcgacgcagcatcggcgccgagccattcttgtcctggccgccatcgccctcctcctggtgtctcccattgcagccgcagccgccgtcgccgccgggtgcgatggcgacaagctccccgcgggccggatctacgcgcactgcgcggcgctcccgtccctcggcgccaggctgcactggacgtacgacgccaagacggggtcgctgtccgtggcgttcgttgccaa

SEQ ID NO: 355274 - DNA, 437 bp, Zea mays
gctgattcaggttcggttaaccaaccgggtttcgtagtatgcgagcatcgttgttggtgggcccccccccccccccctatccgaaccgaaatgacacaccgcttctgctaccgacttattggtttcagacccgatgcatctgcttacgaacttgatcgagcatattcacattgattcatgagagacgctattgcatgccaccttgtgccagctcagatcatcagtacagaagaagattataaaagtcgcatcctctcttaacacccacacctcaacaagtagtagtccgctctgcctgactgctgtctgatccgtgcgatgcctctggatctggatggcgtgggcctatgaatgtgtataaggagatgtggtactgcccgtttctggcttagatgggtccgcctcatcggagtcatagcactggtaggcgccttctc

SEQ ID NO: 355275 - DNA, 326 bp, Zea mays
ccggcccttgccatttccattggcaacaataaaagaaacaaccggaaccgacacactaagaccccctggcggccacccgcctaaaactcttaaccttaaccggggtattaaccggtacgcgacccggcccttgccgattacattggcaacaataaaagaaacaaccggaaccgacacactaagaccccctggcggccacccgcctaaaactcttaaccttaaccggggtattaaccggtacgcgacccggcccttgccgattacattggcaacaataaaagaaatcaaccggaaccgacacactaagaccccctggcggccacccg

SEQ ID NO: 355276 - DNA, 311 bp, Zea mays
cccaaaacaaactttttttttggagagggggcttacataacccatccaatttttccctttcattaggcttacaaaaaaaagccacccttttttttcctagggaggatgtaagggaactttagcaagggccataccggaccaaacactccatggatcgcttttaaatttcagggggggcccacccttaaggggccccccccaagctcccgccccctttacagtccccccccgatgcccccacccgaacctccaccaccttcaaagcccccacctgaacctccgccaaaaccaccacccctggagccgaattc

SEQ ID NO: 355277 - DNA, 343 bp, Zea mays
gctgattaggttcggttaacaaccgggtttcgtagtatgcgagcatcgttgttggtgggcccccccccccccccccccccccccccccccccccccccccccccccccccccccccccccccccccgggaaaagaaagacacacacatcatatcattgccagacaagtgacggaaccaccgagcccgaccattgccagaaacaatatcgaaggccacacacagcatctactactcaactcaagggcatgaactcggacaggtcaggagagaggggactcacgtgcccccaacccgacttgactgagagagcgaagtctgagtgaggaatgcgggtggaggcgc

SEQ ID NO: 355278 - DNA, 443 bp, Zea mays
tggctgattcaggttcggttaaccaccgggtttcgtgtatgcgagcatcgttgttggtgggccccccccccccccccccccgagaaaatgacgagaaccacaacacgaccgagaagcatacgacccacatacatgcatgcatacgaccgagaaaatgcggatatactacgatcgagaaaatgaggagaagtagacgagcggatgcctaatgatccgaaaatgggagaagcagacgagcaactcccgacaccagcggatgcacctccgaaaatgggagaagcagacgagcgcatgctgcggctatcatccaggagagcgaaagctaaacccttgagagctacagatatgccgaacgcttcgattaggtacgctacacgtgcggcttatgactcttactcctcagctccctcgtttggctaagcggctgagtatgctgtttccgc

SEQ ID NO: 355279 - DNA, 345 bp, Zea mays
cgggtttcgtagtatgcgagcatcgttgttggtgggccccccccccccccccccccccccccccccaatagtaaatacccaccggactggaccactggaatcatacttcgagatcctgcaaatttcaaccatggccgcccccaggtcttggccagaatcacattcattatgagcacacgagaagagggcagacgcagtccagcagtcacttcggttacgctagcgatttagtacgggcggtcaggtgcggtgcccgagcctgcgactaaatgtactgggccgctaactgcgcgtgggatccggccgccctggtgccggataggatgcgcgcgtaaacgaccgaaa

SEQ ID NO: 355280 - DNA, 368 bp, Zea mays
ggctgattcaggttcggttaaccaaccgggtttcgtagtatgcgagcatcgttgttggtgggccccccccccccccccccgccgttgagaagtacaaacaaagaaacaacaatatcattcagcacaagactgcgcgcgtcagcagggcacgcgcgggcgcagactcagatagagccgagtcaaaccagctgcataaaaaattaagaaaatacagggctgtgtgtggttgagcatggtattgccactaaattagtctaaacttggcgaatgcgacttccctcggtcaggtccttgtctcctgattctgattctgcggactggcacacggagagccgcccatgctgacgtagatcgcggcaacgcccctc

SEQ ID NO: 355281 - DNA, 393 bp, Zea mays
tggctgattcaggttcggttaaccaaccgggtttcgtagtatgcgggcatcgttgttggtgggcccccccccccccccaacagaatgatcactgccatgtgctcacctcagcccccaaccatcgcaaattcgagacagaacccgagaccggaggagattatactacactaacgcgacgcgaccgaatgagcagcctcattcccaaatgcagatctgcgggatgaacaaatagaataacaaaaatacgctggaattcctcggagactactgttgcgtcagcacccctaccgacctggacttatcgacttgggataccggcttatgtactctaacagctaagacttacccaatggcactaccccgagtaagcatgaagaagcggacccgaatatc

SEQ ID NO: 355282 - DNA, 299 bp, Zea mays
ttcggttaaccaaccgggtttcgtagtatgcgagcatcgttgttggtgggccccccccccccccccccccccccccccccccccccccccccccctatgatagaacaatggtaccttaccctaccgcgggaagcacagcctgaacggcctaagcgcgcgaatctgtctagcgttacgctatactctgacttgaacttgactaaggtgccctatacctcaacaactattatcagaccagcacgaggacgagcaccaccagcattaggagcatcaagtgaagggggctaagtcaagtcatg

SEQ ID NO: 355283 - DNA, 369 bp, Zea mays
ccgggtttcgtagtatggagcatcgttgttggtgggccccccccccccccccgaagaaagaacaacataagatgaagtgctcctgacgaagcaacaaggacgactccggtctgataagcagattgcgccgagcagcgatggcaaaagagcagaacgcgcggggcgaggaatagccatctactgaggtaacacagcctcggcctcggactcgtcgggcggagctccgaacgtgatcatgaattatcaaagatggaacacgggctacgagcgctagaggctataacaatcctcgacccgcggtaccaccgagtatagcgaaggatgagtcacagattccccggaccgaagcctcagaaacggcctaacccg

SEQ ID NO: 355284 - DNA, 302 bp, Zea mays
gttcggttaaccaaccgggtttcgtagtatgcgagcatcgttgttggtgggccccccccccccccccccgaaagtaatgcccaagccgacccacacccgcgtaacgccccatatatgtatgaccagacttatcagtcagacaacagcagctctaattactcgaggacgagggacattgactagaattcagtaatgactaagtaacagaaaatcaatctacataaggacattatagtcactgctgactgctagtcacgaacttctacgaggtacctgttgttgttggggaagttgttgaagaa

SEQ ID NO: 355285 - DNA, 340 bp, Zea mays
tcggttaaccaaccgggtttcgtagtatgcgagcatcgttgttggtgggccccccccccccccccattacgcgcttacgagacccgcgacgcgacccgcgcagtgatgaaaaaaaatcgttataaaaaatgctgagctgacttcttagactattgagcggatgccatcgacagcacatatcaagagagacaagcgaagttggtgggatagtttttcagcgtggttggggaatgacgtgttgctgcaggtcaacccagatatttatgattttattttaaagttccgacggacggacggacacggctgcattgtctgcgtattcgggctaatcatcgtctgc

SEQ ID NO: 355286 - DNA, 434 bp, Zea mays
gttcggttaaccaaccgggtttcgtagtatgcgagcatcgttgttggtgggcccccccccccccccccccccccccccccccccccccccccccccccaaaagagaggaaagaaatgtcacacagtctgcttttagagacggcagcgacttcccgatatcgatagaagccggataacggaaagtacagccgataatcttaaggtggcaaaaaaaagcactgcgcatcgcaccagaatctgtttaaaaaaaatagcgtaaaatgacagaaacaacaacgatctgagattaagtcccggtaatccgattaaaacagcagcccgggcgaggtccccagcctcacggaccttgacgacggcgtccaccggccccggcgccacccttgatttaatacggctggcctgcccgtactccgcggcctcgccgctgtcgctgt

SEQ ID NO: 355287 - DNA, 395 bp, Zea mays
gcttagtggctgattcaggttcggttaaccggtatgccagtcagtgtctgactgtagtcgacatgcgccgcacatctcgaggcaaaccgaaccgagcttggtcgtccccagaggtcgtctagctttaaaagggcttgtccagggaagccaacgtggcctgatgagacgggggcccgtggatgcttgtcaacatgtaatattgggtgaggtacgtgggccgggaagatcctgtgaggctaacttgtaactttagtgtgggctcatgttgtgaccaatgtgttgtttctcttcttccagggatctaggtgcagagcctggatgtgggcatgtgggtgcggcccgtgcccgccgggccggcccgcgtggagtccgtggttgcccggggtcgaatgcgc

SEQ ID NO: 355288 - DNA, 371 bp, Zea mays
gttcggttaaccaaccgggtttcgtagtatgcgagcatcgttgttggtgggcccccccccccccccccgcgatattaaggaatccccatgaacatgaaccggaatttggaaagctcctcaaaagagcttcttcagaggacggaaagagaagatcactaaaatattgacgaagacgattgactaagaagatgctgaagatacagcctgaatgagaagaaggctggggcctcgcgcaaccacgccttcaaggcagtagagaagaaatcaccgaactcctcgaaacatgacagagttcgcggggagctgcccggattcgaataggttgacgctatcgcattcggcggactcgacgtcgtattcgaactcgacga

SEQ ID NO: 355289 - DNA, 364 bp, Zea mays
gttcggttaaccaaccgggtttcgtagtatgcgagcatcgttgttggtgggccccccccccccccccccccgagagggcacaaccgaggttaccccccgggccgggcactctcggaactcaacagaagaacaacacattgcctacacttgaatagaggcactgtaggctctctacttggtaccgtacgtacgatacttcgaggccatcggatatatgcggacttgccgcagaggaatgtatgaccgtcggtgctgaaaacggactcagcccctaatcattatgcggtactatagtaagcgcttgactcggagtccgctgtagaggcgggacgcgcgctctatgactcgcggccggatgacggct

SEQ ID NO: 355290 - DNA, 404 bp, Zea mays
tggctgattcaggttcggttaaccaaccgggtttcgtagtatgcgcgcatcgttgttggtgggcccccccccccccccctaaaagaaattttgcatcagccacagctgagatggcgccagacatattgaaccccaaaaagataagattttgaggttccgaagcataaatgggcaaaaagacaatctgagaaatgacatgaaaccatgcagaaaacactcgtcgctagccgtttgaccgacagcccttaacaacgggtgagaatagtcgcgatatctactggcgaagtggcagcgggatggcctttgaactttgctttgctgctaccgggaaggactcattatgtaggagcttattaagatctggacggagattaagattttggagatccctacgggatggacga

SEQ ID NO: 355291 - DNA, 223 bp, Zea mays
cgggtttcgtagtatgcgagcatcgttgttggtgggccccccccccccccccccccaaagaccaagagactggtaaccacgacagaaaggtgaaaatccagaaacagaattcccagatcactagtccctccttacaggcccagaccccgcgagtcagaccggacatgtactagcagtatgagcatccggacgtaaacggacctaaccggccaccccgcagagc

SEQ ID NO: 355292 - DNA, 341 bp, Zea mays
gctgattcaggttcggttaaccaaccgggtttcgtagtatgcgagcatcgttgttggtgggcccccccccccccccgaatagaagctgcagtcagaccagatattgagaaattggaagccccagatcacagatcagccgagatacaatagcacagagacggacacggggttaaggcccgataatacgaatgtgctcatgggctatggaagtttgcggacgcgtggtatcctcatggtggagaatgagggactgcgtgcgtgccgacgtaatgtggattgtctggagctcctgacacaccctgtaagtgggcgacactggcgacaggtcagctatctatgta

SEQ ID NO: 355293 - DNA, 495 bp, Zea mays
gttcggttaaccaaccgggtttcgtagtatgcgagcatcgttgttggtgggcccccccccccccccccccccccccccccctcgcgggaaagccccctcttcactccggcagagcactcataggcagactcacgaccctcttagaaccccaagatatcccgaacgtccatcatacccatccgtcccaccctaacccgccgttaaaacccataccctaagctgattcgagcctaaagccttaaaaggtctgactaaaaaactacaccgactccagccatgacaatccagtaggtaccggattatgttaggaaaaagccgtatgaagactgcgagcaaagacttggtctaagcctggacggagactcccaaaaacctcacaaaagagaaagaaaatcgataaaacgactaaagcctgcgtatggtaaccggtatgccagtcagtgtctgactgtagtcgacatgcgccgcacatctcgaggcaaaccgaaccgagct

SEQ ID NO: 355294 - DNA, 579 bp, Zea mays
gcttagtggctgattcaggttcggttaaccaccgggtttcgtagtatgcgagcatcgttgttggtgggccccccccccccccccctagaaaaaaaccaaaaaacaacaaaaagccacaggagatgggtcggactaatggagaagtccgcatagaagctaaaggacacagaacgcagaggtgaggttcagcaaagccctagtagcgtataacagaaggggcgaaggctattctttaccgcgaaacaagccagaatggtgggaaaaaaacctacttgggcaagaaaagtatgaagctcggcgtatataaagcccgcctgagaaggaatagtcgcagaagcttggagtagtaagacttcgtattctagattccacggaatactgcacgcgagaatacctaaccctcggcagagcccttgcaattgctgaaaaagcgccaggctgttggctgaaacgtgattaaaccaaggtcggaggaactgcacaggttgaaaacttgaaaagaacgtaatttaaggataaactgcccactagtcgagctctgaccctggccgcgatacccgcggccgcgaacccgacccc

SEQ ID NO: 355295 - DNA, 309 bp, Zea mays
cgggtttcgtagtatgcgagcatcgttgttggtgggccccccccccccccccccccccccccccccccccccttatatttcgcaagcctgatgcgaacacagcctcaaaggcaccagggacccgcagcacagaggatttgaactcacgatgaaaatgcccgttggcagaaacctgcagtaatctaatagaaaatatgaatggaaaaaaaacctataggtttattcatttgtaattaacaacagattagcaaagaacgcgatgctgagctgaccactatagttgagcaacacgctccttatacagcgctg

SEQ ID NO: 355296 - DNA, 549 bp, Zea mays
gttcggttaaccaaccgggtttcgtagtatgcgagcatcgttgttggtgggccccccccccccccccctccccccccccccccccccccccccccccctagtaaattaaaacttgtcccacagaccagaacacagccccgtaccaacgaggtacgttaactaatactactactactacaaaccacaaaatgaagatctttgtttatatgtcatgcctcagtggctggcggcggaccccgggagagttgcccatccccccctcgccgcctgcctggttgcgtgaacgatttcgagtgagttgactagactggatggctaggggagaaagacgtgagagtagtggctaggcaaaaatgtgtggggttactgaagaagcgggattaggactacgagtacagaagctgaagttgagttctaggttatagaggcggggcgggaattggtggtagtagtagcatgctccggtccggtggtcagccttcttcatcatagcatcatcaagatgatgatcgcatcttcatcatatgacatcacatcagctcatagtac

SEQ ID NO: 355297 - DNA, 321 bp, Zea mays
tggctgattaggttcggttaaccaaccgggtttcgtagtatgcgagcatcgttgttggtgggccccccccccccccctcccactccaaccccatacttcccccagctaaagtaccgcgacaaaaatctacctaaaatgcattagtacctagtacagtgacgatgccccatcttcgataatgcataaaaataggaaattgggcaatgacgcatcctgtatacttaaatgctgccggtccaatgctgcctacaacccggggctgttaattggcccgcgccttcccccgtgcgagagaacccaagggatgacgaactgacgccc

SEQ ID NO: 355298 - DNA, 286 bp, Zea mays
ttcggttaaccaaccgggtttcgtagtatgcgagcatcgttgttggtgggccccccccccccccccccccttctagaacataaccttatttaccaccaccgacccaccgcacctcgaaaaggcaaattgcatatttccacacagcccccggcccgatcccgcatgagtcaggtgtagcaggcggccaccgtatggagagtactttcgctggacccccaaggaggagctcggaggggtcgaccgactagtgacttcagccccaagctgcatggacttgagcagtcta

SEQ ID NO: 355299 - DNA, 226 bp, Zea mays
ttcggttaaccaaccgggtttcgtagtatgcgagcatcgttgttggtggctcattgataatatttgaggactactcaggctacttgccgccggcgatttgatcgcagaatttgcttacggaggatccggcctatggcgccgtgccgtcagatgcgggactggccgcgcattataacgcctcgacggactatcactgcggcttatgcagcatctggtgcgagcacgc

SEQ ID NO: 355300 - DNA, 448 bp, Zea mays
tggctgattaggttcggttaaccaccgggtttcgtgtatgcgagcatcgttgttggtgggccccccccccccccccaagagaaaccccacggacacacctgctatcaagggccctaactcgatcgtctaagatcatgatacacctgctatcaaggactccccgatgatagggaaatcggcggaatatttcaactagcaagtagagtagcggaaaacaggacttaatccacttctgtgtaggtcgaacagatataggtcaaaagaatctgaatgaagctaatcacggcggaaaccttcacccccacccgctgcgccgtttgattctcccattcctccctgctgaggcgacagcttcttgaaacggcgaagttgtcgcgaccatagaggttcgcccggcgctaggatatgcggactccgagacgaggatccggggatctgagaaatgacc

SEQ ID NO: 355301 - DNA, 232 bp, Zea mays
aaaaggaacaaggtatccctacactataccaaaaaggcccaagtcctgaatgaatcaatgtttcaaatggcaaaatcaacgagacacctggaaacgaatgaattcagatcgaggaccatgactgcaataacgtcatgtgccctttagtgctgaagtatcaacaaccaaacccaagtacacgctctatcctgtcctcccaagctaaaacaagcagcaggcaaactttttgacc

SEQ ID NO: 355302 - DNA, 407 bp, Zea mays
ttcggttaaccaaccgggtttcgtagtatgcgagcatcgttgttggtgggcccccccccccccccccccccccccccccccccccccccccccaaaattaagaattcacgggcagagcacaggataaattgggaatcggctaactaacgaactcacgaaacttgaaaacgaagtatagaggcttaaagtaactaacagatacgtattaggactagctgaacaagtcgactctgggcgcatctgctaatcacgaagaaggaaagggaatcagagtgcgcacggctcggcgggaatgcaatagtatgatgattgatagccgcctaggtgttagagtcgtcggcctggtggtagtcctacttcacttggggctttattgtgttgttttcgccgtggtacccgtatgtggc

SEQ ID NO: 355303 - DNA, 459 bp, Zea mays
gctgattcaggttcggttaaccaaccgggtttcgtagtatgcgagcatcgttgttggtgggccccccccccccccccacgcctctaggaaagctgaaatctaaacattgaacgaaagaggaaagatcagtttatccgcgggattcagagttgaagccgttccagacaaccgcgagtattcagcttagcttgtgaacgtcgagatggcgactttttggttgagagagggatcattgggcctgaagatttcactggcatacgacgggcgagagcgtgaacgtatcaacgaagcttgcggatacaaaatttatggtacccctcatatcctagccaatgtaggacatcagtgaaacgtgaagctacaaacgatataaaagtcgcgggagctaagaccgatgaggacgaggaaaaagaatgcatctgttctcggttccaacccccactcatcaggatcggcagc

SEQ ID NO: 355304 - DNA, 304 bp, Zea mays
tggctgattcaggttcggttaaccaaccgggtttcgtagtatgcgagcatcgttgttggtgggccccccccccccccccgcgtcccaaacaggaagctttccaaggatgccgcccccattcgaggctatctttgacctggagcgcaccacggctgatatgcggagcacacggcggactcgctccagatgactgattcactgcaagccaggagaaatccacaatgcacacttcaattgctgaagctgaaagtgaggctgcgatcggatggtagtatcaagatttgatagttgctagtagtataat

SEQ ID NO: 355305 - DNA, 349 bp, Zea mays
gttgttggtgggccccccccccccccctagcggaccaccgatcacctaagaccgacagaagatattttaccaccaggcacaccgggccgagtatgagacttggaactgacacactaacgagagaatcatcaaccgagcacgatctgacctacgtgcctgcacgaatgtcgaactggatgccgcgcataggtcatactagcgacttaaccctgaccgacgatgagcccggatagctaatgaggcacacaccgggagaggaagaaacgctcatcatctcaaccttcacgtagctgccgtgtcgagtccgaactcgttgcgggcgttagcccttctactgattgccttgaag

SEQ ID NO: 355306 - DNA, 113 bp, Zea mays
aggccggcgtccaactctggtggcaactgccagaggcatccctggcatgtgctgagttgtcttgcaagaagaagatgagtggtgggctcttcccgccaccagctgctgcagag

SEQ ID NO: 355307 - DNA, 242 bp, Zea mays
cggggggtaggggggggcaggcccatcctttttccgaccagggtgcttctgcgggaaaggtgggaaaggaaaaacttgtggaaaaaaagagagctacccctgtggcccggcggtggtcttctgccatgaggtgggggcactggcatttcccatttttggctgcccggttggaaccggaattaaagcgtgtctttgcagagggcaggtccagacccaaagtttgggggggccccagccccccc

SEQ ID NO: 355308 - DNA, 266 bp, Zea mays
gggggagcccattttgaaaaggggaaatttgggggggcacatttttataggggtaaaaatgcaaatttttaaaaaaccaaagctttggaacaagggacaacaccccctttgggaacaaaccaaacaaggccactcaggttagcattattaactaatttgggaaccccacgatgggaagggggcccatcagcgaaagaattggaaatcatttaggccctaaaactatgcgaatttggttatgcagggaccatggcaaatcaggggaa

SEQ ID NO: 355309 - DNA, 212 bp, Zea mays
gttcggttaccaccgggtttcgtgtatgcagcatcgttgttggtgggccccccccccccccccccccccccccccccccccccccccccccccccccccccccccccccccccccccccccccccccttgtcagggacgcctaaaacttaaacgctcttatcgagacgcccacatctccaaacactgaaacccgcgaaacaggatatgccgt

SEQ ID NO: 355310 - DNA, 446 bp, Zea mays
ttggggggggggggggggggggtatcacgccaatgtgaaaagctcgttgggtaggtgtataaaaaggggtgcacaagggataacgataattaaagctaggtatgagttacgatcatctgctttgacaaagcgatagtgaatttgtttgcatttgcttttgcctttgctttcgtcttcttctcctaatcaaaagtcattgccaaagaaataattcagaactagccagccaagcgcgcaaacctgtgttttacgttttgactgcggttgacgacctcctcacgttacctgctttgctttaggtgtactctcttctggcgtctcttaaggtgtcttttatagtggccttgtccttattagctctgtttccgtcttttatagtggccttgtgcttattagctctgtttgcgtcttttatagtggccttggtcttattagctctgtctcgg

SEQ ID NO: 355311 - DNA, 365 bp, Zea mays
ttgggggggggggggggggggggggggcgggacaaaggtatttggacagagatcaaggggtattggaatataattgtactcgaattaatagtgcactgactcaccaagttaaaaaaaaaacagtcagttgggtaaaggcctctgaataaggttaaaactgattgggtagagatataactactaaggacatgcaagtggccttaaggtacacggggtgggtagtccacgtcgccacgcctgattggcccttccatactgttatcctatcaaccggcgatcgccaagtcatcagttacgtaggctccactccgcttcatgtaattgttgcttggattattgggatgggtgcttaggtcgtttaatct

SEQ ID NO: 355312 - DNA, 405 bp, Zea mays
ttgggggggggggggggggaaaataaatcctatagggctaggttaggacggcggtaatgtgtgtatttagatcagctaaactacgatggctaggatgatgatgatgactactactgatagcttgatagtgatatgatacacgcttgcacgcattcagtacccgcacgttaacgttagttagtaccatgatagtacggtttacggctgatgatcaatgccactattagatggtagatagatagtcagaaatggacttagctgaaccgttcaggtgtgactgggccactgtgtgatgccgtgtgatattattgcctgatgggctaagtgcgtgttaaaagatgctacagctgtgtataccggggtacattagtttggtgggcgctatatataagctgatgacaagtt

SEQ ID NO: 355313 - DNA, 333 bp, Zea mays
tggggggggggggggggggggggggggggggggggggtcacatcaatatggttagatgggcccggtaatcaaggagccaggtgtccgtagtaccgaaatggataaatagggcaaaaagaaacacaacataaggcgataatagctattgaggcgtagttaaaaggctagcaactggcaataggctagaaaaagtcttattttaagcagggtagctgcctaagaaaccctgctcaacctacctagtctacagtagcagacttgttcagctatacgctctggataaccgcctgtctgtaattgaagggattggataaccattaaaaccagggccgt

SEQ ID NO: 355314 - DNA, 407 bp, Zea mays
actgggggggggcggggggcgaataaaactaggtgcggaggatggttagcgagtataaccgtagtaataaaagccctcgttagttacaattctgtacaggctagaagtgaacccgccgtaggcggctccaattatcaacggcaagcctattcgattgctgaaaggtgtaccatagcttgttgtttaatgaagccaaaatcccggaaaaaattcgcaaccgcttacgctaggtggaggagaaagggaggataaaaggccggatggggcgatcccagcttcagtaactactacattatcccggctagttaaagcggtgtggggttgcactccggggtctgtttaaacaagatcgtaaaatatccgaaggcttgttgggtagggataagactacttgttgcagcgtctgc

SEQ ID NO: 355315 - DNA, 355 bp, Zea mays
ttggggggggggggggggggggggggggggcgggggggggtaacaaagaacaggtgcgtggattgtaagtatacgacgagactacgaaaatgtaaagtcacagcaacgagtaaaggattcctagcagggcatgaatattcgtatatagtatggggccccatgctacacattcgttacccacccaacaaccataggaggtgtggtggtaattgttgtgggtaggtgtggtgcggggttcatattacggcgatattcttcttatgtctaatatttccatctataagatatcttagttatggcgtccgagggtgtggggtaccccgacggcattaaccactccgaccgtggcttccct

SEQ ID NO: 355316 - DNA, 441 bp, Zea mays
tggggggggggggggggtaaaaagccagtataccatcgagtgcagcaacagaaaaaaaataggttcaaagggcaggataccatcggtgaatctaaaatgcaagtacctcgtaagatgcgcaactgcgaatgttcagtaccgtgttatctgtacaagtcgttggcaaggttatagtacgaaaatttaaacggcgtcttaactattttatcactgccgtcgccagcattttcgtccttcccactgttctgttcgtttttattgtttcttctactcatcgtatttttggcttcctcagcttctagcctaggagcgctgtcaacgatgttaccgtccccgtaagcggaaagcttacattcgcttatcgcaatttccaccacagttgcattttcgcctcttcaggggctccgttttcatttatattttccgtgtcttccccgtttt

SEQ ID NO: 355317 - DNA, 371 bp, Zea mays
ttgggggggggggggggggggggggggggggggggggggggggacgtaaatcgtaaacaggtaagtggggaggccgctactaagcggcgatgtgctgttggctatacactatttttgcagcatacagggggtacaagagccaggtgcatgccatagtactagcctaccagtgatttagggaaagtacaaatccaatatcatgggaactaaaggtagccacatccaactatactaggatgtcattgagctggtcagttctagcggttagcgtagccccaaatgtggtttcactcccaagcttactttcttcagtggtattagcatcttcggtggatgagttgtcatcttggtgggttttgctactggtctcg

SEQ ID NO: 355318 - DNA, 125 bp, Zea mays
aggtcaaacgtcaaagatacaatcttttattgttgcagcaaagatgtaatctgctccttgaacagagcaccccctgatgacagatttttcaaaataaggattcagactgcaaaacagcatggcag

SEQ ID NO: 355319 - DNA, 455 bp, Zea mays
tgggggggggggggggggaagtatctgaataggtagcagtggtggtagatgctactctataagggtaaaagtgcgagcgcgtgtgcgcgccaaaacttgagacagtgtaaagctactgtactactgccaacctctagagataatatacgcaccaaaaggcctgctacatattccccacaaagctgttgagctggttgaactgagcgtactaacagtagtaaacaggatgcaacaacagcaaaaacaaaaaacaaacccgataatgcgacagtcattaatgcggcttgtgctgaaaacctgcccacattgaaaagcaatcacctactaagtgttatctcacgttgctgctgatgttcattggtatgttttcggtataaactggggatttgtcgacgatggtggtgtctgcctggttggtggtgtaggttctggtgccgaactggtagccggactaa

SEQ ID NO: 355320 - DNA, 450 bp, Zea mays
ttggggggggggggggggcaagttacagtaggaagtcccggaaatagcaaagtagctaggtaatactcgaatggccagcgaattacgcaggtgctacaggaggtacaaggtggataattaatacgcactggcagggcaaggggctaactatgcaacaatgcaacactcttacaatggggattaactaactaggatactaagcatctactgtgaatgaatgggataattggataatggcctacacaggaagtgaactgttactcgttttgttgaagacagaagtgaacaacacgtacaagctggaccaatattgcttgtgcggagggcatggcggctactggtccctacaacatacagtacgccttcggccataggctacgacgccgcatattcgtattgggtatcgtagacaattggtccgatggccacgtaatcgctcgcacagaagag

SEQ ID NO: 355321 - DNA, 316 bp, Zea mays
  unsure (1)..(316): unsure at all n locations
ataaggagtaagcactacacattgtgctatgaggagcactntttggaacaagaaagaattgcaataaaattccagttcttatttatatgactaggtgaattgcttcaaggaatcttgtgctgaaggatgtcgagacacaatgctctgataggatgtgacattggggtatagggttttatattaattgtatgaagtcttagacggtcttgtttgaaccgagatgaccttattatatgatgtagaagaaaataaatgtgagccttttatccctttgaaagacttgtatttaaaaatgtaaaaaaaaatacttttaatt

SEQ ID NO: 355322 - DNA, 467 bp, Zea mays
tgggggggggggggggaacccagcaaagcacggcacaggacggtgctacatggcgctgttagaggcaatataagactcgaaagacgctgaaggggactggtgaaaatacggaatataaagacagttaaatagcttcgaagtatcgttaatcggaaataaagacaaatgagctgcaacgcgctataacgcatatgcaagccgattaagttacacgcaattcctgacactgatagcctattaaacgctggcaatccccacaaaagaatctcaaattggccttccgccactactacaagaattaactcaacaagcgggatgcaattgtcaggacccttctaacaaaagctcctcaaggaagtactggaattaaaattgcccaaggttacacgtatcggtcctgcaaatctgcggcggacctacttgtgcgaggtgcttacacaatgtaggaattggtgtagtaagttata

SEQ ID NO: 355323 - DNA, 440 bp, Zea mays
ttgggggggggggggggggggggggggggggggtactgtaagtgtgagggagggttgcggtatggccttttactgaggaaaagacccaatgagtgaacccttgcgggcgggcccaggagaagtgctttaaaggagagaagtggaatggaggggcagtgccatacaggataagtttaaataaataattttgaacggagaaaatacattccacccccagatgatataatacatatggttgtacagccgataaatcggtcaaccaataccaggattacaaattctaaataacggctgacgcctacacagataatgaaaaagggcaagagccgctcaagaggcgatagggccatagtgaatacctacaattaatataaaccgactcctaaaattttattgggggtgtttagagagcgaattgtaaaaaatataatagcgggggg

SEQ ID NO: 355324 - DNA, 293 bp, Zea mays
agcaggagcaggagcctccggctcgtccgcggcgagcttttcgggagcagcagcctctgcctcggcgacaggctcggccgcggcgggctcctcggcaccagcaggaggagcagcagcagcctcctcctcggcggctgcctcctgctcgaccgcaggagtctcctcgggaccagcaggagcagcagcctccgcctcggcggccggttcggccgcgacgggctactgggcaccagcaggagccgcggactacgcctcaggagatgactgctgctcggccgcgggaagactactcg

SEQ ID NO: 355325 - DNA, 243 bp, Zea mays
ttggggggggggggggggggggggggcggggggggggggggggggggggggggggggtgccatcactctttttacaaactgtctggccttatagaaaagaaaagtgactcttcggctcaaatgtaaaaatcacgtcttaaccccttggcagcaggtggattaaaaaaatagctggcctcgagatagcttcacccccgaaggaccacccctctggcaaattatagcccgggggaggtgccccca

SEQ ID NO: 355326 - DNA, 424 bp, Zea mays
ttgggggggggggggggggggggggacagaagtagaatataggtatagcttggtaaagcccatggttaaggaaaactcttttatcgtgcgattatcaataatcaactcaccgtcgaaaaaacaaataaaaccaggcaggcatccggctgctggagggcgagtaacgtctagtgctagttgctgagccgagccgataaaactttaatcttggtacggtggcgctgctaggtcattctgtgtgctcttcctcgaaccagtaagcagaataggaagtattctgccgggttgcctctccaatcaggtgcaaaccctacagggcactgtcgtgccgcgtgttataacagatttgggtttggtaaaacttggtagtagtggagccgatttgctgcttccaataaagcaccggcccctgcccgtagtgggc

SEQ ID NO: 355327 - DNA, 284 bp, Zea mays
tgggggggggggggggggggggggtggggggggggggggggggggggggggggggggggggggggggggacgttaataaagcaaattaagccaaagcccccccgtagcggtgtaaattttaaaaaaccaaagcctgcgtatttatacggtaactgggccccaccctaggggtgaaattttcaaaaaccaaagcccggttacttatacgataactggggagcccgggttgggggggggttagttgggggcttgcgtgtcgggaatgctttggggccaaccccggg

SEQ ID NO: 355328 - DNA, 342 bp, Zea mays
agtccaacaaatgaagcaaatggagatggtggggtcatgttctcaaacccaaaaaaaggaaatggctgccaccacagtacaagctatggtgaggtcatgttctcagacacagaaaaaggaaatggctgccagccacagtacaagctattatggctttcccctccctttccaacccttttgcctgtctcgtttagctgccctgttggaaggtgttttaaactgctacagtagcccgtgggcagctattttaactttgtccgtccatttagctgctacgttggagatcacttggagccatcagccatggccatggaaggctgccagttttgtccagggaaatgt

SEQ ID NO: 355329 - DNA, 495 bp, Zea mays
ttgggggggggggggggaaagcatacacaggagacaagcatagaaggttattagagacacattaaagaacaccaacgggcgcacggtaacgggtgaaaggaacgtatagcaatgtaaatggagaaaaaacagacaggaaaagagccaagacggctgaaatgccagctctgttagtaaaggaggcgatggtcgacgaaggatgaatagggaaaattaataacgaattggggtggggaggcggacgctcataaagtaggcggctgttagttaaggtactaattgtaaatattagacacggtaggggcttaagcgccggggacaaatcattgaagctggctaacacttaacaatataacacagcactatttgcgccatgcgccgacgctttctagccagagttaaagttgaatatagaggggataccagttagcacttagtagtacaacaatctaaattagcgctacataagaaagaaaagaggaatatatttaaagg

SEQ ID NO: 355330 - DNA, 419 bp, Zea mays
tggggggggggggggggaacagaatatagtagtagattagcaaaagaaaccccgggtagaccagaagatcataagaagtaatataatatatatggaagctaatggtatggagtgagagacaaaagcaaatgctaaactacgtagcatgtagaacaaacgatagcgcaactaggagtatcctgaactaggagtataatgattgactggtagcgagtttggaagaacccaaatgctcacgctaaatgtaggttataggttaggttacagtacaacgacttacaagagctaacctagttagcgaactacataatatggtgcaaggtactataattagggtaaaccagagctgtttaacacggcgtatatattggacaaagaaccgcctatcggcccagatagaccaacactttgcttattgc

SEQ ID NO: 355331 - DNA, 357 bp, Zea mays
gggggggggggggggggggggggagggggggggggggggggggggggggggggggggggggggggggcataaaaatacccctattggttgggctaaaggcctacgatttcagataattagataccgggactaggtggtgatgggaagtggactaaatcataggcattagggactaaacgggggcaatggttacctaaggggccccataacagtataccagatttcattaaacactactgatatcccacgatacaaattaagaaacacatagccaaaaaggccccctcccccgcaaaacatgaaaacaagcaataacccgtctttcactggttaggggaatccaaatagaacccgggg

SEQ ID NO: 355332 - DNA, 375 bp, Zea mays
ttggggggggggggggggggggggaggggggggggggggggcctaaacaaacaaagggcccttaggcaaagaacccgttaacagatacagtagaagtggggtcaaaataggctgaaactataaagccccatagggggttgtgcctgtgtaaccgggcagcgcaaatgggttagcgggatggtgtcgacagttaccccgctgcctgctgtgcttaagtactaccctttgtccccaattataccctaagtgttggaggactatgtgtaagctgcgtatggttagcaagcataggttgcttaagcgtcatactaaacgtcttatccagccgcttccctgtaaaacttacccccggacgcctcttaagcagtggctcct

SEQ ID NO: 355333 - DNA, 173 bp, Zea mays
aaaacccagggattttaatcgaggttaaggacaaggaaattcattagaaacccgtactttaggaaacagaacctcgaaaaaaacatattcggaaaaccccaggtatttacagcagaaaccgggcaaaccggttttcaataataagtggaaaaggacaagtctaatctgcaaag

SEQ ID NO: 355334 - DNA, 452 bp, Zea mays
tgggggggggggggggggggggggggatcacggagcacggatcctgcgcgaatttagggctggcaacgatgggctacacgcgcctcaaaaacatagtcgggcgccatagagtgtaaagtacctactgccggaagatgcaagctatatttgtaaaaagtacgagtacggagttgcctagtcacggcacctgattggtattggatacttcgtaacgtggcgtcgcattcgactcagtattgactagctaggttactgaacatattagtcagcaccaactaatggcgcaggcttgccatcggtcaccaaataggtaatagctagaaatcggcacgcgagcggccgaactttagtggtgtctatacgactatggatagcactgctggtggcaaccatagtattggggtttggggaatttgggtctggtagccgcaaagtgtgataggccaggaagc

SEQ ID NO: 355335 - DNA, 426 bp, Zea mays
ttgggggggggggggggggggaggcaagctccgcgttctaaggaatagaaaattaatacgcgtaacagactaactataatgaaggaaggtcacacagatggagtgtgctatattagcctaaaagggaaactatgacacatttagccgatgtgaagaaccaatgagaaagttaaaataagccagcaccatagcacacctgagacataaaccccgagggaatacgcgcaagtgacttagcaaagcagcgtcggaagcctacggcaaagttccgtagtgccggtgtttgtgaacaggcaagccgactgcttggtagacactggcacccgtggcgttggtcgctgcctgggtgtagaaaccaagggctgcattgcaccagtccggattagcgtgctcctgttcgcaacaagtactaagccacaccacagt

SEQ ID NO: 355336 - DNA, 463 bp, Zea mays
ggggggggggggggggggtgtttttcataaggctaacctgttgcttggattatgactacgactacgacaataaaaccctataagctatatggtattgctagtgggtgttcggttaacaaacatcatagcgcgtatcccgatatactgatgaatattatactaaaacaagctagaagtacgtatgtggtgcttgttatgttgtgtgtgtgtgtgtgtgtgtgtgtgtgtgatactgctaggttgccattactgataataggagttacttccttctgggcaataaggtagccacagctactacatgataaagttgaagtgccaagttcataatcaagctgctgaattgtgtaacttacttatagtgaagaagtaaacgtcatcagatggatacggttatgtatttgctatgccgggtcattaggggggaggggggggggcgtcattcttggttaaagttaggctg

SEQ ID NO: 355337 - DNA, 481 bp, Zea mays
ttgggggggggggggggcgtcgaagtacatagcggtggtgagaattacccaagtagggggatagggggggggccacaaacccgtcttaggcgggaaaaaaaatatactctggtcagagcgcattgtaacgttctacaagtcctacttgggggggataccggggagataacaaagcgggttattgcgctaccaaggcacgccatcactcactactggttagggtactgcatacgcgaggtctacgttactaaatcccggaccagtgttgcctactgtccttcaggtgtacctgtgctttactaagtgctaaggaattgcttcacaccgttggtaccaagtgtaacttcgcaattggtaggactaatgctcgatattatggcaatgccccacagcttggtttagccctcatgtaagcgctatactgtttatagcagaatattaacctgcaagagagtatagggtgtgcgaaaactgtcacttc

SEQ ID NO: 355338 - DNA, 419 bp, Zea mays
tggggggggggggggggaacacaagtaaatgcgcgcgattgatagtatacgaaaatgcaactgatataagcggtggtatggcttaattagatacgatactaggagggcaacgatgtcatggccagtgacaactagaaacagaataagacgaaaataaaacagaatttatacacacaaagtatataaactacaaaatagtttggtgtagattaattaaggttgtaaagcctgctcttaggctgttgttgtcttactggccgttaggtccgcgccaagcaatttccatacgtaagctctgtagaccgcgcgctattaaatacagtttgtgctctggccagtacagggctacctaagtcatggcagtgcgaccgagtcaacgatcaaacctgactacgtaggttgcctcgctgaagcttact

SEQ ID NO: 355339 - DNA, 386 bp, Zea mays
ttggggggggggggggggggaggggggggggggggagcagaaaacaatgaacaggagacaggaatcaggtgagtaagtacaacggtaaaaatattgtaagggattattcggtttggccgtgcttagtaccaaagataccaataccgctctgcttcggcctacaattagtactaaggggtagcctcattggcatggtcgtcgtgttaaacgtgcctccgcacgtagtcggtgtattaaattacttagtattttatgtcgacgtactagttcagggcttattacaaactgtatgaagtacagtggttagagtacacacttttgtagtggtagtcctcgaggttgtcgtatgtatggccgtttctcatgctaagcagttaggtaggttt

SEQ ID NO: 355340 - DNA, 373 bp, Zea mays
tgggggggggggggggcagtggaaatacgaatgagccgggtaccgacagaaacggggccaagataccggataacaaagcgctagttgcgcactgtaacgattagaggaggcttattagtagtggggataattacaaaatggctacaaaaaccacagagggcaaactgcaaatcaaagggcgctactgctgtagccacgttaactataataaccagcttgcctaaaggaattactagtaaagtacgaactgggttgccagtagggtgccgacttattcttcattcgcggcgtcgttgttgtcatacgccgcggcatcgagcctatccccaacgttggccaccccgtaaatgctggccgcattagcgactctgtc

SEQ ID NO: 355341 - DNA, 410 bp, Zea mays
gggggggggggggggggggtacagaaatataggcctggctataaccctaaccttgcacggattcgctcagactgttcctttacgcgcaaatgcgggaggctcggtatccaattcccccacccacgctcgtgataatccctcatcgcgccttagaagaaatctataacaggttcgggtggaggggcgcgcccccttcccccggttagttccctcctattccaaaagctcgggcgggtagttcccagtcctcaccagccacattcgtctaggaggtccccactatcgcaacctcgtctcctacgtcagccagtttatcaaggttctcgattccacatattgggagtcttcctaaaatcacctgtgcgaaaggtctatcattaaacttagggggctcctgaggtcatgtttat

SEQ ID NO: 355342 - DNA, 482 bp, Zea mays
ttgggggggggggggggggggagtaagaacaaactgtacggtgggtgagtgcacctgaaagctactacagctgaattatccgggataacaaatgtaagtagaaagaaaggactgaataaagtaaagcaccgctaatgcctaataataattcagtaactccatcaacccactgctctaccagggatattcagccacccggtcatgttggccagggtgtagtacaacatctctcctgtgttcaccgccatgcctccacttttgtaagtagttgcagtattgttgttagtcgtccctcttccgtgcctcatggccttcgctatattagcctgagtgctactagggcgattactgttgttgtcagcggtgccgctggtagtactgttatcgtaaatattgtccttcggtatgttgtttccattattcacgctatttagtgtcctaccgtcatcatcgtcgtcggttttgcccgtgccactcccctt

SEQ ID NO: 355343 - DNA, 380 bp, Zea mays
tggggggggggggggggacactacctagcctaggggggacaagcttaaccaggagaggataagcaccgacgacgacgacatgacgacgacacctcaaattcgcgtgcatgccatattgtatgttattacttataaccttctttaccaccagttgacaacatctggttgagtattaatctcgcgggttcacgtcacctattattaactttgtatccacgcctgatcggggttggcctaacgcccctcagtgttgtgctcgtcgtcagcttactgtcatgttttgtcatgttaacctttacaactattggtgtttatggtggtctaccttttggttaccataccgtgggtcttagctacggtgcaattagtgtagccaagct

SEQ ID NO: 355344 - DNA, 430 bp, Zea mays
ttgggggggggggggggacaataatggtgctagtctgtacaaaccttaaaggagggtataactatacaaaaatttgagtacgatcgcgtccggctggcatacgcgccgataaataaagcaatagaaggaaccgcggcagttcggcgactgcttagtagtagaattgcatctcctattattatgcagttttctgttattattccaattcttcatcaagttattaggatcattcttggtctggttttggttcctcttattctgagggctcgactgtcaattagacccattagacggagtcttggtcttggtgttaatgttatgcatcctattacagttctgcttaggtttaggctgtttattacaattcgttttcatcatactgttctgtctaggtctactcttagtccgcggccacggattgcacgtctta

SEQ ID NO: 355345 - DNA, 443 bp, Zea mays
tgggggggggggggggggggggggggggggggggctgtaaataaaattacaaatatggttgaataacaggataacaaatatctgtttcaggatactatgcgtatgcccataacaggaggattctagctgcgcttactcctgtacgttctgctatgctacgatagccataaaaaaaaaaatcccctcacgtgcagatagataggggaggtaggccgcacagctaataccaacgacaatgagacaataacacctggcaagcaaaagggcccgaactcttgtaatgtaggcgaaagtatgtggtaaaaagggagcgcagaatccgccccctacactccttacgcgatgtggctagtggccacactggcactctaatagtaattacgccactaacccttgttgcgcaagtttgcttccgtggccaccaagttggtgtcgaggctgtc

SEQ ID NO: 355346 - DNA, 431 bp, Zea mays
ttgggggggggggggggccgggctgtagcgactgatgaacccatcctaaattttgtcctcatccagttcattcaaccccgcacacctactgattcggttgtggaccaacatttacggtagatacgttagtacttatcgtgttcttagtgtgcaacgttaccgctcgcgtttgtcaggttactggggtaccagtccttattatcttagtaacagtgcggactcagggtactgcctccttaaccggactaagacgtggtgcctatgttctaactggtttcctactatgcatgacggtgggtgttgctggtattggtaccgtgttcgggcacggtcgcacctcttaaacgggtcttgtgtcctgcgtttgtaatattgctcttgttactggctcctaggggctggtcgatgtggtgcatacaactggtgttgct

SEQ ID NO: 355347 - DNA, 490 bp, Zea mays
ttgggggggggggggggggttcaaaaggccacaactaaagagcggaggcttcggtaagtaataagcgaagggatacggaagcaaaagcgtcgcctattggcgggtggttgagcgatgattgatatagatggtactggacggggctgagtcctgtcgggtcgggccgatacgaccgccctgtggttgaaacctagcgggttgctactctgcaaaaagcttagtcgatactaaagtaaatgctatgttactgtgggtttccggtataagcaagacaagcgccgtactggtaagaagtggcgaagattagagtttaccggctaaaccagcctacgtacaagtagtcatgataaaagccgcgccagctgtcagcccaagctcccccgcgcgtagacacaggcgcggtaaacttttagtcggcgtggtttaagtggtagtttgcgagttgggcgaacctacaacgctaggggcacccgcttcctatagatatagt

SEQ ID NO: 355348 - DNA, 437 bp, Zea mays
ttgggggggggggggggacgaagaagggaatgtaagagtctgtgcaagataggcagtaatcccgtaggagagatttaattagcaaagcgggcctgcaactaaaaaaaaaacaagcggggcacagtgcagttagtgtcttagtttgagtaaaagcgctcttcaagctataagcaattacggtcggtccgggtacctggtaccggtaccaggatatacgacggccgacggcaagtgggttgtctacggctgctctcatgctagtcagcaatgttgtccgctgtaccgacaatgtttggcggattggccccttagccagaacaactctaaccgttggacgtaggggtttacaggttattcgggtaatatagctacaggtaacgggcgcgcgcaaagttactacatgagtagggggagttactgggctttgcgcggtaacg

SEQ ID NO: 355349 - DNA, 482 bp, Zea mays
ttgggggggggggggggggcataaaaaaaggaaaaaagaacaaaaatggagattatactttcgttagcaacttataatcggtgacataatgcaaattagagataagtgatattctattccgatgaaatgggcatcatgtcacaagataattttgtaattgcaccgcccaggtgtaaagaatggataacttctttaaaaaaaggcagcctttgaataaaatcactaatgcgttgtcacacaaatgggtggctataattaacatcgtgataatgccttatcatcaatagccgtcaccgcataccggagttaacagctgagtgtataacaggcaagggcgttgatatgggcctgaacctgctaaaaatgtggattgctccttgctaaagtctaccaaaggaattcgttattaagctgagattcctaaaagcctaaaataagtcaacccaattacaaactgggagcatcgtatgcgctagggcttg

SEQ ID NO: 355350 - DNA, 357 bp, Zea mays
ttgggggggggggggggggggggggggggggggggggctactattaacaactattaggggggttggaccaggaatggacaataaagttgcataccacgaatactagttagtcagttatacgttagctgccggcagctagcccgtgctgccacttcaccagcaatatactatgaataatgcatatacactcattggctaagtaaaaatatacagccctaataataaatcacatcaatcaacagaaatttgggccatgacccgaaatagtatccgactcaataccagaatggccttctctcccttttattctgtacggttgttacggtttcgtccacggcttcgagttcttcttatccg

SEQ ID NO: 355351 - DNA, 431 bp, Zea mays
ttggggggggggggggggatgtaatcgcttgtgggctaggcatatatagcgatcagagcagttagccgataagataagacgatacatcacattggggaggggaaggagggggagggttaactactgactgactcgctatctaagaacctaaatttttaggccagccacaccatccatcccgtaaagccacagctgcggccccagcttttgtttccgcatgtttcctggccacaaccctggcactacggtcgatcctatcagtttgctgttctattccggttgcactgttcccggcggcggctatgtcgtcagcaagtttgtcagtgttggtagttgcttcttcaatggtgtcaatcttcttggtattagccctgttgttacttatcatcctgttcttaatgtgtttagcgatgttgtcgtccctcacgctc

SEQ ID NO: 355352 - DNA, 452 bp, Zea mays
tggggggggggggggggggggggggggggcggtgggaaagtaaacagctgaaggtaggcataaccacaatagctgttgcgctgttagcatagggcaggcggtgcctgaggagcgagaaggatagggaaccaagtgcccctccgtataggcagatatgagttgtgaggacaagaccgaacagtgcgaccccaagctgattcatatgacagaaacacagtaatgtaagctcaattgtgagtgtgagcaagcgccagctgatccaaactatgccaaatgacagtgagggcaaaaccaatacaaacagctctgcttgacagttgaaaagagcgtattactaaatcaccaaatagactcagagccacgcgctaatcacctagctgggtgattaaacttggtaacaggcattaacccgtggggttgactggtggggtgttgtaggggtggcaaggaag

SEQ ID NO: 355353 - DNA, 480 bp, Zea mays
ttggggggggggggggggggggggggggggggctgctttaaagtagaaagatagagagaggagtacatagggacagagtagaggacggagtaggagggcatatatgtgaccgcttctaaatccagaacgcacggtatcaactataataagaaaaagatatcatgcagatatgatagcagtgaatgcacgaaatacagccgcacagcctataggcaaccgagagggcctaagcatgctaggttaatgcaacaacaaatggctattggtgattggccacgccaattggagatggtaaaacgcatattaaatgagaccactaaaccaatttagtcctattgaggagatgacattgtgcccgtatctaatactaattgcgagagtgtaggccgcagtgtgcatagcgatgtcgatttcacaggagtactagcatgtggcaaggtagtcaacgttatgcctcctatggcgagattaatgaagata

SEQ ID NO: 355354 - DNA, 409 bp, Zea mays
ttggggggggggggggggggggggggggggggggggggggggaatgaaacaaaaagacacaaccttgaaagcctaaaaggtcgcattttccgcgaatacagccccagagagtgacgaagagaggagggtacaaatatttgacccgcaaaatctggattataactagcagtaaaatatacacaagcagcagtaatacgatacaaccctcatcgactaaggtaaatcccatctccatgtttatgacgccttagggctcaacttcggctactatggccggggattcttcttgagggttgtccttcctggtgcccaagacaattgttccgatagccacgttattggccgcaccgacaagcgctttcctgctaccacatgtcgcgtctgctgtcgtgtcaacgtggggctcttc

SEQ ID NO: 355355 - DNA, 497 bp, Zea mays
tgggggggggggggggccaagctaagctgagtcagtaggattttggagcaaggtgggtagtcgtaacaaggtcaagtagcttcaaagcaccgaataaggatatatgaatgaagtttagaaaagcccagtaggtgatgctatctgagagatatagcaataggattccgcttgttcgggctagatatacagatattccactacacacgcataaagcctctaacaacgcttttaaacctattagaattatagtggccccatcccactggatctttttaatcaggaggctccatgtataatcgcacttaccctaaattgctaacagtggcataagatagctgcagctgcatatgctatatataagcaccaatatcacgtgcgtgacgttggcgacataacacctggcggcatttagtggaggtcctacttataacttgctactagtgccaccactgtaacccacactatccgtggtactttctacactagtggtactggtg

SEQ ID NO: 355356 - DNA, 388 bp, Zea mays
tgggggggggggggggggggggggggccgatacgtgtttactaacgcgtcttccagtagtctggctgagaggggtggctaacatctaacaatacgcgcgctgagagagagagtagtaagtagttagtttaaggattaagtcacggttactgcaatggatatatgcttgcagcgaagtttcgaggttacttattgacatgatatttgctggtgtccagtacccagaccaaacaaatcttgctaccccccctacagtgaagctgtaaaggccagatcagatataccaccgtctgctcccaagtcttactatttgcaactcacaaaacttaagccggccggccgggcgttaggttactagcgagcgcgccggccaaacagttaactggtgt

SEQ ID NO: 355357 - DNA, 431 bp, Zea mays
ttggggggggggggggggggggggcctagagataatacataagcataacatcaattataaattgcgcgatagcggatataagacattaagcaacaacatgtaacaaattacaagcccatgtttaaaaatttagggcataggcgtggagaacggctcttaagatgtagctaatagcggagatactataccaattctgggcataaaaaatcatatcggtttgagtgggtaaccggtgggtgattaataccgaaaataagagaaggtagggagctgcgagaccacctaaaatttaatgtttcataatatttctcatgttagcttgcagcttgtttattacaccgccgctgccgcccactaacactttaaagcagttaattcctgcattggtaacatgcattattcattaactgctattatgccgaagctacttt

SEQ ID NO: 355358 - DNA, 426 bp, Zea mays
accccccactgctgttagcctaacaaaccgccttagtgttatgcccatatgtctgataacagtcttcgtcaccttcttaacccctgtactgattgctattatcaggctgtcttcttcagttgctattctcagcggaaagtcaataatagttgctggcaggttcagggtcaactatatcggctgcagggtccctgtcttaacggtggctaccatgtgcctctagtatacgcgagcgtgcttaggctgcctgttgagcctgagaggcttttacacgatctagatatttgtaaccgccatcacaacactcatcgcgatactggtcctcgccgctgttgccactgccgaatcccaaacaacttccgacctcacggtccccatcctcgccatagtcgttatgcccgtaccgtcatcatcctccctctcact

SEQ ID NO: 355359 - DNA, 477 bp, Zea mays
cacccagacaactggccattgtcgcgtgttcaggggccttgtctcacctgctggcgacatacgctgctttatcggattattcgtcgtctccctattgggccagattgactattacacgatggctaaaatccctagctgatgcacaaagtacatcgcgagactgggccacgctggagctgccactgacgcattccaaacaccttcattcaggtggctggtagtaacaacccatgcaataggcggcctgcctgcaatatttgaatgccccactattcctgccaccagagtagtcagcactcagctcctcagcgccaccgccaacttcgccaacttagttggcatagtctacttagcgctattcatctacatttcccctactccttagtcagcactctgcgttgtaacagctgccagcaccacagtggcgtttttgctagcactcactgcgctgatcactactattgccactgtgcactg

SEQ ID NO: 355360 - DNA, 448 bp, Zea mays
ctacaagtatactcctaccgctgactaaaaagtgttagctttttctgtcctgacagtgttcatcacttccttttctctgcgactacaggtctgttttcagtttcattcagccctccgcaccgcttccacttctcttcctgcacttctctctgtactggtcctgctcctcctcgttttcaccacctctgctattgtcgcggtcctgatagccatcatttctcacattcccacctccttgtctgtcgcgcttcttgtgcctattctagtcatctctgtgtctctaactatcgtattcgccctggtgctgatcttcgccactttctctcctgctgtcttaccggtttctcctgtcacgtctgtctctgtaaccccaccttatctcttcgtagcgatccctgtagttttcaacatgggcctcttgatctcctctttgcccgtcttcactgtc

SEQ ID NO: 355361 - DNA, 331 bp, Zea mays
tgggtggggttaaccagtgcatgcacttttccggcttattgagctaagatttaacccggggctagtttagtctgcatgtgagtaagagtaatatacacatgtccaaaagcgagggtcagcaatgatggttaacaggccgcaaacaaccaacgcagcctaagctgccagttacgctgtgggcacatataattgctggctagctatgtgttacaaccagttatgagcccaacgtgcagctacaccttaacgggtagcacgttttgcaactggatatcttacctagaagactttaacattcacagtaatggagcaattggtgtatagagcaaat

SEQ ID NO: 355362 - DNA, 133 bp, Zea mays
aacattgaagttttagcgtcgatgagcgaatccactttgctgcaaaagggcccctagccaaagaaagggacccagcattccatacaggctgcaaccattagcattacgcacgaggggcgagtaagcgcaacat

SEQ ID NO: 355363 - DNA, 147 bp, Zea mays
gcacgtgcagaattttttgcatttgtatgacggtgccgaaacgacacgatggatcgtgtgctgggctgctgtctctcggagtgagtgagtgagtgacaaaccgatacaaaagagcggtacggaacaatgccccgacaccgatacaaa

SEQ ID NO: 355364 - DNA, 487 bp, Zea mays
cctgtcacccaagggcaacacacagagcagtaaagtgggaagcgcaataagaaccggcaggttaaacacggagtgcggccgacactgcttggagtaacgtggtgcccgccgcggcctgatggtgagccctacgttaaaaggctatgtttcaaaccggggatataaaaaaagccccagaacgatagggtagaggccttgctgctaggagagatactgcgttttacttctgtgggtggtttaaccccagggtgcgcccagcaccctggttagtacggacgtagggcctcggcccagcgctagagagtgagccagagtaggccataggccggacagtgctggaaggtacagccagccaggttgacccactaaagtggaccactgcaactgggaacgaaacggtttcaacacgggcggtgctacgagttggttaagccaaagttgttgatgggagggtggctcagatcgcagggactaacgccaagatagc

SEQ ID NO: 355365 - DNA, 431 bp, Zea mays
  unsure (1)..(431): unsure at all n locations
ttccttcgttccggtttagtgctatcttctcttcttcactgtaaccttgggggccaccatttactcaatgggcatatttgcctgagccgcgggaataccgtcactacagggccaacctgctacccacgcaacgcgctcaggctacccaccaattgggatagcaccggtactgctactataccccagcttagccccagcaatagccgtgttaaaccgcgatacaatcgctgccatgattgttacctgcatggtttgcagagcccagcgtagtactagagtaccgaatggtgcggtgcataacaacgtactgctgcgcaatgccagtcagccttcgcncaacgtccgccgggctcacctccgaagtaacaacaacggcgcaaaaaccggtgtaacacaaatcgatacctgtgtcgacaagcaatcgcagtaac

SEQ ID NO: 355366 - DNA, 458 bp, Zea mays
cgttaagggcaaccggcggaagtcttataattagcatataagggtgagcctgcgcaggcataacagcccttatagactacggcccatagtaattaagcctctgatagggaaaaggttaccaacccgccctcagccattaagattaccagtggtggagagccgcagcagcaacggcctctggcgccactaatgccgcagccgcagaggagcagctctggttggttagctgattaacgccgacacactagctcataacccagccagttgtcacatctgcttatacagctgagagtcacaaggctttctaaagatttacagggtagtccgcttcgagggctacgtaataaccaaccccgctagcttcccctagcttatccagccataggttaagatgttcgatccaaggttactagctaccaagcgccaacgtaggatacgagagttggactaagtataag

SEQ ID NO: 355367 - DNA, 461 bp, Zea mays
gtcacttacgtgttatgtgccacgtgccaatgttttgtagttgttatagtgttattctagtccaatgaccaacctcaacttcaacctctcctctcctctcctatccagtcactcagcctccgccttttgttgatcctcctcctctgccactactgaactactactaacagcggtcatcctggtaagtgttctggttcttattacactcttatttggcctgctcttagcatgggtgttagtgattgctttttcgttttcctcgttaattggtttcgctgcgatgcctgtgtcccgtgtattgctattcatcacaagggtagtagaaacgttcctctttactctcttcttctgctttatcctagtctttgtcgcctattgcatagttgtttatcgcccggaaagaggcaaccacacgtacatactgagcaggggccgcgcccgcttcccggggagggcaagct

SEQ ID NO: 355368 - DNA, 378 bp, Zea mays
tggctgattcaggttcggttaaccaaccgggtttcgtagtatgcgagcatcgttgttggtgggccccccccccccccccccccccccccccccccccccccggcctgaggatttggtccacaagacaacctgtgacatgtaactagatttaaagcagaccgttctaagacgatcgggaccgtatgcgtcgaactcgaacttagattaagatgaaacgccggacgccacccgtgactcttttctctgctccgaggcgcggcgaatgctggagagtatagaagagctcgttgacatacaaaagagggactgcattgctggcggcctcgccggcgagtgcagagacccagatcgattgtgcgcctataaagctatgacttc

SEQ ID NO: 355369 - DNA, 390 bp, Zea mays
cgaggagcttcccgcggccgagcagcaggcagccgccgaggcggaggccgcggctcctgctggtgccgaggagcccgtcgcggccgaaccggccgccgaggcggaggctgctgctcctgctggtcccgaggagactcctgcggtcgagcaggaggcagccgccgaggaggaggctgctgctgctcctcctgctggtgccgaggagcccgccgcggccgagcctgtcgccgaggcagaggctgctgctcccgaggagctcgccgcggacgagccggaggctcctgctcctgctcctgctggtccccaggagccggccgccgaggcggaggctgctgctcctgaggagcccgagaaggccagcgagtgaggccgtgcgcacgcagcggcggc

SEQ ID NO: 355370 - DNA, 194 bp, Zea mays
cggcagcgaataatggaaccatttataaatcattgcaccagttgttcattacatgcatgtgacaaaaaatggacaccaaaaaacatacaataatggattcgttcaataacgttatccacatatggaacatttttaaaaaaaaacagaagaaaatacatattgtgtagacatgcaaaaaaagaggcaccaggggt

SEQ ID NO: 355371 - DNA, 514 bp, Zea mays
cggttaaccaaccgggtttcgtagtatgcgagcatcgttgttggtggcccccccccccccccaatttactaaatctatcctataccatccgctgatagcctctgcggacacctaagagaacatgtcaaacatctgcaaccccatgccgcaaaagatccaagagaaacatacggaaagactggtcaacgagtcggaagtccaaagaaacataaagcactgctaatctctgagaatctagagctaacttcaggaacggatatctaaggttgcatatgcagacttgaggaaatctgcctaagttttataaaacaagtgtaaaggccttggttcttatgatgataacaaggaatgtaataactcccagctaaggcgtaccatttggtgaataaaactgttgtaaccaacgatgccaaggaaaaggctttaaccggatatcgagtccgttgctaaagtgctcctccattgatggcgctcaccgctggatatatgcgaccaaggccgcgacgaacggaga

SEQ ID NO: 355372 - DNA, 233 bp, Zea mays
aaagccagggaaaataaccaaattttggtcaaaaaaccccccttcaaatgcccggcaaccggggcatcggggggggttttattcggaccccaccctggggggtccctttaaccccccccgacccccgggagaccctgagggggccacccccaataatccaattcgcaaatcacaacccaaatcccctacccgtagcactggacccttttggacaaaacaaaacggggcttatt

SEQ ID NO: 355373 - DNA, 424 bp, Zea mays
ccgggtttcgtagtatgcgagcatcgttgttggtgggcccccccccccccccccccccccacacccacaccccccaaccctaagatgcctgcccaacgctaatgcatgatgcgtttctccatcctccgtcagaccccagaggagagcgtgcaacgaaatcatgagatgaatcgaatacctctgatcttgactgctgaattcacaaagggaaaagaacaacgcgaacgcaacataatgccagacttctataactaacaaagccaaagcactctaccttcagcgataggccaccatttacaaaagaaaaaactagttgcaccacattactacgcggcgccttagagctagacctatatccccaccctttatgagtactgctccaagcacgagcagccgacgccgaagacgaagttgccgaggaata

SEQ ID NO: 355374 - DNA, 514 bp, Zea mays
ggttcggttaacaaccgggtttcgtagtatgcgagcatcgttgttggtgggcccccccccccccccataaagtaaaggtttactctacccctcatgcagctcctggaggcctacagatcgaagtaaacacagttcccattgcagcgaggcattacgccattacacgggaaacggcgaactagaagcgataactctccatcaaagtgactagcgcttccccggcctcaagaaataagaaatgcataggaacgctcaagccagaaaaacatactggcaaaccgaggcgtaaaagcatacttcgcgggagacggcgaagctatccacgagggtcccgccccccgcctgcgacaagacaccattggactcaaaggagttggaaaaccaacctagtcgcgatgagcggtgtccagatcagtaattgaatcacaaaactacggaagacagacgataatcttgctggctggttgacgctagacgacacaaggtcgtcctgatcctgagacgcgtgagcgag

SEQ ID NO: 355375 - DNA, 354 bp, Zea mays
agcaaaaaaaccccccaggggagcttggtttatttatggggaaacacgtacaaaaacaagatgcaagggagcggggtaaactcaaaaaggggaaacatacctacgggggggggtttcggtattgggttaaccaaaaaaaaccagggaggttttattggatatatgaacggaggcgcagccaaaaccggaaactttggaggggaaaagttcaaggggggggttcaggttcagggtcagggtcagggacctttgtttccttgagggagggcatgggggggagccctttggtcaagagggggtccaacatttcccacgcccacacacgtttttttttttttggccccttgggttttt

SEQ ID NO: 355376 - DNA, 470 bp, Zea mays
tggctgacttcaggttcggttaaccaaccgggtttcgtagtatgcgagcatcgttgttggtgggccccccccccccccccccctctagaatattaatcacagacaccccgacattgatacacatccctaaatgaccgacacctcaagtttaaaagactaatgcggacgcaaccacccgcaaaacttgcaaagattagggcgtctgtaccgaacacctccttgatgaaaagagctggatcgctggagcccagaagaaacaagcacaaagcccctccgatgaactagacactgactaaagcaacagactgacactgactaaacgatcagatggccgatgacacaatggctggctgggccgcttgaagcaaaaactatggacacagctatgaaaggccccggacggagatcttcttaaggacccacttgctataccacggtgaacatgcccctagaagcccgactcacactga

SEQ ID NO: 355377 - DNA, 330 bp, Zea mays
aagccccaaaaaaaagggccgggttatcagggaaaaaacccccagcttttcggggttaccggggaatggtaaacaagccaaaaggaaaacccaaggggttcctttggattggccccccagggggaaccaagggatttgggccccccacttttgacgggggcgggggaaaaaaacaacccgcgaaaacaaaaggggccggaaaaaattcctggggacgggtcatttcgaccttccgggggggagggggcaacatcccttaaaaccccttggtcggggaaccatttccaaaatttgggcccccccccggggatttaccccctccaaaagccc

SEQ ID NO: 355378 - DNA, 349 bp, Zea mays
ttgttggtgggcccccccccccccccccccccccccccccccccccccccaggaaaggcgaactaatattttgatcaaacaaacaaacatcctgctatgcaaaaactaatcttaatttctaaaaaaaaagataaatgaagtttctccctccgggagtccacaagaaccacagagtagcgacggcaacagtagcttcaataaagcaacaagcctttaacgggccacggcgcggagacccacccactcacgcagacgctgcttgtgaaggtgatgggtgctgagacgacgctgcttcagaggtagttttgatgtggtggttgaagtcctgggcgtaggccgagtcgtcggc

SEQ ID NO: 355379 - DNA, 423 bp, Zea mays
tggctgattaggttcggttaaccaccgggtttcgtagtatgcgagcatcgttgttggtgggccccccccccccccccccccccccccccccccccccccacgaattgaccaccggggacacacacaccgaagaactagcttcaccgagaaaccgagctacagaatgaagctagaccacaggtgtaaaccgatgcaacgaataaatgaaagattaaaagggataatataataataaaaaagtcgcatataagagtaggtaataacgaaatgggagccgaggttagaggatatatcttagatatactatgcaaaacagttggttagaatgaggttgaggcattttgatttccctttaaagcttcatggaattcagccttggccttgtccgcgtgagccttggtactcaggagggctggggcctca

SEQ ID NO: 355380 - DNA, 168 bp, Zea mays
acgtgcaacatttcaagaacgatgtttccgatatctcatgctttccatggggtggttttggcccccaaaatcagtcttcgaggactagttacagtatgagagtgacagggatgacacatacacacatataaatgatcatgaacagattgccaggaggtgttgcaaaat

SEQ ID NO: 355381 - DNA, 168 bp, Zea mays
  unsure (1)..(168): unsure at all n locations
cgtgtggtcatcaatgcattgggttctctgagagagatgaatgntaggtacagggtgttgatggctggtagtggcagtgtttgtccctttgcgcgacttgtcatcattttttatggtggctgttttattttaattaaaagtaatctcatcttctatgtttgttgtttt

SEQ ID NO: 355382 - DNA, 302 bp, Zea mays
gaatgacaagtagcccttcataaaaaaatcaatgaaggccaaaagcctctcccggttgaatagttccaaagcttaaaaaaaagtgatcataaaattttaaaaggctaataaaccgcccagattttctataggggaaccaatagacatgctgaccgggacacccattcatatggtctaaacttatgccataaacaatgttgcaaagccctttgccaacctttgcttaaaccccttttgtcccaccatttgggggcttctttgggagggccccaatggctttttggaacaaaaaattgcttgca

SEQ ID NO: 355383 - DNA, 346 bp, Zea mays
ggaaagacaagtaccccttcatagaaaaatcaatgagggcaagaagcctctactggttgaatagtcccaaagcataaaaaaaagtaatcataaaattttaaaggggtaataaacagacaagattttttttgggggaaccaaaaaacatgctgacggggacaacgattcatatgttctaaacttatgccataaacaatggggcaaagccctttgccagcctttgtttaaaccacttttgccccaccattttgggttttttttgggggggcctaaatgtctttttggaacaaaaaattgcttgcaggattggtcttcgagggggccaagtcgttgaaggggggggggg

SEQ ID NO: 355384 - DNA, 243 bp, Zea mays
gggacactcaacccccagggccggggtttttcttatacgttaatttaaaacgagtttttaaaagttttactaaatcaaaaaaaaaatttaacttatgcagcactaaaaaaatgaaatattgggctttagcacaagccaaataaattggaagtttgctgccacaatttttatgggaggacacatgggcgaactgaaccgaaaaccaagggagatctaatttatacgggcgaactcccggatccg

SEQ ID NO: 355385 - DNA, 293 bp, Zea mays
gccagcaaagtagaacaacattaatgagatttacacaaaaaaacaggggattgggccaacttgaattagttgtgcaggaaaaccagtttacatgtggaggcatgaatggccaggaagatagccagaaaatcatttaagcaggtagttacagacattggcacaaaaagccacatggtttgtgaacatgcaggatagaacagcagtgttttggggatccagcacatcatgcaggcgcaattgcagcgcaaattgatgtcatcaaacatcagaagggtgtgttaaaggaattgttg

SEQ ID NO: 355386 - DNA, 199 bp, Zea mays
aaaaaaaacgtgtcagttataaaagcggggggccccaaaaagggccaagagcaaacgaagggggcaaagcaaagcaacccttgggttatggggccctcccgaccagaagagcaattaccggaaaggcaactacgggcccacccttgaaaacacgggcccgggggaactcaggaaaaaatcatgggagcgacagcagggg

SEQ ID NO: 355387 - DNA, 376 bp, Zea mays
ctttggctcatcttgcctgtgatctacacctatttgcatcacctcaatagccaaccggggggcgactgagccatcagcggctgcagcttctgcagcatctgggtcgacgttcccagctgtgactccagtgcttttagtttgcagttgcgccatatcactaacagatacagctactgacactaccaccactgtcacaagtgctcctacatctgcaggcatgacaaccacggctcctttgactggaacaacggggtttccaaattttaatctgcaaacaactcccccagatgttacctgatctgccacaccggacattggggaacatactactgctgctagctcatcagccaccagcaccacaactcaagcaactttc

SEQ ID NO: 355388 - DNA, 244 bp, Zea mays
gaaaaaaaaatcccccaaaaatggggtttaataaaaccagatcaaaattcctaaaaattgcccttcagcttacctccacgggccaattttccttggaacatgcttattgcctggggccccaaaatcggaaaccgttcattacatttcccaaacaaaaggccaattttctttacagggggaccccattttttaacccccccaaatttatttccatgcaaaattcaaaaacttactttacatcccc

SEQ ID NO: 355389 - DNA, 245 bp, Zea mays
ggaaaaaaaaatccccgaagaagggggtttaaaaaaaccggatcaaaattcctaaaaatggccctacagaatacctcccggggccaattttccttgaaacaggcttatggccgggggccacaaaaacggaaaccgttcaatacagtccccaaacaaagggccaattagctttacggggggatctcattttttaccccccccaaatttatccccctgcaaaattaaaaaacttacattacatcccc

SEQ ID NO: 355390 - DNA, 274 bp, Zea mays
agagcacctaaccaacccgggtaaaaaagaaaggtgggatcatgacgacaaccgggatacagagaaagagaaggcattgtttgaaaaaatgacttgctaccactaccagctaagggagccagggggagagttttcatggggatcaccatcaaacatttgggtacatgtttatttttacaagggggggatccattattttttacaaatgatcgcatcaggggttccgatagcccacgaatgggatgcgtttacgggtgccgcctggacggttttt

SEQ ID NO: 355391 - DNA, 233 bp, Zea mays
gaacaaccaccaccacaggcacacataagcatatatgtgcttcatgcatagtaacagcattccatattcatcacgactcaaatatacaggctcatgcaattgatgcattgcacacaaaggagaaaatacaggcaggtgggttgatacatttttggtcaagtggatataagaccagtgggatttgtgtaaatacagaacggcataatatacatagcacagttggggataagtgt

SEQ ID NO: 355392 - DNA, 258 bp, Zea mays
aaggtttcccgtcatcactgtatgacgtcctcctgtctttggggggggggggggggtataagacaaatgtaggccgggttgggattccgggtacacacgcgacagtgcgtgcgggcgacgggatacaccgaggataaggataaaaccaaccgagacctggggtgcgggtggttatttgtggcactacaatctaaatgcgtccaaacggggtacgatggttatggagtacaggaaaaatatggaattagtggggtgata

SEQ ID NO: 355393 - DNA, 428 bp, Zea mays
aaggtttcccgtcatcactgtatgacgtcctccttctttggggggggggggggggggggatccgcgaaatagggggaataaagtaggcacgaagcgacaaataaccatgggcacaaggtgcgagggtgcgatgaccaaattagaggtggacctaaggtggtacaccttagtgtgagtgcggtagactttggcagaaatggctgagattagggagtagataaggggccgcaggcttgggaaccatggcaaaggtatagcataaccattagatgggatcccggaattacagagttaggtcaacggagttagtaaccattatataaaagaattgtgtatagtcgtgttgggttggagcgtaaagtgtaacgaacgcaccgacgtatcaagcgaactggcagtgggtaagagtaggaaggagggtggtgctg

SEQ ID NO: 355394 - DNA, 304 bp, Zea mays
aattaattcccgaggtcgataatcggcggccgccttttttgtttttttgtttttacggtgtaaagatttttaacaaatcattgagtattgtagaaacaaggactttgagaattctggatttctgtactaggaaaccatatgcttaggcaattcttcagaggcgagctctatccggtgaaaagcccttggaaaactgtgctatacgatttagcagacaattttggtgatcgctttagtgacttgaaattcacatgacaaagaccatactttacggtgtaaccatgagatccattcgaagttatcc

SEQ ID NO: 355395 - DNA, 319 bp, Zea mays
ttccaaggaaggtttcccgtcatcactgtatgacgtcctccttctttgggggggggggggggggaatagtaaagggtagatagagtgaggggaaaagaggaaagggagttgaagaaggtacagagttcgggatattgaaacaaacttgtacagtcaacgtactccaataattacatccgataagcgcccagaaataggcttatctaacacgttagcacctgtaacgtagtaacgatgaagtatgagaatattatttgaggggcccataaataccggttccgtcgtacacatacccagtgtaaaggaaccacgtggtgga

SEQ ID NO: 355396 - DNA, 314 bp, Zea mays
tccaagaaggtttcccgtcatcactgtatgacgtcctccttctttgggggggggggggggctacatacgaagagatgtgggggggaggtcgaatcggggacggtaaaaagcaatgagtatgactaccatgataaagagggaacaatccaaagacgatgaattgaacgagataccattgggatctctgtaatataacattacgtatgtaaatagcggtcggcgttaaaacatcacaataaccggttgagggatacgtgggtccggaggtagtattatacgcaaaaggcgtatagccgacattatgagacaatttg

SEQ ID NO: 355397 - DNA, 196 bp, Zea mays
gggaaccaagtatatacaatttattaaaattaacatcaacatccaaaatgcataatacttgagtagttgtagagaaatttacagcaaccagtttggaaaagagaaaggtggtttctagatatttatggaagacaaccattacagaagcattttttagcacaaacacacaattacagggaccaatgaatttaatttt

SEQ ID NO: 355398 - DNA, 243 bp, Zea mays
ccaagaaggtttcccgtcatcactgtatgacgtcctccttctttggggggggggggggggggggggggcataccgcaatcacgtacctagggggaggtcaactaaaaccgctacttaaggtttattagatgaccaagttaccttactctggtttaaaaatcatgtaaatacccaaaaaaaaatgacaacccaattaaacggtggccaaattaaggatatagaatgttaagatatcatgaataa

SEQ ID NO: 355399 - DNA, 266 bp, Zea mays
tgtaagacctagctagagttaatactaaagataggccgtctcatggtacacgtctatattgtgtaagaaagagaaagataatgagaaggaatataaatacccaaaatacactataagggaagggatgatattaatgctatagaattatggcgctggaaacggtaggcgtaagtgggacggtttaataacgatacaggaggtagtccgtggccagcattaccgtattacatgatgtatgcaaaaaaaaatttcttagtatgtgagaa

SEQ ID NO: 355400 - DNA, 359 bp, Zea mays
tccaaggaaggtttcccgtcatcactgtatgacgtccaccatctttggggggggggggggggggttaagtgaagaccaaaggtaaggaccggtagcggtacggataggctatgagggcggtataataaacctttacgattgcaacggctgaaattcagatgttcatcccgtaccaaacgaaactatgccgtgtctctatggtaaatacacgcaataggcataaagatatactgcgtaataaggcacgagttaacgttgcaggggaggataaattataccatgcgggagccaattggtaccgatggaatggatgatataggaggcgtggggttaccaatcgcaaattaatgtggataggg

SEQ ID NO: 355401 - DNA, 386 bp, Zea mays
aaggtttcccgtcatcactgtatgacgtcctccttctttgggggggggggggggtaacagcaacttcgaaaagaaagcgtagcgggagtagcgacaagaacgttgtactgaggtgccagggatagcctaagcggaacgaacgtaaaaagtaaagatagaaccgggagtgggcgaggcagttacgtaaccgccaagtaagcgagaggcgttgttatatgaggcatgcgcgtgccgaagaaaataatatgtgagaataaaaaccctaccaagaaaggttggcccatccagtagagtcagtggatcgccgcacgccgtagtagttgtgagaatgttgcgtgcgtggaattagagttaaaagtgcagttatttttcagcagggatgtttg

SEQ ID NO: 355402 - DNA, 368 bp, Zea mays
aatgctggaggaagtgccagtgcatatgctggagctggtgccggtacaagcttatctgggggtggctcagattttggatatggttcagcgagcaaggagttatagaggatgatgaccactcaccaccgtaagatcgatatgatccgtcccaaggaatttattcctgccctttttgttatcgcgtgttgttttattaccacgcaccagtcaatagtgtggaggcaatatacattgattccccttgactggacaatacaaagataaccttatgtatttcatttttgcttacttaacattgccatgtaaaccagaatagctgaggcttattctcatgataaacatgacatttattttacggcttcatcttg

SEQ ID NO: 355403 - DNA, 355 bp, Zea mays
ttcgtggctgattcaggttcggttaaccaaccgggtttcgtagtatgcgagcatcgttgttggtgggcccccaacccccccaaaatacttcaacttaactaaggaccgcacagacgaaaacacggaatcaccccaaggggaaccgccctcgcagctcaccggaacgaatcaaatgaccaatgagttactcatagagagaaacgccaaaagaataagaatgacacagaaaagatatcacacagggacggtgcctcaatatgctccgaacgtaggtcttactgcggcctgtagtggaccgttgagtatgggctagtccgcgttgggctcgacggctgctggtcacgattctctctgc

SEQ ID NO: 355404 - DNA, 244 bp, Zea mays
ttcccgtcatcactgtatgacgtcctccttctttggggggggggggggggccatggacctaaagtaacgttaggcggggtgcagagatggggactaaataaagccaatggtaaggtattagacacgcatatctatgtcgagagaggtaggtgatgatgtctatgccctataatatggcactactaatacacacagctgtagttgtgtttgtgggaggaaggaggaaatcgcctggttgagagaa

SEQ ID NO: 355405 - DNA, 342 bp, Zea mays
aggttcccgtcatcactgtatgagtccccttctttggggggggggggggggggggggacggtaaacagtgcgaagcgggagccgcgaggatgacccaagttagagaccagcgccataaacctgaggcataattaggaatcgcctcgtagggctaatgagagaaggaagaattgaaaaaccatgatgtgtgagtgagagagactggataaaaaaaaagtattcaataaaaaagtatgaatcgcccttaggtgcttatcgtgttgggttggtgttggggagatgtgtgtgggccccattgagggaggtattacaagcaaaaagaaacaacaaaggaaggaaaca

SEQ ID NO: 355406 - DNA, 522 bp, Zea mays
tggctgacttcaggttcggttaaccaaccgggtttcgtagtatgcgagcatcgttgttggtgggcccccccccccccccccaaaaaactggtgccgatcgaagctgatgctgagatgattcgctcacccgctctcagcttctgctagtctgtattaagattgagctgagcttcctcatgcgattcggccgaaattagttaggtattggactcagacccccaccaccaaaatcgccgtagctctcgcgaacttgcggtgggggcgaaatggtaaaataaaggagggatctccgctcggcctctgccgggacgtctgcggcgcggtaggcggcgctgcaccgcgctaatatcccgcaacacccgttataatcgcttcgccctttcatttcggctgctggatgacccgctaataatgcgttaaatgccctgtctatcactgcccttaacctcatttgtcaacgggccgctgaggagaggaagatgttgcctcatcttatcgattcagcgacaattaacgccgggc

SEQ ID NO: 355407 - DNA, 337 bp, Zea mays
aaggtttcccgtcatcactgtatgacgtcctccttctttggggggggggggggggggggggggggggggggggagacaccaacagccggtaaccaaggccaaggtataactatacctagacagaccccccgggggtcgggcggttcccttccggataaaaccaggatccccccgactagggggggttaatgatgctacaaaatagcaagcccgcttgatgaaaagaagcgttacagccaaaggagggaaagggggggaccaaccagcgtgctgagtaggtaggtctttaggaataaattcaaataaacccttgagagcgagagccccaggggggggg

SEQ ID NO: 355408 - DNA, 147 bp, Zea mays
tttcccgtcatcactgtatgacggtgctccattctttgggggggggggggggggggggggacggtcaatacggtcggtgatgagaatagttccgaatcatagctcatacaagaattcattttcggcttagggggtagaagaggaaga

SEQ ID NO: 355409 - DNA, 433 bp, Zea mays
tggctgacttcaggttcggttaaccaaccgggtttcgtagtatgcgcgcatcgttgttggtgggccccccacccccccaccccccccaacagtaagatccgtccgcagcacaagacggtatcaagtagactgatagaataacaaggtagagggttcctggaccccaaacaacaccaacaactgtgttcgagcggggggcgagcgggcgatgcggcgggtcgtgtctgaagaccacagactcggatatacttaagtgagtgtcgctgccaacccgcggtggaggagtaatagtaataccggctggatgatggtcagtcagtcaagtctgcgggtatgcggagtggggcggcgcagattagtactcgtgtggtgccgccttttccttagttgcggtttcgcggcccggcgacgacgtggtgtaagcgttctcatc

SEQ ID NO: 355410 - DNA, 272 bp, Zea mays
ttcccgtcatcactgtatgacgtcctccttctttgggggggggggggggggggggggggggggggaccaatataaaagtaatttgctcacagccacagggggttaaatggataatcccgggcgggtagctccgatgctacacgtcaaataaggagggtattaaagcctgctatacagaaaagggaacctagcggtgtgtgagaggcccaggagagtaaaggtaaaaccgttttaaggttaacaagtgataccccttgtcgggtgggtaaaaa

SEQ ID NO: 355411 - DNA, 157 bp, Zea mays
cccgtcatcactgtatgacgtcctcgcttctttgggggggggggggggaaccataatacctaggcgtgtgcggccgttgggagggagattgatataagcggtacggtgtgtaacgtgtaatttaatagtaccaaatctattgattacccaaggtaat

SEQ ID NO: 355412 - DNA, 404 bp, Zea mays
gtaggcccattcagttggaatttgcataactttcttgatcattcagttacagttgaaatcgagtaattttttcctttcaatatcaaaccaagccaatccatacaggtatatgatgatctttcccagagtaataaaggttttaacaacattgaccaaatgaaagggttgaaaaccacccgacacctagctaaagctgtatatataacttaggaaccaataaaaactaagagaaaataaaagaataaaataaactgctattttttttttctggtatgtaataagaacaactacttgctgctcatcttaattccctcctctagcctttctacagaataaacagagtcaaagttcatgttgttgaagggaccattgactattcacttatggagcaacctggtcttgga

SEQ ID NO: 355413 - DNA, 509 bp, Zea mays
gttaggttcatactttacacatgatacatattacatagcccaaaatcatagtatccacagtctacaccaatgcttacaaagaagtttttccgtaaaaaaaaaaaaactcttatggaaggattacggaagagtttatggaagaaatttttccatagtgaagggcaaaattagaaaaaatggaaaaatgctagctgcacctagcaacacctaggacattttcatgaatctgaccccatataatttatcttaataaaaaaaatgagtaatgaagtataaactatggtacaccattgctgttaactcataattacattagtaagcagattttccacacacaaggaaaatatctttggctcacaaaatttaataaagaaaaaaaatagatatgaggatctaggaacaaaagcttatcttcggctctacttcatggctaaggtagttcattttctcacagatagctacatatccatttactttattcgcaagagatcttgaacaatttccgacat

SEQ ID NO: 355414 - DNA, 183 bp, Zea mays
cgccagtgtgctctaaaggaaaaaaatgatagacagactccgcttttaaggcctgacgccaagattgaaaatcggcttcaaagcccgcagccaaacagacttggaaaattctttcttctaagtctgcgtcacttgaaaagggtaattcttctagctcttgtcggctagatacatgtctatttc

SEQ ID NO: 355415 - DNA, 480 bp, Zea mays
gcaaccaaataaagcggaacttgcattaaatattggatgaatgtatgtacattttaatagctgagaaactaaaatagacaggtgtccctgtaggacgaagaggttggttatcctatctgtatccacactcacataggtaaattcatcttaatctcaacaacgacaaaatagaaggtggcactcactgtgcctttagctataacttttcccaccaatacttgaaggcagtggctgagatctcaaatgatcagtgaccttgtcgatacaccaagacaagtaaagccctctttgcgtgaagcagccgtttaactcaagttgaataaagtacaaagggaacaatgagaaaaatggtcaacattagagcaagtgtaacttgaacagaacagccatatcgcaagtgcaagggactttgaaactgcctctggctctggcatatacctatgcgcccaaaacgctgattgaacatatgaactactcgca

SEQ ID NO: 355416 - DNA, 275 bp, Zea mays
gccgccaaagaaaagtagcagggtaccccattgttatcacaaagaaaaacaagcgagacttgtttaaaaaacaattttgtaaaaaaatgaacttctcagcattttcactaaggggtaccttttacaattacccggggccttccaacacccgcccgttttccgcaaagcttgcaaaaaaaaattgggaaaacttttacacaaaaacccattaacccacccccccttcaaaaaaaaaaactacgggtcccccttatttagggaaagagcaggacctg

SEQ ID NO: 355417 - DNA, 394 bp, Zea mays
atcataacattcataacgtttctttccttcttattactgtaacattagcagcaactatcaacaaatctacatctctatttcccttctaagtctaataggacctctttagaatgaaagaatgatcaaatatatctctatttccttctaagtccgataggacctctttagagaaaaaaaaaaatctaacaaatctctatttccccaataagtccaataggacctcttttgaataaaagaataataaataaaaatcaataatcaatttaccaatataatcatttgataaactaacttcacaatactatttactagaggcataaagtctggtttttctcttcagaaaattcttaaaccataatgcagagagtttttggtatctctttaattcattttt

SEQ ID NO: 355418 - DNA, 410 bp, Zea mays
atatatcaattgctatgaatttataacagaattcagtaattcacatacacttcactcgtaatcaagatttggattattacacaatcacacacgtctcgatacaaatcctggtctcacacaaatgagcaacttccactgcactcgtcacttaagaattggattacacaacacaagccaaaaaaataaaacatgtctcgaaacaaattcttgtcacacaaatcacaacaccacccttgtcggctggattacctgacttaagcaatcaatctggaaaataatgtctccatacaaattttttcaagaaacaaattttcaatttcgaggaagaaccaaacttaccttcaagcaatgatgccagcaaaagctgttgttgacaaactgctgctcacagccaaacactcaattttgca

SEQ ID NO: 355419 - DNA, 332 bp, Zea mays
ctccatcctcaaaagacttctacttacaaaaaagagaatggtatttttccttagacactactaacatagggcacgggcgaaatctaattaacacccaaatcaaccctctatcattatttggaggctagacaatatttctctacacaagacacactattgacatttacatgcactggccgattaactgaacatatttacaaacagacacaagataaaattttatctcttcctctagattcaactttcaagcatccaaaattactcttctccgtagggtattatattgtatgaaggctcatcttctgtggttatgtttatatgttgaactgaat

SEQ ID NO: 355420 - DNA, 355 bp, Zea mays
aaatatgagtaactcaacaattgtaactgattcaatatagaaatacatttttctcaattttatctcactttctttctagtttctctgaactctagatctcaaatatgggatcaaagctctttgctttgcactgaccactttctcccttacgatcttcgaaaaactcaacaatgattaacgttgactctataaaaaaaccaaattttcatcaaaatttaaaatttcaataccctttataggtacatgacttaaaaatagcagttgcttaggtactaattttacataagtcaagttatcgatcaaatgatagtaagcttaccgtagattatcatgtcatgttgatacctgcctgact

SEQ ID NO: 355421 - DNA, 430 bp, Zea mays
gctaaaaaatagattcttgacaataacattcatacttttggcatcctagagacatcaggaatcaaagaggactactaatcataacagagaaagaagttttggaacatacgtgaaattggtattctgcttgatgagaagtaactccagtttctaaacttagaaaaaattggacaaaactttgaaaggcctagctccttagagcagcaaactattcttttttattattattttgttgcacgtcggtgcttcatactttgcacataaatatataagtagcatattttacaggggacctatcgctccaaaattcttgaacaaccaaaagtgaccgaactcgagcgagctcagatatggataggcatgcaataaacaacctgcgtatgcactcaacttagagcacaccttggaacatataacaacttgatcaagt

SEQ ID NO: 355422 - DNA, 216 bp, Zea mays
atgtactcaaaaatagcgacacacgcaccatttctttttacccaataggatttgattctatacaatccatgtgtctatctatgtataacaaacgggggtgcataaattacaaatgtatctactgatcgatgtacgcacaagaattaaaatcaggtaaagcaaaagttttttttaaaaaaaaaaatctgcgcgatgactacaacgctaccaagagcc

SEQ ID NO: 355423 - DNA, 509 bp, Zea mays
gaaaataatattcttgacgctcattgaaccttttatatctacaaagaaatatgtaaaggtcatcaagcaggcatagcaaaaacgcctaaaatttctgatgtccgaaaaataatttaaaacaaagaaaatcccatagataaaactctaccgacccatctcacagagaaaaccattctctgcaaaattgagtactacccccaaaaaagcacgagccaactaatttttaccctctacaaaaaaaaataaaaaatacaatgagcgtcactaccatctaaataaatttttccaacttccttgatgttttagcattaggtggccggaaagtttccaacctcaagttagagcctgaacagatcttgtttagaaccgcatcccccttctcgctttgaattacctccaacgtgcttcccagaacatcagctgcaagtccaacttctaagagactacctggctcctctccaccatcatgtattaactgcccaatgtccttcaaagtaactacactctct

SEQ ID NO: 355424 - DNA, 405 bp, Zea mays
aaacaaccaaaaaaagattatttaaaattaacaacttatatagacattacatacatatttgaggggcaacatacagcagcaaacctcactatagctagaaggtagtactgtacacaaggggaaaaaaaaccaaatgaaaagaaagatgcactttccacacacacactatacctttcctggggtctaagcaaagtctggatgtaagagttctcccataatttattactacaacttacttacctttccttattaagatttttgcattagtaatataaaaagtttttttttatcatcccatgggtagtaactagtaattagggaacccccagaggttaggatcttcatccatgtattcatagtcggtagcagcaaaattatcaaaacgaggaggactcagtagcattc

SEQ ID NO: 355425 - DNA, 316 bp, Zea mays
ctcttgcaaatgtaatggtattatcaataaatatttataagtgtagtcttagaatagtttgattgccatacattctttaacattggcatgccatggactctttctccatattcaggaacctgtacttggtatatcacttgcactagccccctttcagctcacatattgtttcttgagcaacttggcgcaaaaatccaaatcgaagcgcacttctggcgggtcaccaatgcaatcgaacactgcatctgctgtctcgaagtcctcttctgcagtgtagccgctttttgttacgatacacttcatgccggcagctttt

SEQ ID NO: 355426 - DNA, 458 bp, Zea mays
gcacaagaaagctcaacaaggggcataaattttttgaataattcacatacttaatacatcatttattgatattacaatcaagtaactctagcctaattaaactataattttctaaaatacaaaaatgttagagcatcgctgtcttcaactaaaagaaagaaagtcagtgatttcactagtagattacatgtgtacattacatatcattagccttttcgcattactctggctggtttctttgtcaatggatgcctctagatcttgcagctggtgataatgctgtccccacaccagaaattatcgtaccctttagttgtaacggtcaaattcaagctataccatttcatttaaactactctatctgccaaatttaataataccctcattcaacgtgtcacatgaaaaattcagaactctgacaattctattgaatcattggtcctggtgaatatgtcata

SEQ ID NO: 355427 - DNA, 288 bp, Zea mays
aagacaaaagcttgcggataccaaattttgaaaccggtcaggttgactacactgggtagaagaatcgtcagttgcgcattttcaaccccaaaagcgccatgcaagataaggtcaatcgtacagactcaaatcaagcactacaagtatgcacgtggaatatcttccagcattttcgatatgaaagtcaaacaatgatcaggagctgcgattgatcacgagcttgcatgagagatggttaatgatgcaccaaaaagtcaagccgcatatgtcgacaagatattcatcttt

SEQ ID NO: 355428 - DNA, 434 bp, Zea mays
ggcatgcaaagctgtaatgatgaacaatatactaaaatagcaaagggtccccatcagaatgcgtcttctagaactataaaattttctcgagacacattctcctacattatgctatgctaatgagagattgagaaatatctccaaagcatggaaaaaataggttgagggtaaggatactcgcttccactaaaaagagccacattcaatacacaaattgccgttaagaacacaaactttacaatgaaacaattttgacaagggtaaaaagaggtcaatcaacaagttcaaaatcactgagcagccaatttcttcttggccatccatctccgtctggtggattccaatgcctccagcatcatttcattaagttcatcaatccaatgctgatagtgtgcctcaatttcatcaagtttaaactttagcccaagatcaat

SEQ ID NO: 355429 - DNA, 502 bp, Zea mays
gcatagatcgacatagatagaaatttttgtaataggaaagaacacacaaaccaatccaatacatgtataattatggttacaaacttgaatatctgactctttccttaatcatcaaaagtcattttgtaccaaatctttgaaagcatgcatacatcaataaaggtgatcgatagatatgtatctactccttgacagaagaattcatgaatacaggtcattgcattgcatgacttggacaaaagcagaccctatattcacctcttcttctatctctctctctctaaacatattaaaaataaccaagatgagctgtaaaatcctcacattgctcgaatagaaatgtaataataataataatgtatacaaaatagagtaaccatgtgtatcctattgttagtgatctgaacaacttcaagcggatagatagaaacagtgaagagaaagaaaacaatgcaggttgatatttatgttctcccaatatttcttttctttccttaccatg

SEQ ID NO: 355430 - DNA, 199 bp, Zea mays
cccaaaaaagcccattccagacaatacaaatttatccttataaaaaatgcaaacaacaagggaatcacaacttccaaagggtaaatttttccaaaaaaagggtcctaaattaaaaaacccggtaaaactgggtggggccaaaggcttttttaaaaataaaggattttttttttttttaccccaacggggcactggaact

SEQ ID NO: 355431 - DNA, 207 bp, Zea mays
ggaaaatatacgtcgtcacagttccaattgctgccaaccaataacaaacaagcccagtctcagtactaaactcaaaaagtgagcaagctgcattctaaaggcgcagccctgactttttcttcattacagtctaatgcgcccatgatttgcattacacacacaattccagttacaagaatgctagctacacatcaagcgggatgaata

SEQ ID NO: 355432 - DNA, 250 bp, Zea mays
aagaaagcttagggcccggtttaaattcttggttatatttgggggataaacctatttttatctgccctcattggtcattagctgggaaaacacttgggtaggccttacatttgaagaaccggtttaaagacccctttttggccttttggtgggaaaagggtttccaggaataattgcatttggcacactcacaaatttttcactagcatgtttattggcatggggctccctttggggaccacttttttgg

SEQ ID NO: 355433 - DNA, 382 bp, Zea mays
ctaatgaacatcatttaaaatgaaaactttgcatccacttatggttgtacattatttgacaaacctaattagtaaatagtataagaaattatcaggattcatccattggtaatccatgcgcacaacgcacttctgattattaccaacatctaaacaatatattaattaaataaataaagaaatactgccaaggtaaggaatatacaataagaaaaattaaaatcctgtaactattgattgatattgatatgatagaataaaattaatacacaataaccgcacttgtaagctagtcgaagcaaaattcccaaaatcgacaccacatggcaatccctatttcttatcccaaaacggcggcgtcttgaatggaatccgaggaaac

SEQ ID NO: 355434 - DNA, 343 bp, Zea mays
aaaagtatgaattctatcattaataaacgaatgtaaatagagttgaacaatagatgtgtagatatccaattttacaactctttcctccaagaataaatgacaaaaagtactcaattatcccaacacaggtaaagtagagagacatcatttatagcaattttgttctgtgggctatttctgcatcgatcattgctaatacaacgagaaactcgttgaggtctggcgtgtgggtaaaaaaaatgtatattatagtcagaaaactctggattctgatcactagcatgctaaacaaattttccttcagaaatcttgaggttgactgtgcagtaacgaaaactaaatg

SEQ ID NO: 355435 - DNA, 246 bp, Zea mays
cgcaaacatttaacataagaaactcttacttactgaatcgggcacaaatttcactgccattttattccaaaaaaccttttaatcccaccaacaaaacctcttaactgaatctaaattgccctatatatgggtttcactaaacttgaaaaactttggttctaaagtccaagacccaaatccccaagaagaaaaatcgagaagggaaaagaaaaaaagaccattacaaaaacgggggaaaaccaaatc

SEQ ID NO: 355436 - DNA, 272 bp, Zea mays
acagatacaaacgggggcaattagattttattcatctctacttctctttctcttctctacttgggtatatatatttagtagcccgacaataataatataacaattttcatcaattacaaaaatttaaataaaaaaatgaaataaaaaaaaaagagaagaagaatagattcaacgcctgcatcgggtgatagcactgcatccgcggctgtaggggttggcctgagcgccggggcggcaattgtaataggaagccccacgttgggagcaaggga

SEQ ID NO: 355437 - DNA, 228 bp, Zea mays
gtcagaaccaaaatgaatgtactaaacttttgggactaaaacaaattttcacaactattaggactaaaaggataattaaattccaaaaaaaaaatctctatcaaaatactgcaggtaaggttaggcccttcaaatacaaaatgttacactgtaaacttatttcccactacatatgtgggcattatgcaaccaccaccactagaggaataaaattttaaatgcaaaccc

SEQ ID NO: 355438 - DNA, 395 bp, Zea mays
aagctcaaaagctttgccattgtagtattctgggggttcatcacaatcaatcaaagttgataaatcaaatttaattgccatatattagtgcaactgtattagtgacttacgatgggcaattcacaaagtgtaattcataagcatcttttgaaagaggttccaaaacttgctagagctctacaatttagaatttataaacttttgttgttttgaataaggacaagaaaccaatttataaaaaaaaggacaagaaaccaataattcaataccgaagaaaaaaaaaccataatacaatactatcctatcccaagcctagaaaattcacagacacgtgttcttcaatatttttgcaaccttgggttttagataatagtcttcacctgaatagactggaa

SEQ ID NO: 355439 - DNA, 388 bp, Zea mays
aatatctaaatttttatattatattattttgtaattaacgatatatccatggtacacgagtaaccgtaatttgacggtcaacaacagtagtacgcaactagtagttttcagcgattcactaagaattcctttcattattttatgcctcccttcatttctctcaaggaaaagatcgagaagcaaaaaacgataacatggtttaataaagacagaagaaaaaaacaacaataacaatattgggagaacatgcacgactcgtggtgttcgatattctcttttcgttcaacaagtgtgggtcccccactcacaacataatcatgatcgagcaatctctcatagtggtacactccaactcattcattctccttccatcaaacctttgaagttt

SEQ ID NO: 355440 - DNA, 263 bp, Zea mays
aatacaataataatttctcaatcaaattaaataaataacacaatagttcatcatcttgttggttcccttgcgatttacataagccagcatcgggaactttatttatcgcaacactccaattaaccatacaattaaaataccaccaaaaaggaaggaataacgatcggaagttaaccctccatgcacgtacaaattaatcagaatcacacactgatgaatagaatttgaaaaataaaaataaaaaatggaaaagcacaactaga

SEQ ID NO: 355441 - DNA, 101 bp, Zea mays
  unsure (1)..(101): unsure at all n locations
aactatgnctatgtgttaatttggtttatacaaatataattatgggttaaaccgatgagcatgtatgtgaaatgtgaattaatgagtgatgaattgtgctt

SEQ ID NO: 355442 - DNA, 485 bp, Zea mays
aattgaattcgcccttggaaaggctggtctcccggcatctattattgattggttacttctacaccagttacacagaatgttctagtataaaataaaattctagcattttattgggatgcgcaacattgtgttttttctacgttggcttatgatctgtgcaataaatattttcttcttttagttcattaaaccattatcctaaagggcactggttagcattacccttgtttttatcctttacttgctaaagtagctggcatcaggttaatttgtatgctcatttcctagtaaaaagaatgtgaaagtgaaatgtaaattaaaaaggtggaaaacctgatctatcctttatatcaagcaattcattagctgcacatgtgtgttatactattactttgctgagtggtaagatcaactttatgattgaaaacagaataccattttagttactatgggaattgcatgacatgcttgataatatattggag

SEQ ID NO: 355443 - DNA, 352 bp, Zea mays
aaagcaacggggcatccgcatttattcagtaaaaacctaaaagcaaacatccgccaagcaaactccgatacctacccccccctttttcgcctatatccttttactttgggcccatgtcaatttacagcacacacattaatgcaatgcaatgcaaatgcccggcccgaaccagtcacccccaacaaaccaggtttaatccgggggccgggccttccagccgggaaaaaaccgggcctccaccactccggttaatttacgttaggcttcggggaaaaacggaacggaaacccccggggcccgaaaaagaggctcctcaggggaggggggtgcccatgccgcccaaacgggcttt

SEQ ID NO: 355444 - DNA, 390 bp, Zea mays
tttttttttttttttttttttttttttttttttttttttttttttttttttttttttttttttttttttttttttttttttttgggggggaaaaagccgggaccttttttttgccctacccctagaaaaaacccccccggtcggacctttgtctagggcctctcatcgaaaaccggttttttttggaaaattttgggggcgggcccgggctgcccaggccggggaaacctaaacaaaccggcttaggacttaattaaccccagggggcaacccccggatttgggggggggctgcccccatagggggaaaggggggggggaaaaaacaaaccctcccttggggaacccgggggggaaaacccccaacccctaacgggggggggggggggtt

SEQ ID NO: 355445 - DNA, 339 bp, Zea mays
aaatgcccatgaaatttattgtttttttagggaggcatttgactcaagctcatacgaagcaaataagaaataccttatctgtttgttcgttacatggtacaaacaaatttttttttcctatgatgagggagctttattgaagctattttcaatttccattacagaatataccaatgtctatagataggcattaaactattggctcaaccacacttggtagtctgggcctttgtcaacaaacttctgccagctcccttccaattggttttccttggagggatttcaatcaaactgcccaagctgtattaccagcgcattaccaacctgagcttcataacc

SEQ ID NO: 355446 - DNA, 351 bp, Zea mays
gatgaaaaccttaaaaatgtattattacggacttgcacacaagaccattgatgcactgaagtagcgaaacgctaacaccagcgcagtgaacatctggaagcatagaagatagatccatgccaacgcgaagagatgacagtcacataggagaactgggcaatgaaactcccgaattaactcgctaatagcaaggattaaccacacaaaaaagtacactgatcaacacacgtttctcccaaaggcagggagctgctgtcttgctgaggaaccaggtactgccaataccacacactaccttgctgaggaaactgtctcgctcgaatcaactggctcctgtatccctccatctgc

SEQ ID NO: 355447 - DNA, 162 bp, Zea mays
aaaatgagaagatctctctatattctttaattagaattttgagtattacatgtgcacagacaaagaaagcacaagttcccagcccaaatgaatgcagtaatcataactttctgttgggggccaatcgccttcacgaaacccgtgatcgtgaactcgcaatga

SEQ ID NO: 355448 - DNA, 182 bp, Zea mays
gtaaaccccaccagtggatccaataaatgtaagttcaaaaaaaattgccatcaaccagtaaaaaatggtacatttcaccacgccatttccaaatacttgccgaggacgaactcacggaattgggcaagaaaacaaagaaaagctaagtgggtacaaacgaagggggatcaaaatttccaatt

SEQ ID NO: 355449 - DNA, 175 bp, Zea mays
ggcaaaaagtgccattgggggggacttatctctctttcaaccgtaactgtacccatagatgctacattttgatcaaactttaaagcatgaatgaaaaaaacaaaaaatatttttacagacttctgtatttatttgcaatggatatttaatgaggccaaataaagattcaaacctg

SEQ ID NO: 355450 - DNA, 327 bp, Zea mays
aagcaaagtctcttttgagttttttttttattcccacacgagccaaggaaactttacaccatcatcaacattccttatggggttagagacaatacaatgctcgatcacaaaatgaagaaaaaaccaaaaccccttgagactcacttgcatttttttttctctatcttttccccctttatcttggaacaaaagttgtctaactcttggcttgaatagatcatagaatagagaataataactaagggttactttcatgatctcacactatatataaaatggctcgaagcctctgtttttttttttagggatgacattaacattaacata

SEQ ID NO: 355451 - DNA, 383 bp, Zea mays
cctatctttgtcataccttcctcaacagaagcacctttgctaacagaattagcagccttttgggaagacttttttttcttaccagagatagtgaccggtccaatatcgtcatcatcatcatcaccaccaccatcatccttattctcctctccatcatcaatctcaccaagaacagctgctgaacacactgaaccacccttcttacctccctaggaagacttcttcttcccagtgaaagctataacaggctcatcatcatcaacatcgtcattcttatcatccaccacctcaccatccgcatcgtcatcaatagcatcaaaagccgaggcagagaacaaactgccaccgcctttcttcgaacccttagaggacttcttcttgcc

SEQ ID NO: 355452 - DNA, 161 bp, Zea mays
gatgaaaaacaatgtcttaatgtttgtagacatggctttgcctttttattggcacaacttttcaaattaaacttcagtggatggcaagggaaccaacctacgatattcagcttgagcccacattggataaatatttctgtacattgggtaatgcagcatgc

SEQ ID NO: 355453 - DNA, 366 bp, Zea mays
ttttttttttttttttttttttttttttttttttttttttttttttttttttttttttttaaaaagaaaagctttaacttaaaatttaagacacaaactttgacatttcctaaaggggaccatttattccgtataatagtatgatgttaatgccacaccgaccgtgtctatgtttcaattgggccattggcattgtaaccattcgctacacaattaatggcagcctttaataatagggggggaatcaatttcctagagtcaattaatgggctaaaataattctttgacaatatcacttgcccataagtttcagtttttaatacaagccctgtgacattgggaatagaacttaataaacccaagcag

SEQ ID NO: 355454 - DNA, 364 bp, Zea mays
tctagctatctcgatcgaactggccagttgtgacacatccttctttggggggggggggggggggagcgcagaaggcatgacgagggacgaacctaataaggccccaagtaaaactgttagaggagcgcgacaccgaatgcgggattgagggaggtagcgttgttatagtaaataggtaggatatggcagacacatacaggatcgagaattacaagtatatcagcctgttattgcgaacggaggtgggtaagggcgtatgtaggaatgggtagtactaatattgtggcgggagataaaccgggctgtctcggcctatgcaagtagggataccggtagaaagtataatcgttgttaagttaatttg

SEQ ID NO: 355455 - DNA, 239 bp, Zea mays
cgtctagctatctcgatcgaactggccagttgtgacactccttctttgggggggggggggggcagggacatactagatacagtgagaataggtaaacgaagttaattcggtcttacatcaggcgcaaacgtacaacgtaattcggaattacgcgtcgcgcccggatacggagattgccagttgtaagtaacagtattataaaaaagatagagaaaaaaaagatgattagagagagtttg

SEQ ID NO: 355456 - DNA, 303 bp, Zea mays
tctagctatctcgatcgaactggccagttgtgacactccttctttggggggggggggggggggggggggggggggggggggggggggggggggggggaagtttaagagacggcgaaggtttactttaggaatataagggccgataatacaaggggcctgaaatttagtaagtttgaaacctaaatgggtaggatggccatttaggagttacgaaccataatgaaaaagacccccggtggatgaaccccggtggatggaacccccttacgttgggaaaatagtcgagtaatagggggaatgttt

SEQ ID NO: 355457 - DNA, 155 bp, Zea mays
tctagctatctcgatcgaactgaccagttgcgacactcctatctttgggggggggggggggggggggggggggatacctacaggagggcgaggtgccaagtgctgagcattaggaatgccccgggcatgtatacaatatatatgtgtatagagag

SEQ ID NO: 355458 - DNA, 180 bp, Zea mays
tctagctatctcgatcgaactggccagttgtgacactccttctttgggggggggggggggacaacaaacaagttctccacttgggcaagttaagttcagtcaatctaattaaattgtcaaagccactaatggggaaatgatgataataacgcacaaaaagactcccctcccacccaaaca

SEQ ID NO: 355459 - DNA, 185 bp, Zea mays
tagctatctcgatcgaactggccagttgtgacactccttctttggggggggggggggggggggggggggggggggggtttaaaaagaccaaatagtcaagtggatgtttagccggagtacaattgtctgtaaagaggtggcaaataataatgagtgctacacgtatagtaatggtcatataatag

SEQ ID NO: 355460 - DNA, 242 bp, Zea mays
cgatcgaactggccagttgtgacactccttctttggggggggggggggggggggggggggggccaaatattagctagggcattaagagaggtataggaggaggccccaaattaataccaaaaaggataaccagtttgccgaagaacgccaggattcattcctattacgatattaacaaagatatccccgtctatgtaatgataaattgggggaggattatctggtgaggtacgaaaaaacaa

SEQ ID NO: 355461 - DNA, 243 bp, Zea mays
tgagcatcgtctagctatctcgatcgaactggccagttgtgacactccattctttgggggggggggggggggggggggggggggggggggggggggtgtggttaagctaggggtcgaaagctaaaatactggaaatgatagaggcggaccaagaagagagccttaatattcaaaacgctaattagggatggtcaggataggatatagcctcccttagggtaaagtagggaattaaattatttt

SEQ ID NO: 355462 - DNA, 270 bp, Zea mays
tctagctatctcgatcgaactggccagttgtgacacatccttctttggggggggggggggggggggggggatcgatcagatggaaagagggcagaaagaatggaacgtaatcaacaattcacgcaatgaaaatagccagtgcgggtccaagagataattactgccaataggaaacggggttatccataaggaaaatcccacaacacccggttacaggaacaaatatacatcgggtagtgtgggtaatataaatacgtatgttcgtaatga

SEQ ID NO: 355463 - DNA, 342 bp, Zea mays
gagcatcgtctagctatctcgatcgaactggccagttgtgacactccttctttgggggggggggggggacacagaacggttatggcagggaacgaaaagagagggaatgcgagggcgacgacatactatacagaactagtttcagataattaccgattgattaaaatgctgtggagcatttgaggataaacaggtaccgatcagacggataaaaacgctaatgtaatagcacatggggggggatgcctatgttaacgagagccgtaacgcgtgatataatattgccatggataaaggtaggacttggcatagagtaatgtgaagaagttatagtgcgattta

SEQ ID NO: 355464 - DNA, 268 bp, Zea mays
gtctagctatctcgatcgaactggccagttgtgacacatccttctttgggggggggggggggggggctaccaaaaaggggaagggtcgttaacgcgtggagggtatccggataatgaggagtaccaggggcagactgaagtgaagtgaaggttactattagttttaatttgaaattgtagagcgagagagaaaaatcgaagaacacaacacccaatttttttaatgtgcgtagtgtcacacagtatattgtaggaattaagtggtggg

SEQ ID NO: 355465 - DNA, 306 bp, Zea mays
gtctagctatctcgatcgaactggccagttgtgacacatccttctttggggggggggggggggggggcaggaaagactgtacgctgggaaatttatacaaacgtggggataagacggggctaacttggaagggccgttggggcaaaattcgataaaaatacgaagagtaggaaagattataacatgggacagttataggaacgtggtgataagacgtggctagttagaacacgtttggggcaaaagtgaaatccgaagggtcggggcaaagcagaccgccacccaattaaacggttgaggaaaatg

SEQ ID NO: 355466 - DNA, 287 bp, Zea mays
tgagcatcgtctagctatctcgatcgaactggccagttgtgacactcctgtgtttggggggggggggggggggggcgcgtaaaatccaatagagttagaagggacgagactaaaaaaaaacgcggatgaactgtaagcgacaggcgctatcacgtgaatcaggcgatcctgccctaataaacgaatacacatatggatgcgttacgcgttacttattagcacaacatacgttgaaaagtagttgggtctgtcttgttacaaggaccaaatgaggagcgtagtgttat

SEQ ID NO: 355467 - DNA, 207 bp, Zea mays
gagcatcgtctagctatctcgatcgaactggccagttgtgacactcctatctttggggggggggggggggaacggataacatggcgggggggggttgagggtggcaaggtacccacgttaataatggattaaacgggcaccattcaggtgcgaggggcagaaagaagacgatgggtataacatactgacacgtaggtgatgttgagt

SEQ ID NO: 355468 - DNA, 340 bp, Zea mays
acactgagcatcgtctagctatctcgatcgaactggccagttgtgacactccttctttgggggggggggggggggggggggggggggattcccgttgtgaaagggctgggagggtgtagatagagggtaagccccattgggcgatgtacaccccaatcaacctagttaggtacgacacgggtgcaggactcgtgatcagtaaaagataagaaatttgtatgagtgacaagatagagacaaaaaaaaagaccactaattcgcgtaccgtcacgaaggaatttaaatgattattattatgatcccaaattgaattacggcaatcgcatggcggggggggggg

SEQ ID NO: 355469 - DNA, 174 bp, Zea mays
tgagcatcgtctagctatctcgatcgaactggccagttgtgacactccattctttggggggggggggggggccttgaaggctccagcattgtaataagcaacctattaccagtaaaggtcgactaccaaacgcgcattacatagaggccagggagcgatagctatgcaaataga

SEQ ID NO: 355470 - DNA, 284 bp, Zea mays
tgagcatcgtctagctatctcgatcgaactggccagttgtgacacatcctatctttgggggggggggggggatgatgaaacaggctaacctagtgagggggccgttggcatatggcagatggggagctacaccagacagcagccagtgtcattaagcgatgatgaaacaggcaaacatagggtatgcgggcgtgtatgacacataagtagacagaccagctaccggagtagaggatgccggggcaacgctcaagcatatagcggttgtataaataccatagtga

SEQ ID NO: 355471 - DNA, 248 bp, Zea mays
ctgagcatcgtctagctatctcgatcgaactggccagttgtgacacatccttctttggggggggggggggggggggggcagtagaaaagggaagtataaggtagttctactacgagtaataatacaacgttatatcgtataggtctaaagtctattaattgacttagtcggttatattactaaaatggcttcgtgtaacaatgcataaagaattggactgtactccttagtattactaagtgagtgat

SEQ ID NO: 355472 - DNA, 225 bp, Zea mays
agcatcgtctagctatctcgatcgaactggccagttgtgacactccttctttgggggggggggggggggggggggggggggggggggggggcaaccccatataaaaaggaaaacgggaggataatgaagctcagccgagagtgcagataaccctggaaaccgacgacgtaggtaagaccgtatggaaaatgttatgacaaggctgcctcataacgacgtataaag

SEQ ID NO: 355473 - DNA, 315 bp, Zea mays
tgagcatcgtctagctatctcgatcgaactggccagttgtgacacatccttcatttggggggggggggggggggggggggggggggggcataaggtaatgtcgcagcgtcataacaagacctaaattaggaaccgttactggttaaccacacctagtaaaaactgcggcctaacaattaaagcgtaccaattgaacccacaaccagtgactaatggcgcatactagttctggttgtgaagggcgattagcatgttgttaggcgcgtgtgcgcgtgttacgtgtaggataaataaatacgtagtgtgtgtagataa

SEQ ID NO: 355474 - DNA, 247 bp, Zea mays
cactgagcatcgtctagctatctcgatcgaactggccagttgtgacactccttctttgggggggggggggggggggaagagccaaataggtatcatgtaaaggcgtaaaagaaacgtagcgggattagggtgaggtggctacgaaaaaaactcgggtatacggtagtgagaggagactaacgatagagaaagtggtacagattaaattaaacgttaaagcatacgtcctaatagggggggttagaaa

SEQ ID NO: 355475 - DNA, 183 bp, Zea mays
actgagcatcgtctagctatctcgatcgaactggccagttgtgacactccttctttggggggggggggggggggggggggggggggggggggggaataccaaaaacaaaggcggtggcatacgaaggtaagcaaaagatacatactccgcgcgaacggaataccaaaacaaaaggaaagcggc

SEQ ID NO: 355476 - DNA, 321 bp, Zea mays
actgagcatcgtctagctatctcgatcgaactgaccagttgtgacactccattctttgggggggggggggggaaagaaacattaaagactgtataatagacaagaaagcaaacttaatggggcgcttgacaaaactgaatgaaaaggcgagttgggtgaacataaaaccaagacaaatgaatactacacgggtacccggaacggtagcggatatgtaaaatgggtagccgagcacagccagattatgattagaacgttaataaaacgagtcataccataacagattagtcaacattgcatatggtaaggttaaaatagatt

SEQ ID NO: 355477 - DNA, 218 bp, Zea mays
cgtctagctatctcgatcgaactggccagttgtgacactccttctttggggggggggggggggacggacaatggcctcactccgtatgcagggtaaagaacaccatacatattgacggacaatcggtcaaataaagatacaaagtcaaacgagtaaggccatgataaaatacaccttgaaccatagaagcggatgcatgcgcagataaaagaggatac

SEQ ID NO: 355478 - DNA, 260 bp, Zea mays
gtctagctatctcgatcgaactgaccagttgtgacacatccttctttggggggggggggggggggggggggggggggggggggggccgagcccgggccagagttgggggggggcgaaaatcgaacaccaaaatttactaaacggtaacaagagagaacagaaacagaggcaactaagcatgcccgctatggaccctaagatagcgcaggttggcggtaatggtatattgacgccccattgggccctaatgttgagaagtg

SEQ ID NO: 355479 - DNA, 229 bp, Zea mays
ccagtactaataagagacaatatctcatacatagtcataataaaagtctcaagtatcagaacacaataccatataacagtaggacacttgtgcggatgcttgcatgaaatagctgacgaacctgtggacgtatagagcatagttggaggcggtaataattactaacaaacaacaattggattaattcaaacaacataggcatgtgtgtgcactcctccatgcatgtagc

SEQ ID NO: 355480 - DNA, 209 bp, Zea mays
acccccggggggaacctgggaaaaaaggggcggggtgaagggatccccaaacgggaaacaaaataatcatgaagttacccaagctcaagcccaagggtccaacaaataacctttgaaagggcccccccagatttaagcctgggggccctactttggggaaaaacccaactttcccaaccgcagggggggcaaaaacccattttttgggg

SEQ ID NO: 355481 - DNA, 241 bp, Zea mays
gcgaccttttttttttatttttttttttttacgtacgatacttaaatatttgataaataacttaagacaacgcagaaccgagtgaacttaaacatggactgtatcggtgtatacaaccagctggaacatgaaatgtttccacggacaagtaatactggaaaagagggttccagattaataaacacaggggtattatctctttcatcacaaactagctctccggcaactaatgttattgaca

SEQ ID NO: 355482 - DNA, 407 bp, Zea mays
aggttcggttaaccaaccgggtttcgtagtatgcgagcatcgttgttggtgggcccccccccccccccccaagatgaacaaatagacacgcgacccacaaaactacccacctgtccccagaagacccataagctcaggaaacccgactatagacacacatgcacaaagaaatagcgactgcgaacaagcaaccaacgtccggagccaaaaccaaaagtatagaagctgtgcccctggaagaaggcacaaggagaagtaagccaggaaaagacggcacaagaagaggaggaacactactgagcttgcgacaacggacacactgactacactttgtctaacacacagctttgactaactgcgactgccgcacacagcttcttattgcgatcttatgacttaggttactc

SEQ ID NO: 355483 - DNA, 415 bp, Zea mays
aggtttcccgtcatcactgtatgacgtcctccttctccgcctcttcttcgtctcaacctttgtccgttctccttggtgctactgttgttattggccgtttctattctccgtctttggctttgttaccgtagtactgtttcgtattattacctcagcgtggtttgttttgccttttcctatgcgactcccttttgattttcgctatactactattctcggtgcttgtgccgtcctcaatagtccgttatgttcatacccgtgtcactcaaggttcactgatgatctcgctgctcatcgtagactgtggtgagacgcagtattgaaaggtaaggtatgccttcgtcggggataatcggcgccatgccccaaaatttgcctcggatttaatggaagtcttggctactatagtttttgg

SEQ ID NO: 355484 - DNA, 125 bp, Zea mays
tcgacccatgctggcgtggccgctgttcgccgaccagaggcagaacgcggtgctgctgtgcgacggggtaggggccgcgctacgagtgcccggggccaaggggagggaagacatcgccgcggtgg

SEQ ID NO: 355485 - DNA, 292 bp, Zea mays
accaaactcggtccaaatttgatgcttacaattacatattgccaaccagaatgttaggagcaaattcaggggagccctacgtaatcgctttacaatttgtagaaaacctggaatggacgacaaaaacaggcattctgcctgcgtgcgtgtatccagatgatgatctctgcaatgggtggatgatgatgacccaaacccacattttacattgtcatgtacgggtggggggacagaagttgccgcgtcacccggtcacggtttctggccgacttggagcgtcccaacgccattt

SEQ ID NO: 355486 - DNA, 265 bp, Zea mays
aggtttcccgtcatcactgtatgacgtcctccttctttgggggggggggggggggggggggggggggcggataggcaataagggtttaggtaccggtaagtaagcgagggggtaatatgcgttttggggtgccaggttagaaggatataaagttaatcgaagtttttgggtgactggatgagagtaaataaataaggccagaaagaatgtctgaaagcaagcttcaatgggggcagcatgggaagggtggtcggatggtgtgagg

SEQ ID NO: 355487 - DNA, 126 bp, Zea mays
aggacaccaaacactttttttccctttggaacaacaggcattcaaagaccaaatttaaccaacaggggggtccaggaaaaaaaacatgtcgccctttaaaattaaaccagggggccactttatttg

SEQ ID NO: 355488 - DNA, 128 bp, Zea mays
ccaaggaaggtttcccgtcatcactgtatgacgtcctcgcttctttgggggggggggggggaccaataaatggtgctagtctgtacaaaccgttaaaggagggtataactatacaaaacatttgagta

SEQ ID NO: 355489 - DNA, 354 bp, Zea mays
ggatacaaactagcaatgaaatttgtaactgcatctgcatataccattacatgatcacagcctcctcctgtaaaccgcttataattcatccaaatagacacccagccacacgcaaaaaaaaacaacttattcaactcgtaccacatttacccaagaaaaccgtatctaagcactgctatataccacccgactatccgtgcttacaaactctttattttctctccacctcaccaagagcgctgatcgccagatattcccctcccctggagccggagcgtacacgtgtaactggtcactgtgaatatgctccgtcaggcagagcgactggcctcagctcgccgccccggaggaagc

SEQ ID NO: 355490 - DNA, 100 bp, Zea mays
ggcactgtgtcgatataaaccggttaattccctgataacttttgtagatcaaaccccacattattgacaaggaaaccacttcagtctcagatgagaaaag

SEQ ID NO: 355491 - DNA, 162 bp, Zea mays
gacgaaaaactctgatttatcccgtgtccacacttgagccatccaaggaacgcaaaaatggacggctggggcggaaatggtgaggaggaaccataattgaaaagaaaccaagagaaaagaaagggcaagaatcgcttcagggaagaactctatgcatgtgca

SEQ ID NO: 355492 - DNA, 263 bp, Zea mays
aggtttcccgtcatcactgtatgacgtcctccttctttgggggggggggggggtatggcaattatcttggatgaagtgaggaacggcgggtagccgcacactgccaaaattcaaatgataggggggcaacgagaattttgtttatagaccctttggaaggtaaaggggccccacctggtattagacccaacagggagaggtgccagtgcgtctttgcgtgaggaggatgcccttggttattgaagagcgcagcgggggggagg

SEQ ID NO: 355493 - DNA, 209 bp, Zea mays
tgggggggggggggggggcgctatagtatgggtgtagaaaccgaaaagatgacggcccgtaagactatccgataagatacgttaatacagcgatacgacgccgtaagatgcccccaacaacgaggcccctaacctacaagagggacgagcaaataaggtgtccatggttccgttggaaggacacagaattggaatactatcaatgtcgc

SEQ ID NO: 355494 - DNA, 214 bp, Zea mays
tagaagtttgggtgttgagggtgggcgatacgatatggccaaatactcactaccagtagctcgtgaaagataagtagactagaaataagttttttgaagttggtaaataccttctacctcaacaagataacctaagccaatagtaccatacgtacaaacgtgcgtaataaataattccaaaaagtgatatagccgggttagtgcgaaggtataa

SEQ ID NO: 355495 - DNA, 226 bp, Zea mays
gtcatcactgtatgagtcccctttttgggggggggggggggggggggaattagcaagctcgcgtcagcggcggggccatcacggtgcgtggtgataaccacaggtgcccatatacgttccttaggaggataattaactgactcttgggagttcccctttaaaaaatgaaatgaaatctcaggtacgggctcgctgacgtgctgacacgaagggcgtggccggttag

SEQ ID NO: 355496 - DNA, 189 bp, Zea mays
ggacactaacaggcaattgccgtcagtataaatattgcccggatactggcccggggggggatccaggttcgggagggatacaaacagaaccggtgggaaaaaaaaacaagggtgcaagtcattcaaagctccaggtactcataaggtccttttaggaaacagaaacggggtcaagctcggtttgagcta

SEQ ID NO: 355497 - DNA, 174 bp, Zea mays
tccaaggaaggtttcccgtcatcactgtatgacgtcctcctatctttgggggggggggggggggaggtacgaacggatttcgcgagagagagcgagaagattaggtcttatgtggatatagcgagcgctaggtttgtgcgttgcatactattaataaaataaagagggatagta

SEQ ID NO: 355498 - DNA, 201 bp, Zea mays
gcgggaacgatttttttattacaacagttttaactaaacagtcctagccccgtttttacaaaaactaccaccctggtagggctaactccttttgcaacaagaaactaaactcaagtttcacaagaaaacaaaagcggtaaagtggagcctataacactttagtgtgaaacaagcgaaaatgaacggccccagtcaaaattc

SEQ ID NO: 355499 - DNA, 462 bp, Zea mays
tggctgattcaggttcggttaaccaaccgggtttcgtagtatgcgagcatcgttgttggtgggccccaaacaaaaaaaaaaccccccccccccacctactgtaaccaccttccccacccgcacagtactcgtttgtatagattgattgattaattgaacgcacatcgtgtgcgcatgaagcggtccagaggacttctgtggataaaagagattttattcaatgcaccgggaggaccagcacgcttatcgaaaattcccagggtcgtccccagggctgcttcacactcgacgatgactcgatgaactgattataggcctaccatgataataaaagaaaagatctccgtagcagagccggtccgccgatttctgttagcacttactggcttaagcctaggttgcttagacttgcctaacgtgatttgacgttatgcttttataatgttctccgtccgatcaccc

SEQ ID NO: 355500 - DNA, 146 bp, Zea mays
acccagccctaatctacatgcataaaacagaaaaaaatgtcaggactgttccttgccgagaccaaaggaagaaactatacggttaaaaaaaacagaacctgggtcaagactcaagactgccttggtccgctggccagaggcctggg

SEQ ID NO: 355501 - DNA, 434 bp, Zea mays
acccagccctaatctacatgcataaaacagagaaaaatgtcaagactgttccttgccgagaacaaaagaagaaacaatacagttaaaaaaaaccagaaattgagtcaagactcaagactgccttggtccgctggccagaggctgcgagatcagtcgatcactgctctggcgcggattgaagtcccagcacctgcaccaccccttactaattcacaaaggggcctgctttgtgtaagattcagcaatttctgatgtttagtgtgtaaattattgattttttggcccttatttttttccatggatccaaacatgaccgtaacaggaaggtgtcctgttttcatgaagatgtttccgccatgtcctgatgataccgccctgtttccaccatgtgtaagaagaagaatactgacttgccctgtcttcaggaagatgtt

SEQ ID NO: 355502 - DNA, 201 bp, Zea mays
ggcaacacactggaactggaaatagaccagacgatctttttctcctaggataggctgcaccctgcacacacccaatttaggccactctggtttgggtttaaatctcggaactgcatgcatgaaaatgggggttacacaagttactaggccgcctactttgttcgctacaaaacaagctgtttccaccgccaccggggctcc

SEQ ID NO: 355503 - DNA, 179 bp, Zea mays
agccccgtactactatccccgctaccgtttgccgccgcgctgctcatctggtggcggctcgacttcctccccccatccgccgccgccggatcctcctgtagctccctactgacccctagctttaagctcgtgctacctgcctacctatccgtagggagagagagagagaggggagaagg

SEQ ID NO: 355504 - DNA, 287 bp, Zea mays
acggcgtacaaaataagtgctcatgtttggttcaaaaactatacatcatctcgtattacagataggggtacattgatccaaattcatgatatactgctggtgggagctcacacatcccaaatgctgggataggggtataaactccaatctccaaacaatcctggggggctggtgtgcatgatatttttgattcaacaggctatctgcaccctcgaggaaactgatgtccaccactggagtggaaatggaatcactcctgctgctcttcctcaagttctggttctggc

SEQ ID NO: 355505 - DNA, 264 bp, Zea mays
gggttggggtttaagatctggtcgagggtctgacttgtctggttcgggttggggtttgggatctggttgaagctcgggctgtgggaagggtggttgtggtgttggttttggctcaagtttcggatctggttgcggcgtgggttttggctcaagttgaggcgctagcttgggtctcggctctgggcctggatgaggtgtaggtttgggttctggttttgggtctggttgtggtccaggttttgggtctggttgtggtgtacgttt

SEQ ID NO: 355506 - DNA, 340 bp, Zea mays
aggaaaaacaacccaaatccaaatgggccgaaaacacaattgcaactggggaaatgacaagcttttaaaaaacaggggctaagggttgcccttccggaaaaatttttatttgaccaaacttggggggcccttacaaaaaaactgaacaagagctcaagtccccgacgttttgggtcaaactttttatacaactaccgcataggtggacaggggttactctttactttttttacaactaaagcaaagggggcggggggttgcttggttttggccccccaccaaatggctccccccttataaccggtaccaacgcacctttgggttccatttcctggaaaaa

SEQ ID NO: 355507 - DNA, 260 bp, Zea mays
gggggaaaaacaaccagaatccagatgggccgtaaacccaattgcaattggggaaatgaccagcttttaaaaaacaggggctaagggttgcccttccggaaaaatttttttttgaccaaacttgggggtccctttcaaaaaaactgaacaagagcttaaggcccccactttttgggtcaaacttttttttcaactaccggatagttgggcaggggttactttttactttttttaaaactaaagcattaggggcggggggt

SEQ ID NO: 355508 - DNA, 231 bp, Zea mays
gggatcatccccgaagaccacaccaaatttgtcccaaagacgaaaaaagccagcagcaaaagttgcactggaaattacacacagcactactttatgtactccactccaacgccaccccatttaagtgggcacctttttttttttttttttcgacgggttttatgcaagcatgaactcccctttttttccaaccaagccctacacgggggaacaaactgttaccaccgtttt

SEQ ID NO: 355509 - DNA, 416 bp, Zea mays
aaagcaagtatgtctttatttgtaagcatattactgaaacgatcaaatgaacagaagtggataaacgtcgagtcacttggctgagatcatacgcatcttccgtactgcttgtattaggatgcaagattgaatgtgtcttttttttaaaaatgcagccttgtgttgcactctgaaataagtgatttaaaaagaaaaacatgatacagagatcccatcctgaccttggaggcttggataaagctgtggggagacagcctcatggtccagccaggctagtctgcctgcttcaggactctcaagatctccccaagactttcaggatcagctgctgttaatcaaacaagtgcttataaaaatggaaattgggacaaaggaaatgttaaatttcctccctgcaaccaggcagatgagaaata

SEQ ID NO: 355510 - DNA, 179 bp, Zea mays
gggaatgcaacgagatgtggtttttccaatgaattggcagaagacacaaccgccttttaacattaaagaacaagagagttacagggggatctacctacacttctttgggctgccgcaacaactttatgtcatgtgtgacacgtagctaactcacgggactttcatcttttttttttttc

SEQ ID NO: 355511 - DNA, 243 bp, Zea mays
cccaaggacaaaaaacccccttatttttatcccattggcccctaaagggcaaaaaccagtttggcccttttaaaacctaaatttaaataaaaaagggggcctaaaaatttgtccctttaacccaacccccccttaaatgggcaaaaaaaattggttcagcaaaattttttgaatgggcccaaggcccctggggggcccccttttggccttttttcctgggggacccaaaaaaaagcttttttt

SEQ ID NO: 355512 - DNA, 226 bp, Zea mays
ggccccggcccgccattttttagggcacctgagggggcattgccactctattatcctgcagaggtccactatatcctccatgtctgttacaacatgcagggatgctaacttaccacaaaattataagctatatgggaagggtggaactgcaaacccacctgctcagtccaacccacgaataacagggcaaacgggtgaccaccagatggaaccaactgaataggac

SEQ ID NO: 355513 - DNA, 256 bp, Zea mays
tttttttttttttttttttttttttttttttttttttttttttttttttttttttttttccttccgcccaatcaaataaaaacctcacatgaacagattaatccgatggtttccaaataaattttccttcccagggaaaacccggaaagggggaaaagccccatgttcccaagcttggggaacatgggtggacgatgaaccccgcaagaacccccccaggaaacggggggccttcgttttttcataatttaacaag

SEQ ID NO: 355514 - DNA, 114 bp, Zea mays
aaacacaaatccctgcttataaattttaaatccggcacgagacggacatgaccgggggccctttacaaatgaacatgaaccccaggggcgaccctggttcgataaggggggggg

SEQ ID NO: 355515 - DNA, 185 bp, Zea mays
ctttttctcgcgtgtggttcagacttccgtcttcttcctcgaccgctaaccttaccggtccccaaatgttgcctctcgtgctgctgctcctcgcgcacctactcgtcacggacactgaagcgggagcagcgcggaccatggaccacgggcctcctgctacgtcgtcgtcgtccccgcgggtgccg

SEQ ID NO: 355516 - DNA, 312 bp, Zea mays
aaaaaaacacggaaccaacccaaatagaagcccttcacgccagtaataaggatagccacacgtgtttttacataaataatgactggttttggcccggacgaacatagcagcatgaataaaaaggttggcacacactaggggaaaagaaccttgattacctacataagatggacattggtttggcctccatttcattccgggcaggcaggcaatatacacctaaaaacccggacaggaatgatgagcctgggagcgtgttacttaccgcgttttggacggaggcaaacgaatcgatccctttctttgtgaacc

SEQ ID NO: 355517 - DNA, 172 bp, Zea mays
gtttttgtttttttttttcacaagtgcattatgcacaagcataatactcacaagtgcactgtgcatagaataacagtggcgcatctgtgccacactcacacgactacacgagaacattcaaacacacgccgggacaccatcgtatagtagtagcagaacacgagtaatgcac

SEQ ID NO: 355518 - DNA, 230 bp, Zea mays
cccccaaaaaatgggacataattgattccccctgctaacaaaagcagagcagggtacatacccttttcaccggggcccaaagggcccaacaaaaaaaagcagggctttattttggggggtggacatccaaaacaaggggcccttttcgttgttaaattagaaggctttcgggtacagccggtttccaatttgcaaaaacttggggggggggggcccgtaaaaaacccctt

SEQ ID NO: 355519 - DNA, 221 bp, Zea mays
gattattgttgtttttttttttttctttactacttttcgggttccccccacggcaaaggatgcgaaaagaagccgggcccctaacggcgagcttgggtacccaccatacccgccggggaaccagggcgccgatggctacgccggcatcggcgagttacagtgctacgacaaggacatgctggcccggctgaagcggcacgccgagttgtcggggcagccac

SEQ ID NO: 355520 - DNA, 259 bp, Zea mays
ggaaaaggaaaatttagggatcaccttttttttttactcaacaattttttaaggttacatatggctccaattgcccttttaccctcccttacttattagaggagaaacccttttttttatcaatgccgccccgtgtacattgtactgaaaataaaatcggtatttcgagccctttattatgctcgagtaacttgttcggcgccggttttttcccaaacggggtattttttgccgggggcgggaacctaaaaaccccccg

SEQ ID NO: 355521 - DNA, 371 bp, Zea mays
ggctgattcaggttcggttaaccaaccgggtttcgtagtatgcgagcatcgttgttggtgggccccccccccccccctcgctaagaatcattcttacgtaatgaagcgtgagctgattggagagacagacaacacatatcagcagatcagatcacacacacatacgtacagctgactgctgcggcttgaacagatgttgcccaccccacccgccgggcttgccgacgagcgtctgatgtgtgtttagtcagtctcagtccgttcattgccaccatgccttcgtcgtcaagccatgctacgcctcctgatcgttcttagactgctacttttaacggtagttatagtggtgagcctggttttacttcttgtag

SEQ ID NO: 355522 - DNA, 109 bp, Zea mays
gccgtccattactcaatcgcgcccagtgggtcccatggcgagctcgccgggacgccatgctccagccgacttccctccacggcttctccctgcttctgctcggagctcc

SEQ ID NO: 355523 - DNA, 252 bp, Zea mays
ggcgctccttcctcaatcgcgcccagcggctccctatggcgagctcgtcagggatgccatgctccagccaacttccctccccgtcttctccctgcttctgctcggacctccagctcagctctctccgtgcgtccgcgacctttgccgtagggctccctcctacgcgcgctggacgccgggttatcttcaatctccagccgtggatgtcctgacgcggaccttcgttttcccgtgcgcgcgtctcatctccat

SEQ ID NO: 355524 - DNA, 426 bp, Zea mays
gctgattcaggttcggttaaccaaccgggtttcgtagtatgcgagcatcgttgttggtgggccccccccccccccccccccccccccccccccccccccccttaaatgaatgaagataggccataccgggagtgtggggcccgtataaaacttaaggagcggatccatccgactaatagagatgacccacctcccgctctttgacgtgacccgctcccctcacagaccaccacctgatgagaaacaataaaagctatctcttgattggacacccgagagagcgaagcgatggcgttggggcaacttgcgtaaaagctaccgtaggcgttggactcccagccgccggatatcttgcttaccggagccgttaccgcttcggcctcgaagcaaaagatgagtgagaggccgaagaaaacgtcccgcaac

SEQ ID NO: 355525 - DNA, 223 bp, Zea mays
gttcggttaaccaaccgggtttcgtagtatgcgagcatcgttgttggtgggcccccccccccccccccccccggagtaccccccgccccctccccccccccccccccctcgaccccccccttatgaaagtctagagggtctcacctacccttcccgccttaattccaaaatctaactcttgctcagacctgtaagagaaaccggaccccgaagctaagcgcgc

SEQ ID NO: 355526 - DNA, 265 bp, Zea mays
ggctgattcaggttcggttaaccaaccgggtttcgtagtatgcgagcatcgttgttggtgggccccccccccccccccatattatgaagattatgcacactcggaccttaaggaatacttactgaactcagagtcagtgagtgagagagtccagaaatcgaggaggctgaggctggttggttgttgtgtacgtattgctgctatcgctacgccaagaagttgtagtcatttacgcatggtactacgcttcgtatttgtggttctc

SEQ ID NO: 355527 - DNA, 234 bp, Zea mays
gcttcagtggctgattcaggttcggttaaccaaccgggtttcgtagtatgcgagcatcgttgttggtgggcccccccccccccccccccccccccccccccccccccccccttgacaagagtgactgaccataccgtggagccattacggacgaagacacctgctgatctcgcgatccgcgaaacgatcggggatccgaatgtccagaaaccacagatgcgattccgaaatttt

SEQ ID NO: 355528 - DNA, 311 bp, Zea mays
tggctgattcaggttcggttaaccaaccgggtttcgtagtatgcgagcatcgttgttggtgggccccccccccccccccctaggaatcagcggcaaaccccaagacacgaactataacggaatatactgaactcagataagagacgcagatatttagatagaccgcggatggcccgaccggggagaccccgtcggcgggctgggcgacgaagaaggacggacgagagaactggaccacagccgcgggacgcagctcgagaaaaagaatgcgagcccttcccgaaggaaagaaaactcataactgtaagggg

SEQ ID NO: 355529 - DNA, 231 bp, Zea mays
attgcttcagtggctgattcaggttcggttaaccaaccgggtttcgtagtatgcgagcatcgttgttggtgggcccccccccccccccccacggagtaccgatcgccacctccccacgcactgaatcctagacaacccgagagggacagaaagaagccccccgaaatttcgacaagacagacccacaaatgcgcgccgattcaacgccctatccggccagccgccgccgaa

SEQ ID NO: 355530 - DNA, 246 bp, Zea mays
tggctgattcaggttcggttaaccaaccgggtttcgtagtatgcgagcatcgttgttggtgggcccccccccccccccccatcgcgagaacaatcagaaaacacacttaggaggcaagagaccttcttcgaaagacttctgaaactagcgacggccgggccaccgtggccatgctactcgcgatgttgctcaccattagaattccgctaccaactaccacctatgaagacgagcggagtatcgatc

SEQ ID NO: 355531 - DNA, 381 bp, Zea mays
ggctgattcaggttcggttaaccaaccgggtttcgtagtatgcgagcatcgttgttggtgggcccccccccccccccaactaaaagacggccttgaaactgcccgtgatcctccgtcgcccgacaaacggaataacccgaggcgctagcactaaacagtaactgggggtagctcgggcaccaacgaccagcggtacgggtaattggaagagaacattaggttaacggcactactccacgggactgcaactcacggatatgtacttgcctgccctatgagcgcaacccgccgaaatcaagttgtggttattgagtagggttggatccaattggattatgtgacgtggttgataatttcgtatggttcgttccgcgtggtcta

SEQ ID NO: 355532 - DNA, 234 bp, Zea mays
gttcggttacaaccgggtttcgtgtatgcgagcatcgttgttggtgggcccccccccccccccacgacgacttctaagcactgctagtatgcgaaaacggagactcgaaccgatgaggattgaatacccgcgactttgtgaataacgatctaacacctgatgaatatacgatgagggcttaatctagctatagtagtctcgataacgatttgaactgctgattcatatgctagt

SEQ ID NO: 355533 - DNA, 286 bp, Zea mays
agcccagccgaattacaacgggcagggggtcaaaattaaacaaacccaggacacaaaatccaaaccggccgggaactttggactggggacccaaaaaaaaacccgggcggcccacggtctacacaagggggaacacttacgggcaggcacgggaacccccttaaaaaggccacgggccttggccaggggatccaccttgaaacaaacttttgggaaaaggaaaccagaaccgaacccacatggcaacggttggtaccttttgaacgcccaagggccgggcacgggc

SEQ ID NO: 355534 - DNA, 343 bp, Zea mays
aggttcggttaaccaaccgggtttcgtagtatgcgagcatcgttgttggtgcgcccaagcgccctcacaagcggtttcacaaaccttgtatgcgccgtcgtagacgccctcgtattaggatataaaagagtttctgaccctctcacagatcttgtatgtaggaccatggaacctacaaaaattggcccgtttcgtaaactagcttgaacagctcagacttcgctagactgagctactacgataggagttctgactactaacctgggcaacccttgctaggtgcctcaatatccagtgggtctggaaagcatcatgccttcaactcttcttaagctgtctactg

SEQ ID NO: 355535 - DNA, 355 bp, Zea mays
ggctgattcaggttcggttaaccaaccgggtttcgtagtatgcgagcatcgttgttggtggcccccccccccccccccccccccagcggaacgcacacttacctattaatcccgaacccgcatcagacgaaacgcggcggaacgcacacgaacgcgcgggaacagacactaacctaaaacaaggtaagaatgggcaaaacaccccttgggcgcgatcggggcggaccagcgcgaaagaatgctcgcaagacagaaaaccttagtggaagccccactagatgcgccacactaacaaccaccggagggcggccggagactaaagattaccacgcagctaagatctgaggaacgcatg

SEQ ID NO: 355536 - DNA, 216 bp, Zea mays
gttcggttaaccaaccgggtttcgtagtatgcgagcatcgttgttggtgggccccccccccccccccccccaccacttagcggcgagcttcaccgagacgagcacataagtcacaagaatctcgaaggaacgagaaatacctcgacgaatccacgctgaacggggcacggtactaagaagaaattggcagacgcttgcggaacagctcatcatttg

SEQ ID NO: 355537 - DNA, 326 bp, Zea mays
ctgattcaggttcggttaaccaaccgggtttcgtagtatgcgagcatcgttgttggtggcccccccccccccccccctgaaaaaaaagagccacaaatcaatacccaatacaatatacaatatctatcaatatagaccaagagaagcgcctgagaatggcctaatacatcaagagaagcggcagagaatgacgctcctgccgagccctggtcaccagccggcggtccgccccccaccctcgactccccatccgaaaaacaaagcatgttagttgaaacaccgtataacttattcatcacctgacgggccttcatccttcactgcct

SEQ ID NO: 355538 - DNA, 448 bp, Zea mays
tggctgattcaggttcggttaaccaaccgggtttcgtagtatgcgagcatcgttgttggtggtggtggatgataagtggtcgacttgcggacgttgctgagtggaaaatttttcgcacggccggggcgggaggcgaagacctagtaggcggcgcagtttttggtagattggaacagcgggggcgggggcgggcgtggggctggaggccgccgccggaactacgagaagtaggcgtcgtcctcctcgatttatcgtggcagaaattggtggtgcaatgggaatggtggttgttgttgcgatgtcggtggggtgaagggccgtgtaggaaagggcatgcgcatgaaccggcgtgatggtggtggtgaaggagatgccgatgcgtcctggtctacgcggtactcgccgtgttcgggtcggcggtggggtggtttggggggttgggggaaat

SEQ ID NO: 355539 - DNA, 262 bp, Zea mays
gttcggttaaccaaccgggtttcgtagtatgcgagcatcgttgttggtgggcccccccccccccccccccccccccaccacaaatatgaaattacccaaacatgcatcaagctccgctcaacagcaaaggctccaaaactcgacgcaacccctgcatccgttctagaacccggaggtcgaccgagtcaatacgcgcacagcagctcaccactcacacaccccccgcccgaaacgtctcgtcgaccacactgaagagcgcccc

SEQ ID NO: 355540 - DNA, 303 bp, Zea mays
gttcggttaaccaaccgggtttcgtagtatgcgagcatcgttgttggtgggccccccccccccccccccccccccccctaggcgaaaaacggagattcccacctacccgccccctagatcaggaacaaaaaaagaatggagctcgagcgtcaccaaggacgcatatccgccgtaactcggtaagctagataaccgcgatctgaaaagaaaaaaaaaaacctccctacaaattgtacggaggatgcacaagatagcaatcttggcgccagaaccaacaccgatacaaggaagaagggatgaaga

SEQ ID NO: 355541 - DNA, 329 bp, Zea mays
gctgattcaggttcggttaaccaaccgggtttcgtagtatgcgagcatcgttgttggtgggccccccccccccccccttctgaaaataagacctcgccgcctgcgaaggatcaaggatcatagaattgagtaaaacggccaaacacgcccgaaaacggaatggaattgaagaaaactctgcagcagcgttcattaatctaccagcactgctacttgggagaagcccgccaaaggcctaaggggagttgctccggcggctggagtatggccgcgtaagccggccgggccttatgtgagacacttgccttctcttgctctgttgagcggat

SEQ ID NO: 355542 - DNA, 278 bp, Zea mays
gctgattcaggttcggttaaccaaccgggtttcgtagtatgcgagcatcgttgttggtgggccccccccccccccccccacaatggataggtgtgagaccaccccccaaaagtgcttcttcagccaatcgtctactatgttaagaatctgcgagtataattcgtcaaacttctaaagacggaatgacggtatgacgacgtaccggaccccccccgaactgcagactggctaagggggtggttcaagaatctcataaaggataatttgacaaaaatata

SEQ ID NO: 355543 - DNA, 237 bp, Zea mays
ggctgattcaggttcggttaaccaaccgggtttcgtagtatgcgagcatcgttgttggtgggccccccccccccccccctgatcttcaaaatgcgccataagacgaggatgacgagcaagaaatgttaatgttcaatggcccgatccgggttgcccgggatcccgatggagagtaacccagattggaagattgaagatggaagtgctgctgcttaatgagtgtatctgacgtccttc

SEQ ID NO: 355544 - DNA, 237 bp, Zea mays
gttcggttaaccaaccgggtttcgtagtatgcgagcatcgttgttggtgggccccccccccccccctaataacagatacgtatggagcatctcacacacactcgtacccgggccctagtttgatgaaatgcccaccccgagataattagactcacagaaagcagactgcacctagttctagactgaggttgagactgtgatctaaaacgagaaatgtgaactgttatggacccctgc

SEQ ID NO: 355545 - DNA, 181 bp, Zea mays
aatacaagaacaagggtattacactttggccatacaaatggcgcagaatttgtatgcctgtataatttgattactgctaaaataacacatctgagttcatttccaagagaaatggcaaaaaaaaatcaagagtctgcaagtgacagctcttttgttagttaggtgggtggggcgactacca

SEQ ID NO: 355546 - DNA, 220 bp, Zea mays
agacaaagtgtgtcgtagttagccatgaaccaaccagcctgtaatgtttactacagtcgctcgcaccacgtggtgctgccagcttatcggttccaaccaactacacaactgccgcgtcagccgctactgtttcttttgtacagccaaaacggatagagcactggcgtctccggcaatctgcaacacacgccaggaaaaaaaaagaggctaaaattttgct

SEQ ID NO: 355547 - DNA, 325 bp, Zea mays
  unsure (1)..(325): unsure at all n locations
gctgattcaggttcggttaaccaaccgggtttcgtagtatgcgagcatcgttgttggtgggcccccccccccccccccccccatagaaatctctcgtcatccatggactaaggaaggatggctcaactcccagcagatcgtgcgtgaggagtcttctgctggatgccacgttccggaaggaagcagagaagctggtgtcgatggtgcagctcccgcccctcagatggaaaangttacatatgagcttgtcgcggtttgaacgctgaagagagtggattaaaaaaaaatattgcaaaacccctgctctatgctttaggaggaaatc

SEQ ID NO: 355548 - DNA, 273 bp, Zea mays
gttcggttaaccaaccgggtttcgtagtatgcgagcatcgttgttggtgggcccccccccccccccaagacacccgcccctgaccaagcccccggcaccagatccggcaccgaagacggggaaccctacagcaggtaacccttcagaagatactaacgaggggtgaaatcgtactgcgagcttgcgaaacccagatcctatttaatgaatcagtgttccacccgatgcaccgattacggtagtatggggcctctcgtctgtcaatgaagaact

SEQ ID NO: 355549 - DNA, 336 bp, Zea mays
gttcggttaaccaaccgggtttcgtagtatgcgagcatcgttgttggtgggcccccccccccccccccccccccccaactaacctcagaacacaacgacagatgatcacttgagaaggagctaagactcttccgatcgcaaaataactttaataagaagtacagactagctctctcaaataacagaccctggatccctacttttatagccagataataatgtcagaaaaggaaaaccaagctacggtcttgaagaaaacgggagcttgaactattacggaaaatacgaaacagaggaaaagtacgtttaaaccagaacgacgaactaggcacacta

SEQ ID NO: 355550 - DNA, 231 bp, Zea mays
aatattaaaatatttattaaaagattttttataaaaaaaatctctagctgtccagggacacgtacatgatgcaagtcagcatgtggcggcagctggcgagcggtgacaccatacttatcttcaacattattatttttttgtttagcaggcacttataagacgataacgcgtggtccatctgcatcccagtatgaaattttaccgagtgtttcgtagaaaagcaggatgctc

SEQ ID NO: 355551 - DNA, 230 bp, Zea mays
gttcggttaaccaaccgggtttcgtagtatgcgagcatcgttgttggtgggccccccccccccccccttttttaacaacgtacgggccttgatgatacaccacagtgagagacttctacctactaccagattttggttttaaaccaattatagggggagtgagtgagagtaagtgtagtgatgctgactgcttaagaaaatgtaggtagtataggtttggaggttgagaa

SEQ ID NO: 355552 - DNA, 319 bp, Zea mays
gttcggttaaccaaccgggtttcgtagtatgcgagcatcgttgttggtgggcccccccccccccccacaaaaaacgacaccgccctacacacacgcttcgctaaaaatacccttccgccgattaatctatgactatgcagggtcctgaatgctggatctcctccgttccccgacagcggagagcgagatatatatacgtctggcggcgcggcaccactcactcatctttagaggtcatatgttagttaatatttgaagaagaaaaaaaaaaaatcctgagggagacacacgacgtctgttgttccaccctgatgtctac

SEQ ID NO: 355553 - DNA, 336 bp, Zea mays
gttcggttaaccaaccgggtttcgtagtatgcgagcatcgttgttggtgggcccccccccccccccccccctgctaaagaccccacataaaaggtgacgtactataacaataaaagcttactgatcaccataaacagaagagtattgcaactcaaaaaacatcgaatggccccaacgaatataaccttggattcagagtctaactcaacgccccggcccgaaatcgaacgagcccgccaagtgtccgaccctgctgatgctccggcggaccaagaccccgattgattcagttagctgtcagagtaaggcggccgaccagttgaactcgatcgcctc

SEQ ID NO: 355554 - DNA, 218 bp, Zea mays
ggctgattcaggttcggttaaccaaccgggtttcgtagtatgcgagcatcgttgttggtgggccccccccccccccccccccccccctaagtctagcagtctatcctgaagcctgaagaacagggatacccccacaaaacctcgcctcacatcagcaggcactcagacaaattgtcgatggagacagaccagagttaatcgacaccctcatctgatca

SEQ ID NO: 355555 - DNA, 341 bp, Zea mays
tgcttagtggctgattcaggttcggttaaccaaccgggtttcgtagtatgcgagcatcgttgttggtgggccccccccccccccccatttactgaaaatgaaaaacacaccgctcatgacccaaatgattgatgacaagaccagtccgaatactgagaaaagcagatcgttagtccgcactcagaagagctgaccacaaactcattaagtatgaattgaaggtagcgcagcggtcagaagaccgcggaatctgcgctaccgcttgtctaatgtcttaagctgacgcgtcttaccgccccgcctttacgagtaccgtccgccggccgggactcgctgacgcc

SEQ ID NO: 355556 - DNA, 363 bp, Zea mays
ggctgattcaggttcggttaaccaaccgggtttcgtagtatgcgagcatcgttgttggtgcgtgtacgcataagtaatggatcattgctttatagcgttcgctggacctgagcgcgctcatgcgtctgctcctggccgacggagcgaaggaactgctgatgccgggacttgaagacgatgcggcggaagtccgccgcgaggatcaagcagtatttagcctcgcgataagagttggcgaaaagcgcctcgatcacgggaagtccagcctgctagaagaagacctgagaaaattactactctcagatccccttgtcgacagctgcctatactgcgagaatgaatcgaggaacgtcgagatagtat

SEQ ID NO: 355557 - DNA, 318 bp, Zea mays
gctgattcaggttcggttaaccaaccgggtttcgtagtatgcgagcatcgttgttggtgggccccccccccccccccccccccccccccccccccccccccccccccccccccccccccccccccatgaaacctcactcacacacacaacatcacactcccaccgcggtttgagatgagatgaaccgtaatagataaatttgtgacgtaatgtgggcacggacggcatcatcagacctagccgagatgattcattgcgcctccaccggcctacacgcggacgaggcttaagaacacgacgtgcagcagagatgaggaa

SEQ ID NO: 355558 - DNA, 333 bp, Zea mays
ttcggttaaccaaccgggtttcgtagtatgcgagcatcgttgttggtgggccccccccccccccccccccccccccccccaataagattgagctgacaaacctaattaaataactacccggacgtcgcaagcatgcaagcccctcagatcccggtacaccagaccgagtagagttaaacttgcgcaaaagcaggggcgaaaaagttgcttgaggatgcgaatatggacgaggacgagcggcctctggccgcggggagcaggggacgcgccgcgggacccgacggtaacccacttggcgacgacacacacgagcggcctctggccgcggcgggc

SEQ ID NO: 355559 - DNA, 236 bp, Zea mays
ggctgattcaggttcggttaaccaaccgggtttcgtagtatgcgagcatcgttgttggtgggcccccccccccccccccagagaaactagtctttgtgaggatacttaatgccctgtgggctgcccaacacacattaatcacacacccctagatgatacatactaaggaatgatcgactagcgactagagcataacttaactttacttctccgtctgacgagtgtcgttgtatgcc

SEQ ID NO: 355560 - DNA, 294 bp, Zea mays
gttcggttaaccaaccgggtttcgtagtatgcgagcatcgttgttggtgggccccccccccccccccattttaaaaagttaacacacacaaacagacggccctccgctgctcaacatacagcagaatcttatcgacactgaacagaaactgagtacccccggactatgatatcatcagaacgtgacaccaggacttgactggactacgaacgtctgacgagaacgaatggacatgacaaagactcagcggtcgggttcccggccgagcctaagacttatactcgaaagagagtt

SEQ ID NO: 355561 - DNA, 292 bp, Zea mays
accagggtacagacgtgctcctccttctcccctccccttgtccacagcccccgtagaccatggaagaagcatggattgaacatctacatggttctaaaacataaaagctgcacgaagatggatagtgagaacaaagcttctcaagaagcattcatattcgtagtgcctttactgacctccttagtggtcagctgtagtgcgcacaaaccggcaagtaacaatacggcaatggcggactcaattaggagtcgtccttattactttctttaccccttttccccttctcgttctg

SEQ ID NO: 355562 - DNA, 347 bp, Zea mays
gctgattcaggttcggttaaccaaccgggtttcgtagtatgcgagcatcgttgttggtgggcccccccccccccccccccccacgccaagcaccccacacgtcaccaaacatatagccacacaaatacagacttacgaatggggatggagatatttctcatacggtggagctctggtacgtactgtcagtgacatcgactcggcccctcatcccctcgccttgagagtcagtaaaagctatcgctctcttcagcagactagtatcctagtagcagcggcatgcatgatgcctccgtgctgttgcctgctgttgctgaacggttgctgtttgctgttgccgcagatca

SEQ ID NO: 355563 - DNA, 289 bp, Zea mays
gctgattcaggttcggttaaccaaccgggtttcgtagtatgcgagcatcgttgttggtgggcccccccccccccccgagtaccggaaagactcacttaggaagaacaagaaaatccctgagttcgagatcccaggtatctgcagacgaagaccgaggaagcttccaatttgaaagaaaacaattcccagatgcttgggatttggactatgctggccttcccgcaggtcgcgccgatcagagacaattgattacggcggagttgagtatgcctgatcagcgctgggatac

SEQ ID NO: 355564 - DNA, 264 bp, Zea mays
gttcggttaaccaaccgggtttcgtagtatgcgagcatcgttgttggtgggccccccccccccccccgacctaagccttggccaacccaaccagaagtagacacatgaaacacgcgcttgcgtgggtttccggcagtcagcaggaacatataccatatccccacacatagctaaaggctccttgcctttcggcatggcccgaagtatactcacggacccgcaacgacggagcgtataccgggaacttcctccttgaccgccttg

SEQ ID NO: 355565 - DNA, 186 bp, Zea mays
ggtaagttaattcgctacaaatcaatttggattttggtacaaggtacaaggtacaagtacactacagtacagatgagttggtggagcttattgctgctatagcttgctagtagctccagagcgcgacgtcagctccggagtcgcagtagtcaccatgatcccaggcggcgggcggcgcggtggcgg

SEQ ID NO: 355566 - DNA, 376 bp, Zea mays
ctgattcaggttcggttaaccaaccgggtttcgtagtatgcgagcatcgttgttggtgggccccccccccccccccccccccccccccccccccccccccccccccccccccccccccccccccctaagcaaagaggaaatatccttgacctctacgaagatacgagggcgcatacggagaaagtcggcggaagaaaaaatgatgcactagaacagaacgcatcagactccatccggcgtcgcatacacacatacctgaacgcagaaaatagaactaaacgcacgtgaaagggctgaaggaagactacattttgaacttcagcctcgcaaaatctgctcggccgagcgtcgacgccgcaaatgacggcgacgccga

SEQ ID NO: 355567 - DNA, 324 bp, Zea mays
gttcggttaaccaaccgggtttcgtagtatgcgagcatcgttgttggtgggccccccccccccccccttgtgaaaacgaacggaacccaccggcgacgtatacagtcttaatagcttttactcgcgtatgcggacgttcagatcactccgggtaaaagtcgtcaaaatacaaatctatggcttcgccttccgatgcttatttagactaagggcctgggtcgtcataataacgttatgcctcggcctcccttacttaatagcggcgcggactggccttaaggtggcggtgcgtctaaacagcttatcttagctcgcgctgctgca

SEQ ID NO: 355568 - DNA, 425 bp, Zea mays
caataactatgaaatcttaagtgaaatcttcataccaagcctaaaccttaagtcacctataacatgttgtaactataagataaagataagataaaaataattacatacaacgaagcttacagggcctctagttttttaaatgaaggccaaaatgtgtatacccctaactggagaaaatatgttctgaagaggagctcatacaacggagcttaggagcctctagttcttcaacaatgggaagatggggatggtcctccttgagatgacatggttgattaggtaaaggagttagacagattggagatggaacattatccttggcaatggtgcattgaaaaggtaagaatgggctccttgagattccccatgtcaagacaattgcaattgcgaatccaacaccaaatcctaaaccagtaaaaaggaat

SEQ ID NO: 355569 - DNA, 367 bp, Zea mays
gttcggttaaccaaccgggtttcgtagtatgcgagcatcgttgttggtgggccccccccccccccccaaagaaatttgctttcctgctagggctgggtacctaacctttggcttaactaaggattcggcagaatagatcgaccgttcgacgcgcgcttgcggcatcaggggaacacaccgatacattaggactagattaccgaggtgcaacgcccggaccgaagacataacaaaataaaaaaaagaacgcgaagaaagcttgagaagggaaaaatcaccggtatcgaaggaacaaatgatttgattgcagatgccgtttggaagagttgggtgttgaagctgctattgatgcgacttaagctgcaga

SEQ ID NO: 355570 - DNA, 261 bp, Zea mays
aaaaaaaaggacatgactttttttttttccccctccccaaaagagggggaccggataaaacccccccccattgttttccaaattttccttacagggggctttcctcccttcatttccaaaaagcaaagattttcccccctttggcccgaaataaaaaacagcagcgggcgggggggttcctggccccccggaaacaaaacagggggttttgggggggaacaaaattggaacggggcccattttcgggggcgtccgggggga

SEQ ID NO: 355571 - DNA, 393 bp, Zea mays
ctcgagccgtgaccttctactggggcaagtcggccacgatcctgttcgacggctggcgcacctgcacgtggcccgactaccttctctccctcgcggccctgctcctcgccgccgctttctaccagtacctcgaggccctgcgggtccgcgtgaagctcgtcgcaggaggaggcgccaagccagccccctcctccatcatcccgccaccggccggctccgacccgcggacgccgcttctcgcgcccgccttcgcggccggcgccgggcgctggccggcgcgcctggccgtggccgcgatgttcggggtcaactccggcctcggctacctgctcatgctcgccgtcatgtcgttcaacggcggcgtgtttgtcgccgtcgtcgtgggcctcgcgc

SEQ ID NO: 355572 - DNA, 270 bp, Zea mays
ggatgatataacctgaatttttttactgggatttgtaaacaagtctggttcatatttaatcttaaaagaactggatatacccttttacaacaaaagggaaccgaaatttttggacttgtactcacagtcatagggacaggttgctacagagtacaactcataaaagacccaataaaggacaggccttttttttccagggatcagatctaagcttgaatttttccaacaggtatggctatgcttaactcgggtcgtccttccgttttttta

SEQ ID NO: 355573 - DNA, 266 bp, Zea mays
tggctgattcaggttcggttaaccaaccgggtttcgtagtatgcgagcatcgttgttggtgggcccccccccccccccccacttatgacgctaaaataatcctacaccttcgagaaagtaagatgctgcaccgatagcatccatacgattattaagataccttactaatgcatatcccagaataacgacacctgcggactttcgctaccagtatagatgtatgaacaggatctacccttgattcattaccattaacaggactggag

SEQ ID NO: 355574 - DNA, 372 bp, Zea mays
aaggtttcccgtcatcactgtatgacgtcctccttctttggggggggggggggggggggggggcaactaaagatctactaaagagtgggcgagggccaccaataaaggtgccagttacgagagccccggtaaacataatgcaccaggtgcaaggagcaaaaccccaccaaaacaaatgaaatccgtttaaaaggactaacaacccggacacatacgagattttgggatatgggatacccccggtgatgttggtacgagaatgtgaagttgcgtggtacaataccaatagggtttatagcggttgtggccgttcacaagtcagtcataaacacaatggccgattaatggacgatatttagtggaagaaataaa

SEQ ID NO: 355575 - DNA, 317 bp, Zea mays
ggctgattcaggttcggttaaccaaccgggtttcgtagtatgcgagcatcgttgttggtggtgagcctgtgtgccgtcgtatgttatcttctggggacgctcggtcttctaagagtgcttgtggttggcgtagtatgacgccttgtactattcatattgggcgttgttgttgtactcttatgttgtctgttcttcgtcatcgggctgatccctttcgttgtggtcattggatttgtgtggttactaatcggtatcgggggccttgaagctggtctgagattcttgctggttgtccgcctattgcgatgccgtgaggg

SEQ ID NO: 355576 - DNA, 333 bp, Zea mays
gttcggttaaccaaccgggtttcgtagtatgcgagcatcgttgttggtgggcccccccccccccccccccccagcccgtgaggattaataacaaccagaaagaccagatttacaaaacagactttcctggacgcgaagttgactccgtacagatcttaggcaagatgactaatgaggactgaaataccattcgtctgctggaaaagcgattcccggcgcacaggatgacgcaaggtacacgatgcctggaaagtttaacgaaaccagcacctaacgaaaacaaaaagaaaaaacctggctaaacttgaaatgctcttagggaaaaaccgacgc

SEQ ID NO: 355577 - DNA, 153 bp, Zea mays
aggttcccgtcatcactgtatgacgtcctccttctgacacctggactcgtcaccaacaccacccaactcctcgcttatagcggcacgcactacatcctcctgactatgactatgactcctccgtcctcgtcactcgtaccataccgcctgcta

SEQ ID NO: 355578 - DNA, 471 bp, Zea mays
  unsure (1)..(471): unsure at all n locations
agagaaaacagggtttgtattanttgcggggcaaatgtcatgattgagatggcgggccttgctgacataagggagtgattgaacttacacaccactcccacccattctctctcctttctatataacctcacacccacacggcccctcctatcactccaaaacctaaactccccttgcttttcttaccatctccttcaattctctctcactctcttttttctctcaccaaaacctttcacccaatatcctcaaactactacttctgataaattgctaatttttataaagctagctagagatgatggttcaaaaggaagatttgggtttgagtttaagcctcaacttccctcatcacaataccccaaatcctcaacatccgagtctcatgtcatcctctactcattcctcttctccttctggttgcaaccctcaaaaaccctcttggaacgaggctttcacttcttcggatcg

SEQ ID NO: 355579 - DNA, 137 bp, Zea mays
  unsure (1)..(137): unsure at all n locations
agcttagaagaacttcatanatgaccattatctatagaggtgtttcggcacagattcttattctcgacagagcgaggacatctgcagctggtggattttaggtttgcaaagaagttggaaggtcaaaggacatacac

SEQ ID NO: 355580 - DNA, 202 bp, Zea mays
cgatactggctatgcgacacccaagacgcctagtcttatcaggctgcttatcggctctgattgggatgaccattctctctgctcttgttggctgggctgctccaaatctgatctctcgtacatggactcatcacattacaacatttttattcttgggatttggactttggtccttaaaagacgctatatttgaagaagggga

SEQ ID NO: 355581 - DNA, 478 bp, Zea mays
  unsure (1)..(478): unsure at all n locations
aaaaaaactagaaccatatataatttaggacagaggagataacaacaaatacaaatgtgtcgattttacatttctcataactatgaatgaatgaattttctaaaccgtacgaaaagatttacttcagagctgggcatccagctttgctgcttctgattttgaacaccggaaatcgatcagagcaagatgcttgtgtgcccagacccccattcatccagctagctggcaaccctgaggtacgcgtctctaatggcacgcatctccacagcggcatcccgcatcgccacccgctctctcggctgctgcttggagcaggagactgccgagccggatcgctgaagccaagcactcctcgctccggctcctcaacgcggcagcgtnngcaggatcttttgcggtcgcttcgtcgtgctgccagatggacgggtcggctatctccgaggcgctgtctgggagggcacctcggcgaacgatggag

SEQ ID NO: 355582 - DNA, 257 bp, Zea mays
gacgccaaaaagatactaaatacggattatcaattgagctggacagcactactgtcgcacatgctttacatcaagtcagactaatatgggttatggtagccaccctaatgtgtacaatgaaggcacagatgggttagtcaaaaaaatagcaataatcttcacgcacggcacggcacggcactgtgtaggatggagaagctggcgagcaggaaaacaaccgccatctgaaatgtaatccccagcttggaaaaagagga

SEQ ID NO: 355583 - DNA, 318 bp, Zea mays
  unsure (1)..(318): unsure at all n locations
cgcgctgccgctcatcgtcntcgtcgccctcctggcggcgcgcggcctccggctcaccgtggtcacgaccccggcaaaccttcagcttctctcctctctcctcgccgcacaccccaccgccgtccgcgccgctaccttcccgttcccctcccacccatccctgcccccggggctcgagaataccaagggttgcagcccggtgcagttccccgccttcgtccacgccttggccgagctgcgtgggcccatcctcgcgtgggttaaagcgcagcccgatcccgtcggtgaggcagaacttcatgtggaacctgcacgaca

SEQ ID NO: 355584 - DNA, 254 bp, Zea mays
cgcgctgccgctcatcgacttcgtcgccctcctggcggcgcgcggcctccgcctcaccgtggtcacgaccccggcaaaccttcagcttctctcctctctcctcgccgcacaccccaccgccgtccgcgccgctaccttcgcgtatccctcccaaccatccctgcacccggagctcgaaaataccaagggttgcagcccggtgcagttacccgcattcatacacgccttggccgaactgcgtgggcccatcctcg

SEQ ID NO: 355585 - DNA, 401 bp, Zea mays
gggatgtatgttaaaacagtaaaacatccagtagaaggtacggtatacatgtgcacaatccagatatacagtctgctatctcaacaaaaataaatagaacttttagtttcaatgggaagagactgattgataggtgcatacatctcccaaatgagtaaatacaatatgaaaactgtggactagcttatatgcaacaggaactgatatatcccatttcaaggtttcttcttgcatttatcctccccaaacctaacatagtatccaactcaaatagataagctgccatttcacaactaaccctttggacaaactagaaaggtgaagttctatcaatgcctgattttactatgacacaccagcttcaccacatgaaataattcctgatacaagtctactattta

SEQ ID NO: 355586 - DNA, 455 bp, Zea mays
gggaggagtaaaataatgatatattacattttatgtagattgattttttcaatatatataccttggtacaagaaggggtagcttggcggaggatcaaacttccgtcataaatgtcacaccccaattgagatacaagctcttaggctatgaataaattatttacaccacttgtatgactgtacatgttacatacatcatacatgtacaaaccagtgaagtgaatcgttagaattggggaaagaattgaattattcaggcaaaataggaagcctggtaacactggtgccattgccgctgtcaccagtagacattgaggtaggacttgttttcttgcgggcaacagtagatttagaggctttttttgtatttagcctcaatggaagaatttgcaacctgggattctgatcggtacctgacttttcagcagccaactgataactttgaacgagttcaag

SEQ ID NO: 355587 - DNA, 404 bp, Zea mays
gcaactaattaattatttaaattttaaaagcaacaggttaattctgcacaaatataaaaatcgtcttctactcatgatttacagatgtacacgcatcgtaccgcgttaaataacccgcggaccacttctacaaagcaatgacaccacgtaataataaatatgggtaccgggtcatgttcttgtaggtaatattctacggtgaatcgctctagcctatagcagaagaagataaatgaaacccaatataatgatttacaattgggtttcaatataataaaaaagctggaatatgtacacacatatttacggtactgctacatacttctcaagaaaagactgccatcaaaacttagaaccagggatgccacgttggatccatcatgcacaagttccttgggttcaag

SEQ ID NO: 355588 - DNA, 458 bp, Zea mays
aaattgaattgcttatattttatataagggtgaaacatgaagagttgaagaaagaccaaactcttcttataaagcctgcaatttacatgatatatgctacattgctactgtaagattgaatacactctcttcctctccctgctcttttctttccttaggtttgagataaataaatggtgtcataaaaatatgtaagcagctgaacaatccgaaatagttatcttaattcgactacttccgctgtgcaaaaactttctcacctcttgctcttgacttgtcaattctggctcgtcttgaaaactcttggatctttctgtcatgctctttgagcatctgatccatgttgcttgacgaaaccattaatggacctgagaggtatatcttgtttcccatggactcgcgcccacccggagttgatttttcagccgggacccttctactttcaatttgattgagat

SEQ ID NO: 355589 - DNA, 506 bp, Zea mays
cacacaatgcacatatcattttgttaattaataaatatagaactcttcaaggaagtcaaaccctgaatagcattgcaaatctcaacaaattataaatactagcaagacacaaaggatactgaatcactgatggccacatttactgatatgacaatttttaagaatactattgaagtgaaatgtatttttgacatttcggtctgtagtgatttggtttcagaccttccagatgctataataacttagtgggaagcatcctttgatttaacacttggtggcttcatcaaatccttccataaactctcatcttatagaagagtaggtgatgaattcccttgaagtaaattggaatggctgatgtgggatagggttcggtcgaggcccgtaaactttgatctgccgcacgtgagtatcccttccattgagatggtttgacaacacagcaatttgcaacatgaaagtattcacaaaggtatccctaggatcaactccagacaaggaaagat

SEQ ID NO: 355590 - DNA, 246 bp, Zea mays
tctagctatctcgatcgaactggccagttgtgacactccttctttgggggggggggggggggggggggggggggggggggggggggggggactcgataataagtgggctacccgactgtacggtaagaccctaagactatacccaaatcattacacaagcgatagaataaataaaaaggaggttgacgttgatggaagagagggtactggagataaataaagaaaaaaaaagagatgggaaagagg

SEQ ID NO: 355591 - DNA, 222 bp, Zea mays
tctagctatctcgatcgaactggccagttgtgacactccttctttgggggggggggggggggggtaaaatgtaaaaagaagaaattgcgtagggtagagttcgcaatttagaaagcagagataaaagatcagaagcactcatataagcagccgtacaaggggaaaaaaagttagtaggtagcgtgtatatagtaagtagcaatcagcgtagaaagagaataa

SEQ ID NO: 355592 - DNA, 214 bp, Zea mays
atcgaactgccagttggaactccttctttggggggggggcatacataagataatggattaccaagcaacccgtgtacaggataatactatgcggaacggtaaagccggcaacgccatattatatcacaaggggaaaaaaaaatgaataggggtgcctaatggtattaaatcgggggggcttggggccacatttgcagcgcggtggaggcagata

SEQ ID NO: 355593 - DNA, 221 bp, Zea mays
agctatctcgatcgaactggccagttgtgacactccttctttggggggggggggggggtttcaagtaagtgcacacaggttaggacacaagagaaaaaaaatataatctgccatagtaatcataagcatgcatgcatgcattgattgattatcactgggaacacggtgaaggaaaagcatggcacatacatatatatgatagttagtaacggtgaaggaaa

SEQ ID NO: 355594 - DNA, 215 bp, Zea mays
cgatcgaactgtccaaggtcctgtcacctttcttgttctccttcctaacctgcgtcgttccatcatcacggtgtttgtcttaccgtgtgggtcgcgcagtccctgccccgtgccctgtgtctgttgcgtcgatccaggtccagtggagggtaattgctggttccaggtccaagccgtaatgggctgctgaattgatcccgggttgtgtataagta

SEQ ID NO: 355595 - DNA, 246 bp, Zea mays
tctagctatctcgatcgaactggccagttgtgacactccttctttgggggggggggggggcgggtaaagccaatatgaggaggtgggtattatgcgtaagatgtatgtaagatagcgagaagcgaatcgctgcacagaatacgatacacgagaaatatcgcttaatttgagtggaggctacgtaaaggttccccctctaaggtcatataataaaagataataagtgttatgcgcccagccaagata

SEQ ID NO: 355596 - DNA, 394 bp, Zea mays
  unsure (1)..(394): unsure at all n locations
tctagctatctcgatcgaactggccagttgtgacactccttctttggggggggggggggggtaggaagataaagcggacatagtatcggcagaattctgggaacggtaaaaagtgtccgatagtagtaagaaccaagacagggtggggcacacggacctacagctggaagaacgtgggatacgttcatggaggatgggggctatgatttactaaataaggtgaccattgcaagttacacaccattgcacgtgcaagccaattgtccgtagagttggtgatttgtttggttgataaaaaaaaatataatggtttaacgttgataaaaagcgtacggcaaaatcattagttgtangtgcagagttgtagtgtgatgttgantatagttggtataat

SEQ ID NO: 355597 - DNA, 209 bp, Zea mays
tctagctatctcgatcgaactggccagttgtgacactccattctttgggggggggggggggaaagagaataatgacaaggtgggaggtaggtacagagatagagccagttaaatgcagaccgatgatgactggagagtagagcgaaatgtgtgcatgtcgatccaacaatataatagtataaagtagagaaacatgatgagataataca

SEQ ID NO: 355598 - DNA, 417 bp, Zea mays
  unsure (1)..(417): unsure at all n locations
aaggtttcccgtcatcactgtatgacgtcctccttctttggggggggggggggggcaccccaatggtacgtaattgcagacaaccacgagaacgtgcggctaagtcgtactgtacgtgtactggagcgtgctcatcgataacgacagttgctgaggcccacgggcggttgaataagcaggggggatgagcgggtggtagagaagggtgatttgggtgtgagaaggaagtgtataaaagcaacgcattagcaagggttgtgctacngtggtaaacgcaaacgctagttatgcccggtatggcaaatggtacgaggggagtgcacaagggccctacactagaagttggtgtctttaagaatagttgttggtaatacggcctattcgggaactggtcttcaggactggttccaatggtgt

SEQ ID NO: 355599 - DNA, 129 bp, Zea mays
gacgaagaccattttcaacggaactttttttaccggccgcgcaaaataacccattatggaggggggccaaaagggccccccatggtcagcctagccacttaagtaaaaaaatcacagaccgagccccaa

SEQ ID NO: 355600 - DNA, 298 bp, Zea mays
gttcggttaaccaaccgggtttcgtagtatgcgagcatcgttgttggtgggcccccccccccccccccccccccccccccccccccccccccccccccccccccccagtaaccggaccccgaagctaagcgcccccagtttggtgtcacgacatgcgaccactcactcattcgaaaatttgaggatacctcgaatgcatgaagccaatcaataaaacgagatagatatggagatacattaaagcctaaactagattagatgtcccagctaccaaaagagaaacaccgctgagccaaaa

SEQ ID NO: 355601 - DNA, 362 bp, Zea mays
gttcggttaaccaaccgggtttcgtagtatgcgagcatcgttgttggtgggccccccccccccccccccaaggaaccgattacacaatacataaaaagcgcttccgagtatcaaacgggaaggacgacatgaacgcagatgctaaccaggaaacagatatagaaccatgatcgccctgatcagcccggaagacaaaacaattccaaaacgcaaagactagcgcttcccgggccctacccgagctgggtaaagaacagctctactagctctgaaggcatcgtaatattgctaatgggacacgacgacgtgcccgccggccgcgccggaggccgcgccgcccgccctggcgatgctgattatga

SEQ ID NO: 355602 - DNA, 478 bp, Zea mays
gttcggttaaccaaccgggtttcgtagtatgcgagcatcgttgttggtgggcccccccccccccccccccccctcatcaagccccattaacagaacctaataacgaaggttgcacatgattcggatttcagaagttaaagccggcgaatggtaagagaattttggctattaacctcagacgcagatagtcggcggtacagtaaaagaggaaagatgatttaacagcatgatgggtcggaaggcccccccactggctagagaatataaaacgttcatgtcaggctgaaaaagaaagctcaacaaataagttcgaaggatgccgcgcggcgccggccgggttaacggaacggactttccactttttctttaccattgtaggtgtttgactcggcctatggattgtcgtatgttgcctggtacttatcatagtactaatggtacgcgggcgatgccgcgttatcgtagtactcctgttggt

SEQ ID NO: 355603 - DNA, 355 bp, Zea mays
ggctgattcaggttcggttaaccaaccgggtttcgtagtatgcgagcatcgttgttggtgggcccccccccccccccccccaagccgaagctacagacccgagaacccgaacctaacagatggaaacagatagtagcaataacgtagaaacgcttggcaggtgaattcaaaagccgctaaaaagattagagagagacagagatcgctctggaccacccgaggccctgaggataggacggcgtgggcaccggaggctctctgagccactactagatagctgccctaaagatgtactgaacagacaatcgatcatttcacacaccatgtacaagagggcgcagatcaggacgaacag

SEQ ID NO: 355604 - DNA, 286 bp, Zea mays
  unsure (1)..(286): unsure at all n locations
aaggtttcccgtcatcactgtatgacgtcctccttctttggggggggggggggggggataaaagctggtaaaacctgcgtcgcagagagacccagcacgagtagagataccttagataccggttgttgggttcggttcataaaatcggtcaagaagggcaaatacaatacgatagatcaccaagtatcgtcacggggatantgggttgattcggtggaggtttaagtagtgcaagcgataaccggcagggtgatgcgtggtcccaataaacaaaaaaataatgggt

SEQ ID NO: 355605 - DNA, 348 bp, Zea mays
ggctgattcaggttcggttaaccaaccgggtttcgtagtatgcgagcatcgttgttggtgggccccccccccccccccccccctgaagatgaaacaccaaaataaccctaaacaagacgaacagaaacactggacgaagaacagaatgcgacccccccagcggcatgactgactataaaagaacgctcatagagcatgtttttgaaatagaatgatactacaatgaagaaccgacccacatgatgcctcccgcttatagcttatcagagactatagaaagacctcgcgaggaactcacagtcacacaacggacgagagactaacagccattccaccctcgccgcatgc

SEQ ID NO: 355606 - DNA, 249 bp, Zea mays
aaggtttcccgtcatcactgtatgacgtcctccttctttgggggggggggggggattaaattagtatagacctataggtaggtacccgtgcgacggtaggagtaatatgtcaatacgacgagctaccgcgtactaataacgaatagcggtggatctatttcgatttcgatataggtggtcggcaacgacgtatagtgtcgcgtttttatttacgtctttcctatgttcctcgacgtggtttggtgtgtg

SEQ ID NO: 355607 - DNA, 289 bp, Zea mays
gttcggttaaccaaccgggtttcgtagtatgcgagcatcgttgttggtggccccccccccccccctgccaaagtactgcgacaaacacgattataacaaatcaagataaccagtccccccgcagccacaccaatcacgagaagagggttcgcggaggccgcaatttctccacatcatgcatccacaaacaacagacccataaacttcaaaaccggcttcggaaagcttgccgaagaaaaagcttaatagtgtagtgtatctcctgccgggataatgggaaggtccgtat

SEQ ID NO: 355608 - DNA, 340 bp, Zea mays
gttcggttaaccaaccgggtttcgtagtatgcgagcatcgttgttggtgggcccccccccccccccctaaacactcataacgacaataaagaatcgaggaagaaaaacctccctctccgtaggtgaaaagaaacacaaggttccggcgcctcccaaggcattgagggcgatcagacgatctgcgcaccagcgggatgagctgcccaccctttattcttttcttggcggaatgcgaggagaactcgcagagaaagaactagctaagacggacttaccgagatcggcgaacgtaaaataccgaggaccgcactgcggctggctactaaagcacgaaagacga

SEQ ID NO: 355609 - DNA, 281 bp, Zea mays
gttcggttaaccaaccgggtttcgtagtatgcgagcatcgttgttggtgggccccccccccccccccccccccccccccccccccccccccccccccccccccccattgcccaagagggaacaaacacttacattcaagagaaaagcctcctcaagagacgaacaacccaaaacgaaccgcagaggacgcggaccgctcttgcactcgcgagggaaaaacaaaaacattttaaaaccagacgtacttcgtgaatccactacgctctcatcttactcatccg

SEQ ID NO: 355610 - DNA, 412 bp, Zea mays
aaggtttcccgtcatcactgtatgacgtcctccttctttgggggggggggggggaacatccgaatgcgagagaggcttatattgatagtgggagggggtacatgatggaatatctgggtacgactgcgatagtcgatatccattatacaaaagcgtattagtaattgatagtgggcagccgcggggtggacaatgttgcttgccagcaagggtgctagaggtcgcaatgcggttgggcgtaggttaggcgaagacggcgcattgtgggttggtgtacccgtggcagtagcgtgttaaagttactggaaagttagtagggagaattcagggcgataagataatgaacggcgtccggcggttgtataagacgttgtagtaattgtgagtcttggatgtagtattgtaggagtag

SEQ ID NO: 355611 - DNA, 270 bp, Zea mays
aaggtttcccgtcatcactgtatgacgtcctccttctttgggggggggggggggcctatacctcccccgtacgtgatatggtgtttggaaggcggacgacacaggatgcggctttagacgttagatagatagcaaaccaataacagataataacacagtaattctagaaaaaaatatagctagagtagtacagaagaagtaaataaatagatactaataaaagcaaacaacagtcaaataaagtcctcgcaacatttagtgccgagaggg

SEQ ID NO: 355612 - DNA, 135 bp, Zea mays
cctcccaccgggcggtcattcttccgtaccatcaccgctgcggccgcaggcactgctccggtgggccgcagcgctcccagtcctgctcgctgtcgccgcgccggccgccgggttctgcctccccggcgttgcccc

SEQ ID NO: 355613 - DNA, 213 bp, Zea mays
ggttcggttaaccaaccgggtttcgtagtatgcgagcatcgttgttggtgggcccccccccccccccccccccccccccccccccccctatccaattagcaccgtcacaccggccacacctcccattctttcaccccgccgcatcatgacaatagaaacggagtatacgaagacccaatctaaagagactaacggcgggcgcataagacaaac

SEQ ID NO: 355614 - DNA, 159 bp, Zea mays
ttcccgtcatctctgtatgacgtcctccttctttgggggggggggggggggggggggggggggggggtagctccgatacgataaacctgtgctgcacccgtttgaattataccaacgcaataaacgcaaagactcattgataaagaccgtgaagatagg

SEQ ID NO: 355615 - DNA, 296 bp, Zea mays
ggccgccctatattttttttcttttttaaaaaaaaaaaaaaaaaaaaaaaaaaaaaaacccggaaacgcttggataaaaaccgccaactcaacttgtaccgcaactgaagtagcattatcaacataacctttacagtacccacatgggttagcagtacccgatcgactggccagattgcccaaccgaatcagaacctccatcaactccaacaattgccggaccccctttagatagccttgacctttttctcccccccccccggggccgccccccccgtcccagtcctgtggcctcg

SEQ ID NO: 355616 - DNA, 404 bp, Zea mays
aggaaggtttcccgtcatcactgtatgacgtcctccttctttggggggggtggggggcgggaaacccaccaagcggagttagacctggcgaagcagaccgagagcgagtgtacgcgtggcaagagggagtcattatgacagtagggcggcaatggaaaatatccatacaagaacaaagcgaatccgagcgacgagagacgcgttccccaatgaagccaaaatacaggtacacaccctagaaggggtaataagaaaggaaaggagagagagaaagttgccgggttgaagtgtacgcctcatacgctacgttaggttggttgacattgacaacgtaaggcgataagtgggtgaaataggcgtataaaccgagagtaagggcacaagtacgtccaatttagtaggtg

SEQ ID NO: 355617 - DNA, 299 bp, Zea mays
ttcggttaaccaaccgggtttcgtagtatgcgagcatcgttgttggtgggcccccccccccccccccccccatgaaacatcaacgcaccacagacgatggtcaggacggcactactgctattaaaaagtaaacaaaatagatggagctgcaaataacgcgcctcagactccccctcctcttctcgcttcaggtccagagaaacgaaccagatcagatgagatgcgataagaacgaaagaaagaaagaacgaaaacggagatctgaaaaagatctatcgggcgacgcgattccgatcgct

SEQ ID NO: 355618 - DNA, 410 bp, Zea mays
ggctgattcaggttcggttaaccaaccgggtttcgtagtatgcgagcatcgttgttggtgggcccccccccccccccagcactgaaaaaataaaattaagacacgtagctctcatcaagccccattaacagaacctaataacgaaggttgcacatgattcggatttcagaagttaaagccggcgaatggtaagagaattttggctattaacctcagacgcagatagtcggcggtacagtaaaagaggaaagatgatttaacagcatgatgggtcggaaggcccccccactggctagagaatataaaacgttcatgtcagtgctgaaaaagaaagctcaactaataagttcgaaggatgcggcgcggcgcggcgccggccggggtaacggaacggactttctaatttttta

SEQ ID NO: 355619 - DNA, 276 bp, Zea mays
gttcggttaaccaaccgggtttcgtagtatgcgagcatcgttgttggtgggcccccccccccccccccccccccccccccccccccccccccccccccttaaatacaattcgatccacaaacaaatggaaacatgcgagaagacataacaaactaaatggaagcccctctggcataaaatgcaagcaaaacctcacggcccgcaatagaaaatttacataaagcaagatgaatatcccgatttccaatccgactccagagcgaaaagcccgacttc

SEQ ID NO: 355620 - DNA, 389 bp, Zea mays
gttcggttaaccaaccgggtttcgtagtatgcgagcatcgttgttggtgggcccccccccccccccccccccccaggagtaactcaaaactcatgactacaccttaatcggaacggcctctgtaaactaaagattcggaaataagacggaagatcacatcatttcaacaaagtcctaagatcaagacgaccagagacgaaagaaaaaacacacacatctggttcataatagacgcaagattcctgaagctgtaccgctcggctatcccggactacagacggttatgcggcatcgatccgtgttcctagaccgaattcattggcgaatggcctgcgtgaactcctgcttagatggatcggattggccgacagatagggcgtggatcctct

SEQ ID NO: 355621 - DNA, 197 bp, Zea mays
ggttaaatgaactaaaatggggctatacttgcattgcataaacagcctggggaggaaaatcccttgattgtttaaaaacggggatcactcttacaataaaaagaacacctttttaactgcaaaattacctgaatttttacccactgcaataacaaataaggccctcactcaggggggatcgacccaatccatcattt

SEQ ID NO: 355622 - DNA, 384 bp, Zea mays
tttttttttttttttttttttttttttttttttttttttttttttttttcatgtactagaattgtactatacttgcattgcatagacagcctgtggaggagaataccttgattgttttaaaacgtggatcactactacaataaaaagaacacctctctaactgcaaaattacctgaatatctacacactgcaataacaaataaggcactcactcaagggtgatcgatccaatccatcattttctcagctagtatacacctggaagtcggagagaaggctgtggcgataaccactccatgagattgtaggaagaattgaggatgatctcgaatccgcaagtcctcacagcaagagaggcctccgttgagtttggatccacacgag

SEQ ID NO: 355623 - DNA, 495 bp, Zea mays
ccatctctacccttttgcattcccattgacatattaaataatgaatgttcgtctcaaatggtcttcgtctgatgaatattatcttcttgtggagataatacttcggaagacgaagacccttaatctttaataattgtgttgacttgttcttgattcatagcatttgaaaaggagtgaacaacaaaataggtgctgtccatgcagctctccctactgtttgtacctttcctttttgggtcaaaatgtaagctgtgatgaatggatgctgcatatgcttcagtcagttctaccttattgtcagtatgtgtacagtaagagcttgtgatcgctatccgaaatgcagtaaaggtaccaagttgagatggccagcagattactcagaagttcgttgagtcgtgagtagcatgagatgcttagctgtttagtgctccgtcggtagggacactgtcaggataagacagacgaatatgcgacggacgcgatggcgactagtgc

SEQ ID NO: 355624 - DNA, 269 bp, Zea mays
agggaacggtatattttttttgatacaacacccaatgccaaaccatcatcaagtataaacagtgtgatcccttaattgcgcaaacgaactacatatcttaattttatcaattattaaccgcataagcccttttgcgaaaatgtacaaagaagaagtttgtggttttattgtttcgacgccctagcaaaaacacaagcagcttcataatgccgaaacatgacttccaatgctccatttggtttgcggcaaaaaccaagtaaggttcaagg

SEQ ID NO: 355625 - DNA, 360 bp, Zea mays
  unsure (1)..(360): unsure at all n locations
cggataaataaacttttatactggtcagacctcacaataaggggagccagtggattacatctggtttgaaaatccaataagcgaatagtaatattaaactcataaatgagcctattataaaaagtagaaagctaaattgacatgtacatgtaactaccatgataagaggcaatagaggtgccattcctgtgaggtaacttttgtgaagggtgttctttgttcactataagatcaaaaatatcttggcgaggtcaacaatacaataccatgaacctcatttaagtgagcacctaaaatcaanccatgagatgatgtcattgtgcacagcaaaaattctgtcatcaggttccccttccaaaa

SEQ ID NO: 355626 - DNA, 432 bp, Zea mays
aaaaaagtcatgttttttgccaaagccaaccaaaacaagggaaactttggcattatatatatagagagcactctgcaaaagttacaggtagcaaataatgtacacaccttttttacaaaatggcaacaagcggcaattcatgagtactgctgtgctgtccagtgcacatcctacttttaatatatatatttactttgttttatttaattattaattaactaatacacattaaaaagaagattgattttaagtttgaggtagagtaggtgatgaggaggatcagaaggaagaagccttggctagtgacttgatggtaacattgggacccataacaactggtttaaaatcgaacgtaaacgtgtcgtaacgcaggaagaattccaccaagtagagcctgcacatgagcaccaccagatttttggcgggacactg

SEQ ID NO: 355627 - DNA, 468 bp, Zea mays
atatacaatttacgtctatatattatcttggccggaccaggggaagattttattggggacaaagaaagaaaactagaccaacttggacaagaaaagcttattcataagctgttgcaagtcaagatgcataactattttttcaagaggcatacgtaaatctgttatttcattcatcacttaatatgtggctgtgtatacaaataatttttttagagtaatatccacgatggtccaaaaatattgacttcaatattttcactaaattggtatgatgtatatcaggtacatagataattacaaaagagaaaaaaatggttatgtaccctatgatcagaataaggtagaaaaggactaataatgctatacgtaacatgatcttagggcttcctcatcgattctggtcacctgatgtattgcatttgccaagtaatccacattgctagaggtcacacctgacatgctcattct

SEQ ID NO: 355628 - DNA, 217 bp, Zea mays
gattttaggcgctgaagacgacgtgctatgtttttccggagtcctgttgtcttcttcttcttcttgttgttgttgatttcaggtttgtactattactgatctttgttgtaaaatgcgctgttgtcccatgaggtatgcacctaggtcttctccatttgaattatatcaaacggatttgtaaacacgttcttatgcatgaaaccattttttaatgatg

SEQ ID NO: 355629 - DNA, 119 bp, Zea mays
cccttgcccttgcccgtaccctgaacccgaacccgctccttacccagctcctgaacccgcaccagagccagagccagagccggcgccggcgccagatccagcatacgatcctgcaccag

SEQ ID NO: 355630 - DNA, 367 bp, Zea mays
acagccggaaatggggacttgttcaatggccagtccctccaaccctctctcctatctcctaccacaacctcaaccaaccaaaaaaaagacatactttcaaatcacagaccaacactgctgggggccaatatcctatctcttttaacccaaaaatggggtattagagaaaagaattacaatgaagagagttaaaattaaaaaatagacttctttatcgaattttcctttccaaagtaaaaattggcatttctaaagtagtcatctaccgttattgtttttcattgggtaaatgcaatgacccgtccctcatcaacgttaggctcagactggcaaacctctctcgcgaatactgccttgatgcttttct

SEQ ID NO: 355631 - DNA, 439 bp, Zea mays
ttcggttaaccaaccgggtttcgtagtatgcgagcatcgttgttggtgggcccccccccccccccctacccaacgccgtctctccctcctacctacctacctaccaaccggatgaaaccaaaggatgatctctctcccaaccgactctgggactgcgctccggcgcggcgcatgcacgaaacttggcctctccggcggcgacgggcctccaaggctctgggcggcgactgcggagtgccgcatggttttgagcgctagttctgcatctggacctcctaagtgtcagactgtatctggtggtcgtcgtagtatgtggtggttacatagggcttggactactgagagggctggtggcggaggtaatgcgcggaggtgatatgtacgtacgaaatccgcgatatacaggaggtcgccccggccgcggattcggatgcgaaat

SEQ ID NO: 355632 - DNA, 319 bp, Zea mays
gttcggttaccaaccgggtttcgtagtatgcgagcatcgttgttggtgggcccccccccccccccccccccccccccccccccccccccccccccccccccccccctaaactaatattttatggcgacctccccagcacccgctgagagacggagaatatatgagaaactacccgactgagaaccacacgaatacgactgactttaccaaccgtacgatctagaggctaaccagcacgcaactaatacaaactacgatagaattatctaaaaaccacttatacaagaatgagcataaatcctaaaccgcgaaacgacag

SEQ ID NO: 355633 - DNA, 145 bp, Zea mays
  unsure (1)..(145): unsure at all n locations
tgttgttttctttaaaattgttgaccttgttagagtattccatttcaatngcagcacggattggaggtgcattataattaatgcctgctatgtatcagtttccggtcaagaaaatttggtgaataaactacaatttttagccagt

SEQ ID NO: 355634 - DNA, 254 bp, Zea mays
gttataagacaagacgtgtaagcctgtatcttagtagacaaggagatggtgtatttgctgtattacagtggaagactggaagctcgaaaaatatagattcacagcaagtctgctggtacacgagttatacgttcatcaaacaacctggacatacatccttccagacacgccaagaaaaaaaaaagagaacttgcaaatccgagcaaagtgtgtccctatttcagatgtgacaagcaggtcaaatgccaagaaaa

SEQ ID NO: 355635 - DNA, 314 bp, Zea mays
ggtagttacaatacaaaattgaatggaagaaggaccagacacagcaggagctctctgtgcccgatgtgcttcacatttataaagctctttcattcatcttttgtaagttaacaattacaagtactgggttgtcactcgtgtttgtgtgtctgctattctgcctctgtgacaagcttgtgaggttctatgataatgccttcgtacatcattacaaagttttgccacttaaaacattgtgcatggcagttgtgagtctttttgcctaagcaagaatgtgcttagagagtttttttggtactggaaggaaagctttt

SEQ ID NO: 355636 - DNA, 243 bp, Zea mays
tcgtttcgttgacgacctggcgctactattggcgtcgaatgttctttcttgaacgtggtctttctctttgtggtctacgtactttcactgttttgacgatttactatccaggaagcagctgcgaagggtctcgtagcaggatattatcgagtgacaacggtgagggacgaggttattgatgcacgggaatcgacggaagtaagagactattataaacaatccgcgtccgacgtctccagtcct

SEQ ID NO: 355637 - DNA, 473 bp, Zea mays
tcggttaaccaaccgggtttcgtagtatgcgagcatcgttgttggtgggcccccccccccccccttaaccgaaataagcaccccaccaaaattgagaatcgtctggaagatacgagacagacacatcatgccaagacacacagaagagttaaccctaaacctgactgagccacagcctgtctacccctaagattaaagcacgaaatcataaaacactcatgacgagagacctagaaaagacggccaaccccacagcgcagcaacaaacgaagaagaggagagatcatcgcgcagccctgaagacatgcaccgccaaagatcctagaaccaaagaagcttaacgaaaatgaacgcccacggaccccaccgctcctgccacctaccgatccgacgaatagggcccaggagacctacggaacaacgacgcttggtacataagttaaacttatacatcatgaccatactcaggatta

SEQ ID NO: 355638 - DNA, 342 bp, Zea mays
agagaagtaggtcaatattattattataataatataggaaaggagggtgacaaattacagtaatggcccatgccacatttacagaaccagcacccaacaatcccatccgttttacgatacacattcattattattattccttatcaccatatggcagtgattacaatttctcaacagactcaaacctagaagaagaagaagaaatcctcatcaaatctcagactcagagaccatggatctcaatactgcaatatatccgcagaagccataatagggtggttcagataccccatattcaacgggttgaagaagctattattattaattggctcaacgaaggtg

SEQ ID NO: 355639 - DNA, 480 bp, Zea mays
ttcggttaacaaccgggtttcgtagtatgcgagcatcgttgttggtgggcccccccccccccccccccatataatcattcgaacaccaccaccacaacaacacattaaattatttctagaaaccagatcaacttgggactggagacccagataaggatgagggaagaacgggacggtccccagtacagagaccgaccaccaccaccggccacgaggacacttcatctaccagaacccgcgaagatagcgaaaggcataataataataataaacggcgacgaaacgcgatagcgatataggacttacgcgaacagctgaacacacggtgataatggacaacatttcttccgatacagggggacacccgaggttttcctaataatgcaccaccaccaaccttgcgaagtaattctgcgtactcctgctgctgcggaaaagggtggagatcttcttgaccgaagagtcgaagtacgcgaccga

SEQ ID NO: 355640 - DNA, 491 bp, Zea mays
tggctgattaggttcggttaaccaaccgggtttcgtagtatgcgagcatcgttgttggtgggcccccccccccccccaaaacgaaatcaaaagcacgatcctaaaaacaccgggaatataataaaagcaacacgctctctacggagaaaccgtcagaattcaggaccaaacaggaaaccaaccggataaaacaggagaacgaagatggatcatggcatcaagccgccggggatcactcggagccctcctgattgcccggctactgaaatgagccttctggccgctttatccgcttgctacgaaatttagctgaaatatcgccatgctgcgggacgcgagggccctcggcgtgccctagacgatggcgaaggcggcggcgtcgagaggaattatgcaatacgacccccgcccttccgaaatgcctgagaaaccgacgggaatctctcactacgctaactgaccgacgcgtccccctcccctgagacgaaaga

SEQ ID NO: 355641 - DNA, 477 bp, Zea mays
tggctgattcggttcggttaaccaccgggtttcgtgtatgcagcatcgttgttggtgggccccccccccccccccccccctaatatcacactgcaccatacaatcacacctcattctgcacgcgcgctctgctgaaacccacgcggcagaaaaaataagcttaacccaagtcccatcatcggcgcccaacccccccaactaatcgagagacgaatctaacgccaaagaatcccagcttcctaataacaacgacgcggagccttaatatacacttattatcgaagggacttcggacgccgctacactctcgccctgccgacagcccgcctctatcactgttaataaagaatatcccttgctcgcctctacatgaaccgtaattgcccaaacgccagacgccttcctgcgcgagctgtgcctaccacgttgtgccttaccttaacccccggccgaatgactgcgagcagatactagact

SEQ ID NO: 355642 - DNA, 307 bp, Zea mays
gatcataaatcaattcctttttcaagcaaaaggaccaaaagtggaaattaacagtttctataagtaaaccaaaaaaaaaaaaatcatccatcagtgcatggttatcaacattgacgagaaagtgaacaagaattacgtagaaacctactcccgactgttcaaatcaaacatataaacctctatcagaaatttcaaatttttactaattcactacataaataatcgaaagatttccatcgctatcaatttgtcacaagaaaattcgtccaatcatcgtatgtcattttttcagctcctgcttgggggt

SEQ ID NO: 355643 - DNA, 405 bp, Zea mays
ggctgattcggttcggttaaccaccgggtttcgtgtatgcgagcatcgttgttggtgggcccccccccccccccccccccccccccccccccccccccccctacgacaaacgaaccggcccccgaatgaaaattaggaaaatcttaaaccaagatcccgcacaatcaaaggaaaaaaaaaaaaacgacggacgatctgacttccacgaagacctagtataaatctaagaataaccagtcataaaggcagcgggtagctccgaaacgaaagacacaaaggcgcacgataaacccgaaacccccagcaaccgagcagacaaacaacgtaaatacccggacgtgcacgaaccctcgagaataaaaccgcggaacgacgtcactcgaccccccgatggggctgcctttt

SEQ ID NO: 355644 - DNA, 386 bp, Zea mays
aagttgccaaagctttcatttattgcaaagcagagcaacacttattaagaccaaaaactgatacgtttcttacaatttttaatatcagttcactttaagaatacatctatctctgcttttgcaacaaggtttactagaaacaatgttcaccctcagaatgaaaatagaagaagagaggaaaagaaaacatagtttaacttacattaatacaaaacgatagattgcacccgcaaaaatatctgccacaatgttcacttggacttgtcatcaaagtgaattaacggtgtcaattaaacactagccataaggaagattttatcaaaggccaattactgatttatggcccccttcctcttcagaggagcgcttcttctggccgtagtatg

SEQ ID NO: 355645 - DNA, 395 bp, Zea mays
ttcggttaaccaaccgggtttcgtagtatgcgagcatcgttgttggtgggcccccccccccccccccccccccccaatcctggaaatgcccgacccacctgaaatgatatgaagagccaccaataggaaaaagctacagtcccgccagaacccccaacacgatccgagcccaataacagacgcacgcgctgcccctgaagaattcccagcataaagaactccgagggcgataactaaaacataataatatattaaaataaaagacatcccaagccagaccaacagaaaagtacatacctgagggtgaaaaacacgctggagaactccgagccttagcctcgacgaaatctaaccaaggtctcgaaccaaagagcatggacaattaataccccacg

SEQ ID NO: 355646 - DNA, 345 bp, Zea mays
ttcggttaaccaaccgggtttcgtagtatgcgagcatcgttgttggtgggcccccccccccccccccccccccccccccccccccttttgagaaagagacttacaaaagcagcggagaacatgacaaaaactaatcatactagcgaaacattggacgagcgaaaaacaataactagcggaatcctactattctgatctgagggccgatacatattgccgagcagaacttttaaaacactacctataaaaaccaactgacgaaacgccatagacactagataactactttccatgttggcaagcgacgccgcggcctacgaagggcttgctgtgcccggaccccca

SEQ ID NO: 355647 - DNA, 541 bp, Zea mays
tggctgattcggttcggttaaccaaccgggtttcgtagtatgcgagcatcgttgttggtgggcccccccccccccccaagaaacacctaaatgacagaccacccgcggatccaaaaaataacagaattctcaaaacaaacggcgagcgtcacacacagacaaagcgaactttctactgctggaagccagctacccatctcactacttctccccctattctgcggatcttgccgctcccgcacgatgctcgggcggctccgatgcagctagttttcttctgtcaagttgaaaatgaggtggttagacgatgtgcacgcgctgcgcgagctggtcaaaagacttgaagctgatccgagccagaggtgccgcgaagggttcagtgaggataaaacgacctacacttggactaacttgtccttactggtttgaagatgggtgaccactttgtccttggcgaagagtaccccagtcgagccaaaaaagcgattggtgatcgttcaaggcgtgtgacagatggtttgatctagtcgacgtcgctgtg

SEQ ID NO: 355648 - DNA, 501 bp, Zea mays
tggctgattcggttcggttaaccaccgggtttcgtagtatgcgagcatcgttgttggtgggccccccccccccccctcagcgtaagacctcagatcctaaaccgacaaaaaattagaaatgacaaccgtgggaaatccgattaactcacacagaacccacggccccacaccgttcggccgacgaaagaacaccaaggctccctgaacggacaccccagatctacaaccggccgctaatggctagacccacgatcgagaaacctaagtcttcctatacgacgtagacccacccacccattacatacgagttaccaaatcctagaacgccgccccgcgcaaatgcccggagatcgcgggctatagcgagccggaaattatcaaagcgcaccgggaatcggcccccctggccccgctcttaaacgcttcactcctttacacagttgcgacgcaggcgagagccacgcttaaccctcaactcttttagataggagtcaaaacgtc

SEQ ID NO: 355649 - DNA, 198 bp, Zea mays
caagggaaaaatttggggtaaaatggggggaaccttggggggggatttttttaaaaaaaatggctttggcccccttttttccgggggcggaaaagtaacccccccttttttggaaaaggttttaaaaaaatccaagggggaagattcaggggtgggaatttaggtggcccttggaaacatttggccccttcttgtttt

SEQ ID NO: 355650 - DNA, 389 bp, Zea mays
actaaataaataatgtataaattaattaattggttgctgctcattacataaattattcaatgaaaaaaataattactaaatgttattgttaatatccccctctcccctatgcgggtacaaaaaaattccaataatgttgccagatttttttttaccgaaaaaaatcagctacttttatccatcaggcaccaccaagggtgttcaaaggggcaaactggaacgcaatcttaacctcaatgcgaactcaactgcaataatctaaaaccttatgcactacctccccttttgttggactaagggaactttaaatatagggctccaatttgattagcataacacttgggtcatccaaagagccttgcgaaacagacaaatctacaagcttttta

SEQ ID NO: 355651 - DNA, 371 bp, Zea mays
ttcggttaacaaccgggtttcgtagtatgcgagcatcgttgttggtggcccccccccccccccccccccccccccatattaacgcgtcggaccacaaaaaacaacaccaaaaaaagtaaggagaagaaaccagataccacctagacccccaaaaaaaaacgaaagacacgcctccgctgcaaacaagcctctaacgaccagagcggaactccagatttacaaactgccctgcacgaccaaaataagtgtaacacagacttcacctcgctccccatctcatgactctctagaagttacagccatctatatacccagaaacgaacatcctcttggagctagaatatagcttcggaatggacaccatctacccg

SEQ ID NO: 355652 - DNA, 286 bp, Zea mays
gggggggaaacaaacgggaattggtcataagttttggggagaaataccctttcaaaccctggacttccaaacaacaacggttaaacctctcccttttttaaggggggcccccctttaaaatttttttggcggaagcggggggactaattcacaagcgggggttttttaaaaaaaaaaaaaaagtttccccggcgaaaccctgtttctggccccaggttttatcccatcccaggggaatttcagttcaaaaccttttttaaagcttattaaggggatttgaaaaccc

SEQ ID NO: 355653 - DNA, 488 bp, Zea mays
gttcggttaaccatccgggtttcgtagtatgcgagcttcgttgttggtgggccccccccccccccccccccccccccccccccgaatgtggtggataaaacccgcagcctacacacacggcaccccacagaggaatcccggaaaagactttcccccaacccaataagcgacgacaacaaatcacttctctacaaacctacttagagggcgcctacccgagatttaaaaataaaaggcagcagacggaaccccccaaaccaaccaacaagcgcgcgccggcccttaacaccgaacctaaactcctgctgcggaaggacttggaaaaggggtacctacgacggactggagaaaagactcctgccattgcccgccgccctaggacccttcgaacgccccttgactacttaattcgcttcgcctaatattcccttaaaatgctatgaagcggctgattggcatgataataattattaaatattttcgctgcc

SEQ ID NO: 355654 - DNA, 444 bp, Zea mays
gttcggttaaccagccgggtttcgtagtatgcgagcatcgttgttggtggccccccccccccccctcacattcatcttgaggcacaccccccgccctccaaggcaataacaaacgccatactgccatcttagcagaccaaggatgggaagtcaatatcccgacgaccactcaggaaaaaatctacggacgacctaatacttaaaactgaaaatagagcgaccccttttttataatacgagcacctcctcgggcgaaagcgaaccagaacgcgaggatctacggctcaataaacaccccataataacaacaaaataaacctctaaaactaactctaaaaagagaaagcgatgcgatgcccccgccgcggattacggaaccacttagccctccttgacacctgcgacccaccccgaaactcaacattgacaaccccgctcaagggc

SEQ ID NO: 355655 - DNA, 306 bp, Zea mays
gaacacgtgggaaaagggcagtgccgggccattcaacggaaatattaaaattttgagccccccctttttcctttctattttaaaccaacggggggggggggggggccaaaacaaccattacaggttattttggcaaaggggacactttttgaaggaaaaaacccgggggggttaagccccaaggaaaaaaggataccttggttttttttataaacagggggcacaacaaatatgctttttttatttgggacaaaccctttcccacatgcttgagggtccactctcacctttagcttggatattggg

SEQ ID NO: 355656 - DNA, 201 bp, Zea mays
ggaagtaacaaacgggaattgttcaaaagttatgtagagaaatacccttacaaaccctgaactaccaaacaacaacgtctaaaccccccccttcttcaaaggatgacaccctaaaaaatcttattgtcgtaagcagggggactaattcccaagcagggttctttcaaaaaaagaaaaaaagttaccccgacgaaaccatgt

SEQ ID NO: 355657 - DNA, 475 bp, Zea mays
ggtgaagttcttcagctaaaaatctattgcatgatatatacccaacaaaaatgtcttgttacataataatgtacatgacagggagcaaattccttagaatacgtgtatatgttacatacaaatactaattctgtcaccagacataaatgtaattggaaataaatcatcgagtataaagaatcttgaaagacgaaaacaaccatgaacctgtgaatgaatacacacgagaaaacgttgcaaagctccaactcaagaagtcaaatttggttgctatcttttatctttataccaatattttagttacaggataagaccaatgttctccttcatattctgcttgatgtggagcgagatgaaccgccacgactacttccatttgaatgatctctcttcaacaaggcctccagattttggaagcatttcaatggcctaaccttccaatgtcttttgtgaccaattgtgttgtagatggact

SEQ ID NO: 355658 - DNA, 499 bp, Zea mays
  unsure (1)..(499): unsure at all n locations
gaaatgtaacattataaacaaaagtttccattgtgtgacgtgacgaatatcaggttaagagatccacgcggatttcagtataatgccagctatctatatccctttgtacatctgacctcattactctanaatgaacttagatactggagcggggcgggggaggatctctttattcttttttcaatctcaatttcattaatggaaaattttaccaaaccatagatggtgacattttccaggaagattttggctcaaaaacatgacccaacaagtcaaagaaaatgaacttaaaacaactgaaaaaatagacttgttgatccatctccgaaggtccgcagatcagctggttttaccaatgccctgcataatggacaagttcgttctctctcaaaccattcagatacacactcctcacagaacatgtgtttacagctcaacaatatgggagcctgcatcttctcctggcatatagcacacatgtcaccagcagcattcacct

SEQ ID NO: 355659 - DNA, 282 bp, Zea mays
aaaaaaaccaaaagctgggaacagaattgcaaaaaaaagggccccccgggtttgttttgaaaattttttttgggcttcctccaaacgggtttttcacccccccagccgggggggtttttttacaatttttttggcgcagtttcatgttttagtttttagaatgggtcctgaatctttcatccaagggcttttgcttttgtttttgggggggaaacaaaatttttgggcaaagctttttgaacaacgttagggggacctcaggaatgggccctttaatccaaa

SEQ ID NO: 355660 - DNA, 430 bp, Zea mays
gttcggttaaccaaccgggtttcgttgtatgcgagcatcgttgttggtgggcccccccccccccccctcctgaaactaacgacgacctgctcatagtataagattcgcacaaatctctcaaacatgcatccatccacagaccagacacgcagacgaggccagacgaattcagccaacaagaatatccaaacacctaagaattaactgaaacccgcctgccggccgagcccgctacccataaaaaaccaacacttcccttcaccacccggaaatctccattctccttacccactctgctgttgaatccgaagatacaatactaaatactaccctggctgccgggccactcaagtcagtcgcgggccgactatgcccaagatgcccgctgcaacgatgactgcaacagggcggcgataccgactcggacgag

SEQ ID NO: 355661 - DNA, 187 bp, Zea mays
cggatagagctcgttctcgtttgttcgttctgctttatagtcaaatcattaattttgggattattagagatcttggtgtaatgattttttgtttgcgcatgcaagcactgttatattaatacgattaacacccgttgtttggctttaaaatgggatagttgatgtttctttaaaaaaaaagaaaaag

SEQ ID NO: 355662 - DNA, 476 bp, Zea mays
agggaaaataattaattactcaaatttattaattgccaaacatatcatgtctcttatatgtttatagttgatcaacaatggaggcacgcgcggaatctgaaaacaaacaccactggtttccaaaaagaaaagaaaaaaccacaaaaaatacaagaatgaaaaagaaactggatgtggcaaagtgcaaggaatctagaacaagcattatattacaaaataaccagggagggtacgggcttgtcaactccaaaggatgaagtttcaaaagttgatatcttgttttcaaaatcatttcctttttgcccaattcgcttaaaaaatatctaacgaggatatggctcggtgattggagccttatttgatgatccttgagcaaattgacttcctgaatcacttgactttgttgcctctgaatattgctcactaccagacagcataatcataggcaattgacttttaccacgcattaaaaatgc

SEQ ID NO: 355663 - DNA, 324 bp, Zea mays
gttagctcatcacaaatttggctggttaagctccagaattataagtacagaattgctggttaaaataaatgaaggaattttgctacaaaaatcttgcttccaatgaactagcgctatatggagccttgcgcgagaaaaacttaggatgactgttttgccagccactcaactcacaaaaaaaaacttggtaggaaaaaaaagaagtatgaaagcttagggaccgctttaatctacttgcgtatatttgcggcataaacctatctctatctgccttcattggtcattagctgggaaaacacttggctagtacttacatctgaagaa

SEQ ID NO: 355664 - DNA, 167 bp, Zea mays
caaattggagacccctttttgtactaaaagtattgaaatacagagcctcagctagacactgcaaaataaaaaaattaattgaacaatgtaacacttaagcccatttgccatcgtttacaattcaaggggaatctaaagttcttcacagatattacccaaaaacccac

SEQ ID NO: 355665 - DNA, 368 bp, Zea mays
aacaagtgcaagctttaactcatccattttagcatctaggttgtacaaataaatacaagaaacagaaaccacaccggacacaaatcaaactaaatgtgaaaatttaaagcacacacaaagagggagaacctcacaacatggtattacatgggttcaaactccctactttttatttaatcatagacgctcatgtagcagtgaccattaatactttatattaaaatagttttagctagcccaaggtttcaaattgcgattatggttgtaacaacatatcgtgatgttgtggtggtagagatcgagtcaaagttaaaccatctgacgcatgcacaatcggaaacctttgactcacttatcagttcgggggc

SEQ ID NO: 355666 - DNA, 333 bp, Zea mays
aaagaaaacgggggtttgtattttccaaaacgggaaaaataccctttgggcctcccgggtgcctcaacccataaaggataaggggggggcaaaaacaaaaaaggcctttggaaatccgggccttgcactaaatccttaaggaaccgcttctgggggatcagggatttaacccccgtttccaaacaggttttttttacacatttttccggggggcacttattggcatgggggaagtttcccaaggggggttttaggctttcaggggccatcagggggctgggggaaccttttttttcctttatttttggaacccccccccttttgtccaaaagc

SEQ ID NO: 355667 - DNA, 474 bp, Zea mays
cttgattctgttttttcacatggttgggttttggcaaaacatagaaaatcgtcaactttggagtccaatgatatattgctacaccttgagaaaagttgggattgaagagttctcggtgactcaaggatgagaagacgaatcagaacatacctctatctaatgacctgactacgaggcgcctatatatgggtctcgcatcgatggaatctttgccctatgagtccagtgctcacagttctaaagagatgagtatacatgggcatttctaatcctccccctgtgggaacccaccatctatgaagacccttgagttcagagcagttgatttctcatgcgcctggttctcaaatgctacaccataggacaggattttaatgttcctctgatgctggtctacatgctgctaggtttgacttcctgcatgcagggtctggcacgagattgcttgctgaaactgattagcatacaaaggaa

SEQ ID NO: 355668 - DNA, 324 bp, Zea mays
cttgattctgcaactacacatggttgtgttttggcaaaacatagaaactcgtcaactttggagtccaatgatttattgctacaccttgagaaaattgggatttaaaaattcccggatactcaagtgaagagaagaagaatcagaacaaacctctattaaatgacctccacaagaggcgcctagatatggttcgcacattgatggaatctttgccctctgagtcgagtgttaacagttctaaagagatgagtatacagggcatttctaatcctccccctgtggggacccaccatctagtaagaccgttgagttcagagcagttga

SEQ ID NO: 355669 - DNA, 348 bp, Zea mays
atccaaaaaagcatatgtttatactacgaatgagcccgagacaggtaccaatgtacattaaaaatccataattaggctcaaacggtgaaaccaaatgactttagaggaggggttggggcaaataacaagacagtgtcaatagctgggatccttaaacaactatttttttcatgtctaaatactaagtaattacagttcctttgtaggccaatcagtttccgcaagcaatctcttgccagaccctgcatacaggaagtcaaacctagcagcatgaagaccaaaatctcgaggaatcttaaaatcttgtcaactgctgtagcatttgagaaccagctgcctgagaaatca

SEQ ID NO: 355670 - DNA, 169 bp, Zea mays
ctgtatatctatcagctatatacattcgtttacaaacagcccccagtccttgaattgggcacttttaaagaattagattgtatggcctcagaaaaaaaggctcgcgttacatagtaatacagacagcaagttaacttaaaatttttttcccggaaaattggatatacag

SEQ ID NO: 355671 - DNA, 169 bp, Zea mays
atccaaaaaaggatttgtttattcttcaaatgagcccgagacaggccccaatggtcattaaaaatccttattttggctcaaacagggaaacaaaatgacttttgaggaggggttggggcaaattacaagacaggggcaatagctgggatccttaaacaactattttttt

SEQ ID NO: 355672 - DNA, 143 bp, Zea mays
gtacataaaaactggggtgttcaatacctgaaagtggataagctgcacacaaagaaagggatggatatagataaagaataatctggagatcatttctttgcggttattgatatggataccctagtatcgagctaaaccactta

SEQ ID NO: 355673 - DNA, 173 bp, Zea mays
gggggaaaaggcccgggcccccaaattcccttttgggttaacggggtgaaagacccccaatccggataaaccaagggaaatttggtctttttttttttttggacccacccttggggttccttttacaaaaaatcccggggggtccttccttaaaaaaatcgggcttttttttt

SEQ ID NO: 355674 - DNA, 192 bp, Zea mays
aagtaaacgaggatttggaatttccaaaacgggaaaaataacaatagagcatcacggatgcatcaacccataaaggataaagggggtgcagaaacaaaaaatgcccctgcaaatccgggcatcgccaaaaatccttaaggaactgcaactgatggatcatggaaaaaaccccagtatccagaaatgttcttt

SEQ ID NO: 355675 - DNA, 437 bp, Zea mays
  unsure (1)..(437): unsure at all n locations
cgctcccgctcccatagttcacattggcgcccgacgcagctgagttcgtaacaacgttgttaatgacttcattcccaaccccagtgaactatcaaccgctcccaaagttcacattggcgcccggggcaggctcagtttgtcaccgcgttaccaccgttgcgtagggctcgggaagctcggcatttggccattctcgctctgtgtgtttttctctctttcctcaagctttgttttgctttgctttggccgttttctctttgacctaagatctaaaattgtactttaattctgatattttgttgggtgaattaacacgaatccattttttgggttgaatacctgcctgnagggtaggttctttggccttgcatgggagagaatcaatttcacacagcagaaaaatattgactaggatttatagatagcctttactttct

SEQ ID NO: 355676 - DNA, 191 bp, Zea mays
aatcatctattttattccttatctcttatagaagcggaaagtcaaacacaccactatgcaacaatgttgtaatacaaaaaattatagaacctattgaaataaatggccaacagaatcaaatgatgcatccttcttgagttcaatagttcctctcaaaaaccatttgtaccattttgcagatagctttgggt

SEQ ID NO: 355677 - DNA, 473 bp, Zea mays
ttcggttaaccaaccgggtttcgtagtatgcgagcatcgttgttggtgggcccccccccccccccctaaataaacgaccactgaaaaggggaaacgacactacaccaggtccaactgataacagttcaaaaacaaaagaaataaaaggaataaagaaaacggacgccaatcctagatgaatgaatcggaagagaaaatctaaaattactaatacacacacaaaactaaaaggaaaatgcagaatgagcaaacccgcactggcgccctacgatgcctatttgacgatggcgctctttaatatgattaacctgcgggcccccatcatcctcaacctggggagagtgaccctcaaagcctatcagccgggccaaggcctgccgacgccgaatcacttacctacgacgtagaacgcctgccaacatctgaggaagaaattaacgaggatgtggatcctctcgaagctctcctagact

SEQ ID NO: 355678 - DNA, 264 bp, Zea mays
gttcggttaaccatccgggtttcgtagtatgcagcatcgttgttggtgggcccccccccccccccccccagaatcatgaatacgactaaaaaaccctagacggaaacaagataggtccacccctgactgttacaccccagacgtcaaaatatgagaaagctctaagattaaccaaaaaataacaaaacaaaataacttcaaactaaaccacaactcaagagcctctgcatcttaatactaatcggcgcagtaactctctgaccg

SEQ ID NO: 355679 - DNA, 328 bp, Zea mays
aaaattcaaaaggggaaaccttttttgggcctaaaagtttggaaaaacagagcctcagttagacccggaaaaaaaaaataattaatggaacaagggaccctttaagctcattggccatcgtttacaattaaaggggaatttaaggtttttcacagattttttccaaaaccccccgggctttttttttttttggaccacaaaacctaaaaggcttgggcctggactttggctttaaaaaggattgggggggaaagaaacctgaataaggaaatttcaggggaagggccgggtttttttttgggggggtttttttttgggcttggggggc

SEQ ID NO: 355680 - DNA, 408 bp, Zea mays
gttcggttaccaccgggtttcgtgtatgcgagcatcgttgttggtgggcccccccccccccccaccaaaaatagatccatgtaatccaaaaaccacaacaaaccgctcccagccggtccggcccagaactcaagcgagaacgaattccaacttatccgctccggaccgggccaccaccgccggatagaaaatacaatataaagaatgccagaccagcagaagtccacaataatgaaacaaggcagtaataaaacgaatacaaacaaacatacttcagaaaccctgactctccgttacacggacgtagacgaccgacccgtacgaaaaccgagtccccttagacaaaatgaaccgccgtcgtgccgatacaactgtctcgtcttatgatattactgaaaaggacagact

SEQ ID NO: 355681 - DNA, 251 bp, Zea mays
caaaggcacaacagtttatttttttttgggaaacctttttttgcggggttaagggatgggtatggggctgaaagaaacttacctcatcctcattttgaaataaggaaacaaaggtcaagcccccccccccgggggaagggaaaagtttttgcccagtttaaaaaaggaaaatccttgccaagggaaaaaaaaattaggccgttgcaaaaatttgtttttaaacaacctgtaattttgggaaaaggggccaa

SEQ ID NO: 355682 - DNA, 199 bp, Zea mays
aaagccacaacagtttatttttttttgggaaccctttctttggggggttaaggaagggttatggggctgaaggaaacttacatcatcatcattaggaaaaaaggaagcaaggggcaagccccaccccctgaaggataggaagagtttatgtccaattaaaaaaaggaaaatccttggcaagggaaaaaaaaattaggcc

SEQ ID NO: 355683 - DNA, 322 bp, Zea mays
acaaaacaaccctttccatgttttggaattgttttaggccaaaaacccaaattttgaggcacccataatagaagggaagcaatgggtctggttgttattatcaacaagacattctacggggggaaaaaggaaatatacatgcagaatactgatgcaataacttgcatagcatttggataaatggggggttaactattctaccgggcatgacccaaaattgcattcaagtacccaaaattgcattcaagtacacatgccttaacgcacgcgggccaaaacacaacctgataaatttaaggaatttacatgcatgcagatgctt

SEQ ID NO: 355684 - DNA, 172 bp, Zea mays
ctgcagaattttgggataatagcaggaaaaaaacactcttacgggttttcaaacactttaacacaatgggacaaagacactgaccggttgcgacatgatctgagcacatttcacaggtagcaacaagggcctaaacaacgggttccctttcaaagatccagctgaacttgac

SEQ ID NO: 355685 - DNA, 380 bp, Zea mays
gttcggttaaccatccgggtttcgttgtatgcgagcatcgttgttggtgggccctcccccccccccccccccccccccccccccaaaaaaaaacaattttgtgactaccacacctacaaaaaaaaactagaagaaaataaaggagagactgcgtcctctgacttaagcactaagcaaaagaccaaggactgaaagagaaagctcttagagacagaaaaagagagcgaagcatgatgatcatcagagaacacagaagtgacagtatttggagggtacccttgccgccgacgtcgacgagcatgacgacgtcgacaaggacctcaacgacgacagtcccgctggcgcattttcgtcttgcctttggcgcccgcctccagcag

SEQ ID NO: 355686 - DNA, 310 bp, Zea mays
aaaaaaaccaaaggctggtaacaaaattgcaaaaaaaagggccccccgggtttgttttgaaaattttttttgagccccatccaaccgggtttttcaccccacaagcgaggggggattttttaccatttttttgccgccccttcatgttttagtttttaaaattggtcccgaaacattcataccagggcttttgcatttgtttttgggggggaaacaaaattttttggcaaagctttttgaacaccgttaagggggcctcaggaatgggccctttaatccaaaaaccttctaaaaatgaatttggaatccc

SEQ ID NO: 355687 - DNA, 252 bp, Zea mays
aaaaaaccaaaagctggtaacagaattgcaaaaaaaaggcccagcagtgtttgtattgaaaattttatttgggctacatacaaacaggttattcaaccaacaagcaatggtagattttttacaatttttctgcagcagcttcatgtattagtttttagaattgttcccgaatcattcaaacaatggcttttgcatttgtttttgagggggaaacaaaatcttttggcaaagctttttgaacaaggttaaggg

SEQ ID NO: 355688 - DNA, 450 bp, Zea mays
  unsure (1)..(450): unsure at all n locations
tgcgttaaccgttgcgtataccgagccgcgcgcgcgaaaagaatccacttcatcaccctcgaccgacccgnaaaaggttccgaggcccttagggacttgccgcaaaaggggcaggccaccggagcgcgtcccgccggcgccgttgccgcacctgctttagctttaacccgcgaggtgcgcggcggcgcccatccgccgccggcaaccaaccaaaccagacagaggccccgccccccccccccccaggcaaacccgcgaccagcagaagacgaagaaaatattgacattccccccccccgccccgccgccccaccaaaacaacaacatcccgctctattcattcttatttcatacgtttaataaaaaaaaactcgagatgatgatgtccgtagtggttgtggtccgcctagtaatagtcacgctgcttcttactaggggtggaggtagtag

SEQ ID NO: 355689 - DNA, 591 bp, Zea mays
tcagtggctgattcaggttcggttaaccaaccgggtttcgtagtatgcgagcatcgttgttggtgggcccccccccccccccccccccccccccccccccccccaacgacgacgaccatcacggcccaccattcgggcctgaggacgaaaggaaagaagtaaacaggactaaatatggacagaccccggactactagcaatatatcacccccgccctctccgcatacgcttgcagaacatcctcccgccaaaattcaaccaaccaagaataacactacactcctcagcatagcatttcgccgaaccggccttgatcttgatgaacatttcatcgccttgtgggcgcgcctgttgacccaggaacctaaccgcgcccgggacccctagggccgaaggaaaggggaaacatcccgaaagcccgcggacctcgaggccctttcttcttcctcctcttccgagagcgaggcaggtgaccccgtcgtcgacgaatacgaccaccaacaacatgacgaaaagtgaggtgacgacctcctgcttagagagagtccggcctggtaactactgtgcgcacgagacgttttgcgagtccga

SEQ ID NO: 355690 - DNA, 330 bp, Zea mays
cctagacctaattaagacctaaaccattgccccgaaagctaccctccaaactacatagaaaggaaactaccacttcccccgcctgacattcagaaacaaaacaccctccaatatccagaacaaacccaatataccttaatattatgcggaccggagcggggaattgagcggacaatattacgaacaaccccgggccttgagacctgctctaacaaccctcgaaagcgccgaggcttctaggcgaggccccgcggatccatgaagggatcgggcaaccggcgcgcgagaaagcctcagatctttcaatacgctgaccgccttacgcctccc

SEQ ID NO: 355691 - DNA, 171 bp, Zea mays
gaagcaaatttcttgaccaaattatgttcaaattttctaacaaacagattgaaagttctgtactggacaaaactacaattgaacatctaaacttttgcagcttatatttttctgtccttatttatgcttcctgcttccatttttatccaactaaatacacaagtattccct

SEQ ID NO: 355692 - DNA, 399 bp, Zea mays
agccaaaaaagcatgtgtttatactacaaatgagcccgaaacaggcccccatgggcattaaaaatccatattttggctcaaacggtgaaacaaaatgtctttggaggaggggttggggcaaataacaagacagtgtcaatggctgggatccttaaacaactatttttttcttggataaatactaagctattccgggtcttttgtatgctaattagttttaggaagcgatttcttgccagaccctgtattcaggaagttaatccttggagtttgaacaccaaaatgagaggaacattaaaatcttgtcattggctggagcatttgagaaccagttgcatgaaaaatcaactggtctgaactcaagggtcttactagatggggggttcccacagggggagg

SEQ ID NO: 355693 - DNA, 308 bp, Zea mays
tgaatggggcatattcatctttttcttcgtcttcgtctttttcctctcccactttttcatcatcttctggttcatattctccagggtatccttatttccatttggcacaagagactaaccaatctttgagtcacagttaattgaaattttctttgtttttgttgttggtaggaacagagagagcatgtttttgcagagtgtagctgatgcgtcaccttcaagtttcttttccgacagaaaatctgtacggtttccaaatcatttcatctggggttaatattggttttggatgcaagtttgcattatga

SEQ ID NO: 355694 - DNA, 376 bp, Zea mays
gatataaagtttcacaaattctttaaatcttaacatatttaaattaagaatttggttcataactactagcatgaacaactacgcaactaatctaaaagaatgaaacctggtgattagtgaatgagcaccagttacaaatcaatttatttaataattggacccctgggaactaaacacagcacaatatgtgcagaagcagatgaagcccgaggcatccatattcttatttatattatctttctttttcatcaagtgttgaatcatcagttgggatactttctgtcacttgctgtgagttaaatagttaatatcccacatgtgtgttataccacttgtgactacaaattctggctcttcataattgataggatttccc

SEQ ID NO: 355695 - DNA, 408 bp, Zea mays
tggctgacttctggttcggttaaccaaccgggtttcgtagtatgcgagcttcgttgttggtgggcccccccccccccccagccctagatcctaccctaatcacgctagatcctaccctaaatacttcttgctgaaaactccacggccataacacttagctacgcgaaaatctaatgctgtatgagtatttatgacagttgcgactgctgcgacgcgctttaaccgcaatccacacccggagattaactctctacgcctacgaatccgcgcgacccttccgccggatcgtaaacattaccccaagccacgacctcctttcataactctccctggacaacgatacagacatcccattgatcaagcaaaattagttcccgctgtcccaacacgaccttcacgcttgatcct

SEQ ID NO: 355696 - DNA, 346 bp, Zea mays
ggggggctaaaaaatttgcttttttttttttccccttttggaaattttaaaaatccctggtttttaccttaaaaagaaaaaaaagttccttttgaaggggaactaacccctttggtttaaacccctttttaatgtttttaagaaagcccctaaccttggaatcccctttggttggtttggaaacaaaactaacaagggggggtttacctttgccccccatgccccattgtcctttgaagggaaccttttttaaacttttgccccggggggaaaacccttcctttatccgggaataaatcccaacaggggtttttgggcaacatggcaacccgggaatttttttttt

SEQ ID NO: 355697 - DNA, 405 bp, Zea mays
atataacatggtcacaaattacaacttacataatcataaaaaattagaaacaacatacaaaggaatagcaatattaagaaaatgaataacgagtaacattcaaatttggtgaaagcagattgtactacagaacttgagtgggttgactgtgtatgtattgaaagtgttgttactgctgcataaccttaacgaccttttggattcattatctgggagaacacagcactaggggttagcccatcagagtcttcactagccaagcttctaccttcaatgctcattgaaataccactgcttctggagtcggtcgcattaccatcataacccggattggagtcctttcctttagaatctgtgtataatggctccacttcacagtgaatgtcaccaaagccgttgccactt

SEQ ID NO: 355698 - DNA, 234 bp, Zea mays
ggcgcattgactacaaaaggcaggtccaacatacaagagtggcagatggttcgccgaagtttagggtctgaaattgacggccacgacaaactggtagatatgaagaaagtgctttctcctcagtttcaatgaggcgccttattatcttaagccttgtttgtgggacctaagcatctttcccgagtttcatgctattgagcacatgcgaacgattcggttgtggatagctgaagg

SEQ ID NO: 355699 - DNA, 418 bp, Zea mays
ctgattcaggttcggttaaccaaccgggtttcgtagtatgcgatgcatcgttgttggtgggcccccccccccccccccctggacagaaaccctaaagctcaaaccatggaagaaaaagaaagacagaaccggcgacgacacgacacgctccggctaaagacctaaaaagatccggcgggggcgcccaagataaaggaccctgaacgaacacacctcgcggagggcgcgcgcgcgcgcgcgcgcataataaacgaaagcggatactaccacgataaggcccgctaccatgcacctatacacttccatgatggccccgaggaggagcctactaatgcttctatttcacgccgcgatagcgcagatggccttttacgcgtttcttttcttgagacgctacgaactgggaaccgagaggccg

SEQ ID NO: 355700 - DNA, 417 bp, Zea mays
gcacaaaagctattaacatttaacaagaggcagcccatgaatttacatatcatatattcctcggaaaatggctgctcctggctctacatttcaactcataaaaccttaaaacttcagtaacaggaaattcccgaagatgaaattagattacaaaattgatcaggtaagcaggacactccactatcctaaacaaaagaaatttgcccaaacagttaaaagatactaaaatcgaccagtctaagagcagtccaattgttgcagtaggctgctagacgctatggtctcttcagttataatactttcatcatctctcttcaatcattcatatacgagtcccaactctgcataatctatctagttagagttttagcattcttgaacatctttgtcattgagatcaatgggaagggaaccttt

SEQ ID NO: 355701 - DNA, 358 bp, Zea mays
gaaaaaagaaattacaaagagacaattttattgcctaaaaggtgtactcacagcactttgttctctacaaattacaatagactgttgaacaaagaacagataatatgaaagcacccaaaagtaaacaagccagaaaattacagcaaaaaaggagctaaagattatttcctcacttgtccaactccgatagaaaaaatatattacgaaaaagctcatctattcagagtttagacgttgcgagtttgatgagatccttccgaagaattttgccagatggatttttgggtatggaggaaataaatgccacttttcgaatccgcttgtacggagccacctgtcctgcaacaaaatccataac

SEQ ID NO: 355702 - DNA, 219 bp, Zea mays
accaattaaaaaaattactaataattcagtacacaatgatttctggttagtatctaacctccgtaacattttcaaaaaataggaattactaatctaattatatgaaaatggaaatgtcctaatatctaaaacattaaggctatttgattcgagtagatcacattcaccgtgcaacaggcatcatgatttcagagaactcgaccccaggtgtcatatctg

SEQ ID NO: 355703 - DNA, 401 bp, Zea mays
catcacacatccatcagaaacattcacaatattctctttcaaatggcgcagcaacaacaaaatcaccgagacgagttcgggaacgaccagagggcctatgatgtccgccaccgcgatcttgcggtggcggaaccagttcggaagccgaactgccatagaccccgtggcgaactacgcttacgggaacatagggagtggcgggtacggagcgccacccacaggagaaccgtatgctggccctaactatgcagcctcggggtttgaatacagtactgcttatggcactattggtgctgctcccgtgtaaggcgctccgactgaaggccatggaaccgctgatcgcggccgtggtgacggtgaaaggaacaagaatatggacatgaataggaacaggaacatgg

SEQ ID NO: 355704 - DNA, 421 bp, Zea mays
ataagcaaaaaagacacaacagtattataccacttccaagcaaagatacacttccttctcacaaacgtgttattataccactacgatactatagggtgctctcacatgcatgactcccccacatgcattttattttcaaccacacaaactaagaaccaaccggcctcataaaacaacacttgacaaacaataaaacaagacctgacaaactaaattattaggtggtctgaaatcaacctatcatccatccatgatctcaatcaataatcatatgacataattatttagcatgatcatgaatgacgtgatgctcaaagaccgatcatctaataatttctcctaacaaacaacatttatatatatatagcactagtagtataagttactataaattaaagtactagaacttaattatcttcac

SEQ ID NO: 355705 - DNA, 308 bp, Zea mays
aaaaatatacaacatctattattatacaaccaattaatgccacagttatacgtattaaataaatcaaaactgcaactcaatacattgcactcttctacacataaaaaacgaaacagaacacacaaaaaagcaaatgttcaacacattcatattacagcaaaactttgaaccagatctcccatgcaatgcagagtgataaagttcttgcccttaagttttgttttcaaagatggcaggtatgtaacaagacattctccagtcatgccatatatcaactaattcattctgctaccattttcattagatct

SEQ ID NO: 355706 - DNA, 339 bp, Zea mays
aacaaattctcagggcatattagtgcaatctcatcatattccttggagagcttgtctttatcccacaacaagttacaaggcaatattccagaatcaatttttagccttctaaaccttacttacttaggtctatcatcaaacaatctaagtggatctgtcaaatttcatcgtttctccaagcttcaaaatttggaagaacttcacctttcacagaatgatcagttatcactaaatttcaaatccaatgtcaattatagtgtctctaatttaaagttcttgaacttatcttctatggttttaactgaatttccagaattatcgggaaaagcccaattttag

SEQ ID NO: 355707 - DNA, 547 bp, Zea mays
aaaatcacagcactatgatgaaggtgtgaagatagtaatacaaatacaaatcttagacttatgagaacctactccccacttacagggaaaacttggttccccacctcaagaaagaactaggttaatcaagaattatacaagttctcttcacgtaaacatgcttgcaaatctgcaatttgatgcccaagatcaaaatttcaccataactagaccagatatcagacatgttccctactgacccttcacccaccactgattatgaataatacatgtgatgatgcattctaaacttgatgcaaccaaattccagcaaaagagaacaaccatcagaatgatgagggactcgtctttagtcggatcaaattttcatcataatcatccattcttttcttggctgaatgatgccaggctagtcttcactcagatagataaagccagtgttgagtgttctttaaaccttgtgttactcatgtcatggcattttgatcctgtaaatgtgagacacttgatcaggaatcacaagaaaacacttgtgaagttgatggcc

SEQ ID NO: 355708 - DNA, 194 bp, Zea mays
cgggtttcgtagtatgcgagcatcgttgttggtggcccccccccccccccgctaataggtaaccacgacccaccaagctctagcctgcccttaagaaccgaatccgagcaagaagacggactccacggaacgaccaaaaaccttttaaggataggataggaaaggaaaggttagccacctgatgaggagcgacg

SEQ ID NO: 355709 - DNA, 266 bp, Zea mays
ggggaccccaaaacctttttttgggcccataggatcaaaaaggcaacaaaaaaaatgccccggggaaaaaaaaaggggaaaaaaatcgcccccccccctttgggaaaggcccttataattaaaaatcccctaaaattaagggaaattgggggaacttttgggggcaaaaaaaaaaaaaaaccacctctggggggggggtatttttttggatagcagctttgaattcaaaaaagggaacttttccatcacgggggggcccccttggg

SEQ ID NO: 355710 - DNA, 309 bp, Zea mays
gaaaatgttcaaacattaccggtggccccggttagtggttcataaacctttctctaagcttccgactctctctctcttacggggtctttgcagtccgtggaagagcttgttgggttatctcagctttcacctttccaggctctgattcaaagaaaaatctcaacttccttcaacaattcatctctacaatttctggatagtgtcttctgtttagcaagaatggctcaacattctaatgttccaaagtttggcaatcaggagagtgaagacaacgttttagacacagctcattctgacaaagcccagaaa

SEQ ID NO: 355711 - DNA, 304 bp, Zea mays
agaatcacaaccaaaagaattgtataataaatcttgtatttcccagctaaatacagacaaatcgagttataaagcgtggcaattacataacaaaataaaaaatagataaacaggacaaatcacaatcttccacacaaagtgtctctattgaccaaaagacagaggaagaaaaaggcaaaaaattaagacaattgttcttcaatgatttttttctaggaagacagagccttgaatatttacaagtgctacacacacctcatggccattcacaacactatttttatctcttcagttcagattataa

SEQ ID NO: 355712 - DNA, 242 bp, Zea mays
ctactaatagccaaaaatcaaggacttgttattaaagccaaagcgtacattttttacccctgatgcttgcaaagattgacttggaaacttagattttgtcctaaactaaagtagacaataatacgtttaaaaagttttattaaaaccaaatatattgcccacgaacaaaaccagtgccccgatgtatggagccttctaacaaaattccccgctaggctctcttattcccttaattttggtag

SEQ ID NO: 355713 - DNA, 334 bp, Zea mays
tccatcaggtaagacacaaagttttccaaccaatataaactcttgcattattattgatttttcttcttccacatttttctatgcattttgtttccttttggtttattgcgttttatttttttgtttctttcatgtgtacaggccatcgggtctatctttttggattgtgtgtgcatgtatttgtgttggaaaattataatgtttttaaatctttttataataatatatattattactccttaattataagaaataattgattaatttatatttattggaaatatttgttaacttaattatcaatattaaatttatttaatgattacaatatttt

SEQ ID NO: 355714 - DNA, 513 bp, Zea mays
gtgtacaggccatcgggtctatctttttggattgtgtgtgcatgtatttgtgttggaaaattataatgtttttaaatctttttataataatatatattattactccttaattataagaaataattgattaatttatatttattgtaaatatttgttaacttagttatcaatattaaatttatttatgattacaatattttttaaaatttatctttaaccttaccggaatctatttatttttgtataggagaaaaaaagagataatttatgatattttgataaaaaaataattaatgaaatattataaaatggtattttattttctaaaactataatgtcttagaaataataaagacaggagaagtatgtataagtcattggattacaaacataatatatagttcattgattttcataataatttttttaaaaattataaaaaattacaagttaaacaatttaaataaaaaaatttataattttattttttgggtttatcttttttcattatga

SEQ ID NO: 355715 - DNA, 481 bp, Zea mays
tggctgattcggttcggttaaccaaccgggtttcgtagtatgcgagcatcgttgttggtgggccccccccccccccccacccccgaatacacatcacccacaccggacgactgaccgacctagctgctaccagacgcaacacagccccccccaagacacacctggaaacgaaacgacgaccgaactcactgctgagaagatcgatcaaaacccggcactcagaaaactagaggaaggggaacgaatgggcggggcttcaagggggacaccgacgaaggaaaggccacggaacccgagaagcgtggaaacttaaaacaaaaagaacccaaccccgagagccgcacgcattgctgggaaacctagacctgacagctaaaattcattctaacgaaaccaaaaaaggaagagctcaataaacaccaccgcacctacactaagaataagatcgacgaccccgtcgacgacgacgaagaacgcgacg

SEQ ID NO: 355716 - DNA, 300 bp, Zea mays
attgggcaaaaatgttcaactgtaccgttactaaaaattatgcatatcagcgactaattatttatacaaataagagaagaaaaaaaaggaaaaataggagagaaaattcaaaaataaacgaatttcattctctcacttctctccaacaacactaactaattgatataatttggttgaattttcatttcatttccaagcgggtgcaatcccaaacaccgctggttttcatgcccaagaaatcataagcagcagcagcagcagcagaagaaggagtggtgttgttgaaagtgacagcgttgg

SEQ ID NO: 355717 - DNA, 280 bp, Zea mays
aggaaccggccaaacaaaatacttatttcatgaaagtgagatctatggaattcagaatgagttgcactgaaaagtttcatgaagggtttctcaaaatcattaattgatccttctcacagatttatggaacatattttggaattaagatatcaaattctgtacacaccccaatactatgggttcctatcttagaaataccatccaccttgatacacaaacaatatctatcctatatacaaacaaaaggacccccagaaccaatgcatgggaaacaaataac

SEQ ID NO: 355718 - DNA, 236 bp, Zea mays
catgccaatactgtcatttttatgaacgctaaacggcaaaagccactgacaatatatactacaagtcaaattaagtaacagatcgtctctcaactttgttttgttgtattgtattctagttaatacaacaggagttcgcataaaacctgtttgttagaaatatgcctgacatagtaatcctattctacagccgcaaactgcaaattatacaatttagcacatgcaaaatgaaagta

SEQ ID NO: 355719 - DNA, 266 bp, Zea mays
tcttttttttttttttttttttgctcaaaatagaaaatactattcattttggagaaaaaggactgcacagatttgtatgcatgatattattttcatttgccacatggcaaaatgaaaagatagagtaatcaggtgaagcaactattttgctactttgcatctaaggaattctccccccaatccgtccttttcctggtgagacagtctagagagtaaaaagtacaaaaactgagcacaaggaagcaagcaacaagcacgaccggaat

SEQ ID NO: 355720 - DNA, 217 bp, Zea mays
tgtatttttgttttttttttttttttttcagttaaactatcgattttggacagaagtgctgcagtgtacatcatgggatattgaaacatgttgaagcagatttcccatcacgtctgcagctcacactttcttatatctcacgtgcacacttatgcacatactcattgatacagctataaatatagacaaagattagtttggagtttcaccagcaggc

SEQ ID NO: 355721 - DNA, 298 bp, Zea mays
ggaattcggttcagctgttcctaattcctattcctccttttttagggtcatgttcctctcacacggtatagggacactaccaacccaaccaccttacaatgccataacattctaacttttagcttaatacaataatatccaaaaaaaaccgttatttttttttgttctgtgtagctctttggagttgtatcctccttgaattcttcacttgataagtttttgcttctgggcttgcttgaacttcccaaagggaccagcccctgcattctgctaaggattgttgataccacaaatcatt

SEQ ID NO: 355722 - DNA, 287 bp, Zea mays
  unsure (1)..(287): unsure at all n locations
ttttttttttttttttttttttaggcttttccctgngacctgtttcctttattgaataacggagtacaaatagatggttgtacacaacaattctgttttcatattttataatatacaatctcacttcttttatggatacaaaataaagaataaatgatttcacatacaacaattgttcagggattttgaaggttggatatttgaatcccttttttcaattttgtaaagtcctattttctccattatttacttccaaggagctacacatgtattatacaacacactac

SEQ ID NO: 355723 - DNA, 369 bp, Zea mays
aaggggatctctcggcgtacatcggctggaatggggggaactgtagccgaaaacttcaattcactacgacaaatcatggataacaaatgctaactatcgatgaagtttgaagggatcagaatcgtcgtgaagaacttagaatctcgttgtcgtcattgagaagaatcccagctccgcctataaggcgagacaggagcgatgcgaggcagcggggaccaaagaaaccctagcgtggcgagagccaaggactggacagatgcccagctagcccagctttctacggaagcccgcttctatcggaccgttgcgggggtggcttgggtgggaagcctggtggctgaagcgacggtagaagagaatccaaacagg

SEQ ID NO: 355724 - DNA, 281 bp, Zea mays
aataaagttggttattttgcgcttcttagttgatcaagtccctcatccagcacagaatggaatggcaagacaagtccgatccccttcttcccagcgatcattcacaacacttacgacctaagcaagcaacagggagaaatcagcagctccaaattgctgctgacaccaacagattacaacgcctaacagcgacactagcacttcaccttcactcgagcggtgccggtgagctgccgggctcgcacgcgacgcagcctggcagccaaggctgactgctcagc

SEQ ID NO: 355725 - DNA, 267 bp, Zea mays
aaaaccagaaaaaaaatcagggggggcaaaacttgcccaaagtcttttttacaacaatggaaaacaaaccgggggaaggggatttaatctaaataaataagaaaagcgaatgacgaccttaatcctaaaaacagcttattttcccccacacattcgggcttggggggaccattataaaaaaattggtggtaacaaaacaatttttagtcttgattttactaaaaacttttatcctttagctacccacaaaaacaaaaaaaggggggg

SEQ ID NO: 355726 - DNA, 356 bp, Zea mays
ttctcgcgcgagcgcgggaggtaacggagaccgcaaatcaacagtggttataactagtcgagagcgggagcagggagggtagccatagtggtagcggtcgaggcggcggggagtgcggtacgagccggagtagtgtggtggggtgacggtgccgactctgatgccgttgttgaatacggcgggggtgggggagtagaaggatgcggtgcagtcgttgttgtagagggtgacgtcgtggtcgaaggtgcggacgagcccgcggtgggcgaccgcgaaagcgcggaaagcgcgattgactatgaagacaagatggaatcaggatgcgggtaagtattacgcttagtgtcctacgcgtt

SEQ ID NO: 355727 - DNA, 433 bp, Zea mays
gttcggtaaccaccgggtttcgtgtatgcagcatcgttgttggtgggcccccccccccccccccccccccccccccccccccccccccccatctaattgagcctcacacacacatagacaaaccaggaccctgactacttcacttcatcaaaaaccgatgagggacggagcaaacaaaaactttacgatccaccaatctaaccttttggggtagggtcgagaaaccagtgcggaggcgcgctgttccgacggaaagggtcgacgttaacaagctttctaaggttaaggttagggtaacccttgagttgactacagagtctgctcccgaaaggtcgactaaggaggtggtcttcttattttgctcaattcctgatcttttcgactctggcgagtgggtgcggacacagcctagggtaagggttaaggaaattac

SEQ ID NO: 355728 - DNA, 372 bp, Zea mays
gctgattcaggttcggttaaccaaccgggtttcgtagtatgcgagcatcgttgttggtgggcccccccccccccccacctatcaaaagctctaattgaccatactgaagctcgaaagaaccagaatgctccgatcccccgactcccaaattacagaataccctacccatacagacacacagcacactctcacgagaaaaacccaaatatagagagcgcgaatcaggagcccacgaaccgccaactgcaaacgcctatcgtacgaccttggggattgatgcacaccgatcattggaatgcggacccgccgcacccgcgaaatgcccccccgctgaaaaccaggcctacgcccgatcctacagaaaagaagtaa

SEQ ID NO: 355729 - DNA, 368 bp, Zea mays
gttcggttaccaccgggtttcgtagtatgcgagcatcgttgttggtgggcccccccccccccccccccccccccccccccccccccccccccaatgactaccatccttaaggtcatgaagtcagtttgacggaagcatcaacggccacaaccaccaccgaaggaccgtacagaaaagcccatccatcaaaaggaagcaaagaggcataataagcggggcgttataattgaggtatagcttagttcccgagattaaccacatgatgcgctaccctaagatggagattgtggtgctaatgttagctctggctcatgggttgcgcggcagtaaaggattcctgactgacgactgacgggccgccgatcgag

SEQ ID NO: 355730 - DNA, 360 bp, Zea mays
  unsure (1)..(360): unsure at all n locations
ccccaccccccccccatagtttcgccctctaaggcactacgcctctaaaagggataaatgtacgccctactgagcgacattaccttggtaccgatcgtgtctccgttcttggtcctacccgtctagaaactaagttcttgtactattcatcttgatgcggttgttgcggaggtgagggcgcttatcttaaaccgcngtgattcgccngttanntaagtgagttgacnttttaatattccgattaatcttagacaacccgctgcacctaaccctagaatcgcttctacgacgcctgcagcttctacgtattcttcgtatcttccgcgccctatataagatacagaaaatacgacttcttac

SEQ ID NO: 355731 - DNA, 425 bp, Zea mays
gttcggttaaccaaccgggtttcgtagtatgcgagcatcgttgttggtgggcccccccccccccccaaaccggaagagaaaaccaacgaacaaaaaaactactgagctgattcccgaagctgcggacgggagataaacacgctttgaaaaaaataaaataaaaagcagaccccccaacgctaacggcttcttgatacacctaaagacggcccatcacgctcctcattatatgcagaacgagaccccgccgccgagcctgaatggaaagagaaccctaaagacctacctgaggccgcgcccgataataatacagataaacatatttaaataacaccattacctaaattattttaatattaaaaaaaaatatactgctgggacggatcaagaaaacaattcgcggctggaacggattaacccgaaaa

SEQ ID NO: 355732 - DNA, 386 bp, Zea mays
tggctgattcggttcggttaaccaccgggtttcgtagtatgcgagcatcgttgttggtgggcccccccccccccccccccccccccccatacttaaagaataatactagcacgagaccctcaatgcccccacccgtccctaaggaatcagatgaatgcccccgactcacttaacttgcagagactgcacggaattataaactcaaacagtcgcgcgaactatactaccggccggagaaacgcttcagccctccgaacaagaagaatggtcgtgagcggcttaacttagaacgggcggaaaagccggatgaattcagcgtcgctcaaagaatcactagagctcgccgttggactgaggcttcacctgagacggaaatgacccctcag

SEQ ID NO: 355733 - DNA, 437 bp, Zea mays
gcgcccgcacgaaagttacttctgctattacgcacctatgcactgccttgaagcccttaattacttagaggcccttaagctacttaggggacaccaatataacggcacaacgataactaatcgacgataatgacggacaccttccctcctctctcggaataatacggatgctagatagggagatacttgaagaatcatccgccactgcatagatcaagagctccagcgcaggaagcggcagtgatggctgacccccgtcggagatcttaagctatcggaaagactggaaattatgctggaccgtacgaacgaacaggaactcgctctaactagactcgtaccatgtaaacttacggcgtacaatgcctacgtgccttattccgaacactcaccaccacggactcagccacccgcggcatccccaaactagtaaagga

SEQ ID NO: 355734 - DNA, 497 bp, Zea mays
gggtttcgtagtatgcgagcatcgttgttggtgggccccccccccccccccccccccccccccccaaggactatgaatgccctcccaaccaccagatcgcagtatcagccaccgattgatacgagcgctattcctctggcagctcctttgtgctggatgcctaggcctccttcatgctggagctggatgattatcaatgagatggatgcgactgccggcaggtccgcctatgcgctgatgccggcggacttatacttgacagtatgcttgtactagttgttggttgaatcgtgcgattagttatccgccgggttgtagtcttgctaggacttctcgatttccgtcgcgtaattgtactcagcttaatggccgcgggctgtggccttcttgtagtattcatgggcttttcagtactatgatgctggggtgagttatgagtcgtcgtaagaggtcttcgggtcctcgtgcttgtaggcttagggcctgagctggggcta

SEQ ID NO: 355735 - DNA, 486 bp, Zea mays
  unsure (1)..(486): unsure at all n locations
gcgagcatcgttgttggtgggccccccccccccccccccctaaacttgaactagacgacaccgaaagaccggctattcagacgcattttcttcaacttacgagtacggaaactggcgccgaggaccctccaattgggcaaacaaccctcatccgaaaaactaacataaagaaatggtacggcaacggtacccaacggccaatccccacatctcaaaaccctattggcacctcgatgggcattcagacgaccacctaacgttagatcgtatatcttctagaagtagaagaagaggattctcctgctcggtatactggaggtgacgaacgacgggatcaagcgacttagtagccttcgatgtccagtanttagtcctaaggtatgtatatgatggatcacgtggcggcccatggtatgaggagggtcccgcggctcgcggagtaagatctctcttaatagatctcgtggtgtgtgttctacttcttgg

SEQ ID NO: 355736 - DNA, 287 bp, Zea mays
  unsure (1)..(287): unsure at all n locations
ttgcgtatgcgaatggtgttctacgtaaggcgtccctgagggccgcgggaagacgagattcctcnctaataagaatgctgctgaagttggcaacgccccgccggacctagaatcaccccgaccccccaaacctcagacaaagcgccggcacgaccgattgtcctgctgcctaggccctgccgaccacacgacaactactactactcaatcccgaccgatggagacaaggacaggcaaagagatgaaataaattcacggaaaaaataaacaaagctcctctagcctaa

SEQ ID NO: 355737 - DNA, 431 bp, Zea mays
ttcggttaaccaccgggtttcgtagtatgcgagcatcgttgttggtgggccccccccccccccctcccccccccccccccccccccccccccccccccccccccccccccccccccccccttaagaacagccccccgccccgacccgaacctccgaccgattcgacctgggagagctagagctggagggacttctactgtctagagaccaccagcgaacgacgtggtgcaaactagcgaagcatgcatgcatggatgttgcacagcagatgagacatcccgccgatctttttagaggtggttgatgatgtcattttgacttatcgttgctgctgattggtgagacgtggtcgatcctgctgtgcacgctgtggtggaagatggggtgtaggcttggtgccctgttgctgctgctgattacttagcttatta

SEQ ID NO: 355738 - DNA, 310 bp, Zea mays
  unsure (1)..(310): unsure at all n locations
acctagacctgctccaaatgatgagtcgactgaccctagaagttcggacttggcgtggccgggttgcgctatatatgaataacacctgctaaactttgataaacaacctattaaaagtgataataagcctgatgagcatactgtacctactgttttaatcctncaggacactctcattaactcttaatccggatgatgttgaaagagcgccgtccagcactgcttctgatggtacaataccgacttatattctcctaaaaactcgcgtatatccggactggcacagaccagcctaaggagccttctcctc

SEQ ID NO: 355739 - DNA, 435 bp, Zea mays
tggctgattcggttcggttaaccaccgggtttcgtagtatgcgagcatcgttgttggtgggccccccccccccccccccccccccccccccccccacacccgctgataacccctctacaacatgattaaaaaaagagcgccagttgacccgaaagagacaaagagaactctagaaatagagctagatgcatgtagactacgctatgagacacgagatccatgaagaatctggcaaagaagttgccgggcacgaaatacggatgctaagcctaggacggctttgcgtcggccgccttgggctcggcgttgtgtgcggtgttgggttgtgacggcgttgtgtatggtgatagtaatcgggcttgggctgttgggcgtggttatatgggtgcgcggatctcgcggatgccggaggtgcctagaattaagcgtagtact

SEQ ID NO: 355740 - DNA, 396 bp, Zea mays
gttcggttacaaccgggtttcgtgtatgcgagcatcgttgttggtgggccccccccccccccccccatgcatccataaattacaattaatcagaaagctcgagaaacaaccatgataacgacagtgggaagatccgaacagccagactataggaggacaacgaacatggatacgaaacccccgcagaacgctgggcttctttaccggagaacgctcttaacaaccccgggaggcaacattacgttcccgccgagcgctagctagccttcgggaccgccgatcccaaaggcctgcctctccccactactacgcagctgaagcggccgcttgccgcgctactaaaggcgacgaattaagctacgctgcaaacgaggacgccgacggacggcaatacta

SEQ ID NO: 355741 - DNA, 375 bp, Zea mays
  unsure (1)..(375): unsure at all n locations
tgctcctcctaccccttggcctgaaagcggcctaggactgcaccgggactcgaaagctgctcggtcttgagctccttagagacctgaggatatcaggcgcggaggttggaacgacgctataaaagatactcgcccttacccttgaccgcgcctccatatgcgacaagcttaactagatgagcgtatccctttaaaagatctaacgaaaaatttctgcactgcatantctttccattaaaacagcagagtaaaattatttcctgatctccttcttagaaatatgcattatagaaccactacataacatattctttttatactgctgaatcctgcccagctctcagcgaacaccctagatgggaggtgggcaaaact

SEQ ID NO: 355742 - DNA, 446 bp, Zea mays
ggctgattcaggttcggttaaccaaccgggtttcgtagtatgcgagcatcgttgttggtgggcccccccccccccgcccccccccccccaaaattgaattcagctaagatctgctggaaaacaggactgacatcgggacgacccacgtactggcatacccctcgcagagaaaagctattctaggatgtgccggctgcaattttgctagtgaaaccaactcgtcgaggaagctccggcctacggctatttccgagatgaacacattgtaaataaggctacacggaggcttcgcatttaattacttgatttgctacacgggatacacggccttgtcagcgactaacgtcggcacgtgctgctaagccttactatggatggtctcctattacatagacggcctcggacaagccgctacgcgttcagtggcgacgaagcccccgccttga

SEQ ID NO: 355743 - DNA, 410 bp, Zea mays
ccgttgcgtatgttgacagatttgaattagcaccgcgcctgcgactgcgggccgcgattcatgatccactgctttttcgatctttgctgattctactaaggagcccagcacacctcacgcgctaattactcatccacctggaaaggaatttacagctaatacgacacccgacttgccgccgatgactttcttgactaaaaatgcccttgctcttcctaacgcttcgatttagttatctaagcagcctactattctttacgcattcaggcctacgacgctacctcttaaataaaacagatctaatgatgacgccctctcgggaatcctgccgtattacgatgccgatgactttatatactttccccggagccctgagacgccgtcgaagcgggctccccatccggccagac

SEQ ID NO: 355744 - DNA, 464 bp, Zea mays
ttcggttaaccaaccgggtttcgtagtatgcgagcatcgttgttggtgggccccccccccccccccccccccccccaaaaaagggcaaaccccacaaatatcaattggcccaaagctccgctcaccatagtaggaccccgccgagaaagctcacatccgattctgtggcgctgaaggtacgaaaaggatgtgggcgggcaaaccagagctaagatcgagcctttcggatgcccgggtaagtaacgagttatttcaagatccgctcctaagagtatcccgcgattctcttatcgatcacggagttgtaatcaaggaatggtgcgaaagcttaagcctcgagggataaggtgatcttgaatctacttcagatgacaatgacggcccacgaggcgcccgtatctctttccaatacgtggaatggaacgccggaaccgatgattaccgcgctagactaagaacccgcg

SEQ ID NO: 355745 - DNA, 420 bp, Zea mays
  unsure (1)..(420): unsure at all n locations
aggcgtaatgctggaggaacttgccgcggtaggtgaatgcggcgttgaaatttatggagttgcagtcgcagaaatggtcgtcggtgttggtcgggtcttgttctaatgtcggacgtgttggagaggaacaactccggggtaggttcgcgccgccggtgagggcggtatacgagaaagtattcgtagaagtatacgtagacgcctcggaaaacggatatgggtattccttcgaacgcttcgttcccngaggaacaactaccgaatatagattgcccncttcttcctatccgactatgaacttgagggcgcagtactccgccgacaggcgcggaattggcgggaaccttttcattattaccgtcccttgccctgaaaggtgaaaatggacctagagcgccgagcggcgaaggggcgggtcta

SEQ ID NO: 355746 - DNA, 400 bp, Zea mays
ccgggtttcgtagtatgcgagcatcgttgttggtgggccccccccccccccccccccccccccccccccccccccccccccccccccccccccccccccccccccccaaaaaaaggaaaatgcttcaagataacctgaaaaaaaattaggatgatctccctcacctaaaaccccaccctatgcagacagaaagattccaccgaaggaagaatgaacttcataccccccagaacccccgctgatgatgccgactcaccatcccccataacctccggctaacgaccgacagaacttgcccctgaccctccccctatttttaagaaaacgccccttgaaatgccccctaagaagtccaattttagacgattaactctgggccgaacggaaaaaggcagcaaaa

SEQ ID NO: 355747 - DNA, 414 bp, Zea mays
ttcggttaacaaccgggtttcgtagtatgcgagcatcgttgttggtgggccccccccccccccccctgacaaaaccaacccacaccaccaccggacagacactgcaacgagaaccgagagacttaaagcttaaaacatttcttccgaggcgcacaaataaactccggaactgcccctcaggcgcacaagacgacccacccacccacccacccacccccgaagtgacagacacttgaaatgtctggccttgaagcctttgaagtcgccaccgaacgcacccacacagccgtccccaccgtacttggccgcgccacccgaccgtccctgccgtagccttactggtaactgagcctgcgtgcatgtaaattgacggacgatgaggctttccggagtaagagctgctgctcggccccg

SEQ ID NO: 355748 - DNA, 229 bp, Zea mays
gttcggtaaccaccgggtttcgtagatgcgagcatcgttgttggtgggcccccccccccccccccccccaaaaaattaaagttagcgataaaagccaatgagaaatttcccacacagagaaaggcggttttaaaacaaattaaagcaaaaaaaaaagccgagacggcggaaagtgcactcatccgcggaaagccaaaacgccgaacccccagagcctagaataagtact

SEQ ID NO: 355749 - DNA, 390 bp, Zea mays
ttcggttaaccaaccgggtttcgtagtatgcgagcatcgttgttggtgggcccccccccccccccccctaatcctaaactagcctcaacaacgcataacataattatcatggaccaaggagcgccagaccttccccgaactccaagaagatattctacgcgggatccttggcgttcagcgcaccgttacccaccaaccacgactgaaatacccctgatgagaatatcagtagaatgtgcacgatatataatcatgcggtcgcacggaggccctacattgatgaaacagccgtaacttgatacatcggtacttaagtcttggatgggggcccacctcgtgaaagaacaccacctccgcgtcaggcaacctatcagggatgaacgctaccgc

SEQ ID NO: 355750 - DNA, 410 bp, Zea mays
  unsure (1)..(410): unsure at all n locations
tgcgttaaccgttgcgtatgaccacaactattctaacaggaaatccagataacttacacttgggatacaaatgccggaaaacgactatttacgagcttaagagtcacacgagctaatactacccgaatccgactcgataaaacttgccaaactgctctataaccgggtctttacttcttagaagggcatagggaagaggaggaaatggaccctcctttttacggccttaatctccttacaactggccgagactttgataaaatcacttaacgaatttcaacctcttaggctgactgctgcggaattgcgagaaanacttaataggcgagattctggcgaaatatacttacacgcaataactttactaccgacagacacgctagagctcttgatggacatagcccgcatgc

SEQ ID NO: 355751 - DNA, 339 bp, Zea mays
gttcggtaacaaccgggtttcgtgtatgcgagcatcgttgttggtgggcccccccccccccccaaccaggaacattaagatctaaccccttaaactgatctcataagtaagcccacactccccctcaaaagatcatcattgcacgcccaccccctcaaaccagagccggaaccctaacatagacgcaaaacatcaaaacagcaaccaaatgccaacacaacctccccgaacgacggagcctactgcggataatccatatcgagaccctcattgggaacaatgggacggaaacccttgagtatatcacagacggagccttagcctgtcaaaccccctcct

SEQ ID NO: 355752 - DNA, 399 bp, Zea mays
ccgggtttcgtgtatgcagcatcgttgttggtgggccccccccccccccccccccccccccctacctgaaaactgaaaagcccctaaacataactaggtccaaaatcccaagtacaagagacataggctagaaaacactatcgagcgaactgcgaaggaaggagcagtacaggaccagaggaaccacattccccatagaacgatacaataaaaacccaccgcgttaatgagccggttttaataaagagaagcgcgccctgactgcccgacgagcgccctgactgcccgacgatccctccgacccagccttctgctccgactcttgttacgattcgtaggagcgtttctgctcacggggagcgtcctcgtcaggattagagaatgccgagaaatcctggt

SEQ ID NO: 355753 - DNA, 152 bp, Zea mays
tcttatcacaacagttccattgtaattaagtactaagtataaactctctcccaatagatgaatattcttttttcttgttgccgccaccactcttctaatgtctagttctgagagcacaaacgcgagaactagaacagcgtcatggttttcta

SEQ ID NO: 355754 - DNA, 353 bp, Zea mays
aaaagaaattccatttttattatataaaaatatatataacagattcatgaatggaattttcacatcatgacactccagaaactaaacattttcacatcatgacactccagaaactaaacattttcttgtacatcattaaccttacaagatgttcactgttgctcaaactgtggggagagcaggatatttctcaacatcaaaacgtgttacaaaggggtagaaaatggaaccagcatatatatgattcccaattttaatcgcactagtcaatgctaatttgggatcataataatgtgcagttggttttccttctaaatccacgactagaactcctccattcttcgagatagata

SEQ ID NO: 355755 - DNA, 227 bp, Zea mays
cataggaacacaccttggcttcatttcattgctttttcttgaagggtctaatgcccttgggcagtgtgcactaacgtccatcctggttaattgtggtggcttcaaaaacatttttttttaaatattgtccacttacataaaaactttagactcaaaaaaccttctaatgtatcaaatcacatacagaacattcgagaaatgcaagttattacatagtgccttgaaaa

SEQ ID NO: 355756 - DNA, 255 bp, Zea mays
gggtttcgtactatgcgagcatcgttgttggtggccccccccccccccccccttctaaagggacacacgaccgacgaccataatgccgtcaccacgagagctaaaacacatacgacacaataaccggggaaatcggaaatcgatgaccctgccgccccgataacgacgcgacggttaatgccccgcctcgaaatccgcccgatccttaaccctccccggttaggctatgaatcccggataccgataaacggaacc

SEQ ID NO: 355757 - DNA, 407 bp, Zea mays
aaatcaaaatattttttctttttggcctagaaacatatcggttacaaaacatagagaacaagactagaataagttcaactgcctatactccgaacaaaaatgacttaacctttcaaatcatcagctatgacacaatgaagtcgtgctggaatccttgagaatgcagcatctcttcaactcccttgcccttgagcttcatctattttctttttccgttgtttaatgcgatcagtctgagcttccttcagtttcttagatatcttcatggcttcagctagcttcctttttttaagtgacatcataactttactcatgtcatcatcaacattttcttgaacactggcagttgattcagcagtctgtaccactccagtagatgtttccttagaacctgctgaagtatatgt

SEQ ID NO: 355758 - DNA, 363 bp, Zea mays
ggacaaaaggctactttttttattatttgatattgttagaaatcccccaagttcacaatgccgttttgagcaacttcagaaaattgagtcactctttcattagtaattataaaagacacattattttattttgtttcttattttcaagaatttgttcacaaaataataaaagcatagcccgcaatgcttgaaaatagccaactcaactcaaataacatgacctttttgtaattactaatgaaatcatattttcttaaaccgaagcatgcttttaaaaatgttctcacagtttttcacctgctctttgtaggactgttctaagttcatctgctatctgatgaagtacgataggtttttggatca

SEQ ID NO: 355759 - DNA, 234 bp, Zea mays
catttatattttcaactgctgcactagttccagttgctgctgctggtcatgctgcgattaaagtggcaaaacttgagaaatggcgtagagaggctatttggaaccgggtgaaagactttcatttgcttacaggaatacccgttacaagtcacattatatccctagtagtaggcagtgaagacaaagcacttcaagcaagccggcatttattgcaatctggcttccacgtgactg

SEQ ID NO: 355760 - DNA, 338 bp, Zea mays
gttgttggtgggccccccccccccccccgactcacagacaagaagaagccccacccccgaaaggacgacacacaaaccaacagaggcacaagcaatgccgaagagcaaacgacaacgatacgagcatagaatgccgacgaaggcctccctcccgccgcgacgattagtatgagtactctatctctgactcgactccgctgaaccatcggccgaagacgaaaggcgactcatacggccgagcctataataagcaagcacaggcacgaccaagctactacgagtaccgccttcctctggaatatatgagtatacgcctgaagtgacgcccggaacggggg

SEQ ID NO: 355761 - DNA, 357 bp, Zea mays
tctgcacaagaactcgccggagaaaaaaaaaaaagaatgatcgacagagggaaaacgtcggtcgccgtcgtgtactccgacggaaaccgcgagatcaatgtcggcacggtcgtggtggaccccacgctcaactttaagagcctcgtcacgctcctcagccagcagatcgggatctcgccgcaccagttatccgtctacctcgcctccgtcggcaccgaccgcaagattccggtcacgtccaagctcaacctcgccgccgtgcgccgcgacggcgccgcgcactacttcttcgtgaagcgctccaagcgcaacaagaaggcgaacggaagcggaaacggaaaggacgccatgaagaag

SEQ ID NO: 355762 - DNA, 332 bp, Zea mays
gggccatgaaaataaaataatcctttttttttaaaattaaaattggttccctgatgattggatcggggacctacaaattttttcccaacaaattccccctcccaattgtttttgtttgaacccggggactttcagcttttttttcccaatccttatttaaaaactagcaacggttgcctcaaaccttgctcttaacatagtttatttaaaaatgctaaccccccattttcttttaccctcttttcaatacattttttttattggttgaaattttttagatatcacaaaaatatttggggcccaaatcttattttcatgattttggaattttt

SEQ ID NO: 355763 - DNA, 273 bp, Zea mays
aaagggaacaacaagggtttcccttttccatgattggggggattattttggctgggatttatttttcccccggggggggggttttttcaaataaaaccccgggccaaactccccaggccaaatttacataggtgggttgaaaacaaatttagccaattaaagaccaaccttttttaaccccccccccggggggtccttaaaagggcccttccctttaaaaaaaaaaggcccccaaatgggaaatggccctttcccctccggggggggtttttt

SEQ ID NO: 355764 - DNA, 229 bp, Zea mays
ggcgcaatatctacaaccattaacacttaaatggcttgggggaaaatacaaaacatgccactgagatttcaagtgccttgtgaaatctttttactcaaacccttttttaacactggccctagacactttgcccatttagaccgacagaaagaaaagagcctgctttctttctacctcttttggaaaatcaaaaggaaaacgggttccccaaacaatttgtttcaccggc

SEQ ID NO: 355765 - DNA, 428 bp, Zea mays
cttcattttctttcaggaactggctaaacaatcgtctacaatatttggatgaatgatagtgagataattcagtctcccagcaagtttacaatcgtctgcaatatttccctgccctctgggtttggtaaggatttgagaagattttgtggaacctggaggattcggccctacagggacagttaatgaacctacataggaatacaacgtgaatctattaatacaaggttttatcttcaatggagaacaaaccagataaaatgcttcatgataatgaggagtgcattgacagcacatcaactaacaccaatcatccagagattggtgtgggcaaaggtgttttgaagaattttacaagatcttcgggggatgttgcagagacaaagatagcagctgattggacaggtggagaaaattgcccaaagggtaca

SEQ ID NO: 355766 - DNA, 468 bp, Zea mays
ctcaggaaacgaaatttttacatatgacatcccacttaacaaagacaaaccaaacactaggcaacggatcaactatttatacaagtaaatcatttagtgatattactaacaaaattttctttggcatcatataatgactttgattttaaaaaatattagccacaaacacatggtcctcccagctaaaaacaaaagttgctaatactggagcacataacagcaacaacattcattcccccttagtagcaccagtccaaccaaggccgggcctgcttacttgaccgtgtggttcttcataatctcgtgcatctcggattgaagcttcgaagtcggtagaatcacttgcaacaggaagaaagctagtgatatcatccctggcaccaaatcctccagcccgaataacatcatgaggtgttattgatgcctccatgtttacatccccagatgcatcaatttcctcaggacgtg

SEQ ID NO: 355767 - DNA, 252 bp, Zea mays
cccaactcgtgcatttgaagaaagacaaaaaggggttggtcgttggttttggttttggtttggttaactccctcgtcctcttctactctcacccatggtctccgaatccgaactcatcggccgcctccgcgagtttctccggagctccgacctcaacatcaccacaaccgccaacgtccgccgccagttggaggccggatttcggaatcgatttatccgaccgaaagggattcattaggggacaggtcgact

SEQ ID NO: 355768 - DNA, 403 bp, Zea mays
gagccgttgatgtcttcaaatatttcacccttctcacaatgcaatagaaaaagttaagctgtctaatatattaactttgagcacattattgctcaaactacatttcatttcactgatattatgagatgccccttcatggaaacatggaacgtttccatcgtttacacttctacattttggaattgttgttacctcctgaagcattttaaccacatttctcattgtagggcgagttattgggatggagctggtacaatgaagccctacgctcaataccttgctgattcctccctgtatttggagtccaatgtaggatcaatcagatgatccagtccttcatgttccaacatggaggaaacccatttcaccaaatcactttcaccatactctggatcaattgggg

SEQ ID NO: 355769 - DNA, 325 bp, Zea mays
gctgattcaggttcggttaaccaaccgggtttcgtagtatgcgagcatcgttgttggtgggcccccccccccccccctaacccccccccaggtccgccttcttcacgaagagttgagctctcgtttacacgccacggacccgcggtttataacatacacggggttaaaacacccccaaccgatcgccccccccccccgccgcggaacgttaggaacggggccagcgtagccgccacacccaaatctaccatctcacgcagccgaagtacagcacctccggtcaggaccacttaataataccgcttcaaaacactgagccggcgtt

SEQ ID NO: 355770 - DNA, 368 bp, Zea mays
gtaaccataacggtacgtagcgagttattcataattagctcacagctactgttccaagctcaaactcaaatcagaaaaaaccatctaagagaacaaaagacaagctacatgcatatatgaatttacagtgaaacaagctagcttagcgtcagtagttatatatatatatatatagatatatagatatatatatccacgattctaagctcttaaatgcgtagttctagagatccagattttttttaaagaaatgagagcgtagtacttctaaggccaatggaaggcctttgcaacaactcattgctcgattggacagatctttatagtttgattcaggacaactttttcgaaaggcataatgacaaaag

SEQ ID NO: 355771 - DNA, 406 bp, Zea mays
cgtggtcacaagaaacgcggcaatgccagcttatgcgtcctctgccttaccgcattcgcagttaggacattctggtgaacctcatggttggttttattgtttgcctcgctttcgccagggatttaccacgcctgctcaaaccttcaatgcagaggaaaaactccctgctggccatgccaatggtttaggggtggaagttgcgccgaatagggaatcgggtttccctcagaagcaattgctggttattgatcaaacgggtgatcaaacaactcttgtttatagttcaaggtttgggggtcccgttgattgtgatgtgtcctgggattcaaagctccatggttctatcaatttgaacaatgggaatgaattgcttaatttaaggagagatgtgaatcatgtggttgga

SEQ ID NO: 355772 - DNA, 368 bp, Zea mays
attgcggcataatacgctgaaatacctcaccctctttcttcacacacaaactactaccattactcaaagcccacctgatttctctattttcttccaactttataattgagcaagggcttcaaaggattcgtttcacactcataccttgtttattctacaaaccaaaacacaaagataacgtactaaataagtgataggtgatgctgatttccaattgtccacaacttatatagtagcatcaagtccaagttctatggccttgagtttcaatgatttcaagcaacgaatggcttcatcaagaagctcgattgggtccttgtcctttccaccaggaactatgcattgcaggatgctcagaacatcttgaa

SEQ ID NO: 355773 - DNA, 393 bp, Zea mays
tggctgattcaggttcggttaaccaaccgggtttcgtagtatgcgagcatcgttgttggtgggcccccccccccccccccccccccccctatagaagcgtcaacattaccacacctccgaagaacgaagactacaaaagccaaagtcaagcactaacacgcgagcccaagaactccaaagccaccaccccccctccgacatatgaaggcgcaaaggcttcccgacgaatagataaaaatcaagaagccgaataagacgtatgggccgccagaccccctgccggacgccgaccacaaccgccaaccggctatattatagtaattaccctcaatcacaaaaatgaaacgagagcgccatttcctatggcacccggccccgacttaacttacataa

SEQ ID NO: 355774 - DNA, 392 bp, Zea mays
ccaaacaacattaagtgctaataagaaaagaaaaaagtgttaatagacaacaatgaaaagcaacatatacccccaagcacatcaagctagaactcagccggcacagaatcttggtaaatacataaacggaaaaagacaacagatttacaagaattatctatggcttgcgaggtggaggtggtggtggtggtggtggtgaactgctgctgctgctgttgctactgcctcttcctctcaaaggccttcttgggctccgactctttgatctacgggataccttgcgtggacttggggaatcagagtaggatgatgaccttccccgtctaacgggtggtctacctctgcgaggtgagaatgaccttgagcgtgagccgcagacctacgtattggag

SEQ ID NO: 355775 - DNA, 201 bp, Zea mays
ctctagataggtaaaaatggctactccgccggtggtaatgtttccgatcttcacggcggtgagggcggtcggcgttgccgttactgttcttctgctgacgtgggccgtccatttcagaggaggcctcgctctcgtctctgataacaaagatctcatctttaatgtccatccagtgttgatggtgattgggcttgttctaat

SEQ ID NO: 355776 - DNA, 339 bp, Zea mays
catacatccatgtaaccttgtattaaagatgatacaaatgttaatgttcctcaattttgaatcatatagatgatggtcactcgtttccccttatgacatcagctttaccataaactggagtaacaattccaagaatcacaaagccacctaaaatgactatcagaatgcctaaggaattgaccagaagtgcctcattggaatagcgtgatatgatgttgttgacctgaaggaatgtagctttttctagaataccagtagcagttgtggctataccaagcaatagatatagataccaaagaacacatgccatggcaataaggcagctctactatttcttga

SEQ ID NO: 355777 - DNA, 362 bp, Zea mays
gttcggttaccaccgggtttcgtgtatgcgagcatcgttgttggtgggcccccccccccccccggcgacgctgccgtctccccgccggatggctcacactactagctactggttcctcgccctaactcaaaggcctgccgggccccgctaacagctcgccgaaataacggagaaataccaaaaggcttctaaatttacaccacacgaaattgacccacagccagctctagaagcctgcgccgggcctgccgctgctgcaaacgacgagcccgacgaggagacctccgataactaccctcaagctaattatatagagagattccccggggccgcctctccccgctcgcaggacccttggggcc

SEQ ID NO: 355778 - DNA, 340 bp, Zea mays
tggctgacttcatggttcggttaaccaaccgggtttcgtagtatgcgagcatcgttgttggtgggcccccccccccccccccccaaaggataccaatcaagcagcctcagaaatcatatcaagccccaattaaagatcaggggaaatcgcactaccagtcagagaatctcaaaattttcgagaaacataatccccattctgacagaacagaaaagaacacaactgaaaaccccagacgccgaaatggagaaaggctttgctccttccgagcaaaagcccgagagatggcggcctctagccaccggcaatgggcaccaggagaattactccgaagaaccgc

SEQ ID NO: 355779 - DNA, 462 bp, Zea mays
actgcaaaagactttctgagatgtgaggcctttcatatacatataggggaattctcaattacagcaatagcaaatgcaaatggcaagtttctttccataatgatggttagctctctaataaaagagcccaaataaaatcaatgtatcatcatcactcttccctcattgttctggcccttggtttcaatcaatgattgagccagcaatagagaagaggatcacttcccatcattgacgctgcttgccggtattcaagggagaagcctcatgctcttggattgtgtgtatgtgaactgtggagtccatctttcttcttccgtctacgttgttgagacaagcgagagtgataagacaagattgcaaggtcattaagatcctgcaatggagtcagagccttcacaacttcatccacgttaggacgggatttggggtcctagtaaggcaattataagctaactggga

SEQ ID NO: 355780 - DNA, 194 bp, Zea mays
aaagcctccatcaacaaagtgatcaaagttcctcttttgagtcttcgtgcttccttccacgatccttctcatcaaacccctcatcatagaaatttggaaaaagggttctgaaatcttagctactgagtgcgtaatcactgagatctgccttcatcctgggttggttttgtggatgggtgcttgctggagtaata

SEQ ID NO: 355781 - DNA, 272 bp, Zea mays
aacatgatgaagactttcttacatattaaaaagcaaaagataaaaatgtagagcatcaaccacatgggtagtgttgcagttgtttacagggttcaaaattaatgaaccccttaaggacccacattagactcttgaatgtctaacaatcaggaccacaacacgaaaaaaaaattatatatagcacaaaatgtaacatggaaataaagccaactatacactgcttacataaacatggttcatgccagccccacctaaacctctgaatcgtttgt

SEQ ID NO: 355782 - DNA, 416 bp, Zea mays
gttcggttaaccaaccgggtttcgtagtatgcgagcatcgttgttggtgggccccccccccccccccccccccccccccccccccccccccccttaggaataacactaactagctgctactaactaagaataaaaaaaaccacggcataatacgcactatagaaaccggaattccacccgaattgttacacgacaaaaaaaacaggaggctggcccctgcccctgaggaagccgaacgctcagccaggatgcaaataaccaagtgacgaactccctgggacctccgactgcctgaaaaagaaaattgagaccgctaaaacccccgccctcgaacagattggcctgcgattcaccctttgccgactagttattgtgaccgcttcccggccggatcggttacttgctgctgacggcga

SEQ ID NO: 355783 - DNA, 285 bp, Zea mays
ttcggttaaccaaccgggtttcgtagtatgcgagcatcgttgttggtgggccccccccccccccccctagtaaataagaaccaagactgttatggcgaagggctgagattttctctaagatttcatgcgatgcggtttaaagattaaacttctcccacagaccagaacacagccccgtaccaacgaggtacgttaacttataataataatactactactacacatataccacaaatgaagatctttgtttatatgtcagacctcagtggctggcggcggaccccg

SEQ ID NO: 355784 - DNA, 317 bp, Zea mays
ggaaacaaacatctatctccatttatcgcttttcacttacccccgaatttccggcatgttttgtttattccaaaggagtccaacaagtttgtaacaccgatcgaccaccaccacatgccaattgccaaccatgtacgtactactcatgcctggggcctggccaaaaatttggacattatatcgatcattcactggtggtgggggtttgtcccgacagggaaaaaaaaaccggtctttgttaggggggaatagcgtttccggcttttagcctgaaaaaaggaggagggcccccccagtgatctcaggtcccccttggg

SEQ ID NO: 355785 - DNA, 287 bp, Zea mays
cgttgttggtgggcccccccccccccccccccccccccccccccccccccccccccccccccccccccccttatagaaagacgcacgcggacccacgtgccgcgagccagtgtgtatcgcggttgactcccctcacatcagatattttcagaagaatcactcaagaggtccgtaggaggaggagactggaacctggaaggactcagtcagcagcgactgactcttggcttggataaaccctcagacgacacgtacgaccgagctgctgctgctgcactcaggtagat

SEQ ID NO: 355786 - DNA, 251 bp, Zea mays
gttcggttaaccaaccgggtttcgtagtatgcgagcatcgttgttggtgggccccccccccccttctaacctagaggaccctgagcgatccgaggaacggaacgaagattcgacaaattcttcttccaaagacctagagcgaaaacgcgctgaagcagcacccgattgcactattaatgcaagctacagaaaaacatccatatcgtatctgacctactcgtccgagaactggaccaacgccggatcgtcca

SEQ ID NO: 355787 - DNA, 335 bp, Zea mays
cgttgttggtgggccccccccccccccccccccccttccgtaattctaatggacagcccacatccggagtggacccagacgcgacccggagccgccccacccaactgcggtgttgccaccgtacccaccgcaaaagctgcgcgggagatggacgactaggtacgcctgatgcaaagtgaagcgagtgggccgcaatgagtggcttcccgcggtccgacgacgctggtatctcccgtatgcatattggtagccgattagcgaagggaatcctgggactgatactcagcctatgcggaatcagcgtcgaactggtcagccgtacggccgcgcgggca

SEQ ID NO: 355788 - DNA, 184 bp, Zea mays
gggtttcgtagtatgcgagcatcgttgttggtgggccccccccccccccccctccgacaattagtgctggcgcccaccaccctacgacaagaagctaattaacctcgctcctgagacacgacggaatggaatgaacgcactcagaaattaatgagagctatagctgaacacggaccgagagaag

SEQ ID NO: 355789 - DNA, 312 bp, Zea mays
gttgttggtgggcccccccccccccccccccaaatattcccataaaaatccctgccaccaacagacttcaacccagagggcgaactactcactctaaacttaaaaccaatctactcacacacaatggataggtcgctactggggcacaaggtgcacagatagcataatgaaatggcgatgagaattcacagcgtgaacgaataattgtttcgattacgcggcttgatgacttagtggcgcggttccgctgggatgaacgctgcacgaatgccggaatatttggacgcttcacccggatcgcctggggacgac

SEQ ID NO: 355790 - DNA, 427 bp, Zea mays
ggctgattcaggttcggttaaccaaccgggtttcgtagtatgcgagcatcgttgttggtgggccccccccccccccccccccccccccccccccccccccccccccccccccccccccccccccccccccttgagctcaacgatccgagcgacggacagaatgatcaccaaatcaacggctgaacgacctgacatcagattttaagaagagcagaagattgctcacatctggccacccgcagaactcgcattaatgaaagcgaatcaggccagagctccctacattctaataagagaaacagatcaaaacaccatgtactctgcacttttttgcgatgccggaggtatagacgcactgggcccattttactcccgcttaaaaaaaaccaacgcccactgcctggactcagggaggaccacaccatgc

SEQ ID NO: 355791 - DNA, 265 bp, Zea mays
gttgttggtgggccccccccccccccccaaaattgaattgatccgctgactactctcaaacgaatgacaaattatgaggatcaaccagaaacttacggtgacactgatacaatcaaacaagagaatgttagtaattcatgtggacttcgtgacgaaaaatactactactatccctaaactcgctaacgcgcttgctcgcgattgagaggccctccttgagctggatactaagcttctagaagatggcggcgatatcgaagacgat

SEQ ID NO: 355792 - DNA, 472 bp, Zea mays
tggctgattcaggttcggttaaccaaccgggtttcgtagtatgcgagcatcgttgttggtgggccccccccccccccccccccccccccctagaaaagcggctgcccacaccaaaaaaaattacttaacaaccacgagcatcctgcgagacaggactgctgccaaagacccgcgcccgatcatcatgggccagttcacggactaatcagcgccactgaaaggacgccacccactggagctatattcccacttgtaaaattaccggaagggggaggcataaagtaacaaggcgaatgatgaaaagaagctaacaaagagaaatgctaagatccagcagagctccgtccaagcccggcggcagagattatatgctaattccccgcctaccggattccgggcgcggcgttgccgccgtaaactaggagcctggccgcgcgcgctaaaattctacggaatatgcgaccggataata

SEQ ID NO: 355793 - DNA, 342 bp, Zea mays
tgggccccccccccccccccacttcaatcacaaggcctacctccaccagcgtgagacttgatatagaaccgtagtgataataataacccataacggagtagactgaatatgcgtagaatagtcaggttggatgacatacgtttttgatcgcattggaaggatatctgactacactaataaataaaaccaatgaaaatcagactgacagtgtatttgtatatgatgaattcatgatgtgaaggataataatagtagtagttgtagtcagtacagtattaggaatgaatgaatgactgactcttgatggactgacgcgacgtgttgtagttcttcatggtcacc

SEQ ID NO: 355794 - DNA, 252 bp, Zea mays
ttcggttaaccaaccgggtttcgtagtatgcgagcatcgttgttggtgggcccccccccccccccaatagaataccagcaacggacccccatcagtaggagaaacgtatgacaaaccctagacccagagagtacaacagagatactcagacagttcatacgactgtacggcagataactaacgatagatgtgaggtcactagattccccagagagaaacccccccagcagaacggagaaaaataggggcggc

SEQ ID NO: 355795 - DNA, 286 bp, Zea mays
gcatcgttgttggtgggccccccccccccccccaagaaacaaggcgtgaacaagagacatgatactcgacgaacctccagacttagaagatcgacccccccgcaaagatacacaaagaacagaacagagacatataatcaaactgatgttcgcatgatagaaactggggcttttgaggaactaggcaaccctacaagccaaaggggacctctacttgatgaaggactaaaattttaaagaacttactctacaagagacagactactactagcagattcttagtgat

SEQ ID NO: 355796 - DNA, 388 bp, Zea mays
ggctgattcaggttcggttaaccaaccgggtttcgtagtatgcgagcatcgttgttggtgggcccccccccccccccccccccccccccccccccccccccccccccgatcgcacgaagacatgccgggaatcagccggacgaatttttttaaaaaaaagcgcgcacacgggaacgaagagagttgaaaaaaaaaaaataacgactcccgggcaaaaaaacagtgcagaaaataaggaagcatccgaacatagatgaaaataacttcttcgatcgcatgctctacggctcgatcaaggagtgcctctctctgagatcagaagatgcgaaaaagcatagtgttgtggtaaaaggttgtgtatggatgttcggaggcgtcggctgccgac

SEQ ID NO: 355797 - DNA, 305 bp, Zea mays
aaaccccgaaaaaaaagggcttgtttttcaaaaaaaaaacccccaccttttttggtttacaggggaatggtaaataacccaaaatgaaaaccctaggggtttttttgttttgcccccccggggggaaacaatggtttttgcccccccccttttggggggggggggggaaaaaaacaccccccgataacaaaaggggggggaataatttccttgggacggattttttcgtttttacgggggggggggggcatcaccctttataaccccgggcggggggaaccatttccaaaatttggccccccccc

SEQ ID NO: 355798 - DNA, 245 bp, Zea mays
gttcggttaaccaaccgggtttcgtagtatgcgagcatcgttgttggtgggccccccccccccccccccccccgctccccataaaaacgctgcttgatacacccatatacgactcagctctcacagcggaacagaacgccgattctcagaacacacctagatgacagaccctcgtggattaattccgcttgtaccagaaactccgacttagaaacgatcaaacgtggttctatacagaccgatgg

SEQ ID NO: 355799 - DNA, 289 bp, Zea mays
gctgattaggttcggttaaccaaccgggtttcgtagtatgcgagcatcgttgttggtgggccccccccccccccccccgcgggggtagaacctgaattgcggctggccaggagcatgatcatgatcataagaaaatttgagaactgagagccgaggctgacgcccgcggtccggaataaatagtagactctcgagtttcagagatgcagcaagaggagatgaaaataactgacaacgatcgagcgccgcttgcggagcggcgcgcgcgcgcgcgcgcgcgcgcgcgcgc

SEQ ID NO: 355800 - DNA, 410 bp, Zea mays
gttcggttaaccaccgggtttcgtagtatgcgagcatcgttgttggtgggccccccccccccccccccccccccccccccccccccccatcgcgacatagaattgcagcttcctcagataagcacatcatctgcacaaagaatcattgagccgaccagtggcgtagcgaaacgctgccagaacaccagagctaaacgttaagcctaaacagtagatagataacgatcgagaaaaactccccgattgagcgcacagctgagacttgcccgctgacgcacggcgtaggtggtggtagcgcagaagccgctggtacccttataaattaaataaggactgaattccgcccatcacgctacgggcccctgtaggcgtaataatctatgaagaccccggcggttatccggaaggcc

SEQ ID NO: 355801 - DNA, 447 bp, Zea mays
tggctgattcaggttcggttaaccaccgggtttcgtagtatgcgagcatcgttgttggtgggcccccccccccccccccttgctgaagctaactagggtcctacaaaaaaagattcaacaatctactcccagaagtaagcaccggaatcccagaaagtagcctcgcaaaagcacgagtccctaaaccgaatttgaacacgacgttcggcagcgcgcggaacgatctccctcagacatagcgggatatatctggaattcgaagacctggcgggtaaagaaccacgggcacgcctgctgcgcgtctggaatgatatgccctgccaaagcgtcgttagatctgctgttggattggaacctgttgagctttgcgaagatggaggccgattacgcgacatgagaccccgacttgtcggagaacttgatctcgacggagaagtacaagacgtc

SEQ ID NO: 355802 - DNA, 426 bp, Zea mays
gttcggttaaccaccgggtttcgtagtatgcgagcatcgttgttggtgggcccccccccccccccccccccccccccccccccccccggcagaaagaactgatgctgatccgcccaccccgaccctgacccccagaattcgcactgagccttgaatgccggctagtaacttctcttctttgagaagagattgctctaaaccgagctcgcatacacattcacattatcagcaatgtcaagcagaatatcactgagctctgaaaagacgaaaaaaaaaatgaagattccgaaagccgttctagtacttctcactccttcaggacagatcactccgtaataagcggttttactaagacatgcgactgttgccgataattaactggacttcaaggaacatcatatctccgctatgcttaattaagatgac

SEQ ID NO: 355803 - DNA, 297 bp, Zea mays
tggctgattcaggttcggttaaccaccgggtttcgtagtatgcgagcatcgttgttggtgggccccccccccccccccccccccccggaaagaatgggcaaaagtgctagcccaccagccctataaacaaccacagattgcgacacactttgagattccccggagagacgacgacgaagagtggcccaaatccctgacgtcttgacccatacaacgacaagagaccgagactggccgaaactttagccggaaccaaaatgtggggagacgctcaggagtaagaagtaatgtattcgt

SEQ ID NO: 355804 - DNA, 256 bp, Zea mays
gttcggttaaccaaccgggtttcgtagtatgcgagcatcgttgttggtgggccccccccccccccccccccccccccccccccgtggatgtaacaaccttaaggcccacaaacgacctggaggtcctccgaccagactgactctagaaaaaacttaagcggaaaaaagacagaacaacttacccgccgaacaaagccacggacgcacttaagacccccaaaaaaaaacgtaataaacatgcacctctcatatgctg

SEQ ID NO: 355805 - DNA, 313 bp, Zea mays
gctgattcaggttcggtttaccaaccgggtttcgtagtatgcgagcatcgttgttggtgggccccccccccccccccattcaaatgaacaaagagcaaatgcgttatccccgaatgacgagagagactgactgacaggcatagagatcgagtgacgactgtcggatcctccagattaaattccgagaaggacactaacagacaaggaaggactgaagagatataatgcgaaaaatcaaagtaatacatgcatgatgcggcccccccggtttcagagccagccaatatatatgaagaaggacgctctatgctga

SEQ ID NO: 355806 - DNA, 503 bp, Zea mays
gttcggttaaccaaccgggtttcgtagtatgcgagcatcgttgttggtgggcccccccccccccccccccccccccccccccccatgaataacactgtctgtggacagagtgacacccttgacccgacccccaccggtcgacccgcacgacgatgactagtcggtttgatcaagactagatctactagagatagcagacgcctggatgcatgcatgcatccggcgtggtggaaccgtatttattgcagaaatccctacttacaacgatatgcggccgctaagttcgcctataccctcttctattcctatgtagtatgggatgcctagaagtgctcatactgtgcctaatcgtggtaattcctatttctgttcatgagttgtttcctcgtcgtgctattaagcgttgttgttttggtactattgatcggtcttctttgactactaagtcttggaggtcctcggtgtggagcgggattccttcgacgagggttctgcgtactgcg

SEQ ID NO: 355807 - DNA, 308 bp, Zea mays
gttcggttaccaccggtttcgtgtatgcagcatcgttgttggtgggcccccccccccccccccagcaatacctaaacgcggcgaacgggcgccaacgcacacttacctaaacataaggcacactaaccttaacataacgttagacttggcaacattcaaaagactaactctaaaaatcataggaagatatctgaacgcagaccccagatggctaaggagtcattgtcatgggtcaaaacgcatccgaagactccatgtgaatgcctactttgagttgaaatgcgaataggcttatctgcggctctacc

SEQ ID NO: 355808 - DNA, 340 bp, Zea mays
cgggtttcgtagtatgcgagcatcgttgttggtgggcccccccccccccccccccccccccccccccccccccccccccctagttagaaaatagcgtccaccgcccaagactcaccatctgggccagaagaagaagaaacaagagttcgtttaaatataccatacaatgatgggtgaacttgggaaaggatagtatatatgggagaatggaacggctcttggactgactttagcttaacaagttccactctagccaaacacttcatagctaaaccagataatgtttctgagagtagatcataagggtatgcagacaaccagacttttttgcctcctacgc

SEQ ID NO: 355809 - DNA, 422 bp, Zea mays
gttcggttaccaccggtttcgtgtatggagcatcgttgttggtgggcccccccccccccccaaagacctaagctgttcaacctgaagtttaccggagaccagatgacggaccagagcggagaccgaaaataagaaaatccaaggaacttgattcccccgggacgaaagcaccaccgccgacgaaacggtcaagacaaaatttcacttgatattgtgagaatgcctaggtatggattttaactaattaattgcgagatgtcgtaaatggtgaggcctggaccgtcgtgttgattggaccagtttactcgggagttgccattgcgttttagatgtagtaggactggactgatgcggttgtctattagtaggcttgatgggattgtgtgtctgcctcctatgcgtgttccggcttagtgtgtgtc

SEQ ID NO: 355810 - DNA, 406 bp, Zea mays
tggctgattaggttcggttaacaaccgggtttcgtagtatgcgagcatcgttgttggtgggccccccccccccccccccccccccccccccccccccccccccccccccccccccccgaccgataagaattccgcccgtcgatagtaatgagagcaagactcaggacctggaagacagcatttaagcatgagcacgcgaaagattccgattaagggggggataagagagaattaatttttcatcgccgataaaagatttcgactatccgactagatatgtgcaggcgagagctagagagagagagaggagagcaacatacagacgacgcagtgatgatggctgtagcccaccagcaaggcgagactaagacttgcggagagagaaagtaagaaagcggacgcagag

SEQ ID NO: 355811 - DNA, 385 bp, Zea mays
tggctgattcggttcggttaccaccgggtttcgtgtatgcgagcatcgttgttggtgggccccccccccccccccaaacggggatgattttgtagaaacagaaaacgaccccaccggggaaccgtgcgggcagatgtacgcttaaagaactgcaggatccggttgaaaccccttctttctcatgcccagacttgtcggccttaaatggatcctctttcgtataccggggtatgaccttctatgcgacgaagtggtcgcggggtgcgtaagagatgatgatgagggacgggataaggcactgagacataaacgagcggtaaggttgaacggcctggtgttgtgccgacgcgacctataatatcagctagtgaggtctgaggctcat

SEQ ID NO: 355812 - DNA, 314 bp, Zea mays
gctgattcaggttcggttaaccaaccgggtttcgtagtatgcgagcatcgttgttggtgggccccccccccccccccccaacgtaatcaacgacggatgatggccttgcatgacggaaacgatacagccagattttatgagtgcccgtgttaatattggacttgggaccttttttatttatgtatgtgagctgcgttggatagagtccgagtcgtgggacggtgtcgtgcttgaatcggttggtcgaactttgaggaagatctggctagcccgagtcttgagctttgggagcaagatctagacagattcctcgg

SEQ ID NO: 355813 - DNA, 401 bp, Zea mays
ttcggttaccaccgggtttcgtgtatgcgagcatcgttgttggtgttgtgagtgaaggatggtgtggactcgtcagtgtcgtcatccttcgcggatggctttacgtacgatccgtcgacatccccggcggcgtagatgcgcctcgatgaacttggcatgggaataaagcaactcgcgattgctacagcgctaatactcgactaccttcccggccggatctacgatccggataatgacgagtggtaattataatagtcgttaggttcgtccaagccctggctcttgatgtcagcgcttgtggaatcacggtaaatcggggaccagagtgtcataaagatattccagccgatgctgccttcacccttggaagggaaaacgctgaaggcccttgcgtcatccac

SEQ ID NO: 355814 - DNA, 443 bp, Zea mays
tggctgattcggttcggttaccaccgggtttcgtgtatgcgagcatcgttgttggtgggccccccccccccccccccccccccccccccccccccccccccccccagctcaattcattcaatggaccttcacccacacagagattcgattcgagagattactaaatgccagtctcgaacccgtagcgcctctcttacgaacgccgctcagaagaacaagcatcttgacactctcagctctcaatgagcaaggattgaaacactcagagtggaaattagcctcgacgccagggactgcttatgatgcacccggagagccctagatgaggtcgcgctgcttgctacacgaacgcgcttgcatagaatcctaattactggatgtgtatcacctgtcgagtacttgagggttgataacgctgatgctggcggtgtaagctatcgcct

SEQ ID NO: 355815 - DNA, 348 bp, Zea mays
gttcggttaaccaaccgggtttcgtagtatgcgagcatcgttgttggtgggccccccccccccccccccccccccccccccccccccccccccccccccccccccccccccccccccccccccccccccccccccccccccaaatttaagaaaaaacgaagtgctgtatacttatcccccggaaagccaaaagttcccccccgactgttcagctgaaatcgaaaaaaaccccccgaggaaacttgctgagaaaaaaaacccaattgtcccgggggggaaacctttaccaaaagaaaccgaaaattgggggaaccggaaaaacgcaaattttggggtcccgcccgaaaa

SEQ ID NO: 355816 - DNA, 279 bp, Zea mays
gttgttggtgggcccccccccccccccccccctcccccccctacgacctaattgccgagaggaccatacataatcgaacagggtaaggactgacgacggcgctgctgaaagcagataactttatgtatagctgaaacgttgttgataaagcattttattttatagagaaatattaacttaaccaagaagctactatgtctagttgatgaatattaactatagtatgacttctgtccgcctagcgggggtcccgtctgaaatggcgtggttgaatgaatg

SEQ ID NO: 355817 - DNA, 215 bp, Zea mays
cgggtttcgtagtatgcgagcatcgttgttggtggttctagggtggtattcttcttgtacgctcacttctaatcctgattgttgttcttagtttcggtcgctgtctttgagttgtattgggcttaatggtgattgcggcggccgcttccgctgaggcttaataattgtcctaactgtcattagtgtcctggtcctgctcggactggtggtgagtc

SEQ ID NO: 355818 - DNA, 344 bp, Zea mays
gctgattaggttcggttaaccaccgggtttcgtagtatgcgagcatcgttgttggtgggccccccccccccccccataaagaagagcctctgggctgctgcagcatccttgccgaacgagagggcggcccagaacaaatcatgagcttctgagagtctaacctcagaagcgtagagagagctgttaccgcacacccaccctaccacccgctcatcaaggaaagcaaggatttagaacaacgcgggagtgactgactctcttcttcgttcggactcggacgaatattcctatgagtgacgcaattttgcctggccggcggatgaagcttacttgccctcctactc

SEQ ID NO: 355819 - DNA, 277 bp, Zea mays
tggctgattcaggttcggttaaccaaccgggtttcgtagtatgcgagcatcgttgttggtgggccccccccccccccccccacactaagtctcacacctgcaactcatgtcatcaatatttgagctcagtcaggccctcagacggtcccctcagccccacccaccggcagaacagacacgcttgccgaggagagctacttatcacacacgacgatgacgaatttccgacatggatgaccccaccggacggagtcagacgccacatggatcatcccgt

SEQ ID NO: 355820 - DNA, 359 bp, Zea mays
tggctgattcaggttcggttaaccaaccgggtttcgtagtatgcgtgcatcgttgttggtgggccccccccccccccccggccgataaaaataattgagctccgcgacgatccagatcgccagatagaaccgcgggggtagaaccttaattgcggctggccaggagcatgatcatgatcataagaaaatttgagaactgagagccgaggctgacgcccgcggtccggaatatatagtagactctcgagtttcagagatgcagcaagaggagatgaaaataactgacaacgatcgagcgccgctagcggagcggcgcgcgcgcgcgcgcgcgcgcgcgcgcgcagatgctgaccggctta

SEQ ID NO: 355821 - DNA, 404 bp, Zea mays
ctggcctcaagcccctcaggcctcagctcaccaccacgaaccaaccgacagaaagagggacgaatggcgagctctcagtgctgcgataacccgccggccctgaacccggcctgcggggagggcaaggtcgtcgacagcttcggcgggctcaaggcctacgtggccggccccaagaattcaagggccccgtggtcctctgggccacgtcttttgaatttaaaggccgttttttaggaagaatacagccgacaaggttgcttcgtcagggtactttgttgtggtaccagatttgtttcatggggatccttatgcacctgagaatgttgagaagccctttcctgtgtggataaagtcacatactccggaaaaagggtttgaagagacaaaacaagttattggggctc

SEQ ID NO: 355822 - DNA, 364 bp, Zea mays
ggccctggaatcagttcactcatccatacaagcggtattaaagtaatcctgcaatcattggataggacaggggaacaaccctacaacagggtggatagggccttatttttacaagggctaggaagcaaactcaagtcccttacactggttgatagaggaaaaacccaaatcccggaaaattttaccgatgggctatggggggctaaacttccaccgaaacatttatgctttttatgggagggttctggatataaaaaaaaactttatgcttgccatggccccaccattatattagcttgggaagggtttttttacaccttgaactagcagtccttaaaaggggatgcctgggccaaaagccaaa

SEQ ID NO: 355823 - DNA, 233 bp, Zea mays
tttttttttttgttttttttttttttttttttttttttttttttttggttgtttttttttttttttttgcaaagaaaacagttcactcaaccaaaaaagcagtaaaaaagaaatccggcaaacattggaaagtacagtggaaaaacactacaaaagggtgtaaagggccttatttctaaaaagtctaggaagcaaactcaagtaccctaaacggtttgaaagatgaagaacac

SEQ ID NO: 355824 - DNA, 105 bp, Zea mays
gggctctgggctctggcctagcctccactgtttcccagttcccaggtcctcatcggcctccgggggtctggtggggccaagatctcccaccggggaaccctaccc

SEQ ID NO: 355825 - DNA, 433 bp, Zea mays
aaaaagaactcacataataattattgggggtgtatcctacttaatcgggggaataaataacctcatttacaactcagtttcgcaaatttgtgctaagaaaattaagcctgcgtgcgccttgagattcatgcggactgcaaagcaaaaaccatgctactagtaccattaccagccggccgtgagccgcagttcctgcagccgtgccggcgacggccaactccaagaacagacctacagtaaacgctagtgtactaatcttttttgtacgtacgtatagtgggcacgaattgtgaccgtatgtacgccgtatctatagatacttcacgaggaagaaagaatcggtgtcgtgtttgcgcgcgcgcgccctgccctcagctcgcttttttttccagcaaattattcacattctgtgtgcgtgcggcatgccctcccc

SEQ ID NO: 355826 - DNA, 246 bp, Zea mays
tctttttttttttttttaccgaccaatctatacttatctattgagactgaaagaaatgagaaccgtcaagctcttttaattgttctgaaggactgtatacagtttatctaccagcgcggttaatgagaccggtttctggatcaggccatttacttgtgacctatggcaacgatcccagatgttgtcgtagattcttggtgctagggcaataatcaacggaagacaactattgctactgaacttact

SEQ ID NO: 355827 - DNA, 256 bp, Zea mays
gaaaaggaaaatttagggatccccttttttttttactcaacaattttttaagggaacatatgggtccaattgcccttttaccctcccttactttttagaggaaaaacccctttttttttcaatgccgccccgggtacattgtactgaaaataaaattggtttttcgagccctttattatgctcgagtcacttgttcggggccggtttttttccaaacggggttttcgttgccgggggcggggacctcaaaaccccc

SEQ ID NO: 355828 - DNA, 265 bp, Zea mays
gaggatccccatctagtgcccttgcaacctattttcctcacaaaacacatacaagagttagccaaaaagaatgcttcattatctttaagttttattttaggtcctaatagaacaaaccgtgaacaaagttgtttacaagtaaaatgagaagaagatatcaaatttatagtctctaaagttttcagatagaatcatcactcacttcttcaatgaggccgtgtctccagccaagcatgtaacgtcaggcatcgatgttatgggaatg

SEQ ID NO: 355829 - DNA, 395 bp, Zea mays
cggctcgagctcctttcccatcctgtccatggcagtagccccgcgggctgcgcaccagccgtcctcgtctcgctagtcttctgatggatgcatgggggccggctcccgtcgagcggcgccggggccggcctggcggttatcgcgcctagcgctgtgcctgctgcccgtcgtgctgccgctgttgctgctctggctcccgctgctctgcgtcgtcgtcgccttccgccgcttccgccgccggcggctcatgatggtggtgacggcggcgaatagcaggagttgctgtcccggtgagcgatcggtgcacgaggaggagggccacctggccgagctgttgcacaaggacctcatggaccacatggagctcgtggccggcgacgccgatgccgtggacc

SEQ ID NO: 355830 - DNA, 239 bp, Zea mays
aggttcggttaaccaaccgggtttcgtagtatgcgagcatcgttgttggtgggccccccccccccccccccccctttgcggaacccgcccccccgtacgtataggatacagactgccgccgctaaaatccccgaatgaatgcgtaatgcggcagtggtcgccttggcgtcgtttgttgcttactaatgtgttaagccgcggtccgacgagggcggaattgggggatcataaccctttct

SEQ ID NO: 355831 - DNA, 426 bp, Zea mays
gctgattcaggttcggttaaccaaccgggtttcgtagtatgcgagcatcgttgttggtgggccccccccccccccccccccccccccccctagttaacactcccgctaacaatgaccttatagggggatcgctcaccggccaccgtccagatcaatgactggacccccagatccggccaccatcccccggcccagaactccgaagactcgccccccggaaataaaccagagctaagaggtctcttatatatatataatttaaaattgccgctctccactctcagcctgctcactaaagatggaaggatgctgccccactcaccgaccgatcggactatccctcaggcgccgcgccggagagggtctagtgggaccctcacgcgtaccacttctctcatcttgacgcagactatgcgtatggtaacc

SEQ ID NO: 355832 - DNA, 240 bp, Zea mays
gttcggttaaccaaccgggtttcgtagtatgcgagcatcgttgttggtgggcccccccccccccccccccccccccccttattaagacattccctccacccttaagataccagagagcctaccttgaccggagagtgaaggtacgtacactagtaccacagcggcacccaccatgaggatgcacacacatggactcgcttatcgcttatcgcttagcatgaatgaaggtatacgtactga

SEQ ID NO: 355833 - DNA, 482 bp, Zea mays
ctgattcaggttcggttaaccaaccgggtttcgtagtatgcgagcatcgttgttggtgggcccccccccccccccacaacccctacgagtccaaccgactgacctagatcaagtcaatagtattatgagagacggaaagcctgccggcgacggacgcggcagctcgaccgcctagtcgcgagctagcaagcatccaattgaggtcaacggctctgagtctaatacagaaccagacagatccgaaactaatggaaactagaggtaacgttcgtattgtgatcatgatatatgcatcagctaactacttatgttcatcattctcctttgtgggatccttgatttactagggtatcttggaggatgccggctggttagcgtccttctagtgtgagtagtaatttgtggctcatggctctttcttgtcggatggcggatacttagggggattagcgtgtgacgttgtcggatcatggttatccttg

SEQ ID NO: 355834 - DNA, 190 bp, Zea mays
ttccacgttaaatcatggaaccgttcattgcagcaaaaatcgccgcaaccgccagcacgaagcgccaccatcctcgggaagtaccagctgacgcgcttcctcggccgcggaagcttcgccaaggtctaccaggggagatccctcgtcgacggctccgccgtcgccgtgaaaataatcgacaaatcgaaaa

SEQ ID NO: 355835 - DNA, 351 bp, Zea mays
cattataagaagcggcaaattagtttcttagggcttgggggcattacaatttgattgaacactccaattatctttgcatgaaacactcaaacagtgacttcaattgggtactcttggtccccaacaataaacaaataaggcccttcttcaatcaccatcgaaccagcctcattagccacgctaagatgctcacaagggcttatctcaaaccccacttgaaccgtttcccctgcattcaccttcacactttgaaaccccaccaactgtttcaccggattcccattattaatgtttctcacctttccctgcctcacaaacagtaacaccggatgcttccctgccaagttacca

SEQ ID NO: 355836 - DNA, 490 bp, Zea mays
ggctgattcaggttcggttaaccaaccgggtttcgtagtatgcgagcatcgttgttggtgggcccccccccccccccatacttgtaaagttcgacacactcttgggcccaccggacacacagacacttacgtcctcccggacatcaaaaacactcagacacttcccatggatacttagacgatgcccatcacacctagactcgcccgaggagactccaaagcctatggggccagaatgcccgaggggtaaccctcctactggcaaaagaacgactccctccttccggcgccgccccgctgaagaaccgtcgcggtaaagcgcggaatatgggacacctttaagaatccagttcatcccggacatcctaatcaaaattaagaacctaatgcgggaactctccgcctccttttaaagcgtggctagcgcctcctgacacctacgatccgcccctgatgaggacagaacttctccttacgcgtgctaaggctc

SEQ ID NO: 355837 - DNA, 351 bp, Zea mays
catcacgaaaattacttatatagatggtgggggatgtgttgggggtggggggattacggcaacatttagcaacaaacatgttcataaaaacgactatttaagctaccaacactgctatcaaaaatgtctctcaactgtttcagtattaatcactcacaataaaacatgaaaaagataaagacggacaaaacttcaatgggaaacaaaaattaagttttcgaggttcaatgttcatttccaactctcttatcgatcaatctgcagggaccaaaagtaaattgacagatcttcaattttcctcaacgtgttcatcttccacttcctttttttgatcaggttcattttccactt

SEQ ID NO: 355838 - DNA, 378 bp, Zea mays
aagactctcggggtttcgttttagggggttggcatataaaatctttattacagcttaagaacaaagtttcagcttcctacgtgaaattaaacattgctccatcttcgttttaaatttcctcacatagggcattttattgatcacataaaatattgttattattcaacaacagcagagcttctccgtttgatgaataacaaaaaaatatatatataaggtcatcagagaaatatcaatatccagagtgacaagatgcatcgtactaattgacttgcttcatggttgagatattaatttccaaataacctttgcaatctggactgtgaacgtcccgtgctacgcgatttgagactcggctgcttgcctactggttgttga

SEQ ID NO: 355839 - DNA, 260 bp, Zea mays
gattccaaagaaaatgcttagtctcaaatcggggaagggcagagttcaacatgtcatcgcggcatggcatttctttacattgaagaaaataagtagagtggcaaattgtaaaagctctggaaccaatcaattcaattactacttgtagctatagtcctactagtttgtcaaccatatggtgaaaccaataagatttgcagttgatttggtctacctagcaatgcaatgcgatgcattcagctaccgcacaagaaagggga

SEQ ID NO: 355840 - DNA, 445 bp, Zea mays
gaccggtataaaattgttcagcctcagaaacaggttttggttgtggtaacatggggttgggctgtgatgtgttttgattccaaccttcaaaagttgtgggaaaataatttacaggaggattttccacataatgctcaccatagggaagttgcaatctctataagcaattatactctaaagcatggagatacaggattgataattgtcggtggcagaatggaaatgcagccacatatttttatggacccttttgaagaaatgggtatgggtgcaaggtttgctgagcaacatcaaagaagtgctgctgaaaaggaggcttctggaactgtggatttacgacattttgcattttatgcatttgctggtcgatctggtgatgaacgatggagcagaaaaaatgagaacattgaagcacattcttcagatgcatcacagttactttcac

SEQ ID NO: 355841 - DNA, 305 bp, Zea mays
gaagcggccagcatagattgggtttttattttataacatcaaatttcctacattctgtccaaattttacaatcaacagtctaagactgttcagcaccccctcataatttccttaaattctacgcattttgaatacttttgactctccactggttgcgctcagctcactgttttccgtttcttcaatagtgccagcaaagttaggcgagtttgatttcaatttcggcttttcaccgtggaccagatgagggacgaggcttcccctttgtggaattcaagggcggggtgacaaatataacccccatc

SEQ ID NO: 355842 - DNA, 355 bp, Zea mays
cagttggtatgataactgacccagaggatccaaaaactccaatgtctcaacgcagcaacaaaaaagtagaacttgaaaacacacaactcagggccagaaggaagaaagagaagcaaaccaaagcacagaacgatggttccccatcacttcaaagggctcgttccagaatcaacttcaaggtttctcctcctaaggttagagaatttgataaagaaaggaacaggtatatggcaaatagggtgtctccaagaaataggccatggactagaaaaacagtactattccccaaccctttgttcctctccactcattcctcttcacagcaacagttttgcaagacaaggtcacctatcat

SEQ ID NO: 355843 - DNA, 482 bp, Zea mays
tggctgattcaggttcggttaaccaaccgggtttcgtagtatgcgagcatcgttgttggtgggcccccccccccccccgaaattacaccccaccagcccgaacgctccgccagacaacaaccacaactttaaaagagaaccacccgcttgataacacatgaaacacagcgcggtagagacccctgtctcgcagaaccgcccggacctcacgacatcaaaccaaacaaactctcaatttgcgaacgccgacctacagaatgggctcaacagacttttgaacaccgatgagaacatggctagcctagcactcagatcacagagatcgccctgtgacggaaaccgcgccacacaaacgccctcccccttggattgaactgactaccattggccttgaacgcccctattcacagcctaagaaggataatagaattatgaggaaccactaagccgaaacaccccccacacagctaaggcaacactac

SEQ ID NO: 355844 - DNA, 418 bp, Zea mays
gttcggttaaccaccgggtttcgtagtatgcgagcatcgttgttggtgggcccccccccccccccccccaacgaaggaaatccaaaaaacatcccaccaaacgagcgaaagccttactccttatatgctgaaccggaacaaagagaacgcatgatgagagccagaagcgaatcataaccatactccgaccagaagacccataatagaaactttactagatggccaagactgccatttaaacgccgaaagccataaatacaggacccggcatcctatcaagcggcagggaggaatcagacatcatctggcagatgtaaatgtaactaacacaactcgctataaactaataatacgggacaaaagagatcaacgcgaaataatcatctttttgaacgagaatgcgaaaaaatggagggcc

SEQ ID NO: 355845 - DNA, 339 bp, Zea mays
tggctgattcggttcggttaacaaccgggtttcgtagtatgcgagcatcgttgttggtgggcccccccccccccccaaatgaccggagtaacgaaacaacccacccaccagaaaacgaacaaagatcttaacgaacggaacccactactcttaacgaatctgagtaactatatcaaccccacttgaaagcaatataaaggaagataaaatcccagaaaaagcggaaagaatataacgtgaatagggtctaatcctaccaaaccttaccgcgcgcgtctcaagaaccccaaaccctccaataaagcatagccgcggacgaacggctcccgatgatgagag

SEQ ID NO: 355846 - DNA, 490 bp, Zea mays
aaaatccctttgtttgctcacatattatttgggtttcttcaaaattatctttttttttctctcctaaaaaaaaaagagaaaactttgtttgattctttgaaggaggtttgaagaaagcaaaaggtgtagttttgttttaagtttctttgaaatggttttcatgtctgagatattgttccccgaagaaaaaattgaggaaggagagtgggagaaggagagataagaagaagagaagaatacctacccagcaagcagaattagagaattttttttcacaaactgttgatttgattcattttcatctgcttctgctgggtggttggcaatgtctgctcctatgatcattgaccctatgatgatatcggcaccagaaactcaatcagcagcagctagcatactagttgcacaaagtgaagttgaatttgctgtatgtgactgttgtggactaacagaagagtgcaccccagcctatatagaaagaatcagagag

SEQ ID NO: 355847 - DNA, 337 bp, Zea mays
gttcggttaacaaccgggtttcgtagtatgcgagcatcgttgttggtgggcccccccccccccccccctaatgaaaaccgcctaggaaaccactccgaaaccccgcaagaaagatacctaaatccgctcagcttagaaaagcagaacctaagacgcaaagcccctgatgccacacccccgctcggccacccactgccggctgccggacccccacggaagcaaacagagaatcaccgggccgacgagaagggccgatatatatcatttaatgatgcgcgatacgcctcaatgagataaggactaaccccctctatatcgccttccttagcacccttct

SEQ ID NO: 355848 - DNA, 117 bp, Zea mays
gagcagcgcaatcccacgataatacatctcgatctaaaggctgcagatatcctactagatgatgaattggaagctgttctatgtgattttgggctagccacgctggttgatgcatgg

SEQ ID NO: 355849 - DNA, 361 bp, Zea mays
cgggtttcgtagtatgcgagcatcgttgttggtgggcccccccccccccccccccctcggacagaaaccttacgacccagagcgagacatataagaactaattcggagacaatgaaaagaaaaataatcgagcccggccctccgaaataacgggaaatgacttggatacgaagacctggcggctaaagcagcaccggcacacttcctgaacggccggactgattacccccgcttaaatcacgttacataagatgatgaattggaacctgcggagccttccgcagaagaaggccaataacccgaaaagagatcccgacttgccccaccacccgagctcgccgaagatccacaacccggcgaa

SEQ ID NO: 355850 - DNA, 490 bp, Zea mays
aaactaacgactaaagttattgcattcatcacataaacttttcgcaagacacagaccattccagacgatacaaatttatccttatcaaaataattcctgtatacaacaatggaatcacaacttccaaatgttaatcttttgagtcatcgtgtcctatacattaaataaaccgctcaaactgcgttggtgcatatgatgcattcttcaaaactaatgattttctttcctcttgccccaactttgcagttgaacttcatatcaactcaactacagaaacaaaatctcgttttgcactggcagtagcatggaacattaaattccccccgcaaaccagaaatgtttatataactgttatagtccagtcttctgcaacccaaacattaggtctacgtatggtcgtgacagctggtgaatgagctcttagaacccaaaggggacgaagttcaatatcaaccttttgatttgatggctcaacgagtgcattttttga

SEQ ID NO: 355851 - DNA, 331 bp, Zea mays
ggataaaacatgaataatggaaggaacatcaaattcttattagcaatttacactatatatgtaattaacaagagaagcgtgcatgaacacactttccaccctttacctctctttctataattttgagataaatatcacggtcattaaaaaatgtaactagctgcgtaattggaaaaaaaattggaattgactatgaatcatcctaattttgctttgcatgagctatctcaccagacttgtacattcttgctcgtcttgaatattcttggatctttcgatcacgctctttgagcatctgatctatgttgtttgaagaaaccagtaacggacc

SEQ ID NO: 355852 - DNA, 280 bp, Zea mays
ggagccataaattaaaaaattataacatgaaaaggccattatggaaccaatttacatgttgcttgcagacattcattctattggaaaccccctaaaaataagattcacagtggggtacaagtatggacaaagaagactaaactttatacccgcaaagatgaaaaatacaaaagttggcaacgacctaccctataacaaaaactcccctactatacatcccaaccatcgtttctactgtcaaatccccatttacgaccagctaaacttccatacatctctg

SEQ ID NO: 355853 - DNA, 509 bp, Zea mays
gaagaaaatattgaatgacaatttgagataagacatagtagctcaataagcttcacttgctctcaccctcacattctttcaagataaagggggtcaacacccataagttaacataacatcataaagcagcatatgctatgctttaagagaaggtacatctataagaagaaactaagaaatggtgtaaagggtgaaagagaaaaagaaaaagaaaattttcatcagctctatgctttgccattgggttttggtgatggttggggaaactgatggtgatatggagatgcataagtaccatttggtattgaaaggctcctttgctgctgtccattgcgggtgagcaacgctccttgcattcgcccatttcttgtgtttgggctcgctccaatgcggtcagcttgcattgcctggaaataatatgaagagcttgccatgtccttgaggtttggcaaaggctttaaagcttccacaacttcactcattaggggtctggcttttggatctctact

SEQ ID NO: 355854 - DNA, 250 bp, Zea mays
gacgagagcaccggcagccgcacacgcgtttgtctcctcgccggaccttcccggcaccgtcgccggctctccctcacggtccactacactccacagcaccgccgtcgcacaacgacattggccatcctccgctacctatctcatgctcgccagcgcccacgctcccctcgctcctctcataaggccaccgccgatggcccttgtcgcgagaaccgccgcaacctccatcactaggcgcgaaagagccagt

SEQ ID NO: 355855 - DNA, 244 bp, Zea mays
acgggttcgaggtgctgcacctcatggcgaaggcgcagacgggacccgttgacaggccgctcgccgagatcaggctcaatcgcgtcaccatccacgccaacctgctcgccgtctgaactcctcttcctaccgctctcccctccactcgctcctgtcctcatccaccgggatctgagcgtcatcagccttgctttcaaccgcaaaatcacgctttggcttcggaacatcaatctgtagctctcta

SEQ ID NO: 355856 - DNA, 247 bp, Zea mays
ctgacataaaaaagggaactattgaccagagctttcatgacattgtacattttgaagctctgagaaagattcaagactttacccagtatctggggaacaccgttcgcgtaattctcattccatctgtgcgagatgctcaccatgactttgttttccctcagcctgcatttgacttgaatttgctagaagataccacccatcagattacttctctggcaaatccatgtctcttcggttccaacgagat

SEQ ID NO: 355857 - DNA, 244 bp, Zea mays
gtgagggcggcgaagatgacgctcggagggaaggcgaagaggacagtagatacgacattgttatagccaacgagagacataaggcaaagaaaactaggagaacgacatttcgagaagaatcaagaggtcacaaggcagagagagcaaggaggaggacgtctgcgagagaatgtagaagtgcaacacgcgagtcccgcgggtgtgaagaaatgaaccgatgatccacgatcggacgaccacgttt

SEQ ID NO: 355858 - DNA, 245 bp, Zea mays
atatcaggtcacatcaagcatgaatgaacttatgggtttgatgcaaaaatcagctgaagttgtgcaacctgcaattgcaagtgctaccgctagtgcaaacgcaagtgcaagttcaagtgtaaggtcaagtgcaagcataccagcaagtgtgagcataccagcaagtgcccaagcaagtgtcggcgacgatgaaaaacaagtagatggccagattgggaaaagactcacttcatgggtctggcaac

SEQ ID NO: 355859 - DNA, 271 bp, Zea mays
gctcgcgtgcgtaagctcgatgtgagcctcgagccctatccgtcggaatccgtggcctgaggctcgccggcgaccgtcgtctgcggctgcatatacacgctgttgctcgggctcgggcaaacacgtcccggcggggctattttctcaccgcgtggtctctttcgatctatcagagcgacgactaggctaccggcgccctacgccagatgccctggtcttaggcgggccctttctcggaacgagcacctaacagcaggtttgctcgctcttt

SEQ ID NO: 355860 - DNA, 253 bp, Zea mays
ttgtgcgcctcgaggatcttggagctcgtgtgtcgtatgacgatccacccgaagggcttaacgctgcttgagcacttgtccttgtaacagtctgcggctgacgccgccttgagtgatcaatacgaagcggacttccgtacgaacatgagcatcgttgtcaaggcgctacaacccctgctgaatgcgcatgcgcgggcgactaaccctggagaacatgctgggtcataagctttgcgtttgcttctctccctcc

SEQ ID NO: 355861 - DNA, 140 bp, Zea mays
gcgcttgctgtttgtatttttaagggtaatgaaagcattaatgcggcggctgctgctctgttttaagagtcgcgatagtattaatgtggtgcttgcgttttttatggattttatgatggtactccatcaccatctctttc

SEQ ID NO: 355862 - DNA, 242 bp, Zea mays
tcgagatgatctaacaagctctggagcccagcaaaacccggcgagcaagctaaagaccgagctttgatcgacaacggtaaatagcatgtcaggggagcaagatggacatatggggtcagggggacacataatttcagcaaattgatcaaggcacaaacgagctgcgaatgaatgatggctgtggatggttgatgtcaagcccagcgaaatcaacattttcagagaggggatgtacatatagc

SEQ ID NO: 355863 - DNA, 237 bp, Zea mays
atcatttttccagccgccaccaacagcctccttctcccccacgctctccttgctcctcctaccgtgcagcacctcggcactccttccatggtgcccagctggccgagctcctccaatggcgccctccctttcctccccagcgctgcccctgctttagtcggctccctctccctgctcctgagcgcgcagggcagatcaagtctccctggatccatggcaccggtgaagctcgagcag

SEQ ID NO: 355864 - DNA, 238 bp, Zea mays
cgataatctaattaaaaaaattaaatttgttctcaattagtatttaatttaaatttttactttcaaatatgaaatttcaactttgtttcgctttgagcgccattttggcctgttctatgtcgttcgctgttccacttggcgaacaattaagaaaattgtactcttcaagctccggtattttgcaagaattaaatcaaaatactaatgaaatccttaccaaccgtagcctgtctgtggc

SEQ ID NO: 355865 - DNA, 104 bp, Zea mays
cggctcgagctgagatttcgccgtcgcgcacttcgcgggatgctcaacatcggcttccagctcatgttcaccatcggcatcctctgcgctaaccacacaacata

SEQ ID NO: 355866 - DNA, 244 bp, Zea mays
cgcatcatgaggcactcatgcattcagaagcaagggttcatgcaacacaaactgaccagatttattccactgccaagcaggcaataaatacatcagtgaccaaaggaacttgcactacagatgagagttcatccggcatggattgtgcttgtaatgaacatggttcatgtaatgcttcagtcatggaatgcagtgatgattccggttcagagaatgaaattttccgagtcaagcgcaggtccac

SEQ ID NO: 355867 - DNA, 222 bp, Zea mays
agatagatgactgtctttagtaatgactatgcttaggaactagggaagcatattggagtttaaactgagatagggctggacagtggggataaattcgaatatgaagaaatgggaatagaggtataaaaaaccacctatatatgagaagagtagtagggcaaggagtatagagatgagtttcttatgaaggaattttaagtgagaaaataaaatctatttttc

SEQ ID NO: 355868 - DNA, 214 bp, Zea mays
cttctagcggctcgaggccgcgcgcctgtgtagaaatgtacagtgtatttggctagcttttcgactttgtgcatatgtatgtagctgactggctgatactataaaacagagtggcctctgtgtacattggctccgatttggcacttagatgaccattctttaggccgcgtttggttacctgggcaatctcatgatgagataaattttatctact

SEQ ID NO: 355869 - DNA, 242 bp, Zea mays
gacttttgcttgtagaatagactcccaagatctgcatgcggtgccctttttcatggaatgttacgtttgcacagcgcccttcctcaattgcctttgcctgtgccaaactgccaatacgctgaccggccaaactttggctgcccaagaaaaggacaactttggcagggaaaatgaactagcaacaagttgttcacgatgccaaactttgcaggcaaccatccaaacatacaggatgccaatag

SEQ ID NO: 355870 - DNA, 236 bp, Zea mays
gaaatgactgatttctcattcattgatgataacatgacgccattctttgaagatggcatgataagatagacaccccatgggccatgatgggtaagtatggcaagaggaagcagatactgtcaatgtgaacttctgaagatacaacttcagagggatgtaataataatgtagataagtagagcacctcattagctggcatgccctctgcatagcagattgccacagtcaggttggag

SEQ ID NO: 355871 - DNA, 256 bp, Zea mays
atactatcttccatctgacactaacattattgaaaatgggagcagttaatactttctaataaaaccgaaccctcttaaagttaaaagggggtgggttttacgtttattggaaccacacctaaggcatccctggcctaatgcacatgtattccatagccctaatcaatctattgttttcccatgcaattatcttatttacatgcatgtgatactatgctctcttcattctaatttgaagaagcagtagacatgtcat

SEQ ID NO: 355872 - DNA, 241 bp, Zea mays
ccttgagtgagtgccttatttgttattgcacagtgtgtagatattcaggtaattttgcagttagaaatcaaacacccctaaagcaaaactctgcgttatattatagattgtgttgtttatggagtggattttggaatagtggaaaagatatctagtaagagtatgtacaacttagatttttttgataatgtccaccttagatactacgttatggttctctaagcactagatacatctaaaa

SEQ ID NO: 355873 - DNA, 236 bp, Zea mays
cgagggtggcgctcagcgtctacggctccttcagcagcagggcgtacctgaacgcgcagcggctccggaaccgccagatgtacttccacaagcagatcttcaaggccgcggacgtcatcgtcttgccgatgaccggtgtgactgcgtacccgctgcaagacgacgcgctcagcaccggggagctcgactacataaacggagccgcgctggtccggtactccatagccggcaacttc

SEQ ID NO: 355874 - DNA, 236 bp, Zea mays
gccgaggcggctggcaagcagctgctgtacccgacctcgctgcgctctgaggagattatgtagtgacctaactgccaactgctgtgtgtgcgtgtgagtgagtgcgcgtgtgtgcgcagtagatctctcagaacacctgtggtcatgtttaatatgtgctagctgtgtgccttgacaatgaataagctgctgctctctcttttgcaaaaaaaaaaaaaaggggggtccgccgattt

SEQ ID NO: 355875 - DNA, 233 bp, Zea mays
ctgttgttagcacctgcaactgcaatgtggagctggagctccatggcgtttggctctctcctcctcctcttcctcctggctaccagagcttatggtcttgggaggcaggacatgcagttgcacacagcacacttgcccatgaacacgaaggtcaatagccagaaggagataccagctgacttcaagtggcaactacgaccgccggcgggcacactggacagccgccggaacgc

SEQ ID NO: 355876 - DNA, 235 bp, Zea mays
gggcattctgtgactaagcggagtgaggtgtatggagcaacacttgttgaggcagatacagctattgttctcaagatggacagtaatggccaattaattcaggatactttatcaactaaattcggaactggaacaacaacggtcaactggacaggatcagcaaatgacaacttgcttcagtttgatggaggatatgaaataacattgctacctggtgggatgtacatgggatatc

SEQ ID NO: 355877 - DNA, 239 bp, Zea mays
gtccttccaacaaccatatcaagattccgagcaggtgcggatgagcaaacagcgagactactagaagatattatttatcctgaagaggtgacacattgctcagctggtgttagatggttcagatacctgtgccttaggtcccacggtaatcacccaacctcatatccagttcctggactggaaccccgttcctctgggctgccgggggatggcactgctgatggtaagacagctaggga

SEQ ID NO: 355878 - DNA, 237 bp, Zea mays
ggataattctggaaagctaacttcaacgtatagcagttcttagtgctgtcgatacaattagcaaacatccagcctttgatacagactacaaaattacgtggtccaatcatggacatgctataagcattgagtactctgcaacttctgctctgctgggagattcatatcgattcgggaagcgaactactcaggcacttctatacgatgagaggaatgcacgctgctagatactacttg

SEQ ID NO: 355879 - DNA, 141 bp, Zea mays
gctggtttatgctgtgaacgtaagcgagccatattctctggtatgcagtctgaaccaacatagtaaacctctggtactccgacaagccattaccatgttcatacaaaaaagcaacaattactcataaatctaagtagagag

SEQ ID NO: 355880 - DNA, 177 bp, Zea mays
tggaagttttcatggattttgacccagtattggtttcaaagttaagtgagaagaagatcattgcgcctggatgtcctagctgctccttgctatctgaactgaaattgcgtggcgtcattgtaaatgctcgtcaaatactcatgatcatagaggaatttggatcatttgataaatact

SEQ ID NO: 355881 - DNA, 269 bp, Zea mays
gagcgatgatatcggaggtgagcgctgaattccccatgccattatctccagattatcattgttaaacgcagtaatgcagttagctttatcacaactatccggtggccacagatgcgatgctgaattggaatcacataaaagacgcaataattctgttcaagcatatgccagctcgtggtgacaagttcttgtttatttatgtagcacatggtgacatgctcatcttttatgtaggtgtgtcactaactgatgtcccagggtggactgga

SEQ ID NO: 355882 - DNA, 193 bp, Zea mays
acgttagctctgtatgaggctcgagatatgttcccgttacaaacgctcgggcacttctagtatttagataggactcaaaaagtcccggaaccatacgtacacatactaacatagagtgcatagatgcaagcgaatagctactacatactgacggccactcaacatacgagcaggcgaaaggggaacttgctca

SEQ ID NO: 355883 - DNA, 184 bp, Zea mays
ccaacctcggtcaccagtccatcgatcctcgaatcgctcgcatgcactgacctgctaggatcatacgccatgaagctgagcatgcctttcttcggctcgtcttcctcctcctccggcaagaagaggaaggggtcaaagaccggcggctcctcttccttcgtctccacacaacatacgagcttgc

SEQ ID NO: 355884 - DNA, 140 bp, Zea mays
gatgtcttgtccctgggcatcatatggcacactgcagccaggcacagttacctgcaactgtgcgttaaacggtcacacctgcagataccggtccgcaactaattcgcgagccgacgaacccactattcaacggcggccct

SEQ ID NO: 355885 - DNA, 216 bp, Zea mays
caggatttggaccacggcaaagggcctgggaccctcgcccttgttcaatcatttgcacgatcgaatgctgcgctgcgccctgcaggattcatccgactggaggccgagggtgcatgcacgtcagtcgcattgcacggccatggacacgtacaacgcaagcttgtgactctgtgacggggagcggtgagcatgtaagggtgtgacacgggaggactc

SEQ ID NO: 355886 - DNA, 250 bp, Zea mays
gaaaaaaacttaggcacttaaacgtggtcttgaaaaaccagccacttatggtcaatggccaaaatttggctgccaggtcgcgaatccacttgtcatggaaggccagatcggggttggcggaagaacgcgcatgccggtgggttacacggccgcgacgttcgccctgacgtgcgtcgtgtcctgcggcctcagctggtcgtggggctcgttcttctggaccttccctgcaggaagttcactcgccggacac

SEQ ID NO: 355887 - DNA, 252 bp, Zea mays
ggaagctgcagctgacatcggacttcgatgtcattgccgcgacgctattcctagagactctccagaagatagggatgcttgtatttcctgcctcgagttccatgcacttggcgacaagcgacttgatgttatatatctgaaagttataaaggggctttggagttcaatttacctcgctgtttaggtatattgaaattggatgatgactacagggtagatgattgtttggagctgcagaacctcagtcatttt

SEQ ID NO: 355888 - DNA, 246 bp, Zea mays
ggccgagctccctggcgcacgtcccggtcgcagttcggatctccgtggcgccgcgtcttcttctctgccccgcaatccatggcacccggttggagctccttcctgcccggcgcgtgcccgcctcactgctctccacgccgcgccgagctgccagctctggtgtccggccgagcttctccccgagcccggctctgccccaggtgtcacgcttgctccaatcgcgcgcccctggtccaagctctgcgc

SEQ ID NO: 355889 - DNA, 241 bp, Zea mays
gtcattagcagaccttttaatccgttagatttagatccaaccatagatacaatgtgtcactgctgcacgagttttctctttggctattactattgttgtaatgacaggtctgcaatcatttgatggcctttctggctcaaactgctagtatctaaatcattttttttgtaaaaatgatactgttgcataaatatcaccaaagagtttagttgtcttcaccatgttttcctacagattcaga

SEQ ID NO: 355890 - DNA, 223 bp, Zea mays
aaccttaacatcgttaactcttatcacatgacggagactgagtgatcttgtgattccgaaatctcatattcaatgctccctctatttctgtactgcgcatccagcgcccgacgagaacccgacatgttcgacccgatggctttccctccaaaaccacattcagggccttcgcgccgacggcgccaacatccaagttgactttggccacccttccgagcagcaa

SEQ ID NO: 355891 - DNA, 103 bp, Zea mays
attcgggcccggaccctgcgggcgtcccagtttcccctatagggagccgttttaaacctgggcgaaaccagggccatagctgatccctgggggaaattgttat

SEQ ID NO: 355892 - DNA, 219 bp, Zea mays
ttcgctcgagcagagtggtgtcttctcccaaggatggtaagagcggcgagaagacgatgaccatcgatgtaggctatcagggaagacgagttcagccaagtagcaggagcattagcttttattagagatagatgaagataggaagatttcaaattcttttcttcttccttttcttgtacgaatccgttcctcttggagagtatgaacttgtctcgtttc

SEQ ID NO: 355893 - DNA, 267 bp, Zea mays
tgttgctacatatgtagtatgttagattcctacatcattctgccatctttggagattgtccaggttatgatataaccttatttatcagacagctagccagataaaagttgaagagtgacagattgacggacaacatactcttggttgttatgtgcagtggactcttgctacagacctgcaaaacctggcaatggagttcaaaaaaagcagtcatcatgtttaaagcatttcgcatacaaaacaagttatcttatgttgtcatcagat

SEQ ID NO: 355894 - DNA, 189 bp, Zea mays
cgtttccatccatcctggcgcacaagaggaagcggagagctctctctctctcccgcccgcaatataatggcgagagcacacctagccctggtcagcttcttcgctgcctcaattattggtgcggcgtccaagtcgttcacaatcgcacaccatcttcggacgagcgaatgtgttatgttttttttgggt

SEQ ID NO: 355895 - DNA, 233 bp, Zea mays
gtcaacacacctggacagacttttgacacagaccactgtcctgtgggcccaacagacttagctcccagccactaacggttcctcaagctcattagactcccctaacaggaattcaccacccacataacatcatccacacttccccatctccctttcccaaagacagagttatctgaaccccatctagacactcactgcgattctcccgtgtgctactgtatatgccatttctc

SEQ ID NO: 355896 - DNA, 262 bp, Zea mays
gggaatcagctgtctaacatataggctattgatttctgttccatccatcttgttcaatattttccaggatcaactggctgctcagatgcccagttctcagtgcagcacttattccgtaagttgggaaatgatgaattcattggtcagcgggtaatccttgtagtttctcaaaagatatccaacgtatctgaaagattgttcttggctgatccgtttgctgatgctttccctgatatgcatgacaatatattcatcatgattc

SEQ ID NO: 355897 - DNA, 260 bp, Zea mays
gatccatgtcagccaaagacaagtttcttttacatacttggcttgctgtccatttcaagaattaggtatgtacttatgataatgcagggcaccctctgaattagctgatccaactattctcttgatccattgtggtgactggtctttgtgcagtcacataccagaacaatggaccaaaccccaaaccaaaaactaaaccttgtaattgtcaaaatatgtgaaaagttctttcaagtttaatgctactgaagcagaagttt

SEQ ID NO: 355898 - DNA, 263 bp, Zea mays
tggagccgcacgtctccttccggccttccccgacgatgccgctgccgccgggaggaacggatggatcccattggcttgccaccaccactgcacgcttcggctcctattcccgctcgctacggccccagtcgcgctcctcaccggccggcaccaccccgcccgccctcgccttttgcctgccgagatttaggcctggcattctagcaatgcagaagaagtgatcttataatcataaaagataacaatggggatatccaaggtga

SEQ ID NO: 355899 - DNA, 254 bp, Zea mays
gaaatggcctgatgctaaatttgtgagatggatcttgtgcacttagcgtggcttgttgcgtacgggacacttttggcggtgtggaaccttaatccaactgggtcttgcaagctgtccatgtgtgccctgtatccgtacggtgtacgtgcatgtgttggcgcagcaaagcgacagctctctcgaagatgacgatgtttatgctcccttttggacgttgatattggagggcaagaaatcgaattgagttgtatacc

SEQ ID NO: 355900 - DNA, 253 bp, Zea mays
gttcgtcttcctcgatcctgaacgaaaaccagtagccaaccttccccgcgtgctacgtgctcattcattccccatcccgtctcctcccaaaccagaagacaaaaccctagcctcctcctccgagtgatgggatgccgtccaaaccctacccccactccctgacctcctcttcctcctccgccgtcgcccccgcgacctggatgtccgcatccgcatggacggtgcccgagtcctgatcgccgccggtgccacc

SEQ ID NO: 355901 - DNA, 180 bp, Zea mays
cgtttccatgcatcctggcgcacaagaggaagcggagagctctctctctctctcgcccgcaatataatgatgagagcacactctagccctggtcagcttcttcgctgcctcaattatcggagcagcgaacaaggcgttcacaattgcacacaacatagatatacacgaaagctagatatt

SEQ ID NO: 355902 - DNA, 249 bp, Zea mays
gggtcggtcaggggcggagatctgctgattgctctctctcttatcttctcgcctcccctcccctcccgttctcacaattccacactgcataccagcatgccactggctattgcatcgatcgcgcatccttggccgccggtggatccggccgcatcctgctgctgttccccattcgtcggtcgttgccagtccatggattcttaaccaattcttcctcaagcttcttccttgcctggagcagctagctgc

SEQ ID NO: 355903 - DNA, 212 bp, Zea mays
atggtataactgtctgactatggatgccttgcacttttgctcctgaagtccgaatatttacctgagttgcacgtactctcgcatttaaaggttaaactctaaccgctatatagtccggatccctggtgagctgaagaaaaattattatcacgataaaaattacatacaacatagaaacatacgaggtgataactttattataagtcgccccc

SEQ ID NO: 355904 - DNA, 225 bp, Zea mays
gcccaaaaccctacgcgagctcccagtctcccactccatccatggcgatcgccaccactacctctacctcctcgctgaccattcgtctcctccacccgaatcctaacactaacgccgctctcagatctctccagctcctcagtagcaggaggtgcgctcgtgccgccgtagccggaggcgcggtgccttacggagctgctccacggcgtgggaattggtcgatca

SEQ ID NO: 355905 - DNA, 228 bp, Zea mays
cccgtcgctctgttatccaactcgaagatgtcggccgccaccgtcctgattcatcgaggccagagacccaatctacgctttcgataaacaaaccgaacagtcaacctagcagtcttccttcacttatctgctcccgacctcgtagcgaatcagatcggtgagctaaggttccggtgcgcctctacagccggacgcgaggctaggctgcgcatggagggaatcgtcacg

SEQ ID NO: 355906 - DNA, 267 bp, Zea mays
cgaattttagcctcccttatttgacactgagattatctttcatgccttataatgacattcctattagctcttccatccaaaggatgttaagtgctatgttaaaggacagagttgcccctgctacaacatatcttgcttaaccacactatgtgtgggatgacatatagcctgcttccaacacagaggatgaggtgggacataaggtgcttccctagacgatggtggcttggtcatgtatgctgttaatgagcacgaaattaagaatca

SEQ ID NO: 355907 - DNA, 260 bp, Zea mays
actgctcacgtcacgtgccgcccgcgttctctctccgactcccatgcctctccggcgagctagtctggtatccatcggcgagctagttttgtctccaccggcgagcacgcgtctgtaacctcctccacccccatcgaactcctcctgctctccaatccgctagatctcggctccgtgcaggttgcgtggatggctgtgtggtgttgctttgctcgctaatttggatggatcaggagtgtcctgggagctatgctatgctg

SEQ ID NO: 355908 - DNA, 268 bp, Zea mays
ggagaattcggagcctggcttgtgggaagagcagcatcattgcggccgccgatgagagcaccatcagctgtggtccgtcaccgccctttggtgaacatgtctacggggaccacaagcccaagtcttccactgcagcccaggaggtaaagactctggatggcatattctcagagcaggtcgccatgggctactcacactccttggcgatagcatgagatgaaagttagactgagaaagagaagatcaagaaactgccacaatacaaccc

SEQ ID NO: 355909 - DNA, 198 bp, Zea mays
gccctgcacagcacgactcctccccatctaccgctacctttctacctacccatctagcactcctcgctcgcaaatcgcaatggcgctggccaccaactctgccgagcagccgctggcgctgacctcccgctgaagaggcgcaccatctccgctatccacgccgccgacccgtccaagaacaacgggcccgcggtcccc

SEQ ID NO: 355910 - DNA, 203 bp, Zea mays
gtttatatacatatgacaggggtcattcccaaggggtgtgtcccttgaggatgtgttcgtcgagccccttggattggtcacaaaatattgtaacagaatgattagccaatgatgggaatgggagtcaatcgactcggtggctgcaaaaaaaaaaaaaagggccgtccgcagactagggacctcgtgaacccggaaattaattc

SEQ ID NO: 355911 - DNA, 252 bp, Zea mays
ccgagagccggccggcccagatgatggcgttcctcgccaagctctccgacgacccgggcctcgtgctgcgcgccatgctcgccaagaaggatgagctggccctggccgacaaggagtcgtaggcgcagccgccaagaggcggcaggatcgctgctgaagccgtgaacctggacacagcaggggcgccgtgccgttccgtctgttctcgcaagtgtctactaggtagatcggcaggagatgtgatatatgact

SEQ ID NO: 355912 - DNA, 239 bp, Zea mays
gcagaatttggccgtagtcagctgctagagtaagtaagacacttgtttactcgatgatgacaatagcaagcagatcgtggtggtgcctatggatgctacaagcctacaacaagaaagatcaaaagttcttttggacggatgcagctacatattttgtgttttgcaagtgaacttaaaattctgaaaccaacgtgtggttgtactagctagtatctctgagctttgacaagccaaactta

SEQ ID NO: 355913 - DNA, 264 bp, Zea mays
cttggacatgcgtgcagccgccagagccgccctccagggtacagggtgggcccgggagagcttgtgtgctcacacctgggcggccccgcggcagcaatggcagctctcctgtacaggctgagtttcagccacaccaagaagtcaaagctaaccgaggctgtgccttccgagacccccgggatggcccctgggaggccaaggagtcggggactgggtacccggagcagagtcactgtggccacggagaaccgcagctgagcttta

SEQ ID NO: 355914 - DNA, 271 bp, Zea mays
ggaaaatcgagggtatacctagggtggcggtgaagtcgggctagtggagctgaggcgggacagtgtagtggcaacgcgacgcggggcaggcagactcgcagcagcgaggaagacctctgcaaaaaaaataaacataagcctatcaacaaaaaatcggcaacacctcccccatacagggaagtttccaaaacctgtaaataaaagtaacaacatgatgacgaacgttcacatatgtttcaacggcacgatagccaaaaatcacatatatatt

SEQ ID NO: 355915 - DNA, 265 bp, Zea mays
gcgttagaatcatggagatcctggggccttacctactagcgggatcgactgaagagacgcctgctagtgcgttaggtaggaagctcgatccccacagaaaagagcgagtggtctgtcagctgcgagatagaaccggagtgagcagggtccctagaggccggttcctggtctgtgctgctctcctggaagccatggtacaggcagatctcagggcgatccccatgtgagggcagcggctctgcctggtattccaccgcagtacaac

SEQ ID NO: 355916 - DNA, 263 bp, Zea mays
ctggatacttccgatgcctgttccgctgtttctcttctcccgtgtcttctcccgtttacctgccgtgtgcgactactaggaggtcgccgccgccgtacgctcagcttctctgcgccggcgacaagcacccaccacaccaggattgtgtttattggatttgagtgtctgattgtgtcagtcaaatttgagttcatcacatccagcccccgcaaccccgtccggtggcttccccatgcgctgtgtggcactacggtagccgaccc

SEQ ID NO: 355917 - DNA, 265 bp, Zea mays
cagcagcagatgaactcccagatgctgcagctccagcagctgcagatccagcagcaggcgcccccacaacagacgcagcagcaaggccagcgacaacagccgcagaagtcggcgtaaagaccgtggctgagaggaggacgcggaagcgaattgagcattggccaaggccaactgaaggatgccgggtgggaaaagaaagaaccccaatcttttgccggatatatatattatcagacaggttgtaggatagcagcaacagcagtag

SEQ ID NO: 355918 - DNA, 276 bp, Zea mays
gcaagccgtcggtggtagtggctgtgaaattaaatacaagtgatgaattctgatagactgaattttctcgtcgccagccacgaagcattgatatatctccatgtgagcagctcgctcgctccttctcgatcgggtcgccagaaaaacgctgggaagcccgaaaatgggaccccatggtccatggacgacagcgaagttggtcatgctgcatgtgtggattgtgtgggccggtgctcagttgtcacatcttgtgcaaatacctgatccgtcctgcac

SEQ ID NO: 355919 - DNA, 144 bp, Zea mays
acggcgaaatcgaaatcgaaatcatccggggtcttccagcgatggaagcccgacccagcaggatagagtgctcagaacccaacgagcagcccgagccgaaggaccccggccgggtgttccacacaacatacgagcatgcgaaag

SEQ ID NO: 355920 - DNA, 292 bp, Zea mays
  unsure (1)..(292): unsure at all n locations
ctgtctccggacagcttcaacacctccgcggcggcgcttgttaagaggtggaaggagatcgaggtcgacgattcccttcctgaatggacgtggaagccgtgcagcaaattgggggtgccgtcggaggtagaaggggatctagccctggaaagagtgtaccgcagctgtggaacaagccagagtgttcttccaggagcagatcgaagagatgaagttcgatggtcaggggatgtagcttgggtcgagagctccagcgacaatgttcatgtntatgatttccatgctcgctaca

SEQ ID NO: 355921 - DNA, 209 bp, Zea mays
ctctcgagtaccagcccctctcggccggctatcggcggggtcgacatccgctccgccgtctacagtctacataaggaatcgaggtagccccagtcgtcttcggcgctcaagtttcggccgccggccgcggcgccctccgccccttcccaatcctgcccccaagccccagtcagccatcgaaactccaacccccaggcggccaggcccaa

SEQ ID NO: 355922 - DNA, 257 bp, Zea mays
aagcaggactcccccatgtcctgctgcaggggggaaacctgaacgaggtcagcgaggcggctccttcaaatgtgccgtacgttcctgagacctccctgacatcctcggcgtcgccaagatcgatcgttcgaaggttgccgccaagtccaccctatcgcccagcggcgcgcctctggccacctctgtcagtatacgtgaactcgatggagtcgacggcggcactggcacgaacggtgaggctgtgcaggcgctgcggt

SEQ ID NO: 355923 - DNA, 280 bp, Zea mays
agctaggccagatagccaaacattgccatggaggtcctacagctaaagagaagaggagggtctcttcttcaggaaatacaatagccatgagtaacaatgattcaagtgaagcacaaacatcaaatgcaagtgcagctcctgaaggaagaggaagaggaaggggaagagggaggctagcaacattacttgggcttgaatgattatgagacttatatgctaggtgccttatatgttaggtgccttcttttggatgaacttgaacatgtgatgattatgggac

SEQ ID NO: 355924 - DNA, 153 bp, Zea mays
agcaacagaacatgccatcatggttaattttaggcaagaacttgcgaatgccatgtggcaagaccgtcaacaatattattctaatgcaccatgagtctgtaaaccatctatgtaccattttgtgtgtattactctatgtaccattttctttgc

SEQ ID NO: 355925 - DNA, 287 bp, Zea mays
cgccgccacagcagtcagcagatatcagctgaccgccggccgaccgtcccacaggcgacctttccggcagagaatcaacgctcgctggcttgctaaactcattgtctgtcagagatgggacgttcggaaggggtcacgatcggatgacaacacacgtcgagaagatgacaacgacgagcagcgtcaggaacgggacatcagagtagattggttcaagtgatgttggaaagaatgtcgtcagatagtagatttacgactgggatgagaagacggttgacattaggaga

SEQ ID NO: 355926 - DNA, 280 bp, Zea mays
tctgcatctacctcctcgtcatgtttggtttcagagatccgccactttcctctgcgctttttttcggtatccttttgtctttccatggtagggtgcgatgtcgaggtacacacaactttgaacaattgcatctgatggcgatctgatggtcaccttttacctttgagtcgtattcgctgagcatccgatcttcttcatctatcgatgccagcattttttgtttctttatagttcttgctcggatgctttggatcgagggacctgggatccgccgccttct

SEQ ID NO: 355927 - DNA, 290 bp, Zea mays
gtgcaaaaaacacccaaaaagggctaaaatcgcaaaagagttgggtgcagcgatggtctactcgtcatcagattctctcgagcatcactcaaaccgctactgtactggcctcctgcaccagcatggacaccaatgctgtgattcaatgggcctggcatcaacaccgaagttgtcaagtatcagtggggccaagacagaaacctcatccatggacgcatcgatgaggacaagctcgtcacctgaagaggtcgacaggtctggtgagctcacggtgtccatcagcaatgcaa

SEQ ID NO: 355928 - DNA, 250 bp, Zea mays
ctctcttatctcttcccgtttcgctccttctgcccaacttcaaagcggtgtagcgactggtgtccgtatcatgtataaacaaaacctaagttgtcatgggagttgcataaaaaacaaactaactaaacgggggcaagaaaaaaaaaggggggcccccccaatatgagacctcttcccccgggaaaaaaagccgggccggtactgggggggaaacaagtttcccaaaaggggggcgtaataaaacctgggg

SEQ ID NO: 355929 - DNA, 288 bp, Zea mays
cagccatgctcggatttaattcctatgtgcgagtgcgcgcccatgtcctggaagatggtcatgcctgcagcaatgctcatgtcttgaggagaagcaatgtgaaaagcatcaggaaagctgaaccttacgttcaagtcagcaaacatttgtgagcattctagtatgcttgcgaccttgacactttataaaaattatctttatatttgcttcgagtatcaaccgtatagttgactctagtggggcgaagagagcagagatgagagcaaaattcagacttgctgcccctgt

SEQ ID NO: 355930 - DNA, 266 bp, Zea mays
caccaccgcgcttggccattggccttatcttcagccacgcgatatttcttttgctcagtgttgtctctgttcttcccccacatcggcatcctacccaggctgagcttggcccctgcgccctcccatctccctcagctcatccatctccatgctcagtctgtgctcttttgtcgtcgtggtcgcctgggtcgtctcatcgccctgcgtcgtcgacctcgctctgtcagtcaggctcctgtgttgtacatggctgtcgtcgctacctc

SEQ ID NO: 355931 - DNA, 291 bp, Zea mays
tcgtattcgctcgagaaaactttgcctgacaaagtactgagcatggaagatgaagaaatgaaggccctagaggatgaaaagcttgcactgcttgatcagcttgttgtcttggaaggccttgtcgagccatcccagttgctgtctcaacctaggccgtaaggtgttttgggttatgtataatcgttgtcgttcattataattcagctactagtagctgttatactatctgggcttaaacagtgtgtagaatcagcatagtagacctgttacttctatcggacatcgacgaat

SEQ ID NO: 355932 - DNA, 291 bp, Zea mays
agatgataggaggaatatagctgtcactgttcactagaaattttaaaagtaagtatatattgccagtttcttgattaggtgatctgtcctgcttcttgagaagattctgtggctcttttctctgtcctctgtgctcttgttttaaccctgagtcagcctttctttttcataagaagtagctcaagtattacgcttccagactagatagtggcccgattaccttgctgcctaatacatccatcaaacatactgtatatgaaacaatgatttcatagacatggacatcatacg

SEQ ID NO: 355933 - DNA, 272 bp, Zea mays
ctcgatccgaccaactttggttcagccttcgagtaagcttgcagatgagaagaacacactattggaacagataaagaactagtctttcaacttgaagcctgttcttgcaaagagaccaaatgtaatgggtggtccaaaatctaacttacaagtggtggccattctagagagagcccatgcgattcgccaggctgttgctgatgacgatgacgacgatagctggagtgagtagctggctcttcccaaagcgatttcggtcctgatgttcagaa

SEQ ID NO: 355934 - DNA, 248 bp, Zea mays
cgtggtcatagttgcctctgttgctgtggtctccctgagtagctcgcttgcgatgctccttcctgcacgcttgatggagacaggtcgactactgttacagtgctagcatctcatgaagacgtgtttcgtgagctgtgctctggatatgagcccggtggcactacagcttatatggctcgagtgggacaactgatgcaatatcactgtgatgttgaaaaggctgcacgaatggtgaagcctaatgtaga

SEQ ID NO: 355935 - DNA, 264 bp, Zea mays
gaggaaaacgaggtggcggctagggctggtctcccggctccctactggtagccgtaaatctatgtgtttctgcttgacctatagagtgctgaccacaattatttatactcccctctagcccttatctaatgagacagatctcctcttttctctctaacaaaccttatcttctaatatctatcttctctctaacatatcttatcttctaatccttatctgcatgcttatcttctaatccttatttgcatgcttatgctgttgctc

SEQ ID NO: 355936 - DNA, 274 bp, Zea mays
atttttataagctttaactatgtatctagacataacgcatatcgaagtgcatagaaaatactatgtatgtagaaaaaatattacatatgataattgagaatggagggtgtagtaggatatagctgcctcaatgctaagatacagttatctagcttgtcagggtgatgtgaggatattagcgatgatcctaacagacccatgtagaatggtctgttgtggaatagtactatcctctatctattgcttgtcaggttgatgtcaacggtagcaatgc

SEQ ID NO: 355937 - DNA, 130 bp, Zea mays
ctctatgttccttagatcttcaactgttacctattcacgttggcatagttatcataactcgcgtgtcttactctaaacgatctcaatgactggaccagttgctgctcactgatatctctttctattgtcc

SEQ ID NO: 355938 - DNA, 218 bp, Zea mays
ccatttcacccaggatcctgtctgctaaactagtactcaaagacattgtactactgaccctaggtcatgctgattagcctgcactgagcctgcaggatccttgagctcttcatgtgaaccttctacttgaagtgcgaaaattgctcgccagcccctcagagcaggagcagccatccttgtcctgacagtccaccgtgcccggtcctttgcccattttt

SEQ ID NO: 355939 - DNA, 264 bp, Zea mays
gggatttttaaaaactcaggacatgatatatatatacaatacatatatagcatgttccctaatcgctacaaaatcctaaggcaatttagagaaaaaagtgaccataaaaattatgactaggaaataatggggagatgcataagtcctgatgtttcatcaggataatggctttaatttggatcctgaagtattagtaggctattaataggcaaggatctctttattccttacacacatattaatgtagcatcatactatgaactt

SEQ ID NO: 355940 - DNA, 256 bp, Zea mays
cggctcgaggaaatctgcaaaccatccaaccatgaagaagtgagaggatcaaggcccgtatgctgagcttcaaagtctcctttgacactagggccaccatatgccccccatgcttgatgatgtgtccggtctcaacttcccatgcctgttaaatttccttctatccaagatattacagactttattggtatctatccagagattcatgcttccaccttgcagaaggtggttgttgaccgttgcggcatgctacctg

SEQ ID NO: 355941 - DNA, 224 bp, Zea mays
cctcgttgtccgtcgcctcgtccacgcgctcctcgtcctcctctccgttccctccacctgctcgaccgcaccgtcgtcgtctagctagcggagcgagctgcgaccagatcggagagccatgcacccaggaagagggggccggggaacaagaagaagccgccggaagccggtcgtggacgtgtggtgagtttctgccggcggctgacaagtggtgtaggctaccc

SEQ ID NO: 355942 - DNA, 115 bp, Zea mays
agctcgtatgcggctcgaggctaatttcgcgcgccaggactggctagcttcgcctggttatctgacaacaaaagctaatatgaatatgaaagggccttccttaatgcttgtttcc

SEQ ID NO: 355943 - DNA, 282 bp, Zea mays
atttttgaatgtgtacggaggcatgaggttgtgtatggcgatgtgtatatgctagatgatggagccaagtggaaggaactgtctccaatgccatagccagattcccacattgaatttgcatgggttgtcggtaacaactccatagtaattgttggtggaactacagagaagcatcctatcaccaaaaagatgattcttgttggtgaagtcttccgttttgatttggaagcactgacctggtcagtcattgggcgcatgcctttccgaatcaagacagcctta

SEQ ID NO: 355944 - DNA, 272 bp, Zea mays
caaaaaagctatagccccaccacaatggccgcgccattgtgccatacgatatccaatctggtacgacgaacccacgtgcttagataccagggtgctgcactcttaagcgcgttagataccaatgtctctgcgaaaacgagcgcgttgactgcatcacttctgttggcaaactgtagccgttccttacaaacatcatgaacaggccagtacactgaagttggggggagagaccggtgctctctattgtggacgttcgagcgcaccacaccgac

SEQ ID NO: 355945 - DNA, 204 bp, Zea mays
aggatcgtagatcgccatttattttacaacacgtatcacctatgggacggctatatgtcagcgattctgagtgtaactgaaccattccatgcatgaagtacagcaccaagcacctttttgaatacagaatccatttagtaagatgtatcaaatcagtataatttccagaaaccataaatcatggatataaaacttaaccttttt

SEQ ID NO: 355946 - DNA, 262 bp, Zea mays
gccgccaccaccaccatcagcccaccaggccaacaccatcagctactgctgcgcgcctgctcttcgcctcgcctccctccagtctccaggaatccatctcccccattgctcccgtgcagcagccacctgcactgtgctgcctccttcgttcgtctcccggcctccagtgtcctcggttcccgcgatcctccgtatgctgatacctcatttgcgtatctgaagcgagggctatgaagttaaggacaaaacgtccagaatggaa

SEQ ID NO: 355947 - DNA, 279 bp, Zea mays
cctctttcagaacagtgctgcctatacagattgttatcggcaaaggaaaatctggctatctggcaatattttacctaagcgcagattaattggcgaaaaaattaactcttaagatggccattaataattaggaaagtttacagagtggtcttagtagaaaattcaagtcctgctaatttatttaaggttcaataatgcgttcaacatgcctgttatgtataacgcttaggttctaaggaagattaaggtctcataccataatacatgtagcttatcttt

SEQ ID NO: 355948 - DNA, 266 bp, Zea mays
tgcatttgcaggtagcagttttctgtttcggtggacggtgacgtcgtcgacgaccgaccgtagcggaaggacggagatgatggaggagggggcgcccgatctgcgagagctcgtgcgcctgcctgagtgatgtgccatagttgagggtggcaaagtcaagtcctgcataaaggccgagcatgttgagtcaccttcctgttgtggaaatcagcaagatgaaaaagttcgttccctggaagataatgcatcaaccactaagcccatgg

SEQ ID NO: 355949 - DNA, 257 bp, Zea mays
gctacggatgctgagccaaacggtggcggagccggcacgtcgctgaacgggtgcggagaccgcgcgtaccagcgctacgacgtgcaccacgttgcgcggtgtttcgaacagatattgccgttctcgctgcttctactcgtcgacttcatacggcagcatcttcaaggtttgcttcatatctctctttctaaatgcgcgttcagatattgccgttcttgctgcttctactcgttgccttcatacggcagcattccaag

SEQ ID NO: 355950 - DNA, 254 bp, Zea mays
cgcgagcttgcagctgctcgatttaagcgggactggcatcactgacaatgggcttgggatgatcagcaacacgttccctaacaccctaacacgtctgctccttgctctgtgcccaaacatcaccccatgcgggattcaggcggctgcagcacagctgccgctccttcgcctcatggactgtggcaagagcatatgtgctaccccccagcctgaagctggcagatcatactctggcgatctaactgatgggacaa

SEQ ID NO: 355951 - DNA, 124 bp, Zea mays
cggtcgggccgggaacctcaccgtcttcatcacgccgccgtctcctgctagcacgccgcgtagcggctttgcgcacgccgcggcccgagtctccgcgctcggatttctctacacgcacacaaca

SEQ ID NO: 355952 - DNA, 267 bp, Zea mays
agaacatcgagacaccgccgagcgagctagccgttgagaagcaggtccagtaccaggagataagggaaggaagcccagctctctctagcctggagccgagaagcagtctgaccaaggaccatctagccatgaaggatgccatcccacgcgtaaacggctgacatacctgcgcgcctacgagtacttggacaagatcaccggtgaactcggccgtgggatactggacgtcggtgcgtaccagggcatgagatgtgcggagacatatca

SEQ ID NO: 355953 - DNA, 226 bp, Zea mays
tgacgttgtgttgatacttttgtccttgaggcttgcagtctggtatctttgcttcctgttggggtcatgagttgtggttagctcgtatagttggatggcgttttgaggatctccaaggcttaattaatttatgatgggttgatcttgcaggtgaaaattttataactggatttttctaacatctgggaatttatgtaaaaggaacatgctacacagtctttgttgt

SEQ ID NO: 355954 - DNA, 221 bp, Zea mays
caaaaattgtagctaagcaaagtctgtgatgttaatattagtattccgtaggtgacagacacccccatcagaaggtagtttgacttggcgtgtcattttggatgactcagattagactttttcatcagtttacaaattttcggatacttgttcatggattatttctatatttatttatatggttggttcatcgttaaaaaaaaaaaaaaaggggtggcccc

SEQ ID NO: 355955 - DNA, 287 bp, Zea mays
  unsure (1)..(287): unsure at all n locations
atctttgataggtggtgtacaatggccggtgtacttggtactatgacatactatgtggtgaaatcaaagcgccaaaggaagattagaaaaaaggagaagatgtcaagaagaagtggctcaagttcttggtatgacaataccgagctctcagatactgaacttaatccagtatatgccttgtaaagagtgtttgtctcaggaatcgagtatgtactaacagatacaatagcttacattatttgttgattggtcaatttctccagttccagtaacaacanaaccacaca

SEQ ID NO: 355956 - DNA, 300 bp, Zea mays
cgatcttgaattatctaaagcggtggccggatgacgatctcgccgaagcgatagattaacccggacgcgtgcctgcatgctagaccacattccctatagtgcgccgtgttagactcagtcgaagcatggtcatatgctagaccatgtgcgaaatagctatgagcttacgaattctatagccacatacgagcataccatgtgtctagggcctgtgagaaaaccaggctacacatctccaggggaacggctcctgactctatggactttgacccaccgtactttgcagggctgggggggctg

SEQ ID NO: 355957 - DNA, 296 bp, Zea mays
aacaatttcgttctggcttttgcctcttcagtgttctatgtctgttttgagacgtggcttgtgctagagcatgcgaagcaagaccagaagcaagatgtgcagagcgagacgtactgactgataacattctttgaatcggtgtcccttgtcggaagtcaagaaatcacaaatgtattggctagtgatgatgacagtagattcttgcttccctatgcatttgcagccacactatcggtagtgggcattctgtatatcagaaatgcatcaagtacatgtcagcatgcatctgccattgg

SEQ ID NO: 355958 - DNA, 112 bp, Zea mays
atccacagggcgttctagcagttgcttctttaggatgcggatcattacgtcgtacatatatcccgatgtgtctgagtgaatctttgactgttctgggggagggcagcgggcg

SEQ ID NO: 355959 - DNA, 269 bp, Zea mays
gttctagatcgcgagcggctgcccttttttttttacggggctcaagcttacgggtctctaagttataccatatcaggggagaacattccagtaccggggtctagcaaatttcttacacaacactgcagtctggaaaaaagtcaccctttgaagagcctgacgacttacagcagatggcccagggaaaacaaaagccgcaaaagcagcagacatcctcatgtatcgcaaactaacgtgccagttgccacagcacattgcacaccatgaat

SEQ ID NO: 355960 - DNA, 270 bp, Zea mays; identical to SEQ ID NO: 258518
  unsure (1)..(270): unsure at all n locations

SEQ ID NO: 355961 - DNA, 264 bp, Zea mays
acggatggtggtgaattctcaggccctaaaaggctagatagggaagacagaacagtgaagtgtgagctctgtaattacaactggatcaagcctttgcttcggtagatcacagcagccatgcggctcggagaatgtgtttccctctagatcatccacatgcatcaaattaaccttcaaccaggtgccgcagattgcattagatggtgttggactgtggatggagagtaccagcaaaatcagcttatgatgcacaattcaagacat

SEQ ID NO: 355962 - DNA, 253 bp, Zea mays
gcccagcagctttcatgtgtatggccttgacacgtctacaagtgtcacatctagccacatagcgtgcgatttcaatcttcatctttgcccaccaatagagacaatgtcagccagaagaacacataaggttccatgtgtgcaatttgcttcttctgatggcactgtactatctgagtctgttgggcgagcggcaattacgcaattttacccaaacagaatcagatgcacaatcttgggtaaaacactcagaaag

SEQ ID NO: 355963 - DNA, 135 bp, Zea mays
gtgtttttgtgtgtgaggttggaggagataaatccgtggatgtcatgtggagaaggctgtagtgcggagctcaccgtgtgattgacctaatgcttaactaggactcatcgtcgattttgcggactcgagtcaggt

SEQ ID NO: 355964 - DNA, 168 bp, Zea mays
cgatgtaccgatgagagtcatagtgccatcattctcgagcttcgactcacttcgttgctatccgacctgaggatcaggtcaaacatcattgcatgcgcaggatattcatttaattgctaggtcctcaggcaacatgaaagattattggcggaaaaataatcttcagcc

SEQ ID NO: 355965 - DNA, 226 bp, Zea mays
catggaactgcgggaagtacgacgaataagatttattgagcatgtgtgcgtgcctgcattctgctactctggctgtgagatgaatctattatcataagcagctgttactctacgtgattcgtcattcacatcagctgttactctggcgtgattacacgaattttttgttcaaaaaaaaaaaaaaggggcgcccgccgaatagggacctggtagacccggaaataaa

SEQ ID NO: 355966 - DNA, 225 bp, Zea mays
cggctcgaggttctagatcgcgagcggcggcccttctctttttttttgggcgatagttctgaaacgttagtatatgggatggagaacttggtccgcaaccaatatcctaacgttccagaactctggacagaaaacggaagacaaaagtggttttctggggcaaagtgagaagaggtgaaagtgctagaaattagaattcaatgaaaatctttaaaccaggcctga

SEQ ID NO: 355967 - DNA, 142 bp, Zea mays
ttcgctcgaggccgcgagcctgtccaatccggtcccccgggtctcattcccaccccgcctactattctcctcgctcgcgctgacgggcttccacacgtaatacgagtctgcgccgggatacaagactacgatcgtgatagct

SEQ ID NO: 355968 - DNA, 271 bp, Zea mays
gaaggcgaagacgctacccttcgctccaggccttcatcacctcgctgcaccaacggaggcaagatgactggcgcggctcacccttcgtcctcctcactgcaagacgaaggcctacgacgaagcctctccatcccacgtcctcacccaacctggaggcccacgtgggattcggcccattgtaacagaccccgcacggagaagcgtgttacatacccgatttgtaatagcttttctgtaatgatagtctataaccctcccctgtgggaatatt

SEQ ID NO: 355969 - DNA, 274 bp, Zea mays
cgtagctcggatgcgctcgagcggcacgggctctactgcgttgggctggtgatggctggactggctggcatctctcgtgacgcagtgagcgttgctgcggacatcaaggccgcggtggattccatggtggggccgccggcgttctggttctgatcgaacagcttagatctatctgctcgctcgatcgtcgatgcatggacggagtgaagaataataacgttacgtacgtacgtaccgcgcgatcgatagtagatcatcgatctccatccatccg

SEQ ID NO: 355970 - DNA, 268 bp, Zea mays
attcagtgaagatttcttccttgccctcaaattctagtcaaagttcactgcttgagagtgcagtccttgtgtactgctgggataaccctctctgcatcctaggtttgcctgtcccagaacccttctccccatggactagatacgctcacttccccatggactagatacgctcactgacacacccctttcccttgcttacatattctgtaatttggggctaggtattttggagctcctcactgcccttaaattccagccaagactcttt

SEQ ID NO: 355971 - DNA, 235 bp, Zea mays
gcttgagttcggtcgagctcactactcgttcgtatctttaagcttgctgctgcagcgtaataaaaagcagtctgcactcggtcggacggtcgctctgttcagctagctgcatgctcggccaccatatctcctccagtacgttcgtcgttctccacacaacatacgagcatgcgataggcggatgttcgagtcctgaggtgcaggcgtcatagtagatatcggggtagtatgcttg

SEQ ID NO: 355972 - DNA, 275 bp, Zea mays
tcgactgatcggtcagggaaggagatacaatgacgtagcggacaattctggtgtgctggtggctcctggaataggcaaaaaaggagaaaatgggagaacagaagtagcgctgcggcagtttgtcagtgctcttagtaagtgcggaatatacctacgtagctctagttccctagcttatcctctagtggagttgccttgcagatgttagaaaaaatggaaaattgaagggagttacaaaagcggaggcctgagtgtgaatgctgttactaggctct

SEQ ID NO: 355973 - DNA, 193 bp, Zea mays
atcaatcctaaaccaagactcgcgctacctgccatacgaagagactagcaaccgtctatactttgagtgctgtttagtacgatcagattggtgcatcttctatatgaccatccgctaccatccatcgcataattgatctacaccatatatgtacagggagtttacaggctcatgatagaacgaggaaatcgga

SEQ ID NO: 355974 - DNA, 276 bp, Zea mays
gttctgaataagccttacatgatgaaagtacgtgttgtacgcacagaaactgccatgacagatgttcttcgggaggtgatgattgtgtgtccataatgaaaatgctgaatcaccctaacattgtcaatcttgttgaagtgattgatgacccaaacatagataaattctacatgggtcttgactatgttgaaggaaaaatggtttgcgataatggtttagaagaaggactgcaagaaattatttgcgagacataatatctggtcttatgtatcttca

SEQ ID NO: 355975 - DNA, 263 bp, Zea mays
cggcagaaagataaactcattttatcattcctttgtggaggtattatgcttaattgttagggtccgtgcatgcacgcagagcgaaacaaagtgcattttggctcctactctcctagccctcctaccactggcagcattgtataggcataaaaggcactgcgtaagagacctttcaagtttcatctatttttttagaatgttgttaaaaattttgggtgaaggggtccatcaggacacaactgcatggttggttaacactcagg

SEQ ID NO: 355976 - DNA, 279 bp, Zea mays
ggggcctcgctcgctcccgacccggatgcaagtgttgcggtgggagaaagtcgcgtccgcatcggaggggaagcgccgtcatgcctaagtattatgaggacaagccgcagtgcggcacgtgaccgggcctgaaggaggacctgggcgcgagtctgctgcagtcggactgtgtggtccaggaaggaaaatcacctcggcagggtttgaaggaaggatactgcaactctgtgaagtacgcactttttgagtgtaaaagatcagtgttggataacagggcgg

SEQ ID NO: 355977 - DNA, 223 bp, Zea mays
ctctcctggcagctctcagctgaaagtcgactgccgcctctgatcactcactgctgaccttctatactaggtctcccctctgcccactggacgcccctgacttgtttggcctttttctccaagttctgctcacaaatagtaatgatgcaatgtctgtcttactcactacgctgtaggatccatgaggacaggccttgagtctgtcctggtctcaggaatcacg

SEQ ID NO: 355978 - DNA, 242 bp, Zea mays
ctcggagcagtaataccaaccatggtcataggtgttttcttcttcttcttggtacagaatgatgcagttaggagccgtggcaaaacaaagaagggtaggaccaatgaagcagaagccagataccacaccaactcgttagttacaaactcctaactgagacattctgtaccaagaagaagatgataacacctcggagcaggtatacgaaccatggtcataggagacatgagcgccagcgtgct

SEQ ID NO: 355979 - DNA, 288 bp, Zea mays
gaaattctaaagaaggacaaagaagcttcggcagcagaaagtcctgcaaagccaaaaaacgcagaattatccaagtgacagatgtgattcatcaaacgccgccaccggtatcggcgtcaaaaattgttattgccgagaccgccgaagccgaagccgccgcagccgaagctaccagggctgaaaccactgaaattgcaactgccagagccgaagctaccggagctgaagccgccgaaactaccggagccgaagctaccggagtcgaagccggggctaccgaagattcaa

SEQ ID NO: 355980 - DNA, 272 bp, Zea mays
gtccgctgccgtggtggccgtccaccgggcgagccgtcgaggtacccaatttctgccatggcgatccgcccggaccaatgctcgattctccatctgaccatcgtcgtcaaaaaggactgactggcctgcacgtcttctccagttctattttgctgccagttcagagtttggacactgcttggacttggagtggcatttcaagccagctaagggtccagatccaccatccatggctgtgcttccgccgtgtcaggatcccttattaaatatcc

SEQ ID NO: 355981 - DNA, 274 bp, Zea mays
  unsure (1)..(274): unsure at all n locations
ctcaggccgagcacaagcagctgggcatcatcagtgtggtagcctggtaggtacggtactctctctctctctccttgtccaagagacgaagaagactgacctgctgtactactgcgctgctgcttctgcacgacaagatacgacgcggcgcctactctttacccgagtttaatagctcgtccaggtacagctcctcgtgctactgcttgcttcacaatgtgcgctatcatggggaaacaaaagaggggtaggtgacggtggngtgtcctcaagc

SEQ ID NO: 355982 - DNA, 307 bp, Zea mays
  unsure (1)..(307): unsure at all n locations
tgcatgcgcgtcgagcgcagattgttctgattctcatgttcaattgactatcccacatgagactacagtttataggcagtgaggaattgtatcttcctgggaaatgtccttccagcaacttcagaggaatgggaaagtgttaatcttacgtgaagcataggagcctggactaggggcagagagaaagaagcagcagcccaccttctttggggttgcacatgtgcctatgtcgngtacattggtacctgactgtggctcagatctgcgtcgcagcagcgagagaagagacactccatatccgatgaga

SEQ ID NO: 355983 - DNA, 185 bp, Zea mays
gttctagatcgcgagcggccgccctttttttgttactttaacccagcaaagccatctcaaacataccgtctcaggttcacaatatccccgatgatgatttaacagcaggattggcggacccaattggtttcacatcacggataataaggaagcagagcactgtacagttacggaatcagacatta

SEQ ID NO: 355984 - DNA, 291 bp, Zea mays
  unsure (1)..(291): unsure at all n locations
gaacaaacatatgtcactggaatgccctgatgctactaccacctgtgttggcttcaatcattctatgtcagctacagtgtgctcacacttgctgttagtcatgacatgcttaaaaaaagtttgtcattgttgtaacccacctctcttatcttgggcctggtaagaggggtgcttgtatggaccatntccgctataatacctatgtgttcagaaaaaaagtcatgacaatactatttctgctttgtatgtggcaatgcattccacacttgattaggctactctactatgctc

SEQ ID NO: 355985 - DNA, 186 bp, Zea mays
cggctcgagacgccccgcgtggtccctatttaccggcgagcactaggctaccgacgccgctcgcaggtgccggtgccccgaccttcgacgtgcccatttcaccgtcgacgagcacccactaggtgttgggaactggggatagagatggatcaccaccacccgcagcagcagcagcagcagtacggc

SEQ ID NO: 355986 - DNA, 170 bp, Zea mays
ccggcattcgccccaaaaaatcgagccgaaaaagatcaaaagataaaaaaagaagacaaaaacgctaaccactccgatcgaatcatccgaggccgcagcagcccgggaggctatgctcaggaaccgccgctccgggatgcttccctgggaacactcgggcgcattcgctt

SEQ ID NO: 355987 - DNA, 234 bp, Zea mays
catagtatgttcttagcgtgcccttgtacatatccctcattcattgatgtccttgcgatatgttttgtgagcatgttcgtttagcctttggttcggttctagaactgctggtttggatgtagtaggacttgattgaactcgtttccagctaaatcctttcaggtcttccacaactcactactaagaataccattatgatatactctctgcttggttctcatgcttacgataggt

SEQ ID NO: 355988 - DNA, 231 bp, Zea mays
gttttgatcaaagatacctgtgtagaagtaataaagctatgattaaggaacgattcttgttcatggagatcgatgcactgctacatgattttgggaataaaatcaacttgaattctcgggtgcagtaactttgaagaccatcactcgctgaaaaaatttccttcttggagatcgatgcgatactgcactgaatcagaataaaatcaatggtgaatttgctgtcagtttgct

SEQ ID NO: 355989 - DNA, 174 bp, Zea mays
atctcgcttcgcttccataccatcgcgccagacgccagactcaccagggagacagggagagggaaaaaaaaatcaattagaaacaacaaggacattgtcagctgccgaccttcgtgatcctgaaatttcagctctggtgcttccaaactgagggagttccacaaccttgacatg

SEQ ID NO: 355990 - DNA, 168 bp, Zea mays
gacatcacagtgtcctgaacgcgcgagacacatgggtttgcgcgctgcacacgtctccgcagtccagccatgtgccgtctagtaagtgcacatgcgtgcattctatcgcgctacatagcacagcgtgcccagctactgtccctctgtgcagctacgacccaggtggac

SEQ ID NO: 355991 - DNA, 297 bp, Zea mays
acatgatgaagcttatcacgctcctcgtcagcactgagaccagactcgagcacccttgttctgtaagcgagacatactggcgcgtgttattttgcggatttgagttttttggcgacgttcttaccttggctctgcagatttacttttggtgcctgttctaagtgcaaacccagcaagtttcacttgtactgtccattagatgcaactacatcttgcggtggtgtttctttcttgtccacaatgaattgacatccattccatagagctgatagcctgtaataacactggctaacacac

SEQ ID NO: 355992 - DNA, 259 bp, Zea mays
ctcgagccgattctcctatgtcaatggaaaaacatatttcaactgggttcacatgataggatttctgtgcaggtatttggcatgagcctaaggataatacatctccatccattcggattaaattttgaagatatattttattcatccagtgctttgatggtattaaataatatgaaacatgaaggggcgccaccggaatagggacttcgtcgactcggaaattaattccgagccgtctttgtggcaccctagttttctt

SEQ ID NO: 355993 - DNA, 296 bp, Zea mays
  unsure (1)..(296): unsure at all n locations
ggaccgagaaaacacaatcgagataactccgatgtctctgtctcctcgcgttccctctgtttcgattctgtcaccaccgttcagagacatccacgttctcatctgtttctgaatctcttcttagtcgatacactcgctcccaatctcacctgaataagaagaacatggcgattatggtgatggtgggattgggcctattggacttcctcgtcgctggggtttctntaatcattggtttgggcttcattgccttcattgcttccattctctgcgccactgcgtcttcaacaacgcca

SEQ ID NO: 355994 - DNA, 279 bp, Zea mays
ctcgagccgagtgattgtcgtagtagccacaagccaactcagaagtgcaatataattctgagtctcctctgtgccaaattctggctgaagaagtgcagcggcaaccaacattaattggaagaccgtgtttaccttgctgatgaacagaggttcaacgcttttcacgatgaataacatctaggttaacaaattctgaccaactgttccacttccatcccagactagaagcacgcttgtagaaagcaccacccacaaggagcaagtctcttacgacaacga

SEQ ID NO: 355995 - DNA, 146 bp, Zea mays
ccgacatcagcccttcgtccccacgagcaaccgataatccgccggcgatgagatgctggattatcaggatctcctatctggcgacgagctcccttcggattcatacacctacaaggagctcgctaacggcgaactgcgggaggacg

SEQ ID NO: 355996 - DNA, 219 bp, Zea mays
tagctatagtgtgttcaaacacccgcttagtttcaatatatgtatgccggaaatctattagtgtgccaaggtgttatgatggaattaatggtgaaagatgttctgctactaaacttcaaagctgtagacgaacttgaaattagcttaatatccccggatatagccatataaagattatatgtgggagactccggatataactcgtactcaactcttttt

SEQ ID NO: 355997 - DNA, 301 bp, Zea mays
gctcgaattcgctcgaggtgcacacgcagatccgagctaaccaccgcagatccgagattatccagccggagcgaccttttcttttttcttccacacagcgtaccagcgtacggagtcaggcagccaaagccacccaccgcttttaccgatcggcgttgccgccaccgctagcattgtcggcttcagctccatccaaatccaccgccagcaagcaagccggcgccatgcgtctgccgatgaggagtgatatggacgcggagtcggacctgaacctgccgtcagggttccagatccacacaac

SEQ ID NO: 355998 - DNA, 214 bp, Zea mays
gccagaggcagctgagagccaatcaagcaactctgaacacttgttagctaccaacctcaaggggaaaccattactttcaagcaagaacagcagcgattctagctacaagcactgactaaatcttaatctacagggaacttgaagaaatgcctgagatatggatcgggaatctcttatccagtaggctgcctagtgttaacatagtgattcaagt

SEQ ID NO: 355999 - DNA, 296 bp, Zea mays
gggacttcacatcagttctccttattgattgttagcttgatgcctcttgttctcttgttgtaaacattttctataattaggaaatgccatttaagagtgagagaggtatatatctatgagccattgtgtttggtgatttacaagaactttaccatactggagtgtagtccattctgtacagtttagaagtgattcacgatttgcaggctatttatcagatcacaaataaatcagtctttaagcatttgcttggtaaggtttcttaagattaggtttataatacaaccatctgtaat

SEQ ID NO: 356000 - DNA, 280 bp, Zea mays
  unsure (1)..(280): unsure at all n locations
gcagttttggcgtgtaacttagaaggattgaacttctctgaacttactggacataacattttcagaatagttggacatctagcaaccgcgtcaaaatgtgtaagcaggagagaaatttctcattacagggatttagacttactattacataaaggctaactatgagcttgctcattaattctgataagatgtacctggtggatatctagctagtaatatattctggagcaacattttagctctattgatactctntctaatgctgatatgatcttgagta

SEQ ID NO: 356001 - DNA, 273 bp, Zea mays
atagaacacacactgtttaacagaaactagtgaattgttgcatctagatacttgtatcttggacagattatttccttgaacatgtttgtcagatctaagggtctatttccctcctctctttgagtttggattcagcctacccttacattctccccttatgactagtgttgcctcagatattcatatatgcgcatcctctacatatgcattcactatctgcatatctatcctggagcatatcatgtctgactacatgaggaaaaccattcttta

SEQ ID NO: 356002 - DNA, 287 bp, Zea mays
gcacatcagtgcttggacctttctagcagccgagccccttctccagtggcaatcgcccaagccgccacctctgcaatttccgggcatcaacctcgcccttctgcttatcccgtcgccgagctgtatgccgctatcctgcgacctcctcgacgacgcgcaagatcgctcgcccctacatcacctcgctcctcgtgcttaaatcgacgtcgcccagctccatcgtcacgcaggcctgcctccttatttccgtctcatccttgtgcacgacgtcgaccaacgcctccctg

SEQ ID NO: 356003 - DNA, 275 bp, Zea mays
ctacccaccactgccatctgcttttactgtggctgatgggttccgccagtttcttcgattgttcttggattgctagagagagaggaaaaaaaacagagaaacaaaagaaaacagtctagatggctgctactatagatctgtcaggggaggagctgatgagagcactcgagccttttatccgggatgcctctgctcacggatccagtccggtcctccacccgcaccagccacttagcccctcgtcgccggtctccttccacacaacaacggagcat

SEQ ID NO: 356004 - DNA, 271 bp, Zea mays
  unsure (1)..(271): unsure at all n locations
ctgagacgtgttttatggcctaactctgtggttattctggaaagtttaatatgcccttgagaagaaagtgcattctgcttgtgttagatggagtgttcttttttcccatttccgcttaataagtggaaagtgaagacgaaatgttctgtctatagctggctattaggtttaggtggcttacagagttgctcaagtgttctctttccttgttgatcttgggtctagctctatccatgattganagcagggtattgcagtcagtgattgtact

SEQ ID NO: 356005 - DNA, 241 bp, Zea mays
atcgcgcacaagagatagagagagagagatagtcgcgaaaatgagcagagcgagtcgctagaagaagggagcgagctgtgtgatcgatcgcgcgaagtctgaggcgcatataagtatggacattgcttctctggagagagagcttcacgagatgattaaggttggcgatatgacatgtgcactcggcgatgacattactggcactagggacaagagcactatcaccgtcacctcagacagc

SEQ ID NO: 356006 - DNA, 248 bp, Zea mays
aaattgatgcaaattttgaaaggtggatgtgcagagaacagattgctggataaagatgctctgctaaacatttgcaatcgtgggggcatcaggaggtagctaacgtgcaaaacgaggtggtccttgctcagtaggcgatgcataggctggaaacagcgcatgacaacagaattttgtcaggagatgaactctgcgtgctaggaaagctaaagaaacactgttttgttaatgcttctatggaaagaata

SEQ ID NO: 356007 - DNA, 270 bp, Zea mays
  unsure (1)..(270): unsure at all n locations
caacaacatgatgagtgaccatggcatctattcgagggagaggcttctggttccgatcagcaacccagaaatccttcttggcagcacctgctacatcgagatggaccataacgctaagagagaggttgcaatcttttaccccgagggacgcccaggtggcaaaactgactctgtggcaagcattgtctctgcggagaggagaaacaaaaggattctcgaatcggtgaggcggacctgcacgtcgatgatncactgctgcgactacttatc

SEQ ID NO: 356008 - DNA, 250 bp, Zea mays
  unsure (1)..(250): unsure at all n locations
gttagcttcgaggtctctcttgaccggtgcagccaagttcacaagtatgagatctgaccacgggcttctctgccggccgcactcgaaagaaggccaaggcggtgtcggaggatgaggaagaggcagggttgtaagatgaggaagaggcgactgtgacactatccgtggagaatgacgcactggagtgtgacatctgctgctacnctttccagtccgaagtttttatgtgcaagaacggacattctgtatg

SEQ ID NO: 356009 - DNA, 263 bp, Zea mays
caatggatggccaaactgcagagcatttgcaaaaggcgatttgtgaatattcgagtgatgagatcttaactgtgataataactactcaggtgcatgggtcataataaaggatgggaagaagccgcctctatgttttctggcgattcagttttgcttgagacatgtaacgctgcgttgctagaagctgcaggcaaatcatgggttgaggccttttttgtggctggtctgggaggatggaagctccatggaattgtaaagccatg

SEQ ID NO: 356010 - DNA, 238 bp, Zea mays
gccatgggcccatggccatcgcaagcagcagagacctagtggtaggagcgagcacacgcaacgaagcaaggtatagagtagcgctctgtactgttccggcgtcgctgtggataagttcatgtaaaaaatatctccgtagcctgccctgctctggtagccgcatcgcccgatattatccggcgacggctggcccacttgcctagttgaacgctacatgcttggagtgtactgctcgcta

SEQ ID NO: 356011 - DNA, 160 bp, Zea mays
cggacctctcgcctcctctctggcgttgtcctcgcggcgccctgctccgggtcctcaatcctgcgccccgtcttccgtgcctaccggctgcttcgagccagatcgatacaagcggagccctgattcggtcaacgcgccgagcggttagccggattctctc

SEQ ID NO: 356012 - DNA, 280 bp, Zea mays
ctgcaactagcgcgcacaccgaattgttgtcaagagagaaacccttcctcgtcccgttcaaccggcgccgccgactcgcgtgttcctccccgcgtcctcgttctccttgctgctggacccgctagtggggatcgacctgatttctcctgtgctggtgcgcaaagaaaggctgtgcaggtacatcaccaatctaggcaccgtctcctctacgtcaattggatattacccaggctttcaaggtagaaaagaagctttttgttccatcatgagcttatcaact

SEQ ID NO: 356013 - DNA, 271 bp, Zea mays
gtacgatagaagaacttgaagcgcattcactggtctcttatttaaagtccataaagcaaagttccaaaaaaacaaaaagaaacattgagttgccttcacccggcttctcttgagaaaatacaaggtaaacatatttggcaattgtaatatatgttgttattttgctctttagttgcttcaaattgtttatgggtaccagtaggcaactcagaagagacaacaactgtacttttcagggcgtaagaaattctttagaaagcatattatacta

SEQ ID NO: 356014 - DNA, 267 bp, Zea mays
caaacgcgcaggcgcagcagctgcgttcacgtgtccctccagccccgtagcgtagcgccatccagctccgagctgttgctacaagaagccgccacaacaaccgctccgaacggttcaccgtccgggcggcgctcccatagtcccatggaagaagcgacctaacttttctcggattctaactcgaatcttcaggctgctggtggtgcgaggttctttgagagcaagaccttgaaagggatgcactggagccgtggcctatcccagccc

SEQ ID NO: 356015 - DNA, 136 bp, Zea mays
ggcaccagccaccaggcggcgactactatgtaacacgtgagcactgtagcagctaccgcaacgcaccggacgtgtagttttcgcgacgcgtgcagctatcggccacggcaacgaaaataggagatgttttattcgg

SEQ ID NO: 356016 - DNA, 283 bp, Zea mays
gcttcgagttcgcctctagagatgttcgccggcgtcgacgcctacggctacttctgcgtcgggttcgaggacttcaagatgatgatgtgcccccagccgcaagccgaagccggcgccgtcgttcgggacaaggacaaggccgtggccaaggaggagtgataaaaaaattctagtatttgctggtgtggcaggatccaacggacatggaactgaaatctagctgtaggggacggagggatactgttaaacctctacgggttttacaaaataaaatcaaagatat

SEQ ID NO: 356017 - DNA, 263 bp, Zea mays
tattgttcaaacattgtgtgctagaaggaaatcagggctgaatcttgatgttccacatcgtcggaatgcaacctataatatgctaaatgaagcactaaattataagcttgctctcaataggcatgcagtagaggaacaccatgaatttctaattgaagaagattgagtaaaggtagaagctcttcatggtcctctataagagatcaacgatacaaccaaattattctcagctgtgagatgcctatctggatctagatcgcgag

SEQ ID NO: 356018 - DNA, 264 bp, Zea mays
cacaactgcagtgtaagtagcgctacgcggccggagagagatagggaaagcgggaagcaaggacgatggcgtctctgctcagcctgtacggcggcgacgccgctgccggtcggaggaggatgagccgaggtagcggcacggcgccggcgccggtgaggcgtctgctgaggaggctgaggtccagcttcatcagacggagcgcggcgcggccgaggacgagggcggcggctgaggttcgcctacgacctgcgcagttactcccag

SEQ ID NO: 356019 - DNA, 259 bp, Zea mays
caggtaatggagaaccctgctccgagtatcgtagggccccccatcgccgcacctgtatcagcgaacttcagcagactcgccttccgcaacctgtacatccgacggacgggtccagacagcagggagatggtgactgtggagggaagaagaggctctagtgatcagacaggcgacatgaggctaaagggctccacgcttttcaaggaagtggtgccgcttgggattccgatgaatgggcaatctacggcgggaccggaga

SEQ ID NO: 356020 - DNA, 108 bp, Zea mays
cgtagctcgaattcgctcgagagcaaaccttggggaagggaaccgaagcgcagcatgaactgcgcgtctgccatcccgcagctactccacacaacatacgagcatgcg

SEQ ID NO: 356021 - DNA, 242 bp, Zea mays
gcgagcggccgcccttttttttttttttgggaccaaacttggctggggtcgaaatccgtataggacccgagattccgccagctaaaactttacaactatgaccccaaaacgggaatatggacctaacccgagcaaaagggccctagattgccagggcagggcccacttaaaccttgaaccccctgctgctcctccttcctctggccttctaaaacttccaacctttcgagcgaacataaggc

SEQ ID NO: 356022 - DNA, 150 bp, Zea mays
atcgatcctcccatctgcgcacccgcaagcctattcgccgcacctcctcaggtgaccgggaagatgatgccgttgagccaaaccgacttctcgccggcgcagttcacctcctcccagaatgccgccgccgactccaccacgccttccaag

SEQ ID NO: 356023 - DNA, 201 bp, Zea mays
ctttattattcttctctcggcgttgccattgacgaagaagagatgcgcaagatcttcagcaaggtcgactagtacggcgacgactagatctcgtgctctgagttgaaggagatgatgacggcgctgagatccaaaacgacgtcggacgaggtgaagcgcatgatgtcggagctggaccggaacgtggacgtctacattgac

SEQ ID NO: 356024 - DNA, 104 bp, Zea mays
aaaaatagtaagctgtttcaaggagcttccgtgctagtacatgttatttctgctctttgcttctatgtaatacaagccacaattattttgcgcctgcaatatac

SEQ ID NO: 356025 - DNA, 270 bp, Zea mays
attgtctggacaagattattgtattttctcctccatttaaatccacttagatataattgccttgcctagttttgacatccatgcaatggaaaactggggactaatgatatttgatgaatcaggattgttgttggaaccaaaagatcaactgacagaaaaaaagactctgatctcctatgttgtctcccacgagattggacaccagtcatgtggtaaaatgttctttttatttcacttgaaggtattctccaggtgcgctaccaaaatagc

SEQ ID NO: 356026 - DNA, 269 bp, Zea mays
agatgttgcgatccatcatatctggcacgtatattagctgcatttatcttagatactggcagaggatacctgtaactaatcatagaggtgtcctgagtgatgattctgctttctccacatttcctcctgaatttgtaagaccgttcattgaccctatcgcttcaatatttcatcgtatgctctgtggaagatatgatgcttctaatgacgatggctactgtctggaaaatgagcctttaccaggatcagactcaattgatgcatccagg

SEQ ID NO: 356027 - DNA, 268 bp, Zea mays
gggaacgagtgtggtcgtcgtgctgcgcggtcgcgtcgacgtcgaacggtgtaactccggcaatgctgtcggacggtggtgcatgagttccggtgaggctccacggatggcggacgagcgacgaacggagtgggctcggagagagcagaggagggcttcatacggcagatattcaaaaaattatcggggtcagctgaccccaaaataagggctggctccgcccctgtcaacatatcgatgcgaggaccagttatcaaggtctccttat

SEQ ID NO: 356028 - DNA, 257 bp, Zea mays
cagttcttcggggtgcccaggtgtatgttcctggagtcttagcatgtagttcacatgctgaaaagggtgataaggctgcagtgtcagtcgctattgagcagcctgtcaaggaagatggctgggctgtgggcataacacgaggaaccgttttacaaggattgcaatcagatgcacattatgaagaaaggaagggtctgtacattggtcaaggaactgctgcaatgtcaagatctgcaatatttcgtgttcctcatggg

SEQ ID NO: 356029 - DNA, 264 bp, Zea mays
ggttacttagtcgacccatcctacttcgagacacgtaatgctccgaatcttggcgtctctttgcggacagtaaagcctgtcttgcagtttccggatggagtggtgaaacctggtttcacaattggaactagaggaaacgccgtggataaggcacaatggcccgctgacttgaaaacacaggtaattgtatagcttatgcgaattgcagcaagaataaacaatagatcatgtagaaatgtttcgagatggtactatcacgtcaat

SEQ ID NO: 356030 - DNA, 266 bp, Zea mays
ttcacttgtttggtatcctttcattgtgatattcttgtaccatccctatcaaatctatagtttattcatatttgatgcagatttctactttttttgtactggtattttgttcttaagacatacatcttgttattatcgatcaattattcagctacactagtctgacctcaaccagaattataagagcttagctagttagcaatcataaatattggaaagccatgttagcaatgagagagctatcggtgagtggtcttggaactttg

SEQ ID NO: 356031 - DNA, 247 bp, Zea mays
agctcgaattcgctcgagccatgtaaatgtcgacatggaacaaatgaagtgtacaaaatatgttcaaactaaattatcatgtcaacaaaattaagcaaggcttgaagataatctgaagagctctgtacaggcaattttcttctgacaagggaaatgatatgtcaaagggttcattgatcattgtcgatcctgattcctgatgcttttattttttcaacaacagattttcagcattcgaaatggaact

SEQ ID NO: 356032 - DNA, 272 bp, Zea mays
ctgcaggctgcaggcgctgctcctttcgccctccgctagcgagcgaatcgctggctcgaccccgcggcgggaggtatcccgccttcgatctggttcactggccaattcgttgcttcgtggggctttggagtttggagccaatcttgccccttaaagtgtcggtggcagcgttttgtgatcatcatgagctttgtgttccgagggagcaggaccgacatcgaggccggtggcttcccagggttcgctcccgagcgccgcgccatgcgaattca

SEQ ID NO: 356033 - DNA, 281 bp, Zea mays
cccgcctgccgaggttggatgtggctccaccagctctgcctccctacttcctctactgctgcggctactgctacatcatctatcgtgcctgtttttctaggaatcttaatggcatcaggctgacattttgttcaactcattagctggttacagtaacaaggaaccaccattttgatgcaaaggagcagatgcgacaggatcacaagtaggaggagctgcgacgatgctgtagcgagagacatgggtgccgaggtcgttgtgctgcggtggtggcagtacag

SEQ ID NO: 356034 - DNA, 282 bp, Zea mays
gaaagacatacacgcattctttctacacaatcatacaaaatgggtttcttcggttgggacgattctcaaaactaccacgagcaggtctacggccagcagcagcatgaggccaagttctcccacgaattgattgccggtgctgccagcttcgaggctttcaaggcctttgaagaccaccgccgcaaagagggacagccagtctcccacgcgttcgccaaagaggcccttgtcggcctcgtcggcgccgaaatcgacaagcttgccgaaaccaagggcatggac

SEQ ID NO: 356035 - DNA, 268 bp, Zea mays
ccggcacagcctgctgcccctgcatccctgctcgttggcgtttccctcgatccctcccccctgccgctgccctgccccaacactggctggctgcccaccatccttcctctgcggagctcgcgtgactcccctcgctctcgctttcgcgctgcgtccgcggcggcatcattgggtgtccgtgtctggactggagaccgggtccgtcctccgtcggatagagaggggggcggagccttcggctttcttggctgctgggttctcgaccact

SEQ ID NO: 356036 - DNA, 260 bp, Zea mays
atttcacaacattgcagttacgattattgtgtatggtcaattggcacattgatgcttagtaagaaaagtgatcctacactccaagctaccttattgacagcttatcgcattttcagtttttcaggctgtctaaatagatgccattgaggtgttattaccattctaaaatggttgttgtagtatttggcttgacttgattgtacacttggaaaccatgttatgaccaaagcccgtctgctctgcaggaaatcccgcaaaat

SEQ ID NO: 356037 - DNA, 122 bp, Zea mays
gtttggccatgggctatataatccattcttttacactcatgtctcgttgatgagccagactgagcatgtaccagcttgtatgcatatttgcacaccttgacataatataccacacacaaccc

SEQ ID NO: 356038 - DNA, 262 bp, Zea mays
ggattattcggaccaaactgggaccaaagaagcatctcctggcctgaatcgacacatcagtgtcttaatatcatcagatggacttattccagattcctcacgacatttaaaatgtctatgcaagaagaaattacactttcgatggtgtgaatgggcattcagaacttctgagaatagactcatcataccatggagattgcattgaagttgtttcaggcggaacaccacattctgcctcggacctccacagaagcctcaatat

SEQ ID NO: 356039 - DNA, 248 bp, Zea mays
ctagcggccatccttctttgttagccgtagccgagtagcgcgcccatctccctgctcacatcaacaaccttggaccgcgcgctccggcgtccgctcgccatggagcttcttccctgcgcgcgcccggccctagctcggccttctccccggagcccggccggagctccctccagctcgtccatggcagtcgcgccctgtcgaggttgctcccatggtcaccaatgctccctttgctcgtctccatggct

SEQ ID NO: 356040 - DNA, 263 bp, Zea mays
gaatggtttatatctttagaagggactgggtcattttcatcatcacctgcagtttcatctcaaccttctagcgtgttctagggtcctatggccaaagcaagtttctaatggcttcaagaatgagctggtgacccggagctgacaaaggatggttacaccctcttgaatgaaatgttgtcatatgttatgacttaccagtggcggttcagaacgtatgcatatttgctacatagccacacaccgccaccaacgaagagctcagt

SEQ ID NO: 356041 - DNA, 263 bp, Zea mays
atatatatatatatatatccaacctttagattttgctacctactcactaaaagtacctgatcattgcaacttatatatatatattttggatgacgaacaacttagaaatgatatcaaggatatatataatatcatatcttgtgtatgttcccgtaaaaaataaccaccaatatctttactactctataagcctttattgtaggcctacacacccgtgcgccgtatctgcctctcgatgcccgtctgcccgcgcgccccactct

SEQ ID NO: 356042 - DNA, 255 bp, Zea mays
aaataatttttctttactataattaccactaatatttaaatgcattattttaatattagtggtaattatagtaaagaatttttctttcaagtgcttgatttttacctttagaataaaattttgttaaaaaaaaaaacaaataaaaaattaaaaggggcggcccctaaatagggacctttttaccccggaaataaatcccggcccggaccctgaagggttcccatttttcccaatggggggtcgaattaaaccttg

SEQ ID NO: 356043 - DNA, 269 bp, Zea mays
gtcccaggtcacgcgcggacccacgtgcagcggcttcgggagaggatttgggccgtcgcgcggcggcttccgatgcgtctccttgctgagcccgccgaagcattgctccacagtgagggcacgtcgcagcagtgccgcggcatgggcatcctcacagtcctccttcggacggccataagatctgatttcttgccgacgccgctgggattgcctgttgcactgatgccgttcgtgacctagctcgggtggaggcggtcgtggtcgtaggt

SEQ ID NO: 356044 - DNA, 293 bp, Zea mays
acagtgcacgcgtactcagcattggactcgagccgatctaggccgacagacactgactgacaactgtggacggcgtgccagcaatgatcgattccacgctccttaatctacgcgtacggtacggatcgacctgccatgcacatgcatatatagagacggacgtagctagccacggtactacactacttaaaagttagaacatcagacgcaacggcatctccatgtgtgcgtgctcgaattcttaggagcatagagtagctaggttctgagcttcaggtgttgagtcttttttt

SEQ ID NO: 356045 - DNA, 265 bp, Zea mays
ggggcagtagcatcatcaccgcagggacgaagcggaaagatcagcggcggtggcagcaccaatgacagccacaggaggatcactgtctctgccagcaacatcatcagtactcctttgctcatcgtcgacgccaccgccctgccctctcctctggctccccggctcctgtctttttttctaggttttcatgtttgttgtgaggaagttgttgaccatgtgcgagagaaagaaacggtgtaccctacggagctgagaactatatatg

SEQ ID NO: 356046 - DNA, 245 bp, Zea mays
gtactaattaagtagaacttttgatattttaatttcatgaaataaaacagcttgtgactggagaggcatggattctcatcatgcatgagtccatgatctttcataccactagagatatttcgcaagtagaaattaagagtgttgttgaatgtataataatacacgtcttcgtgcctgtgtgatgagtttaagagaaaattaaaataaattggtgaatataaaaaaaaaaaaaaggtgtggcctcc

SEQ ID NO: 356047 - DNA, 261 bp, Zea mays
ggcctgcacactgctgcagacgctgttgaatatctcgattcacgcaaatgcgttgcgcagtgtgtcgtgcccgtggacctgagcttcctgcctcggagtggccataacgtggatcagaccatgttagatgacctcacacattatattatagctctttcaactcaaaatggataagctaaacgtgcagctcttgtgcaagtcattttgacgatgtttctgaaatctgctgcattactcaatgccaaagctgaaacgatctca

SEQ ID NO: 356048 - DNA, 239 bp, Zea mays
gaatttaacagaccaacctagataagctcaggagtcccataaatatggacaccctacataaaatatgggctctggcgctatcatcaataatcatgaggagtaaatacagctgcagaataacgtaggaaacatgtccgaggttccagctgaggtgcccgatgggaaaaccgtggataactctgctgcaagaggccgaggattgaagcggaagaagaaaaaaaaaaaaaaggggggccccc

SEQ ID NO: 356049 - DNA, 190 bp, Zea mays
aaaatagcacaattgctggggccaaatgaggtagaccgtcgcatccatgacctatctacttccctccccttcttatctgctactgcaataatcacccgaggcaattttggcgtgctttacttccacacaacatcgtagcatgcgaaaggtggacgtgctgatcccctcttgcgacttcatatctcttcta

SEQ ID NO: 356050 - DNA, 264 bp, Zea mays
  unsure (1)..(264): unsure at all n locations
ggagtctttgctgaaaatgtttggntgcagattacgactttgcacacttaaatgttgtgttccctctcccacaactttcccgtttgggtgctttccagaaaaaaaaaactgttgccattttgtttggaagtatcagtttgcacgcattgtttggatgtgaagtatcttaatggttttgactggggtttttcagcaagtcacaccttggaatatctttcacagccgtgcttttttagaaagggagaaaaagaaaaaaaaaatcag

SEQ ID NO: 356051 - DNA, 149 bp, Zea mays
tgctgccgtgcggctccagctccagctgcaggcgcggtagaggggccgcatcgaccttcccaatccccatggccgctaccaagatccttgacaggctcaaggtgggggcttcacctccagcgcccggcggcgcgctcccgctcacaatt

SEQ ID NO: 356052 - DNA, 261 bp, Zea mays
ccttcattcactatacaacagatagacaatgtcttcgctcttttcctccaccacgctctctactccgccgtctcagctcaagaattatcccacgcgtcgtctccggcaccgtcgcctgaagcaggagccgcagactccgtgccttgctccgccatcatgatcggtgcctcgctcgttttgtctctcatggcggtcttcaagttctaggatttcttattttgcatttcatgaatgaattaatattccaaaataacatatata

SEQ ID NO: 356053 - DNA, 230 bp, Zea mays
gcgcagcacgctagtggaatccctgctgttagccgttaagaaacactatctgtatccctaatcgaaacgacaccgcccgatcaggacctccctcctctcagattttgctgcagtgggcctgaaaaggatatattcaaagctcgatcgcacgttcgaaaagaaggtccaatcttattccaaggtgaaagatgctgctacctccttgagtacccagaagtctattactaaga

SEQ ID NO: 356054 - DNA, 284 bp, Zea mays
cagatatgaagacagcgttgatctctggcgcgacgtcataggtattatctagtgtgaccatgtgccacttgccaaaaagttcacatctgaggaaccctccattgaaacaattggtggagagaatgttataagttggccatctgtgtgcgctcggtacagttcaagcgcttcgattgctataattttacagctgaggaatacaaatctatcacttcaaaatacaaagtttcatcaatgatgttagctcccattcatggctctggtttctggattgagtggagttc

SEQ ID NO: 356055 - DNA, 205 bp, Zea mays
tagcacggacattgacattggatctaggaggatgatggcactatgctatgttacgatgcactgtgaagaaaaatgcttcgcttgcagtgcagaggtctggaggaagaaagcaatggagagcagacttagtcggtccttgttccttcctccgtcttctatctctctgtgtaaattggccgttctccattaatcaaactgcaattct

SEQ ID NO: 356056 - DNA, 264 bp, Zea mays
gcatgacatggctatggcttggctccaggatgtcatgcagcacggcccatccttgcctctccgtaacgccaggacctcctccgagctctgtctgctccgcttgaccgtcagaccctgcttcctctcatgtctcgcttcccagccggccggacactctctccttgtcgtgcccttggcctttcgcacagttggacgacctcctctgtctattgttgccgtcatgcgtcgcttgccttagcgcacagtttcctagccatggaactc

SEQ ID NO: 356057 - DNA, 244 bp, Zea mays
gccgacgaggtcagccagcacatctacgacttcatctccaagttctgatacatgtgcatggatcgaccattatcagcttgcttgcttacctgctaaaacctgtaatctcaacctcgatatccgtgctgccaacttgttttgtttttcgaactaagagtaataagtgttcgcataaaaaaaaaaaaaaaaaaaaaaaaaaaaaaacgaggagaaaaaaaaaaaacagggtcccgcgctaaaaggc

SEQ ID NO: 356058 - DNA, 284 bp, Zea mays
cgtctaggcatcttgggccatacatgaggagacaatgggatcctggtattacaaatgggcaattggagatgagctgcgaggagctagctttgcagatcgcagtgttgcttggggacaagcaacatttcgtcggggcgataatgtaacacccgacactggctcaccacgtgatgggcctcgatgtcgcatggcccaactcggagcagcctaaaggcaggaccacaacggcaggagaggtattgaagacaaatcagaaatcggaaacagggttcgtcccttcgctc

SEQ ID NO: 356059 - DNA, 286 bp, Zea mays
  unsure (1)..(286): unsure at all n locations
gcacaggtgagatcgcaaccctagaggagcggttcttgcgcgcgatcagctatcgcttgttcgttggcggtcaagagttcaggggcctctgcgaggtcctggagaaggtgcccctgccgccgtgcgggtgctgtgccagtaggaagaggcaggcggacgccgttgtcggtgacgaggaggagcaccgccgcgtgcgcgctcgcctgccatcacccgtcgtgatgcccccatggccccattacgaatctntttaggctgaaatctaacgaattcaattcaagtcgat

SEQ ID NO: 356060 - DNA, 272 bp, Zea mays
  unsure (1)..(272): unsure at all n locations
gattgctgctcattatcaaataatgactgcactggcgcatatatggacaagggaactgaccaagatcagcgaaaaggagcaatcccttaattctgctgcccagcccctccaggaaaatatggacaagagctcatctgggttcgctgtggttgctgccaaactcatgcaatttaacaagcctaggtttctcttttcggatgcttcaatttccatccttgttgaatgttntagcccttgatgagaaaagaaattaatgcttcagtgagacttta

SEQ ID NO: 356061 - DNA, 250 bp, Zea mays
cgcgtacggctgctggagatgcgcctctagctgtgttatacaaagctctgcgtagcatctaaatacacatttctggagctttctcaaatataatgtcagcctaagatatctcaatttcttaaaatccatcggttgtatctaaatctgcaaatgtgtaaatgagatgagtgaacaattggtagtactcccttaatttgtcgagtgacctgtaatttctagattgctgcttcatcaagttgtaaattttgat

SEQ ID NO: 356062 - DNA, 272 bp, Zea mays
ctcgtttctcgccttcgcctgcctccctccctctactcctccactcgagcgaaaccggtagcgctcaggagctgacggcttgaccttggctgcgcacgctctcgccttgtgctgctgctcgattcgtgctcgctgggctgacagactcggtgcttcggccggttcagaaatctcgagatggctcgtattcagccgaggaccgatcaaaggcctgctgtggacgtggaccacgtcggccatggaaacttcacgggtcatctgaagagcactct

SEQ ID NO: 356063 - DNA, 251 bp, Zea mays
ctcgtctgataaggctccaaggcctgatgtgacagcgcggatctacaaatcctgtcgctgtatcattaacgggaacctgctgagggctctatctgtcattcaccaaggcaatgctcagaagacggggccgctaaagtcctcttatctcattttgatccctacaaagatggatgcttctttggctggtaattttaggctaattagcctaattcacagtgttgctaagttggtcacaaaattgcttgctaatc

SEQ ID NO: 356064 - DNA, 281 bp, Zea mays
cgacatatggcatgcactagctgctgcgtgagactcaccaacaagtgttccatgtgattattgcccaatgtggatcaccgacgcacgcctattgagaatgacttccagtgtcttcgaactgcatgctcgaaggcacaacatggctgcaaagagacacttaggtacagccagatctacgatacatgagaaggaatgcatctatctgccatgttcatgcccatgtactggatgacatgtgattgcctcatgcaaggagctattcctccactttagccatagac

SEQ ID NO: 356065 - DNA, 263 bp, Zea mays
caatcttgaaatatgcggtacttgatgaatcaaatatgaccatgtgtttctctataccgctagatgctgattccaggtttgttatatgtgaaaaatgttatccacattattttaaaaaactattactactgatatttaatggtttcccttattcattcctaaatgcagtatacccttttcacttgaggatattacaaagacattgcctgacctcttcctcgatcatgtgtttacagacgcctgatctcctgttgttgagctag

SEQ ID NO: 356066 - DNA, 251 bp, Zea mays
accactctcactcgctctccttctcttctatccactcctcttccttcttggacttcttcttccacccatcatcattcatatctacacgcgcgccactcctccttccacactccacatgtgcgtttaagcgacgtccgatacgacacctatttgccatcaacctgcaagacagggaaaagtgaactgttccaccagcgagcctctgaaggtcatgatatcaggtgcacctgcatcgggcaaaggcacgcaat

SEQ ID NO: 356067 - DNA, 99 bp, Zea mays
agtagcctcccttgtgacttaattattagaaccacggcagatatgtggttcaaatgataagctcgtttcattgtaaacatgaagataccgatccggaat

SEQ ID NO: 356068 - DNA, 200 bp, Zea mays
acataatgctaataagtgacataaataaccatttgctgatatgctgtaaatacagatgaaggatgagtaacgctgaaaaggtattactggcaacacatgtcctggaagcctgagttcagctacgatcacccttgggggcacatcacttccacttcttgaacttgccgccgccgaacatgccgtgcccgtgcttgcatgct

SEQ ID NO: 356069 - DNA, 284 bp, Zea mays
  unsure (1)..(284): unsure at all n locations
agctggtagtgcggctctagcttatgtggatggagaatgcacggttcccatagaaacggcacgggtaagatgattacccattcttttgtaatcgggcattatatgctatgcattggattcatagtgacacctaggtcagcgcaattctggtcaaatgccagaccaaaatatggtgaagtgaatcttttggtctaggaatggntttgcactgaaagttggacatatctagatacttttcaacgccttttagatcatttggaggaggatttataatggcatatctc

SEQ ID NO: 356070 - DNA, 202 bp, Zea mays
gcttaagataattgagatacttctgaaaggatgcaataatgcagaggattatgtacaatagtgcaagaggttgataatccaaaatgcacctatcataatggagaatattaagaagttcctcgagaagagagatttttgcaattctatccatgtctgtggaagtaaatccgttcgcgctggatcacaagtcctcagaagcctt

SEQ ID NO: 356071 - DNA, 234 bp, Zea mays
tgaaaatcacgaggctggaaacgaggatgaagtgcgcagggctagggaaaggagcttcagaggtgatgatgtgtcaagctctgtagatcatgacggcaaggtgacaaaacctctcccagaggaacaattgaacatcatggataggatatttgaaggcaccacaaacttatctaatggaatttcatttcgagctcctggaataaatggatcatataccacattgccctcgagccg

SEQ ID NO: 356072 - DNA, 261 bp, Zea mays
gaaaaggaaacctcggaaaaatagcacaaaacaatggtttccaaaaattgtcccgaatcagctcaacattaggatgagaacccaccaaatgatctcgaaagaactgaagttaccagtcaaacacagttgatgttgtgccagggaggtgatgttgtgcagcaggagttccagggagttgatgttgggcacttaaccccaccaaggctattgttaggcgccacagattcagttggtcatgttgggcactttaccccaccaagg

SEQ ID NO: 356073 - DNA, 199 bp, Zea mays
atcgactacatgaaggccgccgtcaaacgctactttcaggctggcgcgttcgccagaaggatgggcgtcgacggcgaccagatcgtcaagatgagaccctccctcaccaccaggatccaacgcccatagacagactgtctaatcaaagcggaatcggttatgttcacaaacaggattggactatatatatatatattct

SEQ ID NO: 356074 - DNA, 255 bp, Zea mays
gcagtcgatgccgtcgtccatcttccctgcgtgtccctgccggcgccgacgacaatgccctgcgccctttctcgtcaggccgtgtcttccatggcggtctgcacggtgtagtgtaggtgtaggcggtgcgagaggcagagaaggggagaggaatgagcgacatgccaaaagaagttttaaaacttcatagcctcgagattttattgagctctggttgttcggtagagtttctgtggctggaaagcagtaaccttt

SEQ ID NO: 356075 - DNA, 231 bp, Zea mays
gcagcataggcgtgtgatacacagttctgtgcgtgttatgatatttagatgtgttgtagaaaaagaacagctgcagcatggtctcagcagcttgtgctcatccatagtatgtgttcttgagagaaccttggatgtgatgctgtatagctagatagctgatgtcgagaagctctacatgcgatccgcaatcatgataacgtaggccatgatgctatagttatcatcgattta

SEQ ID NO: 356076 - DNA, 255 bp, Zea mays
atagtgactagacatggtagggtggagtgttgtcgtggtgaagccatcagcccatcactgtcgactggagctttaagggttagaggaatcatgcttttatttgctcattctgtctgggccactgatgttcaggattaagaccaacttcattcttggtgttgggtataggtgtgatgcacacttgtttccttcactatgatgtttgggatgtagcatcctactgacacgcacgtttatactaggtttcacatagac

SEQ ID NO: 356077 - DNA, 172 bp, Zea mays
cacccgtttcatcgcaccagcgaatccaacgacatcgctgtcactctcgactcatgtactccagatccatctcgctccagaagctttcctcgcctagatctccctcgcgtgcccggtcgcgctgccgacccggacatggcgaccaaggggaagctcgtcgagctagggttga

SEQ ID NO: 356078 - DNA, 252 bp, Zea mays
aaaatatttgtgttaagtatcgacaaagaactggtttgcttcacagcaaaactcaattgaagaataagtgggatttactgaaagggctttacagtttttggcttggtctaaacaaagatacaggacttggatgggattctaagctaaggactgtgattgcaagtgatgaatactggaagaaaaatacaaagtggatggatctacatcatgcgctctaggtgaattttatgatgtggaaaatcatgagactga

SEQ ID NO: 356079 - DNA, 248 bp, Zea mays
aaatctcgctcagagctcggtcatgcctatgcttctgccaggctctatctcgatctccatcagatataactatggctactgaagagaccgcggctgatgaaatcacttaccctacgaagatcactactagcaagcgcctatctttgcttggccatggaatcaccgacatggagattcacttcatccatgtgaaattctattcaatcgggggctatttggagccagaagtagtaggccacttggaccag

SEQ ID NO: 356080 - DNA, 186 bp, Zea mays
atgagcggcatcagcttatctgacgctatccgtgactccatccatgcgcttggacctacgatcttcaccaaccaaaacccccaactcgccgaggtcaccggcgactccgtcctcgccgcgccgcgccgtgaggatgtcgttccactaccacgaccacgggctgtccatggacgccgccgcgtcggc

SEQ ID NO: 356081 - DNA, 245 bp, Zea mays
  unsure (1)..(245): unsure at all n locations
gttgattgctattcgatagatcgcactaaagggaacacatggatctagcttgattttgtaccaaattcagagcaactgatcgtggggattcgattctccatagtttatttgcggggccgttccgatcagcgatggtgaagaggctcaggcgcaagggcgacgtcttctctgtctgcgttnaaaaggacgtcgcatctcggtcaaccaatcccgacaaatttaaaaagaagggggtcaaaaccgat

SEQ ID NO: 356082 - DNA, 264 bp, Zea mays
tcgtgctcccgtgctctccagatctaaaatcccctctaggctccggcctctactctcccagtctctcctgtcgatctgtcatgccgccgtcgcctcgccggaaagtcgctgatgtggggccacaacaagtcgctagtaagttgtcgtgttctggtaagtctcgtcgtcgatactcggtagcagaaaccctaaatttgtaataggctcaactagtcccctactgctgatggaagaagtactagtactgatactggtggtagaacc

SEQ ID NO: 356083 - DNA, 124 bp, Zea mays
catgcatcgtagcctaatggctatgcaccgctggatatatttgtgcgcaccgatggatgaggattcaacgagtaagatcgtctctaggtccaccggcactgcctgatcaattgatcgatctata

SEQ ID NO: 356084 - DNA, 261 bp, Zea mays
agcgctgcggcatctgcaaatcgtgacttaagatttgggcacgttggaggtacacagatggatgaatttgcgggagagtttgatatggatactaaactactaaatatggccatttgggataaaagtggtgattacctttcagttgctgattcagaaaccatagaggtggaggaccaaggaactcaaatcactaaatttctcgaaggatacagggaaggaagaaccataaagaaaacatttagcggcccttcactaatgcga

SEQ ID NO: 356085 - DNA, 177 bp, Zea mays
gtaaggtgtcatgtcctttattttgaacttaactggattagtaccagatggagttttggacatgtattgcggtgttggatccgtctagctatatatgtgatggatctatatatgtgtctgtagctatttgtgggcttgtatgaattttgtggaatgatgaataatatgtgaattaac

SEQ ID NO: 356086 - DNA, 244 bp, Zea mays
cacgagggcggcgtctactcggacctcatggagacggtcttgcagtagctatagctagctagatgccgtagcatgcatgatcgatcggttcagggtcacacactacgacaagcgtacgctgctttgtgattctcaccgctctccgtaccaagctttgattcaggcttggagttataatcgcataatatgtttaattagatctgtgtgtgcatttgcgtaatactcatcgcgtttcccccctatt

SEQ ID NO: 356087 - DNA, 130 bp, Zea mays
ctgcggaaataaaataaagctccattacgtatacaacttttatgcgatagccgataggtggttgatgtgaaatcaggaacgtgtagctttcacttgtactatacttttggagtgccagcgactttctcgg

SEQ ID NO: 356088 - DNA, 252 bp, Zea mays
cagtgagtatgtggtgattcttgtgctcatgccgcagatgtctcaccttactgtggccagcgctgatggagcaggtgcatcccaaggccacgtcgccgcagaacgcagccgtggacagctccatcgctggccgtccaatccatgttgattccgactgatcttgcgcgagcaatgaaagcgtggatcgtcacctgcagtagtgcaagcagctcggtcaagggctcatcaaggatcggggtgcggatatatagc

SEQ ID NO: 356089 - DNA, 166 bp, Zea mays
  unsure (1)..(166): unsure at all n locations
actttatcttctatcctaggcctttacgtatctagggtgatagtgtaaggtgtctagatagagatctgacctagttgctgttctgtcggatcgtttgatcgcgatgngtgtcgttgtactaaactttcctatttcctaatgaaatagggggcttcgccccttcttt

SEQ ID NO: 356090 - DNA, 257 bp, Zea mays
agccagtacccagtagtgctccacttgctagtccactcccctctcagtcgaggcaatggccttcgcttccagtagcttccgcctcgctctgttcttggttctgctggcgtttgtcagcttggcacggcacgccacgggggaggccagcccgagcaggaggctcatggagctgtacaagccaccgcccagcgatctcctaaggtaccacgacggcgccgtgctgagcggcgacatccccgtctccgtcctctggtacg

SEQ ID NO: 356091 - DNA, 262 bp, Zea mays
aaactatctgtttgcaggtaatgtgtgaaacaggtgaaggaccaacttccccatggatatcattcagagctctgtttgcagctattcaagacaatatatcatctgtggcaagggagttaatcttccatcattatgaagagctgaaggaaagcataattacccgtgaagaaatggtgaagaaaatgataattgtagttggagagaaagtacttttggaggccttgaagaagcttcattactgtgttgataggaaaatatcaat

SEQ ID NO: 356092 - DNA, 285 bp, Zea mays
cctcggcgcgccgcaaccggccgcaggtcctggtcggcgcctcctcggtgctccgtaccatgctagggccggagatcgccgccgcgtccggtgctcgcgaaatggagttcagtaagctggcgcgtgcgcaacgggaggctctgattatgccgtcctctcctggaaaggagtatgaggagcatggcaagaatgggagggagactgaggagtcactgccgatggctgtcgagcagtgcagaccggagtgagctgcttgatctttcagccttggactcttggcttcct

SEQ ID NO: 356093 - DNA, 212 bp, Zea mays
agggtatattccaaatcttgtgccttgttataccaatccttcctgattcccgtttaaaccaactactctatacctgtgctgcctacattttcaatcctcccaagcattagcaaattcctgaaatgtcctcattgggaggccttccataggagtcagctatggacttacataggagttgcagctaacacagactgtgacttatgctccgtctg

SEQ ID NO: 356094 - DNA, 254 bp, Zea mays
ctggcatgtatcaacctgacggtaggcatgtatctggtgcagcttataaatggtctgcaccacaagggtatgatttcccacagccagcaaaaccgttttttctgttgcaagaatcatccccatcaatgtgatgatgtttccacaaactaatctaaaaactcacttggaatatgagtactcaagacatgaggatgtagacttgataggactgtctactcaagacatgggaagaagcatcaaacttatcttttggc

SEQ ID NO: 356095 - DNA, 240 bp, Zea mays
  unsure (1)..(240): unsure at all n locations
atctattcagtaacatcttgctctgtggagggtcatgatcaattctgctactaatggatctcctgaagaatgaagcattggcagagactgctcaagctgctactgtcaaggctagggctgcgtaaacgcatcagatgtacgtttcagnnttggcatgtgaggagcatttagcatctcttgtgtcgttccagcagatgtggctctccaaagcagtatatgaagagcatggggtttcctata

SEQ ID NO: 356096 - DNA, 261 bp, Zea mays
gcaaaagcgaagagagaatgaaaaggaagaggctggctgcagcagcaaagctggaagatggcttcccagctgtaatgcgagctggtgttgccccacaagtttcacaaccacccataacatacatcaacacataccagatatggacagaaccaggggtttaaattttttgacagggctcgtgaaacgagctccagtggaattcctgatgacggcaacagaaatattggcgagatcaagaagaaaagaaaacctgaatacgat

SEQ ID NO: 356097 - DNA, 260 bp, Zea mays
cacgctagagcagttagacattcggagccaggtcttcagctagctggtgccgatacatgatactgcccaaagcccagattgcacggattcaggatatgacctttgaagtcccaaatgacactatgcagccaattacagacaagaggacactgatcacgggaatccaatattacatgtatataaatagtgagccatatacatgagggctttttaacttcaatgaatctcgagaccaaatccaggactggcgtcactataat

SEQ ID NO: 356098 - DNA, 244 bp, Zea mays
agttaacgctgggacttgggatatcacattgtaaaggctataagggacagcactgtattgccggatgccattcggcggatatcaaacatgatgggtgccttgagaggacctcacggcagagagtaagatgggacaccattgttttcctttgatggcaatatggaggatgtgatgagtttggttaaccatgtgggacatacaggtactgatgaagaaatcccagacagtgatcccaaggatgatt

SEQ ID NO: 356099 - DNA, 234 bp, Zea mays
  unsure (1)..(234): unsure at all n locations
ggcttatcttttagaatgggtctggcaactttacgaggaagaccatccgctggacattgctgatcccaagctcacagaattcgatagcgtcgagttgctccgtgccatccgcatcgcacctcttctgctgccaaagctcaccncgtcaaaggccatccatgtcgagagtggtgtcaatgctcacaggagacagcgaggcgcctgaggcagtgtccaagcctagctatgttgccg

SEQ ID NO: 356100 - DNA, 244 bp, Zea mays
gctccttggccgtctcgacgaagccaggtctggccatcaccttcctggccgcgcgcgttcttcttctactcggagcaccggcgactgtctcggctctgcatcaccgggacaccttgctctgcattactcctcgccggccgaactccttcgcccgctgccatagtgccctgcccctgcgatggccgtgcgtatccttctgttccacatcgctgcgccatccttcacctcgcccggatgtgctttg

SEQ ID NO: 356101 - DNA, 240 bp, Zea mays
gtgcaagcagggcccttcacactcccgaaagtgtctaaggccaatggctccgacgtcagcgtttcagcagctccgctggtgggtaaaccacttcaaatcctacccgtcctgggctgctgcctagccttctacttgcagctctaagtgaacccacatcgcgatgaatcctttagctttgtcctgtccccgcagcctagtatatgcttttgaagcaccacgggacatcattgctcgatcaaa

SEQ ID NO: 356102 - DNA, 231 bp, Zea mays
gacagcgcgagcccaacgcggaattcgatctagtgcgccacgctgtccttctcgatcacctacgacccaatctggccgctgctgtcgcgggtcacgacgatggccacaatctgacgagctgaacacggggagcgaggatacagtacagcaaggacacgggtcacgcacgccgcgcgcgcacgacaccaaacgcgaacagatcttgcaaggtcgccgacaagtgggcacgca

SEQ ID NO: 356103 - DNA, 213 bp, Zea mays
catgtgcctgccccgttttctggttatcaatgagacgattatcttgaatcagatacatcatctcattgattaccagaaaacggggcacgcacatgatcgccgtcacagacaagcaacgtcgaccacgtaccacgacgcgcacatctcctctccgccatcgactccatacatacagacacacgctcgcggtaacatctcacacagacacgcgca

SEQ ID NO: 356104 - DNA, 193 bp, Zea mays
gtctgccaagacaccgccaccgatcatagcctacaacccagtgcagacgtgcgacaagaaacccggctggtccgaggacatcgtcgacgctctgttgggcctgcgcgatccgcagaagttccttaacaagatgccgacgaacgacatgcagcataagtgcatgaggtccaagagcaaggcgttcaacttctac

SEQ ID NO: 356105 - DNA, 214 bp, Zea mays
gacggaggaggcgagcaagaagcagctgccgcccaaggcgaaggtcgtcacggggctcgccgccgtcctctgagcgtggcgtggtgatggacagagaataacgctcctactagtactactactgcctagctagctagtacccgctcttgtcgcaattctcccttcgttttcgtttcttttttgttttccgccgcgcctctcgatccgtttgggg

SEQ ID NO: 356106 - DNA, 225 bp, Zea mays
agctgaagtgcttgacgccttccgcttccacttccacacaacatacgagcatgctataggtgtaggttcgcgtctatggcgccagctaaatgagaaatctgcgggcgagtgcgattgatagacacagagaaaccgatagatcatcaaaaaacgagcgataaaatcggtccaaaccctaggccggacgcgcgttagagtctccaaagcttatccttccatccactc

SEQ ID NO: 356107 - DNA, 198 bp, Zea mays
agactggctgaggctctgagctgccacatgccattagcttaaggtcacacctggtgatgatagcatttgaatctaggcagtctgacaacatcaccccactgcaacactgatgccaatctctgaaacttgtctccaaatattgacatttaattgcctcttattatacttgctttttgagtgcgacatagatggaataga

SEQ ID NO: 356108 - DNA, 273 bp, Zea mays
tactctatcgatctctaaactcgaaatctattagtagagattgttgtaagtgaagtctcggcatacactacagtcgcatctagcgattagacttaaatttgagattgtgacactggctcacacttcaaaggttttgaaagggtatgcaatgcagctttctcctaacctatgctgaagctgaggcttggatgccctggaaggcctgctgatcacaatctcccaagcagtagagctgaaactatggctataagttacattatatataagtctaga

SEQ ID NO: 356109 - DNA, 192 bp, Zea mays
acaatattgtatcaatatgagcaaaaggagcctaagcatgccatagcatcatcatgaacacaaagaacatactactaggagcataatcacattctagcagttatacaagtgaagctcaaaataatatgatatgcagaaataatacaaaagaaaatgaaagactaaaatctacatgacaaagcagaagagaag

SEQ ID NO: 356110 - DNA, 170 bp, Zea mays
gcttcgccttgccggtcggtttagctgcgacccgtcgtgaagctctcatgatgaggagtgcgtaaagctcgtatagtacctgccaaacgctcgacaaattgcttggatggaaaaatcattaccgatctcgcggattcgagtcagatattagaacggtaagctgctttgct

SEQ ID NO: 356111 - DNA, 278 bp, Zea mays
gtttcacgcttccttatcacgaagccgcggtccggcgccgcgacgcttcgagaatcgagacccctctctcctcttcacacttctccgtcgccgcctctctcccaccgctcggccattccccgccagtgcttgcgagtctcgagtcaatcaccgcgctcccctgcgacgacgtcctctctttgagcacatcctccgccacctctcctccccgtccaataaatacctcacgcatcgtcaccctcgacgacctcaagaccggcaccctgccctgctgctgc

SEQ ID NO: 356112 - DNA, 287 bp, Zea mays
cgcgtagatgtgtgcaacgaggacctctacaggtctatcttcgcgctctacctcgctggccgttgcagggcctcctgtagttcattgcctcgacagattggtcacacgcgaggctcgacatcaagcgccactgcggcgagcacctcgacccacatttaatgaacccctttgttagtgtgtccttctgtgccgcaaacccaaagtcttattggggacttatctcgtgtcgcacccgcaaaactcgatatcaagcgctgttgcggcaagcaccttcatgcgcagctatg

SEQ ID NO: 356113 - DNA, 235 bp, Zea mays
gctcgccctgtcttgccatgcgtcctgctcgccctcagctttccatggagctcgccctggcctcagctccttgctcggcatggctactatgcgctccctcgccgcgaagctctctgcgcgcgctcagccgtggtacacgcgcgcggcctcctgctcgccggaatagttctcctttgcttgaccctgcgcgagctcctctgatgaccgatgctgctcggctccctgttggaacttc

SEQ ID NO: 356114 - DNA, 262 bp, Zea mays
gtgctacgggggtgactgcggtggcgactgcggctggcggctgttgtcctcatcgaccatctcggcgacgtcctactcgagcgagatctcgctgcagtccctcgagatctgcagaactaatatgttgcaggaggagattgacaaggagattgaggacaagaagacagagctggagcccaaggtcgtggaggcctacgaagcatctcctcctgaggtcaaggctctgttcaaggataagaagccagtcaaggtcatcaagaag

SEQ ID NO: 356115 - DNA, 291 bp, Zea mays
aggcacgcgtatctgagctcgtagttcgggtcgagcctataccggcaatgcagctgttaatagatgcccatattttaataggagggaaatgacaatgtactagacatttctgcttggcatgcctgcaggccatgattatctgcttggacaaagcctttctgaaacgcagcgtacactgaatcttgatgatgttatgatacgagctatgatgggggctcttgattggagcttccggcatgtgatgacgggatgtcatgtatgcatggaggtactcaactgtgtttaatactc

SEQ ID NO: 356116 - DNA, 268 bp, Zea mays
atgctatgttcctgagaaggggtggacggcgacggtggtggcgcgaggagagggtctgatggttgtggagacgcggagaggggagggctgaaggacgagggatgatccaaacaagattgcccattagatttacaatggagggtgtctaccgcttacttttgcatgaaaggaaagttatgcaggatggtacttctgatgcaaagttccatgctccaatacaatatgagagagatgtgattactgctcttggaactaccaaatggcagct

SEQ ID NO: 356117 - DNA, 258 bp, Zea mays
gttggagccataagagaagtaaaagaagagaccgggattgatgcagaatttgttgaagtgctggccttcaggtaacagctggattctggtcccagttcttctgacatttatctagtactgacctaccaactatcttctcacacttcggaatatgccaacaacaccaaaaaggagatgtattgtgcaacagaatatgtgcagacatttctaactcatatctagacaaccaaaaaatggcagtgttttgcatttcctttc

SEQ ID NO: 356118 - DNA, 260 bp, Zea mays
ttcttagcctcctccatatcctgctctccacttcttctccttcgccatgaggtctatgctaggccagcaagaaccatagcgagagcaagcaacagctagtggcagcactcgagaacgagctaggggaggaaggtatcgacaagagaagcaaagtcatctcccttttctcgatcactttggttcttttctatacgtgtggattttggtgtttgcgagcttttgctcgcggtcgccttttctcgcttgttttcgagtgcact

SEQ ID NO: 356119 - DNA, 169 bp, Zea mays
atttaggataaatgaatttgtaaagatgacttcgatgtacattgcatttccttgtaagaagcactggtttcgtctattttagctttgtaaacattatttattggaacagggagcaacacatttaatcctttactcatataaaggatgctatgtcgaattaacacataat

SEQ ID NO: 356120 - DNA, 255 bp, Zea mays
cccgtgtgcacccaagagtcgtcgacccgtaagagaaagccgcgcggctgcgtgcgacagcgggaagaggggaagcggatacggcggccgagcacgccgccgtgagggacgaaggacagggcactcatggccatcgagcgcgcccagcgatgcctagagaggatccgcgccgtcaaacagagtttgcttgccgcctggatccactgatggggggaatgcaatcaagggtggagagacgagagcaggaagaaggaa

SEQ ID NO: 356121 - DNA, 247 bp, Zea mays
cttcaaaggtgttagcagaagccaatgtgctccttaagttgcaggatagtcccattggtaaactttctcgtacaaggattcctccactgcctttcctcctctcttcccttcttcagtctcgtgccccactgaagttaccagaggagcaatttggtggtgatgatgatgatcttgaagatgatttggcagatgattctgattcagatgatgggtcagattatgatgatttacctccatttaagcgtct

SEQ ID NO: 356122 - DNA, 267 bp, Zea mays
ctcgagcgcctagatgagcgccatgcccttgccctccacccatcctcagaagatatcatgccgacggcgtcgacgcggtctccagcagatccgagtggagcgccttcttgcctactcctgaaacattgtcgcagtgcctgggccgtcgcgaggagccccatacacaatctcctccttagacgtcgtcggtctcctcgctccctcctcaaacgtcagtcgtgctgccgacattgtctgtcacggctccaaccggagcaccatcccacc

SEQ ID NO: 356123 - DNA, 251 bp, Zea mays
  unsure (1)..(251): unsure at all n locations
aactccatctatctgttgcccacgaacgcttgcggcggcggcggaattaggacgcgatggggcactccaacggctggaactcgcaccccaagaactacgggcccggatcccgcgtctggtacgtgtgttccatttaccggcacatattttttttgatgcctataatcgaatttatagntgtaggagtttctttttattttttgctcttggtggatttaggttcctccgtcgatcggtgatagttatggact

SEQ ID NO: 356124 - DNA, 253 bp, Zea mays
ttcagattttcatgataactaaataatccacaaattcataggagtattcaaacttggctcttgcgccgttgcgcgcgcgcctccgtgcttcagaaagcttcgatggagaggtgacgtttggtcgtcggaggctgtcccttgcagtccactcacagtctagctgagcagcaacgacgttattgcggactctaattggctcagacgagaggactctaaccgactcggaagcatgggagagcagatatgcctgctg

SEQ ID NO: 356125 - DNA, 249 bp, Zea mays
ggcagctgaaaagaagcagaagcgcgagcatcaccatgatgctggtgctagtcaaattggcatgggtgtaactgcttaccctggtgtttatggggctccacaggtgagttatatttgtgcttcatcgcttttttttctttttcatgctaaatgttgtgcatgtggcatgtaagagtgtagcccatttgtctttctctttaggaggtgaaggcttgtgttcttagctctgggcctctggccctcaattgc

SEQ ID NO: 356126 - DNA, 240 bp, Zea mays
ccgctaccgcgcctagggttttaggcttttagcacacaccggcggcgctgcataccaagggcttcccctgcccgcgccgatgccgcgcaagcacgcgccggcgtttacgccggaggcagcctccgactcttcgtcaggcggtgctggccagccgcataacctccccgtgcttcaggcgaagatgaagcgtgacccggagggctacgaggaggagctccgccagctccaccgccacttcga

SEQ ID NO: 356127 - DNA, 176 bp, Zea mays
gtcgttacacgcttggatgggttggatggtagtaactaaactatgaggccagccttattctggtggtctgtaaaaggaacacttatgcttgaactcggtgttgctttttgcctggctactgtcgtcaagtggaccgtcttaccttgcggaaaaaaaaaatacattatactttttta

SEQ ID NO: 356128 - DNA, 258 bp, Zea mays
gccgtcggcgacgctcaggatcagcagcagcagcagccgcagcgaggaaacgggaaacggctcggcgggcgcatcccccaacggctgacatgacgtagcagcaccagtaccctacgggtctacggctccgccgcagcggccgtgctggccggccggccggcccaccgtagcgaaaggcgcgctggaatcgaaggcgtttcgactgattttttcccccctccatgtcttttccatcgcaccagctggtgaattgaatga

SEQ ID NO: 356129 - DNA, 229 bp, Zea mays
  unsure (1)..(229): unsure at all n locations
gcacctgccctcccacagcggttgtgaaatttttcgctgaactggatgctggactcttgcggtcttgccttactgagacactgacgataagataagttgtgtgtgtaacagcctaacaggggatacaatagtgctgcctagggcagcgggcgaacaggcacactatcgctattacgtntctagcagccaaaaaaaaaaaaaaaagaaaaaaaaggggatgggagaggat

SEQ ID NO: 356130 - DNA, 177 bp, Zea mays
agcatattgtgctttgtgagataaaaggtttcttctgctattctgctcttggctttactgtaggcaaaagtattccttaagtagctattgcacattgctagactgatttgcacattcattaagttgatttagcagacatgtcagtcagaaggttcacatatccgtcgtatcacacat

SEQ ID NO: 356131 - DNA, 279 bp, Zea mays
ttcggctcgaggctcctcgttcgcctcctcctccaagttcccgcagcttcaccacctctacttcaacggcggttccatcagcgcgccggtgacgcctccatccagcgtctccaacccgcacgcctcgcatcaagactgactgggagaacccgagtgttcagccaccgtgggctggggcgaactacgcgtcccttcccaactcccagccgccgagccctgggcaccaggttgctccggacgcggcgtggctagctcgggtccagatttcgtctgctggcc

SEQ ID NO: 356132 - DNA, 281 bp, Zea mays
ttcggctcgagctcttacagaatctatagttgacaagtgtttcaaccaaacagctttcagctttcccacaacagctttcccttatttcatagctagaataagattttcaagaatctgcagctgcaccaaataaaccctctgttttgcaatgtgggtaacttggatatactagaatacaggaatataatccattcccaatctaatttgacgacctgtcatgtttggagaagtattcaggagcttcttgttgtatcaaaaacatgtttctgactttggcattg

SEQ ID NO: 356133 - DNA, 171 bp, Zea mays
ttcgctcgagatcacaacagactacagcaataggagggattatttcattgtcgttcttgaaatattggaccaactggttagaataccagttgggacatgttaatcctggggcttccatttatgcatacaaagaaccaaaatcttgtgtcaatggaaatttgcagctttatt

SEQ ID NO: 356134 - DNA, 268 bp, Zea mays
  unsure (1)..(268): unsure at all n locations
gatagaaagagcagagagaaggagatggcctcagtactcctttcttcattgagattagaattgttttcaactgatgacatcattgagggttttgtaatgctcttgcagtcagcagaagacactgcactcgacattgtggatgctcctagtgaaaacaattctaatctcgaggatagaaagagcagagagaaggagatggcctcagtactcctttcttcattgagattagaattgttntcaactgatgacatcattgagggttttgtaa

SEQ ID NO: 356135 - DNA, 280 bp, Zea mays
cggagttcgggtcgtgctgacatgtacaggtgagtcggattctgctcggcttagcgacagtgttgagacctcaactaacagtgaccggaagttttccagcgtggtggggatgagcagcattaaagattgtgactttgatcatgaaaggaacgcgagctatgttgtgtacttcagaagaggcaagtatattatgcggcactgattctacttggctacctgaagactggtgcgtctatcaacttcaaggtggctccttcgggagtacaggattgacagcatc

SEQ ID NO: 356136 - DNA, 264 bp, Zea mays
ggattcggtcgagaaattttagtgggctatttatcttaactttagagaagctgcataatgtatgaattattatacaattgctcgattcattagaagaattaaaacaagtttttgcacacatgtgctatgaaaacattaagtgctatattgactcacccacaatcagatttgaatggagcttcctttttagcctacagggatgggatagactggtaataggattcggtagggtaacttgaaaactgacgtaaatgagaaaggtag

SEQ ID NO: 356137 - DNA, 144 bp, Zea mays
cctcatcatctccttgtgctgtatggtggtttttaccatggcctatatcatgctctgtcgtaagacatcccaacaagagcatgtctacgaagcagccagggcacatgccagagaggccaacgattctggagaacccatgagggt

SEQ ID NO: 356138 - DNA, 217 bp, Zea mays
atgtggaggccttgccttggctagtttgggaactcagatcctctctaggattgaagggaacgagggggaagggaaattagtttgtttccctgtattttccttagtctcgagagtatgcatttgagttctcaaactagccctaaaagttgtggctttacatcttgacaagaagagattaatagcttgacaagaagagattatagatccacctatgctt

SEQ ID NO: 356139 - DNA, 207 bp, Zea mays
ctcaaaagaatttgttgtatctgtagtgttttgaggttggtgcgagtgagcaccaacctcaaaagaatttgttgtatctgtagtgtgtttcttttggctttgtgacgttcatgtgcttgaatttttgggtccagaggacatagcataagatgctctgcgcattgtaccatgaaatggcctggttggatttcgtgaagataacatgtc

SEQ ID NO: 356140 - DNA, 105 bp, Zea mays
cagacggatactttttactaatcctgacttgtttgagctttgcaagccaattcaatgaaagtttgggttgaacagaacatacagataccgaaccggaattaattc

SEQ ID NO: 356141 - DNA, 273 bp, Zea mays
caaaatttttgccatttaatcaacaattcttagcagtaggaattctgataagtctacatgttggaattggactatgtctgaaagcaaattaaggtactttacctgaaaatctttcaggttctataacacctgtctgtatgagaatgttttccaattttagagtatggtgtatgcctgcttttgaatcctcagtataacttgtttacaattcagatacaatggccttaccccaaaactattgtcttgaaatgaaagggctcatgaatctgcatt

SEQ ID NO: 356142 - DNA, 217 bp, Zea mays
ctcgagccgaagcaatagtgctgggtactccttataattctcaaagagttcagtcgaatgaattattatcgctggctcttggtttctctgtcttctctctcttaagtcgagcagcatggctgtccaaggatgttgtgtggctatctgcagactcacagtttggagataaccacacaacatccaaggatgttgagcggtaatctgcagcctcacagtt

SEQ ID NO: 356143 - DNA, 157 bp, Zea mays
gagcaagagctgcctaaagaggaaatctcaaggatggcgaaggactcagagggtgacgtgaggtacctgatcgagagcatccatcatcgctcagatttgcggaagaagatggcagagaaatctcgtaattcagtaccatccggttcccaggggcaaa

SEQ ID NO: 356144 - DNA, 264 bp, Zea mays
gcgaggcaaggccatctgccgccatgacgctctccctctccacctctttcctccccattcccgccgacgcgaggaccacctgccgcaccctacgctccgtcagcccctcccaggtacgcacgttcgtacacaccgggcctccctctcgccattcctgcacggatcttcgtcgtcgccgccgctaattcctgagtccggaacctggacggcgcggtgcaggggatgcgctgctcgatgcgcaagaaggggttgcacccggagatc

SEQ ID NO: 356145 - DNA, 252 bp, Zea mays
aattctagcagtcttttaaatagcgggctatagtggcattatagcggagatatagcgagctagcggctcaggatagttgccactacaacacggctatactaaatagcaggctatatggggaattattctagagaagtatgcttgttctttactgtcttgcatttatgcccacctgggctgcgtctttgcactgtaatgtaatgcatcactttcaactttacatatgagagggtgcccaccacattttattat

SEQ ID NO: 356146 - DNA, 282 bp, Zea mays
tgataggtctgctgctctctcccctactctgtattgccctctctgctactttggaagagcacactggcatccttgatgtctgttttgccggctaatgtgccagttgtattcacgttggatcccacctccccgacgctattccacactacgagttatacaagtcagtctccatgttgtgcatagagactaaatttccttcttgtgaggagaagatgaaacactctctcgcctatctaaacaacaccttgaaagaagaacccaagaagacgagtgctgttcatt

SEQ ID NO: 356147 - DNA, 277 bp, Zea mays
ggaggtttggcttccctcgtggccccgtcgccaccttggccaagctagggacggaacggatcgccgcccagaggcgtcctctgcctactcgaaggcctgggtaatttattttcgccatcctcgattgctataagcctgatcggtggaaatttggggtcttgaggcattcagacttctgaaaatgaatcgcagaggcaagggatcatcgagacaccatcctgagccaagagccctctgttgcctgatgtgcgcgctttcataagctcctagttcgact

SEQ ID NO: 356148 - DNA, 211 bp, Zea mays
acccaccgccccactccaccttttccttccccgccggccgacgcgcagcgcgagcggagtcgccctctccagtagagtagtagtgacgtctctacctatccacctgagccccctcttttcattccccacccgcgccgcgcgagcggagcttcgcagcacgctgcggctcgcttcgccagaattcctggcgagggtacagaattgcgcatcg

SEQ ID NO: 356149 - DNA, 277 bp, Zea mays
gaaatatccgtgagagagacaagtgagatcatgaggaaaatcccacatatagattaacacccaactcctgtgagggcggtgtcatgaacctctccctcgcccttgatctcgcccttgtgacggcgatctctcccgcccccgctccctccatgccctccaccaccgtcaccgccgccaggtcgactctcatccctgaaaaattgtgggaggaagatgcagagaatggagctaggtcgttcgatgctcaatcaatttctcggcaggcgacttcaattcc

SEQ ID NO: 356150 - DNA, 275 bp, Zea mays
gtctggcgcaggctctccgccgagcaagtcctgagtcacccatggattgtgactcgcgtcggaagtgtgcctggcggtagactggtttagatgctccgcgcctgatccgatgaatctccatccgaagtgtacataggggcgtcctccatccaatccaagaggagtagagaaggaccttttgctgttgatctcttcgctatggttctggcaaatgatcgtgaatttggacactagtgctgtagttggctaccagtagcacgcagaaagaagtaatc

SEQ ID NO: 356151 - DNA, 275 bp, Zea mays
aaataagccacataaatgtgcgacttagtaccatagttgattatacacaaaatctatttcaggaacttgcgatagttaaaacattgatgggtcatcttctaaggattgggatgaaagctacgttgaagttcagggacagtcaatcaacttttgaggcaccattcgacattctgtagcaattggcaaataggatcaaagtgtgctggacagaattctgtgacctgaatgaatattgaaagtgtatgtactaaactgtcttagaataccatttacag

SEQ ID NO: 356152 - DNA, 242 bp, Zea mays
cttttgtagtttttttgaccgatgatctctttcttccagacacatattacaccaattatgataacgaaggttatgcaattttcagtactcctccgtgcttctgtttgtggttgtattggttactcgagtttgcttggtcagccatgtcatctcttggtcacaaggcatacctgattgcaatgtattacaccatgcattgttctgtgcccttgggttcttaggactatattggtgacatacat

SEQ ID NO: 356153 - DNA, 231 bp, Zea mays
catgcttattgcagtatgcggattaaagttaagattatgcaacaaatgtaagaagagtcaagtgtcttgacatatacaatctatctgaatgctggagggcttttagtactttgggggcttcggtatccttgactttcagttagatatgtccacagaaagttcagtcagcagtacaaagctacaatcggggcagatttcgtcacaaaggaggttctgatcgaagacggctag

SEQ ID NO: 356154 - DNA, 143 bp, Zea mays
gggcactaggctgatggcctatgtatgtgatgtacgccgatgggctgatacctatgcgtacaaagtagcgcatcaaattttgggcccattatttgcactgcattacaaaaaagacgggctgactactcactagcggccctttg

SEQ ID NO: 356155 - DNA, 275 bp, Zea mays
acgtaagtggcaattggagattattatgctgtacttttcaaaatattgtggcaagggctctgtccgtactcgaaggtcttataattcacaagaagatttgaaactggaaaatgttctgaatttctttgtgacagccacatgtgcaaaagctattgtcagaaagatgagtgcagaaattgcccagcttcttttaacacatgcttaccaggcgtgcctttctgctgaagatgccaacagcaattctgctgatacacccgaaaaagttggagctactc

SEQ ID NO: 356156 - DNA, 247 bp, Zea mays
cgtacagatgcggttgctagagaaagatttaacttaggaggcacacgataatgaccacagcccacaggcacaattatttacgccgtgcaggggtacaacaacatctatctagtattgcgtttcactaaccactacattcgatgaatgaaggctgccccaaaatgagtagaaaatccgcccttttttttttttttggcacagaaactgacgaccaattataaagcctttcagaatggatgacaaaggt

SEQ ID NO: 356157 - DNA, 222 bp, Zea mays
ttattgaggctcgagccccgctccaaaaaaatcaaccggacggaaccgcttcgttcccagcccgctcgcacagtcacgctccgttccgttaactctgcaaccaaacaaaaaacggagcggctctgttttttgtttggttgcagagttaacggaacagaaaacagagccgctccggtccagattaccatacacagaacagagcggttccgttcctaaaatcag

SEQ ID NO: 356158 - DNA, 217 bp, Zea mays
cagctgtaggctctaggatggtctaaccttgaccatatcttgattctatgcgcctgacatctggacaacggacctaggcctgacatacgtgtggaagaaaaatgggaacgccaagtgcaatgactagagaagccttcatttttgagatccaagtctcctgatagtcattggcataaggatacttcggatggaagggcatcaagctctgaaccactga

SEQ ID NO: 356159 - DNA, 242 bp, Zea mays
tgtatctactattactgggaacaattgcccttagcttggtaattacctttcggttctatattgtggtacttagctggcaggtatacatctctcacttattcgttcattgttgcaggtaacaactcctcttattttcaaactaattcctatgggaatgcaccttggcatccttatgtggtggatcccctcggaaaacagtatgcagagtgaggcacatgttgtttcagcgattttgaatttta

SEQ ID NO: 356160 - DNA, 252 bp, Zea mays
ctgaaacttgaaagcacagcacaatatacaaaattaacacccgttggctatggccaaacaaaagaaggaaaaccatgtaccacagttatggctggaaaggctcacgagaatagagtaagtccgaatatcaataaactatgcatttcaatcatcgtactagcaatgcagatttcttatatataaatggttacgtaaaaaagtaaacttctgttgctggaaccagagtgatgtagtagattaaagaactgacag

SEQ ID NO: 356161 - DNA, 213 bp, Zea mays
taccttcagacctaattggccccatactgtttcctgaaatgatttgtgacatttgtcctatattgcttcttattgctacacttaggcgcagtccttacctggcatacacgaaccagaatcattagcacaacgaaccttttttaaaaaaatgtcacaatgaaccttttgatgatgaacatttaaggtgcgctgtcatgaccttccgagttcatg

SEQ ID NO: 356162 - DNA, 273 bp, Zea mays
cgccgagccgccgaccacctgccgccgtctcctccttagtcccagccatggccggcggtgacggtgaggcggcgaccctaaacccaatctcctccatgtacacagcctacagcctcccctcgtgacgccgttcccttatctcctcccctgcaggcgatcggcatcgcgcgccgaagcggcacaagtcctcggcgccgtcgaaagcggccctggaggacgagagcgccgagttcgactacgctgatgactttgatgacgacgcccacgatgctg

SEQ ID NO: 356163 - DNA, 267 bp, Zea mays
gccgcgcggagcgcgtacggatggagacctccggtcacggcaatgctgcaacgggcaatattgcaggggctccggaaggtcgtcccgcagcggcggaagttcgttaacgagctcttccggaagtagtagaagcagctgctgtgcgagatccaccgtcggaagacgtcgacgtccgcggctccgccgtcgcctccgccattcttcgcggcgcctcacttcccgctcttccacccggacgccccgcaccaccaccacgaccaccagttc

SEQ ID NO: 356164 - DNA, 138 bp, Zea mays
aaaagtttgaagccgaagaaaaacgtatctaacatagcaaagcacgtgatgacttccttgcagtgtagctagaacgcattgcgcttagattatcaacgagacggccccaggcgactctcatcttggacgctgcctcct

SEQ ID NO: 356165 - DNA, 257 bp, Zea mays
gagctcggctcgagcatagagtgttcatggatgatgatgcactgctacagtatatggtagaattgacctttgtgatcgccacagcatcatcgggctcactacttggtccataaagacctgacagtaactggcagcggcccgcacgccagcgctgcgatccagttcatgcatgaccatagagtccaggtagggtcttgcagttcatcgtgagggcacatggcattcacatacgccgtagagatgagagagcctctcga

SEQ ID NO: 356166 - DNA, 264 bp, Zea mays
tctgttttgaagaatctggagtcctttgcttcaagctctctaactggatttcttatgctccatattggcacagctcttcctgcattgaggatatcagttgaagtgttcacttggacagatagcgatgccgctactaaagttatccccttttgtggtgcattgatccaccttgccgttgcttcaaaccaggctgagttgaggcagtttgttgcaaaggatttgttttcctctataatacacggtttatctgtggaatcaaattca

SEQ ID NO: 356167 - DNA, 178 bp, Zea mays
gagagagaaatactttaaaaatccacactttttgttaagaaggaaacatttagcatttatatatttgtgtatggaaaacacttgatattttatccctgttgcatctggctgcacagagcctctcctcaaagatgctacaaaacttgaatataacacattttggaaggctgactaacct

SEQ ID NO: 356168 - DNA, 162 bp, Zea mays
ccagcatgtacatgcggtcattagtcctatgtctacgccagaccgagctgactaaacgtaccctgattgggcttccgatgtaggatcgctaagctacgctcgtgctaagtattagcgcatactgatagactgccactgtcgtctgtgctatgcatgctcttg

SEQ ID NO: 356169 - DNA, 214 bp, Zea mays
gctctatgcttgcaattacaacttcgacttcgtgcgtagcgtgcccctcgacaccggcggtcgggtcgagtgggcgccgttggtcagcatctgaagcgatcgtgcgtacggtgcaaggcggagctagatagagaagagatgcccgctacaacaaacataacggggaagataataaccaaacaattaagcagctgtatatagcctaagctaacca

SEQ ID NO: 356170 - DNA, 250 bp, Zea mays
aggtcatggatgatgatgtacttctacaggaaatggaagaattgacctttgtgatctctacagcatcattggcctttagggcggcttgtgaagacactgtcagtcctgttcgtacgcgcatactcgatttcgagatatgcttgaaactatttttatccaacagatttaagtcctcacaagtcaccgtaaaggccaatgatgctgcggagaacacaaaggccatggatgatgatgcacttctacaggaaat

SEQ ID NO: 356171 - DNA, 241 bp, Zea mays
  unsure (1)..(241): unsure at all n locations
ctcgagccgctgtgagaacttcgcactcgcgcgcctgcagcatgaaagactgctcgatgactgagcttctggcctatgcgctcatcttcacgctcttgttcaccgcggcggccaccccgaccgctggcctcaccatgcgtgccgatctaacccacgtcgacaaaggcaggggcttcaccagatgcgagcgtctcagccggatggccgntcgttccagagcccgcgcggccagtctttatca

SEQ ID NO: 356172 - DNA, 206 bp, Zea mays
gactgctactagatccttatccatgcgttgcaacggagcgccatataagattaaaggttccccgtgcagagctcctttgctgtacggtctataacatgaacataaagatggcatccagtagtcaatcagcaaaaaaaaaaaggatatgtacaacttgttcggaaataataaccatattacacaaagttacaagtaatacaagctac

SEQ ID NO: 356173 - DNA, 229 bp, Zea mays
cacgacgacctgctcttccactactccgaccagtacctcgccgacgacgtagcctgcttctaggagtcgctccgtcacgcacggcgcgaggtgttcgacgacgcccagccgcggcggcgcaagatccagcggctcctcctggcggacggcatcactggcaagcacatcaggacaggtgaggatgtgtcactgtccatgcgcatctgagcgacattgctgctgatgacca

SEQ ID NO: 356174 - DNA, 199 bp, Zea mays
gcagtgcagggccacaggggaagagggagccccgcccaagatcgcaaaggcaaagtggcagacaaccatggaggtggagccaccaccagctgccgcggtcgctgtagcagcagcgcttctgaaatgccgcggcaacggtggcggcggcgagccaactctcgaggccttcggtaaggcgcggtcgaggagcccgagcagc

SEQ ID NO: 356175 - DNA, 283 bp, Zea mays
  unsure (1)..(283): unsure at all n locations
attttcctaaccagcaaatgaccaattgtgatgctcatttacaccacttgaaagatatttcttatcagcaattgagcagcattgggacggaacagcacagattgcgtggactacagagtagggagttcctccagagggagatacctgctgcaacctttgtttcacgccagcagtatgggtcagtgggcgaagaattcccccacattgatattataaatgacttgcttgatgaagaccanaacagtgcccatatgacagtctctcctcttcatgagtatcatac

SEQ ID NO: 356176 - DNA, 227 bp, Zea mays
  unsure (1)..(227): unsure at all n locations
accgaatttgcgaaataccttgttgaggatcagaccttggatgggtccccattatctagctccacaggtttcagctcattcctcgatgaggttagaagtaaagtggctgagcatggcatttgatgaccagtgtcacctgtctcccgattgctgaactgtgatgttaaacgggtgatgactgatgacccatgcaacccaganatactgtcatgaatagaaagagtaag

SEQ ID NO: 356177 - DNA, 279 bp, Zea mays
tctgcatctacctgctcgtgatgtgtggtttcagagatccgccactttcctctgcgattattttcccttttgtctgtccatgggagggtgcgatgacgaggtacacacaaccctgatcaatcgcctccgatggcgatctgatgttcaccttttacctttggctcgtattcgctgagcatccgttcttcttcatctatcgacgccagcattttttgatgcttttttttcttgctcgggttgctttggatcgagggacctggggatgcgccgcccttcttc

SEQ ID NO: 356178 - DNA, 207 bp, Zea mays
aagcaactcacatatgcaacttatatttgtgtggaatcttgtatgcgcagcgatggagaagccaaatgttgaggacacctcgccctgagtgagattaacttgctgaaatgtagtgccttattcagtagctcatttgaccttgttattaattagtaatttgcatgagtagacgttgaatccatcattgtacttgggtacctacttacc

SEQ ID NO: 356179 - DNA, 276 bp, Zea mays
cgatgaaccctcccatgatgccgggctcaagacctcctagcccagcgtttccataccctctcgtgccacccgggctctggggctgtttttccggatggccacccacggcttggaacgtaccatggaccagaaccaacgtttccgtgtcgccgccgccatcgccatcaagcaacagcagcagctgctcgggcaacgggtctcctactctgggcaagcattccagggacaccaatccgctgagagaggagaaaagagagaagtcgctgtgggttccca

SEQ ID NO: 356180 - DNA, 274 bp, Zea mays
gcaagaagcgacgcccggccggcggcgaagcacaggcacagcacatcacaggtgtgtcagtgcagtgcaggcacagcgctcggtctgcactactgcaggattgtataattagacaagacacgattcgtgtacgttaattagcagctggtcatggctacaggcccaatcggatggcgtgcatgttcgtccagatgacaacacaccgctggccatgttgctaggtgccttcttcctcctccctacctctagctacgcacgcagtatacctaattaa

SEQ ID NO: 356181 - DNA, 273 bp, Zea mays
  unsure (1)..(273): unsure at all n locations
cagttcttgcccagggaaggaactgggtcttgctatacagggttagggtttagggtctctattctgatatgttttaacttttgaccatacgggtctactgatatctaatgtttatgttcatagttgtgcagtacatggagacatggcatatctttatctactttatatagaaggagcatgctttgccctggtttctcactattnggtcttgatgatgttctaatctacaaatgtgttagaagatggtcggatcctgtgtgactggcaagattt

SEQ ID NO: 356182 - DNA, 208 bp, Zea mays
gcagtgagctcggtctgtgtcctgcctctcgcgccgctgagccagtgagccgagctgctaggaatgtgtcgtagacaggagcgaaaagggcttcgagtactccgcaactcgcgaggtatggactgcggcgcggacgccctgctgctgctgccatggccggggatgcggagttgcctctcgaagaggcggaggccgcgatgagatccgc

SEQ ID NO: 356183 - DNA, 238 bp, Zea mays
atatagttatgtcgtctcctatagagttataattagtatttatatgaaagtcaagatctatgtacctttctatatcactcaaactgattgcttgtgatatgctttctctggcttttatattatttcaacttcgaaggattaacagctgttaacacttaaaaagtactgccacatatgtagccttgaagtagttgatctaataaatgagagcagggagcagattcattgactctgaaat

SEQ ID NO: 356184 - DNA, 268 bp, Zea mays
cacagcctgccttccccgggcacccgacccctctgccttaggtttcgatctccatccccgccatgagcagggcagaaggtgttcgagcgggaccagacgctagaggaggtgaacatgtacatcgagctccccaagggcgtgcccaccaagctcttccactgcaccatccaggccagccacgtcgaggtcggcatccgcggcaacccgccatatctcaaccatgacctgatgcaccccgtgaagaccgactcgtcgatctggacaatag

SEQ ID NO: 356185 - DNA, 206 bp, Zea mays
ccacgagccgagttctgaatcctccctgatccctgaatgaggcagaactcgggcggcttcctgcacagcgctgcaaccgcctccctcggggatctggatgcctccgccgcctcgccactgccgactacgcaccagggctcaccccttgagatgacatctcctaccttgatgctgcttttgctgatgaagagattgatatcgaggcg

SEQ ID NO: 356186 - DNA, 210 bp, Zea mays
cacagctaccatcggttatttgctcttatattattcactcctttgctttaacatccgcacttttacttatctgtatgtttctgggttatgcttattctctgctgcatgttagtcttgttagtattatctttaaatgatctttcttcgttttccccgtttcctctcctttgctgggttctgttactttcggcaagcaattcattgcatact

SEQ ID NO: 356187 - DNA, 282 bp, Zea mays
cgcctgccagccctcaacccggagccacaggttccttcgccatgccgctgccttgccgaatgggagacgactgtagatgctcctgcccgccggtggctgtcccctccaccgtgatagtagtatgcgtgtggcgagccgccaggagccgtaggagtttggccgcctcgccaacctgtgcttcaaattgtgcaccaagtgaaggaagaaggcactctggtgtttgatctcgatcggactctgtacgtcgcgacgttcgctgccaggatcgggtggattccactg

SEQ ID NO: 356188 - DNA, 242 bp, Zea mays
tagaaaaccaatttgtttgtgtggctacaacgcaagcaaagcctctccagccgcttactatctttctttctgccttgcttgcttcgatgcactggtgcttcttctccatcatcatcatcatgaggaggagctacctacctaccttttgatgcaggctgccatggccaccaccaccagcagcagcttggtcaccggcttgaggtgcaggacaggtgcagcagtggcattgatcagacccacta

SEQ ID NO: 356189 - DNA, 273 bp, Zea mays
caagaaactcacctagtcacctgtagagttggttggaataaggagtggagtgaggctcagaacttcttttttaaaaaactctgtttgtgggttatcggtgttgatgatgacatgcttagtgattggagaataaaggttctttttcctctaaaacaaaaagaagctataataaaaaaaaaaaaaaacacaaaaaaaaataactaccaaaagatagaaaacaagggcttcctagaaaaagaactagtggacaggattaaaggacccttcagagaa

SEQ ID NO: 356190 - DNA, 269 bp, Zea mays
cggcggtggatctgtccaagctggtgaagtagaagcgcttctgggtggtctgattcctcgtcgtatgagcagcagcgcttgagggccacatgatgtggatgcagcgccaggacaccttcaagcacaagtttggtatcgaccaagcagacggacccgatgctcaggattcctcatcttcgtcttcgtcttcctcttcttagtcagttaccttgtatcgtctcaagcggtttgttcggaacaaatgagacatccatcctttaataaagcgg

SEQ ID NO: 356191 - DNA, 273 bp, Zea mays
  unsure (1)..(273): unsure at all n locations
gttaaagtccaatgtgacaatgaattccgccgcttcgtccttgccgaagttacctacagcaaccttgctacaaccatacgctccctgcttggttttaacactgactccgtcttgaaactgtcctatcttgatgacgagaacgactgngtttactttgcgactgacagcgagctccaatacgccgttactctntccaagtctcccttgaagatttccgttaagctcagctctgcttctgaaactcctgttgaagaagaaacagctgacgaggag

SEQ ID NO: 356192 - DNA, 143 bp, Zea mays
cattagtcgacacatcatgggcttattgaaggtggatacattaatgagctggtcgaagacctcgttaagacattgcttctacgctagactatcgacgaactcctgtacgtggtctgtttggatgcgcatagaatgccaacact

SEQ ID NO: 356193 - DNA, 248 bp, Zea mays
atatgaggcactaaatcagcggagagagggttcgatatttggcgtcgagtgtgagaagtgtgggatgctcattagggtggctgggaacagcatcatgctgtcacccccgctcatcatgactcccaatgaagtggaagaaatgctctgaaggccacggaggaatggatcggagaactgaagtctaggaagaattggccaaagctgctggttgtaacgacggtgaggatggtgatgaaagtgtccaatat

SEQ ID NO: 356194 - DNA, 275 bp, Zea mays
gtaattggtaatccaacaatcatgcaacggattcggaaatacattaatgtgactaattgcagcatcaattatatgatagcagttggccattgatatttttcagatttgagatcgaaatgtttatgtgccgatctctttctctctatgcataaataggatgcaactagtagaaaggaaaatatattatcatctatagctgattgcaatctcaaaaaaaaaaaaaaaaaaaaaacaaacatgctttgacttacaaatataatatccagaaagaaatg

SEQ ID NO: 356195 - DNA, 276 bp, Zea mays
catcgaattcgtcaacgctctattgccgattcgactgtcgtcgatggtgatagcttcgcgtgttgtcgagcccgtcgctttctctttctagtgctcgtgcggtttcctgctcgcctgcgcgccctctcggcttgcttggtcttaatccccatcgcgtcgtcaatcttgccggttatcgtcgttcgtcgtcgacctcgcttggccctatatcattatgggttatagttttgtgctgctgatgatggtgttaagtgttggtgggctcggccttcttat

SEQ ID NO: 356196 - DNA, 266 bp, Zea mays
ctccgcagaacctgctactatcgctgcgctgatgccgctaactcgtacaacatgctaaggtccgaaacccacgggcgctcatcctgtaccttcacgccatcgaggcagagaagctgggctcattcgtgcaatcgggctcaagtctggcatcaagcttccccatgataccgcgacatacacgcgctcgtcatacacccacgcctgcactgcgatgttgccacgctactcgatatgcccggcctcgtatgcaacgtgcgctacacagc

SEQ ID NO: 356197 - DNA, 276 bp, Zea mays
  unsure (1)..(276): unsure at all n locations
ttggccctcgcctgcattaccttccccgtccccctcgtacatttcgacatccactcccccccgactctcccgtcccgctcccgccgctaccagcgattccaatccgccctcccttccgccgctcaccgccgcggccccgccgcaagcgtttcgcctcgatatctccaccccgccttgctcgagccacgctcccaccgtccaggcgtccgntgcggaggtgtcggcggcccatctgaacaggctctcctcgtcggggcttttttgcttcggagggag

SEQ ID NO: 356198 - DNA, 215 bp, Zea mays
gttcgttgctcgatcggtgcaggtaatggagaacgctgctaccaatatcgaagcgcacgctatcggcgaacctgactcagcgaacttcagcagactcgcctactgcgacctggacatgcgacgtacgggtccagacagcagggagatggcgactgtcgatggtagaagaggctatagtgatcagacaggcgacatgatgaacgtgagtgactgcc

SEQ ID NO: 356199 - DNA, 267 bp, Zea mays
agattgcgaatacccctgcaacccgacgtgccacaacttgggcttcgcaaggactttcaagatatgaaattttatctctcttcttccgctatgattttgttgtaaaatcagaaaaaaatataaacttgttattataaatcattttacccgattggtggagtcgacggagaagcttgagaagcagccttgagttcacagttgccaagccccccctttttttagggcgccggtttttcgggacactacccaggagaccaggcagcatgc

SEQ ID NO: 356200 - DNA, 259 bp, Zea mays
  unsure (1)..(259): unsure at all n locations
gatccgcttcttattacaacggatccacgggcgctgctctcgccgagcgctccttcactgctcgagcaggaggctcaacgcggttgaagagcctgtcttcctcaagccggccgaacctgtagacgccatggacataggggcctccttgccgtcgccgcagctactgctatggtccaccaggaacctacctcgcgggagcatcttgtgngactccgcctggcggtggagctgctgcatcacgagcgccgcgtcgacgcct

SEQ ID NO: 356201 - DNA, 212 bp, Zea mays
ggcgttttgccaaacaaaaaagatcatgctaacagaaacttctggagtttcttctttttataagaaatgttgctccttttgcatctactggttcctggttctgtgatcgaatatctacaggtggctccgttgggagatcttgacgttgtctccttagatgctatcaaggtgctctgttgagttgttccttcagccttttcattcatgggcca

SEQ ID NO: 356202 - DNA, 104 bp, Zea mays
gtttcagacatttcgaaatatcttctccgagttccggcggtttgacatgtgcaaacattttggtagggcttaagtgcttaaatttgtcgccatgttttggcatc

SEQ ID NO: 356203 - DNA, 280 bp, Zea mays
  unsure (1)..(280): unsure at all n locations
agctagcatgatctagaagcttctaccactagtgacctcgacgaaaggttgaactattgacggaccgtacaagtcgtgcgtacgacactaaaactagtagcggggagagaacgagcgtgacgcctcttatatactagatggagcctgtgtgagagcggtatcgcggtcacaatgatacgcaccaatgtagcaaccccagagatgttagcagcaagannnaatgttctccaaagagcgcctcanatgctggatcagctactagatccagggtcaccaaatc

SEQ ID NO: 356204 - DNA, 244 bp, Zea mays
caaccgtcggatccttatcctgacaagggtgggagaccagtagctccagcgggctcacctggtgcgtgctacaactgtggtcggtccggccactggtcccgcgactgcccaacctcgaatagtggtggtggtggtggtaccggcaccagccgtgccaggtcgtcctcagccttgagctcgtggaatagtcagagatactgataggaggctcctgtgaactcaattgaactgacatggacatgct

SEQ ID NO: 356205 - DNA, 277 bp, Zea mays
  unsure (1)..(277): unsure at all n locations
ctcttttagctaatatgtcagcggtccagcacctattatgcgcaacaagggcttgatcaccctccgaaatgccctctatgtgatcaagaggaggaaactttagaccatctcctggtttcctgtgtttctcaaggattttctagtttcagctgctgaggacttttgaccttcataggatcgcccctcaatttggattggcctccttcatgangctggggaaagaagcctcttcttcggtcagtggtctggttagaaagggactgaattctctgatcac

SEQ ID NO: 356206 - DNA, 237 bp, Zea mays
  unsure (1)..(237): unsure at all n locations
gtgcgatgcccattaggtgctcgattatttgtgtgagtcacggaactctcgtgacttcatgatctttgcaattatcaagctagattcagttatggcgagttatttcgctattccggtcaattagctgaattagtgtaccgagtagaattttagtaggcatgtgtgttgataaaatattttaatcacttataaagatgtagtgtaatttataaagcaagagattagntcagaataaat

SEQ ID NO: 356207 - DNA, 280 bp, Zea mays
cctggatgcacagtatgatttcttggctcggcaccaccgtcagatgattgcccgagcagaagatgcagagaagcgcaaccgtcagctccatgtggatctcaccacagctcaagcccgtgcaactgccttggagagtcgtgaagtcattgctgttgaagctctgaagcaagccaaggatgagcacgtccagaagttgatggaggcctacttggtaactcataaccaacgtagagccctacggatccaagagcccgcttcatccaaccctgttcaacccatc

SEQ ID NO: 356208 - DNA, 272 bp, Zea mays
cacctgtccagttccagtgctttagatccgcggccctgttcgcaccttgctcgcctcgcctcgcctcggcttccgctgcttcccgcctctaaccaccacggcatccagatcccgcgactccacctacactcgcggcggcgtgccctcgccgagatctcatcatggacacggtcgagatgatcgtcgaggacttcgcctcggacatcgccgtgagccccttctcctccgggacgagcctccgggagatgatacgcgcgatacgcgcgtgcaag

SEQ ID NO: 356209 - DNA, 261 bp, Zea mays
gggaggtggaagggttgatttgaaatatattatttctaaaaaggtccttccacctccacactggtgatggtttgcatctgatacgtacccgtttaagttataatatctttgacattgtgctccctctcttggttgatcacatccttgaacctttacgtctaatatgttatattaccagaattactaaagatggaattcattggtccattcattcttttggcttatcaattctgacaacataatatataccatgtgctgggt

SEQ ID NO: 356210 - DNA, 101 bp, Zea mays
ccgagctcgtgaagcacagctttcatcgtatgatgtcgagtaagaggacgaagagggtcacagaagaatgtgctgtgagcgaagcactgctgctcgtcaca

SEQ ID NO: 356211 - DNA, 269 bp, Zea mays
gccgtgggctacaacttcagtccaaaacagtaggctgatccaagtttgggtgggcataatcctttggctcatggaacatttgctgatctacgctactgggtaaaacatggatccctgcacatcaacaattgtaccagctagaagaccagtagaccaccgtgaataatagatgcaaacgcatgagaacaacacaatgtctcatcttttgttatcaagcctagcattttgtaaccagataccaaacacaatgaatgcatatgtaagtaacc

SEQ ID NO: 356212 - DNA, 165 bp, Zea mays
aggacctgcaggagctcgatatgcccccagtgcgaagactacttgcaggtattacagcacgcgccaatgcggatttcatgtgatagatagttcatagctagactgctagactagataattccatctaggctagcagtctagctattaacactagttctagatcgc

SEQ ID NO: 356213 - DNA, 168 bp, Zea mays
ctgaccaacaagccatgtctcctccgcgtttggttcctgctgtacgcgcctcctccttgttgtccgtccatggagctcgctccggcctcctgctccctcagtcggcaccatgctcggcttccagctcgtcaagctcaacccccatggccgagcgccctcccagccatg

SEQ ID NO: 356214 - DNA, 273 bp, Zea mays
ctcgagccgattttgtacttatgttcatggctaagatttaggccaacttcacttcagggactgagagcatttcttccaaaatttgagctcgtggacaggataagttcatttacagacttgaaaaataaagtcgggtgcagcattcgtgtgtgcattgcaaggctcgatgaagatactaacgacctgataattagtgacaagaaagcatgggaaatgacttatcttaaagaaggaaccctcctacaagggactgtttgcaagatttttccgtat

SEQ ID NO: 356215 - DNA, 280 bp, Zea mays
gcggcggcagcagaggtagcttgcttttgtcccggggccctcgcttggcattgtgctgcggttttcttgggcgaaagccttggcgacggtgacgcccctgggcgccgcttcccctgttgagggcgttgtgcttcccagcactgtctttcatgggcgaaagccccgtccatttcggaccggcgacggtggtgtccccgacatcactcccttcctgaaggcgtcgctactgctggcggtggcaggacagaggatcaaggctttggaagtctcgctggtaaag

SEQ ID NO: 356216 - DNA, 258 bp, Zea mays
gcagtcgatgccgtcgtccatcttccctgcgtgtccctgccggcgccgtcgacaatgccctgcgccctttctcgtcaggccgtgtcttccatggcggtctgcacggtgtagtgtaggtgtaggcggtgcgagaggcagagaaggggagaggaatgagcgacatgccataagaagttttaaaacttcatagcctcgagattttattgagctctggttgttcggtagagtttctgtggctggaaagcagtaacctttatg

SEQ ID NO: 356217 - DNA, 272 bp, Zea mays
gcttgatctatcattacattctcccccacaaacctccatcatgggcacaaatacttcctcaacactgattgcgcattcaagacgcccggcaatgctcacgtacacctcctgtctcgtggacacagcgcatacgctttcccgtatgccactctatttaattggttggaagcgcgaggcagagattctagatgtttcgatgtttgagaatcttgaatttgcgcgtggatggcgcaatgtaccggctagtctgaggttggagattcagagccatg

SEQ ID NO: 356218 - DNA, 194 bp, Zea mays
cgttcctctcctccggctgccttgccggacgatcgaagccggccgcgctgtgcctgtgcgcagccgtcgcgatcaccgcgcctgtgcccgcggcgctggcacgctagccgctagctacgtccatccgccgctcttcttgtccgtgtcattgtatgccgcggaacgggtcgccgctatacgctacgtggcctctc

SEQ ID NO: 356219 - DNA, 317 bp, Zea mays
  unsure (1)..(317): unsure at all n locations
gcgtacgtcagctaagagttagcctcgagggaaggccctgagctgccgctgctagctgttcctatctcgatctgtcactgagcagatcttcacggaagacggaacctctgaatgctgtgctggcatacatattcatcggaatgctgatcactgagataaggaaaaataaatactgtacgcaagagataaggaaatgagcaggaccagatagaaagcggatgtggttaagcgatgggctgagtaaaacaaaaggacgaaacatttacctgctaaattgtcaagttnttcttttttttccgcgactctgtctaagcacg

SEQ ID NO: 356220 - DNA, 247 bp, Zea mays
gcggcgacaaaagcatcccaagaagatgtggagaagcaatcccctagtcgatacccaagtactcggcgaaaggccagaacaagaattgtcgccatgtggagttctagttaatatggagagattccaagaattgtggatggaagagagagtgaagctcagttcaatgctcgccaggtgctcgatcgaagattttattcagagactgtcgacgctctcgcaggctttgagtcggacttactttagatga

SEQ ID NO: 356221 - DNA, 282 bp, Zea mays
cgggcactgccgaccctttgcccctactcctggtgtaattccaaggggtatcccccttgccaggggagaagaaggcgcctgctccactattagcggtgagggtgcctacgctcgagaggaaggtgaaggccggattccatggagtccgagccggtaccggtgaagccggcggtggtgttggaagaccggtgtctacgtcgatgaagtatggtggccatccacagcgagcagcgcgtttgctgtcggggttgatgaggatgctgaccccccgagtaggaacca

SEQ ID NO: 356222 - DNA, 287 bp, Zea mays
  unsure (1)..(287): unsure at all n locations
aaatagcgctgtgttcgagctatgtcacaatttagtagtgggtggcaggatagtcagttaagccgtcgcttcacttgatgaatggttttgttacgatccagtaacaagtgttgccgcacaacacaaacatagggtggctctgcagttcatacacgagatgcagtccaaggcgatccagagctgggaggcgagcaactcccaggccctgccggtcttcagcctcggcgtcgcgttcgtcgacgagaggagcgtcatctcagcgagtcttccggngcgaaatccaagct

SEQ ID NO: 356223 - DNA, 264 bp, Zea mays
atagattgcctcacatggtagtgctcaatctaatgatcttctgcaaccaaattatacatgtactcgcgtttgtttgtaaaagatcgtgatgttatatataaataacaagtagctaagaataatcccaacaaatacgaatgtaatcatttgcagcttccagaaatagatggagcactgacaagataaacttacagagaaagatcagtcagccaaatcaaatgatctagggattgccttgtaccatgaatctgccctcttcttcat

SEQ ID NO: 356224 - DNA, 271 bp, Zea mays
ttcgcctctacgcgtatggagagggaaaagacactagctatcaaaaatggcaatgctgatggacttccttgacatggagtatctggcagcataggaataagattgtgtttgaagaagaaaggattaatgctagtaagatcttgaaggatgccatattcccctgctggacctgggttaaaaatctggttaaaggttttgacatgccttttaatcactggtccagcaacatgaaggaggcttttacaggatgagggggggataataattatag

SEQ ID NO: 356225 - DNA, 273 bp, Zea mays
  unsure (1)..(273): unsure at all n locations
ccgttcccctgccccagctgaccgccgccgagacgtgccacaccgtctcccgcttcagtcgccacaaccttcgcctgcacgcaattggccgcactcctttccacctcccgctacaggatagcgtgggccggtcggcggcgccgacgggtggagaactggagatccacccgcacgcggactgcttccttcgctagtcgatgggaagtaagcgttgttaggtctcatgatttctnttgggagatccgagctgtggtgcctgctgactcatcatct

SEQ ID NO: 356226 - DNA, 270 bp, Zea mays
aagatgacatgtgtaattggctaactgcctaatcagacatagcactaataaactgagatacagctagacactactacatatcacagacaatcaataattatatcacaacatccgccacattccatgtcgagtatggaccgtcgacatcaagagatctcgcagatcgcagtaatcctcaaacgggatggaggctctggctcagagttccttttccagaaggcgcgccggcaccacacctcataccctctctaatatttgggcaatcctccc

SEQ ID NO: 356227 - DNA, 257 bp, Zea mays
gaaaaatatatattgccgtgaatgaggtagtatcaatgttcagcttgtgttttccatacttatagaataatgatcaggataacaaagtaaattgagtttgttttactaaatttattattaagctatatttttttattcttgactatgtgataggtcagagtaattaaaaatatatataacttaccctgtgctagcaaacatactgttgtattatgatccagggtccttcagtttatagttgtaatatggacaaagtg

SEQ ID NO: 356228 - DNA, 268 bp, Zea mays
gatgatagcagcaaatttcagaaagtgtgcctttcccctctgtgactgctccctgtattttcttaacactatgctcaagtcagtggtctggaatgagaatcagagtaatatgtgtagtgttcaatgtaatttagcattattcttaatggccttaaaaataagcatttcagtttcaggtgtttgtaattgtaataaggtttacacttgtatatacaccttgttgagtgatgtctctgtagtggattagtggtcatatctcaatggcctt

SEQ ID NO: 356229 - DNA, 280 bp, Zea mays
aggaactgcggcagagatctcgcaatgttaaactgacatcgttcgttatggctgactaaaagagcttgtaggcgacaattagctagggttctttcggccgcgacaaggaaattatatcaataaggagtttaagacttgggggtagaagagtgtgtgggggctaggttgggatctcgtccgagaagagaacgattgggtggatagttcggtcagctgattcggttcggaggcaaatagttgtgcgagcagtttgatcaaacacccctggaccgtttgctcc

SEQ ID NO: 356230 - DNA, 273 bp, Zea mays
  unsure (1)..(273): unsure at all n locations
gnggacggcagccaggaaggaagaggaggcttcgagacttatgcggaaccctcacgccacccccctctgcacaccaacacaaccttctcctcatagcctgcctctcgcgtagggttgcgcccccaaccgtgtcaactcaaatccagcaccaccctcctacggccgcggattcggagctctcatctgctgcagccgattcgccatcgcaacgagcttgagagcctgccgaccggttgggattctggttcccttctactgtactgtgctggatct

SEQ ID NO: 356231 - DNA, 165 bp, Zea mays
ggctccgtgtcatgaattgtatggctcttactcaaagccagtgctgttctttcagaattctgcagtgaaggagctaactgtcagtgacttagtcagatcgacaaataactttgatcaagccaacataatagggggcggtggattcggtctggggtacaaggccta

SEQ ID NO: 356232 - DNA, 291 bp, Zea mays
cgagcttcctcggcgccgtcaaccacaggctcaaaccaagcatcgttgtcgtgatggagcaggacgctgaccacaaacgcccggcggtctccggccggcttggttgaggcgttcggctactacgcagcgctcttcggacggctcgacgccgtggcggctgccactgccactgccagtgccgccggcgaccgggcgcaggtggagaggatgtgcctgggggaggagatcaagaacgtgctgctctgcgaaggagccggccggctcgagcggcacgagaggctcagccagtgg

SEQ ID NO: 356233 - DNA, 272 bp, Zea mays
tgaagactgccgagagtgctcatttcatgcaaatatatcggagccgtgaagtaggccaatcttacattacatccaatcggaacaacattgctagccccaatgcatgctatgtggctagtattaagaaatcagaccacagggggggtgtacgtaggttcaaactatggagctattcgctgcatgaggttgcactaaaggtttgcatactccttcagatattttgcaatgggccagggacatgctttcctctatgcactcggcgtccttctgaa

SEQ ID NO: 356234 - DNA, 295 bp, Zea mays
cgcagtcatcgatccaccgcattagagcgcaatggctgtgcccgacgcaacttcatgccgcactatggctcttgcctcgaatccggccacttcccacattgaggaccagccatcgacgcccgcaagtaggagacgcacccaagagaaaggaggcgaccatgagggccaagaaatcaagtaatgtggacggggctctccaggccatgcgggtcaaacgactggaacacgtccccttagcctccgaacgggaaccccgggctggagctctacagcgagagaccaagcttgctgaagg

SEQ ID NO: 356235 - DNA, 292 bp, Zea mays
gcgaagacgacatcgggagatttgcgctctctcttgctatggcgcttactccccctctgagaggcgcttgcactggccgccactccccgggtgaacgcccttcgttgcggttcttgcacgtccccgcgccgcctcttcctcggtttctgcccaagctgccttctctccctcttcgtcgcccataatcaagcgagactgcgtgcaggggtgcatgctgcacgcggtggcgacgagctacggcacgaccgcgacgtcgcgaatgactccgagttccgttcgtgggtgcaggctc

SEQ ID NO: 356236 - DNA, 266 bp, Zea mays
  unsure (1)..(266): unsure at all n locations
accagacccgtgntgagaagatcctgcagttatggcgctcaaaggaagtttacgaccagtgaacaattgctaattttgaaagcaggaagaaagggagcttgccttaattcgctggccccacgacatgttcaacagaccttacgatctttcaggatcagcgccaggccctaaaatgtcctcgaacctcagagaggatagccgatcatctgcgctgggcaagtaatctgccccacgacagttcatcnaccactacaccgggctatcct

SEQ ID NO: 356237 - DNA, 280 bp, Zea mays
aaacaccattacaggttcgcttgaatggtgatgcaactttgattgaattcgagtgcttgtctgatgctgggcaagactcgttgtgctttggcataaagtattttaactggaacataccggataattctgatgggacacctcacattgatgctgtaactactggagcgatgcaaggatttatggtggcaactagaattatgactatcgctgagaccattgtagttgttgcatgtcctgatggactcacattggcagtaacactgacgcttgcatattccat

SEQ ID NO: 356238 - DNA, 302 bp, Zea mays
ctagaattcgcctcgagcctgtgcaacatcttgacatgattcccgcagctatgcgaaggtgatgaacgtttccagatacggacggttgttctaaattggtaagcttgaacctggcttttgcacaccagttgggaatgatatcttaatcatggatacaaaatttggcgatgacctaataatgaccattaaggcgtcaatagtgccattctgagatgtatttctattgctgaagtgcggagagaaaaaaaagaattaaaaaagcatgatgattttgccccccccaaaaaaaaaatgaacagggg

SEQ ID NO: 356239 - DNA, 274 bp, Zea mays
gctcgaattcgctcgagttaataataataataataataataataataatacgatcatcacagtcaatgctattacgctgtacatggacttctctctttggatctcagatgtttagttcatgcgacaagacatggaccacttgggggcatataatcatttccagttcaaggtagaaaagcatcatccagcaagtttagcatctcaggtcgcaggcagacgactttcctgacaacgtctctcccactggagcattctgatctctctgagaatcagg

SEQ ID NO: 356240 - DNA, 175 bp, Zea mays
gcgacgggttcttcgtgcaattcgaggcaccggcgctgaggaagatatgtgttgtgcctagcacaaaagaaaagggacggacattgtgcagtagccctgaggccttggacatcgggatccaatgagtgcttccccggatattcaaggaggcaggttaagcccaataatgggggac

SEQ ID NO: 356241 - DNA, 270 bp, Zea mays
gaaacaccattacagggtcgcttgaatggtgttgcaacttgtattggtttggtgtgcttgtctgttgctgttgcagtacttgatgtgctttggataagaatttactgacatccgaaatctgaggacacctaattgttgctggaactactggagtgaagtcaaggatttattggtggcaacttagacttttgactatcgctgtgaccattgtagtcgctgctgtgcctgagggactcccattggcataacactgacgcttgatattccatg

SEQ ID NO: 356242 - DNA, 147 bp, Zea mays
tattacattaaacttaactggactaaatgtgtacatagggtggcaattcacttactatgtgatgttccgaatgggttatcaatgtctaatacggctagcagacttgccctgctttggagaatgtgtatttggaagacactaggctct

SEQ ID NO: 356243 - DNA, 257 bp, Zea mays
tttaggtgatgctagctgctgctaatagctaatatatcggagggatgaggaaattaggggtcgaagctagcttcacttcaggaccgaatgaaacatcgaatataatgtacgcagaggcggcaggaaaactaggtgcatgagcctattgatgttaaaattatccaggaataatggtgaaacagctcgcaagtacttgttctcatctcttccggaatctggaaaacaaaaaggagaaaatttcaagaggtttggctact

SEQ ID NO: 356244 - DNA, 283 bp, Zea mays
  unsure (1)..(283): unsure at all n locations
gacttccacaaacgcgaagtgtgtgaacctcctggctctgctactgatggcgctcggatatcggaatcttctctacttgctgcttcgtctagacgggaagaaatacccgaaggagcttgggaactggaggtcatggngttcaaggggcattctgctgccactggacaaagtgatttttgagcttctatctaatcgagtgagtgagtgtcgtaggtgtttagtgagttctttgngttggtttggcttgcgttgtatgccctgtccatatagacatgtatgtata

SEQ ID NO: 356245 - DNA, 244 bp, Zea mays
ctcgagccgctcgagccgagctgctggcgagatgccgctgaatgctgcttcgagtgcatcaccggatgttgcgactgagggtcctgccaatagcgctaccacttgtgatgctgcacacagcgagatcgacgaccgccattggccgtctaagtgaaaaaccgagaccagccaagaactgggaagcaatctacgagagatttggggtttctggacatactggggtttgcatacattctgaatacat

SEQ ID NO: 356246 - DNA, 269 bp, Zea mays
tctgattaacacagactgctcaccggaatctaataccttacgcgcaccagcgacctaaataattagcttgatacagctgagtgataacgcttcgcgcatgcagggcgatcacggagtcatgagggactgggacacctctcgcagtttcatgcaaaggcacgcatgggacgagatcggctatacatccatgatgcgaaggtgcacaaccttgctgtcgtcgagacgacgtgcatggcagtggacgagcgcttcggcacctaacttcgagg

SEQ ID NO: 356247 - DNA, 272 bp, Zea mays
  unsure (1)..(272): unsure at all n locations
aacaagcagccaaggaagctttgacagctgaatcggcagctagaggtattgatgactaagaggtaatctaatacacgtaaacgtaatgaagacaccatgagctcgacgcctgctgacacacttgcagaagccacatacaacatgctgaaacggaagggacttgtttccaagatcaatgagggagctgctagcgaattatacaaggtatgcctgtttgtctatgcttgaatatagaatccacanactgtatcctgccactaaagatgaagttg

SEQ ID NO: 356248 - DNA, 259 bp, Zea mays
acgtagctggcgctcagccgatgaccctgtggatgcagacagcgcaatgctgggggcggatgcgatagcggtgcccaggctgacggtacgatcgcatcgcttctcactgtctaaatgatatgcattcgagaccatattagaaagaggagggacgaggatgatgaggacatgaggtggttaattttccctgcctaatatctgatgggttcaactagaagtgggggacaaaagatgaactccatacatcagatgaacaact

SEQ ID NO: 356249 - DNA, 256 bp, Zea mays
gagctaagatcgctcgagcgagcttgcgcaagcaggctactagactcgtggctcaagcccttcaaactatccgatgaccggctcgacaagtttaaggaattacacaagacacggttacagataactgaaaagccgaagcataatagaagaccgaaatggaccactgagagaagcatcaaagtaaccagcaagtatgaattcactgataagatgcatcttgctgatagttctccaggagacggcatcatatgtcatc

SEQ ID NO: 356250 - DNA, 220 bp, Zea mays
cttcattccacttgcactaggatcgatcgatcgcatatggcggtactgtgcgagataacatcgggctgcttgctcatccggcttcgtagctgctgggctgccatgcctgactggggctcacgtcagctatgggaccaggcacatcagtaacagtggcggtgctagtggtattccagcagcagcaagagccacaagcaaggcggagggggacgagcccatg

SEQ ID NO: 356251 - DNA, 105 bp, Zea mays
ctctgcggctccgtcaccttcgccagggcatgaggaggaagccgatggcgaaggtgacggagccgcaaaacatgagcgcaactgaggcatagcggagcttggtct

SEQ ID NO: 356252 - DNA, 125 bp, Zea mays
actactaggacgtggcccgggacagcaggaaggcgttgtcccgggtgcaggagttcctcggggttccggcgagggagctggccagcaagcatgtcaagatccacaccaggcccctcccggacctc

SEQ ID NO: 356253 - DNA, 240 bp, Zea mays
cgtcacctgacctcatagataactctaggtctgacggacgtacgctcgtctacggtactgtccggaatatcactgatccgacccaatccggccgccgatggagctcatgaagtccagggcgactgtatgcgcgctcctcctggcgctgctcttgctctcgcactatgacggcgggacgacgacgactatggtggcgtaggccacggagttgcatggcaagagccagcaccactcgttccc

SEQ ID NO: 356254 - DNA, 112 bp, Zea mays
ctgctagtgcttagctacatgcatcatgcactcctggcatttctggatctgaactagctgcttatctagatagtgacactgttcagaagtttgatgatgaattcaatctcct

SEQ ID NO: 356255 - DNA, 104 bp, Zea mays
ctggttctgaactagctgctatctagatgtgacactgtcagaatttgagatgaattcaactcctagatggggcatgacacaactactaccagacttcatctact

SEQ ID NO: 356256 - DNA, 212 bp, Zea mays
aggtttccgaggcctatccgcatctactctcgcggctctcgccagccagtctagtgtttcggacccagccgtcctaatccgccctggcggggaatgtcgaagcagggaggaaaggccaagccgctgaaggcgcccaaggccgacaagaaggagtacgacgagacggatcttgcatatctgcagaagaagaaagatggagaagaagcactgaa

SEQ ID NO: 356257 - DNA, 279 bp, Zea mays
gtacgtagcttgtagttcgctcgaggataaccctagctgcgcgagcccaccgtcgatgtcggaggccatccgctcaggcgagctacttgcgtgtcctgtcgcactctgtagggcgccctaagctgtgtctgtggcgacgacgcggatgatggctaggggcgctgttgcttgtcggtcgggagcaacggtctgaggggtagtgaaagaggggaagaaggcgccggggaagaagaagccgacgagcgggatcaccaagccgaagcccatctctacagagct

SEQ ID NO: 356258 - DNA, 264 bp, Zea mays
attgttcacacgttattgaagttaatgcttaaacagaccaaactctgtatatgtgaactgtgaaaggcacagacagacaatctggtacactgcatagggattagtgggtaggaatttcagattgtagtcgtcccttgtatctgcagtttgtgtacatgtcttcctttctaagatggactagcgtgttgtgtgattttttaccgtaagattctttttacagctcgcagtgtttttttattctcggtctaatgaggactttctgac

SEQ ID NO: 356259 - DNA, 173 bp, Zea mays
tagagaaaacatcgccggcaagtgctattcattggtattatcactgctgttgggactagctagcataatctttcagacggaatcggctgctcgtctcggatctgtcaagcgtcttgatgtggtcctgaacttggctgcggctattgcctaacataacataccagagggggtgc

SEQ ID NO: 356260 - DNA, 104 bp, Zea mays
gtctgttgttggtgagatatactagactagatgcaatgcaattgaaggagtcgcaccgtgtcctgggactagagccagatttcttgcaatttaaattatgactc

SEQ ID NO: 356261 - DNA, 230 bp, Zea mays
cgaagctcgaattcgctcgaggtggcagacacgcggtccgcgagcaccgcgccgacttgccattttttgacgctggacctactgctgagctactagtgtacatatgcaagagtacgtatatatatatatatatacggatcttctatatattatatagtaatagcaaggcggcccggggctccttctcttgtttggcaaaaaaagaaaagttataaggagaaaagaaggag

SEQ ID NO: 356262 - DNA, 275 bp, Zea mays
  unsure (1)..(275): unsure at all n locations
acattgaggaatcaactcactcattattccttggaattcatgatcatttntgtatatctatgttcggaacagggaagatagcccatttgagaaatgcaatgctgacagatgtcctactgtgccatgacacaacggatagcggacgtaagcgaggaagggtgaaccctaccgaccgcatgccgaaatgcattatgctttgaatactcattgaagggaattcgaccggaaactttctaggagaagtcgaatccgtccgtcggaattgatcggctggt

SEQ ID NO: 356263 - DNA, 174 bp, Zea mays
cattttcaatgtaaagctcttttagtttttgacatagacatgcattaatatgatgagatgcatgcctcacctgttcaattccatctgggtggaaatgaagtacttaaaattaccgttatccatgaactttgcggactgtaagacttgttatatatgtacaaatgccttttagct

SEQ ID NO: 356264 - DNA, 204 bp, Zea mays
aacgaaatgatctgtactgtctactatagtgacttggcacacaagagttgtacaacatagatctgtctgttcaagcccagtgagccagcgggcgctactgctgtgatcgccgcgaaacgatcctgagatcctgcgccaagttttgtttcttggtaacttctggtattgcgcgtgccactgcatggcgtggatgacgttttctgt

SEQ ID NO: 356265 - DNA, 248 bp, Zea mays
gcggccgagaactattcacattgcaaagctgcaggaacggcactctgagatgacccagtagcaattggacgagggcgcaatagcagcagccagcctggtagacacctagctagacctgcttgctagatcattcctgcgcgtccgggtccggctcgaggcctgcgatctgcttcagtggcttccaaacaaagcttctcctgcacgcgtgcaacatggccacacgtacgtaatcaggccttagccacaag

SEQ ID NO: 356266 - DNA, 199 bp, Zea mays
ggaaacttctggggtagtccggagaagctttcgttccttcggccttctgcttcccacctgccaccgccacgccacgccggctcggtacatatactagcctgcctcgatcggcctccctcgcattccccctcccccaagatcctccactcgattccaaacaaaccaacatatgcaaaaaaaaaaaaagggcggccgccag

SEQ ID NO: 356267 - DNA, 243 bp, Zea mays
agtctcgcgtacgtcagcttatcgttcgcatcgagagcggctgccccatcttaccagccctttttgtttgccctaggctccccttgtgaaaagtgtgctttgctctataaactctacttgcaataagcagagcctttttttaattatgtcagggtgcatttgatacgatcgaataatcatcaatccataattgtagcaaaaaaaaaaaaagtaaaaaaaaagggggcggccgtcaattagggt

SEQ ID NO: 356268 - DNA, 259 bp, Zea mays
gtagatggaagctgaaagatttgataaacggctgctgcgatcgagttctgacattgatggcaaataatgcatacaaccattagtcctaatctaaggccgtagaaaagatgttgctgcgcaagatgtgcttttggtggagatagcttgtaatccatccacaaccggatctgaacaaaagggtcgggccaaatggatgcagagccatgcagatagcaaggaaagcagatatgtatacccttttctaaattcctggtccgat

SEQ ID NO: 356269 - DNA, 134 bp, Zea mays
gtgcatgtgcctgccggcggccggcacgtatacatacttgtgtggtgtgttgtgtagtgtaaaacgcagagttttggtgcgtatcggacagcgtactggccagggtgctttcaggagccagtgtcgtttttttt

SEQ ID NO: 356270 - DNA, 301 bp, Zea mays
gtgaagcttaatctgatcccctgtttgttttacaactgtaaccctcttctttaattgtactgtttggtagtcatatgctgataacatcatgtaacagtatttttgtaccattacacttgtaacttgttatgtacacgaaattgtttgttttctccctcctgtgatcttttgtagctacaaggcattctgtaaggcaagaattgtaatatagagtccttgcctaataccatggaatgtacaattttgttgctatagctcaggtctcattgtaatcatcttagttttcattcaacgtggatgt

SEQ ID NO: 356271 - DNA, 299 bp, Zea mays
accggagctcctttccacgatcagttgaatggatggtcgaccaccttctccgtcacgctcggcgggcaagaatcgtccgttgcctttgaataaggctctagatgcaattggcggtgggtcgtagtccgcccgtggagctactcgataggttccacaccggcgtctcgtcgtcgggagtcaatcctcgctactcctcattctgcatcacaggcgacgcaccagctttctttggggaacatggagactacaggtgaattccttctccaatgttggatctactacactcaaatgtgaagaca

SEQ ID NO: 356272 - DNA, 256 bp, Zea mays
gtcctttcggaggatgaggacatcaggtttgaagaggccggcgagagccaggaagagtatgacaaatccaaggcgcgcataacaaagtcctgagatgcatgatgatgcctactgcacccaaggcccttcaacttgaggccaataccatacccatacacacacacatatacatactaccctcccattcgctttcggtattttgataagattctatgctctttcatgtaaatgaaatacgggcgtcatgtccccatct

SEQ ID NO: 356273 - DNA, 300 bp, Zea mays
acgtgagctcagattcggctgaggagtacccaatttgttaatagccagaaaccacagtggctcttcactaggcatttagaacatgggtatcatccaagactactctaccctgcaacattgaactcccaagagcaaatccacattcctcttgagttctgcagcttctgtgtaaatagggcagctgccgtctatgccgtagaatcacatgatctgaggaccattcatggaagctgctaaatagcctagtctggcgagtcttccataaagattcgcatggagcagacaaacaggattaaacta

SEQ ID NO: 356274 - DNA, 266 bp, Zea mays
ggcggaccgttgcttccactactaatgcttcttttcgctatctcctgaattcagggtttctgcagacatgtgcgatccttgaaacggtccacgctgccatcggattggtgccgaccgcgccacttcttgctttcttgcaatggggagggagggtccacttcatcctggctgttgtccggcaaattcccgaggtcatccgttactctcactatgctctgactaccttaaaagtttgtccagcatggctgacttatctcaggtacact

SEQ ID NO: 356275 - DNA, 283 bp, Zea mays
ctcgagccgacttatattactacttatatttatatcaatccgttctcatccaccagcctgtcccgcctgatccgtcccatcgattgctatgagtttaggttattttaccacagatcttcctcttttttttgtatgtaaataatgtttgaggtccagactcatcatgtaaattcgggagcgagtgaaatcgggtacctaggaattaggagcagagcgagtgaaatgggggcaaaaaaaagagagaagggccctcttggatgatttgatcaagaataagagatct

SEQ ID NO: 356276 - DNA, 297 bp, Zea mays
gtcagctaatccttcacagcttacatgtttgacatcggcaacatgtggagacgtgccactgccgtcatacgagggacgaggtctggcatatcgccgacttactacatatcagctagcagttcacaatttacaagcgccgatagtgagtcattatgtaggtatgactcatagccaccagaaaaggctcaagctatcatgcttatagctgcagctgcagcggcagcggcagctccaaaagcagtgctgccctactgtaagcctcaatggggcctcagccactggtgcccacagctggcg

SEQ ID NO: 356277 - DNA, 273 bp, Zea mays
gatcaggtacgtgcaggctcctctggcataccctcgagaaagaaaacgccggatgaactgtgaaggctggctgccattttgtgtataccgtgacggtttcaacccagaaatttatccagcactgtggtcagattactacaacaagaacaaaagggaacccgagaacactcagctcgcgccttgggttgccagccattacgcaaagtaccacaagttccactgaccctttctgagttgccttggctttttgccgaattgatgcagatcgtccct

SEQ ID NO: 356278 - DNA, 233 bp, Zea mays
tagcaggtggcttcatattgggtactttcttcctaaactatttctccttaatcctactctggaacacattacacatctcctttccactctgaaattctctccacccatactctcaacacctaactccttttctcattaggctaaactgtaatgtgacccccaaagatctatccctgagctttttttcttataatgctttctcaagataattcttcgttgatcaatgcgtcctg

SEQ ID NO: 356279 - DNA, 162 bp, Zea mays
gactggcgcgtgccgcactcgctgctgctcgagatgctcacggacgatggcactggctctatgatcaccggataaagctgccttgatatttgcttgcaagatgggctttgtgcgacacattgacatcggttggaattgttttgcacaacgcacccaacggtc

SEQ ID NO: 356280 - DNA, 220 bp, Zea mays
aaatatgtgtaaggagttacgcgaggagtaagcgcagttacgaaatgtgacactgttcaacttgatggtaagcccatgaagatagagatggatggtaccaatactccagctgcagcatctgctgatccagtccctaatggcggtcatgctaggaatgctgcgaggagtgcaccaaaggatgctgctccagcaggtatgtcgcagcatagaccccatcaga

SEQ ID NO: 356281 - DNA, 272 bp, Zea mays
tgatagggccaggactggctagcttcgcgatcacgttaacttttgttgtcagataaccagtcaaagtagacgcgccaggttatctgacaacacaagttaatatgaatatgaaagggccttccttaatgtgtgtttccacttggtgctgtataaaggttcagtgtatattccattcaggagaatgagaaaaacttaaacacttcagtgtgggtggatcagggattaggcaacacaatggaactcgatgtgaatttagaacagacagactttta

SEQ ID NO: 356282 - DNA, 239 bp, Zea mays
tttccaattcgtcaatcagaactatactaaaccccttcaattagcaattaatctttcctgccactagttatgctccgacgtcccatctgatgctgacttttgcgccttccctcggcgccgatttccgtcctccgctttccgaaaaaaatcgatacagtcctcgccagctctcgagtcctctgatgatacccgctgcgacccatagcctccgtccgatcagcagcagcagcagcctaaca

SEQ ID NO: 356283 - DNA, 235 bp, Zea mays
ttcattaacctgttgtatctagatttatcttgctagcatgtaggagaacgcattgacactgaagtgattaagtgagggtaactctgtttggtgccgtggtaatagttgaacattgaagcttcccggatgatatgacttcatctacccgcaactagaacattttctttttcttgaccttatttatgtgcccaccacaacttctcacaatacgatctttgtatgataacatctatag

SEQ ID NO: 356284 - DNA, 163 bp, Zea mays
agctattacgctcgctctaggtcggtgtggcgcttccgttgtcaactcttgaccatactaccctcaactcaccctcggtaccaccggcaggcattgatattcagagatgaggtatagtagtctgtagcctctagtagatgctgatgaattgatgatatagtac

SEQ ID NO: 356285 - DNA, 269 bp, Zea mays
gcaacttttagcagctgtacgtgctatcgggttggagagaacatgtggaaagccaatctcggatcttgcttccttcaggtttccacattgtagacacacaagagtccagcctgcgacaaacgctcctgcagcccttattcttcgtagcgggttctgccgtctggcccggttctggaattatgtggccatcagctgattgtcaacagtctcatgagattggagcctagatccagtttgctttgatggaaacttcaagcacctctagacgg

SEQ ID NO: 356286 - DNA, 256 bp, Zea mays
agcaagttgtgtaatttcactgagatgcatgtttatgtatatttgaatatgcatatgcggcctttcttttctctgctaggaaaatttgggagctaacttcaagttcaaacaaaatgaaaactgagaaatcgggcctactaatttgtcttcagtgataaacattccctgggcctgtttcgatctcagtaaattcctgagatactttatggtcaagctatgactgctatttttgcttgctaaatttgtagagactatc

SEQ ID NO: 356287 - DNA, 252 bp, Zea mays
gagcgagaagcgagaagtcttcccctcgcctcgtctccgcccacaacaaacatcacccgaagccgcgtggagccatcatccagatcggagccagcgcgccgggtgatgctgttccggccacgaaagtagccgtcttgcaccccgacccaagagccatggcggaggatggcgaggagaagctgctcgcgacggtgcagcatatcgtgcagactctgcgagcagcgacacaatgacggaggacatcctcaaggt

SEQ ID NO: 356288 - DNA, 262 bp, Zea mays
  unsure (1)..(262): unsure at all n locations
gtactattctactattgattagttaactttctgtcgtagaggtgtttcaatgtgtttccttttcaggttgagagtggtgatctaatagcttatggacttatcccagaatttattggacgtttccctatccttgtgagcctcaccgctctaaatgaggaccagcttgttcatggatcacctgtatctacntggatttatctttcctaacatcatgggctgtcgagtaatgcacgcttatgctggtacattgtgtagagaaaca

SEQ ID NO: 356289 - DNA, 141 bp, Zea mays
aaaaatgacttgggtggtgcgagtaaactggaacgctattcatttactattctttcttgtagcttgtgtcttggccactcctgacttaggcggttgacatcgattcgataattgtgatgattgtatagttgcctctgagtg

SEQ ID NO: 356290 - DNA, 223 bp, Zea mays
gacgcgcgtacagaaaatccaacgccgcgtagccctgcacgccgcaatcctctagccctgcctgccccagctcaagccgtagtcgtgccgctgtacttcgagtccagcaccaccaagatcactgctgccgttctctgcgaacttcgcacaactgtcgtctcactcgcccgcaccatgaccttatcgcgtgctggtcatcacatgccgaagctctgttggccga

SEQ ID NO: 356291 - DNA, 273 bp, Zea mays
  unsure (1)..(273): unsure at all n locations
gcaaccgaagcaattgtagtttcttctcgtgtttgcactcccctgcccggctgcccggcagggttaggaggcaaggagggaagagagggtggaggaagtgggggaggatgagcgaggagaggccggtgccgcggcgggagagcccgtggggtctgcctgagggcgacacgcgccagcccaaggctcaccgctgtaacgaccgcgccgaggacgtcgtccaggcttgctntgaagggaacccattcaagacagttccaggcccatttaagctct

SEQ ID NO: 356292 - DNA, 255 bp, Zea mays
aacaagtatgctattgctacttatacatatggtcaagcttaatacctggagcctactgtgaaccttgctcgctgacaaatgttaatgctgcacactcatagccaccaaaaacactataaattagtttagagtgttggcttggcgcacaagtcataattacgaattatattatgtcaagctgagtagtgcttgatgcctccagtgacatatacagcagaatgcgactacatagggaaatattacacctgctagaat

SEQ ID NO: 356293 - DNA, 248 bp, Zea mays
ctcgagttcttgcgtgaacagtatagctacagccttttgggagtcaggactgacaaggcagagctgcagaaagtgtcgcagatgctctggcgctagcagagcagccatgctgaatgagccctgaatatttctcctgtatgaagtagttaatattcttgtctggctttggatccttaaataatgttaaagcttactgttggtgatgcaaggagatattacctttccactgcgaaagatgaacttggagt

SEQ ID NO: 356294 - DNA, 183 bp, Zea mays
ggaagaaccttggcccgacaccatgctcccaatggccgtccaccccaccaccacgccggccttgtccccgcgcgcccgcgtctcgccgcacaggcctcccatctcctccctggcggacccctcgtcctccccctgccatcgcatcgtcagtttcaaaagcaggagcttccacttcggtttttt

SEQ ID NO: 356295 - DNA, 263 bp, Zea mays
gcggaggaattcgcgtattaggttggtgggttcgaccgatccgcgtccccgggttcccaagttcccaggtaagccgagcccggagcatggcgccgctgtcgtggcggcaccacacgctgctgcagtcgctgctccaccgcggtcccctctccgaacgcgacttccacgccatcttcgctggcgtctccggcaagaaccccgccactcaccaacaactgttcaatgatacacttctcaagatcaacaaggaccttgcctacttg

SEQ ID NO: 356296 - DNA, 158 bp, Zea mays
cacacaattgctgtgactaaaatggttagtcgacgagcagtgtggattcggtgctattttacttatactgctttctattgtaggtaaagtcgtgccattcattgcttctattcctgatgttatggttgctgctctgctttgcttcatgtgggctatgc

SEQ ID NO: 356297 - DNA, 178 bp, Zea mays
gctcgaatcggctcggccgtccgcgcgtcgagatgtgaatagtgacgtgaaggttaagtttcataaaataaacaaaggggcggcctccgcttaagggacctgtgggcccgggaattaagtcccggccgggaccttccagggtacccactttccccaatggtgagcggtttaaaacttg

SEQ ID NO: 356298 - DNA, 260 bp, Zea mays
tggatattggcgcgatggcagagacagtgcaatcgaaccggaaggtggtctttgggttgagggatgcgtttgtgaagatcgagatgggtttgcagttatctggtcttgagatccctgcaccaaagtttgaggctactgaggtgccagtgccgccaaatgtgggcaagggaaaggcacaaaagaagaagaaaaagaccaagaaggctgcattggctgaaggtgagatggaggatgacaaggatttgaaacgtgagaagata

SEQ ID NO: 356299 - DNA, 297 bp, Zea mays
gctataatgctgaagatttgagatatcgacatgcgagctcgggtcagataaagtccaggagcgtaattacaatgctgtggagtgcgacctccacaagctgacaaaaacagtgagaagcagcttgccaattccgtcaagcagaacagatgcgtgtcaccattctctgataagacgcctgctagatgttgtacaatctggtagtcttacgatattgtatctgctttgctgtgttcacacaagcgtgaatcattttgatatccagtccttgaagcattcgaatcagaacatacacactaa

SEQ ID NO: 356300 - DNA, 259 bp, Zea mays
cttcaacgagcttctgctcagtactttccacctgctgagcatctaggtcctcagttgcctgcccgtcgaggtgcacgtaggaggtgcagcagcccacggtgaagggcggaaccgcggtggcgacgcgacgacggcgagaaattcgcccgttctcgatgcaccgcgacccccgccaaggccaccaacatgctcttgatgcccagcacagcacccaaattccacaccgaagccccaacgatggcgtcaagagttcaccgac

SEQ ID NO: 356301 - DNA, 292 bp, Zea mays
ttgagccgtcggtgactaatgacatgatggacaaggtggagcaggtgctgcaacggaggaaggccgagaagtccctgctcagcttgcaatgaaggttggctatggcaagcgcggaagaattaaagaataatggttgtcagaagacatatgagagccctgtaaaagtggtaaggcaggcatcagttgctaatgcatccatgatggatatgcagtagattattacaaaattaacaactcagtgcagtgagtaggcttttgagttagagtcagctgataatcgtgtcctctagga

SEQ ID NO: 356302 - DNA, 269 bp, Zea mays
gtggcagctgagattagtatgtgggagttttatgacaacctattagacaataagggaaattgatggatcttgacatcatgcatggtccgtcttgatgatactagcaagtggttcgaagcatgcatgatggggatggggatgtagtcgcaaatggcatattcattttataatatcaagtaaatgcagccgtgttatccatgtgtatcagtttggactggttatttatgctttgttgtaagcttacaggcaacggaacctggatgacattg

SEQ ID NO: 356303 - DNA, 291 bp, Zea mays
gctgccgtgaggcgtaagctgagcagatgcagatcgactgaccaactgtcggtgaccgcgagggatacacgacacacccgtgctggcgctgcgaccaccgtgatgtgctgatggccacttctgccggtaccatgcgcctacacatgtgcggtgcagtgcaggccatgcgtgaacatccaagtggtctcagagccagaggggacgaacgtgtgcatgcatgctcccgccatggatcgcagcttgagaagataaacaatcactagagtatgtcagtacactcgtgttcatgac

SEQ ID NO: 356304 - DNA, 288 bp, Zea mays
cgccgtcgccgccgccgccgcgctctctccgacggactagcgatggcaatggcgagagtgacgaagaaaatcgatcggattcccattgatttctacgcgaaagatgagatcttaaccagctacttctgactcgcgatgccgctgccactggcgttattttttttttgctgttttgttttttcccccgtgggtgctgatttgcctttcctatggatggatccctgagacgctaatccggacggttggtgatgtgacagaaatatttgctactcttgatggggcaggacc

SEQ ID NO: 356305 - DNA, 274 bp, Zea mays
aaaagtgcagcagccccacatctaaatgatggatccctcagtatacacgtttctggtaaatattagcttgctttgtgctaccataaaactcagccatgctggagcagcaaatttccaacaggtccgatgctgacttaggtgtgcacataacaacttagttgctgtgagctgagttatagttcagatgcattttaatagcacttatcctttttcttttattgactgaataaagggacctgattcagctaatgaggttgtccaatactgctctact

SEQ ID NO: 356306 - DNA, 267 bp, Zea mays
cttgcatgaagtgtatgttgtgttgattatcattgtattatcatatgaaatccctttattttcatggtctgatgatgggtttaatcttatggcttgttatttgtgtatatttttggaggaccaagggcaatctatatgtatgatttgggattgaatgcaccttctctttttttctataagggccaatttatagttatatcccctgcgacacaaatatctcattataggtaatatggctattgttagatggaaccatgagccacactt

SEQ ID NO: 356307 - DNA, 266 bp, Zea mays
gcagctagccgaagcaaatacaatgttccatgagctgaaaggcaaggcatttgcactgttccatgcatggaacattcttaagaatgagccaaagtggtcagaagacaagggatcgaaagtaggcaattcaaatggcgaagctcattcaaatgtggagagacctctaggaaggaaagctgaaaaggaaaaagccaaagggaaaaagcgtgttgacgatgaacctgatcctcttcttgaggaagttaaaaaaattagagaatcaaggg

SEQ ID NO: 356308 - DNA, 286 bp, Zea mays
ttctccacgtcgcagtagcatgacctccgccaatgctaatagcgcagaagtgctgtagctcttccgatccttactccgcacggtgaacaagttctcgaactacaacatccgcgagtacacgcgccgacgcgctgcggactccttccgcgaaaaccgcgccctcgccgatgcgtcggccgccgacgcggcgttcttcggagggaagaagcagctagaggttgctaagcggaagcggaggtttactctctctacgcccccaaggccaagagcgtgatggagttgaagt

SEQ ID NO: 356309 - DNA, 292 bp, Zea mays
cacgcaccttgcctcgtctcccgcctcctgtctccggcacgcgtaccatctcctctcggtctaaagccgtacgtgcatgccgctcggccagtccttgcattgcatcgcattgcaacaggcaggcaggctctaaaaagttcggcagcatcctgcaatctaaacgttgcccgctgggatttgtttactgcgccgcgccacaagccgtctgacgttttctctgatcctccctctgcccgcctgactgtctgtgcatgttctctctgcactggtcaaaaactcgcctgcctgctcg

SEQ ID NO: 356310 - DNA, 140 bp, Zea mays
  unsure (1)..(140): unsure at all n locations
gagcagcaggcggcggaagcaacccgctgtgngggcggcgtggagtccagttttgctcggctcgccgctgggatccgccggcctgcgaagcgttgaagggaagaggggcggagattggagagtacaagcaggggaagatt

SEQ ID NO: 356311 - DNA, 130 bp, Zea mays
  unsure (1)..(130): unsure at all n locations
attatataatagtgtctgttgtacaatctgtacacttcagaattgttcatgttgngcttcacagtttacacggctatcccaacatgaacaattctgaagtgtacagattatataatagtgtctgttgtac

SEQ ID NO: 356312 - DNA, 283 bp, Zea mays
tgcgccgcttgaaggaggctttgcggcgatggaccgggtcggcggcggcgaaaagcaactggaggattgcacagtagccaagtcagtgatatccccgctcgctctctctctctctctctctgtacctcttcctccctgattgatggattagatagttaggtatatcttcccctgttggcagtaggtgcatgatcgggatttatttgtacttcgcatcgactgtcttccttattaggacgctaattgttgtggaggcgataagctggacccgtatttatctata

SEQ ID NO: 356313 - DNA, 148 bp, Zea mays
taaagattgtgacattgggttatatacacatatatgacgactcaatgtgtatataaaccaatgtcacaatctgtattacacattgagtcgtcatatatgtgaaatttgatcctggcacgtacatatgaggtgcatatggatttgtcct

SEQ ID NO: 356314 - DNA, 287 bp, Zea mays
cgcaccctcctcaaactgcaagctcgaaatcaactggtatgccccatatgtctaaccaatccaaaggacatggcttttcagtgtggtcatctgacatgtaaggaatgtggcccaacactatcaacgtgcccattgtgccgcgctctaatcaccatgcgtgtgaggctctactcctaagtcggttggtgtctggagggatgggaccaaacagaaaggagcaagaactttgtggcgcaaggactgcgctacgatcttgagatatggccatatggatgtcatgataacga

SEQ ID NO: 356315 - DNA, 131 bp, Zea mays
attgcttcaatggaagcgacgtgtgctgctagtgactctagactatcaggcagttcttaacttcactgctctgcctgtacgtgctattcgttaaatgtgttatcattatcgggacattgccccatcacagg

SEQ ID NO: 356316 - DNA, 135 bp, Zea mays
cttaacacagcacagaggaagcaggcggctgcgatggcatggcgtgcgagcctgtctcggagcctaaaggagatccgcgtcctcttctgtcagtcctccccggccagcgccgctgcccgtgagttcgtgaagaag

SEQ ID NO: 356317 - DNA, 133 bp, Zea mays
cggtcgcattctcttcctctcctagtccttcccatgatcccatcccatatatcccagccaggtcacccagagagcgagaagctgattgcgccgcgccctagctagcgctctcggccgcatcgccggacgtata

SEQ ID NO: 356318 - DNA, 177 bp, Zea mays
gtcataagaagtatcgaaactgcaaggaattttgattttgaagactttccagtgaaagacaaggtcacttatatgtactacactgggcggatggaggtgtttaacgagaactttcttgttgcagatcagaagctaacttatgctttgatgcattgcaatcctcaaagcgagtcaaat

SEQ ID NO: 356319 - DNA, 113 bp, Zea mays
agattatgtgatgacagattatagatgatggactgcatgtaattgctttacaaaacactgtcattggcccgagctatatttttacatgagtaataacaagattttcaaacctt

SEQ ID NO: 356320 - DNA, 213 bp, Zea mays
  unsure (1)..(213): unsure at all n locations
gtcgtgtcgacctccgttgccgattgatctcaacgcgctgacgtttgatgatgctgccgcggattacgaactaccccgcacgcggctttggctctgatgatgattatcgtgcgatgatgattttgatttctcatgtttctactggantttatgtaatagctatgcagaagacttatatatttagaatgatgatcagatgtaagattatggtaa

SEQ ID NO: 356321 - DNA, 254 bp, Zea mays
gctcgaatgcggtcgagcacaaacctgcagactctccatggcaggctccacctccctcgagccccttgccgtgcccgccgctgcatctagccatcgcttccacacaacatacgagcatgctaagagggccattgctagagtgatggaggtgcttgttctagttaaaaatgaccatagcttttcaccccctgaagctgtttaagctgtggggccaatcctatcaaaaatctaagtatggagagtttcaactcact

SEQ ID NO: 356322 - DNA, 278 bp, Zea mays
  unsure (1)..(278): unsure at all n locations
cgaagctcgaattcgctcgaggcactacttacatagtggcttgtgcctagaggtataatgctcatttgtgagtgaagccagatatcccgtggaacaagtgcacaaacatacgggtatagagcctctacattatactgcaatgaaatgttgataccctccatgatagtaaaagttgcctntgtattttggngcatccaacttaatactatgtaatagtatccaagcatgcactgcgccagagtcagaacagaacacatagccagcttcttgttacaatg

SEQ ID NO: 356323 - DNA, 300 bp, Zea mays
  unsure (1)..(300): unsure at all n locations
cacagacagagagagaggggcaggaattcaattccaccgacccacgcacctctaggacaccccgctcccacccctttcctgcatttacctccacctatatagctccccataattccccgggcctcccctctcttgttaggagtacacacttctccttagaattggagctgtacgagccacccagcaactttcttcatcatcttcttcagccctcgctctgtccgtcgacacagcagctttgctngccaccaagctagccatgcaggaggagtaagagtacaaccggtagagagagagaga

SEQ ID NO: 356324 - DNA, 258 bp, Zea mays
cttgctcttgacttcgctgtctaacaatccgagaactgaacaccttccgcctcccggcctcctccctgcccagtgctgaagaaccctgccggggtatttggcacctgaatttctgagcagcaatgcaatcacattcaaggcggacatatacagactaggtgttataatcactgagattctgacggggcataaggaatgcaccagtgttgacaaggtgcttgaaagctggacggacattgttcagacattaggaagcat

SEQ ID NO: 356325 - DNA, 162 bp, Zea mays
tcggccgagcgcacagcctactcatatcttcctctcctcgcggtgccccaccaaactctaaccggagcacgcagccgatactcgcgactgctcgcgccgtgctcaggtgctctaactctgagcgtcatacgacccgcagtggtgcgcgtggtccaggaaaca

SEQ ID NO: 356326 - DNA, 291 bp, Zea mays
ctggcccacgcttctcggccaacacggtctccatataacacgcgatgaccgggaatgtgctgcagcgatccaagcaagatgacgtgagaggcggtggccgcaaccacaagcggagaggagctcgacggggcgcgccgcagtgagatctctgggcgaggagaggacctcgacgaggcgttggcgtctcgagggccatgaagccgtggaggtctctgggagctggcggcagggcgacgaggagctggcggctgggtggaatcgcgacgaggagctggtgaaggagcggcctac

SEQ ID NO: 356327 - DNA, 230 bp, Zea mays
gtggaggtgtacgttgcaggcgtgttccggggcacgcacgtcgtgttcaccaaggccacgcagctgcggttcaggcggcggcggcaggtgagggcgttcatggacccgatcccggagtgccgcgagcaggtgggagaaacgcatcacccagaggaatcgggataccggggctacaagcccgatccgaactgtgacgacgacgacgtcgacgacgacagcctctacatgag

SEQ ID NO: 356328 - DNA, 191 bp, Zea mays
  unsure (1)..(191): unsure at all n locations
ggtatgggaaggagcncacttggccgcgccccgatcgacgagttgtcagtcagcacgtcttcttcaacctacttctcctctatgaagaagccgtcgctcctcctcttcccgggcgcggccaagtgcgcctccttcccatacccgccgccgctccccttgccgtatgcggtgaacccgaagtgcgacgcgcg

SEQ ID NO: 356329 - DNA, 273 bp, Zea mays
gttccatctggtggttcttacatagtagctgcttatactctaatggacaactaaatacctggattttagctgcttcaagtttccccgggctactttatttaccacttgcagctcaatcctgttttgttctcttaatcctctgttacttgcctcgtttaccagttaggaaacctgatctggttaggcccaccttttgctgatatgaattcaatatgctacttgattcgctgacagtgaatttgatcgcctgaatatgcacacatttttttactc

SEQ ID NO: 356330 - DNA, 263 bp, Zea mays
cggtcagcttctgactacacatagaggactcagctggcaaagccgcgcagacgaagccatggcaacagacgtccgtcgcccgtgccctagctcgcccacattacagccagtcgcgctcctgttcacatggcgccagctgaccagcattatcgcctgcagctcggccatagccgggcaccgtgcacagcatgcgtcaaacaccgtcgccgatgagcacctctcggcttccctggcttcatggccacccactaccctctctatca

SEQ ID NO: 356331 - DNA, 224 bp, Zea mays
gctgaatcgctcagcatatggcaccttgctgacataaggctacaaagaggctaatcacgcatggctggagatctagcataaaaaaggaactacatcccgttcttcaagaaaatgggaagtaccatctcccagcagcaagctacaatctcaatgtagatgagaaacatgcgatgtgtgtttggctcaagaatttgaaagtcccatccggattctgctctagcata

SEQ ID NO: 356332 - DNA, 286 bp, Zea mays
gaaaggtggacttgaaaacctactcgcaagttattctagctggccttgtatacgtgggatatacgagttcttatcacttctcgtgagctcaaccagacgattagtagagcaatacttacctactactaggatacatctgcgagatcggacgatccgaaagtcaaactcatcaaagcctcgagactggtagctgtctcacgtgccctgacaactgtactggctgttaccactttggtcgtgccgatcggagtttatactcagacagcctgcccgatgtgctatttat

SEQ ID NO: 356333 - DNA, 120 bp, Zea mays
gtgctacaaacatatatggagtaatataaattagcacacagcgtgaatacagaatgctcattatgcccatggtgctacaaacatatatggagtaatataaattagcagtattttctttcg

SEQ ID NO: 356334 - DNA, 189 bp, Zea mays
ctcgagggccaatctatgcgtccttatatataggaaattagagccaaacgtctgtgtagtggattgtaatagtcgctttttgcgctccgaccgcccaaggaatccgagtttggcaaaactgtcaaattgtaaagtcaacccttgtccacgaataatgatggtcttatgaatggaatatatgcttgtttc

SEQ ID NO: 356335 - DNA, 206 bp, Zea mays
tagcggatattgcgagctacgaccgaggacgagaggtagatacggcgatccgcgcagatttcgttcgatcgtggattggtgacttggtaagagcgagaggagaagcgcgatgtcggcgtgttcggcaggtgttcgggagtccaagggcagaccaggcaccgcgctggctcgtcgacaagctcaacgagaccttgaatgtggaaaga

SEQ ID NO: 356336 - DNA, 232 bp, Zea mays
aggcagttgcgttggacaagctctcatctggaaattgctcggtatcttgaactttttgtgtggcagaaagttagctgatatataaatgtttacttaacctagtatctagtttattagcagctgctaatttgtgtaattgggcttaccaattgcacggttcagaaacctgcactatgtaaggggatgttgatggcaattgacctcattttataaatgattgatgtctgtccat

SEQ ID NO: 356337 - DNA, 285 bp, Zea mays
gctccacctagtttagaatcatagattttcctccctgtgcaagcattatattattgtctttttggattggttaactaacagttctcgatgagtatttgctgcaaccactgttgttctttttcctttttaatctattcaaggattgctagtggccgaagggcactgccaccttcttttgcttttacgtgatgcaaggccattgttatgtattccatgtgtattattacttcgaacatggctagaatacaatggttcagcatcagcttaatccatgggaggatccca

SEQ ID NO: 356338 - DNA, 259 bp, Zea mays
gcaatatatagctgctgagcctactgtctttgatcctatatggcatagtatcagctagtatattctgcatacgcttgatattcacaagtattcatacatacagtgttggagcgaatgcgtatatgatccaatggctgtcacaacattcgcgctgtgctaattagtcagaacaatgcttcttctctacagatcgccctatagtgccaaggtttcttactgtgcctttgttggttatcaagtcgatgccattatacatcta

SEQ ID NO: 356339 - DNA, 209 bp, Zea mays
cgcgaccctgcttcccgtcccgagctcgacgctggcctgatatatagcattggagtatgttggacctttggtggctagtcccgtactcccgtccaaggcagcagagaccatagagcgaaggaggccaaggccatcgctctcctagcctcggagacttgcctttgcatacacatccccccggagtccggcggccggagctgacccctgat

SEQ ID NO: 356340 - DNA, 205 bp, Zea mays
gccgcgacatgaatttctgccgcacctgctcctcgccgcggcgttcgcgctcctcctcgctgtctgcgcttctgcggctagcagtggcgctggatccttcgacccattccgagtggtccaactctcgtggcgccccagtgcgttcctgcacaagggtttcctgtcggatgcgtagtgcgaccacctcatcgcgctggtcaaggac

SEQ ID NO: 356341 - DNA, 227 bp, Zea mays
actgattagagggctgtcaacaaatctcactgtggcttgcaggcatcgatgatgatacctggacactgattagagcaatgtcaaaagttacaaatttgctaggacaggtattatcagacagttactcggtagatgaagttacaagtgcacagactgatgtctgcttacaaatagagcctgtctcatcaataggcactagatagtcctttagctgcacctaattgaat

SEQ ID NO: 356342 - DNA, 251 bp, Zea mays
acgttcttctaaggtcagagaagtgtttcctattggtattatcagttctaccgtcttgtgtagaccgtaacagtgtcgcgccgctgcagaccgtccccatagaattgagcccactgagctgggtttgacgccgccgccatcgttagttaggtcttagtgtccccgcggtcgattgaacacaggttgtagtccaccgttgcctggggatcgtgatggtgtcgacgtcgttgactagatcacaccaccatggc

SEQ ID NO: 356343 - DNA, 244 bp, Zea mays
ccacttctgccgctcgccaggatgaagcctcacgtggagcctaggcagatccctctagcctccttacctctgcatttccttcactctggtacccaaggggcccccactgtgggtgctatgggctggtaagcccggctgtgactgtgctgcctgagagttattcttgaactctggagatgaaacatggtatccagtgtcctagaaatggtgatgggcaggccctgagtgtcatccccactccctc

SEQ ID NO: 356344 - DNA, 269 bp, Zea mays
aagctcgaatcgctcgaggggcgcatcatatgttgtggagcactgctgaggtgcataggctttactgctggtgtgtgggaggctgatggatcctatcatctcactaaacaagatatttgactagtacatcttggtacgtaggtgatctgtgatattgagggggatatcatcatgagacggcgagtcacttggtgctaaatcgtactgaattttgttatctgcgtctcagtctgctgctattgtcccgcccgtattcgattattcccgca

SEQ ID NO: 356345 - DNA, 209 bp, Zea mays
ctcagcgagtgcattgactatagccgtgtccgtgattcggctcctgcgtaggatgagatgagcctgcttacgtgcatgcagcactagtaatttttcagctcccgcttgcatgcgtggggatattggtaggaggctgctctgctgatccaggccggcgcgagcctagcactcacggtcacagtgaaccaatcacgcggagtctgaattgc

SEQ ID NO: 356346 - DNA, 266 bp, Zea mays
gcatggagggatatcaaatggtgaaattatttacttgaaagtggcttttaagccaacagctactatcggagtaagccatcccagctcaaaacttgctttctttgcttgcttaaaatgtcagcagaggcataattaccatatactgccttttgagtgataatacagagaaatgctgtgaatacagttggaaccactaatttgtcagaaacacatactttgtgcaactaccatgaatgttagaatatttactgtggatcaacatctgc

SEQ ID NO: 356347 - DNA, 269 bp, Zea mays
gaagaaacggaagtgttaggcagatgaagcagtggtcttgctcatgccaggccaggggagagcatcaccccgtccacggatgtagatgacatgacctttatggcctccgttggagcggggaacccttcgtctatgggcatctcctcccaccctgataacgctgaggcgagctccattgccctcccggcctcccctggagggcgatgccaccacgacacctgttgccctaacgaccttggcgatgggccccgcgaaaggacattggaagc

SEQ ID NO: 356348 - DNA, 275 bp, Zea mays
cgcgtactgcagctaacggttcgtctcgagcgctcaacagcaggctgcagatctcaccatcattcacgcaacttcatctactatccgcctccagctgcacccatcgagcaccgaactgcggcggcatgattgcttgcggcgaggaggtcgcgactagcggggggatctccgcgaagaccaccctgtgggaggagttcgaggtccagatcgtcgccttcgaccgccactccaacctcctagttatccaggagggcgtggatagcgcggagaggggg

SEQ ID NO: 356349 - DNA, 252 bp, Zea mays
cggcactgctgatggtaagacagctagggaggctgaaggtgaacctacacccaaactggctaaagacgtcaggtgcgacgacaagatgggccagcaggtggaagatgaactggcatccaggattgcacaggatgctaatggtcgatctaaggtgaccgaacacgtcgaggacggattatcaaagtgcaaacttgatgacagtattgagaaatacgaagagttggtcattaggactttccacagggtgtaaga

SEQ ID NO: 356350 - DNA, 254 bp, Zea mays
caccagcttgaggtgctgcttcttgatgatcaccgacagaagccgatggatcaatttttgccacactgttatcaccagctatatctgcacgctgactagttaactgagcactagcatctcctggactccccttagcttcaccagtgggatgatctgctgcttcctcatcttccacttcatcatcactatattgcccaagcaatgctagaggattctcctttctatctgaaaataaaattacatgaaaatttcag

SEQ ID NO: 356351 - DNA, 234 bp, Zea mays
cccactgctaccttcttgcgcaagctcaatgccctagaacaaaccgtcgctgctagtaccgagcccacggaaagtgagatccgccgtcgtcacctcgagccgttggcgtcgcccgagctcaggaaaggggtccaaggacttcgtttgacgctgttgatgctcgccggtgaccgaacgcagcgttgaatcgactgcgccgtcgacaattgctccgcggagttcaaatttcatccc

SEQ ID NO: 356352 - DNA, 263 bp, Zea mays
gttcacagtccatgtgattgattctctcctgctccttctttcttccatctctcctgtctctcttctctctctctctctgtgtgtctgtctggcaaagggcactgacggccgcggcggtgtcgatggagtggtgccagaaggcggtggtggtgccggtgaagcgcgcgtggatcgccgccgccgcccggctgacgacgcgacataagaaagaagtcagtcatcagtccgtgatcctgaacaattcctcacaatatgaatatatg

SEQ ID NO: 356353 - DNA, 269 bp, Zea mays
ctccaaacaaacttattggtgctcatgtcaactcctgccagatgttttttgactgttgaaggtgggctcctgcgtgttaaggtcaattcaaggaaatatactgagttttggcaaaatttcagaagttgttgttacgttagttctaaaaaaattgtgtttttttgtaagtttttttctcattttcatccatccttaaaaaaagcaaggcgtcatgttatacattaacacatatctttgtataacttttggtgataatagatcatttttta

SEQ ID NO: 356354 - DNA, 280 bp, Zea mays
  unsure (1)..(280): unsure at all n locations
taataataaaagcataaatatgtaaggatatatgcatttttcaaagcaaggatctttttgcagtatttttattagtggtaaaaaactggaaacaaggtgtgaaaagttgaatacatttgatacattttggccttgtaacatgcggtcattaaaaagaatgtagttctgtgtataccaattaatgtagatatattccactgtttgctatgagatgagataaataagatgtgaaggagcatatatggngacaacttcattcccatagaaacataatagaatt

SEQ ID NO: 356355 - DNA, 253 bp, Zea mays
gagaaagggcacgacatctgccggcagggaggacgtggccatggtttccacggaagtggtgagcctcaagcaggaccagcgcaccattgacgatcgtgtcgccaccatgtggcgtcgagtgcaggagacggagcgcaagcccaggcaggttctcgccttcctcctcaaggtcgtcagtagccgcgacaggttgcacctgctcattggcgacgttgttgcgccagatgatgggttcacctccagcggaaccgtc

SEQ ID NO: 356356 - DNA, 269 bp, Zea mays
gatagctaaagcgccagcttccagctttcggtcggtcggaggttcaaaccccggccgttcgcatttgcgaaaattatttaattttcgcatttctgtatgagaggttaccctcttcacaacctttcggtgaccttgtgtcaccaaaaaccaccatcgcggctttgtgctgccctttcgctttcggctgcgtccgacatttcaaatcattctctgtctttgagtcgagctactgtgctcacctctgtatcttaacttattagttaattata

SEQ ID NO: 356357 - DNA, 235 bp, Zea mays
gcacgtgccctaccacagcggttgtgaaatttttcgctgaactggatgctggactcttgcggtcttgccttactgagacactgacgataagataagttgtgtgtgtaacagcctaacaggggatacaatagtgctgcctagggcagcgggcgaacaggcacactatcgctattacgtttctagcagccaaactaaatatgatgctcttatgcatttgctgtagagaagctagctt

SEQ ID NO: 356358 - DNA, 264 bp, Zea mays
tagagcaaaggctgtaccttgtggccgctaaagcagtagaccaagctgactgtagaacttaagcaactctgatcccagccacggcacacggcaggatgaagccatcagctccggtttctggcgccggatttgcgatccgcgcgatgtcttggtccgcgcccgacgacatcctcctcttcaccttactcgctggcttactgcacaagaaacttatatgcctgctcagagatggacggatacttcttgtgaccctctgctcatttg

SEQ ID NO: 356359 - DNA, 220 bp, Zea mays
  unsure (1)..(220): unsure at all n locations
ggcctcagggacaggagtctggaggggatgagagcgattttgacttgtagctgtagaggagctctgctgcccatggcctgctctagggccctgcgggctgcggcagccaaccgagggcattctgtggcctgtggccctcaattgcttctcttctggtctatccaactcacatgtcggcgtcttagcaactganaactgtggccatgtttgcttgatacct

SEQ ID NO: 356360 - DNA, 210 bp, Zea mays
gcgctggaggagatggccgaagccgcggagtgcgaggaggagcaggacctgtttgccgatgcgaatgacgacgtagggatcgctggatcggaggtcgcggacggcgaggttcacccccctcaccacgcgcagcttcagcagcccgacgagatggtccagcatgaagaagaaaagcagaaagttctttactggcacaacgagaagctgaca

SEQ ID NO: 356361 - DNA, 234 bp, Zea mays
  unsure (1)..(234): unsure at all n locations
aggatattggtaacattttacatagtggatctattggcgaaataactccatctggctctggnttatcaaaagattcatatgtggagtatagaggggaggttttagatggcttctcaatggaagcatctcttgacaggtcttctacacgtggggaacaaaatgggtgtagagatgctattgagaatccaattactctagcaacttctgggtataagcatgaaggnctntatctga

SEQ ID NO: 356362 - DNA, 197 bp, Zea mays
gcagacttccaatctcttcccatctgccgcgagttgctacgctctcacaagaactcgctcgacccccaaacccctcttgccctagcgctccccgcccctgcccctgcccctcgccgccggcgagatgatccccgtcagttccgatgtcgctgcggagctgcgccttctgcttgaatgcgctacggactccaacttcg

SEQ ID NO: 356363 - DNA, 170 bp, Zea mays
tcgcgtacggcagctaagagttcgcctcgaggctcctcgttcgcctcctactccaagttctcgcagcttcacgatctctactgtaacggctgttccatcagcgcgccgcggacgcctacatgcagctcttcaacccgcacgcctggcatcatgactgactgggagaaccc

SEQ ID NO: 356364 - DNA, 211 bp, Zea mays
gattttgaatgtatcaagtaataggcttagggcactgccagatagcatctccaagtgcaggtaaataacactatatattttctctttgtttgggaaattatattacccaactgattgatatcaaacttcaggtcgctagttgagcttaatgtgagctataatggttttacttatctgccaaccaacattggttatgactggtaaaatctgc

SEQ ID NO: 356365 - DNA, 216 bp, Zea mays
ctcaaaacaaatcttcccaacgcgggacccgcaaggctgcaactgcggcatgcagatccgcagagcacacacgggcaccgggcgcaccagtgcaccaccgcatacggccgtgcgcttcctttccttcccccgccgccgcagatcttccccgcagtcccggttcccgttcaccacctccgaaccagaggaggaatggccatctactccttcctttct

SEQ ID NO: 356366 - DNA, 121 bp, Zea mays
gactggcgccggcgctgccagacttcgctgggcatctcgccggctactagctcccaccatgattagagcaggtgatcgcgacgagtgacatctgcctggcgcgcgtgggtgcccgagctgc

SEQ ID NO: 356367 - DNA, 166 bp, Zea mays
ctacgtcatgctcccacaagatgaccctcggtgcccccagtgcaagagccctgttctccttgactttctgcaggacaacaacaacagtaagaacaacagtaataatagcagcaggaggagcaggaggggatgagcaatatggttccataggcggcacgacatcagg

SEQ ID NO: 356368 - DNA, 291 bp, Zea mays
  unsure (1)..(291): unsure at all n locations
gtgtgtttcagcgttcacggagacgatggaatgaagtagcaatcgttggatggcttggctggttgctcgtcgctttccctgcctcccaaggcccaggggcaccttgcccaacttgcgaaagtatagatagatcgccatggaagcagccacggccatccaggtcgctagctagctagggcggcaagccaaaaatactgttatctttgccactatgtatttatgatttgtgaaatatcccagcgcgggccggccggntcttgtttaagcgggattaggagcatgattactcgg

SEQ ID NO: 356369 - DNA, 195 bp, Zea mays
gcagctataggtggattcaaagaaaagcataggagagcaatatcgatcgaggtaggaatgcagaactcgtccctaggggtagttttagcaaccgcgcatttctcctcgcccttggtcgcgctgcctcctgcagtctcggccgtcgtcatgaacatgatgggaagcacactgggtctcgtatggcaatataccagc

SEQ ID NO: 356370 - DNA, 221 bp, Zea mays
  unsure (1)..(221): unsure at all n locations
gctagatttggggggagagagaagggagtcggcgcgtaggggcgctgtagggggcaccgctgcggccgtggagtgccccctacagccccatgcaaggggagggggatgacgagggggctgcgttgcgcacagcctcagatctacgcaccgtattcagctggttggatggcaccatgcacggcggcaggtgcagcatgttgngtttggtgaatgatttaggg

SEQ ID NO: 356371 - DNA, 188 bp, Zea mays
tcgaagctcgaattcgctcgagctcgagccgctctggtagagatcctgggatagtgcctcgcaacattctttgatcgtgcagaccggaagtgttgtggcgtctgaccatttgcagcatcattgttcatatcaatagcttcaggttcaggaggatgggggttacgaagcactataccaggatctttacc

SEQ ID NO: 356372 - DNA, 281 bp, Zea mays
gggaaccccaaaaatggacaagtgcctatgacgaaggcggatggaggttcgagttccagactagcaacatggccgagctatctaacagtgtgctgaagggtatacgcggaatgccagtcaatgctatagtaacattcactttctataggctcgtggcttgggttaatgatagacacgcacaggccaaggcaatgcagacgcgaggtctgagatgggcacctaaaccaacaacacatgttaataatgcaaaggaacgggccaatagacatgaggtacaatgc

SEQ ID NO: 356373 - DNA, 183 bp, Zea mays
gttgcatcacttgaatatataggctcaggttgccttgcatgtataggatttaaaacgtagaggaggaaaatagagtgcgtcacattctggttgtggtcgatgaggcctgtacttaaaaattcacaattggataaagcatgtctgctatatgcttcttgcagttccaaaaggaactcatgtaat

SEQ ID NO: 356374 - DNA, 220 bp, Zea mays
atgattttcaagattttatgtgtgcatatattgatgttccacgctgcttgagtcatcttcaatgtcacgtggacctggactccaatgagatggcgtacatttattaattactaaatggattttatgcttttagagtcagaactaatcgtcagctctgaaaatggtgccatttcttactcatcaagccgttcagatgctaatgactcagcttcttccctat

SEQ ID NO: 356375 - DNA, 286 bp, Zea mays
  unsure (1)..(286): unsure at all n locations
atctaggctgctccttgctctttgcccaaatgtgaccacacgtgggatccagctagccacagcacagttgccatgtcttcaactcatggactgtggaatgagcctatgtgctaatgtgaagaatgaaaaagagggtccatattttggtgaaatcaatggaggtattagaattattcgaaaactgtccatcttaaagaggcaacctattcaccanaagcttattataaagcatgggaatttgaagaaagctcagcctgtggggctgtctgcattagatgctctatat

SEQ ID NO: 356376 - DNA, 249 bp, Zea mays
agcttcatcatgttcctcagaagaaatgccacgctactccactagactggtgattgttcagacagggctagctcctgggtgcggcatttgtgctagctcggcgatctcagagggggcacgccgagaacgacgtctaactagcggctgttcttctacatcttcaggctcctcttggaagctctcttcatctattggttgcctagatgctccagcctttcctgaagctgtacttgcctctcaactatgcca

SEQ ID NO: 356377 - DNA, 144 bp, Zea mays
cccttctggagccggctgcacgaccacttccacgcgcaccgggacttcgcgtcggagcgcagcgagaactcgctcctgcaccgctggtccaccgtccaggacaacgtcaggcgcttcgaccgctgcgtcgccgacgtgtcggga

SEQ ID NO: 356378 - DNA, 271 bp, Zea mays
  unsure (1)..(271): unsure at all n locations
ggaagtttcatttgatatgccanagtacgattgcatgcccgtttgtcgagggatgcatttgctgcactttgcccctggtggctacccggcagctgcaaaaatgctgaatctaagtagctctgctgtatctgggccatcaagaactcatgtggatcatgccgctcttaccggtgcctctcatccagcttctacggtcaagacacgcatgtgcaccatgtacaacactacagaagtgctgcagttcggggatacgtgccatttcgctcatagc

SEQ ID NO: 356379 - DNA, 114 bp, Zea mays
cttcttctgtgcttcagaggcatcgttgtacaaagatgcctctgaagcacagtagaggacgaactgtttctcttatcaacgcatagactgtcagtgctgttaaagaaaaagaaa

SEQ ID NO: 356380 - DNA, 148 bp, Zea mays
cgattttgtatatagacaggcttgcctctatttgccgagccgcttcgctgtggacataaactgtacagatattatttcgtaggatatcctagacgttaaatggcaccatgccgtgtaaggctccaatgggtgcctggccagatcctcc

SEQ ID NO: 356381 - DNA, 211 bp, Zea mays
attagggaggaataagcggtagggagggagggaggcagggaggcttgtaatgtgattctctgtaagcaagcagagcagtagtcacctgtacggcacgggctgtggcgttatgtgtacagggtaaagcagggaaagccatctcatcatgcgcagcgcagaactgtacgcaagtagccgttgctggcgtggcgtatgtatgtgtatacacaat

SEQ ID NO: 356382 - DNA, 232 bp, Zea mays
aaaacgccggaggccatggggttcgactgcgcgcaccgctctgcactggacgccatgggattcgactacgtgcaccgctctgctgtagacatcgtcatcgtcgatgtcctcctgcgctacatcacccacctggactggtctgccgccttccatgccaacctcgccggccacgcactcgccaacgagctcgacgttgtacaggtgctcgcaggtggtcggcaccgacacggac

SEQ ID NO: 356383 - DNA, 264 bp, Zea mays
cccgtttccaacctcacaccctcccttccattggagctccttcgtctgagctaaacctaaaccctaatcgcgacctgcgttcgtcaaaaccctacctggccatggacggcggaggaggaggcgtaggaggaggaggcggagttgtagcaggtgacatggtgggtggcggagtcgtgccgggcggcggctgcggcgacgtggaactcgtcagcaagacgctgcagttcgagcacaagctgttctactttgatctgagggagaccc

SEQ ID NO: 356384 - DNA, 181 bp, Zea mays
ttaaaataataccatggggccggtctttcccctatcggccaagttttttaagatcatgataatggcaaacttaatgtgtaatacataatatttgtggttaacttttctatcataagaagtaactgagatatcgttactttcaactagccggtatatttactacaatgagtgtttgcgatat

SEQ ID NO: 356385 - DNA, 226 bp, Zea mays
cgccggctccccagcttgcccctgctccagctcgcctgggcgcggtcttgtcttgctgctccagcgcgccaatctccctgctcggacctgtgccttttccaaccgtgcgcgctgtcggctggccgtcaaccatgcctttcctgctcgccagcacttatttagtcatctcagctcgccggcgtcgtgttctagtcagcaccatgttctgcgcgacgcgcgctccagt

SEQ ID NO: 356386 - DNA, 99 bp, Zea mays
tgagcagtgtcgggactatgttaaagagctccatccagatctagtaggcctcacgggcacgacagatgaagtcagacaagttgcacgtgcttatcgagt

SEQ ID NO: 356387 - DNA, 260 bp, Zea mays
agaagctcaagagaaatggaaagaagatggatacccaaagatacaacttggtaatatgaaaattgagcttccacttcacttcttatctccggctgctatcgctggtgctgctgctggaatagctggcacattggcatgccatcctctcgaagttatcaaggatcgcttgactatcaatcgagaggttaatccaagcattagccttgccttcagcaagatctatcagactgatggtttaggttgtctctatgctggcctct

SEQ ID NO: 356388 - DNA, 187 bp, Zea mays
gttctagatcgcgagcggccgctcgcgatctaggatgcgaagcggcatcgcttatcgatgatatgtacatgcctgtaactcgttttcttgtatttgttggacattgtgtgtgtgtgtgcgtgcgtttgaattgtgatgacctagagaacgctggtgtcaatcaatgcagcgtaccttgtttcaaaaa

SEQ ID NO: 356389 - DNA, 202 bp, Zea mays
gcgtacgtgcagctagtcgttagcctcgaggatttgcactactacgtttgtcctagtcgcagaatgtatcgatgaaggtagacatggctatgccctaagatgagacgcatatctataaagaaaaatgagtagcagcgggattctgaagctgcaccaaatggggatgccttcctgaggtttcccaggccattcaactcttgca

SEQ ID NO: 356390 - DNA, 141 bp, Zea mays
ggctgcgaagggcacaatggatggcattatgaacacggcctctgcaagcatgtccatgtacgcttaccttgctctcctcaagccccagggcaagatgatcctgcttggcctgcctgagaagcctctgcagatctctgcctt

SEQ ID NO: 356391 - DNA, 263 bp, Zea mays
  unsure (1)..(263): unsure at all n locations
ggattcggctgagaccagccgacgacgagaacaccttaggcgagcgcgcgtgctcttatctagtcttaggcatggtgatgtcaatgagatcatggagggaaacctgtactccgagtgcagtgcagttcgtccgtcggcattcgcgagaccttttccacttgtagattgtaggttntgagaccgagcaggattagttctgtatctaaatctgacagtctgattttttcccccgcacacctgtgacctggagctacactgagctg

SEQ ID NO: 356392 - DNA, 261 bp, Zea mays
agaggcctgacttctggcagatcgtgaaagtgctggaacaggtccactccgatctcttggagggtggctgcctcgacacaccgaagagcggccccggcacctgccaggatcccaagaagcggctcatgcggtggattcagaaactgaagccgaagcatagcacctgagttaccaaactcttataggtgtagcatcgttgcagccgcagtttttgtcaggttgggtatgctcagtagtttaatctcgattcaaggaaccagc

SEQ ID NO: 356393 - DNA, 264 bp, Zea mays
gtggcgttctcccccctctctatcttgcttcgatggcaaaagtcaaacactgtttattctgggaaagtaataataagaaatgagttcaatggctgggaattggcaactggcccaagcaaccctttttatcgccacctctatcggtcctcgtcccaagtgcagtacagatgtacaggacctgtacttgcttccttcctcttcctctgttctgttctccatgtgaagaagtatcgaggtcagccttttcttttatgctcagtgact

SEQ ID NO: 356394 - DNA, 216 bp, Zea mays
agttaataagggggcaggttccataagatgagaagcgggagccgagtcttcctccaattgacgaatacctttcctgtgctgaacagagacgtaagtccttgcctggcagaacgagccagacattcaggtcccctgcccttaagttagcatgaggaatgtacctaccagtttacctttacatgttcatatatcacatatagtattaccgaatgtagt

SEQ ID NO: 356395 - DNA, 211 bp, Zea mays
gaaccgcctcaacccgagagtgtttcatcccatagctcccgtgttctagctccctctagttgtactgatgctcctcgacttgaccgtttcagctctaccgttgcgtcttcatcgggacaccgcttcgccgccggtgtgcactgttgaacgccgcccgacgtcgaccgtccgttctacgctttccctgtttgtgtttgtgtgagcatcgagt

SEQ ID NO: 356396 - DNA, 159 bp, Zea mays
gcttggctctctgaatttgaaaattagatccataccaatagcctggatgtaataaacacatagacctaggaggctaggatcatctgcaacgccttctgttctggcaccaaaaaccaaaatatgatattttttccaaaaaaatatcatgcgagctgatgt

SEQ ID NO: 356397 - DNA, 258 bp, Zea mays
cttccctgagctccctcccaccgcgcgctctcctgctgccgctctttcccggcgtgtccctgctccagcgccgcggagctaccgcgacacaagtgcatctggtgggcgtccgcctggctgcataccctccggtctcctccctcaagcgccgcttcttcgagcccgtgattggagatcctcgcccatggctctgggctgccagctccgagctcctacctgcttctctgctccagcccgaccgccctcacctcatcccct

SEQ ID NO: 356398 - DNA, 261 bp, Zea mays
aacagctcaacatgtagctaaaaatcagctgcatcagaaatattaagctaatcagacatgctggcctatcaacttatttctgggataaaaaactgagatccttaaaaaagaataaaatattttacttttgttgcagcctgctggactggaccccgttgtgttcttccgatgatcaatcagtcaatcacaaattcaaaccatacatattacgagctcaatatccagcgtgcttttggaagggctgttcaaggggtggagtga

SEQ ID NO: 356399 - DNA, 192 bp, Zea mays
atcctctgcgccttgtactgctcgctacatcgcggaagcttacctctgttccacgaactgagagatctcggacggacccacccagtacccacaccggacggccgatagagccaagaagctacatgcacgcagacgtcgacagatatctatctcactcgcacgtagacgaatgaacacctagcgccactgtca

SEQ ID NO: 356400 - DNA, 301 bp, Zea mays
tcgcctcgagctgtgctgaaactttgaccatttgaattctctgtgctgacgtgaagcgaacacagagctaacattcacttgcgctgtctttcgtgtggagatgcataaactggcagagctcctgagtcagcaatacattcgggctatgccaagatacagacttcacttttgtcagtgctgaatctacatagaaacttaagtggtaatgcttttggaaaacacttacttatggaacatttgaaaagcgcttaagatggctttgaaatttctgaaactaaatcctgcatttgtaatccatggg

SEQ ID NO: 356401 - DNA, 196 bp, Zea mays
acatcaacaaagcaggttagtttcccttccatcaattgaaacggattgatcagattagttgagctcggtcgctgctgctgctgctgctgctgacacgcgctgcgatgagctgcctacgcttttgcacgctgcagcttgttcttcttatacctgcatgtgttagcgtttttaatgaataaatatacttcttgctgtc

SEQ ID NO: 356402 - DNA, 236 bp, Zea mays
tgataagggaagggatggcggtgcaggagcttggcgagcagaccatcttctaggccttctccattaccagtttccgggagaaagaaacttgtagtagattctatgccgacaatgtacttgtagaaaggtgagctttttgacttgctgatgatgtaaacacgactcgcgattcaatcataccaaagtatgatgattgtctaatttggaggaagagaaatgttttgacttgttgcttc

SEQ ID NO: 356403 - DNA, 174 bp, Zea mays
cgtctatatgcagatcagtcgccgactggcgagctcgtcgaactcctatttcatgcagcaccgggacctagaggcctaccagctatccctatcgtgagtcaaattccagcttggcgtcatcacggtcatagctacgtgctgcatgatattgtaatccgctcagaactctacaca

SEQ ID NO: 356404 - DNA, 305 bp, Zea mays
gtttttgactggctacatgaatttgatcgacgacaacggggactagcaggtcagatgaattgaccgcattgcagaacaagcgagtaaaatttgcatgtgacaagttatttgcaaataccctagctgaaagatatttgcacatggacttgggtgctgagttcgagcttgatagcatcaagaaattgtcaaaggagtatgcagaagcaaaggaactggcccttgcagaggcaagccaaactgtcgaagttgacgatgctaagcacctccttcagagtgagaggctgttgggcgacaagatagatgaa

SEQ ID NO: 356405 - DNA, 185 bp, Zea mays
ctcgagccgatcgcgagtggccgccctttttattacgctgagcacttccaagacggactatagggaatgttaggaatcgggccccaccgggtccttccgggatcaagggttccgggagctatctaataacctgaaactaacggtcttaatcctttaaactctcaaaagtcccctgaaagccttgc

SEQ ID NO: 356406 - DNA, 297 bp, Zea mays
ctccgtgctctctctccctacgctggggagcggatcaccctggctccagcttcccacatcgatgctccttgccctgtcgttcccatcggctgggcgctttgcgtctaggaaaaaccaccgcaccagctcgcgcgctccctacccggccgtgcgtccctgctccctcgccacctggtgcatgcgcgcggctttctacacgccggacaacacttgtgcttggcccctgcgctgaaccctgctcagcttctctagtgccggccgccgctccaagtcctctactcgccgacgccatggaca

SEQ ID NO: 356407 - DNA, 306 bp, Zea mays
gtcggcggtgggcgctcatgcagtgagtggcgacgcgactgagtgcggtggtggtacggcgagcgagcgagcgacacgagctgagtgagtgccctgcaagcccaagctcgtgacatagacaggacttcagctcgactcgcgcggtcgccttgcctgctgcacacgagccgtcgccaactcgatcctcaccgcaatggcgcaagctgcttccggctccagcaagatcgacaccaaagctcccacctcagccgacgaggccgctcaacccaagagctacgtgcgacctgtatccactctcgcggctag

SEQ ID NO: 356408 - DNA, 297 bp, Zea mays
agaagtttgaagccgaagaaaaacgtatcatacagaggagagcacgtgatgatgtccttgcaatgttggaagaacgcaaggagcttacatcatcagcatgatggagcaaagcaatacttatgtttgaagatgatgaaagattcaaagcagttgagcgtccaagggagcgtgaagatttatttgagaactatcttgtggaactgcataagaaggtcattagatattaaacatttggccttgtgactcttttcactgtggtagttcgtactgttgacctctgaagattcatatatttct

SEQ ID NO: 356409 - DNA, 140 bp, Zea mays
aatatttggaatgaccgtcagcctaaatcggctacagggccaatttctagtcatctacagccgggttagaacggacatcatttggtgggttcactggtcacacatagaacaaatgatgtccgtctagttctagatcgcga

SEQ ID NO: 356410 - DNA, 309 bp, Zea mays
aggactctactatgcgacagtgttctgccttgtaactgtcggcagagctagatggcactctagaacttggtaccactttccctgcatgaacagtatgaccaatgcctccatgataatgatcattcaatccaccatcaacgtttgttaggcagatgacacccttaaagatctgtctatcttccttggaaccatcaaacgcatcctatgaaggcttcggaacttttttcccagacaagcattgtggcaatgtcctcctccttcatccctatctccgcaaacaatcctttcccatgcatcttgctgatcaac

SEQ ID NO: 356411 - DNA, 231 bp, Zea mays
  unsure (1)..(231): unsure at all n locations
attttgtactatttagcgacaaataaaacgaaacggagggagtaataaaataacatccactacatgattgattaacaaataaaaaaagggggggcggctaatttgggagctcgaggaccggaatattaatccgggacggttacctcaggggttcccagcttcccttatggggagcggtataaaacctgggggaaatcagggtaatactgnttcccgggggaaaattgtttt

SEQ ID NO: 356412 - DNA, 293 bp, Zea mays
gttctagatcgcgagcggtcgcccttttttttttacgcaaaactagaatccttatatccatgggcctctatggtacgcgtgcatacagacaaccctggttgttgccccggttgacaaactgacccctattggacccacatgtaaaacggaggcactagatggactagttggggagccataaacccggagggattgggggaaccaaaaagccacttattattcaaatttggaataagatgcgtattttggcctgtccattgtgctttagttctgcggctccaaactagcccgaa

SEQ ID NO: 356413 - DNA, 264 bp, Zea mays
gttctagatcgcgagcggctgccctttcttgattaggccctgaaccagttcggataattttgggggatacgataacgcgtcaaaatacatgttagcggtttacaaagtgccccctgagaaaattgcaacccaaccgataattccaactgaaaggatgggacctacttgtgcctaactgggcctttttgatgacacccttgtggctcacataggacccttccaaaaacttccggaatccttcttctagaagggatttcgggtaac

SEQ ID NO: 356414 - DNA, 189 bp, Zea mays
ttcagatcgcgagcgccgcccttttattattatttcgcagaggattaaaatgatttattgttttcaaagggaaaaaacccaaatggctatatcaataaaagggtctcccagaaatgccatttcatccaaggggaaaatttgaaatatgaacaaattgctccgaaaacaggctgtccaaactcatcatga

SEQ ID NO: 356415 - DNA, 251 bp, Zea mays
gtaactgcaagcagaacacattaagcctgctttccctcttccttgggcttgcacttatttttttacttggtgtagcagaagcatgaaccccaggggaacttaaaccaggacttcattgcgccataaatctccgaacctttttttgggaatgtgccccaagggattggcatcaatgaaaccttcacatatccgacgtgtaccccgtttcagaggacattatgatttatagggtctgtgcactatatatgggc

SEQ ID NO: 356416 - DNA, 241 bp, Zea mays
gcctgacagagtcactccagatctgactagctagaaggctcgttctcttccgattacctgtacggcaggtcgccattctagaatacagctcgcaagagatcgcgctcatccctcagacatcggctagcagctagaccttcaggaccttgctgcattcccccatgggaggcgccatgaggcagctgctacgctttctgggagcgagcaatggcctccccagggagaagaagacgaagaggac

SEQ ID NO: 356417 - DNA, 203 bp, Zea mays
gtcgcaatggtagctatgttgtttagtgaccaacaggtctttggttcgaatcttcactgccttatagttttttttcaacctttttagttttaactatctctatttttttagtctacgtggatctagagttttctccaaagtttttatttttttaaaaaaaatgaattataaaagaaaaaaaaaatttccaaaaaatatatcct

SEQ ID NO: 356418 - DNA, 233 bp, Zea mays
gtgatcaatgcaattgttgaagcacagtcatgcggtcttgggcttgctgtggataagatctccattggacctaacttgccaactatatcctttattcatggaaaaagtactcttttagggtacgattgggagtaaggggcttagaggggattgaagggactaaaatctccttgttatttattaaaattgaattgaaatagaattttagcctgtaaaatctcttggctcccaaa

SEQ ID NO: 356419 - DNA, 246 bp, Zea mays
cgcagctgtgcatgtaaatccccgtgagtcttgttagtcttactcctgtgacttgtagcggctggttctagggggatatgggtaaaagaatgcttagggcaattgcttggtttgactcttttcgggataagaaacgggttacatgataatgtatccggcacgagagctctacattatcatgtaacccgtttcttatcccgaaaagaaacgggctacatgataatgtagagctctgtaccagataca

SEQ ID NO: 356420 - DNA, 259 bp, Zea mays
aacgaagagtatggtaggccactgctagacagggaagcagctcaattttcagcagcagtttgaccaaaaatatctgaagagccatgtgcttgggagactgcatggagaagcataggagaaagatcgatctggcttgtctgatggtctcaaagctacagaagcaacatgatccacttcacctcatggcttaaagaacactgtctagcttgccttgtcaggatgctctgtattagtgatcaacaaatttgagatagggaga

SEQ ID NO: 356421 - DNA, 266 bp, Zea mays
gcctaagaggacggctaggcccagtagccgtgttacgggcccagaatgtgcgcgctagaattgtatctcgctaagcccatgagcttctatatgtatcgttgtatccgaacgagacgagaacaataaaagagaacactcatttaccaccatcttcttctctaagcttctctcctacctgtgcttccctgctcttccctctgcctccgtagcctctgctaacagtgatattggtggcattgatgcattaattttttacacttactcta

SEQ ID NO: 356422 - DNA, 280 bp, Zea mays
cgcatcccggcgccgacgccgaggacccgcaaccggcccggcagctgagggagagcttcatctccagcgagagtcgcaaaccctccatgagttccccattccccaaccttctgattttgacgccgggtcgtgggcaaatcaggtagagcggctgcggattttggcgcccggcctcgggagtttgggagcttagcgactccacagtggaagactggtggacggcctttgcccgcgctgcgtcttcccctgcttcgcgatgggaggctcccctgtatgggac

SEQ ID NO: 356423 - DNA, 284 bp, Zea mays
gcaaaagtaccttgctggttatggagaggtcagctgaaggttggaggtttgactatgttcgatgtttatgatatgttatatggctgatctgatgtctatcaatggtgggtgaagattgccacgagattaatttgaagcttgatcgtccttaattagaaaaatgttattagcaggatcaggtggtgatttggaggtagatttaaacattttggaggtggattgaagctttgactggactgaagtttattgcatctggagaacatcatttggctctacctctattt

SEQ ID NO: 356424 - DNA, 246 bp, Zea mays
gtctggtggaacacggacaggctctgacttcgttcgagaccatccatttgattcttgcaccggttcttttctcagttcaggtgaaagctagcactagatgcctacacggaatagaaggttcaccacagtccacagtcgttcatccaagcagctgtgtagatgtcgcctccttttattttgtcccttttctggttgtcatgtccctttttctggttgtcacgttgagctcttggtttgcagtttcat

SEQ ID NO: 356425 - DNA, 270 bp, Zea mays
cacggctggagataaggattgcttagcgctgaaaatatccagagagcagatgacttgctgcgcatagaagaagaacgcacggctgaagataaggattgctgagcgctgccgacgcgggaggaataaatctggatttttttccacgggctgcgcgacgcttggagaaggcgagcagagagagatgagcgccggactggagcttggtcgctggaaaaaaaaaagatcagccggcgactgcaaaaaaaatcttaggcggatgaggatgaacga

SEQ ID NO: 356426 - DNA, 275 bp, Zea mays
catgctcggatcgagtgcaagcgctctctcctctcacacacagagtcacactacactccccggatttcagcagctagctctcggtctaagcaggcattaaaaccctatccttttcaggtcactctcgccttttcttttccgttctccgttcactcctatttccggtcgtttgcacgctcgcctcttgagtcttgacacgagctcccacacgtacactgcataaataggcgagcagcgggagagagacgaccgacgaggacgaagaggaattaagc

SEQ ID NO: 356427 - DNA, 275 bp, Zea mays
acgcacccaggttgtcgtccttctcaccgcaccaccaccacggtcactgctgcgacgatgacgagggtgaccgtcgatgcctgtctgctgccacctgaccagtacggtcgcgtgcccgtcgactcggatccgtacgcccagctttcgtgacaccgatgcggcacccaaggagggtgcctcgcgggggacccagacctccacctctgcgtcgtcttcaatggctggtagtgatgtggcgtctctgttgctgcaattgccaagtggatgaaacagat

SEQ ID NO: 356428 - DNA, 264 bp, Zea mays
cttttctttcgtcatgctcgcttcacttgcggagaagggtgcattcccccctgcctgcgacgccaccgtcgcttctttccagcggtcccgacgactctctcgcagcggcggcggcggcggcactttctgcgagaatctgttaaacgctggccggtccatccggcattggatgatgatgatgactgcaccagctgtttgaaatgaacgggggaaaaatgcagctgcgagaatctgttaaagcgcttttgccacgagagcacgttt

SEQ ID NO: 356429 - DNA, 111 bp, Zea mays
ctaatctgttctcgtttagaacctgtaaaaggttccgcactcgccagtcgcaggcagcactctgtagcagccatgtacgcctgcagagaccggacaagatgaagaagcggg

SEQ ID NO: 356430 - DNA, 277 bp, Zea mays
aggacccagcggccagcactactgccaggctggcagcccgcggaggtccagcgctagctgtcagcaccaggcttccaggtctctagtgactcgatctcaagcaaaggcgtttcgcgatgtttatcatggatcgatcgatcatggcggatggggagacatcggcggaggaaaagaggatgtggacggggccaccagaggcgcatgagttggaggagacaaagaggatgcggacggggccaccagaggcgcatgagttggaggagcgcctggactctct

SEQ ID NO: 356431 - DNA, 200 bp, Zea mays
cacgacgagaacccgagaccaatccagccgtgcgctgcgccttcgccttcgccttcgccttcggctcgcctagtattccctccgattcagaggccgatggagtgcatcgccgagatgccccgcgcgccgctggacagcaggctgcgcaagcgtcagcgtctcggctgggacgtcggccctgccgagatgtataaggccgt

SEQ ID NO: 356432 - DNA, 152 bp, Zea mays
ccaccaccaacacacacacaggcataaacacattaaggtcaacgacacatggctgacaatgcctggctagtaggcctgctcttggagcagcaccagctgcgctcaccagcagcagcatcaagagcaccatctcaaatcacaagctagggcac

SEQ ID NO: 356433 - DNA, 276 bp, Zea mays
gttgacgagtacttcgatctggtcgggtacagttcctactgtgacaaccacatcaatagcaacacgaaacagtacgggatgcaagagcagcagctcctgctgcacaaggagtttggagacaaggagggaagcgagtacgtggtgccttcacaggtcgggcagcagcagagtggctatcacagagttattgggacggagcaggctgcctccatgacttcccgggtcagtgcttacacagattccatcagcaacagcatctctttctcatcgtcaatg

SEQ ID NO: 356434 - DNA, 279 bp, Zea mays
ctcagttgtcagcccatgtgacggcgtcggctcctcagtagtctgcctgccctcaggagggcgacttgcatcccggtccggatgtgatccttcgtaccctttgagtttcagctaagcgagtacctactacgtactagctgtatctctgcgacgtgccggtgctcgcacgcaactacggactagcatgtattattcggtcgtcgtcgtcggtgttaagacgcagacgcagggagctgtacgtacatacagctgtctgtcatgtcatgtgctgttcaaggc

SEQ ID NO: 356435 - DNA, 200 bp, Zea mays
ggctccgtcgtgattgacggctgtggtaaggaaacttcggggttggagtgggtgcactgcattggaaacctccttttttttttcctccgtccggtgaaaggcgacttgaatgatgaactgctggattaactagtttggcgttgagaattgaaaaaaaaaaaaaaggggccgcccccaattagagacttcttaaccccggg

SEQ ID NO: 356436 - DNA, 272 bp, Zea mays
gacgcgccctgcctactactgtctccgcctccgctcccttagctgcccattcgcctcactctcgtctcgctctcgcctgccgcctcacctggccccgctccggccgcagcagccgccccagccctccctccggaaaatcccccaaaaccctaaataaatcctcgatcggaatccacggatgggaccgcggccggcagctccgtagtggactggaggtgctcggtcaggctccgctgcccgtttgatgccgctctcggaagcctcctgcaagc

SEQ ID NO: 356437 - DNA, 128 bp, Zea mays
atttgtctcaggcattctaaccagactccacatttctaggggcgttttgtcccttctcgagtatcgccttgactacaaattataagggaaggcgcgaatttacaagcctgtcgtcctgatgattaatt

SEQ ID NO: 356438 - DNA, 262 bp, Zea mays
gttcgtttctgttatgcagatggacccctttaatggtgggtcgttcctggcaaagaaattcagttgaagaaatcttaagtagagaaccagagggccggatacacactcttccttcaccttatctctgtcttccactcatgagtatcatgaacattgccagggagtgtggatggaggtatctaaaccagtcacctgtttgtatcgacccttgtgctgtctgcttagaagggagctggtccgttgctgcagaaggttgcaaaca

SEQ ID NO: 356439 - DNA, 260 bp, Zea mays
tagtagcatgtgcaatcaatgctatatgcttttcaccaagcggcgaggactaactgttaatgcgatgctgcaatagcatatactaccattatatgccagtgggttgctaacgatcgatacccggatcatatgtaggtcaccgtaaagatgcggagatagtgatccacggatctaggatgatagcttatcacgggctcgcactaaacatacaacctgaccttgctccattcagaatgattcgatccttgctgcataaagga

SEQ ID NO: 356440 - DNA, 243 bp, Zea mays
tcagcagcagccttcttagcagcttcagacatgatcggggagacttaaaaactgtcttcatatgcgaggcttctaagcttgaagcttcgcatatcacagctgcacaagagcgtaaaaattgagagatcggcagtgggcggccagaaagcgtgcaatatgagtatgctgtgatagccgtatttatacgctcggtgctgggaaagttgaaagaccccacttgtcattgaatgttgctattctagc

SEQ ID NO: 356441 - DNA, 263 bp, Zea mays
caggattctcaaaactgtaaacatctgcaggatgaccaggaataagaagacacagtgtcctcaagggtgatccagaaacaaaatggcagcgggccgatattcttcacaggatccgcataaaacttatcaccaagttggaaagcaaggatcagtgcagggccccaaaggtgaccttcttgggcctggtgaagagcctctttccttctaccagaaaccaagagactgtgaacctcctgggcagtagtctgaatctggctttctga

SEQ ID NO: 356442 - DNA, 255 bp, Zea mays
gtcagtttaggccttaggatagagcaaagtagcataatctcaagcacaagtttactatgtctgggatggcatttgatgattcacctgcccaagtgaatgttgaaggagatgtttcagagaaaatagtagaagttcaagaccagaatgaagtgggtgggatgcccttacgacaagaggaggaggcagcaattaagaaaaagtatgaaggaatattgcccagaaagactcctgcttatatctaaggtcaatagcatt

SEQ ID NO: 356443 - DNA, 215 bp, Zea mays
gagagattctaggggacctgtaatatatattcaagctagggataatcctggatctgtcttcgtgcgatgggttgacatgttcattcagctctcaaagttcttgtagtgtactgattgtctgttgatctattctgaatgtgatgatagtacttcgctgcaaaaaaaaaaaaaggggcgcccatctataagggaccttgtcgacccggaaataattt

SEQ ID NO: 356444 - DNA, 157 bp, Zea mays
cttccctcttctgccacacaacatacgagcatgctaaagtctgataagctgtggggggttgcgaattgggtagaaaatttttagttttactaacgttttatggccctaaagaggttttcccggatgatgtttgtgctgttgaccggttcctgttagc

SEQ ID NO: 356445 - DNA, 178 bp, Zea mays
tcagatttcgctcgaggcctgatattatggcatccttcggggctttcttcacttcccttcgtcgacttgcactctgactgagttgagagctcgggcaccagatctgaagccctctcgttctgtggctgtgtgcctttcggctggtgtagcattgagaggagtcgctgttccagttcca

SEQ ID NO: 356446 - DNA, 247 bp, Zea mays
ggcaaagtatccgcgtccaagaaatgtcctagcagagttccgatcccctccctagcataaacacgagccttgtgccgtggaaacaatctcaagtcatcgattcatccagcacaagcagcatcacacaaaaccgatcaatctcgcagagggagaaccaaccaatccatcatctgtctcgactctctcgcgtctccgccggatccaaacaagaaaaaaaagtgccctcccgcgagctcccggccatggc

SEQ ID NO: 356447 - DNA, 169 bp, Zea mays
gcccatccgcattccaaagcagagaagtgtgtggcttacctgcgtacacttcagtttgattgagtgtaggtgttgctcgcgcattagaccgtctcaacaagagttttatcagagtttggtggcattaaatatgttgatatggtatggaataaacgataagagatgatga

SEQ ID NO: 356448 - DNA, 194 bp, Zea mays
tgcaaatcttggtggggacgacggagacctgatgctatgcttccttccctccctgtgctgttgagttccgcttccacagctcgtgtatggccgacacggtaatcgctgcgaaacgaggtcatgcgcgccttccttgtgctttcggatgcaccgcggcttgccatccaaaattcgctgcaatgcttagctagatc

SEQ ID NO: 356449 - DNA, 193 bp, Zea mays
atgaaaacagctgtttttcttcttgcttttatctttgctttggtgagctcccaaggaactcctctcatccatctttgtggaagtgggaacgactgcagtcaaattacaactccagtctgtggtcatcttccagaatgcccaagacttggtccttgcagtaaaacctacgcaaatgcttgtgatgcttgtaacg

SEQ ID NO: 356450 - DNA, 124 bp, Zea mays
gctgtcgacacctctacgcctgcagtcatgctcgcctaagctcgacccgacgcaggtggtggaggtgatcgttcgtgtggaccggcggtgaggtaggcgcgtcgtcttcgctgtcccccaagat

SEQ ID NO: 356451 - DNA, 225 bp, Zea mays
gcactttgcgcgaggcagaaacaccgcgcaagccttttgcccagatcatgccaggaaacaacgtctcaccgatgcctacgcggcccatctccagcgccacagaggaagagaacaaaacctccaggacatttgtaggaggtctcaatgcgaaaacgccggcgacagtgacggctcctatgcagatggcgatgacaccagccgtgtctaacgagggcatagccactc

SEQ ID NO: 356452 - DNA, 128 bp, Zea mays
cactggccctgcactgttctctccatactcagacactcagtgttcacacgatgatacgagactgcgcatgtaccagcttgtatgcatatttgcacaccttgacataatataccacacacaacccataa

SEQ ID NO: 356453 - DNA, 275 bp, Zea mays
atctcaccttcccccgcgtgctccggctgcttttggccaccgatacgctgcgccggcgctccaaagttccaggccaggagaagctggaattccaaatcgtagtccgtgtgaaccagttgaaccgcatcaatcttatcaagtcatctaataaaaaaagatctgcttttttgggccgaaccacgtggagtaatacccctgaagttcagtgactacatcaaccagaagaggctccatcacttttggtcatgagacttttatgtatatattaacctgag

SEQ ID NO: 356454 - DNA, 259 bp, Zea mays
  unsure (1)..(259): unsure at all n locations
gtaatctgctacgcaagatgcagcttctagacttgtaaaaaactgcagctttataagatacattgatcagccagaggatttcagctttttatatcaagtatttatgcttggacgtggtgaatgacagaaaggaaaggatttcttgtagcagctgtttggagtatctaagatgattaatattgcctatgcaatttctatcccagcaattcctgaacagaatttgatttgatgcatganaaaaattctatcctgtcataat

SEQ ID NO: 356455 - DNA, 126 bp, Zea mays
gagccaggcgatggggcgcatctcctcgaagctcctcccgccggggccaggcggcgactgcaggcgcaccacggtgcgcggccgtgtcgaacacgtcggctccctcacctgcacacaacatacgag

SEQ ID NO: 356456 - DNA, 268 bp, Zea mays
taggtgagtaagccttcagcagatacccatgctggagcgaagaagccccctgcactggctggctgggcatgtgtggctgcactgaaacagagtatagaatcgtcaatacaaattgagggcacgaaagttcaaaccgacactgatgtccaaactgagaaaactaccgaagcggcaactgctgcgctagtctcaatccatcttgatgaactaaaccttcaagaatcagataacagagaggaaaagggatcagcattgacagaaacagatg

SEQ ID NO: 356457 - DNA, 269 bp, Zea mays
gatcagcggtcgcagctcggtcgagatcggccacggaataatctagcagccaatttaaagaacggtatggattattcaactccgtagttggctggctggctggttgggtcacaatgtttaatatacaactgatgcgctgaattgttggctggctcggccgagaacggtatggatgggaaatagtaattaccaaagtagaatctctttaggtggattggcgaattgttgtgtttagtactcatcaatatgtgattatcgaagcttcacaa

SEQ ID NO: 356458 - DNA, 155 bp, Zea mays
ctctctctttctctccacattctccctgctgtgcaccttgcagccgccttggctgtggatcggaaatggcaatcgacgatgaatcgccgctcagagtcaacaccagaggcggcgccatgggaggaggggagcgtgacggcgcggagaaccagcgg

SEQ ID NO: 356459 - DNA, 147 bp, Zea mays
ccagggctcaggtgctgctgtttgctcttcttctgcaaccagaatactccaagacaatactgatgatcacacaggagctcaaagtaacttggcttccagtgcatcagctcaagtgtcccacttttacaaccaatatgaactcaaatc

SEQ ID NO: 356460 - DNA, 106 bp, Zea mays
gtcggacccaatggcctgtggcctcatactatgtttgctgcttgtatatgctgtaaattaacgtgaacagtgtcactcgaatctgtatcaatgctggttttggaca

SEQ ID NO: 356461 - DNA, 165 bp, Zea mays
gtggaagttggcatatccacaacacgtcgttaagttcttcaggaacaatgcggctgctatggaagttgtaaaatggtagtattattgttttgcgacggcctattgcctttagagacttacaactgatgttgcccatttctctatgcttgatgtgcagaaagtgga

SEQ ID NO: 356462 - DNA, 216 bp, Zea mays
  unsure (1)..(216): unsure at all n locations
gtaacttgtttcgacaagattgagcgtgtccgcactcatacaaatttatagtagtatgagtgcggacacgctcatactactataaatttgtattctaaaacaaatattttatcatcggtagcaagattatctactatataccataatcctctgtattcatatgtactctatatctcaccactataccaaatatcatatattatatatngttttttc

SEQ ID NO: 356463 - DNA, 155 bp, Zea mays
ggggattacgatgaacacagtccagtccaagtcgcttctgggaattggtaactaaaacctttatcacctggattgcgcctgcttagattctagtaggttccttctttatgctgagttccatctttagtttccttaccgcataatttggggactga

SEQ ID NO: 356464 - DNA, 281 bp, Zea mays
ctagttctagatcgcgagcggcccctctaccatttcaagctgcatatattcaacattatgaatgcatggctgacgactaactttcagatcagcctaagaaaccagccaactccacgcacgatactaacgttctacgggccctagacccataactgttagatcatcgtcgttgccaccaaggtaactattttgcatgcctatgacgagaatcatcacttttggagcatgggtgttttgtgtacatataaccaaactgctaaaatatttgcaggtatgtatat

SEQ ID NO: 356465 - DNA, 268 bp, Zea mays
ccgccgtgcaatgtgcctcggtctctggtcgaaggacatcggcgccctctgcccttgctcacctctctggtcgtgctcgtcgggacattattctctagccaactgctgctgcgagctcgcccgtacacctcgcctccttgtcgtatcatgcgccatcctcgagcaacgtgtgcacgccgcgtccctgctcttccttgccggtcttgtttggcttcaacgtccgcctcttggattccttgccgattgttcctgcttcgactcctttgtg

SEQ ID NO: 356466 - DNA, 266 bp, Zea mays
cccttgaaatgacaggtgttgcttaatccataggggggcatactactaaaagagcagggcacgctaggaaaaaaatcctttaatcggggaatccaatttggggagctgccattgaactccaatgacttttccttgccaaccttggaaaagggtcacgaaaggaaacatgatccttcctgttcagtcacctccatccacaactactcgagggagataccctgcagacatttcaattaaaagcacgttacacgacctgagaacatagt

SEQ ID NO: 356467 - DNA, 261 bp, Zea mays
gcgccagcaggctgtacgacgggctctccgtgctcggcgccgctgctctcgtcggcggcctcttctgatgcgaagaggatcgcatcggaggatgatagaatgaatgcaccagcattcagaccaagatcacacggcgtgtgtgcgtttggccatcggatttattctttcttctctcttctcttgggggattctctctctctctctctctctcgggatttgtatttgaacttaatggatatacattagcagtggttgtcttct

SEQ ID NO: 356468 - DNA, 258 bp, Zea mays
acctactgattcttcaaccacgccctttcttgtcttctccgcgggggccaccggtttggcttggggtccgacccgcgagcgcctgccgatggccgatggcagttggctcgcccaagatgtttgattgacaacttgctgaaaccacatttctatggaaagaacgagatcaggctagatctacttcgatgatgtgctccttggagcggagaatccccgagaaccacttcctcacccaaacaacaaaactgcacatattct

SEQ ID NO: 356469 - DNA, 131 bp, Zea mays
gcttgctgatgcttcttccgatccccactattattctcatcacgtgcttcggttcttgcttggtgggtgctactcccaccgacacaacatacgagcgtgcgataggggtacctggatacaaaggattgaga

SEQ ID NO: 356470 - DNA, 236 bp, Zea mays
gctcgatcgctcgagacggaacctaagataatagctctaccaacggtgtacagcgatctgggtagggctgctttcaatctgttgacatctacagtaggagcagccggcttatcacgtatccttatatgcatctttttaggctttgaggttgactcgtcttcatcactacttccatcatcaacaacaccatataaagacttcttgaaggcctaggcagctattgcctgttcatcaga

SEQ ID NO: 356471 - DNA, 259 bp, Zea mays
ctgtgataggctcctgcggtactgcgctgacaacggctcctatcaaggatgcccccttccacacatcgtacgagcatgctaaaacggcgcgtgctgcttttccaagcacgacgaataccatgtcggaactgctgcgcaggtctacagccaagagcctgcctactgcaactacaactaagagcctgcctactgcaactacgacgaccaagagccttctgacttcggtcggagcatgcactggtgttgctaacctgacctg

SEQ ID NO: 356472 - DNA, 208 bp, Zea mays
gggagatcgtgtacgctatgtgacggcgccgagtgctcagcgacgaggcaatgtctcgttgcgctcgcaggttgccgagataactagagagacggagagggtgggtgtgtgctgctgctgcctgcagcctgcgtgtagttgtgtgctttcaggtctctgctgctcatgcctgatgccgtcgttcgtgatggcccctttttaccgtcct

SEQ ID NO: 356473 - DNA, 220 bp, Zea mays
gcataggcgtgtgatacacagtgctgtgcgtgttatgatatttagaagtggtgtggaaaaatacagtcggaggatgtactcagcagcttgggctcatccatagcatgggtgcttgatgaaccttggatgggatgctggatagcttgggagctgttgttttaagttgacatgtgatcggtaatcatgtaactaggccatgagctattggatcattattttc

SEQ ID NO: 356474 - DNA, 166 bp, Zea mays
gctcgaattcgctcgagcggaccgaccaccatctcccatggcgcccagctcggactgcccctgctccttgatcctccagctcgctcctgtcaggttgcttgatgcgcgcgttggccgtcgacctcacttaaccctgcgtcgtcgggccagtctcgccgcactcgcc

SEQ ID NO: 356475 - DNA, 252 bp, Zea mays
atctcatcaacaagttagccacaagcttctctacaagaaatttcatttcaaaacccacccaccaatcaaccaagatgtctccctgctcctgcaactgctgcaaaggcgaatgcaactcttgctcctgcaacagctgcagccattaaatgccaacgcccgcatggtctcgcaaatgaactgaaaccggatcacttttcctttgtcaactgaaagactcggcggtgtttgaacggaacaaacggatggagatgg

SEQ ID NO: 356476 - DNA, 287 bp, Zea mays
cggccagcgtctcatcggctgggcgtggtctacactgcacgcacacttaccaccagccaccgcaagtgaatcactagccggaagacaggccaaccgcactgctagtgctaggaatctaggagcgagaacgagagaccatgtcctcagaggccagcagcgtcgtcgtcgccgacgagaatggagcggcggagacggtcggcgtcgggcgtacgtggcaatggagaagaccaagagtcgagcgcagcaagtcgcggctctccggcctgtctgcacgggcgcatcgctac

SEQ ID NO: 356477 - DNA, 290 bp, Zea mays
cagctctacacccggtgctccgcctccatgccgcagatcgatcacgtccccactccccaaggctttggtttacaccggcaactattcgcccttccctactaaatctgcgatcatttcttctcgattgtgaccatggcgactcaggtatccctcgtcatgtggagggcggtcttctcagcgctaggcttgctcgtggtggccacgctggtgtacacattggccactgacggctcgctgatccatcctgagctggttacgccaaatggagcagcaacatttggacgatccac

SEQ ID NO: 356478 - DNA, 278 bp, Zea mays
gccgactctcacctaacaccgaaatggcagagaagaccggcggcgccccctggtggctgctgcgtcccttttcatgccgccccttttttgtagggcctccatttggccgtactctgctggcggtgcccgggccgggtggcgcctttttgattggtgaatgctgcggcgtgcgccaagcaccacccttgtttcttggccaggcgcgcgcgagagagagagagagatggcgctggatggtgtccgaatggctggagtcgttctgtacgtacttgagtact

SEQ ID NO: 356479 - DNA, 190 bp, Zea mays
ctcgagccgtgtgctgaatacatgtacaacagctgcctataattttgcttctatctactaatacctccgcttttaatttgatagttcaactttataataacaaatgtcaaatttaaaaaaaaaatcggaaggagtatttttttaatacatccaagtccatccaataaaagtgctcgtggagctttctatt

SEQ ID NO: 356480 - DNA, 276 bp, Zea mays
ccattcacccgtgacacaccacggcccgaccatgcgcacaaaatggcagcgcaggtgaggttcctgtgcggtggtgttcatcccagcttcgcccgcgacgggacctgggttgggcacgacgccatgggttcggaggacaaagaggtcgcggctaggtcctttatgtagaggtgggcggaggtaatcagtcggccaaactgaccccgagttccccggcggccggtgagcgagcgagtcgcgcgaggtgagaagaagacccagccacaggcgctcacc

SEQ ID NO: 356481 - DNA, 220 bp, Zea mays
  unsure (1)..(220): unsure at all n locations
ccgcgtcgtcgctgatcctcccctccacccgcgagtccacgtgcgctgcgctcacaatttcacagaacatacgagcatgctagaagcggatgctcttgctggaactggctgcngagggtgcagcatgatgtacccgacatggtgagcagatgaccaccaccacccaggctctcatcatgggtgtcgcaccatccaaggcgcacgccagagtgcgggtcga

SEQ ID NO: 356482 - DNA, 297 bp, Zea mays
cacttctcgacgtgcgctcgccactgttcctcttcctttttttccaaaagaaaacggagtgacaatacagctcatggcaaaggtttatgctctcaatccatccatccatgcaggtgccatccggtcaccctgcaggggatgctatagtagctaccgaaagcgacctgccattcacaagagccatgagccttgttgggattattatgaggaacgccggcagcttcagactctaggggcgactgttaggtcaggccacaacagggaatccctcctgcaacaggcaccttgtcctttctt

SEQ ID NO: 356483 - DNA, 281 bp, Zea mays
ctcgagccgacgctgtcgaggtgtgagaagtcgtgcgcggagaccacctagatggtcgagagcctcagccgcgacacgtggcaacactgtggcagtcctcttcaccagctaagagcagctaatccttcagtaagcaaattaagtcccgcggagaagtacattcaggtcgtatccattgaaggccacgagttctgggtcatgggttttctaatgtacgacaaggctgcaaccactcttcaagaagccttggctagcgcacgtgagttgcaaccgtgaagaca

SEQ ID NO: 356484 - DNA, 181 bp, Zea mays
cgccaaacgtagccggaggacattcgggcgagtgttgatgtgataagagtgcgccccatctatgatctatgtatgcaactgcgttctttcacttttacctgcccatcattgccacgcagtgattttcagtaatgggtctgactgtacccccggatgctataatttgcaataaggtaacgcc

SEQ ID NO: 356485 - DNA, 247 bp, Zea mays
aacagatcgttgatgtcgccacagctgcatatcgatcgccctctgcagtgcctacacctactgtacaatcggacagcaataggtcgacgatcctcgccgcaccgcctgtccaggttatccctctctcaccactgtttatgcctgctgttcatgatctggcacgcgaggtggagtgcggccagcacgcgtgatggccgtggaaggccctgtttggaatcttagtatttctatggatttgaggtataac

SEQ ID NO: 356486 - DNA, 285 bp, Zea mays
ctcacccaactgaactgaactactcagcagcagatcaacatctctatccaacgccttctacccgataaatcatctagctagctttcatacgacatcagcatcgtattcatcatggccatgggcatcatcaccatcattcacgccgttctggcagtctttctcatcatcgagctgggtctcaccgcatacctcgtcgatgctactagcacctggtggagtgactctcctgcttcggtgtcattcctgctcttctgcgtcgtctggtccatcctaatcctgctctat

SEQ ID NO: 356487 - DNA, 285 bp, Zea mays
  unsure (1)..(285): unsure at all n locations
cgccggntggcatcgacgacgaggaggagtgcccccggagagtgcgcaagccctacaccatcaccaagtcgcgcgagagctgnaccgaccccgagcacgacaagctcctcgaggcactgcagctgtactctttcgaggaacctactggtgtcgtttctggggactactccaaaagcgtgaggaggacaccataaggattaaagatgcttgcagggtgctggaagccactacgatgcaaatcttcgcaatgcacggttggagctttagaaatcagctaactaatag

SEQ ID NO: 356488 - DNA, 180 bp, Zea mays
ctctctctctctctctatcacacaaacacacacacagctctggggggtgcaggtataggagaggggcaggacccgtgtaattgaacacagtagcggcgatgagatccctgatgtccggctggagctcctcagtgctgagtgacaaggaagctcgtttgatgaggaaccgttcgctgacca

SEQ ID NO: 356489 - DNA, 281 bp, Zea mays
ccaccatcgactccccgtcgccctgcatcagatgcttcctccggcaccatcatctccctgtcggcctacatcagatgcttgctccgccacgcctcgccggccccgcgcctctgaccactccacttacctccgggtcccgtcccacatatccccacgctcccctcaagcctccgcgtcgtcacgcaggtctacccggacgccacagggatgacctccatggcttcgtcgtcgtctgggtcgatgcgggagccgcttcgagcttgctggaaccaacggaactg

SEQ ID NO: 356490 - DNA, 224 bp, Zea mays
ctagatcgcgagcggcctccctttttttttaaacaaacatggttatatacatgatctgctgcacagaatttaagactaagaaagtcacatcaacgattccaccaatatacatacacgcgaggaagaatgacaccgactgaaacagtctctgactcacagtcaatggatacagacacctgagcggcaggctgcatctaatctcgccgcgacgttctagatcgcga

SEQ ID NO: 356491 - DNA, 258 bp, Zea mays
gtatgcggtagagctgcaagttccgtatccagtccagtccagtgaggggaattgctttggatggtgcagggcagatggaggggctgacgtccagtgagatcgccggattcgtggtgggtgccctgctgctcggcgccaccatcgctgcccccaaggtcgacggcttcatcgcctcctcccagagaaggtccggtccctggctcttcccatttctctgtccctgcctcctgtgtcatcagtattagcctcccaaaacca

SEQ ID NO: 356492 - DNA, 246 bp, Zea mays
cgtagctcgaattcggtcaggcaggagagcgggtgcagctggccgggagggcagctcaccgcaccctccctcgctcctcccctctataaatgcagaggcgccgaatgctccccaacgccctgtacaatccgggggagaggtcaaggaaggcgagcgacgctcggcaggcagggcatcccgcgaggccgcgacagaggcggcactccggtcccaccaacccacaacaccgatcccctcctcgccgag

SEQ ID NO: 356493 - DNA, 258 bp, Zea mays
tgcatattctggaggaagcacattttccacaccgagctaccaataaatgcaatacaggttgcaattcggatctgtgtaacaccaaaatggaatccaaatcaatatgtgaacggtgtggaaaatgtgcatattctggaggaagcaaaattatttcttgccaaattgagattcagtacaggtgcttattctgttctttgcagagagatgtatgaatgcaagatctgtacttccatggcaaatgaactgtgcaatatgaga

SEQ ID NO: 356494 - DNA, 258 bp, Zea mays
  unsure (1)..(258): unsure at all n locations
ctcttgagacattttcttgccctgtcagtcatcattttgttatagcacacatgtacattatgagtcaaatgactgaaggaaccaacctagattctagagtatgacaggatcactagttattgtcatgtagtcacgttaaaatgagctgcagctttattagagcagcgctcattttttttaatatctgcgactaattcacacttttgttcaaccatggntcgtaagggcaagtattgttagctgccattcatgtccttc

SEQ ID NO: 356495 - DNA, 232 bp, Zea mays
cacagtctcgctatatccgcattgaatcgcctaacgatgtacaggaactctggtcgttgacgggcgacctcaaggccggaacagtttgatgacataacggttcgttccctccccttgagataggagtatggtggccagcgcgtttgtcaagttacttgtctctgaagtatcacatgtttgacaacaattaatgatttatttatttatctatcgaaggtgatagttcttgttt

SEQ ID NO: 356496 - DNA, 171 bp, Zea mays
gagaaagacagaaagagtgagttcatatatatatatcgatccattcctcctgctctacttcccattaacagcttcttgttaagcatacattgctagtatgatgatgatattcatttgaataataagctgctgagcgctaaaactataatttaatattttaaacaataatat

SEQ ID NO: 356497 - DNA, 224 bp, Zea mays
ctcgaatttcgctccaggcctatggtaatcctgtattctgtaatgtggcattgcctgcgctggtggctgctgctgctgctatcgatctcagccacactagctagatcctgcggtccagaacgccagtgtgcacgcaagcgagcgccaagtggtgtggtgaccactaccagcgcagtgcgcagcgtcccccacctattgttgtatccgctacaattccacacaac

SEQ ID NO: 356498 - DNA, 241 bp, Zea mays
gtagtttgtaattgtattcatgcgtattttgagatgcacgtgtgagggaacctcgacatattagcgaggccctatcaattaacatgcctcgaagtttgctaagtgatactgtcaactcacagaagccctgtatgtattcttagaattgctctcagttttttactatcatgaatctgttttgcagcaaaaaaaaaaaaaaaaaaaaaaaaaaaaaaaaaaaaaggggggcccccccattttg

SEQ ID NO: 356499 - DNA, 264 bp, Zea mays
  unsure (1)..(264): unsure at all n locations
cattatgtcatgtcacccacaagggtctctatctgatccaactcttattgtcccaaatatatnntntgtccctcagttatccatggatctactatcagttggtcaaattaccgatcacaattgttttgttggatttgatgactcatcttgttttgtacaggatcgcaaaacaggagatgtgattgggactggccgtcgccgtaaatcttcgcctcgcctctacatcttngacactttgcgtcttccttcatccnctactactac

SEQ ID NO: 356500 - DNA, 204 bp, Zea mays
atgtgcgcagtcgacctgctgctggctgctgctgttgtaaaattcagtgatagattttctcttgcagtcgaattgttaggtcgaagactgtatcttcataatgtcacgacacgtgctcaggccttttgcctgaatccaactgtaaatttcagatccaatctagcagttcgagttacatagacaggaatgagatggtaatgttct

SEQ ID NO: 356501 - DNA, 148 bp, Zea mays
ctgtgctcggcttctttgccggccggccgatcacatgcatgttcagtgaggtcaatcacggcatagaccaccttagagcatctgcatcagaattcagacccttgtactctctcatgtccttttaaaaagaaaatttagcggctgcacc

SEQ ID NO: 356502 - DNA, 237 bp, Zea mays
gaagctgaatcgctcgagctgacctctcgtctacacgcggcacgtcctcggcccacgctgactcacgcatcgcgcgcgacgacgcggaggagaaaaccaggaatcccatgaaggtttcagctccgcaagccaagccactcccagactctcacgctcgagcgaagggaaccagcaatggcgcgtcgcgagccgtgagagacgggaacaagaatggctgccatgatgcgcgggcccgcg

SEQ ID NO: 356503 - DNA, 155 bp, Zea mays
ggacacttctgagggagtccggagaagcttgcgttccttcggccctctccctaccaacggtcaccgccacgccacgccgtctcggtacatatactagcctgcctcgatcggcctccctcgcattccccgtcgcccaagatcctccactcgattcc

SEQ ID NO: 356504 - DNA, 286 bp, Zea mays
atcagagcacgcgaaagtggtgcagcgaaggttaagccacgacacgcatccggccagctcccgagctgcgctgctctgctgtagctctcgagtcgacgactccttacttcccaccgaggtgagagacatacgcctggctcctgcctgctcgacggacccaaagcatcgcctcctcttgctacccctctgctcaatcggctcgtccggcgggcgcttagcgccctacacccgtcagccaccctactgcgacgccgcgttctccccttcttccgacgtcgctggctct

SEQ ID NO: 356505 - DNA, 297 bp, Zea mays
gctcgaattcgctcgaacgggttaactgggaggtgatcgttgtcaaagatgacctcgtcaatgcattttgcctgcctggtgacaaggatgtagtcttcactgcgatgcttaacaaattcagggccgatgctgaggttgccactgttgttgggcatgaggtgcggtccttggtctgcaggttaatgtgtggattagggtgactgcagagcattggaactaactatgtggctagtttttgtaggttgccatgctattgcgagcactccgctgagcagatcactaagaacctctgggtgg

SEQ ID NO: 356506 - DNA, 280 bp, Zea mays
  unsure (1)..(280): unsure at all n locations
acgagagctcgtcggagagcgcgcaagacgaagaggtggatggagaagtgaaatcacctactatgtcacgcgccaagcganagaataagaaattgtcaaaatctggtaaatctacaaagaacacgcctactaagtgcagtgcttcttttgctgagatggtggatgatgatacagccttacagcaggctattgctctctcaatggcggaatattcagaaaagcctgtgacttcattgggtgcagaaacatcaagcacagtaacaagagcgagtggaagtac

SEQ ID NO: 356507 - DNA, 214 bp, Zea mays
ggccaggcgaatttttacaacacatgttccaggtgcagcaggaacgttgcttttgattggctacattgaagttacagtagagcgagtcgttgccgattgtatatgttatcgcttctagtgaactaggcacgctaaaacaatggagatttgttttcatttatcaagcgaggccagccacagagccacttttgcatctatccggagaggcgaacca

SEQ ID NO: 356508 - DNA, 320 bp, Zea mays
agcacatcaacctcgttcgctgtccgttgtcctctccctgccccaagggtcctggcgcggcaagatcaaagcctcccaacagccaacaagtcgatcgcaaatcgcaagaacaagagaagaaccaatccgacaacgtctccattctccctcacatctccttgcttgcccagcagctggcactccccgtcacccctcgcatccgcatcgaatcgaggcatatcaccctatatatcccattccgctcggttggattcagcttcccctccctctcccccatcgataaaaccgatgcgtcgcccggcctcgcgtaccctaccggg

SEQ ID NO: 356509 - DNA, 317 bp, Zea mays
ctaccccggactgctgaccgccctgcagtacctgacctcggtggttggagtgtgggtgctcgggaagctcggcttcctctgccacgacgccttcaacctccagaccgccaagaagtttgcgccggccgcggttgttttctaccttgccatcttcaccaacacccacctcctcaagcatgcaaacgtcgacactttcatcgtgttcagatccctgactcctctcctggtggctatcgccgacaccaccttccggaagcaaccgtgcccttccaagctcacgttcttgtccctcgtgatcattttgggaggcgcggtcg

SEQ ID NO: 356510 - DNA, 320 bp, Zea mays
cacccctagcgatgcgccactcccggcgctcgtgatccatggcctcactccccgttcctcacactcttccgcgggcctcgccagcgatagtgggcgccgcgagggggagggccgcggtgcgcgtacgcactgccaccgcggcattgggcggtaggtgcggcggcggcggcggaatggagcagcgccacggggaggccccgcacagcccagtgaaggagaagcctgtaatgtcaaacattgggaaatcgactaatattttatggcacaattgcttgactggacaatctgatagacagaaattgctgggacaaaaaggctgt

SEQ ID NO: 356511 - DNA, 310 bp, Zea mays
gaagatggttagcgggaagccatgtgtacctttggtaaagctagttttcaagtctctagctttgtttgatttcttccgccatgaaattatttaaagcttacagttcaggcaccagctaagcctaagatgctgagtttccatatgtgataatgttggactgtcttgttcatatcggtgtgccatatcattatgcttgaggtggtggtatgtaccttccattagggaggcctcttgacaacttatgtctcagcaggatggctccctccagaattcatgtaacatgtgcgttagtttatgggccttcaccaac

SEQ ID NO: 356512 - DNA, 323 bp, Zea mays
cctcgtgacagcgcacgccatgcctgctccgaggcgccacccagctcttcctcgccccagcagccgtttctcgagatccttttcactttcaccaccagggtacatagaccgcatctgcggtgctctgcgctcctcagactcgacttgttggttcatccatccagctgccgccggagcccggaggtcgatcagctacctatcttggctagcttggctgttctctctgcaggcagttgccatcgtgtctgatcatactaatattctgtccagatcccaaggaggcaaaggaccgagcgtggaagctcccggaccggacattccat

SEQ ID NO: 356513 - DNA, 315 bp, Zea mays
ctgatgagggcaaagaagccccgaaaggtgaggctggtgacggacagtaatcttgggagagcgcatattgtacgagcccattgttttagatgctctatgctgtcgaagctgaagctgtgccgtgctattattgtagctgatttcctgttccctcacttctttttttatattagtaggctggtagtgttcgaattagttccccattgctttgtgttgccgctagttggcattaagtccgtgtggactggtattattcactggatttgagaagcaataaaggaattcagtttcgaagtgacatatagagaaaggaag

SEQ ID NO: 356514 - DNA, 314 bp, Zea mays
gtcctccacttcactcctcctgcccacttacggcgatggccggccgcctcacgggcgccgccgcgtcctcaccgctttcccgcgcgctcctcctcctcgccgcgctcgggctcttctccatctccttcctctcactccgctccctccgccccgccgcggaccccgccgacaagtcccgccccctcctccggctccactcctcttcgacggtgtatcactctccggaggcgttcgcggtggggtacgcggagatggagcggacttcaaggtgtacatctaaccggacggcgaccccaagacattctaccagactc

SEQ ID NO: 356515 - DNA, 110 bp, Zea mays
tcgacggtgggcgcgacgcgtgggtgttgaaggcaagacaggctttagggtgatggcgtaaactagcgtgcatcctggtttttgtttccacccaaccgaacttgagctcg

SEQ ID NO: 356516 - DNA, 108 bp, Zea mays
cccacgttctcctccctccgcctatcgctctgcgcacatccccatgcccacgccgagcgcttgcgactcaccgcacccgtcgcagcagcggccgtggaggcgtcgacg

SEQ ID NO: 356517 - DNA, 316 bp, Zea mays
atgatatttctttctctcctccattttcatggttttgttttcaaattagggtttgggtgttgtgggcacattaatacattgctattgatacttttatttttattatccacaaatgcacaatcaaataaactccagcatgatgcataagttatttatgtgttctttattttcattatccacttttgaactagggttgatcacatgtaatgataagtagaggtcacaaattattgagattatctcaattcttattattactcttttgagtattacacatatattcggcgttagttctactgagtctgagtctaaaccc

SEQ ID NO: 356518 - DNA, 205 bp, Zea mays
gggaaacaagcttccatgttggctccagtagcatttattgagactcgtcgtgaggattctgctgtgtaatttaatgtgcaagtagcattcttttataagattacttccgaccgggaattctagtctcttaacttcagaactgatttggtgagtaggtaaatagaggggatctatggggtcccttactattcatatggagttcaac

SEQ ID NO: 356519 - DNA, 290 bp, Zea mays
agcaaatggaaatttctcttgagtttgatacagatgcttctgaagtggtttccgacacatggcaccatggagcaaaccagcaacggggggaatttgaagcttctcttgagtttgatcctgacacctctgagctcgctcctggcataacagggtatacattgaaactaaaacagtcacatgaacgtgctcggaagcttagggcagatttggcagttgaacagcagcgggaacaagaactgagcagaatgctgaagggcatagtaacaggtccaaactttactgagacgcat

SEQ ID NO: 356520 - DNA, 292 bp, Zea mays
gcggcgagctcggagagttctggtcagggatcgagagcgagcgaggccggtctgtacagtatagcctgcagtgcacgcagcagcaaaccaaagagctcagagttttcgttggtttcggatgacgacctgtcgcaccgcgaacgcagccgccgtcgtccgtctcctgctgctgtgctcttgctacgccgccgccggccttgcctgccaccctggtaatggcgccaagttcgggtacagcgggtccgtcggtcgcgaccactggggcgcccgtgaccccaggttcaggcagtgc

SEQ ID NO: 356521 - DNA, 145 bp, Zea mays
gtccatcggctcctacaacccggggcagtactcgtacacgcccatggcgtcgagctcgctggacgactcgctctacttcatcaagatgaccgggatcaaggtcgcgggcaagccgctgtccgtgtcgtcgtcggcctactccagc

SEQ ID NO: 356522 - DNA, 305 bp, Zea mays
atttttgtattttggtctagactatcaaaaaaatcctagaaatgtccctctgcctctcgcgcgtgaattctcctctgccgaagggaagacactcaaaggcgagctactgatcttcaactgcttttctggattctctttgcaatatgctttgttggggctagatctgaaatcaatgtttttaataatctagcacaaataggaaatgttgcatgtgttgccgacagaaccatctcactctctctttagtttctgcaattttttggacgaccgagaggtgctgccgtttatgagtaactttccaggta

SEQ ID NO: 356523 - DNA, 299 bp, Zea mays
tttcggtattagatccaatcagaaaggaggagcatgattgtcgtaagtaacaatatatggatagttagtgtctgtaatacctcgccattaagtgttttatttctcttttgcgtagatgcgtaatatcttgtgttattcttcttatgttcatacatgtgcattatgcatctcattaggtacgctagtttatcacgtgatgcagaaaacgagtcaactcgactgtaagatgatgtaatgggtgggctactccacaaggtaatgctgatggatcaacctgaagaagaaccgactgaacaagt

SEQ ID NO: 356524 - DNA, 303 bp, Zea mays
cccacgcgtccgctgaacttgagaagacaagcgaagagaatgtacaactaaagcagtcgcttgacgaaaaaataaaagccttagatcttctcattcaagagcatcagacagtgaaagccgagcttgaacaagcattgacgaaactaaaagctgcagaggatgagaaccaaaatctggttgatcgatggatgctagagaagatgaaggatgccgagaggctcaatgaggccaatgcgatgtatgaggagatggttctaaagctaaagacagctggagttggtggtatacaacttaatgcacagc

SEQ ID NO: 356525 - DNA, 233 bp, Zea mays
gataataatccacactccacaagcagccatggcgccacccatcacgtccctgtcgtctctgatggcgtccagcccaatcccgacgccgccgccgctcccgaagaccagcggcagagcgctctccgtcgcgccctgcagctccgcgtcgtcctcgtcgccgtccacttcctcgactcctcatccggtggcggcgtcggtgtcggcgtcggcgggcaggagggggctgctggcgc

SEQ ID NO: 356526 - DNA, 304 bp, Zea mays
cccacgcgtccggggctgacagaaaataaggatgagtcgataactggtaaaagaaaggatagagattgatcaccttcacctatccaggagcagcatctgctcgggagtctgccatcttgtgagcgattgtggccacttgttgttgattcagctgaggtatttcaagaatagggatgcagcgataatgccatcccagatatgcaggatgtgataattattaattactttcgctgggttgcagactttcattcttcacaaattgggtgtgatcttagacgatttttctgtgctatgtatctgactg

SEQ ID NO: 356527 - DNA, 313 bp, Zea mays
cgttcccgttctcctcctcgtatcccctggtccgtacgtcgtggccaccggcgccgcctagctcgcaccgccgacagcgtctcagactagatcgcgcctccccctcccaaatcgggttccagtcgggctcccgcaaccgccgccgtctacaccaggtgccgaggccgatcttttcgtcggcaaagatcgccgagcagatctgcccctggccgtctgcctacaccaggtgccgatatcttcggcagcgaagaggcgccagcagtttgtattgacaggtacagtgattttggattctatactacctagctttatg

SEQ ID NO: 356528 - DNA, 316 bp, Zea mays
tccactcccacgtctgtccgcgcgcggtgtggtcacactactacggcaccgcccaacgccatacttgccttctccatcctcctgcggtcccgccgtcctctcttctagtccaggccacttctcatggctgtgcacacgcagtacttgtcccatgccttcccctacgaccacagcaccatcaggccggcgctggataacgcaaggtacgcgtccgttttcatcagctcggcggtggtcacccgctcgcggccaaactcagtgctcagcgacctcaccggcaacaacaacaacagcaacggttgcttcttaccgagga

SEQ ID NO: 356529 - DNA, 317 bp, Zea mays
gcagccttctgctgccgtgcggcgaggctccatggatgcatgaacccggtcgggctcggcatgaacgccgctgcccagccgccaccacctcctcctcctggtgctgctgtcaaatcaccagcaaggctgctgtgccctgcggtaatcacgttggcagtggcggtgccgccgatgcagctggtcatgcgacggacgttgttgtccttgtcgtcacggctctgccctgcccaccgccatagctatcctgcttgtttccgccacagctggacgcgtcgcagctgccgccgccgccgccgccgccatgagacaaggagatg

SEQ ID NO: 356530 - DNA, 111 bp, Zea mays
gccccaagaagcgcaaggccacggcgcgctggaccagccagcaggtgcgcgtcagccgcacgacggccacagctggcgcaagtacggccagaaggacatcctcggcgccag

SEQ ID NO: 356531 - DNA, 315 bp, Zea mays
atgatgtgaaaaagagaggtctctgttacactgcttttgtctgttgttttcttctagaggtacgaataatctaagattgtgtcgctgatgattttgtcaagaaagaagtctagaatcagacggcaggtcattgcgcaggactcaatgttccttattcttcatccaggatgttaattgaagtcattatcaacacaagttagctgtataatcaacctactctcttcgcatacaatcaacatctatgaaaaccaggaagcaacctataattttctcacatgtgtgtatttttttaagacaaaagagaatgcggcctat

SEQ ID NO: 356532 - DNA, 310 bp, Zea mays
cccacgcgtccgcccacgcgtccgcccacgcgtccgcccacgcgtccgcccacgcgtccgctgacggacgactgaaccaccgacagacaacatggccgcctccgcctccaccgtctccggcctcgccgcgactccctggccagccgcccggcgttctccaccagcttcacgcggggcagccgggtgtcggcgaggaaccccctgatgagcaggaacctggagaggaatggcaggatcacctgcatgacgtttccccgggactggctgcggaaggacctgagcgtcatcggcttcgggctcatcggctgga

SEQ ID NO: 356533 - DNA, 103 bp, Zea mays
ggcacccacgcacactcttctcccccactagtccggaccccggatgtgccaagccatggcgtccacctcctgctgcctcctccaccagtcaaccgctcgcttc

SEQ ID NO: 356534 - DNA, 292 bp, Zea mays
ccacagtccgcaaccgtcgccatagcgtccgggacctggcgagcgcgtacgtacgtacgtagatcgatccatcgatcgcacagctagctgacgaccatggagctccctctcctctgccgccatcaccgcccctagcttcacggccgctcccgctcgcgcagtggtcagcaggaggtccttcaccgtgcgtgcctctctccgcaaggccactgccaccgccgccgtggccgttgccgccagcgtcctgcttgccggcggcggcgccatggcccaggaggtgctgctgggcgca

SEQ ID NO: 356535 - DNA, 301 bp, Zea mays
atttccacccgattggaattattcgctgacgtccttctgttagtccacctcctgtcctctcgatcttgtgaagccattttgaccagtgaacagcagtgcgcaggtcaacagtcaaatcattctcaagatcgagaggacaggaggtgcactaacagaagcacttcagcgaatatttccacccgattggaattcgtcagacaatttggaggcttcgaattctgcaagtgatggagattctgagtcttgcagtgacgcagagtttagtgataatgatgaggatcacgacgttgatgacttgtga

SEQ ID NO: 356536 - DNA, 306 bp, Zea mays
ctccctgttaacaatacaggagggatctagagatgaaggaagaagaggattgaggaacgaggtagttgtattcagagttcagaatctccacaatgttcataaccgaaatacatgcgaggcagaagagtagaagtagtagagaagagagatgaacttggaaaacaagtgagtgagttctcgtaatagtaatttttcctccctttggtgtgtacagttttcccttttgtagatgaaggtatcccacttgccaacctgtcaagagccctatctgtcagtgtgctgacattccccaccgcttgaaatgcg

SEQ ID NO: 356537 - DNA, 104 bp, Zea mays
aacagattgaaagcagtgcacttttacaaatactgaagcagccccacctcgtctactgtcgctgaacgcaggagcctcgagctctcccagacgccatgtgctcg

SEQ ID NO: 356538 - DNA, 321 bp, Zea mays
caatcccattcctctcctccgctagtagccgccaaatcgacgagaaggagccgaggccaggcctccaccaagtatcagattccacgccctacgaatcatcgcaatggtgagtattcgcccgcggcggccccgtcgagctatgtgtggcttactgctcgcatagcctcttccgccgtgggcttggattgacggcccggttgtttgctgaggtgaggtcctgctgtgtgtgtgttttgtgcagacgaagaagcagcggatggaggcgggggcgatgcgacggcgagaccgacactcacatcaccggcggcagcgcgggacgag

SEQ ID NO: 356539 - DNA, 313 bp, Zea mays
cacgtcacaggccagctcggcctcctccctagcaccgtcccatttcctccctgcaccggatcccctttcccttgcgtgccggactttcctccactcctccatccatggctctctgctgcgtcgcgccctggccccttctctgcgcgctcctccaagccggcgtcctctgcacgccatggccgccgcgccccgggtcgcatgctccaccgtgccgagctccctagcgcttgccctgccctctgccatggacgtcgtcggccttgactccctctggctgcggcatccgtcttgctccctgctccgaccaatccgc

SEQ ID NO: 356540 - DNA, 324 bp, Zea mays
cggaccgtgggcggacgcgtgggttttttttttttttatgaaaaggagtatttatactttcaattaaatttattacaaatatgtttcataattaatctaacgttacttactatacttcatagataatacatcctatacatcagcttccatgttttgttcacgtcatcagctgcgctgctttgtgccgatgagtgtatgtgtatgccctttcgtcttgtaaagacgcgtggagatatacaagcatcagtcatttttggtctgtgcaccatctgcattacgggattcatctggcaggagacccagaagaggcagaggtagcaggga

SEQ ID NO: 356541 - DNA, 322 bp, Zea mays
cagctcccgcaacatcaacatcacctcggcacggtgcctggtgtgatgccccacaagcccgacccgggctccgccggtccctcggctgcggacgcggcgttcgtcgggatctaccctgtggagctccttggcggttgcgcggacgacttgtactgtctgttctatcccggggagatgtttctctacggtctcgctgctgtaggcgctgcagccggctacgtgtcgctgacgctgggcctgcagcacgccggctccggcaacgccgccggtcccgacagcaccgggcggttctccttgagagactacagcggttgttgatgct

SEQ ID NO: 356542 - DNA, 321 bp, Zea mays
ctctttaatcgacgacaagaatttcatagcagctttgactactattgaagttgatcttttactagtgtggtctgcttagcaataggtaatttttctattgaaagattaatttgttaccgtaagcttggtgactgaggtagccatctgatttataattaatctaattgtttctctatgtgaatggatacatataataactcaggtagcactacaaccggcaatgtatggatgaattaaaggaagtaaagaaggcagacaatcttacaaaaactctacatcttaaaactgccatgattggcaaagaagctggatgcatccttt

SEQ ID NO: 356543 - DNA, 311 bp, Zea mays
cttctctgctcaccgctcgaatctgggctgtcgccgagccattctgatcaccgctgctgatcacttctctgctcaacggaaaggagacagattcgtggttcgtcagcggacgcggcggcgacttcatagggtgttctcggccgcttccggcgcgcaaagctgacgcacggcgtgcgcccgcccccagggatgaactgctccagattctacaaaggttagatctactgctgcatcttccgaatccgcgtgcgaatgcaccgccgagctcgataaggccctgtgtgcgcgccggcgctgtgcctcgtacgcct

SEQ ID NO: 356544 - DNA, 306 bp, Zea mays
ggaggcggccgagagctccaaggagaaggagaagaaaccagaggaggcagtgaaggagccaaaggccgagagctccaaggacgagaagaagaagaagccggctgagcaacaacctgatcggggtcctaaacttcgtcaccttcctgctctccgtcccgatcctgggcgcgggcatctggctgggccaccgcgccgacggcaccgagtgcgagcgctacctctcggcgcccgtcatcgcgctgggggccttcctcctcgccgtctccctggcgggcctcgtcggcgcctgctgccgcgtcacctggc

SEQ ID NO: 356545 - DNA, 296 bp, Zea mays
gtttcactcgcaggcgaacttttcggcgcgacattaacgacgcggacccttcggggatgacagcgagcgcgtctctactgaaggtggaccggaattcttctttcctaacagctcaggcggcggcgctaggtcccaagaaggctttggaggctgctcaacctcccagggagattttgttggaagtgcacaatgcccagacgattgtggcggctgcccatggtcctgaggcggcaccgacggctgcccatgctcccgaggcgatgctcgcagcggactcgactctgatggcgggattc

SEQ ID NO: 356546 - DNA, 296 bp, Zea mays
cccacgcgtccgatagttctagatcgcgagcggccgctcggatctagaactaggggagaaaaggatgatcccttggttgcgaaagttacaaagttagaaccagagacggtaataccgttggcactgaaggccgtttcacttgtattcgataggatttttgcaactgaagacaataatgaaactgggaacgcatctgctgcaacgctcctgtttcgttgcgaatgttggtgctatacagccaagcaggttggctcctggggaagggcggtagtgtggttaagcaaatggcagcagat

SEQ ID NO: 356547 - DNA, 299 bp, Zea mays
aaccacgcgtccgcggacggtgggcggaccgtgggcggacgcgtgtgttctagatcgcgagccgccgccctttttttttgacataagccaagtagagaagtttgtccagtcagttcctatgcttattctcgaatcttagatttacctactctgtatatgaacctagctaggagttcactactgttgcgagtgtacatctattacattattctcctatcccatccatggtaaaccttgtatgtgtttagcaaatattgatagatgaatgcttgatattattgatagagacaatcagctat

SEQ ID NO: 356548 - DNA, 318 bp, Zea mays
ccgggtgggcggccgtcgctgggctcgggttccgaggcgccgtgcttgggaccatcttcgccgcgcactattttgtccgtcggaggtggttgctccagttccacgtcgtgcagcgacctctattctatggattaaagatgggtctcctaccatctggaaacagggctctaaagttatcaatccatgccttcttgcttttccatttcctagttttctttcttccctggcaattcagaaagggaggttctgttggaagccaaatacttactgaaatcagtattttaatagtgactgctggtgtttccttctgtttggaaa

SEQ ID NO: 356549 - DNA, 136 bp, Zea mays
gaagacgaagctagcagcatggtattcaccaagtgcgtgataggaagctcgagccaggatttatcagcattcgtacgagatttgggtcgtgtttgatgctggtacgttaattaatcgcgtgatgcggaagaagacc

SEQ ID NO: 356550 - DNA, 127 bp, Zea mays
gaaaagttcatgggttcgtgtcgatgttttatatatatatcttggtgaggcagaacagaagcaatcaattgttttttgtgcattgtatcctatctctcaccactcacaattcaggaatttcacacat

SEQ ID NO: 356551 - DNA, 128 bp, Zea mays
aagaggctagggggaatatatcggacatcatcatcgtgccaaccgacaacgtcgtctgcctctgtcagcaggcttcgcagttacgatgtgtacgttggatttcacggccgcaaggcgtcactgctgag

SEQ ID NO: 356552 - DNA, 131 bp, Zea mays
caaaagcactcattctctaatacaaagtctcgacatactaaaccacagacaaggaagaatctaaatatcttgctgaaggatgatgatgatggacaagctcttgcaggcggacctgctttggctgacgggga

SEQ ID NO: 356553 - DNA, 296 bp, Zea mays
attctcgaaggcctggaaggagaggatatggatgtggagcaatggcagctcatcgagggagcatctgctagagctgacaaaggtctagagactattgagcgctgcctcgacaatttcgaggaggcgatgttgatagcctgcactatgatgatgtgggacctgctccccatcggccagcgcctattttatcgatcgatggcacagagggaggtgttgctaactgcatgacagaaggtggagcagctgcatgcggaggtctcccattcggaggagagaaagcacgagctcgcctcact

SEQ ID NO: 356554 - DNA, 139 bp, Zea mays
gaaatatgaatctatggattctaggctgattctggttgctgtatcacattcctggtcacatcaaattggtgctaggctcatactgcaaacatcgagtatcaactttcttttggctggactcatagcagtaatgctctaa

SEQ ID NO: 356555 - DNA, 100 bp, Zea mays
ggcagaggcaagaggcccctcaccctcaggtgatcaggtcgctagctcccggcttaactagtaggcagccatgaatttcggtgggaatggctacgcgacg

SEQ ID NO: 356556 - DNA, 293 bp, Zea mays
ccgtctcctacccctcgttcctcgccgccgtccgctccctcgcggggggcctctggtccgttctcggtctccgccccggggacgtcgtcctcgtagtctccccgtcccgcatcgacgtccccgtcatagacttcgcgctcatgtccatcggcgctgtcgtctcgcctgccaacccggcgtccaccgccgaggagtacacgcacatggtcgcgctctccagaccggtcgtcgcgctcgcggctcccgaggtggccgctaagcttccgaggaacctcaggtgcgttgatcatcgg
